United States Patent Application Publication US 2017/0114356 A1 - sequence listing, part 84

SEQ ID NO: 132114 - DNA, 2317 bp, Zea Mays
ctgactcgggtgccccttccccatgtcgcacgtcgagcccgccgccgccggagtggaccaagtcggcgaggggacggtcgtgccgcacgacaacggtgtcagcggcaccgggggtgacgtggccaccacggaagcgcaagtggctgttgccgtttccacctccggcgacgagaggcggggggattacggcgatgatgcagagaacgaggaggaggaggaggccgcaacggtgcagggcagcaaggagggcactgacgagctgctccggaaggtggtgtgcagcgaagaggccgcctacaagctctactgcgattacggccaccgcatggggttcagcatccggaaagggaagcagtcctacttcaccggcaccaagcggatacgcaccaaggactacttctgctccaaggaggggctcaaggaaggggagaagctcactgatgcaaatttcaacgacccccacaccaggaccaattgcagggccatggtgcggttcagggtgaatgatcagggggagtggaaggttatccgactggtatctgatcataaccacaacctggcaaggcctgaggaacgacatcttttgcggtctgcaaggtcgcttatagcagggcggtcaagttctgtggagaatcagaagcaagatttgctcctcggctacggtgctgcgacaaagacactgactataggaactggggatgtgcagagccttgtgagccatctgaaaagcagggcaaatgaagatggtatgttttactgggatgttcaattggaccgaggtggtcggatgactaatttcttttggcgtgatgggaggagcaggactgactatgactgtttctgtgatgtggtcgtgtttgattcaacttaccgcttgagcaaacataacctgatatgtgcaccgtttgttggcgtcaatcatcattggcagaccactatgtatggttgcgcacttttagctgacgagtctacgtcagcttttgtgtggctgttcaagtctttcttggagtccatggggaaccgacatccacaatctattttcacaaatctagatcaagttgtgacaaaagcggttgaggaggtcttcccaaatgcacgccatcgcattgctcattggcacatccaaaagaatgcccactctcgtctgggtgctcttaatgtctcaaaaacattcaataagatgttcaccaagtgcatacagggatgtgactccgaagcagagtttgaggaaacatgggctcaaatgctctgtgaatttaagttgcaagataacaagtggcttaaaaaattgtataagctcaaacagaagtggtgtagtgctcttaacaactgcacctttgatggtgggatcgagtatgaaccacaatgtgacagtatgagcaacatgtttaataatgtttctgataagttgacttctctttgtgcaattgctgttgctgtggataaacagactgaagattggagggaaaaagaattagatgaggatgcacggtgtttccaaaggccacctgcttgcatcataaaatacagtgatattttgaatcatgcagcaaaggtttatacacatagaatctacaaactgtttgagacagattttcttgatgggtgtggagccacaaaattcaaagagcttccgtgtcaagataacaatacatatcaatttgagatgactatgcaagggcgaggatcaagagtttgcacagttcatttcaatatgtctatgatgcaattaagttgcagctgcagtaagtttgagacaatgggtttactttgcccacatgctttgaaagctcttagtataaaaaatatatgcaaaattccagaaagctacatactgaagcggtggaccaaggatgcgaagaaatgggtttttaatccaaaacaatatgaatcatcatatcaggaatgtatgaatgatgaagctgcatactgcaactatgttatgagatatgcttatgatcttgtcacgaagagccaagggcaggatgcattaaggaaagcactgtgggagactcttgaaagtggtgagaaagaattggagagatacctagaaaacgttacccaacatgcaccttatgccacttgaaaggatcactaattaacctcctagacttatctgctaaggatgaacaagatacttccttgttctttcaagatgcattcagaacttctctcaaattgtacatttatagagatgaaacggatgcttgtcaaagatacaggcttgagtaagtttcatgccttcaagtttcctagtaattgttcttgtgattccctgaatttttacatgatctttggttccatatttttgtcaatg

SEQ ID NO: 132115 - DNA, 353 bp, Zea Mays
tgcatgtggattggtatgaacgtttttctcatagtttttagttgtttgtttgactaaagaaaccttataggcttatatgagaaaatatagataatgaagacacaaaagatttctggtaccaagtgtgaacatatatttcttaaacacaatcatgctacaatcaataatggaaacatattttagtagtgattcttcgttagctttatcccaagagctaacctaaaacacaaatcatgacttgtatataaaagcttgatctgacgcatagagagctcaaatgcaccaccactgaccaatcggcaatctaaaactcgaaatccccaagatcgcaaacacagattaaggttaatgca

SEQ ID NO: 132116 - DNA, 356 bp, Zea Mays
tgtgaacatatatttcttaaacacaatcatgctacaatcaataatggaaacatattttagcagtgattcttcgttagctttatcccaagagctaagtgggtgtttgaatgcactagaactaataattagttatctaaaaattgttagtgagattagctagctaataaatagctacataactattaactaatttaccaaaaataactaatagctgaactattagctatggtgtttgaatgtctcaactaattttagccactaactattagatctattgcattcaaacaccccctaagcctaaaacacaaatcatgacttgtatataaaagcttgatctggcgcatagagagctcaaa

SEQ ID NO: 132117 - DNA, 1759 bp, Zea Mays
agtccattccctgttgccgcatgcacaattgcacacacacacggcgtgccgcatcgtgtaaacaccagggacccgcgcgatcgcacgcctattctaggcgcaaacccaagcgcggagacaaagcacgcaagcaagggccccccgccgctgtaactaaccgaacgaggaggacaagaaagcctcctcgttaagattggaatccagccagagacagggccagtctccagtctccacccaccgttccctcccctcccctcccctcctctcccctcccctgtcgagtccggctgtccccacgacccccacgccacgcgctctctcccgctcctcgcaacggcaaaaccccagcgaattccccacgcgcccgccagctcggcggcggcccagggatccatggagaagtacgagctgctcaaggacatcggctccggcaacttcggcgtggcgcggctcatgcggaacaaggacaccaaggagctcgtcgccatgaagtacatcccgagggggctcaagattgacgagaatgtggcgagggagatcataaaccaccgctcgctgcggcaccacaacatcatccgcttcaaggaggtcgtgctcacgcccacgcacctcgccatcgtcatggagtacgccgccggcggcgagctcttcgaccggatctgcagcgccggcaggttcagcgaggacgaggcgaggtatttcttccagcagctcatctgcggtgtcagctactgccacttcatgcaaatttgtcaccgggacttgaagctggagaacacgctattggatggcagcccggctccgcggctaaagatctgcgactttggctactctaagtcatcgctgctgcattcaaagcctaaatccaccgttggaactccggcgtacatagctccggaggtgctctcccgccgggaatatgacggcaagatggcagacgtttggtcttgtggagtgactctttacgtgatgctggtcggtgcgtacccttttgaggaccccgatgatcccaagaatttcagaaaaacgattgggagaatagtgtcaattcagtaccagataccagagtatgtccacatatcccaagactgcagacagctcctggctcggatcttcgtcgcaaatcctgcaaagagaatcacaattagggagattaggaatcacccctggttcctgaagaatttgcccagagagcttacagaagctgcgcaagcgaagtactacaagaaggacaacagtgcccccaccttctccgatcaaaccgttgaagagatcatgaagattgtagaggaggcccgcacgccaccccagtcatctactccggtggctggttttggttgggctgaggaagaagagcaggaagatggcaagaggtctgatgatgacgagcagtatggggaggatgaggactacgatggcgaggacgagtatgataaacaggtgaagcatgtacatgccagcggggattttcaacacctcctaaaatgaagctcctggcagcgctcaagtcctcaactggtgagatactgtctggatttgttgtagtttgtggtgctgagatgctgcaccctcggcgcgtacttgtagtttccttctgtctggatccacctttttttttcgcatattgtgtgctatactctgtaaattatcaaactggcttcctcaatgcctatgtaatgaaccgttgagtgattaagatagaaggcgaaatataatttctatggaacatacttcaatcttcggcaacttccacacatcg

SEQ ID NO: 132118 - DNA, 946 bp, Zea Mays
actgtagcagtgtggtcagctgctaacacctttctttgccccagtcatcgctgctgcattcaaagcctaaatccaccgttggaactccggcgtacatagctccggaggtgctctcccgccgggaatatgacggcaagatggcagacgtttggtcttgtggagtgactctttacgtgatgctggtcggtgcgtacccttttgaggaccccgatgatcccaagaatttcagaaaaacgattgggagaatagtgtcaattcagtaccagataccagagtatgtccacatatcccaagactgcagacagctcctggctcggatcttcgtcgcaaatcctgcaaagagaatcacaattagggagattaggaatcacccctggttcctgaagaatttgcccagagagcttacagaagctgcgcaagcgaagtactacaagaaggacaacagtgcccccaccttctccgatcaaaccgttgaagagatcatgaagattgtagaggaggcccgcacgccaccccagtcatctactccggtggctggttttggttgggctgaggaagaagagcaggaagatggcaagaggtctgatgatgacgagcagtatggggaggatgaggactacgatggcgaggacgagtatgataaacaggtgaagcatgtacatgccagcggggattttcaacacctcctaaaatgaagctcctggcagcgctcaagtcctcaactggtgagatactgtctggatttgttgtagtttgtggtgctgagatgctgcaccctcggcgcgtacttgtagtttccttctgtctggatccacctttttttttcgcatattgtgtgctatactctgtaaattatcaaactggcttcctcaatgcctatgtaatgaaccgttgagtgattaagatagaaggcgaaatataatttctatggaacatacttcaatct

SEQ ID NO: 132119 - DNA, 1551 bp, Zea Mays
agtctccagtctccacccaccgttccctcccctcccctcccctcctctcccctcccctgtcgagtccggctgtccccacgacccccacgccacgcgctctctcccgctcctcgcaacggcaaaaccccagcgaattccccacgcgcccgccagctcggcggcggcccagggatccatggagaagtacgagctgctcaaggacatcggctccggcaacttcggcgtggcgcggctcatgcggaacaaggacaccaaggagctcgtcgccatgaagtacatcccgagggggctcaagattgacgagaatgtggcgagggagatcataaaccaccgctcgctgcggcaccacaacatcatccgcttcaaggaggtcgtgctcacgcccacgcacctcgccatcgtcatggagtacgccgccggcggcgagctcttcgaccggatctgcagcgccggcaggttcagcgaggacgaggcgaggtatttcttccagcagctcatctgcggtgtcagctactgccacttcatgaggtgtgcgactgcgaattttgtttggattcattcgcagcaaatttgtcaccgggacttgaagctggagaacacgctattggatggcagcccggctccgcggctaaagatctgcgactttggctactctaagtcatcgctgctgcattcaaagcctaaatccaccgttggaactccggcgtacatagctccggaggtgctctcccgccgggaatatgacggcaagatggcagacgtttggtcttgtggagtgactctttacgtgatgctggtcggtgcgtacccttttgaggaccccgatgatcccaagaatttcagaaaaacgattgggagaatagtgtcaattcagtaccagataccagagtatgtccacatatcccaagactgcagacagctcctggctcggatcttcgtcgcaaatcctgcaaagagaatcacaattagggagattaggaatcacccctggttcctgaagaatttgcccagagagcttacagaagctgcgcaagcgaagtactacaagaaggacaacagtgcccccaccttctccgatcaaaccgttgaagagatcatgaagattgtagaggaggcccgcacgccaccccagtcatctactccggtggctggttttggttgggctgaggaagaagagcaggaagatggcaagaggtctgatgatgacgagcagtatggggaggatgaggactacgatggcgaggacgagtatgataaacaggtgaagcatgtacatgccagcggggattttcaacacctcctaaaatgaagctcctggcagcgctcaagtcctcaactggtgagatactgtctggatttgttgtagtttgtggtgctgagatgctgcaccctcggcgcgtacttgtagtttccttctgtctggatccacctttttttttcgcatattgtgtgctatactctgtaaattatcaaactggcttcctcaatgcctatgtaatgaaccgttgagtgattaagatagaaggcgaaatataatttctatggaacata

SEQ ID NO: 132120 - DNA, 1536 bp, Zea Mays
actaaccgaacgaggaggacaagaaagcctcctcgttaagattggaatccagccagagacagggccagtctccagtctccacccaccgttccctcccctcccctcccctcctctcccacgcgctctctcccgctcctcgcaacggcaaaaccccagcgaattccccacgcgcccgccagctcggcggcggcccagggatccatggagaagtacgagctgctcaaggacatcggctccggcaacttcggcgtggcgcggctcatgcggaacaaggacaccaaggagctcgtcgccatgaagtacatcccgagggggctcaagattgacgagaatgtggcgagggagatcataaaccaccgctcgctgcggcaccacaacatcatccgcttcaaggaggtcgtgctcacgcccacgcacctcgccatcgtcatggagtacgccgccggcggcgagctcttcgaccggatctgcagcgccggcaggttcagcgaggacgaggcgaggtatttcttccagcagctcatctgcggtgtcagctactgccacttcatgcaaatttgtcaccgggacttgaagctggagaacacgctattggatggcagcccggctccgcggctaaagatctgcgactttggctactctaagtcatcgctgctgcattcaaagcctaaatccaccgttggaactccggcgtacatagctccggaggtgctctcccgccgggaatatgacggcaagatggcagacgtttggtcttgtggagtgactctttacgtgatgctggtcggtgcgtacccttttgaggaccccgatgatcccaagaatttcagaaaaacgattgggagaatagtgtcaattcagtaccagataccagagtatgtccacatatcccaagactgcagacagctcctggctcggatcttcgtcgcaaatcctgcaaagagaatcacaattagggagattaggaatcacccctggttcctgaagaatttgcccagagagcttacagaagctgcgcaagcgaagtactacaagaaggacaacagtgcccccaccttctccgatcaaaccgttgaagagatcatgaagattgtagaggaggcccgcacgccaccccagtcatctactccggtggctggttttggttgggctgaggaagaagagcaggaagatggcaagaggtctgatgatgacgagcagtatggggaggatgaggactacgatggcgaggacgagtatgataaacaggtgaagcatgtacatgccagcggggattttcaacacctcctaaaatgaagctcctggcagcgctcaagtcctcaactggtgagatactgtctggatttgttgtagtttgtggtgctgagatgctgcaccctcggcgcgtacttgtagtttccttctgtctggatccacctttttttttcgcatattgtgtgctatactctgtaaattatcaaactggcttcctcaatgcctatgtaatgaaccgttgagtgattaagatagaaggcgaaatataatttctatggaaca

SEQ ID NO: 132121 - DNA, 2561 bp, Zea Mays
caaacaagtacgaggagtcgaggactgcagctgccccaccaaacgccgacctgccgggacatggcagctgcggcgccggccgcgggcaagggaaaacgaaagcgccacctctccgaggacgacgtctgcctcctccaaaggtacaatccggggacgatcctgacggcgctgcaggaggtggcgcagcatgcggagggccggatcatcgactggagggcggtggtggcgaagtcggccacggggatcacctccgcccgcgagtaccagatgctctggcgctacttagcatatcaccacgacctaaacgagagcatcgaagccggtgacctgcctctgggcgatgacagtgacctggaattggagcttgaacccaatcccagcgagaccaaggaagctttatctgaggcctctgcattggccaaggcgctaatatccagatcttcacgtgagcaagcctcgggtcatcgcattaatttggatgttcctgcgctgaacactcaaaatgaaaagatagtgcgggttccatctaagcagcttgctcagagtcatcgtgtaacaaatgttacatgtcctgtttccaatccaaaacagttatctcatatagtaccctctcctactcatttggatccaaatggagcttctaaaaagagaaaaaaggcaaaagcttggtctaaagaggaggatgcagacctagcagctggtgtgcagaagtatggtgaaggaaattgggaggtcattttgcataaatgtaactttgataatacaagaacgcctgatcagttatctcagagatgggcactaaaacgcccaggaggatcaaccaagcctgctagcactaaacacgcctctgttggctcagaagaaagatcagcaactatcaaggcacttcatttggctgtcggtcctatgcctgtatcatctgcactaagatcaggacgtgaacaaagcattcagcataagtctacagcgtttgctcctaagatgccacaagtaagatctgcagtaaccccttcactggcaccggcactggcgctgccagtccaacctctgcgtgtggcagctgaagttcagtctccgcttcgtcatgggcaacaagctcctggccaaggtgcgccaccaaaattgtcaaatgcttcaaataatacacggaagaagcaagcagctctgccaaattctactttcagtccttcctcaatacaagcagcagcaattgctgctggtgggcgacttgccacagcctcaactgccgcaaatcttttaaaagctgcacaatctaagaatgctgtgcacataagatctctaggagcaacatctttgaaatcttctgcaagctttgatcatgggacacaatctgggggctcccagcacctagaatctctaaatgctagcgcagttaatggtgtttcaggagtttctgcagttaatcaatcagggccacctgctggagcggaaactaagaaggcattgggtaccacactagcacctgtcccatgcgacagcgaggaaaatgaggatggctctgaattttgtgcgattacgttagatgacttattccctgaagatgcaaagcagccggaaactgtggataccaaggcaaagcaaccagaaaccacgggtcccaaggcaaagcagccagaaaatgcagatcccaaggcaatgcatcaagaaaccatggatcccaaatcaaagcagccagatacactaaaggttgggatattagatcccaaagataaagacatgctagagttcgatcaatatgttgcttctcaaggagcacacttaaacacggatgatctgaataaaagcaagtgtaccaacagtgcttcccaagcccaaggtcttgttggcagccagaagaacccactgaaactgactcctgtggacgggaaagctaaccctgtaactgcggctgggagaggtaagcctgtagctgctggagtggcatcaaccggaaagaaggctacaatccctatctcacatttggcagcagggaccccacgcggcatagttgacacagtcaatgccaacgccccaattagaagaacactaacaaggagggcagccgcccttgtccccgctggttgccaagctcctcccccgaagcatgccatagacgcgaaaggctgccaaatgacgaatagcattgccacgtttgtcagttctggagtaccagccagcagccaggctagcacgcccgcgaaagatgctaacaaagcaagcccaccgtccagcagctgccagcccaagccggatagtgtggcggtgaacggtgctatcagggccgtgaagagtgttgctaagaaggggaatctgccagcagcagcagccaggcaatagacaggaccctgaataacacggtaaattttgtagtaatacccgtaggacttttgcgcgtcgattgtaccttggaatgtgaatattagtcgttttgcgtgtcattcttttcaccttgcatttgggtgatttttgtctggtattcctgctgggcatcgctaacgtaacttgaaagacgttctcgtctagttcccttgtgaagtgtgatgcttgtgtgtgtgtgtcta

SEQ ID NO: 132122 - DNA, 1744 bp, Zea Mays
aagtaatgggtttagataggatcaaggtgaatttttgctccatactatcccaattcccaacccgaccattgccgtccttacagtcaactgtgttctagacagttgagttcaaaaaggtgaggcggcgagatcgaatcaagcggagcggagcctacacatggcgatggcgctgcgtcggctgctgcttcctctcctcctcctcgtactcttaggtctgcggccgcagagctgcgtcgccagtggcggaggtggaggggagccggcggagttcgagatacctcgggacgggagcgtgctggagcttgacgagagcaacttcgaggcggcggtgcgcgcagccgaattcctcttcgtcgacttctacgctccctggtgcggccactgcaagcgcctcgccccgcagttagatgaggctgctgcagtgctagctggactgagcacgcccgtccttgtggctaaagtaaatgctgacaaatacaagaagctcggctctaaatatggagtagatgggttccctactttgatgttttttgaccatggagtgccctcggagtacacgggttcaaggaaggctgatgtgctagttgagaaccttaagaagcttgttgcacctgatgtttctgtccttgagtcggactcgtcaattaacggctttgttcaagcagctggcatcaattttccattgtttattgggtttggaatggatgagtcattgattgttgaatatggagcgaagtacaagaagaaggcatggttttcaacagcaaaggatttctctgaggatgtgatggttgtgtatgattttgacaaggttccagcgttggtttctgttaacccaaaatataatgagcagagtgtattctatggcccgtttgaaggaacttttctggaagattttataaggcaatccctactgcctgcaactgtgcccatcaatagagagacagtaaagctattgaaagatgatgggaggaaagttgttcttacaatcttggaggatgaatcagatgaaagctctctgcagctaataaaagtgttgaggtctgccgccaatgcaaaccatgatttagtgttcggatatgtgggagtcaaacagtgggaggagttcaccgagacttttgatgtgaaggtttcgcagctgccaaagattgttgtctgggacacaaaagaggagtacgaagtggttgagggttcagagagtttcatagaaggtgactatggatcccaagtcagtcgatttctagagggatatagggaaggaagaacaacaaagaagaaagtgggccgtggttccccaacactgctcggccttaacgcggtatacatcctcgtcctgttggtcgccgttctcgttgttttgatgtatttttccgcgcaaggcgaggaggatcatcagccaagaagagcccatgaggactgacagcaatctgagatggcttagattcaaggcgttgatccggaggctgccgagttatttttgaaggggggtaacatataacatctgatggacaaattttcctgatcttcatttcacgtgccctagggtcgagttttagatatttgttgcagagctatgcatgagctcccctgtgtttctcttgaacccttgaagtttttggacttgttacttgaggaccgggtttcctcaggtttatgtcattgtaattattcggcactttgtaacatagcattcatgtgttatatttgagacccttggagaaacgacttctatagattgaacagc

SEQ ID NO: 132123 - DNA, 789 bp, Zea Mays
gaattttcttttcagctctggagtctggaccttgtccattcccttttgctcgcgcacgcgctcgtctctccaagcctcgaaccgcatctccggcggcctagtggaacgcgaagatggcgacggcgctcggcctcggtgcgcgctccggcctccgactcctgtccgcaggcgccgaggccgcctcagcaacgtggaaaatatggctagcattcgcgaagcgtgtagccgttttgggtagcctgtattttgatctgatgcaaatacgcagctcatgcaaacatcaggattgcgccaaccaggagatgattctggggcttctcgtgcattccattctactggcacaaggaggatgggggcgcacgctcatgatgagccatactacgtccacgccaagcacatgtacaacctgcacaggatgaagcaccagcagcttaaggtgtgcctcgctgtgctggctgcggtgggcactggcattggagtccctgtgtatgctgttgttttccagcagaagaagactgcatctgcataatctgaaacgccgaggcggcacgacatgaaaacatgcctgcccgtgaaatttcttttcccatttcccacatagcattttgagaggttcaggctggagcttcagttttgcttggccatttctctctctatatatttttttctctcttgctgcaggtttactctgctcattggattttgacataggaataccgatgtctgttaataatacgatgtcttgaactgacagaaagcatatgctgttatcctttctaattttgcttc

SEQ ID NO: 132124 - DNA, 667 bp, Zea Mays
gaattttcttttcagctctggagtctggaccttgtccattcccttttgctcgcgcacgcgctcgtctctccaagcctcgaaccgcatctccggcggcctagtggaacgcgaagatggcgacggcgctcggcctcggtgcgcgctccggcctccgactcctgtccgcaggcgccgaggccgcctcagcaacgtcttctcgtgcattccattctactggcacaaggaggatgggggcgcacgctcatgatgagccatactacgtccacgccaagcacatgtacaacctgcacaggatgaagcaccagcagcttaaggtgtgcctcgctgtgctggctgcggtgggcactggcattggagtccctgtgtatgctgttgttttccagcagaagaagactgcatctgcataatctgaaacgccgaggcggcacgacatgaaaacatgcctgcccgtgaaatttcttttcccatttcccacatagcattttgagaggttcaggctggagcttcagttttgcttggccatttctctctctatatatttttttctctcttgctgcaggtttactctgctcattggattttgacataggaataccgatgtctgttaataatacgatgtcttgaactgacagaaagcatatgctgttatcctttctaattttgcttc

SEQ ID NO: 132125 - DNA, 2556 bp, Zea Mays
aaaaatctaatcctactgtctctctgaagccggcttccttgactaatcggcggcggaatctcgcggtcttggtttggcccccttgtctggttcctcccgatcggtacttgcctggtggttgataccttctattctcttcccttgtttggtgctcaaaagggcgcaatttccacttggttcttggtatgttggaggttgccaccttctttctgctttgattttttcttcggcgggagcgtcgtcaacgcgacgcctcgaacgggtgcttggctggtggatctattggatttcttggcccatcgacatttgtcaccatgggcggcgtgtgttcggcggggattgcaggggacaagtcgccaacggagctctcattccgagcgatggggttcgtggtggagcaggatttcaaggccttctcagccgccggcaagaacaggaccgcgcccgtcgaggaggcggtggatcctaaccaagtgagcgatcagtcttttcgtttctctgacaagggctcgccgccatcaacgagtggcaaggttcatcgctcggtctccaaggaggccaagactgggaagcctaggagaagcgcctccggcaaggctggtccaagcaaggtttcagacataggcacagtgcttggtagaaagagtacctctggacttgggaaagcagtagaggttctagataatctgagtagcagcatgtcaagtttgagccctggagggggttttgtcgcaggaccaacgacaaaggggaacaaaatatcaatccttgcatttgaggttgcaaacacaatagttaagggcatgagcctcatgcagtctttgtccaaagaaagcctgaactacttgcaggacatggtccttctatcggaaggtgtacaacgattagtttcaagcaacatgggttatctgatgagaattgctgcagctgacaagaggcaagagctgaggatattttcacaagaagtcataagatttgggaatcgttgcaaagatcctcagtggcacaacctagatcgttatttctccaagctagagtcagaaattacaccccaaccacaattaaaagaaacggcgaaagcagatatgcagcaactgatggcccttgttcgccacactggtgatctctaccatgaattacacgcactagatagatttgagcaagattatcgccgaaagttggaggaagagaaaagatcagttacatctgaaaggggggacactgttcagatcatcagacaagagctgaagagccagaggaagcatgtacacaatttgaagaaaaagtctctttggtctaagcctcttgactctgtcatggagaagcttgtagatattgtccacttcttacatgtcgagatccaagatacttttgggccttgtgttggagagtcgagcgaatcacaagagagccgtcaaactttggggtctgctggtctctctcttcactacgctaatatcatttctcagattgacaatattgtttcccgaagctccgtcccccctcagagcaccagagatgcgctctatcaaagtctgcccccgaacgtcaagtctgctcttcgaacaaggctgataactccgacagagtctcaagaggttccgatcactagaaccaggagttcaatggagaagactttgcaatggattgtcccggttgccaataacacggccagggcacaccatgggttcggatgggttggcgagtgggcgaacacaggacaaggagaaggccgacgcatgcgtactggacctggtggtgtggctccacatcctgatcagctacagcaggccggcaaacaggtcgccgagccgatcccccgtccgttccccgacccacgcggccccgcgggtggtggtagcagcagcagccacttccgggcgccccgctgggctcacccgagaagagcgcgagatgctgcaggacgcctacacccggcggcggtcccccggggccgggaagagcaagagccaggagctggcggcggcccgcggcaacagggtggcgctgagcaggaacgacaggctgagcaagagcggcccgtcgtcgcgggagcacggcggcagggtcttcccgctggcgacgggcaggtcggccgccgcctcgtcgcccgtcgccgtcggcttcgacatcgaccggatcaaggcgctggaggacgtggtggacagagtggacgcgcagaagcagacgcggctgtgaagctgtggctgtgggttccagagaattcaggacggaggcagcagagagcaggtggccatgggttcaggaatggaatgggatgggaaacaaacaacggttctctctcgtgtggactgctagcagattagcatacataatgcctgcagaaacgctgcaggatggatgcatagaaagaacaagatactatacacataggcaagattccccccctccttttgttttgcctttctgtcgggcggtcagtatttgtacatgtaccgtgccaaatcatcaggctaaacaaactctgttgcttgtaagctgtaataactgtatatatttattattattatatacgtacataagtcacgaaaatgc

SEQ ID NO: 132126 - DNA, 2831 bp, Zea Mays
cacaagcaaagctagcaagcgcgactgtcacacctctccgatcaaatccacatcggaacaaccattgaaaagcacgcgattcctacccgtcctgtcgccgccatcaccaccgccggtcggaggtgcctgtcgccgctgctcggctccggcccggagcgtccctccctctcctcgttccgcagttttcaacggcggttgggccccgtcaaaaatctaatcctactgtctctctgaagccggcttccttgactaatcggcggcggaatctcgcggtcttggtttggcccccttgtctggttcctcccgatcggtacttgcctggtggttgataccttctattctcttcccttgtttggtgctcaaaagggcgcaatttccacttggttcttggtatgttggaggttgccaccttctttctgctttgattttttcttcggcgggagcgtcgtcaacgcgacgcctcgaacgggtgcttggctggtggatctattggatttcttggcccatcgacatttgtcaccatgggcggcgtgtgttcggcggggattgcaggggacaagtcgccaacggagctctcattccgagcgatggggttcgtggtggagcaggatttcaaggccttctcagccgccggcaagaacaggaccgcgcccgtcgaggaggcggtggatcctaaccaagtgagcgatcagtcttttcgtttctctgacaagggctcgccgccatcaacgagtggcaaggttcatcgctcggtctccaaggaggccaagactgggaagcctaggagaagcgcctccggcaaggctggtccaagcaaggtttcagacataggcacagtgcttggtagaaagagtacctctggacttgggaaagcagtagaggttctagataatctgagtagcagcatgtcaagtttgagccctggagggggttttgtcgcaggaccaacgacaaaggggaacaaaatatcaatccttgcatttgaggttgcaaacacaatagttaagggcatgagcctcatgcagtctttgtccaaagaaagcctgaactacttgcaggacatggtccttctatcggaaggtgtacaacgattagtttcaagcaacatgggttatctgatgagaattgctgcagctgacaagaggcaagagctgaggatattttcacaagaagtcataagatttgggaatcgttgcaaagatcctcagtggcacaacctagatcgttatttctccaagctagagtcagaaattacaccccaaccacaattaaaagaaacggcgaaagcagatatgcagcaactgatggcccttgttcgccacactggtgatctctaccatgaattacacgcactagatagatttgagcaagattatcgccgaaagttggaggaagagaaaagatcagttacatctgaaaggggggacactgttcagatcatcagacaagagctgaagagccagaggaagcatgtacacaatttgaagaaaaagtctctttggtctaagcctcttgactctgtcatggagaagcttgtagatattgtccacttcttacatgtcgagatccaagatacttttgggccttgtgttggagagtcgagcgaatcacaagagagccgtcaaactttggggtctgctggtctctctcttcactacgctaatatcatttctcagattgacaatattgtttcccgaagctccgtcccccctcagagcaccagagatgcgctctatcaaagtctgcccccgaacgtcaagtctgctcttcgaacaaggctgataactccgacagagtctcaagaggttccgatcactagaaccaggagttcaatggagaagactttgcaatggattgtcccggttgccaataacacggccagggcacaccatgggttcggatgggttggcgagtgggcgaacacagggaacgacccggcgcagaagcaggccgggcaacctggcgcgctgaagatcgagacgctgtaccacgcggacaaggagaaggccgacgcatgcgtactggacctggtggtgtggctccacatcctgatcagctacagcaggccggcaaacaggtcgccgagccgatcccccgtccgttccccgacccacgcggccccgcgggtggtggtagcagcagcagccacttccgggcgccccgctgggctcacccgagaagagcgcgagatgctgcaggacgcctacacccggcggcggtcccccggggccgggaagagcaagagccaggagctggcggcggcccgcggcaacagggtggcgctgagcaggaacgacaggctgagcaagagcggcccgtcgtcgcgggagcacggcggcagggtcttcccgctggcgacgggcaggtcggccgccgcctcgtcgcccgtcgccgtcggcttcgacatcgaccggatcaaggcgctggaggacgtggtggacagagtggacgcgcagaagcagacgcggctgtgaagctgtggctgtgggttccagagaattcaggacggaggcagcagagagcaggtggccatgggttcaggaatggaatgggatgggaaacaaacaacggttctctctcgtgtggactgctagcagattagcatacataatgcctgcagaaacgctgcaggatggatgcatagaaagaacaagatactatacacataggcaagattccccccctccttttgttttgcctttctgtcgggcggtcagtatttgtacatgtaccgtgccaaatcatcaggctaaacaaactctgttgcttgtaagctgtaataactgtatatatttattattattatatacgtacataagtcacgaaaatgc

SEQ ID NO: 132127 - DNA, 291 bp, Zea Mays
atgagctcgctgtgggagcccagctcctggactgcgccggactgcatgacagctatgctgtcggcgtttcggacggtggagaggcggtgtgcgacgaggatggtagtccggcctacggaggccacgtcaagcgcctcctgcacgacgcgctcggactcggtgtccagcgcgctcgttgcttcgtcaaggagcaagatcttgggtgacctcaggatcgctctggcaatggcgatcctctgcttctgccctccagacatttgtgcaccacgctcaccaacctgtttttgtttt

SEQ ID NO: 132128 - DNA, 234 bp, Zea Mays
atgggcggggacagtaggttggggaggaagaatagagcgaaggccgggaagacgaacgtgacgtctgacgacggcaaaaacgatggtgcacgcaatactatgaaacatcctcatggacgtgcaatagccactgcgcgggtcggtgtcggagttggtgtcggaccaacacggggaggaggtgcatgctcccacgacctctaccgagaatggggcggcgcgaaggcagagtcatga

SEQ ID NO: 132129 - DNA, 666 bp, Zea Mays
ttccgcgggcctcgcatgccataggctcaataacctcgccagcggatcccttccttgcgaggccggaactgagctgccgccggcgctatggcgagcggcggcctggcggctgcgtcggaagtcgccgtcgttttcctcatccgccctgtccttgccatcgccttcgtcttcaccctcatcctcctcagctggtacgtggcgtggaggacggtgctggtgcacgtgccgctggtgcaggagatcgccggcctgcgcccgaaaaagccctctaaacccaagccagccaaccgcggccgcttcgccaagttctaccagaaccaggccgaagccgcacaaaggaacagcaaatcagaaggggcatcatcttaagagaaatccgtcaccaccttgtaatgagtacctgccgcagactttattatgcagttctaattagaatgcaagtactaccagtgacggcgtctttttaggagagaatgtataccagcatgtgatgggagcatccctgcctgcctgacgatacatcaggcttatgatagtagcgtatcaactgtttattgcatgaccttgtaaagttaaggaccttatgattgtacatatatatatacacctgtatacaagaaataaagagaagcacatgtcctttggaataatatcaacgtaccttct

SEQ ID NO: 132130 - DNA, 529 bp, Zea Mays
ttccgcgggcctcgcatgccataggctcaataacctcgccagcggatcccttccttgcgaggccggaactgagctgccgccggcgctatggcgagcggcggcctggcggctgcgtcggaagtcgccgtcgttttcctcatccgccctgtccttgccatcgccttcgtcttcaccctcatcctcctcagctggtacgtggcgtggaggacggtgctggtgcacgtgccgctggtgcaggagatcgccggcctgcgcccgaaaaagccctctaaacccaagccagccaaccgcggccgcttcgccaagttctaccagaaccaggccgaagccgcacaaaggtcaaagctttacctccgcacgaccacacaagccttcttctccttttgctcatccggatgtttcagtgctgattcatgtggaaactgactgtccagcacttgttcaattcgatccagattgactgcttcagtgctgttcagtcctggactcctggcattgctgaagcagtttgttgcagttaggttgtagc

SEQ ID NO: 132131 - DNA, 1682 bp, Zea Mays
agtacgatgcgcctcccgcttcttccacggtctcctcccctcgccgccgccgccgccgccgccgccatgcctcctcgccgccgtcgcgttgtcaaagcgacgccgctcaagccgtcttctccacaactctcctctaccccgccacctaccccgtctgtagaggtacccaaaaccgaaccccccgatcaccacgatcccactccctccgcccgtcgccgcctccccctcgctgccggggccgttgaggcgcaggaagagtggcatccgctcccgctctccacggccgacctttccctcccgctcaccctccccaccggccagaccttcctttggcgccgcacctccctctccccgctccgcttcaccggtgccgtggggtcccacctcgtctccctctcccacctgcccgactccgacgatggccgcctcgcattcctcctccacaacgacggcggttgccccgcctcctcgttgcccgccgcccgcgccgcgctcctcgactatctcaacgcggccgtctcgctcgccgacctctggcggcagttcgccgccgcagatgagcgcttcgctgatgtctccgcgcggctcgggggcggcggcgcgcgggtgcttaggcaggaccccgtcgagtgcgtcttccagtttctatgctcctccaacaacaacattgcccggatcgagaagatggtgtggacgctggcaggctacggggagcggctcggcgaggttggtggcttcgtgttccaccggttccccacgatcgagcggctcgcgcgcgtgtcggagcaggaacttcgtgaggccgggtttgggtacagggcaaagtacattgttggcactgctaaagaattgcaggccaaacctagtggaggtcaaaaatggcttgcctcactgcgtgagaaggaactttcagatgtgattgaagctctttgcactctcccaggtgttggtccaaaggtcgctgcctgcattgctctgttctcccttgatcaaaatcatgctattcctgtcgacacacatgtttggaaggttgctacacagtatctattaccagagctagctggcaagagcttgaccccaaaacttagcgttgttgttgccgatgcttttgttactagatttggaagctatgctggttgggcacaaaacgttctcttcattggccagctaccaactcaaaaagttgttgtggctcaagttaccagtgacaatggtaccacaaagcctaccaaaaggaagcgcagggtgcaaccggaaccatgttgagggagcatggataccagcgatagtgggtttgccattcttctgtgttattctcgttcagtaagaatgtaagatgatgtaatatgaccatgacgaatgatcttttctgctgaacaggcattaggttgctcctgatcacactaacatatttgctgtcagcttgtaacatataggaatgcctgactcattacattatgagttctattttcatatgtgggcattgtgttgtttcttcgttagcctgcccgtgcatcttccacaaaaacatcaggatggaagcgggggcacatgtaaccgtgttgtgttgttatttaaacagcgatgagggattcagttgaaagtattgggtcaatagttctctgtaacctttgcacccagctataccatcccgtgctgccaggccggcttcttctgatgaa

SEQ ID NO: 132132 - DNA, 1849 bp, Zea Mays
tcgccgcgccacacgcgcacggcctcacccagtcctcgactagccgacgccgagaagcccctcgatggcgaggcgaaggcgcgcagcaatcctgcctcgcttccctccaaattcccaaagctctcgcgcgcggtgccatggcggagcgcctcgccgcctccctcctccctgccgcctcgccgtccccgtccgcccgccgcgcaacggtcgcagccgcagccgccgcctctttcccctccccatgctccgcccgcgcggggctgcgcctacgctcccgcccgcccctcttctcgcagaaggcggccgggcgcgggtgtggcctgcgggtggtgcggtgcatggcagcgtcggacgcggtgcagctcaaggccgcgcgggaggacatcaaggagctccttaagagcacatactgccaccccatcatggtccgtctggggtggcatgattctggtacctatgacaagaatattaaggactggccacagcgaggtggagctaatggaagtttaaggttcgatgctgagctgagtcatggagccaatgcgggcctgattaatgcattgaagcttatccagcctatcaaggacaaatacccaggtatcacttatgcagatttgttccagttagcaagtgctacggcgattgaggaagctggtggtccaaaaattccaatgaaatatggacgtgttgatgtcacagcagctgaacagtgtccgcccgaggggaggcttcctgatgctggcccacgtgatcctgctgaacaccttagggaggtattttatagaatgggccttgatgacaaggaaattgttgcactatctggagcacacacacttggaagagcaaggcctgaccggagtggctggggaaagctagaaacaaaatatactaaggatgggcctggtgagcctggagggcaatcatggacagttgagtggttgaagtttgataatagttacttcaaggagatgaagttattttttttgaacgaaattcaggacatgaagtttttgagccagcttccctggaaagagcagaaggaacaggatcttctagttttgcctacagatgctgcattatttgaggacccatcgttcaaggtatacgcagaaaagtatgcagaggaccaggaagcgttctttaaagactatggtgaagctcatgctaagctgagcgatcttggtgcaaagtttgatcctcctgagggattctcactcgacgatgacacatgctcttcaccttccgacgagaagacggaagaacctacactggtagcggtaggagcggcagtagcaacagcgacagcggacgacaacaacggcgcagctccgcagccggagcccttcatcgctgccaattactcgtatggaaagagggagttgtcggatgcgatgaagcaaaagatcagggcggagtacgaggggtttggaggcagcccggacaagcccatgcagtccaactacttcctcaacatcatgatcctgattgcggggttggcgttcttgacgtctctgctcgggaactgagtgttatatcatcatatgatccgattcctgaagtctacgagtgtccatatctacgactagcattagagctacgtacgtgcaaacagtttttttcgcgaattttggagagaaacgagcaaaagaaatgtataacgagtgttggagaaatagcgacctgactatcaacactctacctgtatgatttatctactatgaagcagtggatgcatggatattcacaaatattctcggtgcacgatctgaccgtcacccacagctgaccgagtttttttttttgaactccataactgggcttcttaaaattattattcagaaacatacaa

SEQ ID NO: 132133 - DNA, 1730 bp, Zea Mays
tcgccgcgccacacgcgcacggcctcacccagtcctcgactagccgacgccgagaagcccctcgatggcgaggcgaaggcgcgcagcaatcctgcctcgcttccctccaaattcccaaagctctcgcgcgcggtgccatggcggagcgcctcgccgcctccctcctccctgccgcctcgccgtccccgtccgcccgccgcgcaacggtcgcagccgcagccgccgcctctttcccctccccatgctccgcccgcgcggggctgcgcctacgctcccgcccgcccctcttctcgcagaaggcggccgggcgcgggtgtggcctgcgggtggtgcggtgcatggcagcgtcggacgcggtgcagctcaaggccgcgcgggaggacatcaaggagctccttaagagcacatactgccaccccatcatggtccgtctggggtggcatgattctggtacctatgacaagaatattaaggactggccacagcgaggtggagctaatggaagtttaaggttcgatgctgagctgagtcatggagccaatgcgggcctgattaatgcattgaagcttatccagcctatcaaggacaaatacccaggtatcacttatgcagatttgttccagttagcaagtgctacggcgattgaggaagctggtggtccaaaaattccaatgaaatatggacgtgttgatgtcacagcagctgaacagtgtccgcccgaggggaggcttcctgatgctggcccacgtgatcctgctgaacaccttagggaggtattttatagaatgggccttgatgacaaggaaattgttgcactatctggagcacacacacttggaagagcaaggcctgaccggagtggctggggaaagctagaaacaaaatatactaaggatgggcctggtgagcctggagggcaatcatggacagttgagtggttgaagtttgataatagttacttcaaggacatgaagtttttgagccagcttccctggaaagagcagaaggaacaggatcttctagttttgcctacagatgctgcattatttgaggacccatcgttcaaggtatacgcagaaaagtatgcagaggaccaggaagcgttctttaaagactatggtgaagctcatgctaagctgagcgatcttggtgcaaagtttgatcctcctgagggattctcactcgacgatgacacatgctcttcaccttccgacgagaagacggaagaacctacactggtagcggtaggagcggcagtagcaacagcgacagcggacgacaacaacggcgcagctccgcagccggagcccttcatcgctgccaattactcgtatggaaagagggagttgtcggatgcgatgaagcaaaagatcagggcggagtacgaggggtttggaggcagcccggacaagcccatgcagtccaactacttcctcaacatcatgatcctgattgcggggttggcgttcttgacgtctctgctcgggaactgagtgttatatcatcatatgatccgattcctgaagtctacgagtgtccatatctacgactagcattagagctacgtacgtgcaaacagtttttttcgcgaattttggagagaaacgagcaaaagaaatgtataacgagtgttggagaaatagcgacctgactatcaacactctacctgtatgatttatctactatgaagcagtggatgcatggatattcacaaatattctcggtgcacg

SEQ ID NO: 132134 - DNA, 1713 bp, Zea Mays
tcgccgcgccacacgcgcacggcctcacccagtcctcgactagccgacgccgagaagcccctcgatggcgaggcgaaggcgcgcagcaatcctgcctcgcttccctccaaattcccaaagctctcgcgcgcggtgccatggcggagcgcctcgccgcctccctcctccctgccgcctcgccgtccccgtccgcccgccgcgcaacggtcgcagccgcagccgccgcctctttcccctccccatgctccgcccgcgcggggctgcgcctacgctcccgcccgcccctcttctcgcagaaggcggccgggcgcgggtgtggcctgcgggtggtgcggtgcatggcagcgtcggacgcggtgcagctcaaggccgcgcgggaggacatcaaggagctccttaagagcacatactgccaccccatcatggtccgtctggggtggcatgattctggtacctatgacaagaatattaaggactggccacagcgaggtggagctaatggaagtttaaggttcgatgctgagctgagtcatggagccaatgcgggcctgattaatgcattgaagcttatccagcctatcaaggacaaatacccaggtatcacttatgcagatttgttccagttagcaagtgctacggcgattgaggaagctggtggtccaaaaattccaatgaaatatggacgtgttgatgtcacagcagctgaacagtgtccgcccgaggggaggcttcctgatgctggcccacgtgatcctgctgaacaccttatctggagcacacacacttggaagagcaaggcctgaccggagtggctggggaaagctagaaacaaaatatactaaggatgggcctggtgagcctggagggcaatcatggacagttgagtggttgaagtttgataatagttacttcaaggagatgaagttattttttttgaacgaaattcaggacatgaagtttttgagccagcttccctggaaagagcagaaggaacaggatcttctagttttgcctacagatgctgcattatttgaggacccatcgttcaaggtatacgcagaaaagtatgcagaggaccaggaagcgttctttaaagactatggtgaagctcatgctaagctgagcgatcttggtgcaaagtttgatcctcctgagggattctcactcgacgatgacacatgctcttcaccttccgacgagaagacggaagaacctacactggtagcggtaggagcggcagtagcaacagcgacagcggacgacaacaacggcgcagctccgcagccggagcccttcatcgctgccaattactcgtatggaaagagggagttgtcggatgcgatgaagcaaaagatcagggcggagtacgaggggtttggaggcagcccggacaagcccatgcagtccaactacttcctcaacatcatgatcctgattgcggggttggcgttcttgacgtctctgctcgggaactgagtgttatatcatcatatgatccgattcctgaagtctacgagtgtccatatctacgactagcattagagctacgtacgtgcaaacagtttttttcgcgaattttggagagaaacgagcaaaagaaatgtataacgagtgttggagaaatagcgacctgactatcaacactctacctgtatgatttatctactatgaagcagtggatgcatggatattcacaaatattctcggtgcacg

SEQ ID NO: 132135 - DNA, 1842 bp, Zea Mays
tcgccgcgccacacgcgcacggcctcacccagtcctcgactagccgacgccgagaagcccctcgatggcgaggcgaaggcgcgcagcaatcctgcctcgcttccctccaaattcccaaagctctcgcgcgcggtgccatggcggagcgcctcgccgcctccctcctccctgccgcctcgccgtccccgtccgcccgccgcgcaacggtcgcagccgcagccgccgcctctttcccctccccatgctccgcccgcgcggggctgcgcctacgctcccgcccgcccctcttctcgcagaaggcggccgggcgcgggtgtggcctgcgggtggtgcggtgcatggcagcgtcggacgcggtgcagctcaaggccgcgcgggaggacatcaaggagctccttaagagcacatactgccaccccatcatggtccgtctggggtggcatgattctggtacctatgacaagaatattaaggactggccacagcgaggtggagctaatggaagtttaaggttcgatgctgagctgagtcatggagccaatgcgggcctgattaatgcattgaagcttatccagcctatcaaggacaaatacccaggtatcacttatgcagatttgttccagttagcaagtgctacggcgattgaggaagctggtggtccaaaaattccaatgaaatatggacgtgttgatgtcacagcagctgaacagtgtccgcccgaggggaggcttcctgatgctggcccacgtgatcctgctgaacaccttagggaggtattttatagaatgggccttgatgacaaggaaattgttgcactatctggagcacacacacttggaagagcaaggcctgaccggagtggctggggaaagctagaaacaaaatatactaaggatgggcctggtgagcctggagggcaatcatggacagttgagtggttgaagtttgataatagttacttcaaggagatgaagttattttttttgaacgaaattcaggacatgaagtttttgagccagcttccctggaaagagcagaaggaacaggatcttctagttttgcctacagatgctgcattatttgaggacccatcgttcaaggtatacgcagaaaagtatgcagaggaccaggaagcgttctttaaagactatggtgaagctcatgctaagctgagcgatcttggtgcaaagtttgatcctcctgagggattctcactcgacgatgacacatgctcttcaccttccgacgagaagacggaagaacctacactggtagcggtaggagcggcagtagcaacagcgacagcggacgacaacaacggcgcagctccgcagccggagcccttcatcgctgccaattactcgtatggaaaggtaaaagcacttgcacttgcctcctctattgaactcttacaatgcagatggcagcttgatggtaagctgatcgagcatgttgcgggtgaactcgcagagggagttgtcggatgcgatgaagcaaaagatcagggcggagtacgaggggtttggaggcagcccggacaagcccatgcagtccaactacttcctcaacatcatgatcctgattgcggggttggcgttcttgacgtctctgctcgggaactgagtgttatatcatcatatgatccgattcctgaagtctacgagtgtccatatctacgactagcattagagctacgtacgtgcaaacagtttttttcgcgaattttggagagaaacgagcaaaagaaatgtataacgagtgttggagaaatagcgacctgactatcaacactctacctgtatgatttatctactatgaagcagtggatgcatggatattcac

SEQ ID NO: 132136 - DNA, 516 bp, Zea Mays
cttatgtgacccttttctttcacttggacaagtgtgaggagatggattcactttgacctggataagtgtactattacgcatacaggaagcatgtatcctccactgacacctctcaaatgcacaatgaacagtcattctagttggctcactcttgtcaattacataatcatactcacctttgatgcaataggtagcaagtgcattcctaaactcggtcgtcgatgcaaatgtgctgccttcttttaaggatggattatctctgtcataatcaattcttggtacataatcaccctctccttgctcatccacccccatagctatgttctcctcctcctcctcttcatcagtctcttcaaattgagcccctgtgacaatatctccatcatagtcctcaagttctagcatatcccacttgtcaacaaactcaggatactgcctctcatcatcatcaggtgcaacaacttcttctattggttcaatgtgtcttgcctcatcatcggggataatgggatccat

SEQ ID NO: 132137 - DNA, 127 bp, Zea Mays
caaaattatgtgaattatgttgtgagacaaatttatgtgaattgtgtgatgagatctgaatcaggacataaattgcaaaaaatgacatgttctgtttctccaataaaaatccaaaaaagtagtcatc

SEQ ID NO: 132138 - DNA, 339 bp, Zea Mays
atgccaccgctagctactcgcccgccccgccgccgtcagctactcgtccggcccggccagccactgcctcccttcgtctcctgctcgcccgcccggctccgccagccgccgcggcacgcgtggcagccatcgccggtccgccccgcccgctgctcgcccggcccggctccgccagtcaccgccgcccgtcctctcctgctcgcccggcctcgctccaacacagctcattcagaccccgagcgctgcacgctgcgccgttgccccaacaccgtcgcgtcactgttttcatcgcttcagattagtaatattttcgcaaaattgtcgtaatgttgcggaact

SEQ ID NO: 132139 - DNA, 1989 bp, Zea Mays
gatcatccatatatccctcccctctgccgttccttttctcgatttgattcttccaccccggcccttgtgttcactggctctgtcccagtcccagtcccacccacctttgtgctcgtgcgatgtaggaacagggcatcggaaccgagcaagcaagcaagcagaagcaggattccggcagagggaggaggaaggaggaaggaaggcggtcgatcgatcggaagcgccggcgccggcgccgccgcaaaggatcgggcagacgagacgacacgaggttatctgaggcgcagagctcagggtgaaagaagaatctagtgaaagtggaaggatccgcgcacgggctccgtccgaagatgctgccctactttgatccggagtacgagaacttcaaccagcgcatcaaccccccaagggtttgcatcgacaacaccacatgcagcgactgcaccttggtgaaggttgacagcatgaacaagaatggcattctgctggaggtgctgcaggtcctgagcgatctggaccttcacatcttcaaagcctacatcacctctgatggtgggtggttcatggatgtgttccatgtcgttgataagcaagggcagaagatcactgatgacaagaccatcaagtacattgagaaggctttaggtccggagagcaatttgctgggcgcaaagggcagcaactcagcggggaggtcggtggggctgcactccatcggcgaccacaccgccatcgagctcaaggggcccgacaggaggggcctcctctcggagatcttcgcggtcctcgccgacctccagtgcaacgtgctggccgccgaggtgtggacgcaccgcatgcgcgtggcctgcgtcgtgtacgtgaacgacgtggccacggggcaggccatcgacgacccggaccgcgtggcccgggtcgaggaccggctgcgccacgtgctccgcgggtacggcggcggcggcggcgcgggggacgacgacgacggcagcggcgcgcacgccaacttcgcggccgcctcttcgacgccgcaccacgtggaccggcggctgcaccagctcatgcacgccgacgtggacgccgtccacggcgacggcgcgcacgcggcggccggcggcgagggcgaccggccggccgtgacggtggagcactgcgaggagaagtcctactccgtggtgaacgtcaagtgcaaggaccggtccaagctgctgttcgacatcgtgtgcacgctcacggacatggagtacgtcgtgttccatgccgccgtgtcgtccgaagccaactacggcatccaggagctgtacatccgccgcaaggacggcaaaacgcttctgaaagacgaagcagagaaggtgatcaggtgcctggaagcagccatctccagaagagtatccgagggattcacgctggaggtgtgcggccgggaccgggtgggcttgctgtcggacgtgacgagggtgctccgggagcacgggctcacggtgagccgcgccgacgtgacgacggcgggcgggcaggccacaaacgtcttctacgtccggaacccctcgggccagccagtggacatgaagaccgtcgaggggctcaggggccagtttggccagaccgccatgctcaacgtcaagagcgtgggcgtgcctgctgcggtggccaaagcggcggagccaagctccggcagcatggtcaggagcagcttcttctccttcggcagcctcttcgcgaagctccgggcctgacaactggtcaggcgattcgaactccagctgtgtgtagaagaaatgaactcagaactagggtagtggactagcgggggtgggcgggggagagaaacagggagcaactgtatctctatgtggcagctgtggttgttgtacagttcataaggagcctctaccagaagaatggtagttctgtggaatgcaggctgcggactgcttgttaaggtaagggtttatcccatctgcgcagaatttaaaaaaaaaacatcgatcc

SEQ ID NO: 132140 - DNA, 1993 bp, Zea Mays
gggaggggggagaaaggtgtccaaccaaccttggttgaaatcgttttgtgacacctagcattttacatagcctatataatataacagcccctagaggagggggaggacagacggtgtgtggcatggcataagctatagcggcatcaagtggtgggcacacggagagctggtgactggaacagggcatcggaaccgagcaagcaagcaagcagaagcaggattccggcagagggaggaggaaggaggaaggaaggcggtcgatcgatcggaagcgccggcgccggcgccgccgcaaaggatcgggcagacgagacgacacgagtggaaggatccgcgcacgggctccgtccgaagatgctgccctactttgatccggagtacgagaacttcaaccagcgcatcaaccccccaagggtttgcatcgacaacaccacatgcagcgactgcaccttggtgaaggttgacagcatgaacaagaatggcattctgctggaggtgctgcaggtcctgagcgatctggaccttcacatcttcaaagcctacatcacctctgatggtgggtggttcatggatgtgttccatgtcgttgataagcaagggcagaagatcactgatgacaagaccatcaagtacattgagaaggctttaggtccggagagcaatttgctgggcgcaaagggcagcaactcagcggggaggtcggtggggctgcactccatcggcgaccacaccgccatcgagctcaaggggcccgacaggaggggcctcctctcggagatcttcgcggtcctcgccgacctccagtgcaacgtgctggccgccgaggtgtggacgcaccgcatgcgcgtggcctgcgtcgtgtacgtgaacgacgtggccacggggcaggccatcgacgacccggaccgcgtggcccgggtcgaggaccggctgcgccacgtgctccgcgggtacggcggcggcggcggcgcgggggacgacgacgacggcagcggcgcgcacgccaacttcgcggccgcctcttcgacgccgcaccacgtggaccggcggctgcaccagctcatgcacgccgacgtggacgccgtccacggcgacggcgcgcacgcggcggccggcggcgagggcgaccggccggccgtgacggtggagcactgcgaggagaagtcctactccgtggtgaacgtcaagtgcaaggaccggtccaagctgctgttcgacatcgtgtgcacgctcacggacatggagtacgtcgtgttccatgccgccgtgtcgtccgaagccaactacggcatccaggagctgtacatccgccgcaaggacggcaaaacgcttctgaaagacgaagcagagaaggtgatcaggtgcctggaagcagccatctccagaagagtatccgagggattcacgctggaggtgtgcggccgggaccgggtgggcttgctgtcggacgtgacgagggtgctccgggagcacgggctcacggtgagccgcgccgacgtgacgacggcgggcgggcaggccacaaacgtcttctacgtccggaacccctcgggccagccagtggacatgaagaccgtcgaggggctcaggggccagtttggccagaccgccatgctcaacgtcaagagcgtgggcgtgcctgctgcggtggccaaagcggcggagccaagctccggcagcatggtcaggagcagcttcttctccttcggcagcctcttcgcgaagctccgggcctgacaactggtcaggcgattcgaactccagctgtgtgtagaagaaatgaactcagaactagggtagtggactagcgggggtgggcgggggagagaaacagggagcaactgtatctctatgtggcagctgtggttgttgtacagttcataaggagcctctaccagaagaatggtagttctgtggaatgcaggctgcggactgcttgttaaggtaagggtttatcccatctgcgcagaatttaaaaaaaaaacatcgatcc

SEQ ID NO: 132141 - DNA, 2123 bp, Zea Mays
gatcatccatatatccctcccctctgccgttccttttctcgatttgattcttccaccccggcccttgtgttcactggctctgtcccagtcccagtcccacccacctttgtgctcgtgcgatgtaggaacagggcatcggaaccgagcaagcaagcaagcagaagcaggattccggcagagggaggaggaaggaggaaggaaggcggtcgatcgatcggaagcgccggcgccggcgccgccgcaaaggatcgggcagacgagacgacacgagccacatgccgacacgcgcgcgtgtgtgtatgtagtactgctattgctctaggtcgccgccactttgttcgtcgccgattcgccggagcccaacagggtggcttttgctgttgtgcggtctgaggcgaacgtacgtgatgcctgccgcctgccggttatctgaggcgcagagctcagggtgaaagaagaatctagtgaaagtggaaggatccgcgcacgggctccgtccgaagatgctgccctactttgatccggagtacgagaacttcaaccagcgcatcaaccccccaagggtttgcatcgacaacaccacatgcagcgactgcaccttggtgaaggttgacagcatgaacaagaatggcattctgctggaggtgctgcaggtcctgagcgatctggaccttcacatcttcaaagcctacatcacctctgatggtgggtggttcatggatgtgttccatgtcgttgataagcaagggcagaagatcactgatgacaagaccatcaagtacattgagaaggctttaggtccggagagcaatttgctgggcgcaaagggcagcaactcagcggggaggtcggtggggctgcactccatcggcgaccacaccgccatcgagctcaaggggcccgacaggaggggcctcctctcggagatcttcgcggtcctcgccgacctccagtgcaacgtgctggccgccgaggtgtggacgcaccgcatgcgcgtggcctgcgtcgtgtacgtgaacgacgtggccacggggcaggccatcgacgacccggaccgcgtggcccgggtcgaggaccggctgcgccacgtgctccgcgggtacggcggcggcggcggcgcgggggacgacgacgacggcagcggcgcgcacgccaacttcgcggccgcctcttcgacgccgcaccacgtggaccggcggctgcaccagctcatgcacgccgacgtggacgccgtccacggcgacggcgcgcacgcggcggccggcggcgagggcgaccggccggccgtgacggtggagcactgcgaggagaagtcctactccgtggtgaacgtcaagtgcaaggaccggtccaagctgctgttcgacatcgtgtgcacgctcacggacatggagtacgtcgtgttccatgccgccgtgtcgtccgaagccaactacggcatccaggagctgtacatccgccgcaaggacggcaaaacgcttctgaaagacgaagcagagaaggtgatcaggtgcctggaagcagccatctccagaagagtatccgagggattcacgctggaggtgtgcggccgggaccgggtgggcttgctgtcggacgtgacgagggtgctccgggagcacgggctcacggtgagccgcgccgacgtgacgacggcgggcgggcaggccacaaacgtcttctacgtccggaacccctcgggccagccagtggacatgaagaccgtcgaggggctcaggggccagtttggccagaccgccatgctcaacgtcaagagcgtgggcgtgcctgctgcggtggccaaagcggcggagccaagctccggcagcatggtcaggagcagcttcttctccttcggcagcctcttcgcgaagctccgggcctgacaactggtcaggcgattcgaactccagctgtgtgtagaagaaatgaactcagaactagggtagtggactagcgggggtgggcgggggagagaaacagggagcaactgtatctctatgtggcagctgtggttgttgtacagttcataaggagcctctaccagaagaatggtagttctgtggaatgcaggctgcggactgcttgttaaggtaagggtttatcccatctgcgcagaattt

SEQ ID NO: 132142 - DNA, 92 bp, Zea Mays
ctgaattcatgcattggcactaccattgttcaacccagctacaatcaggggcaatgcgatcagctcgaacaaaagttggtgagactaaacaa

SEQ ID NO: 132143 - DNA, 969 bp, Zea Mays
ctccctataaaaagtaaacactcagattcacctcgtctcatctcacccttcttcgtcgtccctatccctgcctgcccagcgagcatgggaggaggagccaccaacctacctccgggcttccatttcttcccttcagacgaagacctcgtcgtccatttcctccgccgcaaagccgccaacctcccgtgccgccccgacatcgtcccgacgatcctccttcaccgctacgacccgtgggagctgaacggcacggcgctgcaggctgggaaccagtggtacttcttcagtagccacgcccacgcccacgcccactccgcggcggggcagaccagaacctctccgtccgggtactggaaccccgccggcgccgatgaaacagtagtactagcgagcagcggccgtgtcgttggcctcaagaagacgctcgtcttctgcaccggagagcctttcagagggttcagaacgaactgggtcatgcatgagtaccaccttcaggacgggccggccgggtgcaatgtcggcgggagcagcggcgccaccaccccaagtagctccagcagctccggcagcagcaggagatcgcagaggaagagagttcactcgagcacggagtcaataaacagctgggtgatatgtagagtgttcgaatcaagctgcggttcgcaagtgagcttccatgacgagggcacagagctttcgtgcttggatgaggtgttcttgtctctagacgactacgacgaagtgagcttgccaaataattagaaccctagctagcaggccatttgattagtacctgtgacggtaacgtcgtcgtctgcgtaagcgtaagtggttgcaacttgcattgtgcatgatgcagatggcctgatgataggcatcgagcttaagccggtctctatccgaaatcattatatattaccctgtaatcgatcgatatgattatcatgcaatatgggtttaaaagcttca

SEQ ID NO: 132144 - DNA, 1827 bp, Zea Mays
atgcgccgccttctcccgccgctcgctgtccacccgccgccatgcctcccagcacctcctccaaccgccggcggcggaagcgccctcgccatcccggagttgattcctctcctggaacgggccatctcaatgggggacgtgctccatctcggccgcgcggtgcacgcgcacctcgtcaagacggcgctcaccagccatacgctcctatcaaatcgtctcgtcgcgctctactcctcgctcccgtcgccggccgctgccgtcaaggccttctacgaccttccacacaagaacgcgcactcctacaacacgcttctcgctgcgctcttgcgcaggccggacaccctccccgacgccttccgcctgttcgacacaatgccggccgactcacgcaacctcgtctcctacaacaccctcatgtcgtcccttgcgcaccacggccggcaggtggaggcgctccgcgtcgttgcccggctggccagggacaggttcttggggccaggtttagccatggatcggttcacggtggtcagcgtggcgactgcatgtgcgggaatcggagctgcgaggccgctgcgggaaatgcacggtgcggtagtggtatcagggatggagttcaccgtcatcatggccaatgccatgttgaacgcctacagcaaggctcggagggtggaagatgcgaggcatttgttcgatcaggtcagcatccgagacaatgtcacttggacgtcgatgatttctgggtactgccaagtgaagaagctccatgaggcagtgcaggtgttcgatatgatgccagataaggataggattgcatggacagcgctgatatctgggcatgagcagaatggagaggaggacaccgctcttgagcttttcgaacagatgctggccaagggagtatcaccaacgccttttgtcttggtgtcagctttgggtgcatgtgccaaacttggacttgtcacacgtgggaaggaattgcactgcttcatcttacgccggaacattggctctgtccctttcaacattttcatccacaatgcactcgttgacatgtactctaagtgtggagacatgatggctgcgatggcagtatttgactggatgcctgagagggactttatctcttggaactcaatggtcacggggttctcacataatggcctcggaaagcagtcacttgctatttttgaggagatgctggtagctggagttcgtccaactcatgtcactttcctcgctgtcctcacggcctgcagccattctggtctagtatctaatggacgactcgttcttgaatcaatggaggaccatggtgttgaaccaagggctgaacactatgctgccttcattgatgctcttggtcggaatcaccagctggaagaagcgactgagttcatcaaagatttgccatccaggattggtcctggtacagctggatcctggggagctctcctaggtgcatgtcgccttcatggaaatatcgagcttgcagaagaagtggcagagtttctcttcaggttagagcctgggaacagtggtcggtatgtcatgatgtcaaacatctatgcagctgcaggacagtgggatgatgcacgtcgagtcagggggctcatgaaggagaagggccttaagaaggatcaggcttacagttggattgaggtgcggagtgcaaagcatgtattcgttgctgatgacatctctcattgcgaggcagacaagatatatgagatgttggggaagcttctcgaccatatgagcgtagcagaggatcctactgaacaccagcttaatttttgtttagacttgagtggaactgcccatgtataa

SEQ ID NO: 132145 - DNA, 1027 bp, Zea Mays
cggccccgtccggtccagtcactcgtctgccttatcgtcagagccgccgagcgagcgagcgagcgagcagcagccagcagaagaagctaaaagcccgaagcgcagcgcgcgagcgaatacaacagcgcaacgcagcgccatggaagacgacgacttcaccttccccaccgttgccgccgcgcggggcccgacggcgccgctcggccgccccgatgacgaagacccggtgccgcacctgctccagcttcccccgcctcccagtcccaccctcgcggggacgacctcccctctgtggccgttcgcgggctccactcccaagacgacgacgacgacggccgcgccgccgtcgtccccgcccgtgacagaggaggacgacgaggacaggatggacctgctgtgggagagcacgctcaccaccaggcccgtcgcgacagcgccggcgccggcgccggagtcagctgggagcgccgtcgtcagcccccacgcggggccgccgccagagcggcgcgcggccgcggccgacgacaagcagcgcgccgcggcgctggccgccgcggagaggatggacaggctgtgggagagcttcaacgaggacctcgtcgtcctgcggcggcacgtccgagaccgaggccgccgctccaagtccgccgccgagcaccccggcggcaccaacaccaacaccaaggcgccgcgggccctggccgacgacgacgacgacgaccactggtacctctgcaactactcggcgtcgtcgggcgccgacgacgacgagtccgatggccaggagacgtcggcgtcgtcgcccgcggagcggcgcgggtacgggtgcgcgcccaccatgctgcgcgcgtcgtcgcgcgcgggcggggcgggccagttctgcggcgccggcgccagccaccgcggccgacggcgcggccgcggcggcggggcggcggctgggtgggcgctcctgctgaggctcttccgcaggctcttcgccgtcgacaggacggcgcagccgtcccgcagcgtctgcgtgccatga

SEQ ID NO: 132146 - DNA, 462 bp, Zea Mays
ctccaatcaaggttgatggtcgcattgccgtctgtgaaggggcgtctgaaggtgttggacttggccacccaattgagtacatctgccttgatctggaggcacctaatgtgtgcaagtactgtggtctccgttatgttcaagttcaccatcactaaattgggaagatactgctgtctaccgctgcagaagctgagttgaggagtttatgtgcacacacatttgtttcacaatgttctgtagtgtactttgtactatccttgcgggcaaaatattacctttcatgatcatcctcttctcgggcgatcttttattaatcctgtcttagtatggttcatttttctacagatgaattgtgctcctttttcagaatctatacaagctgtgtgtattgaagttttactctgaataagcatggaactaactctaagggcaatttaatctcagaagttctagttttcttga

SEQ ID NO: 132147 - DNA, 1885 bp, Zea Mays
gccggatcatggcacagcttttttgaccttgtctgtggcccccctcaacctctgcatcgacggcctcgagagaagagtcgccggctcgccgccctgctccggcaccagcaaaaccgccaggtgatccccgacaaccagctagagcagctagccgctgcagcagaagggaccttcttatcgccgtggttatcccatcatggctgagacaaatgatgccagcccttcgtcgaaactccatacaagattgagactctgggagtttcctgactgttatgtatttgaaccaattgatggccttgctgacttgtacctatcagttagccggaccagcggaacaatgaatctagttcaagacttgccatcacgtggatccactacaaaacataaagttcaaacagtatatggtgtgataggagtactcaaacttgcagttggatcatattttgtggtgatcacggatcgtgattgtgtgggatcctactttggacacgcaatttttaaagtgacaggactaaaaattcttccctgcaataatgcacataacaccacctctactgatcagaaaaaaatggaaacaaaattctcggagctcctggattctgcagagaggactattggccttcacttttcctatgatatcaacctaacactttctgcacagaggctacatgatctcggcgatgaatatagagctcttcctctttggagacaggcagaaccaagatttctatggaatggctacttgttagaacctctaattgagaacaagctgaaccagtacttattgccagtaattcaaggcagttttcaaaatatccaagcagaagttggatcagagatggtaaatgtgaccctgattgcacgtaggtgcacacgaaggataggtactcgaatgtggagacgaggagctgatgcagagggttatgctgcaaacttcgttgaatcggagcagataatgcagtcaaaagggtttacagcatcctatgtacaagtccgaggttctatgccattcttgtgggagcagattgttgatttgacatacaaacctagttttgacattgttagacaagaggaagcgcctcgtgtacttgagaggcacttccatgatttgcaaaagaaatatggagctgtcttagccgttgatcttgtcaatacaggtggcggtgagggccgcctccgtgaaagatatgcaaaatctattgaacctattcttagtgaagatctaagatatgtgcacttcgacttccaccgaatttgtggccatattcactttgagcgtctgtctcagctgtatgatcagatcaaggactaccttcagaaacataagtacttccttataaatgataaaggagagaaaattgaggagcagactggcactacaagaacaaattgtatagattgtttggatcgcaccaatgtaactcagagcatgattggtcgaaaaattctggaaagccaacttcaacgtataggagttcttggtgctggtgatacaataagcaaacatccaacctttgatacaaactacaaaattttgtgggccaatcatggagatgcaataagcattcagtactctggaactcctgctctgaagggagattttgttcggtatgggaagcgaactactcaaggaattctgaatgatttgaggaatgcacttggtagatactacctgaataacttcgttgatgggactaagcaggatgccatggatcttcttcaaggacattacatgacatctgttagtagagatatggcagtgccaagcaaagcaggacttctgcagagttatgcgtccttccgccttgcttttgcattggttatgggagctctaatgttcatgttgatgtcactgagacagggtaagaattctgaatatttctga

SEQ ID NO: 132148 - DNA, 484 bp, Zea Mays
ggcgtttggctggcgctaaagctctctcttctttccatctagaggagttgttttaagagtggtgtatttggtggtgtgtgtctgtaagtctgctgttcgtgttttggggtttcaccccttttctcttcttaatacaaaaatacgcagatctcctgcgtattcaagaaaaaaaggatactttacccatagtttgaatttgtttttgtctattaggtatgggaagcgaactactcaaggaattctgaatgatttgaggaatgcacttggtagatactacctgaataacttcgttgatgggactaagcaggatgccatggatcttcttcaaggacattacatgacatctgttagtagagatatggcagtgccaagcaaagcaggacttctgcagagttatgcgtccttccgccttgcttttgcattggttatgggagctctaatgttcatgttgatgtcactgagacagggtaagaattctgaatat

SEQ ID NO: 132149 - DNA, 1409 bp, Zea Mays
ctaagttgtttgaagcgctttgcttgcttttatgaattgacttccaaagtccatcaatatttcatttgaacattcaaatatgcttttggcagaaaaaaatggaaacaaaattctcggagctcctggattctgcagagaggactattggccttcacttttcctatgatatcaacctaacactttctgcacagaggctacatgatctcggcgatgaatatagagctcttcctctttggagacaggcagaaccaagatttctatggaatggctacttgttagaacctctaattgagaacaagctgaaccagtacttattgccagtaattcaaggcagttttcaaaatatccaagcagaagttggatcagagatggtaaatgtgaccctgattgcacgtaggtgcacacgaaggataggtactcgaatgtggagacgaggagctgatgcagagggttatgctgcaaacttcgttgaatcggagcagataatgcagtcaaaagggtttacagcatcctatgtacaagtccgaggttctatgccattcttgtgggagcagattgttgatttgacatacaaacctagttttgacattgttagacaagaggaagcgcctcgtgtacttgagaggcacttccatgatttgcaaaagaaatatggagctgtcttagccgttgatcttgtcaatacaggtggcggtgagggccgcctccgtgaaagatatgcaaaatctattgaacctattcttagtgaagatctaagatatgtgcacttcgacttccaccgaatttgtggccatattcactttgagcgtctgtctcagctgtatgatcagatcaaggactaccttcagaaacataagtacttccttataaatgataaaggagagaaaattgaggagcagactggcactacaagaacaaattgtatagattgtttggatcgcaccaatgtaactcagagcatgattggtcgaaaaattctggaaagccaacttcaacgtataggagttcttggtgctggtgatacaataagcaaacatccaacctttgatacaaactacaaaattttgtgggccaatcatggagatgcaataagcattcagtactctggaactcctgctctgaagggagattttgttcggtatgggaagcgaactactcaaggaattctgaatgatttgaggaatgcacttggtagatactacctgaataacttcgttgatgggactaagcaggatgccatggatcttcttcaaggacattacatgacatctgttagtagagatatggcagtgccaagcaaagcaggacttctgcagagttatgcgtccttccgccttgcttttgcattggttatgggagctctaatgttcatgttgatgtcactgagacagggtaagaattctgaatat

SEQ ID NO: 132150 - DNA, 1900 bp, Zea Mays
gtactaggtaggtctttctccttgcaatctttccgtttcttcgtttgattccctcccgccgccgccgctggagacgcccaaccacgacagcgccccagggttcgtcctcccgctggaatagtaagtgaccggagaaaagcagcacaagagagatgtggtatctatgcgtcttctaccacaggctcctggactaccggcgaccggaggtggagtccctcgccgagctctttgccggcccaggcgcccgtgaatccgtcgagtggcgcatgccggagaaccaccacgtagactcccccttccacctcgttcgcctccctggagacgagcgcctcgccgctcaggtcgccaaccgcagcttgttggtgaagggggtctacgagctctggggctatggcactacctacgaggagctggagaagtcggtcagggagtaccccgacgagaggaagcttccgttcctggtcccggaaagcagcttcaagatcgttatcgacagcttcggcaaggtgatcagctcccaagagcagaacgagatcatacagagcctcacttacataccattcaagggacgtgttaatttgaagaagcctgatcacagattctttgtcatggagaccgatgactatgggtcgaacaatggtctcccaccggttgtcaagaggtcgatattctttggccgggaggttggagcagctgataggcatctcctgccaacataccagctcaagagtaggaagtacattggccccactgcaatggatgctgaaatggctttcctcatggccaatcagggtctggcctcgcctgggaagcttgtctatgacccttttgttgggaccgggagcattttggttgcagctgcacattttggagctatgacgatgatattgatataagggttgtacgggatggtcgtggccccaattgcaatgtttggagcaactttgagcagtataagttaccagagcctttgtgtttgctaagggcagacaacaatctcccaccctggcgtcctggattgaaggagatgttcgatgcaataatttgtgacccaccatatggagtccgggccggtggccggaagtctggtggtcggaagctcataaaaggcgtcaaaggcccttacacagtgcctgatgagaaacgggacaatcacatcccatcaaccgccccatatagcctcgcagagtgcgtccatgacctcctccaccttgccgcaaggatggtagtcatgggtggcaggctcgtcttcttctaccctgtactgcgaggtgaagatggcactgcgaacccgcagttccctgagcacccctgcttcaagttaatcacctcctctgagcagatcctgagctttcggtacagccgggttctgctgaccatggtgaaggttgcaccttacaccgaggagatcgagaagttggccgcagagcggcaccgggagttcagggagaaccaccagaagtggatggaggagggcaacctccattccgccgtgttcgagccagcccaggatgggaagcctgatagagactccaagcccaaatacagaggcaagtatgtgtagcagcgcagatactaacttgttgaatttagtggaaacacatttttggtggtttcctgttctgcatcctgtaccaaattttatgagctagtgtgttggcaggcgctgcgagatgtaccactgttccagagtaccattcaaatcttgtcagtccatttgatggatgaggaagtgtaattgcagcttaattgactgaacttatttttttggttaacctgcctttgacacggctgttgaaattggcgctgcttctgttactgaattatatgaaaagaaataattcagtaacagaagcagcaccaatttagtactaagggaaaaaacaagtaaaatacatca

SEQ ID NO: 132151 - DNA, 1865 bp, Zea Mays
ccagttgcttgcctggtctctccaactcaccctttttcaccttcggcagtctggctccatccgtctcctgcactgaccttttcctccacgtttccggcaactgcaagcaaccactgatccagcccgttctgtgtcccggcgaatggtgacgaaccaggacgcggatgcggcagcgccaggggcaggggcaacggtagatccgatgcggctagcatcgcggtggcgatcccggccagagtggaactgcgcgtcggcggagctggaggctgagccgtccgagctcaacaccgtcaacagctcgggactcttctccgtcgtctctaccgacaagttatcggtaaaatacctcggcagccatcaccacggccacgacgtcggtgtcgtgcaggccgaccgtcccgcgccgacgcgccgagccgtgtactacttcgagatgggcgtcaggaatgctggatacaaggggcagacatccattgggttcacgagcgagagcttcaagatgaggcgacaaccgggctgggagacaaacagttgtggataccatggtgacgacggccatctttatcggggtcaagggaaaggtgaatcatttgggccaaaattcacatctggtgacataattggtgctggcatcaactacttgtcacaagaatttttcttcacgaaaaatggtactctggttggagccattccaaaagaaattaaaggcccactatatcctaccattgcagttcatagttacggtgaagagttgactgtaaactttggaaaagaaccattctgttttgacgttgagggttatattcttgaggacaaaatgaggcagcaatcagtgtctgataaattgaacttggagccagacatcagccattggattgtccgttcatatctcctacattatggataccaagatacattaaatgcttttgatatggcaaatgcaaccgatcgccccaccagtcgccaaaatggtaatgcagaacctcccgaaatgtatggtcttagccatagaaaacttttgcgtcagcttatcatgagtggagatattgactctacattcaaaagacttcgggagtggtatccgcaagtgataaaggatgagcaatcggttatttgcttcctacttcgttctcaaagattcatagaatatatcagggctgaacaactggaggttgccgtgaaatatggtcgtgctaacctggcaagcttcttcacccacaaagcttttgaggggctgctgaaagatagtgtggccctacttgcgtatgagaagcctacagaatcatgcttgggatacctgatggactcttcccagcgtgaatttgtggcggacgcggtgaacgcggctgtcctgtcgacgaaccccactgtgaaggaccctgagagctgcctttactcgtgtctcgagaggctactaaagcagctcacagtatgtagctttgagcgacgtgcattcaacaactaccaaggagatgcattcttactccacaaagaagtgcagaattatgaaaggtctaggcgctcataggcatcgggtttgatgcgcatctcagaagtaaactcagatgctagactcccaagtctcaactgctctttgaagggacgaaggttcagaaccaagtggtcgaccatgctaagcacaaatccttccccttgatgcagcacccctactttcggaagggtggatacaagatttcacagacagaggtcaggctttcggaaggtgtcttatcctccctgtaatcagaaaactacgtttcagtctccctagttttttttgttggttggctaatatgctgtttgacattgacattgtggatgctaaaaagtaaagatgctttaatgtatgcccacctttgagaaca

SEQ ID NO: 132152 - DNA, 1852 bp, Zea Mays
ccagttgcttgcctggtctctccaactcaccctttttcaccttcggcagtctggctccatccgtctcctgcactgaccttttcctccacgtttccggcaactgcaagcaaccactgatccagcccgttctgtgtcccggcgaatggtgacgaaccaggacgcggatgcggcagcgccaggggcaggggcaacggtagatccgatgcggctagcatcgcggtggcgatcccggccagagtggaactgcgcgtcggcggagctggaggctgagccgtccgagctcaacaccgtcaacagctcgggactcttctccgtcgtctctaccgacaagttatcggtaaaatacctcggcagccatcaccacggccacgacgtcggtgtcgtgcaggccgaccgtcccgcgccgacgcgccgagccgtgtactacttcgagatgggcgtcaggaatgctggatacaaggggcagacatccattgggttcacgagcgagagcttcaagatgaggcgacaaccgggctgggagacaaacagttgtggataccatggtgacgacggccatctttatcggggtcaagggaaaggtgaatcatttgggccaaaattcacatctggtgacataattggtgctggcatcaactacttgtcacaagaatttttcttcacgaaaaatggtactctggttggagccattccaaaagaaattaaaggcccactatatcctaccattgcagttcatagttgactgtaaactttggaaaagaaccattctgttttgacgttgagggttatattcttgaggacaaaatgaggcagcaatcagtgtctgataaattgaacttggagccagacatcagccattggattgtccgttcatatctcctacattatggataccaagatacattaaatgcttttgatatggcaaatgcaaccgatcgccccaccagtcgccaaaatggtaatgcagaacctcccgaaatgtatggtcttagccatagaaaacttttgcgtcagcttatcatgagtggagatattgactctacattcaaaagacttcgggagtggtatccgcaagtgataaaggatgagcaatcggttatttgcttcctacttcgttctcaaagattcatagaatatatcagggctgaacaactggaggttgccgtgaaatatggtcgtgctaacctggcaagcttcttcacccacaaagcttttgaggggctgctgaaagatagtgtggccctacttgcgtatgagaagcctacagaatcatgcttgggatacctgatggactcttcccagcgtgaatttgtggcggacgcggtgaacgcggctgtcctgtcgacgaaccccactgtgaaggaccctgagagctgcctttactcgtgtctcgagaggctactaaagcagctcacagtatgtagctttgagcgacgtgcattcaacaactaccaaggagatgcattcttactccacaaagaagtgcagaattatgaaaggtctaggcgctcataggcatcgggtttgatgcgcatctcagaagtaaactcagatgctagactcccaagtctcaactgctctttgaagggacgaaggttcagaaccaagtggtcgaccatgctaagcacaaatccttccccttgatgcagcacccctactttcggaagggtggatacaagatttcacagacagaggtcaggctttcggaaggtgtcttatcctccctgtaatcagaaaactacgtttcagtctccctagttttttttgttggttggctaatatgctgtttgacattgacattgtggatgctaaaaagtaaagatgctttaatgtatgcccacctttgagaaca

SEQ ID NO: 132153 - DNA, 1253 bp, Zea Mays
cacacaaaagagagggtctggtgtgtggatgattccagtcctcctcctgttctttgtttcccgtcccatcgtgtgtgagcgcgtctgctggtctgccaagaggaggaaaggaaggaggagcaagtagagatggcttgccctgcgcagtccatgctctccgccagcggctgcatcttcctgaggagcaagcctcaggcggcatcccaagtgcgagggggcatcatcggcggtggccgcagcagcaggccgttcctgctcacctgcaacgcttcctcttctccgtccccttcctcgccggcgccggcgcaggaagaccccgactgcaacgaggaggagtgcgccccggagaaggaggtcgggagcctgagcgccgagtggctggccgaggagaggacccaggtcgtcggcactttccctcccaagaagaaagggtggaccggcttagtggagaaggacaccgccggccagaccaacatctactccgtcgagccgatggtgtacgtggccgagagtgccatcagctccggcacggcgggtacgtcggcggagggcgccgagaacacggccgccatcgccgcggggctcgtcctcatcaccgtagccgcggcctcgtccatcctcatccaggtgaacaagagccaggtgccgcaggtgccggaagccgcctacagcggcccgccgctcagctattacgtcaccaagttccagccggcggtggctgcgccggcgcagaccctcgaggcccccgcccccgacgaggcacaagacggcgccgccgccaccgtcgaggctccggaggtaccggcaccgcagctgtcgtcgtgagctgattcggttttgtggcatgcagctttatactacggatgagccagtagcgcatgatgatggaagatatgaatccatgatacaagcatttcggaattgtattaaagtttgtatatacacatgcattcagctcgcgcattctgtatgcttatttgaattcagacatcacggcactcccacaaaccattcagttgtaacaaggtgaacataccattttcacgcgtagtatttgaacataatttttatttttttggggctcactcgtactacatgaaacgaattcaaacaacgacaaaaattggagcgaagtggttacgttcaccgtactccagaattaaacagtaacttaataaagaccctagtcaatatctctctccttcatggcgtgatgcgagacaagcatgctgcaaacaagagaaaaaaaataa

SEQ ID NO: 132154 - DNA, 1488 bp, Zea Mays
aagtccccgctcgaggaacaggcgtatggactgattaaatatccaatagatgatctgctagtaaggcccattgcagatgatccggctttatctaagagacctactctgctacagattttagagtaccaagatgttctgtgggagatctccttatggtatgggatttctgctcgtcttttgggagggttctgaatctgtccccatttccgctaacagatttggagaacacaatttgccacaaagaaagcaatgttcttcttgtggaaatacatgcagctatgaaggatgaaggtgactatttcactgttctgcagaacaagaaacggaagttaaaggtaagttcagtaacatgggctgagtatctatgtgatttcttggaaatgacaaaaaatgaagaacgttccacaaacattgcaacagtaataaggggttattatggtcttattgacactgatataaagcttaagatcctccgggaactagtggaagaagctattcaaacctctgccataaaggagatactaagtgaccgtgtggaccagaaacaagtcctcaatgcaacaaaaagagagaacaccagaaaggacaaacaagagaaaaatcttaacactgaaattgccatgaaaagtcaggagaatcagacagatgatgtgcaagttggtcatgggggtgtagatgagctggttaggagaaaagaagaaaatgacaagagcaatatttctcggagtagaacagaagggaaacgacacttggtacagcaccttgagacggagattgagaaattatccatccgatccagcccacttggtaaagacaggcagtacaataggtactggtttttcaagcgtgaaggaaggctttttgttgaaactgcagattccagagaatggggttactacaacactaaggaagagctttgaaacggcaactagagaagttttacagtaagataagtaatgccctagagaaacgatcaaaagatatcgcaaacaggatgttacttgaagagggtgtactgcggcgttccacacgtgtccgggctcagccaaaggacatggcattcctcaagtacgtcaacaagtggaaggataactgaggtggcggtctgccagcggtggtggtggtctgccagcggtgggaggataacttgagccactgggtgacagggtttgcagtagatgtgtttggtttgaggttaaagtgggatgggacgggggcgacaccgtcctctcaattttttaattttttgggatcacgccgctacaaaaaaactactctggtgtttacctcgtccctacgtgactcccatttaaccactggagtaactgtgaccgtcccatttcatcctttcgtatacttggttaggtcgtcacagtggttcgccatactcgtcgcattagctaatgaaaactgtactagaacctagttttcttccctttgctactgaaatgaacactggttcacaaatgaaaagcttttgctactgaa

SEQ ID NO: 132155 - DNA, 526 bp, Zea Mays
ttggttttctttctgctctgttggggagggcagtgagtgcttctgctacagtcttaggaatgatggtaaagatgttgagcctttagttttattccaaagatgctctttgttacttgtcatccttacacaacctatattaacattagtttctaatgacttttcgcctaaatctggtgccctgatgtgtttatttaaatcttactattaccatctaattaatatagttgcacaaaaccatgttggttcgtcgacattagcttctgccttaaacaactgtaaggcgcctaatgttctagtatctgaaaaatgctcaaccttttttggctcaggccaccatgcgcagacagtgtcacacacccatgctgccattctgtcaaagtcaaacaggcagtatacgcgccaacgctagcaaacagggagagagcgagatggacggcattgtccacgcaaggggattccacggtgtagcgacctcacaattggtacgcccctgcatcggcatgcatccttatctcataagcgctgt

SEQ ID NO: 132156 - DNA, 1535 bp, Zea Mays
ccagccgccccatctcttttgcttctctctcccagcgcccatctctctctcctctgcccggccccaaacgccatggccgccgtgagctctctgccgtgctctctctctcttccgagctcctctggttccatggccgcgcccaaggtcctcccatggcgtccgtcctcctgagctcacccctcttgctgtgctgctcgccccagctcgaatttctctctgtgcgcgcgagctgccaagcacgtttccctgtgtcctggttggagctcgccccttcggtgtccatggccgcccagtctccactccccattcctgccgtggtcgacgcctctccctgctccatcttcttccttgccgtggctgttccacagctcagctctgctccagcagttcctatggcgcgcgctcagccagccctccatttttcctctgctgcgcgcagctcgccgagcagtccctgcgcgtttctctctcgcgcagatctctctccttcccggcgtttctctctattgctccgcgctatagcgaccgtcggaccgatcgttccctgcgcgccgactttcttgtgcgcgccgttgcgagctcgtcagccactgttggcttatcacagaacccccaacgccgtcgacctcgcttagccagtcgaccatagtcgctgccgagcgcttgtcccgcagtatttgggtctcgctgattggccgctcttgcccaccgttaattccgcctcgcagctcgcctgctgttgtggtgctgacactccacgacactcgtgtcgatgcatcgttgtctggccgagagttgtcgtcactatttcgctttcgtccaaattgtcatcacggatgcttaattctctggtcgcgcgtctttctatctcgcgcgtgtgagttggaagctctgcacgttcgtcgtcctttagtcccagttcaacccccatctcgccaggtcgctccagacacaatctcgtcgtcgttccgcgcctcagcaagaaattccaagaaacgggtgaagacgaagccagcagcgtgatattcaccaagtgcgcgacaaaagttcggttcgtcaaaattatttagtcgaggagaagatcttcagtaattgattaccgaagaaagaagacccctggatgacgtcaaccggaactgtagtcgtgcttgcgactatcgcgtcaaattagtcagggtaagcaaatttgttattcgtattagcggattgatggatggtttgactaggtaaaatatttattagattgtctgagtcgctttggtaaattggtcgatgtcgtaggataaaagaggtctcaataggtctcagtattgcggactgtagttattaaaaatgaaaagtgttattaatatatatgatacacaggttaaccggtaaattagtttagaaaattaatgaaagttcttctatcaaattttataagtgttaggtgcccaagaattttgaagttaaaattataagccgtttagtgtgttctctagactaggtatgatattttatgtgttgatcgagttcatgcttggaatggatgttga

SEQ ID NO: 132157 - DNA, 277 bp, Zea Mays
gatactttaagtatactagtcggttgcccgtgcgttgcgacgacttacaacaatacccacataaactatccatcaaaaaatttcaatattttttatttattgtctcccctctctatattatatattttttgatttggctaactgatgttattgtttactccatgcaaatatgtcttggtacaacatggccaatgaagtgagcgattagaagagagttcacaacgattgactgaatgaacagagattataaaatgacatgattccatcatacagagac

SEQ ID NO: 132158 - DNA, 1695 bp, Zea Mays
ggcgggcccacacctgtgccgttataaagaaacgtaacacgtaggcagacggcgtcccgctggtgtggtggcgtcctttttttccgccgggagataaaccgaccggacccctgactgcgacccgcagctgctcctgcttccgatccgaacttctctcgcccgccggttcttcgcgagcaattcttataaagcatcatcatcaccacttgtgatgggtggaagccagtacgatgatgaatgggtgttgcccagtgccgatatcactcttgttcttgttgggaaacttggctatggaaagagtgcaactggaaatagcatccttggacgggaagcatttgtatcagaatattcacattctggtgttactaatacttgtcagctgggaagcactaccctgatggacggccggaccatcaatgttattgatacaccagggttatttgatatgagcattgcatcagacgatgctggtaaagagattgttaaatgtatgaacatggctaaagatgggatacatgcagttctaatggtttttagtggcacatctcggttttctcgagaggatgcaagtacaattgagactattaaggtcttttttggagaaaagattgttgaccacatggttttagtttttacttatggtgatctagttggtgaatctaagttgaagaacatgctcaatgatgcgccagagtatttgcagaatgttgttgagctatgccaaaacagagttgtcgtcttcgataacaggaccaaggaccgaaggctccaagcgcagcaacttgacaaattgctctatgtagtggactcggtttgtgcaaacaatggaggaaaaccatttacagatcaaatgttcactcgcatcaaggaggtgcatgatagggaaaaagaggtgcataccttgggatattcagatgagcagatatctgagttgaaggaggagattcatagaactagggatgaacagcttgcacagataaccagcatggtcgaggaaaagctaaaccgcactgtggagaagctgcaacagcagctcatggaggaacagaacgcaaggctggaggccgagaaggtggcgcatgaagctatgcggaaatcagaagcgcagatccaggagctgaaggagagactcgagaaggctcgactggaaaacgaggagttccggaggatggcgcagagcagtaaatgtgctatcctatagtacttgctagaaaaactctgtgcggctatcgtgctgacgcgtctcttttttttttgtctgtagcaccttttttaaccgtttatttattacgcgacaactgttatgaagacactgctttgcttccgtatattatcttcttttttgcgcaattattccatatatgcactgtacaacctagccactgctgtacggtattccaagtataagatacaacttaaatacaacataatacaatggtcatgtctaaaacatgtgtcttaccatattcattgtaccaatcaaagcattcaataaattaaaatgaccaatcaattagtctcctgtctcgaacatagagctaagacaatgtgtcttcgtcaagatacatgtcttgatttttttttagatttactttactagatacattctaagatataacttaagacaccttattgtacatgcctttatcgttgtgcttatcttccttgcaggatgagtaagtaatcggatctctc

SEQ ID NO: 132159 - DNA, 327 bp, Zea Mays
atgcgatgcgacagcggacgacggagggggtcgagggcgcgagtcgggcgactcctcccccttccaggcgatgcgacagcggaggggtcaagggtgcgagtcgggcggctcctcccccttccacatgatgcgacgacggaggggtcgttaggcgacgccgaggacagcgcgaggggcaacgccgaggatggggaagatggagggaggcatcgcgcggtgtctccttcggtgggggagggggcggacgcggcggcgggatgggcggggagcagacgacgatgcgcggtgtggggatggggcgtcgcggcctcgtgggggcaggggtag

SEQ ID NO: 132160 - DNA, 1033 bp, Zea Mays
acaagaaacattgagaacaacgagctgccctctctgcctgcagccacacgcactggaatcatcgtgcggcgcagcgagcgagaggagtggagaggatgacggcgcccaagcctggcgggggagcggcggccgcggcgagggcggcggcggcggggcccaggacggtgctcatcacgggggtcagcagggggctgggccgggccctggcgctcgagctcgcgcgtcgcgggcactcggtggtcggctgcggccgctccgccgagcacctccgctcccttgaggaagagatcacgtcgccatcgcgccacttcttcaccgtcgccgacgttaggtctgacagcagtgtggccgagctggcaaagactgttgtagaaaagaagcaagttccagatattatagtaaacaacgctggtacgataaacaagaataacaagacatggaatgttccagcggaagattttgatatggtggtcgatacaaatatcaagggaacagcaaatgtgcttcgccattttgtaccacttatgatagagaagagacatgggattataatcaatctatcctctggttggggaagatctgctgctgcagaggttgctccatattgtgcttcgaagtgggcgattgagggcttgacacgctcgttagctaaagagctacctcctggattggcagccattgctcttagccctggtgttgtgaatactgacatgcttaattcatgctttggaagctctgccgcattatatcaaacaactgaaacatgggcacccaaggcagctacaatgatactaagcctttcactggacgataacggtgcttccttgactgtatgaagtcgtgaaattctgtgctcaactgattgctgatgggttctcttcatctcttgtagcctgatgtgtagatttttgcgagattatggtgatgtaaaatagtagtgataatgcgtgtctgcactctgatgtccctagctgctgtctgaacgttgttgtttagcattacctctatggcctattcatatatactcaaatgg

SEQ ID NO: 132161 - DNA, 1395 bp, Zea Mays
gggacaatcatcctcctagatactggattaggaagatggttgctctttttggtccctcagttgatgagatgaatgaaaaggcgagtcataccccagattttagaagttcagtgggctctgataggaagaaacttaaaatttccagcaacagatatgtttcaagaggatctaggaacgaagatgtgcatacacgacactctcctcaagattattcacattctaagcaagaacgaagtagccacaacatgaattatgagtacagacgacataaaagagattcttcagcagcagataagcaccgaagacaagatgttggagatacaaatgacagacaattttcaacaatgggaaatgacagcaagtcccataggcataagcatgaagaacggcatagaagtgatcatggtaatggagaaaaagaagatgacagcaaaactaggcctaggaagcactgttctgttaggcgtggaagtttggaggttggatattctgactggtctccagacttcactggtacagacaacagcaagggtccttcaggtgagaagtccactagcaggtatgatgatgccaaagggagcaggaggggatcatcagagtattacaatcttgaaagacaccactctacagctcaaaaacaatcaagaaatgagcacagcactacaagacgcaggagacatgacattgaagattatcatgatgaaaaaaatgacggaagaggggaatcccgaaagcataaccgccatgaatcaaacgaccggtgggtagccacaaatagtgatgttgattcggatgtagatagatatcagagttcaagctgtaaaggcactaggttgggaaggaaggatgatgatccaggcattgaagttcggcatcagaggtcaggtagaagtacgaaggatgacaagagaaggaaacatcacagtggaaacaggtggcacagcggcactgaagagggtacctcagattcaagcggtggagatttgagctctgattcgtggagtggtagatcgagaaacagtgagaacttttcagcacacaggtcaaagaggaagcgaagtcggagcaaggagtctggttattagttgtaaatagttagcctctttttggagcacatgaattcgtaggaatcgtgcagaaattttacaggaatcggtttaacttcgcacgaaaaatttcccgcactccaaacatgcggtagtggcttcttgatattctactgtatgctttcaccgtttcgcttacaagttctgttactgtacactgcggtagtgcggttcatagcattgctcaattccggacccgttctcaagcgtctggctatgttaatacaggtattatttccgtgctatacctttcagaattttgatctcgatgaataacctcactgataaa

SEQ ID NO: 132162 - DNA, 819 bp, Zea Mays
atgtcggccttagcggcgggcggtggcgccgccgccgatggtgccccggaggcgacagcggcgccgacaaggagggagaagcggagggagcggaagaaggagcgccgccggagggcgcggaggcaggccgcggcgcgcgctcgtgcggcggtcgaggcggaggcacccgcggtcgaccccgaggaggagcgccgactccttgagatccaggaggccgaggcggctgctgagtccgagcgtgcgctccgcgccttcgaggacgccgagcgccggtggctcgaggccgccgctgcccgcgccgcagagaaggccgcggctgctgcggccgaagaggatgcaagggctgcggaggcttccgctcgaaacaagcctaaagatggccaaggaaaccagtcagaagaagatagtgaatgggaatatgttgaagatggtccagcagaaattatatggaaaggaaatgagatcattgtgaagaagaaaaaggttaaagtaccaaaggggtccaaggaaaagctgcaaattcaggaggataaggcccattgtccatttcatctcaagacaggggcttgtcgctttggattgcgctgcagcagagttcacttttaccctgataaatcaatcacattgctaatgaaaaacatgtataacggtccaggccttgctttggagcaagatgaagggcttgagttcacagatgaagagattgaacaaagctatgaagaattttatgaagatgtacatacagaatttctgaaatttggtgaacttgtgaatttcaagggtcgtggttgccttagtgagagagagttggagaattag

SEQ ID NO: 132163 - DNA, 2832 bp, Zea Mays
agacaaccaaacgaacccgcccggagcagcaaagcataggcgctcgagcgctccctcctgagctcctccgcctcacggtcacgcctcgtgtccccccaccccctcctcgtcctccaccggccgcctcacgccgtcacctccgctcggcgagtctcggctccgaccccagccgccacgtgcgacctcccctactcctgactcctgagaggtaagatcttctacctccccgctctccggctcctccgctaccctgaattccgcgggttcaggaggggtctaacggctacctcgctgctaccgcgcgcgcagatctgcggggctcggcatggggtgaccagatcgggccgctgctcggtgctttccagctgaattctgcccgcagctcgtgtcggaggcagcggagatggcggaggccggcgtggcacgcggctcagggagtgctggcgatgctttgttcagggaactctggcatgcttgtgctgggccgttggtcacagtgcctcgccaaggcgagctggtttattacttcccgcagggtcatatggaacagcttgaagcgtctacagatcaacaacttgatcagcacttgcctttgtttaatctaccgcacaagatcctctgcaaggtggtcaatgtagaacttagagctgaaactgattctgatgaagtttatgctcaaattatgctgcaaccacaaacagagcaaagtgagcccaccagcccagatcctgaaccacctgagcctgaaagatgcaacattcattccttctgcaagaccttgactgcttcagatacaagtacccatggtggattctctgtcctcaggaggcatgctgaagaatgtttgccccaactggacatgactcagaatccaccgtggcaagaactagtggctaaagatctccatggaaatgaatggcatttccgtcacatctttcgagggcaaccaaggaggcatctacttacaacaggctggagtgtttttgttagctcaaaaagattggttgcgggtgacgcgtttatcttcttgagaggtgagaacggagagctgcgagtcggggtaaggaggctcatgagacaactaaataacatgccgtcttcggttatctcaagccacagcatgcatcttggagtcctagcaactgcatctcatgccatctccactggaactctcttttctgttttctacaaacccagaacaagtagatctgaatttgtcgttagtgtaaacaagtacctcgaagctaagaatcacaagatgtctgttggtatgaggtttaaaatgagatttgagggtgatgaatcccctgaaagaagattcagtgggacaattattggtatgggatgcatgccagctaactcaacatctccatgggctaactctgaatggagatcattgaaggtccaatgggacgagccttccgctattctgcgtccagatagagtttcaccatgggaagtagaaccccttgatcgaacaaatccacagccacctcaacctcctttacggaataagcgagcacggcctcctgcttcaccttcgattgctccagaacttgctccagtttttggtttttggaagtccccagctgagcctgcccaagctttctcattctcaggactgcagcgaactcaggagctataccattcaagccccagttcaatgttctcatcgtcgttgaatgtgggattcaatccaaagtacgagggtcccactccaaacaccaaccatttgtactggacaatgagagagacaagaactgaatcctactccgctagtatcaacaaagctccaactgaaaagaagcaagaatccactacttctggctgcagattgttcggtatcgagataggttcttctgcagtgtcacccgtggttactgttgctagcgtcgggcatgatcctccgccacctgctctctcagtagacgctgaatctgaccagctgtcacagccgtcccatgccaacaaagcaacggatgccccagcggcaagcagcgatcgctctcctaacgagacagagagccggcaagccaggagctgcaccaaggtaatcatgcaaggggtggcggttggccgggcggtggacttgacgaggctagatgggtacgatgacctccgccgcaagttggaggagatgttcgatatcccgggagagctttccgccagcctcaagaaatggaaggtgatctacacagatgacgaggacgatatgatgctggtcggggacgatccatggagtgaattttgcaggatggtaaaaaggatatacatttattcctacgaggaggccaagtctttgactcccaaggcgaagctgccggccatcggtggtgacaccggcgtcaagccggacccaagcaaactgccaccagaatccgacgtgccacagagcgactccgacaacagtgctcccgttgctgctgataaggactgatggacgctagctcggccgtaccttccctttggatgttggccatgggaggcaagtgcagtgcccatgctccttgagactgctaagagttgatcatctgttccatctgcctcggcttggaccagcgaggatggccgggagggagtgcatgacgttctgtgcgtgtttcgtttgccgtgtttggtaggagccatggcttgttgccggctacttcggttctgtagactgttacactgactgctgccgtctcacctggccgtcggcgcgggccgccccctctcacctctctagtaatatatactagggcttatgtacacagctgttttggtagtggcatatgtatatcgtcggtcatgttgcttgcgacatttagcatcctccgtagctgctatttcctc

SEQ ID NO: 132164 - DNA, 1167 bp, Zea Mays
cgaccggcgatgcgtccgccggcgccgaaggtcccatccgccgcttcctcgtcctcccacagccagcgcgagccccgcccggagaaccctctcctcctcctcccctcctctcgcttcaccaagctctcactcggctgtcccctcctcgaccgcctcctctgcggcggcctccccgccgcctccgttaccgagatagccggcgagtctgcctctggaaagactcagctctgtcttcagctcgccctcctggcgcccctgtccccgctctccgcctcctccctcttcctccactccgacctcccattcccccttcaccgcctccgccgcctagcccccaaatcccgccccgatatcctcgaccacgtcctcgtcgccgccgcgcactcccccaccgaccttctgtccctcctcgcccgcgcccagcgactgctcgccaaccccggccgctccccgcaccgcctccccatccgcctcatcctcctcgactccatcgcttccctctttcgtggcgacttcgacgcctcccccgctgacctcaggcgccggtccgcgctcttcttccagatatcggcgaagctcaaggagctcgcttacaggcaccagtgtgtggtggtggtgaccaaccaggtggtggacgtggtggagggggacgccgggaacaccgtggcgtggtcgtcggggcgccgtctgagcccggcgctcgggatcgcctgggccaactgcgtcaacacgcgcctgttcctgacgcgggaggtggaagggaatggcaccagcgggagcgcaaggaggtggatgaaagtggcgtttgcgccgcacctgccagagcaatcgtgcgagtttgtgatacggagggacggcgtctttggcgtcgagccggagaggtaggcgctcctcttggtcttttgtcaggactttacagaggaagtgtgtgaccataacctgtttgatgaaatgtccccgttggtagttagatttcacacaccctgtaaaagattcaaaatattttactattttacttcaattgttaagaatggatgtgaagccatgcatgtaaattagacgtgtcacaacacaacggacaagtgattgaacctttctggggaaagagttattgtagaaatcatcatggctagttttgaagtctgaaatcagaacctaagttctgtc

SEQ ID NO: 132165 - DNA, 1618 bp, Zea Mays
tgacttttgagctggcgcgggacgcacagcacactgacacacacacacggtggttggccttggccccaccccttcaccaacaaggattccaagtcagaagcgccaacagcaagatgtacgcggcgtcctctcatccgggcaccagctccagtagcagcatggaggaatcccatggcatcgtcatcgtaggcggcggcatctgcggcctcgccaccgctcttgcactccaccggaaaggaatcgcgagccttgtgctggagaagtcggaggctctgagagtagatggcggctccatcggcgtccatgtcaacggatggcgcgttctggagcagctcggggtcgccgcagagctccgggagactgccaaccttgtcaccgcgttccacgacgtgtggcaggacgaaaagaagagcaccctgacacccgtcaggaaggagctccggtggctgaagaggaaggacctgctggagacgatggccaaggacatacccgcaggagcgatccgtctgggctgccacgtcacggccatccacccgtcggatcccggcgtggtccttactactacaccggccggcggcggcggcggcggcgtcatcagagccaaggtgctgattggctgtgacggctccaactcggtggtggcgaagtacctaggcatgtccccgtccaaaccgactcctccgcgcacgtatctgcgtgggttcacgacgtaccggcacgggcaccccttcggagaccgtttcctgcgcctgaggggcaggcgcttcttcgtcgggcgctcgcccatgaccgacacccgagtcagcttcttcgtggcctgccacgtcccttctgctgccaccagcagcagcagcagggtggtcgacgcgcgcgacacgaggcatgccgtgctgcagaagctgcgagaccagcggtgccccgccgaggtcgtcgagatggtgcgggacgccgaccccgactcgctgaatgtggtcaccagggtgtggtaccgcccgccgtggcaggtcgcgctcgccgccttccggaagggcgccgtgacggtggccggcgacgccatgcacgccatggggtcgtacatcggccagggcggctcggcggcgctggaggacgccctcgtgctcgcccggtcgctggcgcgagcgcgggccgccgccgccgggggccgtgatgacggcgacgacgagccgtttcttctcggtgcggcgacggcgatccgggagtacgtcagggagaggaggctgagggtggcgaggctgtcgttggaggccttcgtcatgggggagctgctgcgagccaagtcgatggccacgaagctcgcctgcatggccatcctggctctcctcggcaccaaggcactcggccacaccaactacgactgcggccgcctgtaacagactaacagtgctttgcttattgcgtcttttagcatctatgcactggtgtctctagatatctttattaaacatgtaagaatcatctcaacgaatgttggataaatattttaattgatgttatctttttttttcaattggtgttatgacatatatctatcatatgacatatatcatcgtttcttactctctttctctataaccataaaatcaacctagcatgggta

SEQ ID NO: 132166 - DNA, 1702 bp, Zea Mays
tgacttttgagctggcgcgggacgcacagcacactgacacacacacacggtggttggccttggccccaccccttcaccaacaaggattccaagtcagaagcgccaacagcaagatgtacgcggcgtcctctcatccgggcaccagctccagtagcagcatggaggaatcccatggcatcgtcatcgtaggcggcggcatctgcggcctcgccaccgctcttgcactccaccggaaaggaatcgcgagccttgtgctggagaagtcggaggctctgagagtagatggcggctccatcggcgtccatgtcaacggatggcgcgttctggagcagctcggggtcgccgcagagctccgggagactgccaaccttgtcaccgccttcatacgtttgagaatgcccttgatttcataccaaatgccaccagatcagattcagaaccagcgtagcttgcccaattgtttccaggttccacgacgtgtggcaggacgaaaagaagagcaccctgacacccgtcaggagctccggtggctgaagaggaaggacctgctggagacgatggccaaggacatacccgcaggagcgatccgtctgggctgccacgtcacggccatccacccgtcggatcccggcgtggtccttactactacaccggccggcggcggcggcggcggcgtcatcagagccaaggtgctgattggctgtgacggctccaactcggtggtggcgaagtacctaggcatgtccccgtccaaaccgactcctccgcgcacgtatctgcgtgggttcacgacgtaccggcacgggcaccccttcggagaccgtttcctgcgcctgaggggcaggcgcttcttcgtcgggcgctcgcccatgaccgacacccgagtcagcttcttcgtggcctgccacgtcccttctgctgccaccagcagcagcagcagggtggtcgacgcgcgcgacacgaggcatgccgtgctgcagaagctgcgagaccagcggtgccccgccgaggtcgtcgagatggtgcgggacgccgaccccgactcgctgaatgtggtcaccagggtgtggtaccgcccgccgtggcaggtcgcgctcgccgccttccggaagggcgccgtgacggtggccggcgacgccatgcacgccatggggtcgtacatcggccagggcggctcggcggcgctggaggacgccctcgtgctcgcccggtcgctggcgcgagcgcgggccgccgccgccgggggccgtgatgacggcgacgacgagccgtttcttctcggtgcggcgacggcgatccgggagtacgtcagggagaggaggctgagggtggcgaggctgtcgttggaggccttcgtcatgggggagctgctgcgagccaagtcgatggccacgaagctcgcctgcatggccatcctggctctcctcggcaccaaggcactcggccacaccaactacgactgcggccgcctgtaacagactaacagtgctttgcttattgcgtcttttagcatctatgcactggtgtctctagatatctttattaaacatgtaagaatcatctcaacgaatgttggataaatattttaattgatgttatctttttttttcaattggtgttatgacatatatctatcatatgacatatatcatcgtttcttactctctttctctataaccataaaatcaacctagcatgggta

SEQ ID NO: 132167 - DNA, 121 bp, Zea Mays
gtcttctccgcgccccgggcgcgcggtcgcgttggagggaggcccattgctacaggtgcacgtcgaggcttgcaagggacggcgtccttcaggttcacaggtaggtttgcctcttgacttc

SEQ ID NO: 132168 - DNA, 2218 bp, Zea Mays
acacggggcaggcatgcgcccaggcggacgagagctgacgctggaggaacgacagaggagagggagaggcggacgtgagcaacatgatgaattagctcgtataaattttccggtccagaggcgagccacgcgtcggaatgcaagtgggttccacctccgtcggatgcggacgtgcgaggtcaggaacctgattcacatcccctattcccctggcgctggcgctggcggcctgcggcctggcctaagcctaattggggcgcacgtcccccgtctgtcgtgcgcgccactaccccacctggccacctcagctccacgcctccaccacaccagctccccttcgtttattcgccgccggctccgggcgatgggcggcctctgctccaaggagggcgtcgtggaggcgccgccccccgcgccccgccaccccgtgtcgcagctgcagaaggcgtcgagtcagtccctgaagcagctcatcacgctcaccgccaaggaggaggagaacgccgtcgccgcccggacggaatccaacgccaaggtcaacggcggtatcggcatcggcgcgcccgcgccggccaaagggtccgtggagaagaccgcgcctcccgtcgtggtcatcacgtccctcagcaagtcctacagcaccgccggggcgcccacgcaccaccggtgcgtcacggtggacgtcggcgggagcaacaccccggcggccgcggactgcggcgagcagatccacatcctccggcggctggaccaccccaacgtgatcaggctggagggcatcgtcacctcgcgcctctcgcacagcctctacctcgtcttcgagtacatggagcacgacctcgccggcctcgccgcgctgtccggccagcgcttcacggagccgcaggtcaagtgcctcatgcgccagatcctcgagggcctgagccactgccacgcgcggagcgtcctgcaccgggatatcaagggctccaacctcctcatcgacgacaacggcctgctccggatcgccgacttcgggctcgccaccttcttcgaccctggcaagcggcagcccatgaccagccgcgtcgtcacgctctggtaccgcccgccggagctcctgctcggcgcaaccgagtacggcgtcgccgtagacctgtggagcaccggctgcatccttgccgagctgctcgcgggcaagcccatcatgcccggccagaccgagatcgagcagctgcacaagatcttcaagctttgtggctcgccgtccgaggactactgggccaaggcgaagctaccggacgtgacgctcttcaagccgcagcggccgtaccggcgcaagatcgccgagacgttcaaggacttcccgccctcggccctggcgctcctggacacgctgctcgccatcgagccgtcggcacggggcacggtggcctctgctctggacagcgagttcttcaggaccaagccgctggcgtgtgatccggcgagcctgcccaagtacccgccgtgcaaggagtacgacgccaagctccgaggccaggaggtcagcaggcaaaacgcagcgggcctcggaggcaagggctctgtatccgtcaaaccggggagagacgacgccaagggcgccgcgccagctcaggacgccattgccgactaccagcggaggcacaggcaggcgcgcgccaaccagaagagcaccagccaccactacagctcgcaggaggacagcgtgccgggcttccgcatcgagccgccgccaccgggcatggccgtggccgcggccgcgcgcgggccggcgacgctgcaggccggcgggttcgggtcgacgtggtacaggagcgaccctcgggcggtcccccgcgcgtccagctccgtcagggcggccgcgtcgcacctcacctcgcagcggtcctacgcgcagtccaggggcaccgacctgcacccgagctcgtcggccgccagcgccagcaacgccaaccccaggtacaatcggctcgacgtcgcggagccggccagcggcgtgggccgccccggctcctcctcccaccagaaggacttcggcatgagggacgcgtccgccggtttcggagggaggaacaagaggatgcattactcggggccgctggtgccgcccggcggcaacatggatgacatgctcaaggagcacgagaggcagatccagcaggccgtgcgcaaggcgcgggtcgagaaggagaagaccaacaggcaccattactaa

SEQ ID NO: 132169 - DNA, 90 bp, Zea Mays
ttcattgcagtttgcggagcgctttgtcgataaatttcttcctccaacaagattgcttgatgattttgacttctgcacagcttcagccta

SEQ ID NO: 132170 - DNA, 681 bp, Zea Mays
tatttcgttttgtcttctgactccggtccggtaagtaatcagagtccaggcggcagcacagcagcttcctttcctccggcgatggcgaagaatcccaaagatgccgctccggaggaggagatgcccgccgcggccgaggaacaggcagcgcctgccgcgacggtgaaggtgctcttcttcgcccgcgcgcgggacctaacgggcgtggcggattccgcggtggaggtgccgccggggagcaccgcgggggagtgcctcgcgcgggtcctagcccagttccccaagctggaggagatccggggctccgtcgtgctcgcgctcaacgaggagtacgcggccgactcggccgcggtcgccgacggcgacgagctcgctgtcataccgcccatcagtggcggctgacgttattaaccacggccgacttgtgtggaggttaccaagccaactctaaaggtagccatcttcaaaagtgcaacggtggagtttgagaatccatcacagagccgacgtgacacatatatgtgttgcggaaacgtggtgctctctggtcctcggacgtggaaatgacaagccaacgatagagtgttgaatgatgtggctaaatcgtatttccattttttgcaaatctaggtaataattagctgactaaaaatcattaatagaattaactggtgttgacgt

SEQ ID NO: 132171 - DNA, 691 bp, Zea Mays
acttgcgtgccaattcatccccagtggtaaattggaagttactagaacgaacagccgtttcgtatttcgttttgtcttctgactccggtccggtaagtaatcagagtccaggcggcagcacagcagcttcctttcctccggcgatggcgaagaatcccaaagatgccgctccggaggaggagatgcccgccgcggccgaggaacaggcagcgcctgccgcgacggtgaaggtgctcttcttcgcccgcgcgcgggacctaacgggcgtggcggattccgcggtggaggtgccgccggggagcaccgcgggggagtgcctcgcgcgggtcctagcccagttccccaagctggaggagatccggggctccgtcgtgctcgcgctcaacgaggagtacgcggccgactcggccgcggtcgccgacggcgacgagctcgctgtcataccgcccatcagtggcggctgacgttattaaccacggccgacttgtgtggaggtaataaaagatatgaagacatcgatcgttgaggaaaaaaaaaagagagaagaaaggttcctctcccttcttcatggtcagtttatcaccacgaatgattgaaattattatatgctcgataaaataatctcttgttcttgattacaattttgttcacgttgatcaatagttttttgttgtcaaagaatggatgaaat

SEQ ID NO: 132172 - DNA, 2018 bp, Zea Mays
tatcatgatgataagtctttcctatgtcttatttccatgtgccctcctgcataaacaaccttgaacgtccatatctcaacacctctgcaaactgttcgttctgacacagtacatttcaaaccgacggccacgggagatcatccgcgaccaacgcacaaggcccaagacgacaacgcgcaagcagcccttaggcgacgaggtcgtattcgtcgcgcgctggtggcacgacgtcgagtcgcatcatgctccggtacgccacgggcacgggcgcgccagcctgcacgcacagctccaccaccgcgggggccttaccgtagtaccgcttgagctcgttggccaaaggcgattcctcgccggcaaggtccgcgacgtgccacacgtagttgggcgggaccaggtcgtccaccgtggcttcctgccatgcgtgctgtccgtcccgctgctggtgcttggtggccctgcacatccgcaccttgtgccccttgggaccgacctgcacctccgggcagtagccgcaggtgtgcacgctgtacttcttcatcagcttcgctgcgccggatttcatgtccagccacgattgcagtgtcctcgacgctagctcaggcacggtgatctccgcctcttccccctctccgttaacaacagcagcagaagaagaagaactagttccgatcgcggcgattgccaccgctggaggcagcgatggtctgcacgctggcggttcatgtaacgtcctggctgcttcgtcgtcgtcgacgtcgggctcgaagtccacgatcctgccttcaatggagtagactggcctggtgcgccgcttggtcgggtagcgctggacatcgacgccggcctggatgcagagctccaggaccgctgggagcctcggcacgtcgtacttctccttgtgcacgactctgggcttcccgacgcggtcgaacaggtggtagcagtaggggaagccgacgacatcccgcacggtccccggccgccacacgtgcagggagttcctcgcgccactgttacgcccctcgcacgtcctgatctcgtggccgacgcggccgacgtgcacctccgagcaaaacctggcgacaagaacatttcgtcatgccatggttccatccgagcagagacagagtgtccctcacctgcatcgcttcaccgggacagcgccctccacgagcctggtcaggccgccgaggagcccctccctcgcggcgtgcacgcgccgggcgacgtcgacgaggtgcggcacaacaaggccgttgtcgggtgggtgctcgagcacgcggcacgggttctcccggcgggcctgcctctcctccttggcccgccggatgagcaccttcatcggcgtcacgtacggcttccgctcccacttcctaccagcgcgaggcacgtccacgtacgggaccgccgcctcgtcctcctccgaggccactgtccgcccgctgccctgcagccatcttgcccgcgcggttagctgccgcgggaggagaacccgcagcgacgctctggatcggacaccgaggttcccctgcatctgtcagacgtgcgcagcggcgctaggactgaaacggcattctgtcaagcacctgacgagcgtgatcgggcattggggggaacacgctcacgcaaacgtgcagcagcgttcggcggtcgcgcgtaagggaagaggcaggcgcgggcgagctcaggctgcgcgtagaggtagagacagccgctggcgagcacaattgaattcggcaagctgccaacaatagcggcagtggcggacggcggacctagccaaacatttcatgtagggcgccgcggatgcgcgtagaggcaactgagtactgctgcctgcctgccgatcaaccacgcactgggatctgagagagggagcggggagcggccaagcagggagccgccgcggcgccgcgtgcccgtaccgaccggcgaccgaccgccttccgccttggagcaccgctcccgccgccaactgcccgagtccgtaggcggccggtggggtcgtggggagc

SEQ ID NO: 132173 - DNA, 2602 bp, Zea Mays
ttgattccccctcttcatatttccgttcccctgtacccgcgtggtcttcgatcttgccaagtttcacatcggcgcagttttggtcgcaaaggcgtggtcgttctcctcgagcatcgatttagggttcttcggctttctatgatcaggaggagttgctggattattttatcagggaacagaatggtgtgattcgttgattggattacagtctggatctctcttgcatcaaatggttgagcaaggcaaaccacgaagcatcccgacgaaggcgaagaaatcgccgttcgtggaggtagaggttgacgagattggccaggctagtggggtggtgtttgcaagggaatcaccgctggcgcctaagagcgaccaaggatgcagcgttagccatagtcatggcgacgacgaaacacatgaatcggatgggtgcgtgcaaagccaggggctagacgagcatgggtgggtggacttcggtcactcactgcagctggtgctgttctcgcgacagtggagcctcgctgaaagtcttgttgacctagcagatcagcagccgatgctggattatggcctgtcgattgcccttgatgccatatggtttttgcggacgaaacaggatcttgaggggctcaacagtctgatatcgaagattgtggcctcaggggcaaaggattttgcaagagcaatcctcaggacatcgctgctcgcgtcatgtgttgcagcgtgccaaagcaaggctatcactgtgggtaacagcaaggagatcgtcgcagagagattgcatgatcgtctgcgagattgtccaggtgctgagcatctaaaaatagaggcaggtgccaaggtgcagaagttcatggaatgggctttacagtgtattcatatgcatcattgttctgaagatacacatatgtacagatggaactacaatactctccaagaggtacagcttcatgtatcagcatttaggaccttcttggacatagctggtgacaacttaagtggcaagatttttactgaggcatttgatgcggtctgcttcccccttacactcttctcaagtttatttgaacctggatggtcttctgggagttcagcagtctccattaagggccttttatcattgctggtggaaggaggcgctgacaatgtaaatcagtgttttcttgaagcagcgcgctttggaagtactgaacttgtacgcattctgctgaaggtcgcatatcagaatagcttggctgtggacaccgatctggctctggtgtatgcctcacattactgcaagttcaaaacaatggaatgcctagttgatgaagggaacgtgagttctttccttggccctctgataaaagctgcagagcgtgggtgcttgcaggttgtccactggttcgtcagtcgaggcgtctctgacattgagatgtgccttgccctgacgactgctgcctccagcggccatttcgtagtggcgtcgtacatgcttgcacatatccctcagcaaatccttgaagctctcagcacacagatcctcaaagccgcgaggggccagggcagcaggccgcttgatggtgtcaccttccttctgagatccaacttcctaagagacgcagctgcaacatatgaggccgcagacatcattgcaaccgggggcaccaacggtgagctcccggacctggttgccttcctgaaagaacactggtcccaggacgcgtttgctgaaggggtgagcgccggtgaaatgcacttcgtgaatgtcatgagggtcctcaggagaggggcgtccccgatctgcctggaggacctcccgcctgagatggtgctcggcatcacgtacctgccactgtaccgtgagtgcctgagcgcgggtgggcagctgttgccccaaaggctgaggggggagctgctggaggcggtgcaccggctcggtgagcccgttggcccggagagccaggggaaggacctcgtgctggcactagagcgccacatgccgtcgttcttggttggatcctgagatgtttccaggttgtaaaagaagcttgtgcaggctataccttgctttaaaaaattgtatggagcagtgttgattaccaacttctggctgcggtggaatcagcaatagatttggcgcgtcacatgtctcgtgatcgtgtagaaagattttgtttttgttttgtattttgcatgagaaagaagtttctttcttgattgcctattgaaggggcctgttcttgttgccagctgagctcttccaattattttccgggctgcgcacgagacgtacatgtgtgctagtggtgctgttagtctagtttgtgttgtgttgtgttgagtgtatgcgttgtgtgcgcgcgggcgcgtgtggtggtgctaagagtagtttctgcgtatactgggccttcagtggtatgcctggtaatctcaataagtatcgctttcaagacatggattcttcagcaaaagggtatttgatgcatgccttggtgggagtaatgtctaggttccgttccttccaagtcggccgtatacattttgttttttagatttagtttacaacatctgaacccacaatcttaatgtgtcatgggttgtcatatattttataccacatttgtct

SEQ ID NO: 132174 - DNA, 2610 bp, Zea Mays
ttgattccccctcttcatatttccgttcccctgtacccgcgtggtcttcgatcttgccaagtttcacgtttgcagatcggcgcagttttggtcgcaaaggcgtggtcgttctcctcgagcatcgatttagggttcttcggctttctatgatcaggaggagttgctggattattttatcagggaacagaatggtgtgattcgttgattggattacagtctggatctctcttgcatcaaatggttgagcaaggcaaaccacgaagcatcccgacgaaggcgaagaaatcgccgttcgtggaggtagaggttgacgagattggccaggctagtggggtggtgtttgcaagggaatcaccgctggcgcctaagagcgaccaaggatgcagcgttagccatagtcatggcgacgacgaaacacatgaatcggatgggtgcgtgcaaagccaggggctagacgagcatgggtgggtggacttcggtcactcactgcagctggtgctgttctcgcgacagtggagcctcgctgaaagtcttgttgacctagcagatcagcagccgatgctggattatggcctgtcgattgcccttgatgccatatggtttttgcggacgaaacaggatcttgaggggctcaacagtctgatatcgaagattgtggcctcaggggcaaaggattttgcaagagcaatcctcaggacatcgctgctcgcgtcatgtgttgcagcgtgccaaagcaaggctatcactgtgggtaacagcaaggagatcgtcgcagagagattgcatgatcgtctgcgagattgtccaggtgctgagcatctaaaaatagaggcaggtgccaaggtgcagaagttcatggaatgggctttacagtgtattcatatgcatcattgttctgaagatacacatatgtacagatggaactacaatactctccaagaggtacagcttcatgtatcagcatttaggaccttcttggacatagctggtgacaacttaagtggcaagatttttactgaggcatttgatgcggtctgcttcccccttacactcttctcaagtttatttgaacctggatggtcttctgggagttcagcagtctccattaagggccttttatcattgctggtggaaggaggcgctgacaatgtaaatcagtgttttcttgaagcagcgcgctttggaagtactgaacttgtacgcattctgctgaaggtcgcatatcagaatagcttggctgtggacaccgatctggctctggtgtatgcctcacattactgcaagttcaaaacaatggaatgcctagttgatgaagggaacgtgagttctttccttggccctctgataaaagctgcagagcgtgggtgcttgcaggttgtccactggttcgtcagtcgaggcgtctctgacattgagatgtgccttgccctgacgactgctgcctccagcggccatttcgtagtggcgtcgtacatgcttgcacatatccctcagcaaatccttgaagctctcagcacacagatcctcaaagccgcgaggggccagggcagcaggccgcttgatggtgtcaccttccttctgagatccaacttcctaagagacgcagctgcaacatatgaggccgcagacatcattgcaaccgggggcaccaacggtgagctcccggacctggttgccttcctgaaagaacactggtcccaggacgcgtttgctgaaggggtgagcgccggtgaaatgcacttcgtgaatgtcatgagggtcctcaggagaggggcgtccccgatctgcctggaggacctcccgcctgagatggtgctcggcatcacgtacctgccactgtaccgtgagtgcctgagcgcgggtgggcagctgttgccccaaaggctgaggggggagctgctggaggcggtgcaccggctcggtgagcccgttggcccggagagccaggggaaggacctcgtgctggcactagagcgccacatgccgtcgttcttggttggatcctgagatgtttccaggttgtaaaagaagcttgtgcaggctataccttgctttaaaaaattgtatggagcagtgttgattaccaacttctggctgcggtggaatcagcaatagatttggcgcgtcacatgtctcgtgatcgtgtagaaagattttgtttttgttttgtattttgcatgagaaagaagtttctttcttgattgcctattgaaggggcctgttcttgttgccagctgagctcttccaattattttccgggctgcgcacgagacgtacatgtgtgctagtggtgctgttagtctagtttgtgttgtgttgtgttgagtgtatgcgttgtgtgcgcgcgggcgcgtgtggtggtgctaagagtagtttctgcgtatactgggccttcagtggtatgcctggtaatctcaataagtatcgctttcaagacatggattcttcagcaaaagggtatttgatgcatgccttggtgggagtaatgtctaggttccgttccttccaagtcggccgtatacattttgttttttagatttagtttacaacatctgaacccacaatcttaatgtgtcatgggttgtcatatattttataccacatttgtct

SEQ ID NO: 132175 - DNA, 2629 bp, Zea Mays
ttgattccccctcttcatatttccgttcccctgtacccgcgtggtcttcgatcttgccaagtttcacgttcgatctcgctgccccccaaaacttatcggcgcagttttggtcgcaaaggcgtggtcgttctcctcgagcatcgatttagggttcttcggctttctatgatcaggaggagttgctggattattttatcagggaacagaatggtgtgattcgttgattggattacagtctggatctctcttgcatcaaatggttgagcaaggcaaaccacgaagcatcccgacgaaggcgaagaaatcgccgttcgtggaggtagaggttgacgagattggccaggctagtggggtggtgtttgcaagggaatcaccgctggcgcctaagagcgaccaaggatgcagcgttagccatagtcatggcgacgacgaaacacatgaatcggatgggtgcgtgcaaagccaggggctagacgagcatgggtgggtggacttcggtcactcactgcagctggtgctgttctcgcgacagtggagcctcgctgaaagtcttgttgacctagcagatcagcagccgatgctggattatggcctgtcgattgcccttgatgccatatggtttttgcggacgaaacaggatcttgaggggctcaacagtctgatatcgaagattgtggcctcaggggcaaaggattttgcaagagcaatcctcaggacatcgctgctcgcgtcatgtgttgcagcgtgccaaagcaaggctatcactgtgggtaacagcaaggagatcgtcgcagagagattgcatgatcgtctgcgagattgtccaggtgctgagcatctaaaaatagaggcaggtgccaaggtgcagaagttcatggaatgggctttacagtgtattcatatgcatcattgttctgaagatacacatatgtacagatggaactacaatactctccaagaggtacagcttcatgtatcagcatttaggaccttcttggacatagctggtgacaacttaagtggcaagatttttactgaggcatttgatgcggtctgcttcccccttacactcttctcaagtttatttgaacctggatggtcttctgggagttcagcagtctccattaagggccttttatcattgctggtggaaggaggcgctgacaatgtaaatcagtgttttcttgaagcagcgcgctttggaagtactgaacttgtacgcattctgctgaaggtcgcatatcagaatagcttggctgtggacaccgatctggctctggtgtatgcctcacattactgcaagttcaaaacaatggaatgcctagttgatgaagggaacgtgagttctttccttggccctctgataaaagctgcagagcgtgggtgcttgcaggttgtccactggttcgtcagtcgaggcgtctctgacattgagatgtgccttgccctgacgactgctgcctccagcggccatttcgtagtggcgtcgtacatgcttgcacatatccctcagcaaatccttgaagctctcagcacacagatcctcaaagccgcgaggggccagggcagcaggccgcttgatggtgtcaccttccttctgagatccaacttcctaagagacgcagctgcaacatatgaggccgcagacatcattgcaaccgggggcaccaacggtgagctcccggacctggttgccttcctgaaagaacactggtcccaggacgcgtttgctgaaggggtgagcgccggtgaaatgcacttcgtgaatgtcatgagggtcctcaggagaggggcgtccccgatctgcctggaggacctcccgcctgagatggtgctcggcatcacgtacctgccactgtaccgtgagtgcctgagcgcgggtgggcagctgttgccccaaaggctgaggggggagctgctggaggcggtgcaccggctcggtgagcccgttggcccggagagccaggggaaggacctcgtgctggcactagagcgccacatgccgtcgttcttggttggatcctgagatgtttccaggttgtaaaagaagcttgtgcaggctataccttgctttaaaaaattgtatggagcagtgttgattaccaacttctggctgcggtggaatcagcaatagatttggcgcgtcacatgtctcgtgatcgtgtagaaagattttgtttttgttttgtattttgcatgagaaagaagtttctttcttgattgcctattgaaggggcctgttcttgttgccagctgagctcttccaattattttccgggctgcgcacgagacgtacatgtgtgctagtggtgctgttagtctagtttgtgttgtgttgtgttgagtgtatgcgttgtgtgcgcgcgggcgcgtgtggtggtgctaagagtagtttctgcgtatactgggccttcagtggtatgcctggtaatctcaataagtatcgctttcaagacatggattcttcagcaaaagggtatttgatgcatgccttggtgggagtaatgtctaggttccgttccttccaagtcggccgtatacattttgttttttagatttagtttacaacatctgaacccacaatcttaatgtgtcatgggttgtcatatattttataccacatttgtct

SEQ ID NO: 132176 - DNA, 2637 bp, Zea Mays
ttgattccccctcttcatatttccgttcccctgtacccgcgtggtcttcgatcttgccaagtttcacgttcgatctcgctgccccccaaaacttgtttgcagatcggcgcagttttggtcgcaaaggcgtggtcgttctcctcgagcatcgatttagggttcttcggctttctatgatcaggaggagttgctggattattttatcagggaacagaatggtgtgattcgttgattggattacagtctggatctctcttgcatcaaatggttgagcaaggcaaaccacgaagcatcccgacgaaggcgaagaaatcgccgttcgtggaggtagaggttgacgagattggccaggctagtggggtggtgtttgcaagggaatcaccgctggcgcctaagagcgaccaaggatgcagcgttagccatagtcatggcgacgacgaaacacatgaatcggatgggtgcgtgcaaagccaggggctagacgagcatgggtgggtggacttcggtcactcactgcagctggtgctgttctcgcgacagtggagcctcgctgaaagtcttgttgacctagcagatcagcagccgatgctggattatggcctgtcgattgcccttgatgccatatggtttttgcggacgaaacaggatcttgaggggctcaacagtctgatatcgaagattgtggcctcaggggcaaaggattttgcaagagcaatcctcaggacatcgctgctcgcgtcatgtgttgcagcgtgccaaagcaaggctatcactgtgggtaacagcaaggagatcgtcgcagagagattgcatgatcgtctgcgagattgtccaggtgctgagcatctaaaaatagaggcaggtgccaaggtgcagaagttcatggaatgggctttacagtgtattcatatgcatcattgttctgaagatacacatatgtacagatggaactacaatactctccaagaggtacagcttcatgtatcagcatttaggaccttcttggacatagctggtgacaacttaagtggcaagatttttactgaggcatttgatgcggtctgcttcccccttacactcttctcaagtttatttgaacctggatggtcttctgggagttcagcagtctccattaagggccttttatcattgctggtggaaggaggcgctgacaatgtaaatcagtgttttcttgaagcagcgcgctttggaagtactgaacttgtacgcattctgctgaaggtcgcatatcagaatagcttggctgtggacaccgatctggctctggtgtatgcctcacattactgcaagttcaaaacaatggaatgcctagttgatgaagggaacgtgagttctttccttggccctctgataaaagctgcagagcgtgggtgcttgcaggttgtccactggttcgtcagtcgaggcgtctctgacattgagatgtgccttgccctgacgactgctgcctccagcggccatttcgtagtggcgtcgtacatgcttgcacatatccctcagcaaatccttgaagctctcagcacacagatcctcaaagccgcgaggggccagggcagcaggccgcttgatggtgtcaccttccttctgagatccaacttcctaagagacgcagctgcaacatatgaggccgcagacatcattgcaaccgggggcaccaacggtgagctcccggacctggttgccttcctgaaagaacactggtcccaggacgcgtttgctgaaggggtgagcgccggtgaaatgcacttcgtgaatgtcatgagggtcctcaggagaggggcgtccccgatctgcctggaggacctcccgcctgagatggtgctcggcatcacgtacctgccactgtaccgtgagtgcctgagcgcgggtgggcagctgttgccccaaaggctgaggggggagctgctggaggcggtgcaccggctcggtgagcccgttggcccggagagccaggggaaggacctcgtgctggcactagagcgccacatgccgtcgttcttggttggatcctgagatgtttccaggttgtaaaagaagcttgtgcaggctataccttgctttaaaaaattgtatggagcagtgttgattaccaacttctggctgcggtggaatcagcaatagatttggcgcgtcacatgtctcgtgatcgtgtagaaagattttgtttttgttttgtattttgcatgagaaagaagtttctttcttgattgcctattgaaggggcctgttcttgttgccagctgagctcttccaattattttccgggctgcgcacgagacgtacatgtgtgctagtggtgctgttagtctagtttgtgttgtgttgtgttgagtgtatgcgttgtgtgcgcgcgggcgcgtgtggtggtgctaagagtagtttctgcgtatactgggccttcagtggtatgcctggtaatctcaataagtatcgctttcaagacatggattcttcagcaaaagggtatttgatgcatgccttggtgggagtaatgtctaggttccgttccttccaagtcggccgtatacattttgttttttagatttagtttacaacatctgaacccacaatcttaatgtgtcatgggttgtcatatattttataccacatttgtct

SEQ ID NO: 132177 - DNA, 2642 bp, Zea Mays
ttgattccccctcttcatatttccgttcccctgtacccgcgtggtcttcgatcttgccaagtttcacgttcgatctcgctgccccccaaaacttgtttcgtttgcagatcggcgcagttttggtcgcaaaggcgtggtcgttctcctcgagcatcgatttagggttcttcggctttctatgatcaggaggagttgctggattattttatcagggaacagaatggtgtgattcgttgattggattacagtctggatctctcttgcatcaaatggttgagcaaggcaaaccacgaagcatcccgacgaaggcgaagaaatcgccgttcgtggaggtagaggttgacgagattggccaggctagtggggtggtgtttgcaagggaatcaccgctggcgcctaagagcgaccaaggatgcagcgttagccatagtcatggcgacgacgaaacacatgaatcggatgggtgcgtgcaaagccaggggctagacgagcatgggtgggtggacttcggtcactcactgcagctggtgctgttctcgcgacagtggagcctcgctgaaagtcttgttgacctagcagatcagcagccgatgctggattatggcctgtcgattgcccttgatgccatatggtttttgcggacgaaacaggatcttgaggggctcaacagtctgatatcgaagattgtggcctcaggggcaaaggattttgcaagagcaatcctcaggacatcgctgctcgcgtcatgtgttgcagcgtgccaaagcaaggctatcactgtgggtaacagcaaggagatcgtcgcagagagattgcatgatcgtctgcgagattgtccaggtgctgagcatctaaaaatagaggcaggtgccaaggtgcagaagttcatggaatgggctttacagtgtattcatatgcatcattgttctgaagatacacatatgtacagatggaactacaatactctccaagaggtacagcttcatgtatcagcatttaggaccttcttggacatagctggtgacaacttaagtggcaagatttttactgaggcatttgatgcggtctgcttcccccttacactcttctcaagtttatttgaacctggatggtcttctgggagttcagcagtctccattaagggccttttatcattgctggtggaaggaggcgctgacaatgtaaatcagtgttttcttgaagcagcgcgctttggaagtactgaacttgtacgcattctgctgaaggtcgcatatcagaatagcttggctgtggacaccgatctggctctggtgtatgcctcacattactgcaagttcaaaacaatggaatgcctagttgatgaagggaacgtgagttctttccttggccctctgataaaagctgcagagcgtgggtgcttgcaggttgtccactggttcgtcagtcgaggcgtctctgacattgagatgtgccttgccctgacgactgctgcctccagcggccatttcgtagtggcgtcgtacatgcttgcacatatccctcagcaaatccttgaagctctcagcacacagatcctcaaagccgcgaggggccagggcagcaggccgcttgatggtgtcaccttccttctgagatccaacttcctaagagacgcagctgcaacatatgaggccgcagacatcattgcaaccgggggcaccaacggtgagctcccggacctggttgccttcctgaaagaacactggtcccaggacgcgtttgctgaaggggtgagcgccggtgaaatgcacttcgtgaatgtcatgagggtcctcaggagaggggcgtccccgatctgcctggaggacctcccgcctgagatggtgctcggcatcacgtacctgccactgtaccgtgagtgcctgagcgcgggtgggcagctgttgccccaaaggctgaggggggagctgctggaggcggtgcaccggctcggtgagcccgttggcccggagagccaggggaaggacctcgtgctggcactagagcgccacatgccgtcgttcttggttggatcctgagatgtttccaggttgtaaaagaagcttgtgcaggctataccttgctttaaaaaattgtatggagcagtgttgattaccaacttctggctgcggtggaatcagcaatagatttggcgcgtcacatgtctcgtgatcgtgtagaaagattttgtttttgttttgtattttgcatgagaaagaagtttctttcttgattgcctattgaaggggcctgttcttgttgccagctgagctcttccaattattttccgggctgcgcacgagacgtacatgtgtgctagtggtgctgttagtctagtttgtgttgtgttgtgttgagtgtatgcgttgtgtgcgcgcgggcgcgtgtggtggtgctaagagtagtttctgcgtatactgggccttcagtggtatgcctggtaatctcaataagtatcgctttcaagacatggattcttcagcaaaagggtatttgatgcatgccttggtgggagtaatgtctaggttccgttccttccaagtcggccgtatacattttgttttttagatttagtttacaacatctgaacccacaatcttaatgtgtcatgggttgtcatatattttataccacatttgtct

SEQ ID NO: 132178 - DNA, 245 bp, Zea Mays
gccgacaaaagtgggttgagtccccaagcacttctggacgtactggaccttggcgccatcgcagacccgatgttcaagctgaaggggccgacaatgctgcaaggcagctacagccctgcgttccctctgaagcaccagcagaaggacatgaggctagctcttgcgctgggactgggagacgagaacgccgtagccatgccaacaggggggaccaggatttctcggcggtctacgaggctgtgaag

SEQ ID NO: 132179 - DNA, 442 bp, Zea Mays
ctcgctctcggtctcggactacggttgagcgaagtcgtcactgtaatctactgatctgcaaatggcggaggcggaggcgacggtggggcgactgatgctgtactcgtactggcgcagctcgtgctcccaccgtgcccgcatcgctctcaatctcaaaggtgtggattacgagtacaaggcggtgaaccttctcaagggcgagcagtctgatccagaattcgtcaagcttaatcctatgaagttcgtccctgcgttggttgatggcagttctgtaataggtgactcttacgcgataacactgtatttggaggacaagtacccagagcctcctcttctacctcaagaccttcaaaagaaagctttgaatcaccaggtgacatggctgctcaaactagccggtggaaattcaggacagaacattgttactgtgaggataaaataa

SEQ ID NO: 132180 - DNA, 2185 bp, Zea Mays
atgctggtccccgcccagtcggcaccggcgccgccgttgtgctctctccgctccctatcgtcacactacctcctccttccgtcccacttcctcccccctggcggcgtccttcccccgctccgccgcggcgacctcgccatccgcatgggcggcgggccgcgcaccttccccggcggcgtgtccaagtggcagtggaagcgtatgcaggccaagaaggcgcggcagctcctcaaggcgcgtctggcccgcgagcgccagctctacgagatgcgcaagcgcgtcgagctccgcgacgccgtggcgcacctcgagcggccctgggacgcgggctcctccgccggcgcgtccgccgtggctcccactctgctctccgtcgcggccgaggaccagctcagggcgctcgcggaccgcttccaccgccccggcggcgtggacctgtggaacgaccgcgacgggccccgcgtcttcgcgtccccggccacaggcgccgcctccgccaggttcttccccaggaacgccttccacagcatccagccctacgcgctcgtcggcgccggcgtagaggcgagcgcgcagggtgttcgtgagaatgccgcggaggatggcgcgcacagtagcattgcgaccgatcgcgagcctgcggttgaactcacggaaagggatgatggaacatgggagccggtggatgcactcggcgacgccgatgtcagcgacgccggtgactggacctcggaagacgatgacgacgaagctgctgctactcctgaatcagagggcatgggagatgccggttcttggcgtgagcaacgagccatggtaaggagaaatggaaggagcaacggtgcagcaagatgggaatctgcaggtgcaatggctgccggcagcggaaatgacgctgcaactcctgaatcagagggcatggtagatgcgggttcttggcgtgagcagcgagccatggttaggagaaatggaaggagcaacggtgcagcaagatggggagctgccggtgcaacggctgccagcagcgacaatggcagaggttcgagtggaagacggactggctcgaaggccacggcgggcagccatgtcagacagaggggccgaacaggtgctggttcgttgtctgaatctgaggcgacccctggctcgaaggccacggcgcgcagccatgtcagacagaggggccgaacaggtgctggttcgttgtctgaatctgaggtgacccgcgcgcgctccgagccgaaatggggaacgaggaacagagatgacacgaggaatggtgccggccggtggaatgctcctagaaaggatagggtgagtgatggtggtgggtttgattcagagtcaggcagtgcaagagggaaggaaccggaaccaagacggggagccagaagtaagatgaacggaagcgatagtcttagaggaagatcgaaacacaactacagtgctaatgccaacggcggggagaagctgttcaagtacctgagcggtgacggtgacccgcgcgcaaacagcagcaatggctttgcggagggtttggaggcaccaaaatggaagccgagaagaatgaatcgagctaggagcagcaatggtggcagagatgatgacatgggtgggagattcaggcgaggcgatgatagagtggcaagacggctacgggcaaacgcgaaaccaatcaatacgacgagcggagatgatggcagcagcgcggatggtgaacggagcaggaatggaggacgactgctctggggagacgagtactcgctgcggccaacgtcggaattgcgcggctcttggcgggacactggatcgcatagattgtaggctactaccaaagacagactgatgatttcttcgtgctaacttttgtaaaactagacctctgaaaagtaatgtactccaccaaccaacaatggaacatctcaacttttaacggaaacgcacttgcaaactcaaataagcacataaaagatagtccaggattcttgaattacatgagcactgtcagatccatatagcaaggattaacacagggtcccaagacaatagttggacggaccagtgggcaagtctacctggtcacagattacaatatggtcatggctgaccttatgagctcaaaactgtaaaaacatcaacagcaccagtgcttggtaaagttggctccagcttcttgacctgcaac

SEQ ID NO: 132181 - DNA, 796 bp, Zea Mays
gttggttaagggtgcaaatgtattcaatatcgtggatcctcagaatggctagaaagcgccaacactttcttgaggagaaatgtgtgcattgccgtagatgccaacttattcggaagttacaatatcctttctcgcttgcttatctacttgcttgaaatttacgatatttgtcttgtactggatgttgaaatagtctttttggcaaatatgttttaccgttcctagggctaatggttggaggtcactgttattgtgtgggtactaaccaaatatttaccgcatttcatgacttgacctccctatgttcaggttaaaaggaagaaagctaaacatgccgggatgtttgatattgccaagacagcaaatagacccatgatacatataggtggctgaggtgtgcagaatttcctcatgtcgaatatgagccaataaaatggatttgccaactgctgggttgctgcctggttttacctgaacgaccatgaaaaagttctctgatgcaatggaccaaactctttccgagtggtttaaacattagaggaggaagtggagtgtattggtcactgcagtcatacaatttagatccgtatacttgaacaaatgaacagtgtcacagaaactcactcagtcttcgcgtgccaaggtgttttggttgtgtacttgtatgttgtatgctcataatgtcacgttgtgtaagctctcttttgagatctcaccgtttgtgaattaaactgctaccttgagatcaatcgcacatcctcgtttccgttttagaaatgagcatttcagaattcag

SEQ ID NO: 132182 - DNA, 1937 bp, Zea Mays
gagatcgcgaccgcgagtcagggtattttgggcaccaccagagcgccaagaagggaaggttggcttctccttcctaccctttccgcgctgcaaccgccaaattctccgactgcctcgcactctcgcagcacgtggggggtgattctctctttcttctcttcctcagccgccaggaaggtggattcttttcgagctcttgcccagctgattataggtaggtacgtggctggatagaccctactgctggatagagcgtctcagggacgggttgactctttctggccgcatcagcggccggctattcttcttgtccggctatccgttccaggacttcggattaagaggcgacgagatgatgcgacgctgcgtctcggcgttggcccgccgccgccgtccagatcgcacggttgatactatgaaggcacgattccaatgtttggttaacatttcctcttcaataagggacactgacagccaaaggtgctcaagtacgtgtgctacttcctgtgctaccgatccagatgttttatcgagagaaacatcgtcatcagaaatgcttgttgattcatttgggaggttccacaattacttgaggatctccttgaccgagcgctgtaatctgaggtgccagtactgtatgcctgctgaaggagttgaactaacaccaaagtcagagcttctgtcacatgatgagataattcgaatcgctgacctttttgttacttctggtgtgaataagatccgattaattggtggagaacctaccgtacgaaaagatattgaagatatttgtttgcatctttctagtttgaagggactgaaaactcttgcaatgaccacaaatggaattgttctttcaaagaaactcccaaagttgaaagaatgtggactcaatgctttaaatataagtttagatacactagtacctgcaaagtttgagttcatgacaaggcgtaaagggcactcaaaggtcttggaatcaatagatgctgctgtagaacttgggtatagccctgttaaggtcaactgtgtcatcatgcgtggtataaatgatgatgagatctgcaattttgttgaattgacgagacacaagcccatcaacgttagatttattgagtttatgccatttgatggtaatgtttggaatgtgaagaagctagttccttatgcagagatgttggacaaagtgcggcaaagttataaaggagtagagagacttcaagatcaccccacagacactgcaaagaatttcaggattgatggacatgttggcactatttcatttattacatcaatgacagagcatttttgtgctggctgcaatagattacggttattggctgatggaaacctcaaggtgtgcttatttggcccctcagaggtaagtttgagagaacccatccgtactggtgttgatgacgctggactgaaggagataattggtgccgcggttaaaaggaagaaagctaaacatgccgggatgtttgatattgccaagacagcaaatagacccatgatacatataggtggctgaggtgtgcagaatttcctcatgtcgaatatgagccaataaaatggatttgccaactgctgggttgctgcctggttttacctgaacgaccatgaaaaagttctctgatgcaatggaccaaactctttccgagtggtttaaacattagaggaggaagtggagtgtattggtcactgcagtcatacaatttagatccgtatacttgaacaaatgaacagtgtcacagaaactcactcagtcttcgcgtgccaaggtgttttggttgtgtacttgtatgttgtatgctcataatgtcacgttgtgtaagctctcttttgagatctcaccgtttgtgaattaaactgctaccttgagatcaatcgcacatcctcgtttccgttttagaaatgagcatttcagaattcag

SEQ ID NO: 132183 - DNA, 2197 bp, Zea Mays
gagatcgcgaccgcgagtcagggtattttgggcaccaccagagcgccaagaagggaaggttggcttctccttcctaccctttccgcgctgcaaccgccaaattctccgactgcctcgcactctcgcagcacgtggggggtgattctctctttcttctcttcctcagccgccaggaaggtggattcttttcgagctcttgcccagctgattataggtaggtacgtggctggatagaccctactgctggatagagcgtctcagggacgggttgactctttctggccgcatcagcggccggctattcttcttgtccggctatccgttccaggacttcggattaagaggcgacgagatgatgcgacgctgcgtctcggcgttggcccgccgccgccgtccagatcgcacggttgatactatgaaggcacgattccaatgtttggttaacatttcctcttcaataagggacactgacagccaaaggtgctcaagtacgtgtgctacttcctgtgctaccgatccagatgttttatcgagagaaacatcgtcatcagaaatgcttgttgattcatttgggaggttccacaattacttgaggatctccttgaccgagcgctgtaatctgaggtgccagtactgtatgcctgctgaaggagttgaactaacaccaaagtcagagcttctgtcacatgatgagataattcgaatcgctgacctttttgttacttctggtgtgaataagatccgattaattggtggagaacctaccgtacgaaaagatattgaagatatttgtttgcatctttctagtttgaagggactgaaaactcttgcaatgaccacaaatggaattgttctttcaaagaaactcccaaagttgaaagaatgtggactcaatgctttaaatataagtttagatacactagtacctgcaaagtttgagttcatgacaaggcgtaaagggcactcaaaggtcttggaatcaatagatgctgctgtagaacttgggtatagccctgttaaggtcaactgtgtcatcatgcgtggtataaatgatgatgagatctgcaattttgttgaattgacgagacacaagcccatcaacgttagatttattgagtttatgccatttgatggtaatgtttggaatgtgaagaagctagttccttatgcagagatgttggacaaagtgcggcaaagttataaaggagtagagagacttcaagatcaccccacagacactgcaaagaatttcaggattgatggacatgttggcactatttcatttattacatcaatgacagagcatttttgtgctggctgcaatagattacggttattggctgatggaaacctcaaggtgtgcttatttggcccctcagaggtaagtttgagagaacccatccgtactggtgttgatgacgctggactgaaggagataattggtgccgcggttaaaaggaagaaagctaaacatgccgggatgtttgatattgccaagacagcaaatagacccatgatacatataggtggctgaggtatcctcttatcaacatctgtacatttttactacaatgactatgtaatagattgttcacggacatgacaagattgatatttgagatgatttatcgcatggcaccttctatagttgccttgttgcacgcccagtttggtggttctcaaacttcagtagtcggtcccttttatgttctaacttctaatgaggaaaaaaattgcaaaccatttcatgagatcactgctgagtttaaacatcccatggatttttactgctgtttaagatatcgttttggaatctggtgatcaaatgtgttcagcattcaattcacgtgcatctctcttatttggaatcaggtgtgcagaatttcctcatgtcgaatatgagccaataaaatggatttgccaactgctgggttgctgcctggttttacctgaacgaccatgaaaaagttctctgatgcaatggaccaaactctttccgagtggtttaaacattagaggaggaagtggagtgtattggtcactgcagtcatacaatttagatccgtatacttgaacaaatgaacagtgtcacagaaactcactcagtcttcgcgtgccaaggtgttttggttgtgtacttgtatgttgtatgctcataatgtcacgttgtgtaagctctcttttgagatctcaccgt

SEQ ID NO: 132184 - DNA, 108 bp, Zea Mays
atgccgcggctggagcaggggcgcggcggcaggaagggcgcgcggccaggattctggcgcgcgacgattggagaaggagaattagagcgcgcgcagggcgagctctaa

SEQ ID NO: 132185 - DNA, 712 bp, Zea Mays
ccggtagatgtggaacgtaattacaatgatgagaacataaaatcgtgtcataaatcgtggaacatttttcactgaactcgtcaagttggacaataattacccacctttgccaataaaaaacgatttgtttatacttacctaccctttctcttgtcgcagactaacgatttcctattccttctgtccttccccgtggacatgcctgtagatgtggtgggggccgccaatcaggccacgccggagctccgatctagcgggaaggagtccgtccaagggccggcggcgcacatcggcatcggccttcatctcggtgcgggcattgacggcgcgggagttcaacaaggcgacggcgcggctgcgagcctccgaccggctgggtgtgtcggcgcagctgtggcctgtgagcgtcgcttcctatcaacgcgatgctccaccccggcgccggtggtgtgcctggaggtccgcggccggctgcttccatggcggcatgtacgcggttgttgggtgtgctaccttcgcttggtcgagaagcaagtcttctgggaagaaattagctaatttcttacggctagacatgaattgataatttttgttacataaattagttaattttgtcaagagattggtaaaaaagtaaaatgttgtatccacgaagattgggtaatttctcatctttatctctaattgaccggcggaatttatccagataaca

SEQ ID NO: 132186 - DNA, 2195 bp, Zea Mays
gcggaaagcggagccaggaccgggagctgaagcggttgtcttccccccctcgtctccgtcaactggcacccccacaagccagcaagatggacgggttcgtggaccccttcgtcccggaacaggcatggccgcaggacgccatgttcatcggctcatcctggccatgcgccggcgccggcgccacttccctcgccgaccctgcagggacgtacgcgtacctgggagctcaggctgcaccaggccaaggcgcaggctttcacctccaagacggctcctccacggcgctcgtgccgcccttggagctgcaccagcagttcctgagcgcgcacctgccgggcgacgacgtgaccgtgacccaggaggagggcctcggcttcgaggtgaacagcgcgctggtggccggcatgctgggcccggtcctgagcgcgccctgcgcggtatcgctcgccgacagcgcgccggtggtgtgcagctcctccaacgacagcagcggcgggagcgagcagtccggcctgccgccgccgccgcggttcctagtcctgggagagcagcccgcgtcgtggccttccgcgttcccgcggatctcgtcgctggccggggaagagacttcgcggagcttcggtttcggcgcggttagcgacaacgatctcgtccgtggatcctcctgtgtcgcggacgtgaacaagtatccacagataggcaatgcgcggctacatgtagaggatgacgttgagttcaacactggaaagatgctgtcgttcgctcctggccttgactttggcgatctgcagctcagccaaaaggaactcagcggtctgcgtcacctgaactctgggcagcagctctcgtcgtttgatgcaacgcgtaatcctgaacagtcgtctaacgaggccagcggcggcggaactgggttgaatgcgccgccgttcatggttccggccaatggggctgctgggaatggagctcctaagccgcgcgtcagggctcgccggggccaggcaactgatccacacagcattgcggagaggctccgaagggagaagatctctgacaggatgaagaatctacaggagctcgttccgaactccaacaggactgacaaggcatccatgcttgacgagatcatcgaatacgtcaaatttctccagctgcaagtgaaggttctcagcatgagcaggctgggcgcgacggaagccgtcgtcccgctccttacacagtctcagaccgagaactccggtggtggtcttctgctgtcccctaggtcaggctcaggcaggcagcagcaggcacgcggaggcagcctgccgccgccgtcgtccgaggtccgggacggcgcggcgttcgagcaggaggtggcccagctgatggagagcgacatgacgacggcgatgcagtacctgcagagcaagggcctgtgcctcatgcccgtcgcgctggcgtcggcgatatcgggccagaagggggcgtcctccgcggcggtccagccggagaatgggggcgccaaggaaatgctgcgcgcggtgaagcccctagcaagtccaatccatgggagatgaagtgtccggatcctagacggctggctcaacgacgcagtgcagtccccggcatcaaatcaaagccatctcccgtttagattccaatgtcctaacagcctgcgccctgttttgcatgctccttccacaacttgtagccatatcatgaagcctggacctagcttactacatgtgctccatcgcaagaacgcgtattactttcttattaaaacccgccagggttcggcgcgctctccgcgttcggcggccttctcccgcagctcgtcggtccggccgcgttcggtggcctcctcttccctaccccgtggtctctggccgcctgctctgcctggtgagacccgacctgaatggggccctcctcgttcctccttccaccattcctccgccggcttctagagcccatctaaacacgccagcgcggccacgaccgtcggcctcctccgcttctgcgctagccggaaacctaccttccggcacctctccatcacttcctgtgtcgctgccctctccaccacacctaccgttcccttcgcctccatcactgtcagtaaaatgggagctaaaacatacgaaatataattttttttctaagattttaggagtttttataatatttttacactcgaaaatagttataaaaag

SEQ ID NO: 132187 - DNA, 2298 bp, Zea Mays
gcggaaagcggagccaggaccgggagctgaagcggttgtcttccccccctcgtctccgtcaactggcacccccacaagccagcaagatggacgggttcgtggaccccttcgtcccggaacaggcatggccgcaggacgccatgttcatcggctcatcctggccatgcgccggcgccggcgccacttccctcgccgaccctgcagggacgtacgcgtacctgggagctcaggctgcaccaggccaaggcgcaggctttcacctccaagacggctcctccacggcgctcgtgccgcccttggagctgcaccagcagttcctgagcgcgcacctgccgggcgacgacgtgaccgtgacccaggaggagggcctcggcttcgaggtgaacagcgcgctggtggccggcatgctgggcccggtcctgagcgcgccctgcgcggtatcgctcgccgacagcgcgccggtggtgtgcagctcctccaacgacagcagcggcgggagcgagcagtccggcctgccgccgccgccgcggttcctagtcctgggagagcagcccgcgtcgtggccttccgcgttcccgcggatctcgtcgctggccggggaagagacttcgcggagcttcggtttcggcgcggttagcgacaacgatctcgtccgtggatcctcctgtgtcgcggacgtgaacaagtatccacagataggcaatgcgcggctacatgtagaggatgacgttgagttcaacactggaaagatgctgtcgttcgctcctggccttgactttggcgatctgcagctcagccaaaaggaactcagcggtctgcgtcacctgaactctgggcagcagctctcgtcgtttgatgcaacgcgtaatcctgaacagtcgtctaacgaggccagcggcggcggaactgggttgaatgcgccgccgttcatggttccggccaatggggctgctgggaatggagctcctaagccgcgcgtcagggctcgccggggccaggcaactgatccacacagcattgcggagaggctccgaagggagaagatctctgacaggatgaagaatctacaggagctcgttccgaactccaacaggactgacaaggcatccatgcttgacgagatcatcgaatacgtcaaatttctccagctgcaagtgaaggttcgctcaccacggcccaccattcctctgctctgctccatgcggtctggcttactatcctgtaaagtttctgctgatctatgttgtctgcctgtgattgaaggttctcagcatgagcaggctgggcgcgacggaagccgtcgtcccgctccttacacagtctcagaccgagaactccggtggtggtcttctgctgtcccctaggtcaggctcaggcaggcagcagcaggcacgcggaggcagcctgccgccgccgtcgtccgaggtccgggacggcgcggcgttcgagcaggaggtggcccagctgatggagagcgacatgacgacggcgatgcagtacctgcagagcaagggcctgtgcctcatgcccgtcgcgctggcgtcggcgatatcgggccagaagggggcgtcctccgcggcggtccagccggagaatgggggcgccaaggaaatgctgcgcgcggtgaagcccctagcaagtccaatccatgggagatgaagtgtccggatcctagacggctggctcaacgacgcagtgcagtccccggcatcaaatcaaagccatctcccgtttagattccaatgtcctaacagcctgcgccctgttttgcatgctccttccacaacttgtagccatatcatgaagcctggacctagcttactacatgtgctccatcgcaagaacgcgtattactttcttattaaaacccgccagggttcggcgcgctctccgcgttcggcggccttctcccgcagctcgtcggtccggccgcgttcggtggcctcctcttccctaccccgtggtctctggccgcctgctctgcctggtgagacccgacctgaatggggccctcctcgttcctccttccaccattcctccgccggcttctagagcccatctaaacacgccagcgcggccacgaccgtcggcctcctccgcttctgcgctagccggaaacctaccttccggcacctctccatcacttcctgtgtcgctgccctctccaccacacctaccgttcccttcgcctccatcactgtcagtaaaatgggagctaaaacatacgaaatataattttttttctaagattttaggagtttttataatatttttacactcgaaaatagttataaaaag

SEQ ID NO: 132188 - DNA, 243 bp, Zea Mays
gcggaaagcggagccaggaccgggagctgaagcggttgtcttccccccctcgtctccgtcaactggtgagctccctcctccacctcctctccctgctctttgatctcgccctcgcttcttcctccccagccggccatcagttccggcgactgcttccttcgttcgtccccgccgccgccgccgccgctggactctttccgaattgctctgtctatcctgtgccgtggatcgagttgcttccgg

SEQ ID NO: 132189 - DNA, 303 bp, Zea Mays
atgagcacccagggaaactgtgagacgcacggtgcagcagtgccaggaactaaggatgcaggcacaggaaaggcagggcaatctagtggcgatcgacaggaggagaagttacccaagtgtgagcaggtcgactatggaagtgaagttgaagggcataagtcgttgctcgggtgtaggccggtcaacagcggcgaaggcaaacacgatgactgtgggatggagtttgggttgcccatggacgtgcaacacgtggcgcacatcatgtttgataggttttatgggttcctggggcttccctgttga

SEQ ID NO: 132190 - DNA, 1735 bp, Zea Mays
gattcagacttattttccaagcagtcctatgaacatattctctctaggacagcaatactcattccaagaataaacacaaatagagctaacaatttcccacaaaagtaagcatgttacatacgatgacaatctctccaagacaacagaccacaatcacgggaacaaactggcaggtacaagttacacacagtcacccccacactattttgtgttgagttaccattccattgctgaagaggagagcaatcactggctctcttcatcttcgtcttccgcatcctcctgggcttccttgtccgagtcgctgccgttgtcatcgcccccggtggggcttgtgctgttctggtaatgcgcctgctgcggggcatgctggtgcctgctgcccttgatgcggtaccgaacgcggtgattgctgctggtggcgacctcggcggtcacgcccgctctccgcgtgccgttgccgtccgtagggatcgggacggccatgggcgtgggcgtggcggtggccgcgccgcccgtggccttggagagctccatctgcatcttgaggaagaactgcacgcgctgctcctccagctgccgggcggagtccaggcgctcccgctccatccggagttcctggtccctcttggcgctctccacgcgctcgtacacctcccctagccgccggatcgcctgcgccagctcgcgcagaccctgcgcgcggctgacgctgctctccgcgccgttgtccgcggcggcggcggcgggctcctccacgcgctgcctcttgccgttcgccaccgcggacggcgggaacccgtcggaggagtcggacgacgccgacggctggagcagcggcgacggcatcctccactttgcccccgcggaggagtggaggggcgtgcgggtgcgctgcgggaagttgatgcgcggagggaccatgggcccggcgctccgggctgccgccgccgccgccgcagcagcagcagccgaggaggaagaagaattgggcttgagcagcacgggagcgagcaggtcgtcgaggcggtcgaagtagcgccagtcggagtcgtgcttggccttctcgaccttgtacttcttcttgagcgtgtcgatgcggttcttgcactggacgtcggatttgggcgccttggagtagctgtcgcgagaggagacgacctcggcgacctcctgccactgcgggtggcggaggctgccccggcccagcgccacgaagcgctccccccaggcgtcgatgagcgtggaggtggcgccgtcgctccatgcgtcctcgcggccgccgccgccgccgccggaggaaggcgagtgcttgcggagggggatagcgacggcgacgtggccgggcggcgccgcggcgaccgtgacggggtcggccacggggagcggagacggagacggagagcgcgacggggacggcgagggcgaccgggaggccccgccgtcgtcgtccatggccggagatctggcgaccggcggcggggaaggaggggggcgagggtttccttggggatatttccgggatggatgggcaacgcggaattgttccgattattttctgcgcttccggttccggtgttgtggccgtcgcgtccggcggcgagggggaggccagcgagtcgtcgcctggacggagcgggatggctgcctggctgctgccttccttgctgggcctaaatgggccaggccgaacgagagatagagagacgggcctcctcttcaactccgggctagg

SEQ ID NO: 132191 - DNA, 2579 bp, Zea Mays
cccaccctccctgcggccggtcaccaacgccggttgctgctgttctcgcgcgctccccgcctcttcttctcttctaggtgccgtcggagcttgcttttggggagtccggcgaaggtggagaggaaccgagaaattaaagatgtcttgctgcggtggcgccgaggaggacagctacggcccgccggccaaccaggcggtcccaccacccaacgccaacgcccccggtaacagaggcggtccgagggggccgggcgcgcccagggtcggcggccccgcaaagcccatcagcatcgacgcgccctccatacccttggacgagctaaagaagatcaccaacaacttcagcgagcgcgccctcatcggcgagggctcctacggccgcgtctacaacgccacgctcggcgacggccgcgccgccgtcatcaagaagctcgacaccagcgcctcgcaggactccgacaccgacttctccgcgcagatagccatggtctccaagctcaagaacgagtatttcctggagctcctggggtactgcttggaggacggcaaccggatggtagcctaccagttcgccacgatgggttccttgcataacatactacacgggaagaaaggagtccagggcgcggagcccggccccgtcctcaactgggctcagcgcgtgaagatagcctacggagccgcgagaggtctggagtacctgcacgagaaggtgcagccgtcgatcgtccaccgggacatccgctccagcaacgtcctcatcttcgacgatttcagctccaagatcgccgacttcaacctcaccaaccagggcaccgacacagccgcgcgcttgcactctactcgtgtgctggggacctttgggtaccatgctccagaatacgccatgacaggccagatcaaccagaagagcgacgtctacagtttcggtgtgatccttctggagctactcaccgggcggaagccagtcgaccacaccatgccgaaaggccagcaaagccttgttacctgggccactccaaggttgagcgaagacaaagtgaagcagtgtgtcgatccgaagctcaacagcgactaccctccaaaggcggttgcaaagctggcggcggttgcagcgctgtgcgttcagtacgagtccgacttccggccaaacatgaccatcgtggtgaaggcgatcacgcctctcctgaacgcacctaaaccggctgctccggccgcgccgcaatcctgatcaaccaaccagccagatgacagaatttagccaacaccgcggtttccctctgtttctgatcatagatatgtgtttcaaggaaccgcgcatccttgctccatccatccagcgcttatgcttctgtaaaggaaaaaacaacactgatctgctggtgctgcaggacacatataggggaatttttaaaaatgttaatctgctactctgaattcgtgtgcttcttgctgtaagtttgtgttataccatgtgcagttttagagagtacacatgcagtttctagctacaaaagtaggcacgacgatggtttccagcttttccaaatataaaacaaattcacagccacagctacaggagtgcatcagatcaagatagtattggctctttttcaccatatataattgctggtaccaattacaaaaaggagcaaactctgatgactccaaagtttgcttacgcttaaaccaaaactttggtgagcaactggaaaaactactacatagaatggacatgcaaaactttcaccggttgtttgcattatgaccactagggaggcattgcacatgtgtccagatcacatgacgtgctgatgaatactgcggttgtctcccactagcatttgagcactgtaaatagaaaaaggtcagcaaaaattaaaaaggataaaaacactcagaagccttttcctaaagaaaaaggtcagcaaatttctaaagtataacatgtgaagtgaaggttgatcctgcataatttgacatgattcaggtagtgatttgttacttgatcttttaccgactacctcgattcctcgaaactacatcatgtcttgaaccaattggatcgaaatggcagaggtgagcatccctgtcattctctcaataccagcaaaaaaaatcaataaataagtaaaaggttcaggttaactcctgctaggaactgtcacagtacttaatagctctcaaggcctgttttactctataccagttgagatacaatgatacatgtatcagtggaaaatctgaatgtaacaatttcaatattccctccattccaagcaggaacataagctattgagagtgagattttgaatcacacttctggctacaggccaattttccatatttttttaacaacatgggacattgggaaatctgggggattaatttttgttcaattgagatttttatgtaataatgcaaattgcaatccagatttggatctctggttccaagcagtagctagttgtgaaacatctttcattcgaattgcatctaaacagaactaaacagaataaacctaccataccaaagatgattgtgtgcacaataaataaataaataaataatgccagaaa

SEQ ID NO: 132192 - DNA, 1737 bp, Zea Mays
gcgcgctccccgcctcttcttctcttctaggtgccgtcggagcttgcttttggggaggtcgtgcggcatgatctgctgaccgaccccaaatcaacccggccgcgccgcgcatcgatcgtcgtcatccagtccggcgaaggtggagaggaaccgagaaattaaagatgtcttgctgcggtggcgccgaggaggacagctacggcccgccggccaaccaggcggtcccaccacccaacgccaacgcccccggtaacagaggcggtccgagggggccgggcgcgcccagggtcggcggccccgcaaagcccatcagcatcgacgcgccctccatacccttggacgagctaaagaagatcaccaacaacttcagcgagcgcgccctcatcggcgagggctcctacggccgcgtctacaacgccacgctcggcgacggccgcgccgccgtcatcaagaagctcgacaccagcgcctcgcaggactccgacaccgacttctccgcgcagatagccatggtctccaagctcaagaacgagtatttcctggagctcctggggtactgcttggaggacggcaaccggatggtagcctaccagttcgccacgatgggttccttgcataacatactacacgggaagaaaggagtccagggcgcggagcccggccccgtcctcaactgggctcagcgcgtgaagatagcctacggagccgcgagaggtctggagtacctgcacgagaaggtgcagccgtcgatcgtccaccgggacatccgctccagcaacgtcctcatcttcgacgatttcagctccaagatcgccgacttcaacctcaccaaccagggcaccgacacagccgcgcgcttgcactctactcgtgtgctggggacctttgggtaccatgctccagaatacgccatgacaggccagatcaaccagaagagcgacgtctacagtttcggtgtgatccttctggagctactcaccgggcggaagccagtcgaccacaccatgccgaaaggccagcaaagccttgttacctgggccactccaaggttgagcgaagacaaagtgaagcagtgtgtcgatccgaagctcaacagcgactaccctccaaaggcggttgcaaagctggcggcggttgcagcgctgtgcgttcagtacgagtccgacttccggccaaacatgaccatcgtggtgaaggcgatcacgcctctcctgaacgcacctaaaccggctgctccggccgcgccgcaatcctgatcaaccaaccagccagatgacagaatttagccaacaccgcggtttccctctgtttctgatcatagatatgtgtttcaaggaaccgcgcatccttgctccatccatccagcgcttatgcttctgtaaaggaaaaaacaacactgatctgctggtgctgcaggacacatataggggaatttttaaaaatgttaatctgctactctgaattcgtgtgcttcttgctgtaagtttgtgttataccatgtgcagttttagagagtacacatgcagtttctagctacaaaagtaggcacgacgatggtttccagcttttccaaatataaaacaaattcacagccacagctacaggagtgcatcagatcaagatagtattggctctttttcaccatatataattgctggtaccaattacaaaaaggagcaaactctgatgactccaaagtttgcttacgcttaaaccaaaactttggtgagcaactgg

SEQ ID NO: 132193 - DNA, 1665 bp, Zea Mays
gcgcgctccccgcctcttcttctcttctaggtgccgtcggagcttgcttttggggagtccggcgaaggtggagaggaaccgagaaattaaagatgtcttgctgcggtggcgccgaggaggacagctacggcccgccggccaaccaggcggtcccaccacccaacgccaacgcccccggtaacagaggcggtccgagggggccgggcgcgcccagggtcggcggccccgcaaagcccatcagcatcgacgcgccctccatacccttggacgagctaaagaagatcaccaacaacttcagcgagcgcgccctcatcggcgagggctcctacggccgcgtctacaacgccacgctcggcgacggccgcgccgccgtcatcaagaagctcgacaccagcgcctcgcaggactccgacaccgacttctccgcgcagatagccatggtctccaagctcaagaacgagtatttcctggagctcctggggtactgcttggaggacggcaaccggatggtagcctaccagttcgccacgatgggttccttgcataacatactacacgggaagaaaggagtccagggcgcggagcccggccccgtcctcaactgggctcagcgcgtgaagatagcctacggagccgcgagaggtctggagtacctgcacgagaaggtgcagccgtcgatcgtccaccgggacatccgctccagcaacgtcctcatcttcgacgatttcagctccaagatcgccgacttcaacctcaccaaccagggcaccgacacagccgcgcgcttgcactctactcgtgtgctggggacctttgggtaccatgctccagaatacgccatgacaggccagatcaaccagaagagcgacgtctacagtttcggtgtgatccttctggagctactcaccgggcggaagccagtcgaccacaccatgccgaaaggccagcaaagccttgttacctgggccactccaaggttgagcgaagacaaagtgaagcagtgtgtcgatccgaagctcaacagcgactaccctccaaaggcggttgcaaagctggcggcggttgcagcgctgtgcgttcagtacgagtccgacttccggccaaacatgaccatcgtggtgaaggcgatcacgcctctcctgaacgcacctaaaccggctgctccggccgcgccgcaatcctgatcaaccaaccagccagatgacagaatttagccaacaccgcggtttccctctgtttctgatcatagatatgtgtttcaaggaaccgcgcatccttgctccatccatccagcgcttatgcttctgtaaaggaaaaaacaacactgatctgctggtgctgcaggacacatataggggaatttttaaaaatgttaatctgctactctgaattcgtgtgcttcttgctgtaagtttgtgttataccatgtgcagttttagagagtacacatgcagtttctagctacaaaagtaggcacgacgatggtttccagcttttccaaatataaaacaaattcacagccacagctacaggagtgcatcagatcaagatagtattggctctttttcaccatatataattgctggtaccaattacaaaaaggagcaaactctgatgactccaaagtttgcttacgcttaaaccaaaactttggtgagcaactgg

SEQ ID NO: 132194 - DNA, 104 bp, Zea Mays
agatatatgaaaaatatattataatatgcatatggctaccaaaaagaaatcgcgactatacacaaaaaataaggaagccagtaaatctaagggtatcaatttaa

SEQ ID NO: 132195 - DNA, 2680 bp, Zea Mays
gtttttgtcagtcatgcggccagcttcctccccgctagctcactagccaggcccgggcgcctcaccgccacggtgaccgccgccttctttgacgcctgcggcctgcctaaccccgaagtctctcagtgcgtgtttggccgaaatccacggggagggcttgtcctcgcctttgctgagctgctccggagcggagccgtgcctacttgagttcaggtttgtttcgccatccgaggccaagattcggagcgtcgccgaagggaggcgatgaagggcaaaggcgggccggtggacaggaggtcctccgccaggtggaggttgctggtgctctgcgcattcagcttcggcatcggcatgctcttcaccgaccggttctggacagcaccggataccagtagccataccatgtctcaacgctggaggcaagagcaagagctccaacttgtatcagaagattgcaacacaaagaggaagcatggggaagacaaggatataatgggagaggtaaccaagactcatgaagccatacaatcattggataagtccatctcaacgctgcagatggagcttgcagcaaagcggagcacacttgagctactccgatctagtggttcaccagtaacctctgaaactaaccaaccaaggaaaaaggcttttgttgtcattggagtcaacactgcattcagcagccgcaagcgccgtgattctgtccgggagacatggatgcctcaaggagaaaagctgcaacaattagaagaacagaagggaatagttatccgcttcactatcgggcacagtgctacatccaacagtatactggacaaagctatagattcagaggacgctcagcatcatgactttcttaggctggaccatgttgagggatatcatgaactctcagctaagacaaaaatattcttctctactgctgttggcatctgggacgctgacttctacgtcaaggtcgatgatgatgtgcatgtaaacctaggaatgcttgccactacccttgctcggcataaatcgaaaccaagaacttatattggctgcatgaagtcaggcccagttcttgctgacaagaatgtgaagtaccatgaacctgagtactggaaatttggggaggaaggaaataagtacttccgtcatgctacagggcagatatatgccatttcgaaagatctggcgacttatatctcaatcaatcggcctatcttgcacaaatacgcaaacgaagacgtgtcgcttggatcgtggttcatcggtttggaagttaatcacatcgatgaaaggaacatgtgctgtggaactccaccagactgtgagtggaaagggcaagctggcaatgtctgcgtagcgtctttcgactggagctgcagtggcatatgcaagtctgttgagaggatcaaagatgtacatgctcgctgcggcgaaggggattcagcagtttggagtgctcttgtctagcacataccctcctttgcccgtaaatatgtagcataattggtaagctttggtggtggtggacaccagcataggcgttaggcaactccccaagtaaacttgacaaaacccagagatcatgatcatgccccgtggaacattgccaatggtaactctggctggaaaaattctgcgtaattttggtctgtcactgttcatgaccttcggacttcggtggtgttaggagctccaaggtagggttgcaactgatgttactgatcttacatgtagggggagagtttctcagctgatgcgagatcatgtaatgcagaggacattgttttatgcaaattttgacattcttttgcgggttctttccacacatttctgtcattcattcatgagagtgcaccatactgtaacatatgagccgtggacggattgttgatttagcaaatcttgttctattaggaaatctattttctattcgtgactgtctcgtagaaaagaattacacttcctcgtgcaacaaatcaacatatacactagatcctaattaaccttttgagacgtcttttcatgaattaaccttttgagatgcattttcatgccaaaacccatgtttttaacagcaaacaaaggcatgtggcagcatgattccaagatcggacttacacagggaaaaccaaagctcctttcggtgtgcgaaaaacatgtcagacctatctgtgagcactaaatccctaactgttggacacgcggcaatataggaaaaaatatatcgccttgctaacgatccaagacaaaaactcatgccaaaaatgattctcagcgtcccaacatggccggcctcgggtgttccaattatctttagtcccctgtactcttgtgctgctgctgctgcttctcgtccagctcaatatggaggagaatgctcttgacttcttcattgaactgcatagactgaagcttcttcttgagttcctcacagccttttacctacaaaaggattggaattgatatcatagaatgggaaaatggtgaaaatgagctagtaaccaccggaaaagcagaaatatctgaacgctagaaaattgaggaaaggcttaccgtgtctgcaatctcgtcgaaatccaaaggtgtcacttgcactatttcatcttctttccaaccaagcaacatcatgaaacgcttatcttctggagaaatgtcagctggatggaaatcatcatctgattcagta

SEQ ID NO: 132196 - DNA, 1814 bp, Zea Mays
ctcactagccaggcccgggcgcctcaccgccacggtgaccgccgccttctttgacgcctgcggcctgcctaaccccgaagtctctcagtgcgtgtttggccgaaatccacggggagggcttgtcctcgcctttgctgagctgctccggagcggagccgtgcctacttgagttcaggtttgtttcgccatccgaggccaagattcggagcgtcgccgaagggaggcgatgaagggcaaaggcgggccggtggacaggaggtcctccgccaggtggaggttgctggtgctctgcgcattcagcttcggcatcggcatgctcttcaccgaccggttctggacagcaccggataccagtagccataccatgtctcaacgctggaggcaagagcaagagctccaacttgtatcagaagattgcaacacaaagaggaagcatggggaagacaaggatataatgggagaggtaaccaagactcatgaagccatacaatcattggataagtccatctcaacgctgcagatggagcttgcagcaaagcggagcacacttgagctactccgatctagtggttcaccagtaacctctgaaactaaccaaccaaggaaaaaggcttttgttgtcattggagtcaacactgcattcagcagccgcaagcgccgtgattctgtccgggagacatggatgcctcaaggagaaaagctgcaacaattagaagaacagaagggaatagttatccgcttcactatcgggcacagtgctacatccaacagtatactggacaaagctatagattcagaggacgctcagcatcatgactttcttaggctggaccatgttgagggatatcatgaactctcagctaagacaaaaatattcttctctactgctgttggcatctgggacgctgacttctacgtcaaggtcgatgatgatgtgcatgtaaacctaggaatgcttgccactacccttgctcggcataaatcgaaaccaagaacttatattggctgcatgaagtcaggcccagttcttgctgacaagaatgtgaagtaccatgaacctgagtactggaaatttggggaggaaggaaataagtacttccgtcatgctacagggcagatatatgccatttcgaaagatctggcgacttatatctcaatcaatcggcctatcttgcacaaatacgcaaacgaagacgtgtcgcttggatcgtggttcatcggtttggaagttaatcacatcgatgaaaggaacatgtgctgtggaactccaccagactgtgagtggaaagggcaagctggcaatgtctgcgtagcgtctttcgactggagctgcagtggcatatgcaagtctgttgagaggatcaaagatgtacatgctcgctgcggcgaaggggattcagcagtttggagtgctcttgtctagcacataccctcctttgcccgtaaatatgtagcataattggtaagctttggtggtggtggacaccagcataggcgttaggcaactccccaagtaaacttgacaaaacccagagatcatgatcatgccccgtggaacattgccaatggtaactctggctggaaaaattctgcgtaattttgggttgcaactgatgttactgatcttacatgtagggggagagtttctcagctgatgcgagatcatgtaatgcagaggacattgttttatgcaaattttgacattcttttgcgggttctttccacacatttctgtcattcattcatgagagtgcaccatactgtaacatatgagccgtggacggattgttgatttagcaaatcttgttctatta

SEQ ID NO: 132197 - DNA, 1881 bp, Zea Mays
cttcctccccgctagctcactagccaggcccgggcgcctcaccgccacggtgaccgccgccttctttgacgcctgcggcctgcctaaccccgaagtctctcagtgcgtgtttggccgaaatccacggggagggcttgtcctcgcctttgctgagctgctccggagcggagccgtgcctacttgagttcaggtttgtttcgccatccgaggccaagattcggagcgtcgccgaagggaggcgatgaagggcaaaggcgggccggtggacaggaggtcctccgccaggtggaggttgctggtgctctgcgcattcagcttcggcatcggcatgctcttcaccgaccggttctggacagcaccggataccagtagccataccatgtctcaacgctggaggcaagagcaagagctccaacttgtatcagaagattgcaacacaaagaggaagcatggggaagacaaggatataatgggagaggtaaccaagactcatgaagccatacagtgagctccttcaacttcatatggggttcaacttaaccatgcaactgtgttgagttttagtatctgaagacttttctttggaatttgtttatggtgttagatcattggataagtccatctcaacgctgcagatggagcttgcagcaaagcggagcacacttgagctactccgatctagtggttcaccagtaacctctgaaactaaccaaccaaggaaaaaggcttttgttgtcattggagtcaacactgcattcagcagccgcaagcgccgtgattctgtccgggagacatggatgcctcaaggagaaaagctgcaacaattagaagaacagaagggaatagttatccgcttcactatcgggcacagtgctacatccaacagtatactggacaaagctatagattcagaggacgctcagcatcatgactttcttaggctggaccatgttgagggatatcatgaactctcagctaagacaaaaatattcttctctactgctgttggcatctgggacgctgacttctacgtcaaggtcgatgatgatgtgcatgtaaacctaggaatgcttgccactacccttgctcggcataaatcgaaaccaagaacttatattggctgcatgaagtcaggcccagttcttgctgacaagaatgtgaagtaccatgaacctgagtactggaaatttggggaggaaggaaataagtacttccgtcatgctacagggcagatatatgccatttcgaaagatctggcgacttatatctcaatcaatcggcctatcttgcacaaatacgcaaacgaagacgtgtcgcttggatcgtggttcatcggtttggaagttaatcacatcgatgaaaggaacatgtgctgtggaactccaccagactgtgagtggaaagggcaagctggcaatgtctgcgtagcgtctttcgactggagctgcagtggcatatgcaagtctgttgagaggatcaaagatgtacatgctcgctgcggcgaaggggattcagcagtttggagtgctcttgtctagcacataccctcctttgcccgtaaatatgtagcataattggtaagctttggtggtggtggacaccagcataggcgttaggcaactccccaagtaaacttgacaaaacccagagatcatgatcatgccccgtggaacattgccaatggtaactctggctggaaaaattctgcgtaattttggtctgtcactgttcatgaccttcggacttcggtggtgttaggagctccaaggtagggttgcaactgatgttactgatcttacatgtagggggagagtttctcagctgatgcgagatcatgtaatgcagaggacattgttttatgcaaattttgacattcttttg

SEQ ID NO: 132198 - DNA, 1015 bp, Zea Mays
gtttttgtcagtcatgcggccagcttcctccccgctagctcactagccaggcccgggcgcctcaccgccacggtgaccgccgccttctttgacgcctgcggcctgcctaaccccgaagtctctcagtgcgtgtttggccgaaatccacggggagggcttgtcctcgcctttgctgagctgctccggagcggagccgtgcctacttgagttcaggtttgtttcgccatccgaggccaagattcggagcgtcgccgaagggaggcgatgaagggcaaaggcgggccggtggacaggaggtcctccgccaggtggaggttgctggtgctctgcgcattcagcttcggcatcggcatgctcttcaccgaccggttctggacagcaccggataccagtagccataccatgtctcaacgctggaggcaagagcaagagctccaacttgtatcagaagattgcaacacaaagaggaagcatggggaagacaaggatataatgggagaggtaaccaagactcatgaagccatacagtgagctccttcaacttcatatggggttcaacttaaccatgcaactgtgttgagttttagtatctgaagacttttctttggaatttgtttatggtgttagatcattggataagtccatctcaacgctgcagatggagcttgcagcaaagcggagcacacttgagctactccgatctagtggttcaccagtaacctctgaaactaaccaaccaaggaaaaaggcttttgttgtcattggagtcaacactgcattcagcagccgcaagcgccgtgattctgtccgggagacatggatgcctcaaggtgtgtagttggtctagtagcagttaaaacaaattatggtatgggctcgtctattagatttgcgcaatgattaacttttcagttccttgcgatctctacatattgagttcaaggcacattggttttgattattacagcctatataagattatgcttggactaacttaacacatggcataagctat

SEQ ID NO: 132199 - DNA, 1905 bp, Zea Mays
cgatgctaccaggaacactatgacgatttgatgaaggctctacaagagaaggatccttcatggccctcactgatgctgaagctgtgcgcggcgctgaagactgcggataggctgatgagttgcgcggacacgaacgcggaacagctgctggagaaggtgaaggcactggagggcgtcctcgacaggagcggtcatgcggtggcagagattgtagaagctctccagaggtcaggcctagccaatgatggtcacggttccccgtcaaaatcggctagcaagtagacgttctggtctgctttttgttcgtcttctatcccatgcaaatctctgggtattgtgagtgagttgtatgtcgacctgtgcctccacggctttgcggcctgccttgttttttttttttacccctcaccgctcttggaatgcgcgtttgtgtttatcctgtcagaagtagcgggcgatactggatttgcggtgtacaagcttcttccttcttggatcattagcttggtttcttgctaagttgcaccaagtctgaaatcaactcaaaattctggagcagaaagacgctaaaaatgccagattgcgtacgctttgtgaaacgtgagaacttgaccgccttcaatgtttgaacgcagagcatcttccgaaccagtaaaaaaaagcggtttcatctcatttgtggacgagtttacatgaaacatttcgattcacataaagtctacagtctagcgtgccaggacgtctcgaatttcttccaaaatattccaaaatgggctatcagcatccgaattccgaaggcacgatgaatttgcacttcatatttgggagctggaactacagtccctcaccctgttcattcattcagaaaagtgcggtggtttctcgtgaacgagcaacccagaaaaagtacacctgtcgcgtaagcgtcctcaggcagcagctccccggtcgcggtctctgtctctctgaagggaaagctctgtttccccttcccggtgccggagtcggggaaggtcaccgcgggcgcgagccgatggacagcaacaacctcctggcggcgtggccggtcctggggccgggcgtcgccggcgccgtattcggcgcaggctggtggttttgggtcgacgccgtcgtctgcagcgccgccgccgtgccattcctccactacctcccagggttcttcgcctcgttcgccgcgctcatgttcaactgcgtcaaccgggaggacatcggcgatggctactactcaccgtacgacgactccgagtggagggtgaagctctggctttttatttcgtacgtggtgtcgtttgtttcgctggccggggcagtgggtttcttggttcaagatgcgcttacggatacggggccatctgcgtggactggcagtgctggcatcctgcagtgcgtgtttgtgttagtgagtgggctgatctactggacgtgccactctgaagattgacttaagaagtataggtatatatggccaaggaggaggaggatggagactgcttttctcagaagcgattgcttttccgtagtacgtttctggaggcacctttggaccgtgctttccgaaacgggtggaataaagagccattttctagttgtttcaagagagatgtagataagctgtactactattttacacgtgtttatagtcgtgtatcatgttgcttaaaactactttgtgaggtgttgttttggagcaagaaacttataggggtgctaagtactcgctctgtttctttttagctgtcgccggatagttcaattttgcactatacagcgacaactaaaatgaaatgaatggagtagtcaggaaacatcgttacatttttccctgttggcgaatttctcgtgcaaggtttgacaactctagtctgctcctgtacctcccgagga

SEQ ID NO: 132200 - DNA, 642 bp, Zea Mays
atgatcgtctcctccttcctcccgctccgctcctccgtcttcgtcctcccctccagcgccgcctcccgctcccgtcccgccaccgccaccctccttccctttccaaggatcaccctcagccggcgccgccgcttggccgccgccgcgactgagagcagcagcagcagcagcgaagaaggagaaggagaagcggcgggcgggagtacgaacgggtccctcccgggcctgccccctgtggaggaggaggaggagctgtgccccgtggactgcgtgacggagttcaagacggacgaggagttccagcgccacctgaaccggtccagggccacgggcgctctggtggtggtggacttctaccggccctcctgcggcagctgcaagtacatcgagaaggccttcacgcgcctctgcaaggggtccggcgacgacggcgctcccgtcgtattcctcaagcacaacgtgatcgacgagtacgacgagcagtcggaggtggcggaccggctgcgcatcaagatcgtgccgctcttccatttctacgtggacggggtgctggtggagtcgttcccaacgagggacaaggagaggatcattgccgtcatccggaagtacacctcggtcgagccagaaccagaacctgagtaa

SEQ ID NO: 132201 - DNA, 2146 bp, Zea Mays
ccctctcctctcctctcttcctcttcctcttcgtcgcaccaccaccaccaccaccctccctctcctcgcctcccaaaaaaggcgcggcaccaaaaggcgcgagagagaggcacggggaccgcccgcctcgctcgcctgcgcaccggattcgtcgctgcggcggtggttgcagcggcggcggcctggcggggagatgtcttcgcgctcggggtccacgggcggagggagcaccggcggcggcagcagcgcggggggaggcggcgcggtgccgctggccgtgctgctcaggcgggaggtggccagcgagcgcaccgcgtcggagcgcccggagctgcactggggcctcttcagccaggccaagaagggcgaggacttcaccttcctcaagcccgaatgcgagcgcgtccctgacgtcccgtcctcctccttctccgccttcggcctgtttgatgggcataatgggaacggagccgcaatttacaccaaggagaatctcttgaacaacatcttgagtgcggtcccagccgatctgaacagggaagactggcttgctgcactcccaagagcgctggttgctgcattcgtcaaaaccgataaggatttccagactaaagcacgttcttcagggacaactgtgacatttgtcataatagatggattggtcatcactgttgcatcagttggtgattcccgttgtgtactacaagctgaaggttcaatttatcatctatcctctgatcatcggttcgatgcaagcaaagaggaggttgatcgtgtaacagaatgcggaggtgatgttggaaggctaaatgttgttggtggtgctgaggtttgaacttcgcccatatttttttcctgttagctaatattggcccccttagatgttggcctggaggtttgtgcctatcaaggtcaattggagatcaagatgttggtgaatttatcgttccagttcctcttgtgaagcaagttaagactgctgtgcaatcaaaagggctgagggatgataccacctgtattgttgttgatataatagtagaaaaaaacaactcttccatgccacttgctaaaaggcaaccaggaattggtgtcttcaaaaatatgttcggcaagaaaaaatcatcggattcatcatcccattcccattcagatagagaatatatggatccagataacgtggaggaaatatttgaggatgggtgtgcgcttctttctagacggctggattctgaataccctgttcgaaatatgttcaaactgttcatatgtgccatttgtcaagtagagttaaagccaaaccaaggtatatctgtacatgaagattcatcacaacctgggagcttgcgtcgctgggatggtccattcctttgccagagctgtcaggaaaagaaagaagcaatggagggaaagcgtcgttcacgagattcatcaagaaacagtgggtaagtgaatagttgacatgtgtagagtgatcaggtaactactgaccagcaacaccccagcaccaccattttgcagcatttcttctgttgtggcacttccttgatcacattcacatgtaatatctgggagttctgatctagaactagattgaagtattgaattgctactgtggaggtggctgctgcttatagctctcatcccaagtgaggagcatgccttgtcctcagcaaggtccttgcccaggaatgtaggcagctttactcagccctttgaccttgatggcacatacaggttgaaagattaacgatgccaaaatgatatggcttgtatattctaaggtccattgctgcgacgatcttcttatagagttctgacaaatagctatggcactgtttctgaattagaactaggcgcttacatcaattcttccccgttcgagctagccttaatttatggctagagaccttagtattatcagtcctgctgaggtccagccttcgctgacaccaatgtaattgtcatctaaaatattctttcaagcagctgtgattcatcagtaagacattagttgtcatgtacaatgtacaaaatcttgctaacaagacagatctgtttcgtcattacttggatgaaaatcaattggtgtctcaattggaggaaagaaattgttctaataaatgtggatggtagacttgcttgagtc

SEQ ID NO: 132202 - DNA, 2282 bp, Zea Mays
cgcggaaatccaacccgccacgcgcatgtgacccatccgatccgaccaccctctcctctcctctcttcctcttcctcttcgtcgcaccaccaccaccaccaccctccctctcctcgcctcccaaaaaaggcgcggcaccaaaaggcgcgagagagaggcacggggaccgcccgcctcgctcgcctgcgcaccggattcgtcgctgcggcggtggttgcagcggcggcggcctggcggggagatgtcttcgcgctcggggtccacgggcggagggagcaccggcggcggcagcagcgcggggggaggcggcgcggtgccgctggccgtgctgctcaggcgggaggtggccagcgagcgcaccgcgtcggagcgcccggagctgcactggggcctcttcagccaggccaagaagggcgaggacttcaccttcctcaagcccgaatgcgagcgcgtccctgacgtcccgtcctcctccttctccgccttcggcctgtttgatgggcataatgggaacggagccgcaatttacaccaaggagaatctcttgaacaacatcttgagtgcggtcccagccgatctgaacagggaagactggcttgctgcactcccaagagcgctggttgctgcattcgtcaaaaccgataaggatttccagactaaagcacgttcttcagggacaactgtgacatttgtcataatagatggattggtcatcactgttgcatcagttggtgattcccgttgtgtactacaagctgaaggttcaatttatcatctatcctctgatcatcggttcgatgcaagcaaagaggaggttgatcgtgtaacagaatgcggaggtgatgttggaaggctaaatgttgttggtggtgctgagattggcccccttagatgttggcctggaggtttgtgcctatcaaggtcaattggagatcaagatgttggtgaatttatcgttccagttcctcttgtgaagcaagttaagctatctactgcgggtggccgactcattattgcaagtgatggtgtttgggatgtcttgtctccagaagtagcttttaactgttcacgtgaacttcctccagtgcctgcagctgagcaaatcgttaaaactgctgtgcaatcaaaagggctgagggatgataccacctgtattgttgttgatataatagtagaaaaaaacaactcttccatgccacttgctaaaaggcaaccaggaattggtgtcttcaaaaatatgttcggcaagaaaaaatcatcggattcatcatcccattcccattcagatagagaatatatggatccagataacgtggaggaaatatttgaggatgggtgtgcgcttctttctagacggctggattctgaataccctgttcgaaatatgttcaaactgttcatatgtgccatttgtcaagtagagttaaagccaaaccaaggtatatctgtacatgaagattcatcacaacctgggagcttgcgtcgctgggatggtccattcctttgccagagctgtcaggaaaagaaagaagcaatggagggaaagcgtcgttcacgagattcatcaagaaacagtgggtaagtgaatagttgacatgtgtagagtgatcaggtaactactgaccagcaacaccccagcaccaccattttgcagcatttcttctgttgtggcacttccttgatcacattcacatgtaatatctgggagttctgatctagaactagattgaagtattgaattgctactgtggaggtggctgctgcttatagctctcatcccaagtgaggagcatgccttgtcctcagcaaggtccttgcccaggaatgtaggcagctttactcagccctttgaccttgatggcacatacaggttgaaagattaacgatgccaaaatgatatggcttgtatattctaaggtccattgctgcgacgatcttcttatagagttctgacaaatagctatggcactgtttctgaattagaactaggcgcttacatcaattcttccccgttcgagctagccttaatttatggctagagaccttagtattatcagtcctgctgaggtccagccttcgctgacaccaatgtaattgtcatctaaaatattctttcaagcagctgtgattcatcagtaagacattagttgtcatgtacaatgtacaaaatcttgctaacaagacagatctgtttcgtcattacttggatgaaaatcaattggtgtctcaattggaggaaagaaattgttctaataaatgtggatggtagacttgcttgagtc

SEQ ID NO: 132203 - DNA, 1732 bp, Zea Mays
tcgatggcgtaagcgctcccgtctgcacaagtctggctggcttattcggcgccgtggcgggccagctgcaaagataagagtcaagacccgatcgagtgtaaagctacttgggtcatcaagcgtgcaaggtctcaatctcgcggtaatggcgaggccacacgtcgtggttgtgccgtacccatgctccggcaacatcaacccagcgctgcagatcgccaggctgctccaccgccacggcgtctacgtcaccttcgtcaacaccgagcacaaccaccggcgcgtgcaggccaccgagggcgccggagccgtgcgcggcggggaggggttccgcttcgaggccatcccggacggcctgtccgaggccgagcggggcaagcaggactacgggcgcagcctggccgtgtccacgagcacgcgctgcgctgcgccgctcagggacctcatcgcgcggctcaacggcacgccgggcgtgccgccggtcacctgcgtgctgcccaccatgctgatgagcttcgcgctgggcgtggcgcgggagctcgggatcccgaccatgtcgttctggacggccagcgcggcctcgctgatgacgcacatgaggctccgcgagctgcaggaaagagggtacgtgccactcaaggacgagagtttcctgacgaacggctacctcgagacgacggtcatcgactggatccccggggtgccgccgatccgcctcggcgacttctcgagcttcctccgcaccaccgacccggacgacttcggtctgcgcttcaacgagtcggaggcgaacagctgcgccaaggccggcgccctcatcctcaacaccttcgacggcctcgaggccgacgtgctcgccgcgctgcgcgccgagtacccgcgcgtgtacaccgtcgggcccctgggcctgctcctccgccaggacgacgaccgagacagcagcgcctccgccagcggcagcaccgagtcgaccggcctgagcctgtggaagcaggacgccgagtgcctcgcctggctggacgcgcaagagcggggctccgtcgtgtacgtcaacttcggcagccacacggtggtgacgccggagcagctgaacgagttcgcgtggggcctcgcggcgagcggccaccggttcctctggtccatgagggacaacctcgtccgcggcggcggcggcgccggcctggacgcgatgccctcgaccttcaaggctgagacggcggggcggtgccacgtgaccgcgtggtgtccccaggagcaggtgctgcggcacccggccgtcggctgcttcctgacccacagcgggtggaactcgacgtgcgagagtctggccgccggcgtgcccatggtgtgctggccgggcttctcggaccagtacaccaactgcaagtacagctgcgaggtctggggtgtcggcgtccggctggaggcaacggtggagagggagcaggtcgccatgcacgtcaggaatgtgatggcaagcgaggagatgcggaagagcgcggccaagtggaaggaggaggcggaggctgcgggcggccccggcggttcgtcacgcgagaacctgctgagcatggtgagagcgctcagctccgcacccaactcaccagatgcttaagagcccaaagatcagtagtcacactagaacggaatctagaatcatgaagcaatactgttcatgatcgacgccagcaaagttttagtctcctaataatagttggcatatttcagttgatta

SEQ ID NO: 132204 - DNA, 1598 bp, Zea Mays
tcgatggcgtaagcgctcccgtctgcacaagtctggctggcttattcggcgccgtggcgggccagctgcaaagataagagtcaagacccgatcgagtgtaaagctacttgggtcatcaagcgtgcaaggtctcaatctcgcggtaatggcgaggccacacgtcgtggttgtgccgtacccatgctccggcaacatcaacccagcgctgcagatcgccaggctgctccaccgccacggcgtctacgtcaccttcgtcaacaccgagcacaaccaccggcgcgtgcaggccaccgagggcgccggagccgtgcgcggcggggaggggttccgcttcgaggccatcccggacggcctgtccgaggccgagcggggcaagcaggactacgggcgcagcctggccgtgtccacgagcacgcgctgcgctgcgccgctcagggacctcatcgcgcggctcaacggcacgccgggcgtgccgccggtcacctgcgtgctgcccaccatgctgatgagcttcgcgctgggcgtggcgcgggagctcgggatcccgaccatgtcgttctggacggccagcgcggcctcgctgatgacgcacatgaggctccgcgagctgcaggaaagaggacgagagtttcctgacgaacggctacctcgagacgacggtcatcgactggatccccggggtgccgccgatccgcctcggcgacttctcgagcttcctccgcaccaccgacccggacgacttcggtctgcgcttcaacgagtcggaggcgaacagctgcgccaaggccggcgccctcatcctcaacaccttcgacggcctcgaggccgacgtgctcgccgcgctgcgcgccgagtacccgcgcgtgtacaccgtcgggcccctgggcctgctcctccgccaggacgacgaccgagacagcagcgcctccgccagcggcagcaccgagtcgaccggcctgagcctgtggaagcaggacgccgagtgcctcgcctggctggacgcgcaagagcggggctccgtcgtgtacgtcaacttcggcagccacacggtggtgacgccggagcagctgaacgagttcgcgtggggcctcgcggcgagcggccaccggttcctctggtccatgagggacaacctcgtccgcggcggcggcggcgccggcctggacgcgatgccctcgaccttcaaggctgagacggcggggcggtgccacgtgaccgcgtggtgtccccaggagcaggtgctgcggcacccggccgtcggctgcttcctgacccacagcgggtggaactcgacgtgcgagagtctggccgccggcgtgcccatggtgtgctggccgggcttctcggaccagtacaccaactgcaagtacagctgcgaggtctggggtgtcggcgtccggctggaggcaacggtggagagggagcaggtcgccatgcacgtcaggaatgtgatggcaagcgaggagatgcggaagagcgcggccaagtggaaggaggaggcggaggctgcgggcggccccggcggttcgtcacgcgagaacctgctgagcatggtgagagcgctcagctccgcacccaactcaccagatgcttaagag

SEQ ID NO: 132205 - DNA, 2674 bp, Zea Mays
gagagctatatacacgcacacacacaagcttctgtagtcgttcagtcaaggcgaggcgagcgtcgattgaagacgatgtgggagtcagagggcgattgccatgccggtgagcgcgagcgcgggctcgtccctgtcggcggcggcggctcctcgggccggtacgaggcagcgctcaagaacgacggctttgttcgaagagaccagtcctggtatgtaaacagcgatattcccagcgatttgcttgtcaaagttggagatgttagcttccaccttcacaagtacccgatgatctcccggagcgggcggatgagccgcgtgatctacgagacggcggcggcggccccggactcgggcgcggcggcggcggtggtggtggagctggacgacgtcccgggcggcgcggactcgttcgagctggcggcgcggttctgctacggcatggcggtggacctgacggcgggcaacatctcggggctgcgctgcgccgccgagtacctggagatgacggaggagctggaggaaggcaacctcatcttcaagacggaggcgttcctcagctacgtggtgctgtcgtcgtggcgggactccatcgtggtgctcaagacctgcgagggcctctcgccctgggccgagaacctgcagatcgtgcgccgctgcagcgagtccatcgcctggaaggcctgcgccaacccgcggggcgtgcgctgggcctacaccggcggcggtggggggaggccgatgccgaccaccagggcaggcgccggcggcggcacggcgagcccccggtggaacctcggcggcggcggcggggactccaaggagtcgagcccgagccggcaggccgtgccgccgccggactggtggttcgaggacgtgtccatgctccggatcgaccacttcgtgcgcgtcgtcaccgccatcaaggtcaaaggcatgcggttcgatctcatcggcgcgtccatcacccactacgcatccaaatggctcccgggtctcaccaaggacggcccgcacggcggcgcgctggaggagccctgggctcaggcccaggcgtcccccggcggcgggctccacatgatcatcgccagcggcggcggcggcggcggcggcaaggacgacatcgccgggagcacgccggcgcgggagcagcgcatggtggtggagagcctgatcagcatcatcccgctgcagcgcgacagcgtctcgtgcggcttcctcctccgcctgctccgcctggccgtcatgctgaaggccgccccggcgctggtgacggagctggagaagcgcgtgggcatgcagctcgagcaggcggtgctggccgacctgctcatcccctcctacggccgcgccgacaccgcctacgacgtggacctcgtgcagcgcctcgtcgagcacttcctggtgcaggagcagacggagctgctggcgtcgtccagccccggccgcgtggagcagccgccgctgcccgagtactacggcgctaggacggcgggcgccgcggcagcgtcggcgtcggcggggctgaacgccaaggcgcgcgtcgcccggctgctcgacagctacctctccgaggtgtcccgcgaccgcaacctgtccctgacgaagttccaggtgctggccgagtcgctcccggagtcggcgcgcacctgcgacgacggtctctaccgagccgtcgactcgtacctcaaggcgcacccgacgctgacggagcacgagcggaagcgtctgtgccgggtgatggactgccagaagctgtcgctggacgcgtgcatgcacgcggcgcagaacgagcggctgccgctgcgggtggtggtccaggtgctcttctcggagcaggtgaagatcagcaacgcgctggccagcggctcgtcctccaacgccgccgccgccgcgctgctggccaacaaggcggcggacggcgtggcgccgccgacgcgacggcagctgctggacggcacgccgcagtcgttccaggaagggtgggcggcggcgaagaaggacatcaacacgctgaagctggagctggagagcatgaaggccaagtacctggagctgcagcacgagatggacgcgctccagaagctggtggagcgcggcgcgccgtcgcccctggcggcggggctcaaggcaaccggcggaggcgttggtagcaagaatcacagccaggggccctcggcgtggagcagcgggtggaagaagctgggcaggctggccaagatgaccggcggcgacgcggcggggcatgacgggcacgtgccgggagcgcccggagaggcgccgaggaagccgcggaggtggagaaactccatctcgtgagcagctgcagagcagagtagagacgacggagccccggtggcggtggaatcagcttgtttcgtagcgagcagagtaggcggcctagtaacttgtgtaacacccattttcatgcatgcagttccgagattgaaaaacaaagcagagtggccgagaccgagattgcgcgcgtgcaggctgcagactgtcctaggagaagaagatcgtctcgtctatttccagttccagtgtgctgcatttgccgtgttgtcatctgttttgtttatgaacagaattaacagggttgagatgcgatcgaaccagagcctcaagctctcaaccatgcgaatcaacctgtttgagtcgtgaatgttctgagatc

SEQ ID NO: 132206 - DNA, 1514 bp, Zea Mays
caaaaaaaacatgtgtggcgcgcaaattagtggctgccccaaataccagccgcgccgccgcagcccaaaaccctatctcccttcccgtaattccagtcgtcgcgctccacccaaaaattgatgccgccgccgccaatcgccgtccacagccgcgcgccctagccggccggttgcaaccgccgtcccagccgcgcgcccaagcaggccggcccccaacgccgtcgccgtgatcctattacctgatgcggcggcaccaaacctcgcaaggtcgaagcccgtacgccgccctttgtcgcccaccgtgagtcacccctccggtcctccctccttaccccctcgccaagtccctagaggtcgctcaacgctggatctgccacgaccctaggctcccagctatctacgtcctactcctgcccctggctatacctatgactgcgtctcggcagccggcgccctgtggaagccctccgcttcatatccccgtgctgtcgtgcagccagctgccaggagggacacctgaccacacaaaatggataggtttttttagcagcaaacaagactttatcgatgtagttgaggcaatattcagaggtgcgatgaaaggcaaactgatagtgtcttgcccccttcctcctgagaggataccaagattctaacttcttttcaaggatgtctgagaaaactgcagctcatcacgtgcacacaatcagctacctagcccaaggtaagtagaaaagctgaagcttctataagagaagcacaacagaggggacaatgcaggcgtgttcgtgcttcgaaaaaacctaattgtgctggaaacagccattttcattctcaagactttgcgcaaatctctgcaataatctaatgttgtacttgtccatattgcatgtttaggtttgtatttaatcacgttcatcaaatatgatgggtatagatttcttgtttggtctactagtcaagcaagagaatgcccttcgttttgctgaggatgcaagtatgttctactcaaataaattactcatccaacatcctgtgtttttcgctattggtgtcatagtatgttctccctacaacattttattattgcagaccagttgtgctatggcacctgcctttagtgtcttccttacttcctattcatatggcgattctatgagtatggcacgagcagtagaagctataaaggagggaggtcctagaggtagtaagtcacttgtttactccatgatgacaatagcaagcagatcgcggtggtgcctatggatgctacaacaagaaagatcaaaagttcttttggatggatgcagctagatattttgttttgtattttctccaaaagagaaatttgcaagtgaacttaaaattgtgaaaccaacatgtggttgtactagctagtatctctaagctttcacaagccaaacttagtgttgttgctgcttattttaatctttattacaacaaaagcaaacttgtgaactttatgtgaatgcagtacaattgttattgtcatg

SEQ ID NO: 132207 - DNA, 979 bp, Zea Mays
caaaaaaaacatgtgtggcgcgcaaattagtggctgccccaaataccagccgcgccgccgcagcccaaaaccctatctcccttcccgtaattccagtcgtcgcgctccacccaaaaattgatgccgccgccgccaatcgccgtccacagccgcgcgccctagccggccggttgcaaccgccgtcccagccgcgcgcccaagcaggccggcccccaacgccgtcgccgtgatcctattacctgatgcggcggcaccaaacctcgcaaggtcgaagcccgtacgccgccctttgtcgcccaccgacacctgaccacacaaaatggataggtttttttagcagcaaacaagactttatcgatgtagttgaggcaatattcagaggtgcgatgaaaggcaaactgatagtgtcttgcccccttcctcctgagaggataccaagattctaacttcttttcaaggatgtctgagaaaactgcagctcatcacgtgcacacaatcagctacctagcccaaggtaagtagaaaagctgaagcttctataagagaagcacaacagaggggacaatgcaggcgtgttcgtgcttcgaaaaaacctaattgtgctggaaacagccattttcattctcaagactttgcgcaaatctctgcaataatctaatgttgtacttgtccatattgcatgtttaggtttgtatttaatcacgttcatcaaatatgatgggtatagatttcttgtttggtctactagtcaagcaagagaatgcccttcgttttgctgaggatgcaagtatgttctactcaaataaattactcatccaacatcctgtgtttttcgctattggtgtcatagtatgttctccctacaacattttattattgcagaccagttgtgctatggcacctgcctttagtgtcttccttacttcctattcatatggcgattctatgagtatggcacgagcagtagaagctataaagg

SEQ ID NO: 132208 - DNA, 1494 bp, Zea Mays
attcttgcgtacagccgacgccaagtaatctcggaaggaaatcaattatgctggattatttctcgcgcaatctgtcatctggggctctcggcatctaaaaccctccgaggaccactaatcaaacccaccgccgcaccgcacctcacctgccgtctccgcccaaaccctagccccggcacccgggggacgacgccatgtacgccgccgccgtgttggcagcggtctctgcggtatccgtcgttgcggcgcagtccccggagccgcgcgacaaccaaacggtcgccgacgtgatgagcatctctatattcatggccgtattcttccccgtcttcgtcgtgcttcttgccttcgcctgcctccacttgttccgggcccccgacgacgacgacccccaggctccggacgcggcgtcggcaccggagtggccccgcggagggggcagccgcaagggagggctcgatgccgccgcgatcgctgcgctgccgctagtgttcttccgagaggtgagacagcaccggatcgtggacgggcgcgaggacgcgctcgagtgctcggtctgcctcctcgagttcgacgacgacgacgccctccgcctcctcccgacgtgcccgcacgcgttccacccggagtgcatcggcctctggctcgagaggcacgccacctgcccgctttgccgcgccagcgtcctcgacgacgcgccaccagccccggcagcgcagctggagcttcatacggcgccaccgctgacgccggactcgtcgcccgttcacgcggctatcgtgctaatcggcggcgccggcgcaagcgaggtaggcgaagaagaggaccggactacgatccagcgcctcgcgaggaaccgccgcgcggcggggcggcaggcgctgccgcggtccaactcgacgggccacagcgccagcgacggcgggatggagcggttcgcgctgcggctcccggagcacgtgcgccttgagctcctcatgtcccacaggctgaggcacgtgacgagcgcggtagcatccgtgcgcgtcatggagggtagcgcccacgacaccagtacggtgggcgggagcgtcaggagcaccatggcgaggctgatgtcgctctttacaccgggcgccgggtggaaaggcgatggcgacgataagtccggcaaggcagaggccactgccgcgtcatctctccgccgccgcgagaactcgtccagaggagcagtgggagaagaaaagagaagcgtctgataggcgaaagaaaccgaataagtactatgctcacacgattcggtttcaaacttctgatgattccatcagtgtccgtttttttagtagagagatgcttcttttaggattgaaggtgtagcttgaggatgcagtgttgcggattttgatcattttttttcttttgagcctatttttgtgagaattgtgagaacaatatgggaacgaggataaacatgtgagcgaacctgtaaaagatacatcgttctatgtccactga

SEQ ID NO: 132209 - DNA, 2314 bp, Zea Mays
ctcccacccgcgcccacgcccacgcccacgcccacggccgcaccaaccaccaggcaccagccccgatttcctcctaatcaatcacaccatcaaaccaaaacccaaacagcacttctcctgcaatcgccgacgtcgccggaggcttcgccggccggagcagcgccgacggttgttttgcccctccctcgtccggcccagcagcccaggcgagcatgccttcgattgcgccaccgtcttcctccgtcgctgccctcacccgtcaaccggtgcaattcttcaaagggtgcagtgtatccaaggagacaaagggaccggtccgcagtttcttcactgcaaattcaaagagcaccaaggtgaaatcagcgggcttgaaagtagcatcatccttcaaaaatgatggtggttatccagctggcggtgtctcttggaaggacgacactctattgccaaaaagcacaaccattcgtggccaggaccattcggttgctgaccctgtactcccaatggattccatgattacgccagaaatcctctctgctaatgtggaacgtgttatagacatgtttgcagatgatgacactgatactgaacttgatttggatagcccgacagagggcttcacatcaattgcagaagccattgaggacatacagcaaggaaaacttgtgattgttgttgatgatgaatcaagggaaaatgaaggagatctgataatggctgcctccttggttaccccagaggctatggcttttatagtaaggcatgggacaggaattgtttgtgtcagcatgaaagaagatgatctggaaagactgagccttcctttgatggttaccacaaaagaaaatgaggagaagctatgcactgctttcactgttacagtggatgcaaaagagggcacaactactggggtatctgccaaggacagggcaaaaacggtcatgactcttgcatctcctgactctaagcctgaggacctcaaccgccctggtcatattttccctttgaaatacagagaagggggtgttctgaaacgagctggacacaccgaggcatctgttgaccttgccatgttggctggattacctcctgttgctgtcctttgtgaaattgtggatgatgcagatggttctatggctcgcctaccaaagttgcgtgtctttgctgaaaaggagaacttaaagattatatctattgctgacttgattaggtataggaggaaaagagacaggctaattgaacgcgcttctgttgcacgcttgcctttgaaatggggcaatgtccatgcatattgctacaaatctgttattgatggcattgagcatattgccatggtgaaaggtgatattggtgacggccaagacattttggtgagggtgcactctgagtgcctcacaggcgacatttttggatccgcaagatgtgattgtggcgaccagcttgcgatggcaatggagatgattgagaaggctggaaggggtgtattagtctatctccgtggacatgaaggaaggggtattggtctgggccacaagcttcgtgcttataacttacaggatgatgggcgtgatactgtggaagctaatgaggaacttggtcttcctgtggactcacgggaatacgggattggcgcacagatattgcgggatctaggagtccgttcaatgaagctgatgactaataaccctgcgaaatatagtggtctcaagggctatggattgagcattgcgggcagggtgcccttgattacgccaattaccagtgagaaccgtaggtacctggagactaaaagaacaaagatgggacatgtatatgggttggccaatgcgcaggccaacctagcaaatggcagccagagcacagaagagaatcattaggcccccaagcatgtttccattattattccagcaatccagcttggtgacacaaaagagtgatatgattcttcgtttggggagttcctgaaatcttctcccccgatatttccgtagattctttcgcaaaaaagccgatatttcggtagatcgatttgttcttcaattgtaactgtaggtttcaaggtggctaatgagtaatgagcctaataatgaacggtaggtttcaagatggccagtaatgatatacacggagttagtcgtcataatgtactgtgttgagttttacgactttatcgccttggtgtggttgtcctgatggagttgtgatcgaatggtgtggcttttcactgccctttccttcacccactaaaaagcatagaatgtggagaattttaccttgagccattatagaagtttataatactttatgtgccacg

SEQ ID NO: 132210 - DNA, 999 bp, Zea Mays
cgctcatttcacttagacacaggaagccgctggtctgtgccgctacgccatctctctgtctgtcccatcgcctcgcccttccccaactcgccgcgataggagcccctgcgcgctcgacgccgagaccccacgcgacgagtgaccagcgccgaagaccccgcgcccctacacgccgtcaagacgccgaccgtttctgaattttaatggagctttactgcgtccgtttcttctgtctggttgaagccgccattaaacagccattaatggtgatggttagtgcttgtgcttcgtctcccaccggctacctctcttattcttccacttatggccacgaccgttattggattcgacactctcttctctcctcggcgcccctctccatccccattaaatctgcatttatcccctgccactgtcgcacaccattgatgcttgcctgctcagcttccctctccacggctatttaagccatggtgccgtgcccctttccctcccgctctccactcttcctccgtgctgaattattgtcgcgtctgcttgctgcttgcttgcagagcaccgcgctgccgtttgccacaattcgccagagctgttcaaactccttcgcctagctccgtcagctcgccggaacctctcgccaaagccacgacatcgccggagttgctgctctgctgcaccattttgcctgtgtgcccacaccgctggctgtttccccactacgccgcgccacacacccgccgtcgagcccctgctcgcgctgtgcccagctcgctgtcgtgaagctcatcgccggaccgtccgcagccgtacgtcgttcgtcatccgtggagcctcgccggagctacgcacccaccgtgccaagccttcaccttgacgcacgcccaaacccatccgtcgtccgttcacccaaggttgatgacaaccccgaaatatttattttccatatcatgttttgaatttattgtgaattattgttgtaatgatgcgatttagcgattc

SEQ ID NO: 132211 - DNA, 2210 bp, Zea Mays
atgcctgcgacagtggtcgcgcttgtcgtcctctcccgctcgatcgtcgtcgccgaccggatctggttaccgccgcaaatgcatccacaccgcaccctgcgcttggggaggagggcgcgatgggatcaggagaactcggccaccttccatcgacggcgtggggaggcggatcccctgcgcttggggaggagggctcggatgacggggaccgcggagcagagaaaatgggagctgaaagtgttccgagtgccaaccgcaaccgtaaatttcacaagtggagagggcatgagcgcaaaaggcaacaatcttagcacagcagcaccaaagcgcgtcgtgtcgtgcaaatccaactttgataccactcgctgcctggttatggactccaccaggagcaaccaggtcgccggcagatgcaacagcaccatcgcgtcaagggctgccacggtcccgccgtcgctgaccatgccgcgcggcgaactcgctgacgccatcgtgggcggaggcggaggaggaggagcggacggggacccccgggccgccctcctccgtctgtctgctctcggggaccgcatggccgccgtccggggccgtatctgcgcctctatctcgggcgaagcccggcctctctcctacgccgacatccaatctgtctcctccgagatctccgccgctgcccagctcgtcgtcctcaacgccgccgagctcctcgcttcctccgtcccctttcccgccccacctccacctcctccttccgccgctccctctcccgctcccgtccgagagatcccagttgtggccgcttccgcccaagagcaacccctggaggccgccaaggacgacggtggctacgaggtcgtggagctcgacgccgccgagctgctagcggagcacgtccacttctgcgagatctgcggcaagggcttccgccgcgacgccaacctcaggatgcacatgcgcgcccacggcgaccgcttcaagaccctagacgcgctctcccgccctggtcacggccagccgaagccgcccgttggcagcaacgtgcgcttctcctgcccctttgcgggctgcaacaggaaccgcacacaccgccgcttccggccgctcaagtcggcggtgtgcgcgcggaaccacttccggcgcagccactgccccaagctctacgcctgcgagcgatgtggcggcaagaagcgcttcgctgtcctggcggacctccgcagccacctccgccactgcggcgaggaggcacagtggcgctgctcctgcggcaccaccttctcccgcaaggacaagctcttcggtcatctagcgctctttgaaggccacacgccagcagttactaagccaaacaaggatgtggtgacagggcctacagagtccaccattgatgctatggaggaagggggatttgaagaaggcattcctgaccgggaggaggatgaagagggcggttatgatccagagttcttcaaggagtggatggatgagctcagaggtggtgctggtggctccaattggcctggaccagcagcagatggacattagcaatgttgcgagggttaataggatggtttgacaagggacatctgcttacatcaagtgaccaggaggatcaataaagactgaataaaggtgatagtaaagaaaagaggtgctttgggatagtttgtaggatttctctttaccattgtgtttgtgcgttcgttctaaccagtagcttgtatggtatggtgcgtgtgttgtttagttgctgttcactgggcctctcccttgccattctcggttgctttcatgttatcctgtgaatttgtgatctaccaggtaatacagtggagaactgtgtcatgctctgtaagcgttctccttggctgtgtgggtcatggagttgccgattactgaggaagaaggatagcttgcaggaaaacggtggcaccagttccctgtgcgctgctgaggatgcgaagtattcgggggagttttagaaaaatactttggttttgtgaaacaatttgattttagaatgtattgatgtgtttggacgcaacaaactttagtatttgttagaaagttaggcatttttagttttaatttaatccagaaaaacagtgcgatatatgtgatgacatgtatgtgcatgtgtgtataactactcgcataagcagtaaacagcaatgaaacatgcacaaatacgaagaacagagtgtacccagcgg

SEQ ID NO: 132212 - DNA, 1935 bp, Zea Mays
atgcctgcgacagtggtcgcgcttgtcgtcctctcccgctcgatcgtcgtcgccgaccggatctggttaccgccgcaaatgcatccacaccgcaccctgcgcttggggaggagggcgcgatgggatcaggagaactcggccaccttccatcgacggcgtggggaggcggatcccctgcgcttggggaggagggctcggatgacggggaccgcggagcagagaaaatgggagctgaaagtgttccgagtgccaaccgcaaccgtaaatttcacaagtggagagggcatgagcgcaaaaggcaacaatcttagcacagcagcaccaaagcgcgtcgtgtcgtgcaaatccaactttgataccactcgctgcctggttatggactccaccaggagcaaccaggtcgccggcagatgcaacagcaccatcgcgtcaagggctgccacggtcccgccgtcgctgaccatgccgcgcggcgaactcgctgacgccatcgtgggcggaggcggaggaggaggagcggacggggacccccgggccgccctcctccgtctgtctgctctcggggaccgcatggccgccgtccggggccgtatctgcgcctctatctcgggcgaagcccggcctctctcctacgccgacatccaatctgtctcctccgagatctccgccgctgcccagctcgtcgtcctcaacgccgccgagctcctcgcttcctccgtcccctttcccgccccacctccacctcctccttccgccgctccctctcccgctcccgtccgagagatcccagttgtggccgcttccgcccaagagcaacccctggaggccgccaaggacgacggtggctacgaggtcgtggagctcgacgccgccgagctgctagcggagcacgtccacttctgcgagatctgcggcaagggcttccgccgcgacgccaacctcaggatgcacatgcgcgcccacggcgaccgcttcaagaccctagacgcgctctcccgccctggtcacggccagccgaagccgcccgttggcagcaacgtgcgcttctcctgcccctttgcgggctgcaacaggaaccgcacacaccgccgcttccggccgctcaagtcggcggtgtgcgcgcggaaccacttccggcgcagccactgccccaagctctacgcctgcgagcgatgtggcggcaagaagcgcttcgctgtcctggcggacctccgcagccacctccgccactgcggcgaggaggcacagtggcgctgctcctgcggcaccaccttctcccgcaaggacaagctcttcggtcatctagcgctctttgaaggccacacgccagcagttactaagccaaacaaggatgtggtgacagggcctacagagtccaccattgatgctatggaggaagggggatttgaagaaggcattcctgaccgggaggaggatgaagagggcggttatgatccagagttcttcaaggagtggatggatgagctcagaggtggtgctggtggctccaattggcctggaccagcagcagatggacattagcaatgttgcgagggttaatagggtgataaatattataattagtcctattgtggaagaatgtaaacaacaaatgagtctatgactattatcaagagagcagagctagtgctagaggatcccacatgagtggggttgagaggagggataaaccaaggcaagcctccccccaatgtggagagactgcttcgatcccgcgacctggtaactcagtgaagcagctctcaccagtcaccactacatcaggcctgctcctcaagagatgaaacttttttgttaaacttttgccaagaactctgactagaatgaacagcatgtagcttgaattcaatggtggctgcacttataagtgagtttcataaagtaatatttagtaggttttatcttgaatctttc

SEQ ID NO: 132213 - DNA, 1651 bp, Zea Mays
tcattcgatcaaaccgagcccattgcccttgccccccagccgcgcaaacgtgagcgcgacttggcaggcgtgctcgtccggtcttcgtcctggttccctgtgcccccactgttccagcatcagatattcagatcagatcgatcagaccagaaagtttgcgctcgtctgcttggtaaaggaaaggagaagtttccgaaataggggcggcgcgccgggcgcattttggttgctggattggaaccgagcgaacgcgccggagtccggatgggctcctcgtccgctccggcggccgcggccgcggccgcgccgagccggcgcaaggtggcgctctacctggccctcctcaccctgcagtacggcgcccagcccctcatctccaagcgctttgtccgcgaagatactatagtgacctcactagttcttgcaacggaagcagcaaaggttatttgcgcaatcattttattgattgcagagggtagtctgaaaaaacagttcagtaactggactctcactggatcactgactgcgtctggactgcctgctgccatttatgccctccagaatagtctgctgcaagtatcatacaagcatctggattccttgaccttttcaatccttaaccagactaagcttttgtggacagcatttttcacatttcttattttggggcaaaagcaatcttccaggcaagttctagcattggccctcttaattggtgctgccgttcttttaagtgttggggagagcagtagcaaaggttccaagggtggtggctctgactatatcttgctatatgggatcattccagttacagtcgcttctgtgctgtctgggctggcctcttcattgtgtcagtgggcatctcaggttaaaaaacatacctcttatatgatgaccatagagatgtcatttattggaagtatgtgcttgttagcaagtacctatcgctcaccagatggagaggccatcaggaaatatggatttttccatgaatggactttctggactgtgataccggtattaatgaatgccgtgggtggaattcttgttggtcttgtcacaacttacgcaggtggcgttagaaagggttttgttatagtttcagctctccttgtaactgcactgctacaatttatatttgatgggaagccaccgtcactctactgcctgatagcattaccacttgtcgcgtcaagcatattcatctaccaaaaacatccatatgttgataggaagaagaaagactgatccacataattgtcagagacgggaattatcaacaggatgtgatcctaacctcattttctccacaaggctggaatttgcaccgtcaaggggaccaaatttgactcttgaagagttgctgttcgtcaagctatgtttcaattatctactgatctatatatatagaattaattagtaggacactagcctggaatcagtttcagcaggcagttgacaagcttgcatataacttctcgaaggaggcttcgtatcaatgatgatgatgaagtgtttccatgtgcagctatctatacttgtacggttgctgaatctattgtattttttatggatttctatttagattccgactttcgaatatatatttctatgatggcagcaaattaaaaaccaattattgtgtgccgga

SEQ ID NO: 132214 - DNA, 1757 bp, Zea Mays
gctagagatacacgcagaaggaaccttctcacatggaaaaaaaacatcgcaagttcgcgacagaatagtgacatcctgaagcagtcaagcactcaacctctccttcagtccttcccatctcatcctccatctcgatctcttcgctccgtcgaactttcacctagtcagcctgccgcgctacccctccaccgccgtctccacgcccgtggccaagccagcggaaccctagcatggcgaagctagcgcgatcgccaacgacctccccgccggcggcggccgcggataagcaccgctccgcggccgggtcggggctccggtccctcgccagtgccgcctccggatggtgggaccggtggacggtcattggttccggactctccaagctcgaaagggccttcggcgaccagttccccgagggcgagcgctacttcgggctcgagaacttcggcaacacctgctactgcaacagcgtcctccaggcattgtattattgtgctccattccgggaacagttgctggaatactatagaagaaacagaaatctcgaagatgctgaagaaaatttgttgacctgcctagcagatcttttttcacagataagtgcatcaaagaaaaagactggtgttattgctccaaaacgtttcattcaaatggttaggaaactaaatgaatattttcgtggctacatgcatcaggatgcccatgagtttttgaatttcttactgaatgaaattgttgatattctggaaaaagagtctagttctgcaaaggattctcctgggaccacatcttctgaaaatgtctcaaatggcgcagctgttgatggagttagaaaagaaccactggttacatgggtacataagaattttcagggtattttgaccaatgaaaccagatgcctaatgtgtgagacaatcaccgcaaaggatgagacattttttgacttgagcgtcgacattgaacagaatagttcactcacaagctgtctgaagaatttcttttctactgagactttaaatgcggatgacaagttcttctgtgataaatgctgcagtttgcaagaagcagagaagagaatgaagataaaaaaggcgccacaaatattagtgatccacctaaagcgcttcaagttcatcgagcagcttaaccggcacaagaagctgtcgtaccgagtggtgtaccccttggagcttaagctcagcagcaactccgctgatgccgactgtgagtactccctctttgccgtggtggtccacctggggagcggccccaaccaggggcactacgtagccatgatcaagagccatgaccattggttgtccttcgatgatgacaatgtcgagatgatcccggagtctaccctacagaccttctatggctcttatcatgaatattcgggcaacactgatcatggctacatcttgttctacgggcgcattggtgggagtggaaatgagaagaccgactcttccgatggagtgtgaccgttgacatgggatcctgggtggttcgatgtacatgggctttcctggccttcgtatacttcggttggataggatatatttacattttcaacaagaaagtgttttttttgcggaagaccgtggggggaaaacataaaagtttagtttgttgttagttgcagttccttgtaaaggattagttggcaggttagtatatcattttattttgttttcataattctaacttgtcatcgggaccacattgcgcacgtttttttttttttgtgaaaaagt

SEQ ID NO: 132215 - DNA, 488 bp, Zea Mays
gtcggggggtcaggaaagaaaggggcctaatatgtaatagaatagtagtgttaatgttaaattattgtcttgtgaaatcgcatagaagcgaaagagaggacacacacattaggctaaagcgtcggttaaaggcctcctacaccgctgcacagaaccagtctcgtcctcactgtcatcgccgatcacatgtcacaggctcgcaactccctgatcttagatgttaccaaagaagtatcttttcatgagaagcaatggatgtgatggagttatattcttcattaaggttttgttggcaatatgagctgcacagtttgaaggctttcttgatggctctaaacgtgatccattgaagacattgtcaattaaaaatgattctaatatgacagaggttgcaaaccctattatataaattggcgtgttcgtgatccatacgtcccgatgtatcttgtctccttactctcttataagatgctctctggaattccttt

SEQ ID NO: 132216 - DNA, 338 bp, Zea Mays
attttcttcgtgcctgggcgttcccaggtgccatgcgagtagatcggcaactactccatcctcctctccctacctggccatcgtgcagcagccgtgctgagcctctgctgccctctctctggccactcgcgtgagcctctgctggtcggctgtccggacacgacggctatggccgagcccagcgcgaagtcatcctccaggactgagcccctgtgcagccactaccgccggcaggcctcggtgtccggttgtgcttcgacaagtcacgcgcctccgacaaacctcgcgcccgtcgtgttcttgcctctacgtcaatcgacacgcataggtgagaatcc

SEQ ID NO: 132217 - DNA, 1268 bp, Zea Mays
ttggctcgtgttgccgggctacacaaacgagcccattcaggggattctttattttatctcatattttaacgtatttaataatttagaaattataacaaaataaaactaaaataactaaaaattagtcacagtaaaccaaacatccattccttcatcccgtgtccgccgccggcgagtctacccagccgcggggctcggtgccccggccatccatcccctgcgaatctcgatccgccctcaaagggagtcaagcctcctccagcctttcctttcaaatcggatttgtttgctcaagttgcaagatggataagaggaccaaggttgcagtttgtgttgctgctgcacataacttactgtcaatgatggccgtgattattgcgtctagaaaaagaaaacgaaatgcaaggagcgcacagattacctatgcaccattgcatgtgagtggtacaggctgggatgaagataattttgttattactctggatgaagagcactataatggttatgttaaggatgacaaaagcgatgctgattgtttaaacaagccttttgaacactttgatgagatgcaaacaatatttggaaataccatggccacatgtaagtttgcaaaggattccagtgcaggtctaggtgaagatgatgaaactgaaaatgaagaggtgacggcacgtgctttcactaaaaggcagttcgcttgtgatgataatgtcgcaacatcttctgcaagcaagagcaacaagaaggcaaaaaaacgtgacagtgaagaggagttgattgctgcattcaaaagtgtcgcggataagctatccaatgctattgagaaggttgccacatgggacactgatgtaccagatgatctttttgacaatttgctaaaccttccaggttttgagcagacccacatatctctgtatttcaattatttggtggcgcaccctcacattgctagagccttcaacaagttgccgttcgaccacaagttaatttgggctcgcaatttcgccagtgagaagttctctagagtgtgagggtaattagtaggtagatttgggcggctcttttgcttgaaccacatcgaacaatgaattgtgggctaagtacgtgtggattttgtagaagccttgaacttgatattatgtgcaaggctaggacacattattatgtgtgctgtgtggagttaataatatgtgttttgtggacttaatattagttgtaacatatcctgagatgggggcaatggctataagctttttggttgaattcca

SEQ ID NO: 132218 - DNA, 1981 bp, Zea Mays
ccctcccacctacccactttctctcctctcgctttctcctctctcgttcttgacactccttgtgatcgccacccgcgcggccactgcagatcgatcgagagaggcgaacggcagtcggcaggcgagaaagaagtgctgacgcctcgtttccgtcgcacgcaccactactactcgcccagtccgccgctctcccgcggatccttcacctccactccattccgaggatctcattagcacgctctccggcgcggcggcggcccttcctccgagaccaggagctcgccgccggagtcagtgagtgaggggtacgtggtcgccgtccgtttccgacagtccgcggggcccgcggagcgtaaagcaaggacgcagccaagggagagagggggagggaagcaagtggatctgtgctagctgttgcggtattctccggaacactctccaccaggcacagagcaggtgtgctcagaatatgcagtcatctgcgatggcgttcttccctagcgttgccacggcgaagctggagctgaactctctgtacaggaagtacgtggacatgttcggtgtatcatcaaacaactctaccgttggctctcacaccatccacaagatgtcgcaccttcctgtcctgctggtcgatcgtacattcttcagcaccggtactgctattcagagcattgccatcagctatggagctcttattcgtaggtggttactgggcggaacttctgttgcacagcacgcgatgatatcccgtgctgctatgaactcgcttccttgctgtgccttcctgccattctttgccagcgttggtgctctaatgaccaagctctgtggctgcactatgattccagaccgtttttctggttggcaatctgtccttggccaaagtgctaacctccgtggagaaccagttctggtcgtggacaataatgagctgggcaatgatcagacattatcgagctttcttgggcgcaagcgagattacgtcggtctcggtctagcgcttcagtgcatctgttaccctgcatgtctgaaggttgctgagttcccccagaagaatctcagcttcagcaggcagtggatgcgaagtggccatgacacgagcgcaatctggagggccatggcgaggaatgagcaatacctggcattcgtcgtagtcctggcggccttgcagctcttcctgcggctagcccgggtgaacgtcaccatcctgttcctgccaatgctgtcccaggccgtgagttccaggagcagcccagcggtgatcggcaacgttctgctggttctggtgacctcctgcggagttcttggatctgcactctcagtgaaacagttcggccgggaggtgacgttcgctatcggtgccatcgtgatggtaatttgccaggtcgcgattccactgatcatggaagtccagatcggggttggcggaggaacgcgcatgccggtgggttacacggccgcgacgttcgccctgacgtgcgtcgtgtcctgcggcctcagctggtcgtggggctcgttcttctggaccttacctggcaggaaggttcactcggccggacacgttctggccgtggctctgaacctgggcgtctgcttcgcccagatgcggtacttcctgctgatgctgtgcaggctgaagaacgccacccttgcgtactatgcgctgtggatctggtcgtgattgggattcagctgagggagaatgcgtagctagatgagtgcgtgttaactctggttacttgagtaggaggctagtttggtggatgtaaatacttctcttggcttggcttgtacagagttctggcgctatttctgatggctccgtagatagcaactgtagggcttggttgcacttcctatgctaatggctgttctactaactgtgtggcgctcaataaagctgttatggttggcatggtcgctacagggttatcaattaagcggatatgtggctgaccaatcggacactttcaaattc

SEQ ID NO: 132219 - DNA, 1679 bp, Zea Mays
ccctcccacctacccactttctctcctctcgctttctcctctctcgttcttgacactccttgtgatcgccacccgcgcggccactgcagatcgatcgagagaggcgaacggcagtcggcaggcgagaaagaagtgctgacgcctcgtttccgtcgtgtgctcagaatatgcagtcatctgcgatggcgttcttccctagcgttgccacggcgaagctggagctgaactctctgtacaggaagtacgtggacatgttcggtgtatcatcaaacaactctaccgttggctctcacaccatccacaagatgtcgcaccttcctgtcctgctggtcgatcgtacattcttcagcaccggtactgctattcagagcattgccatcagctatggagctcttattcgtaggtggttactgggcggaacttctgttgcacagcacgcgatgatatcccgtgctgctatgaactcgcttccttgctgtgccttcctgccattctttgccagcgttggtgctctaatgaccaagctctgtggctgcactatgattccagaccgtttttctggttggcaatctgtccttggccaaagtgctaacctccgtggagaaccagttctggtcgtggacaataatgagctgggcaatgatcagacattatcgagctttcttgggcgcaagcgagattacgtcggtctcggtctagcgcttcagtgcatctgttaccctgcatgtctgaaggttgctgagttcccccagaagaatctcagcttcagcaggcagtggatgcgaagtggccatgacacgagcgcaatctggagggccatggcgaggaatgagcaatacctggcattcgtcgtagtcctggcggccttgcagctcttcctgcggctagcccgggtgaacgtcaccatcctgttcctgccaatgctgtcccaggccgtgagttccaggagcagcccagcggtgatcggcaacgttctgctggttctggtgacctcctgcggagttcttggatctgcactctcagtgaaacagttcggccgggaggtgacgttcgctatcggtgccatcgtgatggtaatttgccaggtcgcgattccactgatcatggaagtccagatcggggttggcggaggaacgcgcatgccggtgggttacacggccgcgacgttcgccctgacgtgcgtcgtgtcctgcggcctcagctggtcgtggggctcgttcttctggaccttacctggcaggaaggttcactcggccggacacgttctggccgtggctctgaacctgggcgtctgcttcgcccagatgcggtacttcctgctgatgctgtgcaggctgaagaacgccacccttgcgtactatgcgctgtggatctggtcgtgattgggattcagctgagggagaatgcgtagctagatgagtgcgtgttaactctggttacttgagtaggaggctagtttggtggatgtaaatacttctcttggcttggcttgtacagagttctggcgctatttctgatggctccgtagatagcaactgtagggcttggttgcacttcctatgctaatggctgttctactaactgtgtggcgctcaataaagctgttatggttggcatggtcgctacagggttatcaattaagcggatatgtggctgaccaatcggacactttcaaattc

SEQ ID NO: 132220 - DNA, 1866 bp, Zea Mays
ccctcccacctacccactttctctcctctcgctttctcctctctcgttcttgacactccttgtgatcgccacccgcgcggccactgcagatcgatcgagagaggcgaacggcagtcggcaggcgagaaagaagtgctgacgcctcgtttccgtcgcacgcaccactactactcgcccagtccgccgctctcccgcggatccttcacctccactccattccgaggatctcattagcacgctctccggcgcggcggcggcccttcctccgagaccaggagctcgccgccggagtcagtgagtgaggggtacgtggtcgccgtccgtttccgacagtccgcggggcccgcggagcgtaaagcaaggacgcagccaagggagagagggggagggaagcaagtggatctgtgctagctgttgcggtattctccggaacactctccaccaggcacagagcaggtgtgctcagaatatgcagtcatctgcgatggcgttcttccctagcgttgccacggcgaagctggagctgaactctctgtacaggaagtacgtggacatgttcggtgtatcatcaaacaactctaccgttggctctcacaccatccacaagatgtcgcaccttcctgtcctgctggtcgatcgtacattcttcagcaccggtactgctattcagagcattgccatcagctatggagctcttattcgtaggtggttactgggcggaacttctgttgcacagaccgtttttctggttggcaatctgtccttggccaaagtgctaacctccgtggagaaccagttctggtcgtggacaataatgagctgggcaatgatcagacattatcgagctttcttgggcgcaagcgagattacgtcggtctcggtctagcgcttcagtgcatctgttaccctgcatgtctgaaggttgctgagttcccccagaagaatctcagcttcagcaggcagtggatgcgaagtggccatgacacgagcgcaatctggagggccatggcgaggaatgagcaatacctggcattcgtcgtagtcctggcggccttgcagctcttcctgcggctagcccgggtgaacgtcaccatcctgttcctgccaatgctgtcccaggccgtgagttccaggagcagcccagcggtgatcggcaacgttctgctggttctggtgacctcctgcggagttcttggatctgcactctcagtgaaacagttcggccgggaggtgacgttcgctatcggtgccatcgtgatggtaatttgccaggtcgcgattccactgatcatggaagtccagatcggggttggcggaggaacgcgcatgccggtgggttacacggccgcgacgttcgccctgacgtgcgtcgtgtcctgcggcctcagctggtcgtggggctcgttcttctggaccttacctggcaggaaggttcactcggccggacacgttctggccgtggctctgaacctgggcgtctgcttcgcccagatgcggtacttcctgctgatgctgtgcaggctgaagaacgccacccttgcgtactatgcgctgtggatctggtcgtgattgggattcagctgagggagaatgcgtagctagatgagtgcgtgttaactctggttacttgagtaggaggctagtttggtggatgtaaatacttctcttggcttggcttgtacagagttctggcgctatttctgatggctccgtagatagcaactgtagggcttggttgcacttcctatgctaatggctgttctactaactgtgtggcgctcaataaagctgttatggttggcatggtcgctacagggttatcaattaagcggatatgtggctgaccaatcggacactttcaaattc

SEQ ID NO: 132221 - DNA, 1564 bp, Zea Mays
ccctcccacctacccactttctctcctctcgctttctcctctctcgttcttgacactccttgtgatcgccacccgcgcggccactgcagatcgatcgagagaggcgaacggcagtcggcaggcgagaaagaagtgctgacgcctcgtttccgtcgtgtgctcagaatatgcagtcatctgcgatggcgttcttccctagcgttgccacggcgaagctggagctgaactctctgtacaggaagtacgtggacatgttcggtgtatcatcaaacaactctaccgttggctctcacaccatccacaagatgtcgcaccttcctgtcctgctggtcgatcgtacattcttcagcaccggtactgctattcagagcattgccatcagctatggagctcttattcgtaggtggttactgggcggaacttctgttgcacagaccgtttttctggttggcaatctgtccttggccaaagtgctaacctccgtggagaaccagttctggtcgtggacaataatgagctgggcaatgatcagacattatcgagctttcttgggcgcaagcgagattacgtcggtctcggtctagcgcttcagtgcatctgttaccctgcatgtctgaaggttgctgagttcccccagaagaatctcagcttcagcaggcagtggatgcgaagtggccatgacacgagcgcaatctggagggccatggcgaggaatgagcaatacctggcattcgtcgtagtcctggcggccttgcagctcttcctgcggctagcccgggtgaacgtcaccatcctgttcctgccaatgctgtcccaggccgtgagttccaggagcagcccagcggtgatcggcaacgttctgctggttctggtgacctcctgcggagttcttggatctgcactctcagtgaaacagttcggccgggaggtgacgttcgctatcggtgccatcgtgatggtaatttgccaggtcgcgattccactgatcatggaagtccagatcggggttggcggaggaacgcgcatgccggtgggttacacggccgcgacgttcgccctgacgtgcgtcgtgtcctgcggcctcagctggtcgtggggctcgttcttctggaccttacctggcaggaaggttcactcggccggacacgttctggccgtggctctgaacctgggcgtctgcttcgcccagatgcggtacttcctgctgatgctgtgcaggctgaagaacgccacccttgcgtactatgcgctgtggatctggtcgtgattgggattcagctgagggagaatgcgtagctagatgagtgcgtgttaactctggttacttgagtaggaggctagtttggtggatgtaaatacttctcttggcttggcttgtacagagttctggcgctatttctgatggctccgtagatagcaactgtagggcttggttgcacttcctatgctaatggctgttctactaactgtgtggcgctcaataaagctgttatggttggcatggtcgctacagggttatcaattaagcggatatgtggctgaccaatcggacactttcaaattc

SEQ ID NO: 132222 - DNA, 2074 bp, Zea Mays
ctgctctatccaccacccccgcccacatcaccagagcacccgaggcttgtcttccttcctctcacatccgtacatagaaaaaaaaagaagaaatagggataccggagccgaactccggcggaccatctggtattctggtctggcactctggcgtgagaaaaggaaactgaattgaagcacagatcgatcgagagaggcgaacggcagtcggcaggcgagaaagaagtgctgacgcctcgtttccgtcgcacgcaccactactactcgcccagtccgccgctctcccgcggatccttcacctccactccattccgaggatctcattagcacgctctccggcgcggcggcggcccttcctccgagaccaggagctcgccgccggagtcagtgagtgaggggtacgtggtcgccgtccgtttccgacagtccgcggggcccgcggagcgtaaagcaaggacgcagccaagggagagagggggagggaagcaagtggatctgtgctagctgttgcggtattctccggaacactctccaccaggcacagagcaggtgtgctcagaatatgcagtcatctgcgatggcgttcttccctagcgttgccacggcgaagctggagctgaactctctgtacaggaagtacgtggacatgttcggtgtatcatcaaacaactctaccgttggctctcacaccatccacaagatgtcgcaccttcctgtcctgctggtcgatcgtacattcttcagcaccggtactgctattcagagcattgccatcagctatggagctcttattcgtaggtggttactgggcggaacttctgttgcacagcacgcgatgatatcccgtgctgctatgaactcgcttccttgctgtgccttcctgccattctttgccagcgttggtgctctaatgaccaagctctgtggctgcactatgattccagaccgtttttctggttggcaatctgtccttggccaaagtgctaacctccgtggagaaccagttctggtcgtggacaataatgagctgggcaatgatcagacattatcgagctttcttgggcgcaagcgagattacgtcggtctcggtctagcgcttcagtgcatctgttaccctgcatgtctgaaggttgctgagttcccccagaagaatctcagcttcagcaggcagtggatgcgaagtggccatgacacgagcgcaatctggagggccatggcgaggaatgagcaatacctggcattcgtcgtagtcctggcggccttgcagctcttcctgcggctagcccgggtgaacgtcaccatcctgttcctgccaatgctgtcccaggccgtgagttccaggagcagcccagcggtgatcggcaacgttctgctggttctggtgacctcctgcggagttcttggatctgcactctcagtgaaacagttcggccgggaggtgacgttcgctatcggtgccatcgtgatggtaatttgccaggtcgcgattccactgatcatggaagtccagatcggggttggcggaggaacgcgcatgccggtgggttacacggccgcgacgttcgccctgacgtgcgtcgtgtcctgcggcctcagctggtcgtggggctcgttcttctggaccttacctggcaggaaggttcactcggccggacacgttctggccgtggctctgaacctgggcgtctgcttcgcccagatgcggtacttcctgctgatgctgtgcaggctgaagaacgccacccttgcgtactatgcgctgtggatctggtcgtgattgggattcagctgagggagaatgcgtagctagatgagtgcgtgttaactctggttacttgagtaggaggctagtttggtggatgtaaatacttctcttggcttggcttgtacagagttctggcgctatttctgatggctccgtagatagcaactgtagggcttggttgcacttcctatgctaatggctgttctactaactgtgtggcgctcaataaagctgttatggttggcatggtcgctacagggttatcaattaagcggatatgtggctgaccaatcggacactttcaaattc

SEQ ID NO: 132223 - DNA, 2064 bp, Zea Mays
ctgctctatccaccacccccgcccacatcaccagagcacccgaggcttgtcttccttcctctcacatccgtacatagaaaaaaaaagaagaaatagggataccggagccgaactccggcggaccatctggtattctggtctggcactctggcgtgagaaaaggaaactgaattgaagcacagatcgatcgagagaggcgaacggcagtcggcaggcgagaaagaagtgctgacgcctcgtttccgtcgcacgcaccactactactcgcccagtccgccgctctcccgcggatccttcacctccactccattccgaggatctcattagcacgctctccggcgcggcggcggcccttcctccgagaccaggagctcgccgccggagtcagtgagtgaggggtacgtggtcgccgtccgtttccgacagtccgcggggcccgcggagcgtaaagcaaggacgcagccaagggagagagggggagggaagcaagtggatctgtgctagctgttgcggtattctccggaacactctccaccaggcacagagcagaatatgcagtcatctgcgatggcgttcttccctagcgttgccacggcgaagctggagctgaactctctgtacaggaagtacgtggacatgttcggtgtatcatcaaacaactctaccgttggctctcacaccatccacaagatgtcgcaccttcctgtcctgctggtcgatcgtacattcttcagcaccggtactgctattcagagcattgccatcagctatggagctcttattcgtaggtggttactgggcggaacttctgttgcacagcacgcgatgatatcccgtgctgctatgaactcgcttccttgctgtgccttcctgccattctttgccagcgttggtgctctaatgaccaagctctgtggctgcactatgattccagaccgtttttctggttggcaatctgtccttggccaaagtgctaacctccgtggagaaccagttctggtcgtggacaataatgagctgggcaatgatcagacattatcgagctttcttgggcgcaagcgagattacgtcggtctcggtctagcgcttcagtgcatctgttaccctgcatgtctgaaggttgctgagttcccccagaagaatctcagcttcagcaggcagtggatgcgaagtggccatgacacgagcgcaatctggagggccatggcgaggaatgagcaatacctggcattcgtcgtagtcctggcggccttgcagctcttcctgcggctagcccgggtgaacgtcaccatcctgttcctgccaatgctgtcccaggccgtgagttccaggagcagcccagcggtgatcggcaacgttctgctggttctggtgacctcctgcggagttcttggatctgcactctcagtgaaacagttcggccgggaggtgacgttcgctatcggtgccatcgtgatggtaatttgccaggtcgcgattccactgatcatggaagtccagatcggggttggcggaggaacgcgcatgccggtgggttacacggccgcgacgttcgccctgacgtgcgtcgtgtcctgcggcctcagctggtcgtggggctcgttcttctggaccttacctggcaggaaggttcactcggccggacacgttctggccgtggctctgaacctgggcgtctgcttcgcccagatgcggtacttcctgctgatgctgtgcaggctgaagaacgccacccttgcgtactatgcgctgtggatctggtcgtgattgggattcagctgagggagaatgcgtagctagatgagtgcgtgttaactctggttacttgagtaggaggctagtttggtggatgtaaatacttctcttggcttggcttgtacagagttctggcgctatttctgatggctccgtagatagcaactgtagggcttggttgcacttcctatgctaatggctgttctactaactgtgtggcgctcaataaagctgttatggttggcatggtcgctacagggttatcaattaagcggatatgtggctgaccaatcggacactttcaaattc

SEQ ID NO: 132224 - DNA, 1827 bp, Zea Mays
ctgctctatccaccacccccgcccacatcaccagagcacccgaggcttgtcttccttcctctcacatccgtacatagaaaaaaaaagaagaaatagggataccggagccgaactccggcggaccatctggtattctggtctggcactctggcgtgagaaaaggaaactgaattgaagcacaggtgtgctcagaatatgcagtcatctgcgatggcgttcttccctagcgttgccacggcgaagctggagctgaactctctgtacaggaagtacgtggacatgttcggtgtatcatcaaacaactctaccgttggctctcacaccatccacaagatgtcgcaccttcctgtcctgctggtcgatcgtacattcttcagcaccggtactgctattcagagcattgccatcagctatggagctcttattcgtaggtggttactgggcggaacttctgttgcacaggtcagttgctgaatgcgcgctcgagagaacggacttcatatatgctgctttatttcggtttatccgtgatattaattaagtgaccaattaacacatctctaactggacaaaatttggcagcacgcgatgatatcccgtgctgctatgaactcgcttccttgctgtgccttcctgccattctttgccagcgttggtgctctaatgaccaagctctgtggctgcactatgattccagaccgtttttctggttggcaatctgtccttggccaaagtgctaacctccgtggagaaccagttctggtcgtggacaataatgagctgggcaatgatcagacattatcgagctttcttgggcgcaagcgagattacgtcggtctcggtctagcgcttcagtgcatctgttaccctgcatgtctgaaggttgctgagttcccccagaagaatctcagcttcagcaggcagtggatgcgaagtggccatgacacgagcgcaatctggagggccatggcgaggaatgagcaatacctggcattcgtcgtagtcctggcggccttgcagctcttcctgcggctagcccgggtgaacgtcaccatcctgttcctgccaatgctgtcccaggccgtgagttccaggagcagcccagcggtgatcggcaacgttctgctggttctggtgacctcctgcggagttcttggatctgcactctcagtgaaacagttcggccgggaggtgacgttcgctatcggtgccatcgtgatggtaatttgccaggtcgcgattccactgatcatggaagtccagatcggggttggcggaggaacgcgcatgccggtgggttacacggccgcgacgttcgccctgacgtgcgtcgtgtcctgcggcctcagctggtcgtggggctcgttcttctggaccttacctggcaggaaggttcactcggccggacacgttctggccgtggctctgaacctgggcgtctgcttcgcccagatgcggtacttcctgctgatgctgtgcaggctgaagaacgccacccttgcgtactatgcgctgtggatctggtcgtgattgggattcagctgagggagaatgcgtagctagatgagtgcgtgttaactctggttacttgagtaggaggctagtttggtggatgtaaatacttctcttggcttggcttgtacagagttctggcgctatttctgatggctccgtagatagcaactgtagggcttggttgcacttcctatgctaatggctgttctactaactgtgtggcgctcaataaagctgttatggttggcatggtcgctacagggttatcaattaagcggatatgtggctgaccaatcggacactttcaaattc

SEQ ID NO: 132225 - DNA, 798 bp, Zea Mays
gcgaggcgatgtctagttagcacggaccagactatgactggaggacctcacctattgatcctcaggctgtgtatgcaagtggtggaaaagctcatggaaggtgagggttcagcatggaggttcatcgaggtctgctgctcgtagctcccgtcgctccactcaagatccagcataagtggagcaactgcgagaagaacttaggcgacatcaggattacttgaagcaacaagctgcgcaacatgaatattatgctacacagattcagcaatagcaaacactcatacaacaactagcacaggcccaagggatacacgtcccggtgccccccccacctcccgttcattatccttggtcttcacctccacctatacctacatctccatctaccgaacatcagacccctccagctaccttgtcgacgcatgaacaagaggatagggtagactttgttgaaaccctcttcaatagtggaggtatcgaccatactcttcaatgtaactcgatggtgatcggcgaccgtgagcttccatgttattgcgttctgatacttgagacttttattatgactatatatgtatgagatattgtcttttattagtactggatgatgatatgtgtattattatgactatggatgagacttttgtgatgtaatggatgagactatggatgagacttttgtgatgtaattgatgagactatggatttaaatattgttatgtgattgtgtgtgagatgttttatgcgaaaatatgttatgctatattactattgatatatttgttatgttgtggaatg

SEQ ID NO: 132226 - DNA, 2450 bp, Zea Mays
ccggactcggtttcgactttcgagctacagagaattcgtcccggaaaagaaaaaaaaatcacccttccatccgccagagagagagagagaggagtgggaggaccggaggaggagttcaggagggagaggtcggcggcggcgcggcagatcgggtagcaccgtgcagctcgggccttaggcgcaccagcggtggggggatccgcgcgcccatgcgccggtgaggtggtggggcccgcttggcgctcgagttggaatggcggcgtcggcgtcggctgggaggtggtgggcggtggtccttgcggtcgcggtgctgctcgggccgggacgggtcgtcgccaacaccgagggtgatgccctgtacagcctgcgtcagagcttgaaagatgctaacaatgtcttgcagagttgggatcccactcttgttaatccatgtacatggttccatgttacgtgtaacaacgataacagtgttatcagagttgaccttggaaatgcacaattatctggcgttctagtgccacaacttggccagctgaaaaatctccaatatttggagctttacagcaacaacataagtgggacaataccccctgaactggggaacctgactaacctggtcagtttggatctgtatatgaacaacttctctggcaatatccctgacagcctggggaatctagtgaagctgcgtttcctacgtcttaacaacaatagcttggttggtccgattcccgtatccttgaccaatatctccactctccaagtactggatctctcgaacaacaacctctcaggacaagtcccatcgactggctccttttcactcttcacccctataagttttgccaacaatccaaatctttgtggccctggtacttcgaagccctgccctggggctcctcccttttccccacctcctccattcaatcctccatctcccccaactcaatctactggtgcttctagcactggagcaatagctggaggtgttgctgctggtgcagcattggtgtttgctgttcctgcaattgcatttgcaatgtggcgccgtcgtaaacctgaagagcatttcttcgatgttcctgccgaggaggatccagaagtccatcttggtcagctcaaaaagttttcattgcgggagcttcaagttgcaactgataatttcagtaacaagaacattttaggaagaggcggttttggaaaagtgtacaaaggaaggcttgctgatggctcattggtagcagtgaaaagactaaaagaggagcgtacacctggtggtgagcttcagttccaaacagaggttgagatgattagcatggcggtgcacaagaaccttctccgacttcgtggtttctgcatgacacctactgaaaggttgttagtctacccatacatggctaacgggagtgtggcatcacgtttacgagagcggcagccatctgagccacctcttagctgggaaccaagaagacggattgcactgggatctgcaagaggactttcttacttgcatgatcactgcgatcccaaaatcatccatcgggatgtcaaagctgcaaatattcttttggatgaggacttcgaggcagttgtgggtgatttcgggcttgccaagcttatggactacaaggatacccatgtcacaacagctgttcgtggaacaattgggcacattgctcccgagtacctatctaccggcaagtcttctgagaagactgatgtttttggctatgggatcatgcttctggagcttattactggccagagggcatttgatctagctcgtcttgcaaatgatgacgatgttatgcttcttgactgggtgaaaggactgttgaaggagaagaaggtggagatgctggtggacccagatctgcagaaagcctacgaggaggtcgaggtggagagccttattcaggtggcactcctctgcacgcagggctcccccctggaccgtccaaagatgtcggaggtggtgaggatgctcgaaggtgacgggctggcagagcgttgggacgaatggcagaaagtagaggtggtgaggcaggaggctgagtcggcaccgctccgcaatgactggatcgtcgattccacgtacaaccttcgtgccgtggagctgtccggcccaaggtagccactccacgactccgatgaaagaaaacactgaattggccaagattcagtctaattgctgcttgtgtatatgaaaggtagcttttggaattgttagcgacaatttgaaaggatcgatcttttttttttggattcctcgctagctcagatgttggttacgctgaggttgtgttaaggtgaaaattcgtatatctaagggtgaatttctaaagcattcttgcaatagtccagcagcgaatgtagcagctattgtactacgtggtatgcagaaccgtgttacgttttgccatagcttagttctggttcagctttctaag

SEQ ID NO: 132227 - DNA, 669 bp, Zea Mays
ggaacgggtagattgctgatgagaaaaacaagctggcataaatgaataattcgcaattggcatcttgcaggtgaaaggactgttgaaggagaagaaggtggagatgctggtggacccagatctgcagaaagcctacgaggaggtcgaggtggagagccttattcaggtggcactcctctgcacgcagggctcccccctggaccgtccaaagatgtcggaggtggtgaggatgctcgaaggtgacgggctggcagagcgttgggacgaatggcagaaagtagaggtggtgaggcaggaggctgagtcggcaccgctccgcaatgactggatcgtcgattccacgtacaaccttcgtgccgtggagctgtccggcccaaggtagccactccacgactccgatgaaagaaaacactgaattggccaagattcagtctaattgctgcttgtgtatatgaaaggtagcttttggaattgttagcgacaatttgaaaggatcgatcttttttttttggattcctcgctagctcagatgttggttacgctgaggttgtgttaaggtgaaaattcgtatatctaagggtgaatttctaaagcattcttgcaatagtccagcagcgaatgtagcagctattgtactacgtggtatgcagaaccgtgttacgttttgcc

SEQ ID NO: 132228 - DNA, 85 bp, Zea Mays
accagaaaagtgaaaagtaaaatcagtgcatgggaaattttctacaagaaacactatctagatatgataaataagagaaaatccg

SEQ ID NO: 132229 - DNA, 291 bp, Zea Mays
atgggcgatgcagtggtccgtcttcccttccgcgctcttggtgcagccgagctgcaggcaccggcgccccccgccgtgggccttgcagtaggccgtgcggctctcggcgcccttgtggcacccgggcttctggcacctctgcccgccgccgtgagcgatgcacaggcccgtcgcgcctcgcgcgcccttggagcaccctttgaacctgcacttcttggggtgccggcgttgagcctgctgtccagagttgcttaccagggtcacagcatcagagctcacgccaccaaatga

SEQ ID NO: 132230 - DNA, 698 bp, Zea Mays
atggccacgctcgccaggcacctcatcctgtgctcctcctcgccatcgcagcgccgccggcgccccctgccgcccgacgccaccgcgggcacgcagcagcagcagcagcagcaggcgccgccgccgcagccgtccaccacgcgccgcctggcggtggccgcgtccgcggcgctggcggccacggccgcgctgtcctacgtgcgcgagcggttcttcgagcccgagctcaccgcggaggaggcggccgcgcgcatccgccagaccgccgagggcatgcgcacgctgcggcccatgctcgagaccatgtcctggaagtacgtgctcttctacgtgcgcctcaagtccaagtacctcggcctcgacctcaccaccgccatggccggcgtccccgcgggccgccgcgctgactacgtccgcgtcgccaacgagctcgtcgacaacatgacggagttcgatcgcttcgtgcggactcccaaggtctacgagtcctacctcttctacgagaaaacgttgaagtcgctggatgacgtggcagagttcctcgtttgatgtacataatataatacaatataaagtagttgtatgaaatatgtactccgtgcgtctaagaatgaaattatagaagttatgccagccaaactattttaagtttggccaaagttttaataaacaatattaacatttatggctctaataaa

SEQ ID NO: 132231 - DNA, 909 bp, Zea Mays
cttcccttccaacctcagaaaaacgatctccctaccggctactgtcctctcctctcggcgacactactccagacgtaccgcactccattcagcttcgccatggccacgctcgccaggcacctcatcctgtgctcctcctcgccatcgcagcgccgccggcgccccctgccgcccgacgccaccgcgggcacgcagcagcagcagcagcagcaggcgccgccgccgcagccgtccaccacgcgccgcctggcggtggccgcgtccgcggcgctggcggccacggccgcgctgtccgcgcgccggcccgcgccgcccccgcccgcgatggccgccgaggcggccgtgccgccccgcgccgccgacaccggcgtcccccgggaccgtgccgcgctggggcaccaggtcctacgtgcgcgagcggttcttcgagcccgagctcaccgcggaggaggcggccgcgcgcatccgccagaccgccgagggcatgcgcacgctgcggcccatgctcgagaccatgtcctggaagtacgtgctcttctacgtgcgcctcaagtccaagtacctcggcctcgacctcaccaccgccatggccggcgtccccgcgggccgccgcgctgactacgtccgcgtcgccaacgagctcgtcgacaacatgacggagttcgatcgcttcgtgcggactcccaaggtctacgagtcctacctcttctacgagaaaacgttgaagtcgctggatgacgtggcagagttcctcgtttgatgtacataatataatacaatataaagtagttgtatgaaatatgtactccgtgcgtctaagaatgaaattatagaagttatgccagccaaactattttaagtttggccaaagttttaataaacaatattaacatttatggctctaataaa

SEQ ID NO: 132232 - DNA, 594 bp, Zea Mays
aacgctctcatttcccctccctctctcattcttacaggtggaccccatgtgtcatttcctccactcttccctctccacaaccgtctccaattagtgcttgctgcacgatcagagaaaccggcatctcccccacgttgcttggcctctcgccttaggccctgtagcactaccccgccaaccctccagggaacgcactcgcttctgctcatccaacacccttctcctaggcggtcctgcatcccccatatggcgcttttcccctttgtccttggtcagcggcggtgctgcagcccggtgcaatactcgtatcctcgacgctcgccaagtgcttgacgaaaggccagcaagctctgctccctttcccgcgatcctcagtcggcgcttcctctctcctccatgattgagtgcgtccgtgctgcagcctcgacgtcgtccgcctcctggtgccccattgtgcggtcgtgacgttcactgtccgcatccgcgtttcgccgttcgtcgttggctcgcctcgccgtcgcttcgcgtcatgcgcgcagcacgttgtcgtgcctcgccactagcttgtttggccgtctgccgtcgttgcaaggt

SEQ ID NO: 132233 - DNA, 710 bp, Zea Mays
ccatgtgtcatttcctccactcttccctctccacaaccgtctccaattagtgcttgctgcacgatcagagaaaccggcatctcccccacgttgcttggcctctcgccttaggccctgtagcactaccccgccaaccctccagggaacgcactcgcttctgctcatccaacacccttctcctaggcggtcctgcatcccccatacggtgagcccccctacagttttccccaatacgctgcaagctctaggagccggcgccccctctggttcctccctcggctgctcctgaccgcgagctatccgagtccatggtccgactctgcaacctcgctacttcctaatcactcgcccctctcccatggcacatgcgcttttcccctttgtccttggtcagcggcggtgctgcagcccggtgcaatactcgtatcctcgacgctcgccaagtgcttgacgaaaggccagcaagctctgctccctttcccgcgatcctcggtcggcgcttcctctctcctccatgattgagtgcgtccgtgctgcagcctcgacgtcgtccgcctcctggtgcgccattgcgcggccgtgacgttcactgtccgcatcctcgttttgccgttcgtcgttggctcgcctcgccgtcgcttcgcgtcatgcgcgcatcacgttgtcgtgcctcgccactagcttgtttggccgtctgccgtcgttgcaag

SEQ ID NO: 132234 - DNA, 929 bp, Zea Mays
ggcactcgtcggcatgaagaagacgctcgtcttctacacggggagggccccgaggggaggcaagaccggctgggtcatgcacgagtaccgcctccaaggcaagcacgccgccgccgccaccagtagcagcctcgtcgtcccgtcgtcggtcagagctggcgcgtcgtcaaaggacgagtgggtgctgtgcagggtgttcaagaagagcatcgagccgccatccgtgcccggcagcaagaggtcatcgtcggttgcgtgcatggggacggagggcacgggagtgggagtggggccgtcgtccatgtccacagaggacgacttcgccgcgtgcgccgcgttgcctccgctgatggacgtgtccggcggcggcgccaacatgtcgctttcagcagcggcggcggcggcggcggcgtccatcgagctgacgccacctgcagcaccggcaccacacgtgacctgcttctccaacgcgccgctggagggccagttcctgaacccaccattcctcctcccttccgccgccgcagccgcggaccacatcgccctggcggcctccgcctcgccgttcctggcgagcatgatgatgcagcagcaggcgcagtacgccggcgacgcgggcgtggtgcacggcgacgggctcctgcagggggccggcgggtggtacggcaagctggccggcgagagggagcggctgagcggcggcggcgtccccgccgagatctcgtcgacgcggcactgcatggatcacgaggcctccttctggggcttctgagctctcgaccttttccgcgatcgttaaaaactggattagattagccaccggattggaaacggggattctagtgtgcttttttttaatgggagcaaaaattgttgtgaagaaagtttgttttgcgtagtactaaattaattgatttgggtttagagtt

SEQ ID NO: 132235 - DNA, 564 bp, Zea Mays
ttaaagttgtttattagtcaaacctgggacggaaattttgtggctaatcaagtctaatttacagttcttaacccaaagatgaaggacatcctgaggaaattctccttcccagccattgtcagctctgaagcagtcacttccagctactttacttactaagtcatgcaacagatcatggatcgtatagcgttccttgtcaccatctactggtttcagaaatgaggctgacactaactcatcaaagtagcctcgaccaacagcctccagttcctcccctgtattgcgactggtgacaaatccttctgccacccacaacctgactaaatactcagggtccagccaacgcctcctgggaaaaatactgcaataagaaaagcatcgcctgacctgctcatctagatgctggtagctccaccacatagctctcattgcctcgtccagaaggtcccgatcccgagtattcctccaaaactcgatgtttggtcttatacataactgtcttcccactgttctggcagctagaggtgatcgcttgagctttttcgcaatctcagctccgaccat

SEQ ID NO: 132236 - DNA, 575 bp, Zea Mays
caactttactgggattttctaatagatcgcctcttagttatattgttgatttgtgatccttccaaaaccatactatcacctaaaaatgatcagttcatccagcaatgttttgtttgtctatttcttgtcatggtgcacttattagaattgttgcccacttttactttttacatctgataatatgtttaagaaactatttttacttgattcttgacttgtagatacctttttatttctgtattgtatcccacaaactttcctgctagatattcagttgatgttttgtacttgtatataccttgtccacataaaacttgtgtgatatacttttatgaaattgatacatatgataggttgtttaatgttttagagaaatgctcttgataaccatagttggtcatatattatagttcatctacttaaacatattgtaccttttttacatctctcatttgagtacaactgtagtatttgttcataacatattgtagcttaaccagaacactaaagttcaaattccttacctttcaatgctcaaggtttttatgtcttgtacagtaaatgcggccattttt

SEQ ID NO: 132237 - DNA, 396 bp, Zea Mays
gctcaaggtcgtgtgaatgttgccgctgagtactacaaacaacaggtagagatgttagagggttttagtgagatgggcgcatttacagatcatgctttcctacctgtaatgtccaaggaagaacacgaaaaagttatcaggagtgaaccattagccatatggttgtctaatattgcaaatatggttctctttgctgcaaaagtgtatgctttagtaaggagtggttcacttgctattatcgcatcaactttggattctcttctagactttttgtcacgatatatcttgtggtttactgccttttcaatgcaaacgccaaatccctatagaaacccaattggaaaaagcgtatgcagccgctggtgagttcttttttgccataacctgtacttccaa

SEQ ID NO: 132238 - DNA, 1177 bp, Zea Mays
cagccacatctactagctctccccaatccgaaccgaagccacacacccacaccatatctgcaccagccatcctcgtgatctctctgtctcccatcgccagccgccaccgcgccctcctcccaccggatttagaggcgattcatgggagtggtgcgcaggctgctactgcggtatcaatggaggctgactgccatggaggatctgagcatcgaggcgaaggaggccgcgaggacatgttgatggtctccatgatggaaggaccacgccgcacggagaagcccaccggtgtcatcttccgcaaggtttgcttttactcttggatcaagactcacctggctagccgagtagtcgtccatcgcgttttgaaggcagacaggaagttatggttagctgcaggttaaagcgaatgaaatgaaccatcatctgtaacaaggtgctatatcaatgacaagcagcaacaaagcgtaacacactaaagtcatgcacggagaagacagaggaattgcacccaacaagcccttgatatccaaggaccacgagcgtacctaatttgattctacagactgggtcgatctctctatgattaacaaacacaataaaaaaactatatctgctaggaaaaattcagaactgaaataaaggacacaacaatttttgccacttcagcaacttcatagcatgttttccaacaaggatacaactccaagaagaacgatgttggtctgttatgaccggtcgccactacaggcgccgggcaacagcataggcatgcagataaggattataagatgataatgattagaagattaaggagataagatttgttagagagaaaagagggaatttatctcattagataaggacaagaagggagtataaataattgtaagcaccactctatagggattaagcagaaacaagattgttctggcttcctagagggagccgggagattactgtgacctagccgcccctttcctcgcgtctctcatctcgcgcgcggtgaacacggcgccccgccgttgtgcatcgcgcctcaaaccccggccaccaatcacccaccactacaacctgagatcgatcagggaatccgccccgattcctatcatggtcattgtggatgagatggactatttaataacaagagattgtgttgtgctacatgatcttttaatgc

SEQ ID NO: 132239 - DNA, 1177 bp, Zea Mays; identical to SEQ ID NO: 132238

SEQ ID NO: 132240 - DNA, 617 bp, Zea Mays
cagccacatctactagctctccccaatccgaaccgaagccacacacccacaccatatctgcaccagccatcctcgtgatctctctgtctcccatcgccagccgccaccgcgccctcctcccaccggatttagaggcgattcatgggagtggtgcgcaggctgctactgcggtatcaatggaggctgactgccatggaggatctgagcatcgaggcgaaggaggccgcggtacgcataccccatcctccgtgtggcggcctccctccgagcacccacccgccccaccccctttcttctccctccatcgcgtcgtcatcatactacagaaagtacaaggaggacatgttgatggtctccatgatggaaggaccacgccgcacggagaagcccaccggtgtcatcttccgcaaggtccgctcggtcgtccatgtccgttcgtcctcttcctgggcggttggcgcgtgatctggcgagacctcccaatgggtcaaaatctattttgtgcttggcgatgtattccttaaggaccgccatgctcttctcctttggcgcggtcagctgcttcgacaaaggataccatactcattgttgatagcaaatgattgggttccctaaac

SEQ ID NO: 132241 - DNA, 280 bp, Zea Mays
ctccgatgtctgaatatctgcttgtgcttccaaattctattttctttatgctcagtatcagtcgatgcaaaataaaagttggattacctaattcaactgatagtacatgtaaatcagtcagtattggaaacaatattattttaacagttcatttagcagcagaaggattggaatgaatacttccatgcagctaaaacatcaaatattcaaatacgttgttcaataaccccatctacctcagtcacgattgcacgaaaatggtaataaactgatattctag

SEQ ID NO: 132242 - DNA, 98 bp, Zea Mays
ctaatgcttgcaagagccaagaacgtcgtgtcgtgcttggctgtagcctcggcccgtagtgctggctcgacccgacatgattatattttttattttac

SEQ ID NO: 132243 - DNA, 836 bp, Zea Mays
atgagcaccattttaggtggattgattactggaacctgcatgggcgtttggacatatttcaaacaaagtgataaagctgttatggttggttcaacatccatgctgatgggtatgatactggttggactaactgttgtggttgtggaaagtgctgttacatcaatatacatatgctatgccgaggatccccttttgattcagagatgggatcccgaattttttgaacaaatgtcagaagcgctacaccagcggctgcagtaccgaagcgcgcgagctcgtcaaatattgaatgggcggcttgatcatttgccacatacgtccagtatttgaatgaattgcgtgccagatattgattatctctgtgaatccattgatacgtgggcagacatttacagaagatttggatctccctgccattgaaatatatagaccaaggaagatattcgaagccattgacgttccgagaactggagtgccccagcaatcttgtacgccttcaagaacaaaatgttttcaaatccaaatgaagccgtaatgtggatgctcatgcttctttggtactgcaccatcgttttttttatttgtgtaaggcttttctggtaaggtagatactattaaatccatttcgagatttgtgatgcagaatgtgtccggtttcaacatcagtgcgggttagtgtggcaatgtgataggtttttgtcttccttttgtagccttagcgctacaatacgataaactatggagaggaacagcatcatggtcgctacttggccggttgtacataacagtgttgcttagtgctcatatactaaggccctgtttcaatctcgcgagat

SEQ ID NO: 132244 - DNA, 1643 bp, Zea Mays
caagcagctatcctcgcgtccaaagtgcccacggcgctcccaggccccagccggacgccggacgccggtcgcgctccgccccaacacgaaaaccccgaaccctctccgtggctgtttctgcaacttggttgggcttcccattcgtcgcgtactcgcgttgccagccgcctccctcagtcgctcctccgaaagtccaaaccgcgtccgcttccggcttcccttgctcccctggaattccgcgcgacgtcgccgtcagtcacccggcagttcgctcgcgcaggtcatcgtctccccgatgaccgaaacggttactccccctagtcgcaccagtcaccaccaccaccagtccaccaccagcgccgagcagttagccagttgccactactccccgcatcgctaattgctctaggacgtgtctcgttaatcctccccattcctcataccgcccgatcctacctccccaaccgccaatcgcagccatgtcctcttcctccacctcctcctgccacggcagcgggaaccctagcccccccgcagcggcgggggccgtgtcggtggcggcggcggcggcgggccccgcggcgtggcccaggcggcagtgccgggacgtgttctggctggtggtcttcctcctccacctgctcgtcttcggcgccgcgctcgcgctcttcggcctcaaccgcttccaccaggccgaccgcttcaacatcggccgctacgccaacctcaccgcggagccctggggcacccccgcaggcccgccggaccccgcgcccgcgccgccgccgccctccgtctaccgctccgaggacccctccgtgccgccgtccgagctcaccgagacgtactggaagtactacggcgccgcgggggctgtcggggccgcgctcgcgtgcgcgtggctggcggcggcggcctggaggaaggatggcggcaaggtggtcatgcggaccgccgtgcactgcctcacggcgtacctcgcggtcgtcagcgtcctgtgcttctgggggaagcacttcttctggggcgtcgctctggccgtcggcgccggcctgcacttcctctacgtcatgtctgtgctcgataggtttcccttcacaatgctagtactgcagaaggcagtaagaatggtacgggaacttcctgatgttatgagaattgcttatgcatttgtgctagtcatgctttgttggatggcattatggtcctttggaatttctggcattgttgcctttggcataccaaatggtgggcaatggtggcttcttttgattttttcagtcagtttattttggactggagctgttcttagcaatacagtccatgtcattgtctcagggatggttttcctcgttctcattcatggtggtccagctgctgcaacaatgcccccaaaacctcttctgaaatctcttcagtatgctgtgacaacttcatttggaagcatttgctatggatcgctttttaccgctgctattaggactttgcgatgggagattcgtggaattcgttctaaaattggcagcaatgagtgtttgctatgttgtattgattttttgtttcatattgtggagacccttgttcgcttcttcaacaaatatgcatatgtacagatagcagttaatggacagagtttcaatcgc

SEQ ID NO: 132245 - DNA, 1031 bp, Zea Mays
gaactgctctagtgtcgtgtgtttcgtagatgtacgggcaacaacttggaaccctcgcctggaatgatcaaacaagcaccatcagaaaaccacatggctcggcaaccttggagcaataatggccatagaaattccccttcaaattcattagatggaggagttcctggacccatgcctctggtcccttttcaggaggaacttgcagttggttgtgaagagattcgtagaattgctgctgataatactcttgtgctagaggatattctgggccttaggcaagaattagctgtcattgaagacgagatccatatacttgccaaacaaaccattcccagacttcgtgttgataatgaaatggaatacagggatattatccagggaggcatgaagttagaggaacagatgcatgctcttaaacttatcaaggaagaagtgttggtcctaagttctgaaaagatggagttggaagctttgtgcaaagagctatctgtgaaggttcagtcattgtacagggagctggagcagatcgagaacaagcagatacctgctacaagagaagggttgcatgatatacaagcggagatttcgagggccaggatggcatacgagcatgagaaacgtgcaaaagttgagcttcttgaggagagtcaggccatagagagtgattttatcaacataaaaatggaagcacagagattgcggacagagctggagaagaggaggtctggtgtgttcaagcatcatgcatttggctcatactataaaagatagagcatggcattgcatcctccaactgataggtgggcgtcacaaagcgtagctaagggtttggtgtctatcagagaaattagtcgaactcaggagtcaagaccaaatgcgtttgtctttcggatgagcagctgacagttatttgcgaacacgttactattactatatctcattattaagtaggagtacaaattggacgattgaaagaagaatattatcaatttggtctttattgtactcctacttattttctctctcgaaaa

SEQ ID NO: 132246 - DNA, 1059 bp, Zea Mays
cagcccgctccactcctcccctgccgaagcaccacacaggcacacagcagaagcgaaaactgcaggaaggccaatcgggcctggcaggcatgcttgcccgctgccgcaggtgaggcgacccgcagccgtccgagacgcaccccggcgcaagcgcgcatccgccatggatccggtgtccgaggagctcgagcgccgcagccgctatctcaactcgctcatccgccgtactaagctcagcgccacccctgctccccctcctcagccggagccggagccggagcacgaggtagcgccacagaatccggagccggagccggagaccgcggttgggaagcgcgaggaggccaaggcggatccagtggtcgttgaggaggagaagcgggaggccaaagtggcgggggacgggaaggggaaagagatcaaggggaaggacgacgggggtcccaaggaggacaacagcaggaaggtgtcagtgcgggtgcgcgcggccgacatgcccctaccgctgcagcgccgcgcggtccggctcgcctacgaagccatcgtcgccatgccgcgcctcgacagcaagcgcctcgccctcgcgctcaagaaggaatttgatacggcatatggtccagcttggcattgcattgttggaacaagctttggttcctatgtcactcactctctgggcggtttcttgtacttctccgtcgacaaggcctatattctcctcttcagaaccgctgtcgagccattagcccatccgcgatgaggggccatgaaacagtctactagctagcgcattctgtattcgacatttaactgtagaagggtaaggagagtagaacgatcatcgcccccaccccccaatgcaaatatgtagaactaatctgctgtagctaagtttgttccatgtactgtgcactaatcggccatgtggaccttaacattagctttcagagttgtagcttgactcagctcagttcttccgcgcgaggggaattttctttcgcatcttgtaatgccttgtagccttgttcgcaatcgcaatggaatcagtagatgcatcctgtt

SEQ ID NO: 132247 - DNA, 1327 bp, Zea Mays
cttcttccctgccaagaaaggccaaaggggaggagatgcggcgtcccgtgcacgccttaaaaacgagatccctggggtcaccactggtccactgcgtcactgcgccgaatcactagaaaccccaccaaacggaatttcacatccagcgagcaataccgcaccgcaggtaagatcaaagaggaggcgatggctggcggcgggcaggcggcgatttcgttcatgacgcggatggcgaaggtggcggcggggttgggcgtggcggcgtccgcagcctccacgtccttctacacggtggacggcggagagcgcgccgtcatcttcgatcgcgtccgcggcgtgctcccgcgtacgatgtcagagggcacccatttgctggtccccatccttcagaagcccttcattttcgacatccgcactcgccctcacagcttctcctccacctccggcaccaaggacctccagatggtcagcctcacgctccgcgtcctgtcgcgacccgacgtcgaacacctcccggacatcttcacctccctcgggctcgagtacgacgagaaggtcctcccatccatcggcaacgaggtgctcaaggccgtcgtcgcgcagttcaacgccgaccagctcctcaccgagcgtccccacgtctccgcgctcgtccgcgaatcgctcaccaagcgcgcccgcgagttcaacatcgtcctcgacgacgtcgccatcacccacctagcctacgggcaggagttcgcgcaggccgtcgagaagaagcaggtcgcgcaacaggaggccgagcgctccagattcctcgtcgcgcgcgctgagcaggagaggcgcgccgccatcgtccgcgcagagggggagagcgaggccgcgcgccttatctccgaggccacgaccactgcgggcaacggcctgatcgagctcaggaggatcgaggcggccaaggagatcgcaagcgttctgtcgcgcacgcccaacgtctcctacatccccgccggcgacaatggccagatgctgctcgggcttaacgccgcccggtgaatggatcgtctttttcccgcataattagcttcagaatttcaggacgagatgaaactgttcttggtggggaggagggaaagttgtttctgtagagcttctagaagtgttgctaagagtctgtttttgattaatgaaatggctggaagtctgtttgtgctcaatagagtgtttcttctgtgaaataaaactggtctatgagatggtgtggcgagctctttgctttgctctctgcaattcagttgtatctcatacatgctgtcttctctgaaataaaacttttcgagtgaactgg

SEQ ID NO: 132248 - DNA, 597 bp, Zea Mays
gtgctcttgcatgaaatgtttgatcctccagtctggtggcgttgaataatgatttgtgtgctgttggtgtagatatcggttgttgatggtaggctgttgtatggtaggattttcttgatgatggtaggctgttgtatgtggctatagaagcgtcatcttggacctggctgttggtgaaggatttgtgcgctgttggtgaaagattcattttgtacctggctgttgatgaaggattcattttgtgcttttgttatctgttcgccatttgcccttggaatccaatcccctccaccatgcatgtctcagtctttggttgtgtttatgcttttgcaggcttcagaatttcaggacgagatgaaactgttcttggtggggaggagggaaagttgtttctgtagagcttctagaagtgttgctaagagtctgtttttgattaatgaaatggctggaagtctgtttgtgctcaatagagtgtttcttctgtgaaataaaactggtctatgagatggtgtggcgagctctttgctttgctctctgcaattcagttgtatctcatacatgctgtcttctctgaaataaaacttttcgagtgaactg

SEQ ID NO: 132249 - DNA, 1244 bp, Zea Mays
acgccttaaaaacgagatccctggggtcaccactggtccactgcgtcactgcgccgaatcactagaaaccccaccaaacggaatttcacatccagcgagcaataccgcaccgcaggtaagatcaaagaggaggcgatggctggcggcgggcaggcggcgatttcgttcatgacgcggatggcgaaggtggcggcggggttgggcgtggcggcgtccgcagcctccacgtccttctacacggtggacggcggagagcgcgccgtcatcttcgatcgcgtccgcggcgtgctcccgcgtacgatgtcagagggcacccatttgctggtccccatccttcagaagcccttcattttcgacatccgcactcgccctcacagcttctcctccacctccggcaccaaggacctccagatggtcagcctcacgctccgcgtcctgtcgcgacccgacgtcgaacacctcccggacatcttcacctccctcgggctcgagtacgacgagaaggtcctcccatccatcggcaacgaggtgctcaaggccgtcgtcgcgcagttcaacgccgaccagctcctcaccgagcgtccccacgtctccgcgctcgtccgcgaatcgctcaccaagcgcgcccgcgagttcaacatcgtcctcgacgacgtcgccatcacccacctagcctacgggcaggagttcgcgcaggccgtcgagaagaagcaggtcgcgcaacaggaggccgagcgctccagattcctcgtcgcgcgcgctgagcaggagaggcgcgccgccatcgtccgcgcagagggggagagcgaggccgcgcgccttatctccgaggccacgaccactgcgggcaacggcctgatcgagctcaggaggatcgaggcggccaaggagatcgcaagcgttctgtcgcgcacgcccaacgtctcctacatccccgccggcgacaatggccagatgctgctcgggcttaacgccgcccggcttcagaatttcaggacgagatgaaactgttcttggtggggaggagggaaagttgtttctgtagagcttctagaagtgttgctaagagtctgtttttgattaatgaaatggctggaagtctgtttgtgctcaatagagtgtttcttctgtgaaataaaactggtctatgagatggtgtggcgagctctttgctttgctctctgcaattcagttgtatctcatacatgctgtcttctctgaaataaaacttttcgagtgaactg

SEQ ID NO: 132250 - DNA, 1275 bp, Zea Mays
ccctgccaagaaaggccaaaggggaggagatgcggcgtcccgtgcacgccttaaaaacgagatccctggggtcaccactggtccactgcgtcactgcgccgaatcactagaaaccccaccaaacggaatttcacatccagcgagcaataccgcaccgcaggtaagatcaaagaggaggcgatggctggcggcgggcaggcggcgatttcgttcatgacgcggatggcgaaggtggcggcggggttgggcgtggcggcgtccgcagcctccacgtccttctacacggtggacggcggagagcgcgccgtcatcttcgatcgcgtccgcggcgtgctcccgcgtacgatgtcagagggcacccatttgctggtccccatccttcagaagcccttcattttcgacatccgcactcgccctcacagcttctcctccacctccggcaccaaggacctccagatggtcagcctcacgctccgcgtcctgtcgcgacccgacgtcgaacacctcccggacatcttcacctccctcgggctcgagtacgacgagaaggtcctcccatccatcggcaacgaggtgctcaaggccgtcgtcgcgcagttcaacgccgaccagctcctcaccgagcgtccccacgtctccgcgctcgtccgcgaatcgctcaccaagcgcgcccgcgagttcaacatcgtcctcgacgacgtcgccatcacccacctagcctacgggcaggagttcgcgcaggccgtcgagaagaagcaggtcgcgcaacaggaggccgagcgctccagattcctcgtcgcgcgcgctgagcaggagaggcgcgccgccatcgtccgcgcagagggggagagcgaggccgcgcgccttatctccgaggccacgaccactgcgggcaacggcctgatcgagctcaggaggatcgaggcggccaaggagatcgcaagcgttctgtcgcgcacgcccaacgtctcctacatccccgccggcgacaatggccagatgctgctcgggcttaacgccgcccggtgaatggatcgtctttttcccgcataattagttagtagtgccctattgaagtacttcagtaatttcagatgcatctacttagttatggttttgtggaacgattctatgctgggtaaagatggtgatatgcattgctcataaagttcggcagatggggaatttgccagaatactctatcgtaatcacttattgtgatatctcttgtttcatgctggttgcctgatctatatagtgttgctagcattctac

SEQ ID NO: 132251 - DNA, 2205 bp, Zea Mays
tataaatcctcacccgggcctcatccctcttggacaaactcacagcacaaacgttcctctcctcttccatcgtcgtcctcgccgctcccggccccgcctgtctagtcccctcttctcgcgtgcaacccctgtactgtacgtgctaggcacacagctagctgcagctacagctgcagggcagcaaatggtttccggtgcgggtcatggtgggtacggcggcggcgacgacgggcaggccgtggacttccggggcaacccggcggacaagtcgaggaccggaggctggctgggcgccgggctgatcctgggcacggagctggcggagcgcgtgtgcgtgatgggcatctcgatgaacctggtgacgtacctcgtcggcgagctgcacctctccaactccaagtccgccaccgtggtgaccaacttcatgggcacgctcaacctgctcgccctcgtcggcggcttcctcgccgacgccaagctcggccgctacctcaccatcgccatctccgccacaatcgccgccacgggcgtgagcttgctgacggtggacacgacggtgccgagcatgcgtccgccggcgtgcctggacgcccgcgggccgcgcgcgcacgagtgcgtgccggcgcgcggcgggcagctggcgctgctgtacgcggcgctgtacacggtggcggcgggggccggcgggctcaaggcgaacgtgtccgggttcgggtcggaccagttcgacgggcgcgacccgcgggaggagcgcgccatggtgttcttcttcaaccgcttctacttctgcgtcagcctggggtcgctgttcgcggtcaccgtgctggtgtacgtgcaggacaacgtggggcggggctggggctacggcgtctccgcagtcgccatggcgctcgccgtcgccgtgctcgtggccggcacgccccggtacaggtaccgccgcccgcagggcagcccgctgacggcggtcggccgggtgctcgccgcggcgtggaggaagcgccggctgccgctgcccgccgacgccgccgagctccacgggttcgccgcggccaaggtcgcacacactgacaggctcaggtggcttgacaaggcggcgatcgtggaggccgagccggcggggaagcagcgggcgagcgcggcggcggcgtcgacggtgacggaggtggaggaggtgaagatggtggcgaagctgctgcccatctggtccacgtgcatcctcttctggacggtctactcccagatgaccaccttctcggtggagcaggccacgcgcatggaccgccacctgcgcccgggctccggcgccggcggcttcgccgtcccggcgggctccttctccgtcttcctattcctctccatcctgctcttcacctcgctcaacgagcgcctcctcgtgccgctggccgcccgcctcacgggccgcccgcaggggctcacctcgctgcagcgcgtcggggccgggctcgcgctctccgtcgccgccatggccgtctccgcgctcgtcgagaggaagcggcgcgacgcggccaacgggccgggccacgtcgccgtcagcgccttctggctcgtcccgcagtacttcctcgtcggcgccggcgaggccttcgcctacgtgggccagctggagttcttcatccgcgaggcgcccgagcggatgaagtccatgagcaccggcctcttcctcgtcacgctctccatgggcttcttcctcagcagcttgctcgtcttcgccgtcgacgccgccaccgcgggcacgtggatccggaacaacctcgaccgcggcaggctcgacctcttctactggatgctggccctgctcggcgtcgccaacttcgccgtcttcgtcgtcttcgccaggcggcaccagtacaaggccaccagcttgccggcgtcggtggcgcccgacggcaccgggcacaaggagatggacgacttcgtcgcagtcacggaggccgtggaaggagtggacgtgtagggcgcgcatgtcaggctcacacttcatcggtgggtggcctctgctgtttaattttgcctttgggtagttagatcaacaagaaaaagtctactatttgatttattgcttcctgcaacttgcgccactccgcgtaactttgagaggtacatctgcactcatgcgatcttgatctctgtccgttgagatcaagttgtatgtaggcaaacacaataataaaagggctaaaaaaa

SEQ ID NO: 132252 - DNA, 2250 bp, Zea Mays
tataaatcctcacccgggcctcatccctcttggacaaactcacagcacaaacgttcctctcctcttccatcgtcgtcctcgccgctcccggccccgcctgtctagtcccctcttctcgcgtgcaacccctgtactgtacgtgctaggcacacagctagctgcagctacagctgcagggcagcaaatggtttccggtgcgggtcatggtgggtacggcggcggcgacgacgggcaggccgtggacttccggggcaacccggcggacaagtcgaggaccggaggctggctgggcgccgggctgatcctgggcacggagctggcggagcgcgtgtgcgtgatgggcatctcgatgaacctggtgacgtacctcgtcggcgagctgcacctctccaactccaagtccgccaccgtggtgaccaacttcatgggcacgctcaacctgctcgccctcgtcggcggcttcctcgccgacgccaagctcggccgctacctcaccatcgccatctccgccacaatcgccgccacgggcgtgagcttgctgacggtggacacgacggtgccgagcatgcgtccgccggcgtgcctggacgcccgcgggccgcgcgcgcacgagtgcgtgccggcgcgcggcgggcagctggcgctgctgtacgcggcgctgtacacggtggcggcgggggccggcgggctcaaggcgaacgtgtccgggttcgggtcggaccagttcgacgggcgcgacccgcgggaggagcgcgccatggtgttcttcttcaaccgcttctacttctgcgtcagcctggggtcgctgttcgcggtcaccgtgctggtgtacgtgcaggacaacgtggggcggggctggggctacggcgtctccgcagtcgccatggcgctcgccgtcgccgtgctcgtggccggcacgccccggtacaggtaccgccgcccgcagggcagcccgctgacggcggtcggccgggtgctcgccgcggcgtggaggaagcgccggctgccgctgcccgccgacgccgccgagctccacgggttcgccgcggccaaggtcgcacacactgacaggctcaggtggcttgacaaggcggcgatcgtggaggccgagccggcggggaagcagcgggcgagcgcggcggcggcgtcgacggtgacggaggtggaggaggtgaagatggtggcgaagctgctgcccatctggtccacgtgcatcctcttctggacggtctactcccagatgaccaccttctcggtggagcaggccacgcgcatggaccgccacctgcgcccgggctccggcgccggcggcttcgccgtcccggcgggctccttctccgtcttcctattcctctccatcctgctcttcacctcgctcaacgagcgcctcctcgtgccgctggccgcccgcctcacgggccgcccgcaggggctcacctcgctgcagcgcgtcggggccgggctcgcgctctccgtcgccgccatggccgtctccgcgctcgtcgagaggaagcggcgcgacgcggccaacgggccgggccacgtcgccgtcagcgccttctggctcgtcccgcagtacttcctcgtcggcgccggcgaggccttcgcctacgtgggccagctggagttcttcatccgcgaggcgcccgagcggatgaagtccatgagcaccggcctcttcctcgtcacgctctccatgggcttcttcctcagcagcttgctcgtcttcgccgtcgacgccgccaccgcgggcacgtggatccggaacaacctcgaccgcggcaggctcgacctcttctactggatgctggccctgctcggcgtcgccaacttcgccgtcttcgtcgtcttcgccaggcggcaccagtacaaggccaccagcttgccggcgtcggtggcgcccgacggcaccgggcacaaggagatggacgacttcgtcgcagtcacggaggccgtggaaggagtggacgtgtagggcgcgcatgtcaggctcacacttcatcggtgggtggcctctgctgtttaattttgcctttgggtagttagatcaacaagatattgaattgggcatgaaggctgaacaccatgtgtgtgcattacagtacccaacccaaactctaacatagcatcgttataacttataatggctgcgttgtaatgtggcgttaggccatgttcactctaatactacctcagtcccgaaatataattcattttagtcttttaatgaattcatacaataattaatat

SEQ ID NO: 132253 - DNA, 798 bp, Zea Mays
atggcggtcggactagcgcctgcgcggcggtcccggcccaacggcgcgaggcacggctcgcgtgggcggcggcgcggtcggcccaacctcggcacgacggccctagcagcgcggcgtggccctaagggcgggcagccccccccggacgcggcgcgcggcctcccggcttccctgtgcgggcgcggcccccatgcgcaggtgcggaaccgctgcttggcggcgcggcgcgggtgcccggccctggcgcagacgcggcgacctggcacggcgcgggcggggcgcgagtgcgggctccagcggcggtgcgcggggcggttgcccggccacgggacgggcgctcaggcggccatggtggcacgcaggcacgacatccccggcggatcgggtgtgctgccctcggccagcgcgggtgcgcggcccccagcgcgcgactggatctccgggcggcgcgggcgcgggcgagtccccatcggcggcgtgggtgtgcgtcccccggcgcgcacgttcagcctcggtggcgtggccccgtcaggccatctctgcgtggtccagtagtcggcaacgcgaagtagcgctgtcacgcggcctctagcgcaggcgtgcatccaggcggccgcgcccagcacgtcctcggccacagccgttcatcacagaaacgagcacccgcacgttgtgaccgtgaccacatgcatgcactgtcatttcttgcacccatcgtcgagaatggcaacaagaataaaattaaacaaagatgccatagcaacgcaagaattcttactgttcttttgtgttgtgatt

SEQ ID NO: 132254 - DNA, 713 bp, Zea Mays
cgtagtaggaatttcttcttagattctttttttttctgtaggagcacacacacacatatatcagagaactaaagtagaggctctccagcaatgcagcacccactctgcggcagctgatccccagccctgcagggaccatgctttccaaactcacaaccaccgccgtgtagtagttttcacggaccgagagacatgcatgagagcgttacggttttgctgcctcgaatttttgtgctctcgacggcaccctttgtccctttctactcgaggcagcaatccatcctcgatcacaacgcaaaagtagcaaaaaagggggagatcgatcgagaacgcaaggcgaaagatgagctaggcaggtaagattaaagacgcaatggtttgcagcagcaacacgttacacgtcgcgaactcgcgacggaagagcctgctgctccacgccacacaaatttggggcgtgcagcgtgctggctgatgacggatcccgtggttggtgttgaagtatactcagtgataacgagattgagagagagacaaatgacagcgatctttcattattgcaggggagtcctggttatatacatgtgaaggggtgtatcccaaggggtatgtcccttagagagattctgccgcaccctttagattggtcacatatacaatatacaatattttgtaacactcccccttgatcaatccaagtccatttgatcatctgc

SEQ ID NO: 132255 - DNA, 1899 bp, Zea Mays
atgatggtcctcacctcagttgccaccacctcgttcgccattctacttcttttctctctcccctcatgcctccacctccgcgccaccccattctcggcagagggcgtaggagcatgcgcctcctccccgtattcgttcgacaccagccctgacaccgactcgcgcagtggctattgcacgtccacgaggacgtttcacatcatgcgcgcaccatcgttttcgccgtcgtcggacgtcccgttcgtcttcccggccttcgccacgttcttcctccccaacctgctgcccccacccacggtcgcaaccgcgagccgaccgacgctcgtcgacgcagggaaagtgaaaaatcgctttcgcacaagtcgcggaacagaggcaagcgctgtgccacacagcgggagtcctccccgactccccgagagatttgctgcccagagccttcgaatcgggttcaatcccgtcgatctttctgcccgccgccgccacgggactccagaagttgccttcgattcggccggggccgtggaagcggggatggggctcggagaggcggcggggcggctcctggcggccgtggactgggagcgcgaggcctaccctgcgtacgacgacttcctcgcgctccccgccttcgttctcttcttccctaccgtccgcttcctcctcgaccgcttcgtcttcaagtgggttgcaatgaggcttatacatgggcagggacatcagagagctaataatgacacagaagaggcaaggaagaagataagaaaattcaaggaatcagcttggaaatgtgtttatttcctgtctggagagcttttatctttgtctgtcacatataatgagccttggttcaccaataccagatatttttgggtaggaccaggagaacaggtctggcctgaccaaaagataaaattgaaacttaaggctgtatatatgtatgctgctggattctacacatattccatatttgcacttatgttttgggaaacaaggcgttcagactttggagtgtcaatgtcacatcatgttgctactgttgttctgattgttctatcttacgtgttcagatttgctagagttggctctatagtattggcaattcatgatgcaagtgacgttttcctggaagtagggaagatgtccaagtacagccattgtgattggcttgccaatgtttcgtttctgttttttgttatttcatgggttcttctccgtctcacatattttccgttctggattctgagaagtacaagctatgaggtcttgttgactttggacaaaaagaagcacaactttgatggtcctatatactattatgtgttcaattcccttctattttcactacttgttctccacatatattggtgggttttaatatatcggatgcttgtgagacaaatcaagacaagaaatgttggagatgatgttcgatctgattctgaaggagaagacgaccatgaagattgattgggggcatcatcttactttgtgtgttataacggtgcttatacattcttttgctggattccaacagattatgagaggacgagcattgttcctcacgagattcaccgaagccgggctatgggttagttgtgtcttggctgccaatttgtgctgtactaagtatgcattagaaacaacgctgcaatgcattagaaaaaaagctggaactggatgtcgaatataacattcttttcagtgttcacacaaagtgcagcggtaaatgtagcaccaatttagcattccggaaacaaaaggaccggttgtaaatcaaagcctttctgccgacataccatgtacattatgtttgccaggatgacaccgcttggagttttgtgaacggtagcgctggccgccggtgaaacgcttctcttgagctcctgttgttccata

SEQ ID NO: 132256 - DNA, 87 bp, Zea Mays
gcgtctcattatattaagaagaaaaagaaaacagggtctaaagaaaggcctaatacaaaagaccccctacgggggccagaaacacgc

SEQ ID NO: 132257 - DNA, 265 bp, Zea Mays
aagggttggagacacatatttatagctctagaggcgaggctgcactaccacaccttctcacacacactacacaacaggattgtcctctagatgctaaagagactacagaggacagtcaaaagcggctgttgtcctctagatgctaaagggactacagaggacagtcaaaagggactgttgtcctctagatgctaaagggactacagaggacagtcaaaaagcgactgatgtcctctagatgctcaagacttattccatcattctc

SEQ ID NO: 132258 - DNA, 1946 bp, Zea Mays
ctcctggtcgttgggctgcctgtgatcggcttatcccctcctcatcccattctcaccgagcttctgccaatctgcgttcgcggcggcgtttcttttggcctcgcaagcggcggaggaggagagaattccggggttttatcgcaaggacaacaccaatttgatgctttctgaaactagacaatacaacctgatggtaaaatgatacagagttatgacacggaaaatggtagaagacaagagttcatcacaagacacggtacagaaaagtgggcatgctgtacttgggaatgtttcttatgacaaggatgttgtggagataaaactggcagacgctattgattccgataactacgtcggtaattttgtcaaggatgtctgtgtcgatgacggagcactgcttcatcggacggcatcagaagaaaaaccagtagacagaaggtcatccctagatctcagttgccaaatgatcggtgcagatagtgacataagctactacgggaaggaagatcattctagaacatctgcgcacgaactaaaaccagaagcagttgcacttgcacctctttgtaacatcggtgcagatagtggcagagagtatgatcttgaagatcggaccggtactggttccatcgcaggcagtcctggtgagaagaagataagtttgcaagagctgcttctccttgaaagtgcagaagagtcccgaaatacaggcgcagtaaactccgagagcagtgaaaagcataaatgtcctctgaatgaagaagaagctgcacagacttccaaggacggcgatcctgacgctgagactgttttggccaacacctttgagcatattagtgatggcatatcaagtaaggagaaaggcagtggttgcccagcgacgatggctagagaccaggttgatacagctacggcactagatgtgcgagagccacagaaacttgatcggtacaacccttccgttgatcgtcggtcacgagagtacacatcggtgcctgagtgctctataccaggaatcacagatgctgcctcctccacgggttccatctgctcttttcacaacgcgacgagcagcaccgcaaccgcaggcttgggtgaaggtgaaacacttgaaccaggggcggatactctcagcgcaggcagctcagacatcggttcatctgaaaagagccacgacaaccacagcggaagtatgtttagcaagccaatcgctggtgcatatgggaatgggaagaagcaagaaaaacatggtcagatggatgaggagcacggcataggcacagcagacgacgcagccgccagtacgagttctgcttctaccctcgcgcaggatggctctgcgcctgcggtccaagaaaccgtgcctggtagtagtagtagtagttcgagaccggcagctcgcgccggtgacgacccggacctctctggtcccagtataatgtcaggcccggtgtcgatgtcgggtcacatagcatattctggcaacgtctctctccggtcagatagcagcacgactagcacccagtcctttgcatttccagtgttgcagagggagtggaccagcagccccgtcaggatggcgaaggcagagcgcaggcgcagcggtggacggcatcgcgtctggaggaaagggatcatctgctgtaaattctgatcgaccatggcgggcggccctgccatcttatttgaaatccagccacctcctttcttgacacctccttcctagtggcttgaccgttgagtgacaaggtgtgtatagctgtagcgtagtgacggtttttttgttttgttttgttttgtttttgtttcctccgagaatgtgcttaagtgcccacgtttttcatttgctattgttataaggcagtagagtagtagtgatcacgcttggcagaggtgattagttttgtacatccttttggtggatttaaattaaattagatgcagcg

SEQ ID NO: 132259 - DNA, 1658 bp, Zea Mays
ctcctggtcgttgggctgcctgtgatcggcttatcccctcctcatcccattctcaccgagcttctgccaatctgcgttcgcggcggcgtttcttttggcctcgcaagcggcggaggaggagagaattccggggttttatcgcaaggcaggacaacaccaatttgatgctttctgaaactagacaatacaacctgatggtaaaatgatacagagttatgacacggaaaatggtagaagacaagagttcatcacaagacacggtacagaaaagtgggcatgctgtacttgggaatgtttcttatgacaaggatgttgtggagataaaactggcagacgctattgattccgataactacgtcggtaattttgtcaaggatgtctgtgtcgatgacggagcactgcttcatcggacggcatcagaagaaaaaccagtagacagaaggtcatccctagatctcagttgccaaatgatcggtgcagatagtgacataagctactacgggaaggaagatcattctagaacatctgcgcacgaactaaaaccagaagcagttgcacttgcacctctttgtaacatcggtgcagatagtggcagagagtatgatcttgaagatcggaccggtactggttccatcgcaggcagtcctggtgagaagaagataagtttgcaagagctgcttctccttgaaagtgcagaagagtcccgaaatacaggcgcagtaaactccgagagcagtgaaaagcataaatgtcctctgaatgaagaagaagctgcacagacttccaaggacggcgatcctgacgctgagactgttttggccaacacctttgagcatattagtgatggcatatcaagtaaggagaaaggcagtggttgcccagcgacgatggctagagaccaggttgatacagctacggcactagatgtgcgagagccacagaaacttgatcggtacaacccttccgttgatcgtcggtcacgagagtacacatcggtgcctgagtgctctataccaggaatcacagatgctgcctcctccacgggttccatctgctcttttcacaacgcgacgagcagcaccgcaaccgcaggcttgggtgaaggtgaaacacttgaaccaggggcggatactctcagcgcaggcagctcagacatcggttcatctgaaaagagccacgacaaccacagcggaagtatgtttagcaagccaatcgctggtgcatatgggaatgggaagaagcaagaaaaacatggtcagatggatgaggagcacggcataggcacagcagacgacgcagccgccagtacgagttctgcttctaccctcgcgcaggatggctctgcgcctgcggtccaagaaaccgtgcctggtagtagtagtagtagttcgagaccggcagctcgcgccggtgacgacccggacctctctggtcccagtataatgtcaggcccggtgtcgatgtcgggtcacatagcatattctggcaacgtctctctccggtcagatagcagcacgactagcacccagtcctttgcatttccagtgttgcagagggagtggaccagcagccccgtcaggatggcgaaggcagagcgcaggcgcagcggtggacggcatcgcgtctggaggaaagggatcatctgctgtaaattctga

SEQ ID NO: 132260 - DNA, 1584 bp, Zea Mays
ctcctggtcgttgggctgcctgtgatcggcttatcccctcctcatcccattctcaccgagcttctgccaatctgcgttcgcggcggcgtttcttttggcctcgcaagcggcggaggaggagagaattccggggttttatcgcaaggacaacaccaatttgatgctttctgaaactagacaatacaacctgatggtaaaatgatacagagttatgacacggaaaatggtagaagacaagagttcatcacaagacacggtacagaaaagtgggcatgctgtacttgggaatgtttcttatgacaaggatgttgtggagataaaactggcagacgctattgattccgataactacgtcggtaattttgtcaaggatgtctgtgtcgatgacggagcactgcttcatcggacggcatcagaagaaaaaccagtagacagaaggtcatccctagatctcagttgccaaatgatcggtgcagatagtgacataagctactacgggaaggaagatcattctagaacatctgcgcacgaactaaaaccagaagcagttgcacttgcacctctttgtaacatcggtgcagatagtggcagagagtatgatcttgaagatcggaccggtactggttccatcgcaggcagtcctggtgagaagaagataagtttgcaagagctgcttctccttgaaagtgcagaagagtcccgaaatacaggcgcagtaaactccgagagcagtgaaaagcataaatgtcctctgaatgaagaagaagctgcacagacttccaaggacggcgatcctgacgctgagactgttttggccaacacctttgagcatattagtgatggcatatcaagtaaggagaaaggcagtggttgcccagcgacgatggctagagaccaggttgatacagctacggcactagatgtgcgagagccacagaaacttgatcggtacaacccttccgttgatcgtcggtcacgagagtacacatcggtgcctgagtgctctataccaggaatcacagatgctgcctcctccacgggttccatctgctcttttcacaacgcgacgagcagcaccgcaaccgcaggcttgggtgaaggtgaaacacttgaaccaggggcggatactctcagcgcaggcagctcagacatcggttcatctgaaaagagccacgacaaccacagcggaagtatgtttagcaagccaatcgctggtgcatatgggaatgggaagaagcaagaaaaacatggtcagatggatgaggagcacggcataggcacagcagacgacgcagccgccagtacgagttctgcttctaccctcgcgcaggatggctctgcgcctgcggtccaagaaaccgtgcctggtagtagtagtagtagttcgagaccggcagctcgcgccggtgacgacccggacctctctggtcccagtataatgtcaggcccggtgtcgatgtcgggtcacatagcatattctggcaacgtctctctccggtcagatagcagcacgactagcacccagtcctttgcatttccagtgtaagtcaaacgactctgcaatcgtctgaggggagggccaac

SEQ ID NO: 132261 - DNA, 2031 bp, Zea Mays
cggcaaagggcaaagtgggaaacaatcaagttccacaaaatcgcatctcatctgcttcgactccaccgaggactcccttctttcctcccactcccatctgctctcctcgccgccacctgcgccgtcagagcacggagcagtccgcgaccacgctttcgctgccgctctccgacaggcgacggagccgcagctccagtcgcagtcggctcccctgaattcgggctcgccaaataccctccaatcgtctgcgtccgtcgtccgggacttccggtgcaactgaatccggcaccacctgtgcggcctgtcatggcacttggaagaggagggaggaaggactcaagaggttaaggtacggtatttatagatttggctgaagaaactggttgttgctattatgaagactaagacgagtaggagcttacagaagtctgggagaggtaaccatgtccaaggagaagggccaaactgggttcttgttgctggcggggttttgcttagcacgctttcagtcaaggttgtgtgcaaactaaagcagttgttagacgggaagcagcaaaataatacttccgaagctaaaggaaggcctgaagcatgcaagctgcattcagatctctaccggttcagtgaccaaactggctgctactactgtatgtcagggcttgcaaatggtggagtggaagtcaagcaaacacctgcaagtcctgtacccaaatcagttgaatcctcacttccacttgtcaagatacccacaccagaatcaagcaaagagaacagcggtgttatgtggatatcctcacctgatcggcttgaagatcctcgaaggccatttcagtactctaacagttctggctctccctgtgtttcagaatcaggatctgacatttatagcaaaagagaggtcatacagaagctaagacagcacctcaagaaacgtgatgagatgatcatggagatgcaaactcagattgctgatcttaagaactctcttaacattcaggtgacacagtccagcaatctgcagtctcaattggatgctgccaatcgtgatctgtttgaatctgaacgagagattcagcatctaaggaagattattgcagatcattgtgtcacagaagcactctctcatgataaacctttgcaagctgcgcattggcagccagatgccgcaaatgggcattctaatggctatggtgatggttgtgttgatgatgctgacctgcattgtattagcatcgagaagaggaaggtagaagtagagagggtggagatgctcaagaaagaggtggttgaactgaaggaagtcattgagggaaaggactttgtgcttcagagctacaaggaacagaaggtggaactcttctcaaagatcagggagttgcaggaaaagctctcagcacaagtgccaatcatcttgtaggatctatctgtgatactttttagaagattgaatctaagcataatgttgccatgtcccatgagcagcagagggggtcccgcttcagtgaagattgcagaaggtcttggcatttggcaatcgtcacgcatgccaaacaccatgctaggatctttgtggaatgcttctcttttcctttgaggggagctttgcataatgttaggttgatttgtttctttcttggttgtcataatgttaggttggtttgctttcttccttcttcaatatctagcccttggttgctcaaagtttacaaagggattctttttttcagttgctaggcctcaggtaactcaattgaacttcatactcaagttgctgtacaggttctcagatttcaggagacacagaagtctgtactgtgcctctgcctcctgtttcatgcttttttttttgttaagtgatctttggaatgttaggtccatgacatttctactatgagatttgaagactatggcattgcccttttttgtgattccttctggataaaaagcaacttaggcccggtgatgcagtgtatgacattgcccgttgttcatctgatagttattgggggtgtgtgggcagttgcaaaacat

SEQ ID NO: 132262 - DNA, 1896 bp, Zea Mays
cggcaaagggcaaagtgggaaacaatcaagttccacaaaatcgcatctcatctgcttcgactccaccgaggactcccttctttcctcccactcccatctgctctcctcgccgccacctgcgccgtcagagcacggagcagtccgcgaccacgctttcgctgccgctctccgacaggcgacggagccgcagctccagtcgcagtcggctcccctgaattcgggctcgccaaataccctccaatcgtctgcgtccgtcgtccgggacttccggtgcaactgaatccggcaccacctgtgcggcctgtcatggcacttggaagaggagggaggaaggactcaagaggtcaagtctgggagaggtaaccatgtccaaggagaagggccaaactgggttcttgttgctggcggggttttgcttagcacgctttcagtcaaggttgtgtgcaaactaaagcagttgttagacgggaagcagcaaaataatacttccgaagctaaaggaaggcctgaagcatgcaagctgcattcagatctctaccggttcagtgaccaaactggctgctactactgtatgtcagggcttgcaaatggtggagtggaagtcaagcaaacacctgcaagtcctgtacccaaatcagttgaatcctcacttccacttgtcaagatacccacaccagaatcaagcaaagagaacagcggtgttatgtggatatcctcacctgatcggcttgaagatcctcgaaggccatttcagtactctaacagttctggctctccctgtgtttcagaatcaggatctgacatttatagcaaaagagaggtcatacagaagctaagacagcacctcaagaaacgtgatgagatgatcatggagatgcaaactcagattgctgatcttaagaactctcttaacattcaggtgacacagtccagcaatctgcagtctcaattggatgctgccaatcgtgatctgtttgaatctgaacgagagattcagcatctaaggaagattattgcagatcattgtgtcacagaagcactctctcatgataaacctttgcaagctgcgcattggcagccagatgccgcaaatgggcattctaatggctatggtgatggttgtgttgatgatgctgacctgcattgtattagcatcgagaagaggaaggtagaagtagagagggtggagatgctcaagaaagaggtggttgaactgaaggaagtcattgagggaaaggactttgtgcttcagagctacaaggaacagaaggtggaactcttctcaaagatcagggagttgcaggaaaagctctcagcacaagtgccaatcatcttgtaggatctatctgtgatactttttagaagattgaatctaagcataatgttgccatgtcccatgagcagcagagggggtcccgcttcagtgaagattgcagaaggtcttggcatttggcaatcgtcacgcatgccaaacaccatgctaggatctttgtggaatgcttctcttttcctttgaggggagctttgcataatgttaggttgatttgtttctttcttggttgtcataatgttaggttggtttgctttcttccttcttcaatatctagcccttggttgctcaaagtttacaaagggattctttttttcagttgctaggcctcaggtaactcaattgaacttcatactcaagttgctgtacaggttctcagatttcaggagacacagaagtctgtactgtgcctctgcctcctgtttcatgcttttttttttgttaagtgatctttggaatgttaggtccatgacatttctactatgagatttgaagactatggcattgcccttttttgtgattccttctggataaaaagcaacttaggcccggtgatgcagtgtatg

SEQ ID NO: 132263 - DNA, 1191 bp, Zea Mays
ttattggattcctcgtacctgtggcttgcggtattccactgtttctctctcgaaatcggccgtctctctcccgtccggcacttcctccgatcgactagcctgcggcggcgccggcgccggcgaccagcggccatgcgggtggcacccagggtgctcttcctcgtccgcgacgccgcgggctacggcgctgccctcgccgacgcgctccgcccgccgcccgggctaactagggagtcctcgcccttcgagctcccccttggaaagtacggcctcgacggagagaaggcgtgcgccgagctcctgagcttttccgattccagtggctctccacaggtgaccatttttgttctgccagactataagccacctcttgcagcgtgtgttgtaaatggggtcttggaactgatttcttctgaagctacctccactgagcgaactctaattgtcccatacatcacaagatcgtcaagctatcatcatggaacggaacatgcaacaaaggcatcgactgtacttcatggtgctgaaataggggcaacaactgactatactcacctgttggttggtgggaccactaaacctcctacatccttgcaaatacgtagtgaaccaatattatgtttgctggaaatggtgcgtgtgttgaaggtgcctacagttcttcttgtcacttctggtggacagcagcaaggcaagagctctacagtttctgatcttgaggtactgcaatgcttaggagagcacttggccaagcacacggctttggaattttccaaaggaactgttctcaagagagggatcgaaaaatcacgaattgatcaggaaccctggcgcgagctgtatgggtgacggtgccctcatacagtttggtattagcttaattggctatacatgtttgactcggatgaatgatggtgttttatggagctggaatcacgaaggatctggtccgtcgaaaccactatatataatgtggttcctttcgcctgggtaaatcaactcatcagcaagatatcggatgtcttagaacttgtagacgctttgcagttaaacattaaacgaaatacatttacacttctaacctcttggccagtagtattcaagggttaggtttattgcctgactcgctggaatgtttatagccaaagctccaattttgctttcgaaggatatatatacatatattctcaa

SEQ ID NO: 132264 - DNA, 850 bp, Zea Mays
attttatagaattgttctgatcaaatgggaaacatcagcaaaacaataggcgtgctaggtggtggcaatgttaaaatgtgtctctaaaagatctacggtgacagtggataacattgttttctagttttcttctgtaaaaaaaaaagcaacacaccttgcttttcctatggtcttgtctgattcttggtgttttgatctgtctatttagtactgcgatgttaaaagttttgacttctgaatttatcatattctaatatgaagtagtgcatataaccacacataggtagcattaacagcctgctgcctctgatcgtccagttcagttctgaataactgtgaaaaaaggatattataatttatacatgtaaaatgtgaagtttcttgagtcttagctcacccaatttttttttccaattgttaggtactgcaatgcttaggagagcacttggccaagcacacggctttggaattttccaaaggaactgttctcaagagagggatcgaaaaatcacgaattgatcaggaaccctggcgcgagctgtatgggtgacggtgccctcatacagtttggtattagcttaattggctatacatgtttgactcggatgaatgatggtgttttatggagctggaatcacgaaggatctggtccgtcgaaaccactatatataatgtggttcctttcgcctgggtaaatcaactcatcagcaagatatcggatgtcttagaacttgtagacgctttgcagttaaacattaaacgaaatacatttacacttctaacctcttggccagtagtattcaagggttaggtttattgcctgactcgctggaatgtttatagccaaagc

SEQ ID NO: 132265 - DNA, 1238 bp, Zea Mays
ttattggattcctcgtacctgtggcttgcggtattccactgtttctctctcgaaatcggccgtctctctcccgtccggcacttcctccgatcgactagcctgcggcggcgccggcgccggcgaccagcggccatgcgggtggcacccagggtgctcttcctcgtccgcgacgccgcgggctacggcgctgccctcgccgacgcgctccgcccgccgcccgggctaactaggttttcgctcccacccaaaaccctaacctaacgttccaacgcacgtagcatccgctcactggctttttgccgctggatgtttctggtagggagtcctcgcccttcgagctcccccttggaaagtacggcctcgacggagagaaggcgtgcgccgagctcctgagcttttccgattccagtggctctccacaggtgaccatttttgttctgccagactataagccacctcttgcagcgtgtgttgtaaatggggtcttggaactgatttcttctgaagctacctccactgagcgaactctaattgtcccatacatcacaagatcgtcaagctatcatcatggaacggaacatgcaacaaaggcatcgactgtacttcatggtgctgaaataggggcaacaactgactatactcacctgttggttggtgggaccactaaacctcctacatccttgcaaatacgtagtgaaccaatattatgtttgctggaaatggtgcgtgtgttgaaggtgcctacagttcttcttgtcacttctggtggacagcagcaaggcaagagctctacagtttctgatcttgaggtactgcaatgcttaggagagcacttggccaagcacacggctttggaattttccaaaggaactgttctcaagagagggatcgaaaaatcacgaattgatcaggaaccctggcgcgagctgtatgggtgacggtgccctcatacagtttggtattagcttaattggctatacatgtttgactcggatgaatgatggtgttttatggagctggaatcacgaaggatctggtccgtcgaaaccactatatataatgtggttcctttcgcctgggtaaatcaactcatcagcaagatatcggatgtcttagaacttgtagacgctttgcagttaaacattaaacgaaatacatttacacttctaacctcttggccagtagtattcaagggttaggtttattgcctgactcgctggaatgtttatagccaaagc

SEQ ID NO: 132266 - DNA, 1272 bp, Zea Mays
ccaatccccgcttccccgctatcttcttcttcttcttgcccacgaaacctctcttctctgcttctgctaacagtgtgacggcggcggcgatggtagtgctcacggaggagttccacggcctgtcgctgaagcggaagggcgcctacgagccgggcctcttcgacggcgccgacgaccgctcctccgggctctcgctcccctgccgcgccaccaagatgcggcgcctctcgtgtcctgatggccctagcgacggggacgaccaggccgtgacggcggcgtcggaggatgacgttgcgatgggcgacgcggcgccgtctcattcgcctggcaccgttggcggcgacgagagggcggtggtggtgtacggagacggcagcagcagcaggcggatcgacgccccgcgccttgccctgcgcgccggtgtggacgcggattggatccgtgtcatgttccgggaggcgaacagcaggaccgtgcgtgagctgctcgccggcgccgccttggaacggagatctgagcccgatctcgccctggccgtcgtaccctgggtggcggtggcgccgacgacggcggaggagaccgcagaggcgtccaccgccgttgaggcagcggacgacggggccgacggcgagggtgcggctgcgatggacgtcgagcaagacgaggtgcaggaaggtggccggccctggaccggccaggaccaggcgtacgacgccgccgttggggaggagttggtgtacaggtggccgcagcactgctgggctagcccgatgatgtggtcgtgctgaacgtcgtatggtattgggtgtgtgctgccgactgccgtagcagtagacagattgtagagcagacacatgtcgagtgattccagctgggaatggggatgagaccggtcgccattgccgatggcatgggatgatgggaggccttctcgttctcgccatgacctgttcgttgccgagatcgatcaggattcgattagcctggttggttgtttttcgttcagagccgcacgggtactttcgacaattccgtgctctgggggctggggcagacggcagtgttgctgctgatatttagtagtgggctcaaagcaaagccagcaatggcgagttcaatgtcgctaacgcaaatcatgatcttcttctgatggttagcagtagtctgtttctgtttgtcccgcctcactgcttcggtgcttccttgcgggattgtttgtcccggatgcttgcatgtaaaattttctgcgactataaccgtagtgaaattttt

SEQ ID NO: 132267 - DNA, 107 bp, Zea Mays
acagcgatctagaacacgcaaggagccaaggacccacgagaagcgaagctagtcggagagcagaggaggggccctaccaacaacgacggaccaaggtagtagtgcga

SEQ ID NO: 132268 - DNA, 1359 bp, Zea Mays
atataacttagaatggttttgccacaagtgctcgattaggtctgccttaagctgatagtgggtttccatgttcttgatatttttgtatttttgaatgaatgcatcaagttcaggtgaagaattgtgcgacactgtcaccctttgtcccatgtcatcgtagttgcaaagatattgtcccatatcatcgaagttgtaaacttgttctcctccgtactcatcccgctcgtcttcaacaatcatattatgcagtatgatgcaagccatcataatattatggagtgtgtcttcatcccacaaacgagccggcccacgaactatagcaaaacgagattgtagaaccccaaatgccctttcaacatcctttcgacaggcttcttgtgcctttgcaaaatattttttcttattaccttgtggttctggaatggtcttaacaaaagttgcccacgatggatatatgccatctgctagataatatcccattgaataatcatgcccattgatgttgtacttaacttgtggaccttccccctcagcaagccttgcaaatataggagacctatgaagcacattaatatcattgtgtgaaccaggcatgccaaagaatgcatgccatatccatagatctttagatgcaactgcttcgagtataattgtgggctcctttttatgtcccctgtacatcccgtgccatgcgataggacaatttttccagctccaatgcatacaatctatagatccgagcatacctggaaatcctctgcttgctccaattgcaagcaacctagttgtatcctgttcattaggcaatctcatgtactctggtccgaataccttaacaacagctactacaaacttttgtaaagcttctagagcggtactctcaccaatacaaatgtattcgtccaaagcgtcagccggaactccataagctaacatacggaaagccgcaacaaccttttgcagagaagatagtcctagcacaccgacagcattcctcttctgcacaaaatagttgtcatgttcctcaacatcattcattatgcgaagaaatacaggtcacctcatccgaaacctatatcacgatgcagttaaaaattagcaatactgaaatgatgtaaaaagaaataggaaaaatagaaaacattgcgaacctccgtctaaaaatctttgaattgaacgtaggattatctgagaaatagtctttgtaaagaagagcatggtgtaatagtctgtcacgatgcactcgtgttcctcaacagaaccaattcgtcccggatgattaactaaaccatcaacgatcacgtgcgcggcatcaaaaaacagatcattctcatcatccgaagatgacggatcaatcag

SEQ ID NO: 132269 - DNA, 198 bp, Zea Mays
tttttgggacagatggtgttggaagacagttgggattaacgatttggtctttcgaacaaatccacccttttctatgcaatgttatgtattagtaatatataatgatagagagccgacggtctgtcttttccacacactaggttttagggttttcctgtgaggctgtgaaaaaactctttatgtgaggaaaaatatttc

SEQ ID NO: 132270 - DNA, 712 bp, Zea Mays
cgcgcgcctccctttccgccattacaatctttgtttccgggaggggaggggaggggaggggagggaaggttccgtccagcgcaggccgcacggacagagagcgcgaggaacagggggctagctagcagagctaataagaaagaaacgagaagcagcagggttggtggtcaagcatggaacgcaggaggagccggcacgccttgttgctcctctcagccgtcatggcgtccctcgtcgccggctcgaccgccgggatataccacatcgtcggcgccggcaaagggtggcggatgccccccaacaggacgtactacgaggactgggcgcacaccaggcagatcagcataggcgacaagctgatgttcctgtaccggagcggggtgcacaacatcgtggaggtgccgacgcgggagctgttcgacgcgtgcagcatgcgcaacatcaccagccggtaccagtgcgggcccaccatcatcgagctcaccgaccccggcgagcgcttctacttctgcggcgtcggcgagcactgcgaggccggccagaagctcgccatcaacgtgctcctcgtcccgccgccgccgccggacacggacgacgacagctccggcgccgcccgcctcctgggccgcgcgggcgcggggctcgccgccgcctgcctgtgcctcgtgtccgcgctgctgacaatggcggtgtgaatcggcacgccgccgcc

SEQ ID NO: 132271 - DNA, 663 bp, Zea Mays
aagctacatcagtacatcaccctataggcagagctagctaggcggcacttcaaagacgaccgggaatatcagcaacgaacagcgataatgaaggtgaacgcccaatcatcactacatgctcctgccactgcattgcatgtcgccgtcttcttccctaactcttttcacagtactgatcgacatgggatgggcacacattattgttcgtcatcctctctgtctcttccgcagcaaaagatcgtgatcagggtgcacatggagtgcgaccggtgccggtccaaggcgctggcgctggtggcggccgcggccggggtggactcagtggcgctcgccggagacgccagggaccaggtcgtcgtcgtgggcgacgacgtcgactccgtcaagctcaccagcgcgctgcgcaggaaggtcggacctgcagacatcgtgcaggtcgccgccgaagccaagaaggtggacgccggcagcaagcctccggcccccgtcgccacgctgcccgagttcgtcgcgtcgagcacgtggtactgccagcagtacccgcagccggcggccgtggtatacgggcaccccgcggacgggtacgcgtactacggatgcgagacgcggactgacagcatctactgctccataatgtagacattgacttgacttgatttcgtc

SEQ ID NO: 132272 - DNA, 589 bp, Zea Mays
aacaaccctcagcaaaatgaagcaaaagatcgtgatcaaggtgcagatgagctgcgacaagtgccggtccaaggccatggaggtggtggcggccacgctcggcgtcgactccgtggccatcgacggcgaaggcagggacaaggtcgtcgtcgtgggcgacggcgtcgactccatcaagctcactggcgcgctgcggaagaaggtggggcccgcgcacctgctgcaggtcggcgaggccaagaaggacgacaagaagccgccgcccgccgtcgtgcccgcttattacccgccgccgcacccggtaaacgtcgtctacgaccaccctgccggctacccgtggtacggctaccaggcgcagcatgacaccaccagctgctccataatgtagagacaaagtaaacagcagaccccgcatacgacatccgtacgtatgtacgatcgagcggatagtatttttttactggggaaaatattctatgttcggttttgtttattagtttgtagcgctactcttatagttgttacaactctagttttttcctttgcactgggttgaagtggaaaccatattttagaaaagtaatatgaa

SEQ ID NO: 132273 - DNA, 837 bp, Zea Mays
aagtcccaccacagcaaagcaactgcttgcagcctccgcacaacaaaaaaccccacgggtagtctcggatctccacgccaccaaaacattcgaagcttcttcgatctcttgcgcggcgttctggaatctgaaccttcaatcttggagagcggcgcgtccccaaagaattagatcagccatggccaagcaaaagatcgtgatcaaggtgccgatggcgagcgacaagtcccggtccaaggcaatggcgctggtggcagccgcgggcggggtcaactccgtggccatcgccggcgacggcaaggaccaggtggtcgtcgttggcgagggcgtcgactccatcaagctcaccaccatcctgcgcaagaagatgggcgacgcgcagctcgtcgaggtcgccgaggacaagaagaaggaggagaagaagcccgaccccgtcgccgaagctgcggcggcgtactacaaccagtactactaccactacccaccgccggccgccgtcgtttacgacccctacccacggccgggcaacacctgctccataatgtagactcagcctgtggacatatgcaagttaagttttgtgtgtagcggtgcgtgtgtgggggaggcgcgcaagtgtagtttctatacggaattcttctcttatctcccttttgaggttaagggcatgtgcagtcccagttaatatatggtcatttgaaaagtctctatgggttaatttaaaaattacgagagacagattcttcgtaaagagtttatctctacacgactctatatactatgatccgatgactcagggttgtatcattttgtctcttgtacttggaaaatcgatcc

SEQ ID NO: 132274 - DNA, 99 bp, Zea Mays
gtttgtccaaaacactagcctgtctgctcgaccatgctccacacgtttatgtaaatccaggtgactctacagctagcagctactcaaaagactgaactc

SEQ ID NO: 132275 - DNA, 584 bp, Zea Mays
ccaccagcggctagctgcgacatcccatcgatccacacatcaatacaatataatctaatggcgtccaaggctctgttcctcctcgccatcctgctgctagcgacgtcggccgccgtgctcgccgccgcggcggagcaaactcatgaaaacaacgagaagatggtggcgaggagcaaggacgccgccgccggcgtgatgaagcagcaggaacggcgcggcggcggatcagacgagtacggccacgcctgcgagtacggctgctgccaccacgtattccatggaggatgccagaagtgctgcccgccgccacccggcgctgcaggtggccgaccgcaggaggttaagaactagtagacgtctacacccgccggccggccgctgccatgcatgcatgacgccgggagtggaccggagctgtaccgtacgtaccactgcgccgcgctcgcgcgcgtgccaacaacgtacgtggcgagaataatcatcatctcctttaattttgttaaataacacgtacggctcggctgtagctaggtacgtaacagcttcccttaatatataccgtcgaccgacttgcttttgtatgt

SEQ ID NO: 132276 - DNA, 1236 bp, Zea Mays
gaaaccttcgcgcggtgatggagcacgcgcacgcgacctcgacacgcacgcagcagccagcaggtgaccgccgtcacgcgaccgcttcccacactcccttccccaccagccgaaaccgaggctgacgctgcgcgagccaaccggcggtgatgcaggcggcagtcggccaccgcggcgccaaccttggctccccgtcactctcgcgcttccggtatggcttccgcctccccggccggtcccgcctcttctctgagggcgtggcggcggcgtcactccgcgtcggctctctgccccagccacggacccatggcagcggcggtttcgcgcacctcggggccatgggtggggaggcgccgaggctgccgcacgccctcaggagaatgcttatcgatcatcagaaaatggcatgtcccaaccttctgaaagctgctgtactttcaaccatgacattgctttctgtacctcttgaggcgtcagcggagatgtgccagccacctagttctttcgccaatatgccaatttttattgttgtagcactaataggagctgctgttggcggattattagcacgccaaagaaaggcggaattgaagcggctcaataatcaacttcgccagatcaatgcagcacttagaaggcaggcacagattgagtcatttgcgcctggccttacttatgcgccagttgggagaacaaatgaaactgatgttattgttgacccaaggaagcagcagttggtcacaaacctgagaaatgggaagaattacatgaggaatcaagatcttgataaggctatagtggagttcagaacagctctggagcttgcagagagcataggtgatcgttttgaagaaaagaaagctgcccgaggactagaggctcgggaagtaccgagaagcaatgagacagtacagcaaggttctggagctgtccaaggagacaggtgaagattccggctgcaccgaggcctacggtgccatagcggactgctacaccgagctgggcgacctggagcgagcggcgaaggtgtatgacaagtacatatcgaggctgcagcccggcgagtaaggtagatttctttacagacgagacagcgagttccttcccgttcgttgagttttgcgttttgtcggtcttgttaaactcactgcaggtattggattgttttgagaacgattttaatattcgtatataaataactattgatttaatcaaaaaaataaaaataaatcacaa

SEQ ID NO: 132277 - DNA, 1041 bp, Zea Mays
cagcaggtgaccgccgtcacgcgaccgcttcccacactcccttccccaccagccgaaaccgaggctgacgctgcgcgagccaaccggcggtgatgcaggcggcagtcggccaccgcggcgccaaccttggctccccgtcactctcgcgcttccggtatggcttccgcctccccggccggtcccgcctcttctctgaaaatggcatgtcccaaccttctgaaagctgctgtactttcaaccatgacattgctttctgtacctcttgaggcgtcagcggagatgtgccagccacctagttctttcgccaatatgccaatttttattgttgtagcactaataggagctgctgttggcggattattagcacgccaaagaaaggcggaattgaagcggctcaataatcaacttcgccagatcaatgcagcacttagaaggcaggcacagattgagtcatttgcgcctggccttacttatgcgccagttgggagaacaaatgaaactgatgttattgttgacccaaggaagcagcagttggtcacaaacctgagaaatgggaagaattacatgaggaatcaagatcttgataaggctatagtggagttcagaacagctctggagcttgcagagagcataggtgatcgttttgaagaaaagaaagctgcccgaggactaggcgcatcgctgcagaggctcgggaagtaccgagaagcaatgagacagtacagcaaggttctggagctgtccaaggagacaggtgaagattccggctgcaccgaggcctacggtgccatagcggactgctacaccgagctgggcgacctggagcgagcggcgaaggtgtatgacaagtacatatcgaggctgcagcccggcgagtaaggtagatttctttacagacgagacagcgagttccttcccgttcgttgagttttgcgttttgtcggtcttgttaaactcactgcaggtattggattgttttgagaacgattttaatattcgtatataaataactattgatttaatcaaaaaaataaaaataaa

SEQ ID NO: 132278 - DNA, 1220 bp, Zea Mays
acgcgcacgcgacctcgacacgcacgcagcagccagcaggtgaccgccgtcacgcgaccgcttcccacactcccttccccaccagccgaaaccgaggctgacgctgcgcgagccaaccggcggtgatgcaggcggcagtcggccaccgcggcgccaaccttggctccccgtcactctcgcgcttccggtatggcttccgcctccccggccggtcccgcctcttctctgagggcgtggcggcggcgtcactccgcgtcggctctctgccccagccacggacccatggcagcggcggtttcgcgcacctcggggccatgggtggggaggcgccgaggctgccgcacgccctcaggagaatgcttatcgatcatcagaaaatggcatgtcccaaccttctgaaagctgctgtactttcaaccatgacattgctttctgtacctcttgaggcgtcagcggagatgtgccagccacctagttctttcgccaatatgccaatttttattgttgtagcactaataggagctgctgttggcggattattagcacgccaaagaaaggcggaattgaagcggctcaataatcaacttcgccagatcaatgcagcacttagaaggcaggcacagattgagtcatttgcgcctggccttacttatgcgccagttgggagaacaaatgaaactgatgttattgttgacccaaggaagcagcagttggtcacaaacctgagaaatgggaagaattacatgaggaatcaagatcttgataaggctatagtggagttcagaacagctctggagcttgcagagagcataggtgatcgttttgaagaaaagaaagctgcccgaggactaggcgcatcgctgcagaggctcgggaagtaccgagaagcaatgagacagtacagcaaggttctggagctgtccaaggagacaggtgaagattccggctgcaccgaggcctacggtgccatagcggactgctacaccgagctgggcgacctggagcgagcggcgaaggtgtatgacaagtacatatcgaggctgcagcccggcgagtaaggtagatttctttacagacgagacagcgagttccttcccgttcgttgagttttgcgttttgtcggtcttgttaaactcactgcaggtattggattgttttgagaacgattttaatattcgtatataaataactattgatttaatcaaaaaaataaaaataaa

SEQ ID NO: 132279 - DNA, 3573 bp, Zea Mays
ccatgatcgcaggtagaagagagtttatccacacaggcagctatgttggaaaagattgggttgccgccgaagccgtccatgcgaggcgccacctgggtggtggacgcatcccactgtcagggttgttctgttcagttctcgttgtttactaggaagcaccattgccaaagatgtgggggcttgttctgcagcagctgcacccagcagaggatggttttacgtggacagggtgattcacctgttagaatttgtgatccttgcaaaaagcttgaggaagaagcacgccatgagttgagatatgggcacaaaaatagagctacaagagctaccacaaaatctgcttcgaaaccagaggatgaaattctaagtgaaattcttggaggtggagagcgtatccaatctctggattctttgcttcctgggagaaccacaagcagtgccagtacctccagacgaacttcttctaacctcagtacggacgcaaaaggagatgaaagcctttctgctgaagcacacaattatgaacttaacaataccgcatctattttcaccccagaggagttgcgccaacatgctgtagaagagaagaaaaggtacaaaactttaaaatcagaaggtaaaccagaggaagcactgcgggctttcaagcatggtaaagaacttgagaagcaagctgcagccctggaattagaattgagaaggactaggagaatggctacaaaagcgactaacatctcttctgctgttggtacttcgatgactgctggttctgatgaggttgaaacaaaaaggtcttcaactgggaaaaagattaagaaagaaaagaatgatcttgcctctgagctcagagatctaggctggtcagatgcagaccttcgtgatgaaacaaaggctgcccctatgagtctggagggagagttgacacagattcttagagaggtggcccctaaaccattggagggcaagagaacaggtggtatcgataaatctcaggttaatgctctgaagaggcaagctttactgctaaagcgggaaggtaggcttgctgaagcaaaggaagagctcaagaaggctaaaattttggaaaaacaacttgaggaacaggagattctaggtgaagcagaaaactcagatgatgatttggctgctattattcggaacatggacgacgataagaatgatgacatatttatagatgattcaaagttcccagctttcaactttgaacaaattatggttgcctctaatgatcttgccactgatggtcactttgacgttacagatgatgacatgaatgacccagatatggctgctgctctaaaatcatttggctggagtgaggaggatgacaaacagttggaaaatctcgaacctgtttcttcaaatcaagaggggctaaaggagcaagtactttctctaaaaagagaggctgttgcaaacagaaggtctggtaatgttgtagaagccatgtcattgcttaaaaaggcaaagctactagagaaggatctcaaaactgaagagccagactcaaaggttccttctctagaaaggcagaaaactacacatgcagaagatgccacttatgcagggacgaatgtccgacctataccaacaccaaaaagtaagcttgcaattcagcgagaactgttggctctgaagaagaaggcactagctttgaggagggaagggaaggtggatgagtctgaggaagagctgagaaagggtagtgttcttgaaaagcagcttgaagagcttgaaaattcttccaaaccacctgtagcaaaggaaaccaggagctttccatctaatcccccgtacaaagttgaacccccaaatatcaatcttgctgatgaggtatatgaacctgaggttacagacaaggatatgcaggatccagcattgctgtcggtgctgaaaaatatgggatgggaagatgctggttcagattctgtggaaacaactgacaaagcatcattttctgcacatgtagttcatcataaatcatcaaaaactaagggccagcttcagaaggaattgcttggtataaaaaggaaggctcttgccctcagaaggggagggaaaaacactgaagctgaggaggaacttgagaaggctaaggtgttggagcagcaacttgcagagatggaagaatcaaataacttgagtgctagtcaaggtgttactactgctggcggggacgaaatattgctagtgcatgcatctgaatctggtacgccagtggttactctgtgtggttctccaagtaaaccgcagattgagacaaccaatcctaatcaaggtgatgtgggagaagaaagtagagctggaaggtctccagccttgtcgcagccagcttttactgatccgttgggatctgaaaaagggtcacattcaccttctgtagtacatgatcgtaatgagcatcagaaaacacaaggagatgatactcttaaagatgagatattacttcataagagaaaagcagttgcctttaagagagaagggaagatggcagaagctagagaagaattgaaactggcaaaacaattagaaaagcaccttgaaggtgctcaacaagacaccatggatggtgtgggtgactccattactcctgctgtggaacagaacagtttggtccaacaacctgctagctccagcaatcacactgacgacataacttctccccctcctgcacaagcgagcaagcggacgcaacctcagaaagcaatgtccagccgggatcgtctcaaaatccagcgtgaatccctggctcataagcgcaacgccctcaagttgcggagagaaggaaagactgcagaagcagatgcagaatttgaactggccaaggagctagagagccaactggaagagtcagacaaccaaagctcgagctccgggggaaagtcaagtgaaccaaacgacacgagcgtcgagaatctccttgatcctcagatcatgtctgccctaagatccattggttggagtgacatggatttatccatgcaatcctctagtgcacaacctctgaaacctgtgcagtcctcaagttctcaacctccgcaaaaagtggaagccaagtcatctgttgccgcgaccagcaaacctcagagcgagagaagtcaacttgaagaacagatcaaggcggagaaactgaaagcgcttaacttgaagcgggaagggaaacaagcagaggccctggaggcccttcgctcggcaaagcgactggagaagaagttgaactcagcttaagccaatcacaccctcccagattgctcttgttcttttgtcaattgttcgttttggttacctgacatcccaagcgttccagctagaacagagaatcatatcgagtcctatggccctgattggcacagcttgtgagctttgagcaccataaacttatgtcctgtttgtgttcgagctatgagcagtccctttcatgtatgtataaataaaatctgatggacggagattattttcacgaattcgtgtatacacaatgttaggggaatgtcaattaagttggaatctgaacatttcatatgttagtcatttgataataatgttttccaa

SEQ ID NO: 132280 - DNA, 941 bp, Zea Mays
tactacccattcgcaaatcgcaacctcaaggttcgagaccttgactcgcggacgcgttttctgttcgccgagcgctgcagccgtcgagcgggagtgcgggccgcgttactgcgttagccgccccccgccgtcgcctgcctcagcggatccacgctcggcaggttactgacgccgcccgcctaacttccaccggtctggtggagtggtggggagatctatctgccttggatcgattattctctactacttggtagaagagagtttatccacacaggcagctatgttggaaaagattgggttgccgccgaagccgtccatgcgaggcgccacctgggtggtggacgcatcccactgtcagggttgttctgttcagttctcgttgtttactaggaagcaccattgccaaagatgtgggggcttgttctgcagcagctgcacccagcagaggatggttttacgtggacagggtgattcacctgttagaatttgtgatccttgcaaaaagcttgaggaagaagcacgccatgagttgagatatgggcacaaaaatagagctacaagaggttcatttccttttccttattcttctgatcactcacgtgtttcagtgaatatatgtgatttggttgacactactgctatgaaatatgtttaaatagtacatttgtggaaatcataatagcaatcaaggcctgttgtttaaaatctgactatcagcatggaaaccaatggggatgcagtttaagtcgaaatttggctatcgtcataatatagaacacatttgaccattttggatgcttgggcacaaggtttggactggttgttttttacatttgattatgctttatgggaactatatccttatgctctgaaacacagatgcttgtaatgatggtgcttgcagcttctcactagcgaacaattaaacagttttgacaata

SEQ ID NO: 132281 - DNA, 2181 bp, Zea Mays
gtcgacatagcagtcgggcacagccctgccatctcccagttcagccctgccgcggaacgctattcgacgtcggccgtcgcggcggcgccggccaccttctcctcctcctcaaataggggtggcgagcgccaccattcgctgcacttctccttctctggacgggatctcgttccttgcctgcgtcaagcgcggagtcgcggagccgccgtcggagagcgcccgtttccggccgggcgggcacacgagatggccctagccatcggtggcgtccacgtcgacgagtcctccgcgctcgggaggaacgtgtttggcgtcaaaagggtggtcttcccggttgccgagatgcccgtcccggctcggcggctcctcaggaagcggctgaggtcggagctcgacgccgtgcgcgacctcctcagtaaggcggagctatattcctgcgcttctggcgcggccggcaaggacgacgaccggctcttcgtccccgaggcggcggtggaggatgacggccgcagaaaggcatctccttgcgcagggcgcaaaagggagtccaccaagccagatgatagggagcggctggccggccgcctggcctcgatggcggcggtgctgccggatcacgtcgtcgcgttcctgcaggaccgacgcgctggggacgcagattcccgtggcggcgatggcgagatcgagacggacgtgcagtccatgaaagatggtgctctgttccagctgaaggtgttgctggacaagttcgcaccggagaccacgccgaagttggtgccgcgcgcaccacgggttggctccggcatcagctgcctgtcgcaggcgcggcaccaagaggcaggagacagaatacccccggtgcaagaggaagggcagggcatcaacgtctgcggcggcgtctctcgcatatcgatccaggacatcgctgaggagtacggcgagctcgtgaatggcatcagagttcagctcctgtcgccgctccagcgcaagtacgtcgatctcgccgagcaaggcgggtacattgacatctgcggcgacgcctctcctgtcgtgttcccggccaagaccggcgatagcagcagcccaaacttgagcagcagcagtgactccgatgcaacatcgtcgactgattccgactcaagcagcagctcgccggaggctggagaaccagttccggcgcctgaggctgatcctatccaaggcaaacataatacgcactcgcagccaccagagccggcgcctgaggcgattcagattgcagagccggagaaccagtgcccggcgacggtgtgcgcgatcaccaaaagcccaccagcgccgacggtgctccccaaggaatgtggcacccttgctcagcaaccaccaggcccaccaccgctagagcaggcaccggaagctgtccagattgcagagccaggggagcttaaggagaagtgcgtggcggccggggctacgatgcaccccatcactggcagcgcacctccgcctgcggttcttcccaacgggaatggcacctcttctcagccggccccggtggcggcgcagatcgcacagccacaggtggtccagcctgagggcgtccggcgcgcgcggacccagacgaacgacctgatcgccatggcgcgacaggaggggaagaggcgtgcgatggccaaggcccgccgagagcttctcgagctggagagggcggtgctgcccgacgagcgcatccatccgctggacatggagctgctgggcatcgccgcgttcgagcacgtcgtgagcaccgtgcgggacgcacgcacggcgcagccccgggtgaactatggagttggcctcagtgtctcgcccggtcgccccagcatactgcagcagctggggctctttctgaaggccgatggcggcggcgaggaagaggagggcgaggaggagcggccgccaccgttggccgtcgcttctgatggtgaagacatggacatggaggtcgaggacgggcagatcctgtaggaacgtaggcaccaccgcaccatgccaccatgtatgcatccgtcgatgcagcgttgcatcgttggttttgtacaacccctgattccctcaccaggactaattaactgttaggtattcccattctcgagctagtggttttgcatggttaacaagcaggataatttatgtttgtctgtttatttgtttgttgacgat

SEQ ID NO: 132282 - DNA, 2034 bp, Zea Mays
atgtctaccttcatcggcgttcttgtctccgatccagggctgcagagccagttcacccaggtgcagctcaggacccttcaaacaaagtttgcatccgcaaagcgaccaaacgcagaacatgtgaccataaaggatttgcccccgatgatggaaaagctgaggggcatccacgaagtcctgtccgaagaagagatcagcgggtttttgagcgagacctatcctgacatgaaccagcctatagaattcgagccgttcctcaaggagtacttaaatatacaagccaaagggagcagcaaatcgggaggcaagaagaagctgaaggggtccgtgtcgtttctgaaggcttccaccaccactctccttcacgtcatcaacgagtccgagaagacttcctacgtgaaccacataaacaatttcctgaaggaggatcctttcctgaagaatttcttgccgctggatccggcatccaacgagctgttcaaccttgttcgggacggcgtgctactttgcaagttgatcaacgttgctgttccgggcacgatagatgagagagcgattaacacaaagaagcatcttaatccatgggagaggaacgagaaccataccctttgtctcaactctgccaaggccattggttgcactgttgttaacattggaacacaagatctgattgaagccaggcctcatctggttcttggactgttatgccagatcataaagatacaactactggctgatctgaatctaaagaagacgcctcagttggcagagttggtggctgatgataatggcaaggaagtagaggagctggtcaccttagcaccggataagatgttgcttaaatggatgaacttccatctcaagaaagcagggtataaaaaaactgtgacaaatttctctactgatgtgaaggatggtgaagcgtatgcttaccttctcagcacccttgctccagagcttagctcaaaaaccatgatagaaacttcagatccaaaggagagggcacagaaagtacttgaaaccgcagaaaagctcgattgtacaagatatgtaacgtctaaagatattgttgaaggttccgccaatcttaacttggcattcgttgctcaaatattccagaacagaaatggtttatcaaccaacactgtggctcccgttattgaagatactcctgatgacgtggaggcatccagggaagagagagcatttcgcctatggatcaacagccttggaattccaacttatgtcaacaatttgtttgaggatgttaggactggatgggttttgctagaggttcttgacaaaatttctccagggtcagttaactggaagcatgcatccaaaccaccaatcattatgccgtttagaaaggttgaaaactgcaaccaggttatcaaaatcggcaaggagctaaacttttctctggtaaatgtagcaggaaatgatattgtgcaaggaaacaagaaactgattctagctttcctgtggcaactcatgaggactagtatcctacaattgctgaggaacttgagatcccactctaaagagaaagagatgacagatgctgacattctcatttgggctaatagcaaggtcaaggaatcaggcaaaaattcacatattgaaagcttcaaggacaaaacgatagcagatggggtgttcttccttgagctcctaagtgctgtgcagagcagggttgttgactggaacatggtgaagaagggggaggatgaggaggagaagaagctgaatgcaacatacataatcagtgttgctaggaagctaggttgcactgtcttcttgctacctgaagacataatggaggtgaacccaaagatgatcctcaccctgacagcaagcatcatgtactggagcctgcagaatcaagggccatacaagagttcaggaccacaggatgctcttctagaggaagaggaaggcgaggaggaggaagaagaagaagaagaggaggaagaggaggaggaggatttcgaaggaggtgtcgaagatggtgtctctgaaacgaccacttga

SEQ ID NO: 132283 - DNA, 106 bp, Zea Mays
attcattctcctgttcttgccatggtgcttcagattccatccaaatccgctcgtcgacgttctgattcttggcagctttgatgcgttcagcgccaaaaaaaaaaaa

SEQ ID NO: 132284 - DNA, 162 bp, Zea Mays
acttgttccaaacagagtttgtaaatgctatatggactataatgttaaaagttatttattatttatttccaggttgagaaagctcacagtggagatgttcattgtgttgattggaatccccttgattttaactatatcttaattgagtatgatggtattaag

SEQ ID NO: 132285 - DNA, 330 bp, Zea Mays
atgtggagcttggtgcggcagggcctccgatggggcagggggcggcgacggcggcggacggcgcgggtggtggacgagagcgcgctcggcgcagacggcggcgatatcgacggcggcggtgctgccgcggcgggcggcgccgtggtggcgccgacgctgggcggcgccctggccagggcgctgctggcgctggcgtgcgccgtccgcttggacggcgaggacgtcggcgcggccgaggaggcgtgggccgccaccgggtggcggccgcgcgccgacgaggtcagccacctcatggtgcgcgagagcatgcgctacgccatctacgcgtag

SEQ ID NO: 132286 - DNA, 2147 bp, Zea Mays
cgcgcccggcctctccttcctccccggttccttcccttgccacacgcgtgcgtgcgtgcgcgcgcgcgggcgcacaaataatcacgaggaccccgcgaggccgcgccaccattattccacttgcctgactcctctccctccctctctctctctctatctctcatttcctcacgcacgtctcgcaactgccgcggcacaccgcgccgcttcttctcctcctcctcctcctcctccttccgagccgagagaaaggctgctgccagagggacgaggacgagcgaggatccttccgagcgatggagcagtacgaggtggtggagcagatcggccggggcgcctacggctccgcctacctcgtcctccacaaggccgagcgcaagaggtacgtcatgaagaagatccgcctctccaagcagaacgacaagttccagcggaccgcttaccaggagatgtccctgatggcaagcctcagcaacccgtacatcgtcgagtacaaggacggatgggtggacgaggggacctccgtctgcatcgtcacaagctactgcgaaggaggggacatggccgagaggatcaagaaggcaaggggcatcctattctcagaagagagggtgtgtcggtggttcacgcaattgctcctcgccctcgactacctgcactgcaaccgtgtgctccaccgtgatctcaagtgttccaacattttattgacaagggataacaatatcagactcgctgactttgggctggcaaaactgctcatggaggaccttgcctcatcggttgtaggaaccccaaactatatgtgcccagaaatactagcagacataccttatggatacaaatccgatatatggtcacttggttgctgtatgtttgagattttagcacaccgacctgcatttaaagctacagacatggcagcattagtcaacaaaataaacagatcttcaatatctccaatgcccccaatatactcatcagcactgaagcagatcgtgaagagcatgctaaggaaaaatccagaacataggcctactgctggggagctgctgaggcatccacatctgcaaccatatctttctgaatcgtccaactgttcaccgatctatcttccggtgaaacccaccaaaggtaacctggtagacaagcagtcaaagaagccaagcagtggcagaaagcgagctgtcaaagccaatggatccaatggaacattagaaactgcagcagagcacgctgtggaagcaagagacagctccacaaacttctcagatgtatcaactataggtacccaggaagccttgatattgcaaatgccggtggatcctgatgccggaagcaaagaagagcagaacgttgatgttgtaccgtttcagcatgcggcagagaatctgatggcgacaaccgatagacaggtcgatgcgaccatacgtcttaaagccataagaaccagtaacgcaaaagaggcggccccggtcacagttgcagaccaaaagttcaacgaggcgccaataccaaatgaggaactgacaatcggggtagtgcaggaacaaaggaaggacgtgaagccacgctcttaccaggcaggaaaaccagagatgtgtgacacaaccgtaacggaggaatcgtcgcccatcagcacgctaaagctggcgcacacggagagcgcgcccgcggagtgggaccacctgaacatagtccagcagagggccgacgcgctggagtcgctcctggagctctgcgcgaagctcctggagcaggagaggctcgacgagctcgcgggcgttctccggccgttcggcgagggcgccgtgtcgtctagggagacggcgatctggctgaccaagagcctgatgacccccccacccaagttcggagagtccccgacgaagcttttgtaaaacagtgattcgtttgagagtttttgtttttttttcgagtgccattttcgagagtgtacatagcatcaacagaatttgagttcaagattgctgtgcttacctaggcctgagctttatttatcttggatgtatatggtttgcatggcaccgactgttgtgagcgatgactggttatttaccagccgccttgttttatttattgtgctggaaatcatgccgagtccatttctgtttactgagtactagtag

SEQ ID NO: 132287 - DNA, 969 bp, Zea Mays
ccctccctctctctctctctatctctcatttcctcacgcacgtctcgcaactgccgcggcacaccgcgccgcttcttctcctcctcctcctcctcctccttccgagccgagagaaaggctgctgccagagggacgaggacgagcgaggatccttccgagcgatggagcagtacgaggtggtggagcagatcggccggggcgcctacggctccgcctacctcgtcctccacaaggccgagcgcaagaggtacgtcatgaagaagatccgcctctccaagcagaacgacaagttccagcggaccgcttaccaggagatgtccctgatggcaagcctcagcaacccgtacatcgtcgagtacaaggacggatgggtggacgaggggacctccgtctgcatcgtcacaagctactgcgaaggaggggacatggccgagaggatcaagaaggcaaggggcatcctattctcagaagagagggtgtgtcggtggttcacgcaattgctcctcgccctcgactacctgcactgcaaccgtgtgctccaccgtgatctcaagtgttccaacattttattgacaagggataacaatatcagactcggtaagatgtgaagtgctgaatcactgaactgtctttgtcagacaatgagtatcttgacacgaatgaataataattcaccatttctttgacagctgactttgggctggcaaaactgctcatggaggaccttgcctcatcggtaggaataggatccacacttttcgttggagcatttttaatgtaaatcagtatataataatacaggcaaaaaacacatttccgggttggaattaggaaactggacacaactcttccactagtcatgttttcccacaccgaatcacggcacgatgttatcaccagtatgtctgtatgacatttgatattcagtgacatttttacagctcatgttaaccaaaaaagagtagcatg

SEQ ID NO: 132288 - DNA, 160 bp, Zea Mays
atgtgaaccaaagtaagcatgagcatcaaattaacttaagtactaaaggattcaccaagtatatacttaaaagtatcatgatcaaaacaattgagtcttttaaaaagataagaatgtacaaccctaatgaaaaccctaagtgagccccatgggcaaaatt

SEQ ID NO: 132289 - DNA, 676 bp, Zea Mays
gcacaaccacaaccaaaatctggaacaataagcaaggctaactgtatcaattgaagtgtcaagaattcaagctgttactacaactcgtaactgctctatcttttcggtgaactaaacgccacaaatatctagtacgccttactactacgcagtgaagtcttatacttcacaaacagaaagacgtgaacaacagtggttcgtttctggtgaagccaactgaagtcgtatgcagtaagcataccatggcaagttgtaccaacagatagccatgctctcaagcagagaagctagaaatccctcttttactcctaccacagtgtcctcaagcagagaaccaggaatccccatccctagacataccttgactagcggccaagaacgcagcagacaagagaaatcgttgctgagctcatcgcatggacatcagtatgcgcctttggacaactaccttggaaggctgagcagcctttggatgagtttccttcatatggcgcctcaccatcttttcaatctgctctatcgaacctgacagtttcttcaccagatcagcgggagatggatcatttggcttggatggagccacctgcaaggagcagtccgttgcctcttgcttgccctcagccacagaagtcacacggtttgcaacagctgaagttgagcttggaccagaagcaac

SEQ ID NO: 132290 - DNA, 582 bp, Zea Mays
gactacttgagtgaggttcaaaaacactgaccaactgtttacctctccagttctcatcgttgctcatgttatcacaaaagtacaagagtatcagaaatccagagccttgatgacatgccgtttcctccacgcagcatcttcaatcgtgcatctgcagaatcacaatggtgtttgttcatctccatcgtgcattaaagaattatgtgcagcatgtaaaccttgctttgctggtgcattggacactcactaggttcgaagtgctgccagcaataaccgtctttcaagaactgatgaatacgcagccattcacaaaaatgcacccatagagaagaaatctcttgctatatataaaaaagaatggcaagagatttcctcccccatagatctcttataatcctcgtcaccaaatcagctctaaagagttggatcaccaccactgtacacatcggctctgtttttcttggacatgattcttgtaatcgtcgttttcttggacatgattcttgtaatcgtcgttattcttgattagtagttcagttttcgattttggacgatggcgcgattgggagaagcaagtttatt

SEQ ID NO: 132291 - DNA, 469 bp, Zea Mays
actcataaactaaaatcgggaaccctgtctgattctgaaacatatctttttgcaaaccattgttctggcattgatatttttcaggaacaatcaaacattgtttcaagtccgattctgtcgatagacttcaaccctagttgttcatatcaattggccttccatcttgatgatggctggtctggagtcctgaatgttaacaatctcaatgtgactcatcttcactgccctcctcctgcttggttggagggcacagacttggtgctgcaaaagcaattaagaaagccaacctggctgctgacatcttcaatctatgcagttggatcttcctcatatgatggaatctatctactagactttcatccagataccagctctgcatgccatgtggactacaaagaggaaacaagagtctccggggaaaatcaacctgcaggaaacaagtttgttcctttatcccaaagggtgcttt

SEQ ID NO: 132292 - DNA, 375 bp, Zea Mays
atgaaacaaggtaggccttcagctctgggagaccatctcgtggggcttgtcacaagagagcacagccaaagcgacttcctccgaactccaaaactcggtttagaagaccatctcgtggggcttgtcaccatccctaagggagaaccgagcgccaagataggccttcagctctgggatagcctcaatagccttgatcagagcagcatccacggccttctggtcatcctttttgaaatcaggcagagacttggacgcctccttctctgtctcaaaaagctcaccctccgtcttcttcaccttctgctttttctccctggcaaagtacttgtcatcaaacttcgcgacatcaacaccagagatgtcaaccttggttga

SEQ ID NO: 132293 - DNA, 1567 bp, Zea Mays
atggatgataagcactgctaggctatcctggcctatcaggcctacttggcgcgtctctctctgtctagcggccgagtttaacagttaaaccctagctcaccgtcgtgctcgcctccccgcgcctgctccggtgctcccttcaggcactgacagttcgccgccgcggcggcgctttcgagcccacgcggaagcgcacctagtgccatggcgaagaagcggaagcacaccgacgcccaggcagagacggccggcgcagagaagccagacgactccgcaccggcgcgcccggagcgcacgctcttcggcttcaaggatccggcccccgacgccgtgcctgactccgcggcctccagggccgcggtggcgccgtttaggaacagggagaaggtactcatcacctgctcccgccgcatcacgtacaggtatcgtcatctgatgcaggacgtgttgtcgatgctcccgcacgcgaagaaggacagcaaggtcgagtcgaagcagagcaaggggaacgctctcaacgagatgctcgagctcaggagctgctccagttgtctcttcttcgagtgccgaaaacagaaggatctttacctttggatggtgaagtctcctggaggaccatcagtgaaatttctagttaatgctgttcacaccatggaggagttgaagcttacgggtaaccatctgaaagggtcacggccacttcttacattttctacaaattttgatgagcaacctcattggaagcttgtgaaggaaattataactcatatatttgctactcctaaagatcaccgtaaagcaaaacctttccatgaccatgtatttgtcttctccattgtggatggccatgtttggtttcgaaactaccagatttctgttccccacaatgagattgataaagttgataaaggtggtatggataaaatgacacttattgaggttggccccaggttctgtttgaatccaatcaaaatatttggtggtagttttggtggtcctacatggtatgagaacccatactacatttcccccaatcagatccgtgcactagagaagaggcagaaggcaggcaaatatgccaagaaggtgaaggccaaggtgaggaggaagatgcacgagatggagaacacgctggagcctgatgagtttgctgagctctggaaaggggagtaggctttgatcgaccctgtcaatgtcgtgaagcacccgcaactcctgtcagcaagcgcagattttgtttacctgtgtggcagtgtctatgttgtggaagttttgtatgacaaggcctacgtttattttacataaaatcggattttagtgataacttatgcccatatgacattctctcttgtttgcttctagtggatgtagtgccaagtgttatatcacttatgtgattggtagctgagaatcatggggaagcgcgatcacagttcaaacctcaagatatcaatgtgatagccatagccgtgttccatatgtatactatgtacttcatttcagcaatggttttgtaaggaaaatagatcgagcttcatttaaagtaaagttttagtgtttgatgagc

SEQ ID NO: 132294 - DNA, 1533 bp, Zea Mays
atggatgataagcactgctaggctatcctggcctatcaggcctacttggcgcgtctctctctgtctagcggccgagtttaacagttaaaccctagctcaccgtcgtgctcgcctccccgcgcctgctccggtgctcccttcaggcactgacagttcgccgccgcggcggcgctttcgagcccacgcggaagcgcacctagtgccatggcgaagaagcggaagcacaccgacgcccaggcagagacggccggcgcagagaagccagacgactccgcaccggcgcgcccggagcgcacgctcttcggcttcaaggatccggcccccgacgccgtgcctgactccgcggcctccagggccgcggtggcgccgtttaggaacagggagaaggtactcatcacctgctcccgccgcatcacgtacaggtatcgtcatctgatgcaggacgtgttgtcgatgctcccgcacgcgaagaaggacagcaaggtcgagtcgaagcagagcaaggggaacgctctcaacgagatgctcgagctcaggagctgctccagttgtctcttcttcgagtgccgaaaacagaaggatctttacctttggatggtgaagtctcctggaggaccatcagtgaaatttctagttaatgctgttcacaccatggaggagttgaagcttacgggtaaccatctgaaagggtcacggccacttcttacattttctacaaattttgatgagcaacctcattggaagcttgtgaaggaaattataactcatatatttgctactcctaaagatcaccgtaaagcaaaacctttccatgaccatgtatttgtcttctccattgtggatggccatgtttggtttcgaaactaccagatttctgttccccacaatgagattgataaagttgataaaggtggtatggataaaatgacacttattgaggttggccccaggttctgtttgaatccaatcaaaatatttggtggtagttttggtggtcctacatgatccgtgcactagagaagaggcagaaggcaggcaaatatgccaagaaggtgaaggccaaggtgaggaggaagatgcacgagatggagaacacgctggagcctgatgagtttgctgagctctggaaaggggagtaggctttgatcgaccctgtcaatgtcgtgaagcacccgcaactcctgtcagcaagcgcagattttgtttacctgtgtggcagtgtctatgttgtggaagttttgtatgacaaggcctacgtttattttacataaaatcggattttagtgataacttatgcccatatgacattctctcttgtttgcttctagtggatgtagtgccaagtgttatatcacttatgtgattggtagctgagaatcatggggaagcgcgatcacagttcaaacctcaagatatcaatgtgatagccatagccgtgttccatatgtatactatgtacttcatttcagcaatggttttgtaaggaaaatagatcgagcttcatttaaagtaaagttttagtgtttgatgagc

SEQ ID NO: 132295 - DNA, 546 bp, Zea Mays
atagtgcgcccatccagtccactatgtgctttacccccaaagggattacgtttccacattattattattggaatgccgagacaaaggatgaaatgctggtgcttattttgttgggtatggttctccaaatgtttctgataatgattctgcaccgttctgatgagcaggggcggagggcccgttatggccaagtatggcccgcgccatacctcaactcggcccagtaaaaaagtgaaatctaggtattcagccgcccagcccacgcagcccgcacagcacagccgccgcaacacagccgctgcagcacaagacgtccgctcgcggctcgcccggccggccgaccgcctgtccgtccgcggccgcctgcccacctccgtctctggcttctgcttcctgcgggctgcggtcttgcctggctggtggctgcctctgccttcctgctgtgcgcgcgtgcttgtccggttgacccgttgggcgttggctggccggcggccgcacggccgtgctccacctccactgctccacggctgcttgcctgctttgctt

SEQ ID NO: 132296 - DNA, 457 bp, Zea Mays
cacacagaattcttgtcaaagcccactaacccaggaaaatgaacataatgcatagcatcgaaccctgctgcattcatctatcaaagatgcaccaatttccattgttacatgtcaaattcttctataactttttccccgaaaacacaagagaactgcgcctaattatattaagaaaaagacaggaaaaaaggcttgagaagtccaaatacaaaggtctccttacggaggccaaaaacacaaaaaactgaaataatccatcagacacacacaaccactcaaaggatgttatatctagaaaaggagggcagcaaggtaagaaagccctttagcccctgccacctcccaaaacaatctctccttccctgctaacctaagagataaggccaaacttagagtccatccatcgaatacacatctgtttcgaagcttccaaattgtccaggctcccaaggcaatt

SEQ ID NO: 132297 - DNA, 1265 bp, Zea Mays
cgcgctctggaatccggtgtcttcctcaatacgctcctcccaagtcccaagtcccacacgcgccctcatcctctcagctccctacagaaatatcccagctcgcgccctccctgctctcccctcggtgccgcgcccagcttctcctccccatggccgcggctccctagcgctcgcctatctgctcgcgacgcacgcccagcctctcccactcgagttcctctgcttcttccccctgtgtcacgccctggccatggacatcggtatcgacgagctcaccctgagttacctggcctgaccgacttcctctgctcctgcgtgccccatctcgttgcagctccatggtgctcggactcagctcagcgtgccgtggagctccctgtttagcgcaggttgaatctcccaagaactcgcgtccctctgttcgccggaatggtgccccttctgctcagactgcgtctccctctgctcacgcgctcccctgttcatctcactgcgcatgcagcggtgttcggctccagctcgccggacctccctgcccagctcccagcgtcgagcttacctctgtccatgccgcgcgcccttcctgctcgccgcgtcgcgccccagctctctggcgtgccgagctcgccctacgcgcgctacaagtttccttctccaatcgtcgcgcgccgcgcacgctgcttcctggagctcggccgtgacctcgccgtcgttcatcagctccagcgcacagctgaactcccctgcctcccatggccgagtgtccagctcccttgttccctgatttctgcgcgccgcacgcgcctctccccgagctcgcccaaatcagacagtgtctccctcagctcgatccctgtcgtgaagctttctggctcgccggcgtttcacccgtgcgcgcacgttcctgccgagctcggtcctgtccatcttgccgcgctcggtctctagctccatgtgcgcgccgttgtgagctcgtcagccacccaccgttgccttgtcacagaacccccaacgccgtcatccatggtcgcgacctcgccaaatgcgttcatcgcttggccctatgtcgtttggctcgtcgaccttgttcgctgccgcgcgcgcttgtccctgatgcttctcgcacggtatttagatctcgtcgattggctccgccatccttgtttccctctggtcgcgataaaatcttgtcccaccaggtcatcgggcgctgttcccagctcactatagagtttgctgggctcgccatatatttaaatgtcgtc

SEQ ID NO: 132298 - DNA, 107 bp, Zea Mays
cgaaacgacgtcgttctctatcaccgttgtcgacgctattgctgcagcaagtgaacgacaaaggtgacaaatcctacagaatccttttttacatagttagaaaatga

SEQ ID NO: 132299 - DNA, 456 bp, Zea Mays
atgcaggggagggatgtgggtgagcaccggcttcaggcgcgtgtcgtcggcgagggccagtcgcttgaacatctgttccagggcattcatcctctttgcgtccatctgctttgcggcggcgacgcccgcggaggatcacccttgtccggcaaagccgccacctcggtctccaacgccgcgggagccaccgcgagccatgacataggggcgccaaggagggagaggatgcggcgtgggcaagcgtggggagagcagcagggcgttctcgcggagttgcggccatggcgggtggcggcaagggagagcgcgaggagaggaatttggagtgggaagaagcgcctggaagaatccggttgtgcggagatgcagacttttttaattggtgtggactggaggcagcagacagttgttgcgtggagcgggctcgtgttcactggatccaaatcatacggctga

SEQ ID NO: 132300 - DNA, 1147 bp, Zea Mays
atgaacaccagggtaccgatactcttgattcttatcataccttatgttgtctattttttttcctccccaggacaaccaaaaggtgtatgtgtttcaccgggtggacggttccctgtcttttcatctgaaggcaagcctgctggaagagcacctgagggcaaagagatctagcactgtgtaggatattccgtcagagtacatgttgtgatgtgacacagacatttcctgctcttgtctcggtgagaaaccttgcattgactggtgaaggcagtcaagaatgtattcatttgtgggaattgcttgagtgctccatatgtgatccgagaataggtatcaggcctggacctcctgttgtatgcacaccattttgtgatatggtcttcaaagcttgttcggagtcatacttctctgtagatatgaagacacaggccttgtctccttgtggtttaagtgacatcctttgtggcaaagcacataaatgggtctctaaaatggcacagagttatgccgtcttgctggtttctctgttcaagtttctgagtcgagctctgctggagttgatgacactttctgctatggtgggaaagcaagtttggattccatctctgattcatggacttcttcaaaagatcgtccaacattaagtggtgtggcttcgtgggacgctcaagattttcagagatgggcaagggaaatgccggtcagtgaaagagttttgtgggcaattggaggaatggttctcacaggcacagctggccttatttttatcagcaaaagaaagagctacggccatcgccagaagcaagctggtattgtttgcaatatgagattgagaaggctggattctagagtcaactcacaacaaacaaaggggatctagggaggcataggcaacttagtgtaactcatagaggattcttggacttgtgcttctacttttgtgatcagtatataatcaatcaactgtgaacaatagattgtagcctgtgctcttctcagtgcttagatacaccagctacgacctccttgtcaccattctgtagaagagtctgtaagttgtcactgagtattcctgaaatgcagaactttacttacgagctgtgatgaactcatgtacgtattgtttggaaatgacatgttttgcagc

SEQ ID NO: 132301 - DNA, 104 bp, Zea Mays
cgagaacgagggggagtccatcttccgcaggttccggcgggaggtgatgcgcgccgacgtgctgcaggagatcaagcgtcgccggaggtacgagagcaagacgg

SEQ ID NO: 132302 - DNA, 2542 bp, Zea Mays
cacagtcaccgttgcgtgggacccaggcgtcagcccgccttctccgccagggccgttgcaatggcgcccggctcgggcgtaaccacccgccgatgctggatctcgccgaggatccggcgccgcggacttcttccccctcgcatctctgtgctataagaccgccttcaccagccgccgaactaccacttctctgccttcgtgaaccaccgcgagagagagagtcgagatccgtcgctgccgtgcgaaccttgggctcaatcgattgggtcagtggggttcggcaacgctcgagagaaccggccgttgtatcaacgggcgaagtggtgatcggagcgcgtggcgatttcatgccggagtcggagctccgccgcggattccgctgcgccccgcgggcagactacttcgcagctgtcgctggccgcgaccacgtcgtcatcttccctttcatggcgaagggccacatgctcccgctgctccacttcgccacggcactctcggcgcaacacggcaggctccgcgtgaccctggtcaccaccccgggcaacgtggccttcgcccggagccgtctgcccgcgtcggtgggcctcgtcgcgctcccgttcccgtcgttcccgccgctgccggagggcgtcgagtccaccgacgccctcccgtgcccgtcgctgcacctgacgttcatgcaggcgacggggctcctgcgcgggccgttcgccgagttcctggcgtcgctcccgtccccgccgctcgcgctcgtctccgacttcttcctcgggttcacgcgccgcgtggcggccgacgccggcgtccgccgcatcgtgttcaacggcatgtcctgcttcgcctcggcgatctgcaaggcgctcgctgcgagcccgccgaccagcttcgagcccgggaccatgatccaggtgcccggcatgccggagcacgtggcggtcagggcggaggaggttcccgatggggtcaccaagagggccgaccccgacaacccgttcacgcgcttcttcatggacgagatcggtgattcggacgtgcgcagctggggagtcctcagcaacagcctcgacgcgctcgacgcggcctacgtgtcggccttggagtcattctacgagacgggcgcccgtgcctggctcgtgggcccgctgttcatggccgccggcgacatgccggacggcgagaagaaggagcaagaccccgagggctgtctctcgtggctcgacgagagggcggcgcatccggggtcggtggtgtacatctcgttcgggacgcaggcccacatcacggacgtgcagctggacgagctggtgcacgggctggtgcagtccggccatcccttcctctgggccgtccgatctgacacgtggtcgccgccggtggacgtggggcccaacaaccggatcgtccgtggatgggttccgcagagaagtattctggcccataaggcagttggtgggttcgtgagccattgcgggtggaactctgtgatggagagcctcgccgccgggaagcccatgctggcgtggccgatgatcgcggagcagcacctgaacgcaaggcacgtggccaacatcttaggcgccggcgtcaggatagccctgaaggttggcgctgacgtcgtcgggagcgcggaggtggaggagaaggttcgggagctgatggacgctgaaagcaaggcggcgaagcggatgcgggagagggctgtgtgggcgcagcaagcagccaagtcagcggtgagccacggtggaacctcggccatggctttgctcaagcttgtggaagagctacaggagacctatgatgatggggtcgtaggcaaatgtgcgaatagtgtttagaatgatctttccagtaattctgttaagctggtgtttagaatgatcttgcctacttctgttaggcctagctacgtatgtgtcattagcgtctatggtgtcttctcaaaacacaaatcaatcgactcttagcaggtgttttgataattgatcataaataaaaatcaacaacataaaatcaggattcctgaattgacatatatgtctgctccaaatgttacaatcttaccagtgttgacaagttttttttccttctgtgaggatcaatgtttacagattctgacaggtccatcggtgttgaagccaggtcacataaagaaccacgacctttgggcccttgaattgagttcaagcatgagggaggattgtgagtgtttgattttaatgttgttggattcctggatacaaattgtgtggtatacaaagattggactacctgaatggacaatagaatttgaagtgtagccaactttattttgattgtccctatataaaacattgttgggagccttcttctccgccgaaggttctcaaggcaaaaacaccttcggcaagataatacgaaggctcgccgaaactatcatcaacctcggctttgtttctcaagacgaagactttgtgtacaagcaatgttgcagaatgtcgaagctcaatagcttcggctcggaccaagcaaagaaataaaagactaaatagaccttattagcttt

SEQ ID NO: 132303 - DNA, 2100 bp, Zea Mays
cacagtcaccgttgcgtgggacccaggcgtcagcccgccttctccgccagggccgttgcaatggcgcccggctcgggcgtaaccacccgccgatgctggatctcgccgaggatccggcgccgcggacttcttccccctcgcatctctgtgctataagaccgccttcaccagccgccgaactaccacttctctgccttcgtgaaccaccgcgagagagagagtcgagatccgtcgctgccgtgcgaaccttgggctcaatcgattgggtcagtggggttcggcaacgctcgagagaaccggccgttgtatcaacgggcgaagtggtgatcggagcgcgtggcgatttcatgccggagtcggagctccgccgcggattccgctgcgccccgcgggcagactacttcgcagctgtcgctggtgagaaaaccctttccaactgtttgtcgcattctcccctacgtgcagttcgttcgtatcggggatttgaacgttcctgtgtcaaggtcaggccgcgaccacgtcgtcatcttccctttcatggcgaagggccacatgctcccgctgctccacttcgccacggcactctcggcgcaacacggcaggctccgcgtgaccctggtcaccaccccgggcaacgtggccttcgcccggagccgtctgcccgcgtcggtgggcctcgtcgcgctcccgttcccgtcgttcccgccgctgccggagggcgtcgagtccaccgacgccctcccgtgcccgtcgctgcacctgacgttcatgcaggcgacggggctcctgcgcgggccgttcgccgagttcctggcgtcgctcccgtccccgccgctcgcgctcgtctccgacttcttcctcgggttcacgcgccgcgtggcggccgacgccggcgtccgccgcatcgtgttcaacggcatgtcctgcttcgcctcggcgatctgcaaggcgctcgctgcgagcccgccgaccagcttcgagcccgggaccatgatccaggtgcccggcatgccggagcacgtggcggtcagggcggaggaggttcccgatggggtcaccaagagggccgaccccgacaacccgttcacgcgcttcttcatggacgagatcggtgattcggacgtgcgcagctggggagtcctcagcaacagcctcgacgcgctcgacgcggcctacgtgtcggccttggagtcattctacgagacgggcgcccgtgcctggctcgtgggcccgctgttcatggccgccggcgacatgccggacggcgagaagaaggagcaagaccccgagggctgtctctcgtggctcgacgagagggcggcgcatccggggtcggtggtgtacatctcgttcgggacgcaggcccacatcacggacgtgcagctggacgagctggtgcacgggctggtgcagtccggccatcccttcctctgggccgtccgatctgacacgtggtcgccgccggtggacgtggggcccaacaaccggatcgtccgtggatgggttccgcagagaagtattctggcccataaggcagttggtgggttcgtgagccattgcgggtggaactctgtgatggagagcctcgccgccgggaagcccatgctggcgtggccgatgatcgcggagcagcacctgaacgcaaggcacgtggccaacatcttaggcgccggcgtcaggatagccctgaaggttggcgctgacgtcgtcgggagcgcggaggtggaggagaaggttcgggagctgatggacgctgaaagcaaggcggcgaagcggatgcgggagagggctgtgtgggcgcagcaagcagccaagtcagcggtgagccacggtggaacctcggccatggctttgctcaagcttgtggaagagctacaggagacctatgatgatggggtcgtaggcaaatgtgcgaatagtgtttagaatgatctttccagtaattctgttaagctggtgtttagaatgatcttgcctacttctgttaggcctagctacgtatgtgtcattagcgtctatggtgtcttctcaaaacacaaatcaatcgactcttagcaggtgttttgataattgatcataaataaaaatcaacaacataaa

SEQ ID NO: 132304 - DNA, 968 bp, Zea Mays
aaaagaataagaagaaaaacaggcgcaatatagcatcctgcatccaatccacagtagccgcggctactagctagctagtctgctccacgctgcagggcttttagcttaatggccgggctaagcgttctcctggagaaccacagcaagagctacaccgggaaggcggcggcggcgcagatcatcagcaaggccaccctcgtgacgacgacccacggccccaaccaccaccagcagcagcggaagatccctgtctctgcggcggctgcgggctccttcctgcagcgctgctgcctgtgccacaaagagcttgccgagggcatggacatctacatgtacaaaggcgaccgggcgttctgcagcgaggagtgccggtgccggcagatcttcatggacgaggacgccaccaccgtgcgcggcaggcggccagtcaagacaagacaaggatgggaacgtgaatgggagacgtagcttaggtggtgcaccagatgaccagatcttcttcatggaaacatggatggggagacggagacaagacaaggatgaagatgatgaacacagtgtggaagtgtctgccagctcatcccccgtggggtccgtcgcatgcgcagcacactagtagtacgtgcgtggcatcttgctggacccactggataagatggccgcacgacttggagccgctctttgggccccacctcatgaattggatcaggatccgaccgagtaattagcgggccgcatcttcgcttcttttccttttttttgtcacgtcaaatctgttgagaactacgtcaccacggatcaccagatccgctcccttccctcccgtcagcagtagaggcgcaagaagctgtagagtactcgtctcccttcccattagcacgacagaggaaacacaatagacacgatgtagggttgggcctctggcctctttctcttctctgtattatgagggggtgtacaggttcctt

SEQ ID NO: 132305 - DNA, 2891 bp, Zea Mays
catcatcgcggactggcccggggccgtcgccatcgcgcccacgcacgccccttcctccttcccctccgcccaactatgttccccaaaccgcacgcgcgcgctcgactccccgccgctgtcgtcgtcgtgttcgcggaggagatccaccggggtcgtcgtcaatctccctcctcccttgctcccgcagcctacccctccacgcgtgccctcgctaaaccctagcttgggcactcccccctgccccggcggcgccaccaccgcgccgcaccgaccgcgtgcgctgacacgttggaatgcattgtttgaagtgtgatcattgaggttctggttaaataagcttctagaatcgagtgactcccctcccataaatggataagatacaatctgattgcccttatccgggatgtttcttttgtgttatgaaagaggcgaaccctagtaaacgaagagcaagtgtgctaaagttttttagggaacttccttcccaagatgacgatggtcaagttctccctgtcagcggtctctggaacacagcgatggctcacccaaatgatcccgagttcatcaacttgggcatatttgaatgcatggcagctcttatatggaaagggttgaaaaataggcgttggcttgcacatgatcagaatatttacgtcccatattatgcagctcacataattggatcgtacacgatgaatatggaggaatttgcagagtgtgctgttcgtgctggtgtaatacctccattagtcgaactgttaagaggtaggttgacatgggtcgagcaaagagttgctgttagagctttggggcatttggctacgtatcctagtacattccctgcagttgccgataatggggaagtacttgaacttgccactcaacttgcttcaagctcccttgagattgtgtacactcacttttaccagtttgtggatcgaagacttgactaccattgtggccttcttactcgtggcatgggtggtgtggaaatggaatcccgcaaagctgaggaatgggcaagtcaactacagtgctggtcattgcaactcattaactgctttgcatttaagcctgaattcctccatgatatttgcaagcctgattttctagtcaagttacctggaatgtggggtggacttgtgaatgagaactcgcctgctggtgttggtttgctaagaacaatctgccagagcaaagttggccgaggtgatgctgccaacattcctggtactattgatgctttatgtaacattgctcgctcttcagatgattggcaatacatggcagttgattgtctgatctggttagtgcaggatgcaagtacttgtcataaggttatagacaaagttgcgccaacactgatagatttagcagatatttcgacactgggtgattataaaaagcttggtgacatgattgtcacagtcctccaagaatgtatgcaacaaagcgggaactcacgtggcgcaatcagtgatcagaccaaagcagaaatcgatgagctcttgagatccaagcaaagtttgaaattggaaaagagtatgccaaaggaggatcttcatataaaacaagctgcagcactggttgtcaagttggaaggcaactcactgttctcttcagggaacattgcaggagctgcagagaaatactccgaagcactggcactatgtccaatgaaatctaagaaagagcgggtggttctttacagcaaccgagctcagtgctaccttctcctgcagcagccatcggctgccataagcgatgctactcgagcgctgtgccttcatagccccgtgaatcgtcacgccaagagcctgtggagaagagctcaggcgtacgatatgctcggctttgcgaaggagagcttgctggatacgatccttttcataaacgagtgttcgcagtcgaacgatcctgacctatccctgaagcagaacaaagtccctgattatgccgagcggctggtgaagaagcagatgcgcgccgcttggctgttcagggaagcagccctgaagcacgggggcgtccgtcgcgcgggggatgctagcgacgctgcgtttggccaggaggccgacgactccgagtgggagacagctagcgaaagcgacggcgagaacggtgccgccacggggggagaagcagacggtgagactggatggaagaatggtggccgccaggaagatttctgtgagaaaagctgagcaacagccaaatgtgtattcagagtctcaaactgagctgctacagaagcagatgctgggccttctgcggtcggcacactatgaagcatcaaatctttctaacgaaacgatctggtgacgtttttattgtcctcatcaaagcaaggggggcagaggcccaattaaattagttatccacgtcttctcgctgggtcagttgagctgtgcctgtgaccattcaatatttcctctttgatgctggtcctcctctggtgtttgtaacatatttttggtcagtttgtcaagtccctgaaagaacagaactgtgtgcattgcttgttttgttttattgttttctgaagtttggtgaagaggccgtaatcctggcgctctcccctttccatttgacttgtctggaacgtgaaggccacgtttcctttcttcagggtgtcgtacctggttttcttggtgtactaatgtcaagtaggggtaggggctgtcttaggctcttacgatgaaacagtgtgctccggccctctggataacagcgccacgtcgaaacagtaaggtagcggaccaaacgctccttcgctttcacctttttcagcgcagcagccagcgggctggaggccactggccaccgcaccagcttctgctgcggcatcccccgaccattctgcgccccacccaattccgtagccccgcctg

SEQ ID NO: 132306 - DNA, 1734 bp, Zea Mays
catcatcgcggactggcccggggccgtcgccatcgcgcccacgcacgccccttcctccttcccctccgcccaactatgttccccaaaccgcacgcgcgcgctcgactccccgccgctgtcgtcgtcgtgttcgcggaggagatccaccggggtcgtcgtcaatctccctcctcccttgctcccgcagcctacccctccacgcgtgccctcgctaaaccctagcttgggcactcccccctgccccggcggcgccaccaccgcgccgcaccgaccgcgtgcgctgacacgttggaatgcattggttatagacaaagttgcgccaacactgatagatttagcagatatttcgacactgggtgattataaaaagcttggtgacatgattgtcacagtcctccaagaatgtatgcaacaaagcgggaactcacgtggcgcaatcagtgatcagaccaaagcagaaatcgatgagctcttgagatccaagcaaagtttgaaattggaaaagagtatgccaaaggaggatcttcatataaaacaagctgcagcactggttgtcaagttggaaggcaactcactgttctcttcagggaacattgcaggagctgcagagaaatactccgaagcactggcactatgtccaatgaaatctaagaaagagcgggtggttctttacagcaaccgagctcagtgctaccttctcctgcagcagccatcggctgccataagcgatgctactcgagcgctgtgccttcatagccccgtgaatcgtcacgccaagagcctgtggagaagagctcaggcgtacgatatgctcggctttgcgaaggagagcttgctggatacgatccttttcataaacgagtgttcgcagtcgaacgatcctgacctatccctgaagcagaacaaagtccctgattatgccgagcggctggtgaagaagcagatgcgcgccgcttggctgttcagggaagcagccctgaagcacgggggcgtccgtcgcgcgggggatgctagcgacgctgcgtttggccaggaggccgacgactccgagtgggagacagctagcgaaagcgacggcgagaacggtgccgccacggggggagaagcagacggtgagactggatggaagaatggtggccgccaggaagatttctgtgagaaaagctgagcaacaggtccggactgtttacgtgctattacgcgaatacctttgcgacaagaaacgctagtcctcttcgaaaagatagtttcagccactgacagttccttttctctttgcaagatcctttgctgtttatgtttcatatttttgcatgtaacatcccttagcaatctgtttttttttgtttcttcctgtgcagccaaatgtgtattcagagtctcaaactgagctgctacagaagcagatgctgggccttctgcggtcggcacactatgaagcatcaaatctttctaacgaaacgatctggtgacgtttttattgtcctcatcaaagcaaggggggcagaggcccaattaaattagttatccacgtcttctcgctgggtcagttgagctgtgcctgtgaccattcaatatttcctctttgatgctggtcctcctctggtgtttgtaacatatttttggtcagtttgtcaagtccctgaaagaacagaactgtgtgcattgcttgttttgttttattgttttctgaagtttggtgaagaggccgtaatcctggcgctctcccctttc

SEQ ID NO: 132307 - DNA, 239 bp, Zea Mays
acaaatctctgttttgttaggcttaatcctgcaaggacctagaacaacctttaaatcctgcagataagaaagaacaaaaatgttaaatcaatgctccaagataaacacaaatttgagagaggaaatcgctagggaattgccatagacgagttcagtgatgctccagcatgaattcccccaaggaaaatttcttcaatcacactcaaatcctacgaacagaaattcccccaaagtttacc

SEQ ID NO: 132308 - DNA, 699 bp, Zea Mays
gacaaaatagcaaatttctcggcttccgccacacccgctccaggtcccctcccccaaactgaaacgaagttgcggcggtcgcgactgagtgcagagatgctgcagttcccggcgctgatgcggcagtggccatcgccggcgctgatcccggcgtccacgctgctccccgtgccggccacctcccaggaggacgagcttctcctctccatggccgagtccgacctcgaggataagctgaacgagatccggaagaccaacagccacctggttatcatcgggaagcccacgggcgacaccaaggaggagtacgacgctgaggtggaggacgacgatgcagacaacgtcgaggagtctgacggcgacgacttcgaccaggagaccggttgacccaggtggctcccccgtgcttcgtcggcgtccttgagcgtcgtcatccccgctgtccagtctgtatttcgcaatccctgagttgctccttctatctagatacgctgttaccctattttgctgctgtctgttctcaggatctgagcatgtccttgtcgtgtggaccttgtgtatgaaacaagtacatgattaatcggtccaatttaaatgctatattagtttcctctatttgtgccagatactgctacttcttaccattttgttgtttgtgtcatgaccaacaaatccttgtcaagattcttacactgttct

SEQ ID NO: 132309 - DNA, 825 bp, Zea Mays
tcagaactgttgctgcaggaactcgtcctcatcgtccaccttctcctgcccgacaaccttcaccgtcacgtccgacacccaggtgctcagcgacgacacgctccgcgtcagccactccctgggcgtggacgccctggggctctccgccacggcggccgcgttcgcacgccgccgctcctcttcggcaacggcctcggcccaccgcctcgccatgtactcattcaccgcgacgacgccgtcggcgaccacctcggggggtggcacagcgagcgggttctggtccaggcggagtctctccagcttggcaagccggccgaaacagtccggcagcgcacggatctggttgttgctcaggtccagctcgcgcaggccagctaggtcgccgaacgatggcggcaggtcccgcatgtcgctgaagttgctgctcaggtccagcgtctccagcgcggacagctgtccgatggcggccggtaggccgtggagctcgttgaagtgtgcgtccaggaggcgcagcgatcgcatctcgcagaccgacgacggtagggagcgcagcttgttgaggtgcacgcgcagtatctgcaggtccaccagctcgtgcccgatgcctgtcgggaggtaagccagggcgttgtagctcgcgtccagctccaccagcgatctgaagctccgaatggtgtcgggcagaaccctcagcctgttgccggagacgtcgaggatcttgaggttggagagaaggccaatggagtctggaagagaaaccaagtcgttggaagcgaggcggagttcttctaggtgttcgagcccaccaatcgcgtcgggaatcac

SEQ ID NO: 132310 - DNA, 3582 bp, Zea Mays
tttctattccacgaccttatccacaccagcagattcgaaattcacggacaggcccatggacccggcgaaagccagcggtggttcagcccctgacgtgcgggtcccactctccagccgcaccgcctagagaggcagaggcatcccttcgcgtggaagcaaacgaggcgtgataaagtggggctcctcggtcccggcgttggccgcatcgacactcgccgcgcaccaccaccaccgctgcggctcacggctacgcagcccgctctcccgacccccccgtgccctcctctttttgctactagcacatagagtttcgcccgaatcgatcgccgactgactccgctagggttcggcccgatcgccgcttcgtcctcccggctcccgcggggaccccgccgagatgtctgactggagctcgccggctgcgccgacgttcttcccttttggcccgcaggccgaggggtgggacgtcaccttcaaggtcaaatatggtgatacacttaaaaggttttatggttgtgccaatgggagtcattttgacatgaatttatctgctctacgggcgaggattgatactgcctttaagtttggtcctgacgttgactttgttctgacttacaccgatgaggatggtgatattgtcatgctagatgatgatgatgacttgcgtgatgcagctctccgtcagagattaaaccctctcaggattactgttcaactgaagaaaaatcaaccaactgaaaaaaaagatacttctgcaccagtgaaatccgctgctcaggatccactatcccagttaatgtcagctattgaaggtttgaagcctgttcaggaagatagtctggcccatataaaatcagctattggtgaagcaatcaagtctatcccagagccaatacctgatgcccttgcaaaactttctcatgaaatacttgatgcagcaccaccaccattagctgagctgatgaaaccttttgcacaattgatggcaccaaacaataatggcaatgggccatctgatgtgcatgctgaggggtcatctagctcttccagtgcacaggtgccagctgaagctaaaaatgagcccaaagttaggccaagtttgggtcttaagaccgtgttgaaagaggctgctggacctgttcctaatgctggagcttctcaggttcaacagccattaatgtatccatctgttgaggagatgctgttcccctgtaattcagtcgacaaatctgtttgcaaagggaagattgatgctcaaagtaagggaaaatctgttacgtcctcaggcatccaacctgctcctcattctcttcgtactcatgccccacctccaccacatccgtgcatttcagaatggtcccgagcacaaagaagccaacaccgtcaattgaaatttgaagacaatgcaaaagccactaatgattctagatggcgcattccgatgtataaaatgccctatgcaccaccacctccagcagtgccacccccaggctatgtaccttctccacattttccttatccaggccgcctcttatcttctgggcatccatacggagatctcgctggtaacatggaaaactcagcaccacatagtctgcatagatggattcagtgtgatggctgtggagcgcaaccaattgttggtccacgttataaatctaatgtgaaggaagactatgatttatgtgattcctgtttccagcgcatgggaaatgaaatggagtacaccaaaatagacaagcctattttaccccacaggtttctaagagatccccatgtgtaccggaaggtgcaccatccacgggttctaatgaagtcaagacgggagaaacttgaaagtcgcttcattttggatgtgactgttcttgatggaacactgatgacaccttctaccccgttcactaagatttggcgcatgcataacaatgggtctgttgtgtggccacggggcacacagcttgtctgggttggtggagatcagtttgcattgcagacatctgttccattagagattcctgtggatggttttcctgtggacaaagagattgatgttcctgttgattttgtggcacctacaaggccagggaggtacatatcttactggaggttggcttccccttctggtcagaaatttggtcagcgagtttgggttcatatccaggtggaagacccttcttttgttaatgacaataacaggaatgctgctattaacctgaatctgcctccagagagctatagttcaaacacaaccaacttaattgatgtgaacattgagcctgctgactcagcccttagtgcacatgctaagcgcacaaaggagttccatttctgttcaactgattttcctgaacccagtaagtctgtgccttttacgttggccactacctctttgtctgcagcagctcctacaaaccaaactggtgatgttcccatgtccagtacacctgctgctgcttgtttgccctctgttaatgtgcctatgcatgaagtcgttactactcatacaccgtcacctattacgcctgtcttgcctacaactatacacttttcagccccagtatctgctcctgcaattgcccctgagcttgcatcaggggctgttggtgtgcctccacctgttagtgctgtggtacctgagctgtcagaactggatgttcacaatgaggagaagttgctgagggagctggaggaaatgggttttaggcaggtcgatctcaacaaggaaatcctcaggcagaacaattacaatctggagcagtctgtcgatgacctatgtggcgtcaatgaatgggatcctctccttgcagagctggaagagatgggatttgatgacacagagatgaacaaggagctgcttgcgaagaatgagggaagcatcaagcgagctgtgatggagctcattgccagggagaagaaggacaagtgaagatcgtgtgctatctaagtatatattcgtaaataatgagacggctgtgccactgcggtgcagccctggtgcgtctcagagcttgcttatggtgaactcttcgtgttaggtttcttccttatatctgtcgtgtctgcggtgtcgatgaactatctagtatgtggagcgtgtgcgtctcagcagttaccctgccatgccacgtggactggctgtcgtgcctactgtctgttaccatgtatatatataaaaaatgatgcgtggaccaatgtttgatgctggcgctcttgccctcgtgataatgtattagcggttggcttgttgcttgcttgtcagccccaggtaaatcttgctgcttgctttgcttgcagaagcgagcgtctgcacgtacgtaatcaggataactgtatgcagcgatttggtgatatgcactgccagtggagtttgcttcacaaagaatggaatggaacctggcgaccctacgtggagtttgcgcaccgatgtaaggagctggaggccggctccgaggactattgcttccacttcctatatgtggcacgctgaagggcaatgccgtgttttagttgaaattttggccagtccacgagcaatgtggtgtttctactctctgtatctctactaatattaccaaaatcaaa

SEQ ID NO: 132311 - DNA, 1891 bp, Zea Mays
aggtaggaggagcagctagattgttagatgaagcacgcaagtggcagctgtatatattgatgaaccactacaccctcgccaccagtcaaacaacgccaagcgcgcctcccgtgaacccagcggcccgtcaagtcaaagcatggacgtgccgctcccgctgctgctcggctccgtggccgtttccctcgtcgtgtggtgccttctgctccgccgcggcggggccgggaaggggaagcggccgctgccgcccggtccccggggctggccggtgctgggcaacctgccgcaggtcggcgccaagccgcaccacaccatgtgtgctatggcgcgggagtacggcccgctgttccggctccggttcggcagcgccgaggtggtggtggccgcgtcggcgcgggtggcggcccagttcctgcgcgcccacgacgccaacttcagcaaccgcccgcccaactccggggccgagcacgtggcgtacaactaccaggacctggtgttcgccccgtacggctcccggtggcgcgcgctacggaagctgtgcgcgctccacctcttctccgccaaggccctggacgacctgcgcggcgtcagagagggcgaggtagcgctcatggtgagggagctcgcccggcagggagagcgaggacgggccgccgtggcgctgggccaggtggccaacgtctgcgcgaccaacacgctggcccgggcgaccgtgggccggcgcgtgttcgccgtcgacggaggggagggcgccagggagttcaaggagatggtggtggagctgatgcagctcgccggggtcttcaacgtcggggacttcgtgccggcgctcgcgtggctcgacccgcagggcgtggtcggcaggatgaagcggctgcaccgcaggtacgacgacatgatgaacgggatcatcagggagaggaaggccgccgaggaaggcaaggacctgctcagcgtgctgctggccaggatgcgggagcagcagccgctagcggagggcgacgacactaggttcaacgagactgacatcaaggcacttctcctgaacctcttcacggctgggacggacacgacatccagcacggtggagtgggcgctggccgagctgatccggcatccggacgtgctcaggaaggcccagcaggagctcgacgccgtcgtcggccgcgaccgcctcgtctccgagtcggacctcccgcgcctcacgtacctcacggcggtgatcaaggagacgttccgtctgcacccgtccacgccgctgtcgctgccccgcgtcgccgccgaggagtgcgaggtggacgggttccgcatccccgccggcaccacgctgctggtgaacgtgtgggcgatcgcccgagacccggaggcgtggcccgagcctctcgagttccggcccgcccgcttcctcccgggcggctcgcacgcgggagtcgatgtcaaagggagcgacttcgagctcatcccgttcggcgccggccggagaatctgcgcgggcctcagctggggtctgcggatggtcacgctcatgacggccacgctggtgcacgccctggactgggacctcgccgacggcatgaccgcggacaagctggacatggaggaggcctacgggctcaccctgcagcgcgccgtgccgttaatggtccgcccagcacccagactgctgccgtctgcttacgcagagtagaaatcgatgctcgccggccatccatgccgtccgtatgcatggatgcatggtcaaataaataagcgttgtacgtgggtatcagtgtcacaaactcacaatgtgtatcatgtattgcttcgtcagtggcgtgtgtaagcgtccgatttttttttgtattttattctttttccagaaaaaaatcgccgttgaaatcgcataacaaaa

SEQ ID NO: 132312 - DNA, 826 bp, Zea Mays
aaacatctaagagcaaccgagaatgaaaccgagagcaccgtcgtcgaagaaagcagagagtggaggaaggaagagagtccatcgcgagagggaactctggttcatcgtcgtcgcgtccgcggggttggtccggggagcttcaccgaagtgtctgcgactcaggcgtggcggtgttaggctcggggagtccttggagcgtgacaaattgctcactggaaccacgaagccgtcgcacgacgtggagagctccattgccgccataattactagtaagtatgcatccattgagttcgttgtagctcacatgagttagcgcccagggagagtccaggggggcggttcgctattcgccggtgaatggtgccgccgtcggccgagagcgccgccgcgttgtgatgaccggagagagaggcagagatggtggggtgctcatggaccaccgatccgaaattgtgtggtcctaattagaactgaagaaagcagtctagtgcattaaatctgggcaacacgtgttagatcgaatggtgctagtgtagcgctcgtctcaagccgtggatctcggatctgagggccacagttatatacccattcaatatattttgaatctaatcttatccatcaaagttagattgtgtggctcaggttacttcgtaccccttcagccgagcacttttgcataagagtcctcagattttgcaggaatcaacccgcagtccatatagttcaaagatgtgcacagataagtccttaaatttaaggtttagaccttacagttttaaggaataggacccggagtcccttttaaggaaaaataaataaaagaaaa

SEQ ID NO: 132313 - DNA, 2290 bp, Zea Mays
gcctgtgcaatttctatcttttattgtgcccgttgagattacaactacatgcaaggtacaatttgccttgaaagcgtaacaaagagagagagagagagagagagagagagagagagagagagaggaggaactcgtagaagagacagacaaatcaccctcaggaaaacgagagagagagaaacaggagatcacaggagctaacactgtctgctactagtggctaacgccgcttctgcccagcggccacagcttgctgagcatccgcctcggcttcccggcggggatggcgcagaacgccctgaaccgcagcgacgcgctgcgcggtagcccggccttgcgcgcgaactcgtcggcgtcacggtcctcgtcctcgtcctccgccagcttcatccgcagcgtggcgatcttggacgccgcgcgacggaggccctccacgctccagtcgtcgccgggggacgcgccggcggccagcgcccggagccgctgctcgtcgacgcggtccgcctcgtcgtcctcggacgacccggacttggacagcagcgcccggatgttgctcggcaggtccgccgccgcggccacggcgtgcccgcccgacgccagcgccgcggcgcgcgcgtgctcgaagaacagcacctgcaccaccacgcgcagcgggaggagctcgttctgcgccgcgtgcgcgcacgccttctccgacagcttccggcagttgagcacccggcacagccgctttctcgcgcttttgctcatctccggatgcgcctgaaatagttaaccaaaagacagattaatacagtaataaagatcacggcagtgtgtaatcacagaagattgtcacataatccaaagtggaccttttattttatgaccatatgctagatggaaacgcagaaaagaatgagataccttgaggtatgtgtcgacgactttgtacatgccatcgtgctccggccgggcgctgtctggcacggcctcggcaatggcgagcagcttgtccatcggcatgttggggtcctttgcgacctcaatcaagaacccgtccaccaacttgcccacctgcaccagaccgccctgcgacacgggtgcggccgacaaggagcgtcgcgtgccgtcgaagctcacgctctccgccgaacgggaccgccggtggccgcccgagtgcgccgggctgtcgtcgaggctcccggacagagccagcgccggcgccggcgggagcgcggcgcaccgcagcgcgaactcgtcgaggatggccgacacggcgcccacatcgtacagcgtgtcgctgacgcaggacagcgacgggatgagcaggtcggagacgctggcctcctccagctgccacgccaccctcctcaccagctccgccctggacgccttggacgcgcccaggatgttggcggccttgagcagcttgagcaggaagccgcaggagacggcgtccctctccgcggggagcaggctgacgatcttctcgagcaggaggcggtgcctcgtggcgacctgcttcacgtccgcggcgtcgcggtcgagcggctggtccttggcgacgttgggcagccaccggcgcgcgtacgccttgagcgcgtcgccgacggtcttctcgtggacggcgccggtggccttgacggcgaccatgatccgccagaagaggtcgaccccgagctcggcgacgtcgtgcgcccaccacggcgacgccgacgtggacgtcggggcggtgtccgggctggcgacgagggcggccacggcgtcgacgcagcgggacgtgaggcccaggtcctcgcagagcggggcgtggtggcgcgtggagtggagcacgcccagcgcgtccttccagcggcgcaggaggcaggaggcgaggaacgcgtcgagcttggccgcgaggttgcccctgtcggcggcctccgacatgccgaggtgcgccgccgcgcaccgcagcgggaccaggttgcgcgcgctcaccgtgatggtgatgccgtagcagtacttggcgcaggcctcgaacgcctcggcgccgcccgggaaccccgggagctcgacgacgacgtcgccggcgtcggcgcacagcgcttgcaggagcatgcatttcgagagcagggggaactgcggcgtccaggcaaggcatgcacaggacggacaatggcaagaaacagaaagagtctttaatctcaagatcggccgggggggacttctccatttcctagggggccgttcgtttctattggaataaacccggtttcgttccaactcatcaaaatttatataaattagagaagtaatccggctaggaatt

SEQ ID NO: 132314 - DNA, 294 bp, Zea Mays
atataacaagttcacaaggatcacaaatttataatataaaaagtttacaaagatcacaagttcacaatataacaagttcacagtataacaagttcataaagatcacaagttcacagactcaaaattcacaattcacaatatccactcgatctagctgacatggcatggttgcttatgaaatatttttttcctcacataaagagtttttcacaacctcatgggaaaaccctaaaacctagtgtgtgaaaaagaccaaatcgttaatctcaactgccttccaacaccatctatccc

SEQ ID NO: 132315 - DNA, 2064 bp, Zea Mays
ccgagacaaacagtcgagctcgggaccctgagaaacaaccagggagggcactagggcagggacaggacgaccagacaggctccgcgtttcccggcccgcgaacgcgagcgcgagttcatcgccttcccggttcccgccgcgccgcgggctttcccgccttccccgagccctcctcccccgcacacccacgaccagtgtgtgggtggagactagtgggagtgggaggcgttataatcggtcggcgcaaggacgtgggggagaaggggggctaatccggccgtgcacgcaaccggaccgggcgcggtagccagtgcgtaggcgccgttccgccgctgccgcctcgcccggcgttcctcgccgccagcacagggcgtggccggagtccgcgcgccaccatggcaaggtcatggctgataacttgtaggggaattgctaagaaaataaggtacacaaatcctggcgctaatcaccatataagtgaactggttgcagaagcacggagggaatgcccaaactgcagttatattattgataacagcgatgttgccatgcagtggcctgggttgcctgctggagtcaagtttgatccttctgaattggagttgcttgaacatttagaacagaaagttggcctgggagattcaagaccacatgtgctcattgatgaatttattccaactatagacaatgatgagggaatctgctattcacatcctgaaaatcttcctggtatgaaaacagatggtagcaatgctcatttctttcatagagtttcaaaagcgtatggttgtggtcagcgcaaacgtcgaaggaccatcaactgcagtgatcacactgtttctgatgagcatgtgagatggcacaagacagggagatccaaagccatatatgaaaatggtgttataaaaggttggaagaaaataatggtgctgtacaaaatttcgcaaagaggcagaaagcctgatagagctaattgggtaatgcatcagtatcatcttggagaagaggaagacgaaaaggacggggaacttgtagtatctaaaatattctgtcagttgccaaataagagtatggaaatttctgaaacagaaactgcttatgaagaacctggtgcacctgcttcggtgattggtccgaaaactccaaagacagtcacaccacagccacgccatcctaaaaatagtccatgtgaaactgagcagagtattttcatcctgcaggaccagctactactggacggtgaagacgagcctaccatgcctatcgttagtctggcggatgatgcaatgaaccctgcatggtgtgctgtagctgaagaagagcaggttgttggagaggcatctcgggctcagtcaaactcagatgaacctcttctctgtcgcgaagacccaaattccttaaacgacgaagcattgcttccctgggactatccgattctgtcgcaatgcaggagtgagatttttgatcggaacctgaatggatacgggttgcctgatctccataatgtggatctcggcacgcctccagatcttcagcttgctgatttccagtttggctctcaggaaagcctcggcagctggctggatcgcatctaggaagatactaaagtacgtatttggtagagcagctcagcaacctgatcgatgggcatcttttttgcacatgatatggtaaccggtggcagctatttttgggcttgcaacacaaagattgcattcttgcattagtgttgtattagtgttgcgctgtcaaactttatctggaaaccaaagaacctttcgctcttttctattttctttagaacctttaacagctggctatcagaacactagccttgaaatatagctgtaagttttgtggcatggttggtgcaaacctacattgccccgctgtatataagatcggtgccttgagatctttgactttatgagttcagagtgttcttgtaataacaatgcaaaactgatgaggcagtccagctgcgcctagtctaatctctagagagtgcgaagttttggacttcacacatgcaactggcaagtaaaagcattgtttagaaggtac

SEQ ID NO: 132316 - DNA, 1839 bp, Zea Mays
aaatctactactagtccacatgcatagcatagcagttcgcacagctgcacactctcggggcggcgggtacagtattttagaagaccttggagtttgtgatggctgtgatgttccctatgttcagccgttggcttttggcatggtgctatgtcaagtagagtgtcagggccatgtatacttttttatttgtcaatgtcattgggttgtagtagctttccaatgcctcctctagttcaattttagatgccttgatctaatgtatattggtggatttcttacatgctcccagctgatactagttactacttgcagcttggttcaaagtcagtcctgagcatgtcgaggctgaagtgcgcgctgcggacattcgatctgagggttctcttgattctgctgatcggtgtgccaatcctgctcttcgcgatatacgtgcacggccagaaggtgacctacttcctccggccgatatgggagaagcccccaaagcccttcaaagtactcccccactactaccacgagaacgtctcgatggccaacctctgcaagctgcacggatggagagtcagggagaccccgcgccgcgtcttcgacgccgtgctcttcagcaacgagctcgacatccttgacatccgctggcacgagctgagcccctacgtgtcggagttcgtgctgctggagtccaactcgaccttcaccggcataaggaaggacctccacttcagggagaaccggcagcggttcggcttcgccgagtcgcggctgacctacggcaccataggcgggaggttcgtgaagggagagaacccgttcgtggaggagtcgtaccagagggtcgccctcgaccagctgatcaagatcgcgggcatcgcggacgacgacctgctgatcatgtcggacgtggacgagatcccgagcgggcacaccgtgaacctcctgagatggtgcgacgacgtccccgaggtactccacctccagctccggaactacctctactcgttcgagttcctgctcgacgacaggagctggcgggcctcggtgcacaggtacagggccgggaggacgaggtacgcgcacttccggcagacggacgacctcctggccgattccgggtggcactgcagcttctgcttccgccgcatagacgacttcgtcttcaagatgaaggcctacagccacgtggaccggatcaggttcgggtacttcctgaacccgaggaggatccagcacgtgatctgcgagggggccgatctcttcgacatgctccccgaggagtacacgttccaggagatcatcgccaagctggggcctatcccgagcacgttctccgctgtccatctccccgcctatctgctggagcacaacgagcggtacaggtaccttctcccgggcaactgcgttagagagagtggctagtagctaaggctgtaaggcagctagctgtgttgctgtctgcatcgccatggcctgaggcgcaccgacgtcgctcgcggatgcatgcatgcgtggaggagcgccctgccgttgccggggttgttgtatctggatatacgactggctgggctgacttatatatttagatgatgaatgaatggtcgcttgaccgctgctggttcagttcgtatgagattttgtaccatggaaggccttcacagcagcatagcatgcttggtcgctgcttccttgttgttttgcaggcctgggtttttattcattgcttccatgattgatgtatgtatgaatgaactcaaactatttgtaggtgtcataccgagcgacattcatactctgctctcgcgttgtgatgtacattgccattcacttaccctagttacctgagtc

SEQ ID NO: 132317 - DNA, 2067 bp, Zea Mays
agcacgaggacagacaaagaccagctctccgcctcacacctctgcctgactgactgcctccctcttcggccagccagtcactgccacgcccacgcgcaatcagaagcaggccaccaccccaccctcccaaacggctataattacgcggttgccggaatcctcttgtcccgcatcgcataccagcaattccctccccccgctccggcccctcgcaccgtttccctttccccgccgctcctccgaagccaccaccgtgccccgccccgcgagggcacgaaagaggaggaacgcggccaccgccggcgagggttcgggctccgctcccgacggtttgcaacccgggagggagccgaccgtgcgcgcgcattgggcccgcgcgggggaagcggcaggcgcgtgccgtttttatttagcccgctccgctccgcgcccggcggctgcggggtgtggtgctcctgctgattttcttctcggcgccatggaggccggctactgcaaccgcaagaagaccgacggcatctgcgacggcgtctgcgacagcgagcttggttcaaagtcagtcctgagcatgtcgaggctgaagtgcgcgctgcggacattcgatctgagggttctcttgattctgctgatcggtgtgccaatcctgctcttcgcgatatacgtgcacggccagaaggtgacctacttcctccggccgatatgggagaagcccccaaagcccttcaaagtactcccccactactaccacgagaacgtctcgatggccaacctctgcaagctgcacggatggagagtcagggagaccccgcgccgcgtcttcgacgccgtgctcttcagcaacgagctcgacatccttgacatccgctggcacgagctgagcccctacgtgtcggagttcgtgctgctggagtccaactcgaccttcaccggcataaggaaggacctccacttcagggagaaccggcagcggttcggcttcgccgagtcgcggctgacctacggcaccataggcgggaggttcgtgaagggagagaacccgttcgtggaggagtcgtaccagagggtcgccctcgaccagctgatcaagatcgcgggcatcgcggacgacgacctgctgatcatgtcggacgtggacgagatcccgagcgggcacaccgtgaacctcctgagatggtgcgacgacgtccccgaggtactccacctccagctccggaactacctctactcgttcgagttcctgctcgacgacaggagctggcgggcctcggtgcacaggtacagggccgggaggacgaggtacgcgcacttccggcagacggacgacctcctggccgattccgggtggcactgcagcttctgcttccgccgcatagacgacttcgtcttcaagatgaaggcctacagccacgtggaccggatcaggttcgggtacttcctgaacccgaggaggatccagcacgtgatctgcgagggggccgatctcttcgacatgctccccgaggagtacacgttccaggagatcatcgccaagctggggcctatcccgagcacgttctccgctgtccatctccccgcctatctgctggagcacaacgagcggtacaggtaccttctcccgggcaactgcgttagagagagtggctagtagctaaggctgtaaggcagctagctgtgttgctgtctgcatcgccatggcctgaggcgcaccgacgtcgctcgcggatgcatgcatgcgtggaggagcgccctgccgttgccggggttgttgtatctggatatacgactggctgggctgacttatatatttagatgatgaatgaatggtcgcttgaccgctgctggttcagttcgtatgagattttgtaccatggaaggccttcacagcagcatagcatgcttggtcgctgcttccttgttgttttgcaggcctgggtttttattcattgcttccatgattgatgtatgtatgaatgaactcaaactatttgtaggtgtcataccgagcgacattcatactctgctctcgcgttgtgatgtacattgccattcacttaccctagttacctg

SEQ ID NO: 132318 - DNA, 579 bp, Zea Mays
aagttttagcgcctgccctcagtccagctcgccagcagctctctgccctcctccctcaagccctagccgagtttttccatggtgccctggatgccagcccctttactcgctgcccctgcattcctgctcgccctgcccccagccatggacgccgtcgggccacccgttcctatctcccctcaccctcatcctctggctgctgccccttcctattcctggtggttgagtcttcttccatggacgccaatagcagcagcccactccttcttttgttctccatggatgaaagcccaagcatctgcccctcccctaggttttttacaatcgcagcagcacgtcgaacctttgcaaccccggtgagaccagctgcttgcgctatgtttattccccaccaattcctatatttgattatttactgtatatgtttgtgtgtttgtggtggaggtaaatcctaggaaatttagatgagaagaaagctatagcgaggcgcttgccaagtgcttggtgaatcgcctcaaccggatgtggttgtcgatctcgcggagtcgagtcgagtttagtcatggtaagtcgatccat

SEQ ID NO: 132319 - DNA, 820 bp, Zea Mays
aagttttagcgcctgccctcagtccagctcgccagcagctctctgccctcctccctcaagccctagccgagtttttccatggtgccctggatgccagcccctttactcgctgcccctgcattcctgctcgccctgcccccagccatggacaccgtcgggccacccgttcctatctcccctcaccctcatcctctggctgctgccccttcctattcctggtggttgagtcttcttccatggacgccaatagcagcagcccactccttttgttctccatggatgaaagcccaagcatctgcccctcccctaggttttttacaatcgcagcagcacgtcgaacctttgcaaccccggtgagaccagctgcttgcgctatgtttattccccaccaattcctatatttgattatttactgtatatgtttgtgtgtttgtggtggaggtaaatcctaggaaatttagatgagaagaaagctatagcgaggcgcttgccaagtgcttggtgaatcgcctcaaccggatgtggttgtcgatctcgcggagtcgagtcgagtttagtcatggttgaaattttgttctgttgtggatggtgctaagtgccggtgggctcggccttcttatataagtatatcccatctttagcttctttattgaggattgtcacttaagttagcatgtattttaaaaactataaatattttatacattttaaattataattcttttgaatcactttcttttgtaatcactccgataattgtataatgtaaacttattgtaacatgtaatcattttgcaataaagaatttatttccgctgca

SEQ ID NO: 132320 - DNA, 1470 bp, Zea Mays
agaccccctccccattgtcagatcgatccttcatcgccccccgatgacaacggcttctcggatgctagggcacctgccacccacccatctccctcccatcccagatccctcgcgccatggccaacgcctccccccagtggcttacgctagcgcacctgcccacctccctccctctcccccgcccagccatggccatcgcctttgactctccgacctcctcccccgctgaaattcctgctctgaaatacgctcgcttctgctgcctagatctggtacccctgttgtcaccacgtttttgccaccaccgtcaccagctcagagctttccctccattgcttcctcctcgtcgtggtctcctctgtgtcactccgctcgagctcgccatcctcttgccagcgcgactccgtggagcgtgcgagacagtgccggtggccgcggagacccgccacggggacatggaggggtaggtgttgccacagttcgtagatttcaacgcctggtacacacacgcgatctccactaccgagctcgtggactacaggtttgtgcgggggatcatggtcatcctcatccaccctacagatacaccatgtgggaggccatccaagttagtgcccattcgctcctcttcccccatgcccatgttgtgcatcatcctgcattgaacgttgctggtgtaaagatgaagagagtgattacaagtgtttctgcctgcatagttgtagattttgaagcatcgtgatgttccatttgtgcatagaatggtcccgaaatggtgtttaggtaataggcacgaatagcgtgtttttgttgttctggttccttgctttatttgcatactcattccttgcagactccaaaactaaatcaacaagttggagatcctccttcctgcagcgcagaagcacagctggttctttcaggcgcagcaaactctgttcagataaaaatttgtgttaactgatgctcaaattactgaagaatggaatagaggagctgcaccaagttcacgcttcatattcgcagagaagaatgcaaactatgttctgcttacctgaacaataagtgtcttgagaagcttcttctggattccaccgtggtcaagccttgtgatgaaatcagatgatgatgacgcaattggcttctgtgacctacaattatgggcatgctgatgctacctagaacctcactacactggatgacagggcgctactttttctagtgtagcatacaagctccaatcggttggctttggtgacaatggagggaggagggaagggtagtggagtttggtatatagatccacccagatggagtggagtacagtacaatgatagacagtgaagagacgagaagattcaattttatttgagttgagcctcaaagttatctacaacagtccactctacagtactatagtgggcaacaaatgtatggacatatgcacgctttgttagtcaaaaggtttag

SEQ ID NO: 132321 - DNA, 1411 bp, Zea Mays
gacaacggcttctcggatgctagggcacctgccacccacccatctccctcccatcccagatccctcgcgccatggccaacgcctccccccagtggcttacgctagcgcacctgcccacctccctccctctcccccgcccagccatggccatcgcctttgactctccgacctcctcccccgctgaaattcctgctctgaaatacgctcgcttctgctgcctagatctggtacccctgttgtcaccacgtttttgccaccaccgtcaccagctcagagctttccctccattgcttcctcctcgtcgtggtctcctctgtgtcactccgctcgagctcgccatcctcttgccagcgcgactccgtggagcgtgcgagacagtgccggtggccgcggagacccgccacggggacatggaggggtaggtgttgccacagttcgtagatttcaacgcctggtacacacacgcgatctccactaccgagctcgtggactacaggtttgtgcgggggatcatggtcatcctcatccaccctacagatacaccatgtgggaggccatccaaactccaaaactaaatcaacaagttggagatcctccttcctgcagcgcagaagcacagctggttctttcaggcgcagcaaactctgttcagataaaaatttgtgttaactgatgctcaaattactgaagaatggaatagaggagctgcaccaagttcacgcttcatattcgcagagaagaatgcaaactatgttctgcttacctgaacaataagtgtcttgagaagcttcttgtaagtgaggtgatctctacttatgcgcagtagctctttgcttgctgacttcaacatatctgttaccaaatcatcctgagcttgaaggactttaattctagaagcattgagctgcattgagtaatcactgcataagaccacacacagtaatatcagtgaattgatattttttacacaaaagaaaaatagtatggtcaccggcatatgctaaagtggggaaatatccataatggcccgtagacaatagtagctatgaagtgtgacataggtaaaacagaaacaagtcacaagaatgggaataagaaattgagttagaactgctatttacattttcttcttgatgccaataacttgctagctggattccaccgtggtcaagccttgtgatgaaatcagatgatgatgacgcaattggcttctgtgacctacaattatgggcatgctgatgctacctagaacctcactacactggatgacaggtgaataagcagacaatagttgagtgttgtcatcaggttgcatctaccatgactgagattgtgagcttatgtatctatcgatcattgtattactcactctttctcagtataagttgaatactcagcatactatatatat

SEQ ID NO: 132322 - DNA, 1341 bp, Zea Mays
gacaacggcttctcggatgctagggcacctgccacccacccatctccctcccatcccagatccctcgcgccatggccaacgcctccccccagtggcttacgctagcgcacctgcccacctccctccctctcccccgcccagccatggccatcgcctttgactctccgacctcctcccccgctgaaattcctgctctgaaatacgctcgcttctgctgcctagatctggtacccctgttgtcaccacgtttttgccaccaccgtcaccagctcagagctttccctccattgcttcctcctcgtcgtggtctcctctgtgtcactccgctcgagctcgccatcctcttgccagcgcgactccgtggagcgtgcgagacagtgccggtggccgcggagacccgccacggggacatggaggggtaggtgttgccacagttcgtagatttcaacgcctggtacacacacgcgatctccactaccgagctcgtggactacagactccaaaactaaatcaacaagttggagatcctccttcctgcagcgcagaagcacagctggttctttcaggcgcagcaaactctgttcagataaaaatttgtgttaactgatgctcaaattactgaagaatggaatagaggagctgcaccaagttcacgcttcatattcgcagagaagaatgcaaactatgttctgcttacctgaacaataagtgtcttgagaagcttcttgtaagtgaggtgatctctacttatgcgcagtagctctttgcttgctgacttcaacatatctgttaccaaatcatcctgagcttgaaggactttaattctagaagcattgagctgcattgagtaatcactgcataagaccacacacagtaatatcagtgaattgatattttttacacaaaagaaaaatagtatggtcaccggcatatgctaaagtggggaaatatccataatggcccgtagacaatagtagctatgaagtgtgacataggtaaaacagaaacaagtcacaagaatgggaataagaaattgagttagaactgctatttacattttcttcttgatgccaataacttgctagctggattccaccgtggtcaagccttgtgatgaaatcagatgatgatgacgcaattggcttctgtgacctacaattatgggcatgctgatgctacctagaacctcactacactggatgacaggtgaataagcagacaatagttgagtgttgtcatcaggttgcatctaccatgactgagattgtgagcttatgtatctatcgatcattgtattactcactctttctcagtataagttgaatactcagcatactatat

SEQ ID NO: 132323 - DNA, 1460 bp, Zea Mays
cattttcgtgcagccgcgcgctccctgccctccccgcccacccggccaggcccaattttgaaaccccaaatccccaacaccttcagcccctcgtgcgcccgtggaccgccagatccccacggccgccgaggcactctcctccttgcaccgagtactctccttgcaccccctctcatgcccgcatcttcagaagccgcgggcgctctcggcggcgggggagacgtcgagcaggactacgagattcgcaacgacgagggctttgtctacaaggttcccagagggctctaccacgaggccgcaccctccaccacccagtcggcggcgggcaccgaccccaaggccgccggcctgcgccgccgctgccgcgcgctcctccgcctccgcgccaagcgcctccgcgacctctcccgctgggaggccctcgcctccgaactcttcgccccgctttccgctccccagccaccggctccaccatcccaagcccctcccgcctcatctcattcagtcgctgcctcctcctcctcctccccgacctccgttcttgacgagctcctcgcacaggttgacattcaggcggagctgatgaagaaggtgcaccagtggtgcgacgaggccaacgccatttgcgacgcaggagagtctgccatcgttgcttctatggttgcgctgccgttgtggggtggcaacccagcggatctggtaacggcgctgtgcagccctgatgaaaaggcccatggtaacttggatggacagagtgggcgccaagtagcttctggactgtcttcagcagctgctgaaatgataaaaaatagtgccaagaaacaaacaatgggtcatgaccttcctcacaatctcactgagagcaggatgatgaaaagagtaactaacctttcaggccccaatattgttgcatcacaagcctctaatgaacgaaagaggaagaaggcgtcagggagagcatctactgcctcacgtactccaggatcaacgacgagaaggaaggccgcgtccactccaacaagagatccagcggcattttctagccctgggccactaaccaggagaagggcagcagctctaaatgtatcaccactcggggaggctcataatagtcaacaggtcttgtaatctggattggggagagtaggaaaggtgagaatatgtgtttgtacacaagtgttgtttgctgctgctgtacctagaaaactaggggattttttttgctagtgataagccatcaactgtcatcttgtgtactaccttcgttctcgaatatttgtcgtcagctagttcattttttaactaaacggcgacaaataaaaaagaacggagggagtaattgtgaagttccagccgcagatggtatttatcaagtactgctgtattggtggtgactagtgagtcgttcatataagtgcatgtctgctccttggaaacactgatcatgtatgtaatggctg

SEQ ID NO: 132324 - DNA, 1577 bp, Zea Mays
cattttcgtgcagccgcgcgctccctgccctccccgcccacccggccaggcccaattttgaaaccccaaatccccaacaccttcagcccctcgtgcgcccgtggaccgccagatccccacggccgccgaggcactctcctccttgcaccgagtactctccttgcaccccctctcatgcccgcatcttcagaagccgcgggcgctctcggcggcgggggagacgtcgagcaggactacgagattcgcaacgacgagggctttgtctacaaggttcccagagggctctaccacgaggccgcaccctccaccacccagtcggcggcgggcaccgaccccaaggccgccggcctgcgccgccgctgccgcgcgctcctccgcctccgcgccaagcgcctccgcgacctctcccgctgggaggccctcgcctccgaactcttcgccccgctttccgctccccagccaccggctccaccatcccaagcccctcccgcctcatctcattcagtcgctgcctcctcctcctcctccccgacctccgttcttgacgagctcctcgcacaggttgacattcaggcggagctgatgaagaaggtgcaccagtggtgcgacgaggccaacgccatttgcgacgcaggagagtctgccatcgttgcttctatggttgcgctgccgttgtggggtggcaacccagcggatctggtaacggcgctgtgcagccctgatgaaaaggcccatggaccataaaagaccaaaacacctctcctaatgattcctatccatgctcggcctttaccacaagccgagacttttgacaaggatcatgattggaaaattcatgcaaagaaacttcgtggtaacttggatggacagagtgggcgccaagtagcttctggactgtcttcagcagctgctgaaatgataaaaaatagtgccaagaaacaaacaatgggtcatgaccttcctcacaatctcactgagagcaggatgatgaaaagagtaactaacctttcaggccccaatattgttgcatcacaagcctctaatgaacgaaagaggaagaaggcgtcagggagagcatctactgcctcacgtactccaggatcaacgacgagaaggaaggccgcgtccactccaacaagagatccagcggcattttctagccctgggccactaaccaggagaagggcagcagctctaaatgtatcaccactcggggaggctcataatagtcaacaggtcttgtaatctggattggggagagtaggaaaggtgagaatatgtgtttgtacacaagtgttgtttgctgctgctgtacctagaaaactaggggattttttttgctagtgataagccatcaactgtcatcttgtgtactaccttcgttctcgaatatttgtcgtcagctagttcattttttaactaaacggcgacaaataaaaaagaacggagggagtaattgtgaagttccagccgcagatggtatttatcaagtactgctgtattggtggtgactagtgagtcgttcatataagtgcatgtctgctccttggaaacactgatcatgtatgtaatggctg

SEQ ID NO: 132325 - DNA, 1297 bp, Zea Mays
cattttcgtgcagccgcgcgctccctgccctccccgcccacccggccaggcccaattttgaaaccccaaatccccaacaccttcagcccctcgtgcgcccgtggaccgccagatccccacggccgccgaggcactctcctccttgcaccgagtactctccttgcaccccctctcatgcccgcatcttcagaagccgcgggcgctctcggcggcgggggagacgtcgagcaggactacgagattcgcaacgacgagggctttgtctacaaggttcccagagggctctaccacgaggccgcaccctccaccacccagtcggcggcgggcaccgaccccaaggccgccggcctgcgccgccgctgccgcgcgctcctccgcctccgcgccaagcgcctccgcgacctctcccgctgggaggccctcgcctccgaactcttcgccccgctttccgctccccagccaccggctccaccatcccaagcccctcccgcctcatctcattcagtcgctgcctcctcctcctcctccccgacctccgttcttgacgagctcctcgcacaggttgacattcaggcggagctgatgaagaaggtgcaccagtggtgcgacgaggccaacgccatttgcgacgcaggagagtctgccatcgttgcttctatggttgcgctgccgttgtggggtggcaacccagcggatctggtaacggcgctgtgcagccctgatgaaaaggcccatggtactactttatactaattaggcacttttggaatacgactagtgactctctagtaaaggttcactggcggtattacaactgaattgttgttagattgggaaatttttagccttttgcatttgcacagtttccttttcctggtatcacatgcattgggcattgaggttttgccatctttgttgtgtctaagatctgtctgctcagctgctctttggtcgtggacgaactgaaaattccatgaaggccctggagtaacaacctgtgactttgagaacttagagtgtctccaacaaactagccaaatggctcgtcaagtcaaatttggttagtcaacaccaaaataactctacaatagactatttatctaactcgccacgctatccgactttccaaattagctccctcactagccaaatttggttagccacctcactagtcaaactagatagatagtctgttggagtgagatgctacatatagaatgtaatctttatgaaaagatcaatagagtcaaatagagagcaaaaaatgaagagtttcttggagatgctcttatgcact

SEQ ID NO: 132326 - DNA, 1418 bp, Zea Mays
ctgggactggcgcttctcgcctcggccagcgatggagccacaggatgccccattggtcgcatctacgctcatcgacagcaccactgacgagcccagcctcgtccccacgctgggccgcgccaactcctgagccgcggacaactccatgtttgagacgacttcctcagtagattccatgcatcggattcacgagctcgagaaggctagggatgccgcggtggaagatgacatcgccttcggctccttggtggatatggcgtgcaagcttcctcctacgtcgattgctgtccaggtggcacaacagatccgttccgctagaaacatgtcccgcaaggccgatctccccttctccaatgccgctgaccacctcttcaacatggagctcgacaccaaccagaatactgagttccgtgacatcatcggcaaccacattctcgtctttgttccctcggccatcgccacctactatgacgacggcgatcgcgcctttcgcaacctgacgctcgcaagtagcgaggcgaggcaggtgcggatggactacgacggcgagggaaggcgtgttgacgtgaccatggcttccctgagaatgactaagcccagcaggccactgctcgacattgtgtatgatctctccacggtgatcaccgatgaggcccgcgtcggctctgtggtgaatgtggcaagcaagttgtcttctgcctcgtttgatgctcaagtggcgctcgatgaaatgcccacgagcggctggaggtcacctggccgcttcctcgacgtctagctccacggacacttcgttgggcattacctgagtgctactgcaaagatgtgggctagcacacacaatgacactcttaatgcaaaaatctcatctgtcgtcaacacgctctacgattgccagaaaagaacatgtgcacaggtacctgtcggccctcccgtcagagttctttgattgggttgaggtcatcacgcctgtctgggctccttactacacaatccacaagactatgtaaggtcttcttgatcagtacacagttgctggaaattccatggctcttgtcatggtggtaaagatggctaattaatttagtgaccggtgtgaagaatgtcatacaaaattatagtattgagacgcactagggtggcgtttggttcgcgaaatgtaacgtaaatggtaatggtaacgattcacactcgaataccggcggtaacagatttgaataagacggtatctatttatagtgtggtatcgattacggttagacttaaacaaacatgatctaacgttatcggttacccattctgttaccaatatgtgaaccaaacgacacctaggagtctctcaatgagaagtccggtgggatgaatgatgttttctatcagctctacacgatatcgaacgatatgaagcatttgacact

SEQ ID NO: 132327 - DNA, 77 bp, Zea Mays
ggaaactggagcatgtactaaaatatgcactccggcactaaatcagttgcaaacttccagtaggttatgcatcaagg

SEQ ID NO: 132328 - DNA, 1041 bp, Zea Mays
aagccacaaccccgagctcagatccctcgcctcgtgtcgtgtctccggtcgacgacgaccaacagccagtgtgggccagacggacaccgccgagctatagcgcttggtgatagcaagggacgaccggcggccggaccggagcacgtacgtacgtaccgcagcgatggctcggcagcaaagcgtgcaggccttgtgtgtgctggcggcgcttctcttcgccgcctccctgccgtcgccggccgccgcgggggtgcacctctcctcgctgcccaaagcgctcgacgtcaccacctccgccaaacccggccaagtcctgcacgccggcgtggactcgctgacggtgacgtggagcctgaacgccacggagccggccggcgccgacgccgggtacaagggcgtgaaggtgaagctgtgctacgcgccggcgagccagaaggaccgcgggtggcgcaagtccgaggacgacatcagcaaggacaaggcgtgccagttcaaggtcaccgagcaggcgtacgcggcggcggcgcccggcagcttccagtacgccgtcgcccgcgacgtcccctcgggctcctactacctgcgcgccttcgccacggacgcgtcgggcgccgaggtggcctacggccagacggcgcccaccgccgccttcgacgtcgccggcatcaccggcatccacgcctctctcaagatcgccgccggcgtcttctcggccttctccgtcgtcgcgctcgccttcttcttcgtcatcgagacccgcaagaagaacaagtagaacgagttgcggctgcgcgccatacatgcatacatgtaaatcgtcggcggcgatgagtggctgtcgttgctgattcattggtgcgcgcgactattttggtgtatcatgtaagttacttttctgcagtgtgtgcgtcaaaattaccaaataataacttaagtttctctgctgatccggttttcgattacgaatggaggggctcaaaatatatatagtctgctcgaaagtggattatattgcccacttattacaaatttatttatttc

SEQ ID NO: 132329 - DNA, 1731 bp, Zea Mays
gggttagcgtatcgaaatcaatcgtgttcctcgcctgcacgacgagagcccgagaccaatccagccgccgcctccgccttcgcctcgcctagtattccctccgattcagaggccgatggagtgcatcgccgagatgccccgcgcgccgctggacagcaggctgcgcaagcgtcagcgtctcggctgggacgtcggccctgccgagatgtataaggccgtgcggccgcggcacgggtgggacgtcggccccgccgagatgtatcagttagaactttgtggacaagaagttgtgaatgccatcagtgctgcagccttgggcctttcgtcgggctgtgtttcttctcaagtcaaacaagagcagcctcatgatggttcccctcctctgagagaagatgacagggatgggcattatgtttttgctgttggagataacctcacatctcgctataagatcaatgcaaaaatgggagaaggtacctttggtcaggtgttggagtgttgggacaaggaaaggaaagaaatggtggctatcaaaatcattaggggcattaaaaagtacagggatgctgcaatgatcgaaattggcatgctcgagcagcttggtaaatatgatgaaagtagatctagttgtgttcaaattcggaactggtttgactatcgtaaccatatctgtattgtctttgagaggcttggaccaagcttatatgattttctgcgggaaaacagttaccgctcattcccaattgccctagttcgggagattgccaaacaactgttggaatgtatagcatttatgcacgaattgtgtctcatacacactgatttaaagcctgagaacattctccttgtttctccggagtacattaaagtgcctgattacaaagtttcatcccgatccccaaaggagggatcctattacaagcgggtgcccaagtctagtgctatcaaggtgattgattttggtagcactacctatgatcaacaggatcagagttatgttgtgtcgacgaggcattatcgggctccagaagttatactgggacttggatggagttacccatgtgatatctggagtgttggttgtattcttgttgagctttgcacgggtgaggcgatattccagactcacgaaaacttggaacatctggctatgatggagagggttcttggacctttgccataccatatgttcaagagggcagatcggcactctgacaaatacatcagaaaaggacgcctgaattggcctgagggttgcacttcgcgtgaaagcatgaaagctgtgatgaaattgtccaggcttcagaacctggtgatgcaaaatgtggatcaagctgcaggagatttcattgaccttttgcaagggctgctgaagtatgatccatcaagccgtttaacagcacgagaggccctgaggcatcccttctttacccaagggttttggcgaagatgatgatactccttgcattctaccttgtttgtctgacttgatgtcttgcatttgacagtctgtacttttcagtggtgtatgtaggcggtagatcaatctgtataaagccgttgtagagttgtttcagtcttgtttggaacgtcgtgcagattaagttgtagcataatggaagtcaaatggatgcatttgactttaaatcctgacttgtttgaatttggaatgtcaatggaaatctggtttgaggagaaagtgaacatcatatattaaggccctgtttgatt

SEQ ID NO: 132330 - DNA, 2204 bp, Zea Mays
gggttagcgtatcgaaatcaatcgtgttcctcgcctgcacgacgagagcccgagaccaatccagccgccgcctccgccttcgcctcgcctagtattccctccgattcagaggccgatggagtgcatcgccgagatgccccgcgcgccgctggacagcaggctgcgcaagcgtcagcgtctcggctgggacgtcggccctgccgagatgtataaggccgtgcggccgcggcacgggtgggacgtcggccccgccgagatgtatcagttagaactttgtggacaagaagttgtgaatgccatcagtgctgcagccttgggcctttcgtcgggctgtgtttcttctcaagtcaaacaagagcagcctcatgatggttcccctcctctgagagaagatgacagggatgggcattatgtttttgctgttggagataacctcacatctcgctataagatcaatgcaaaaatgggagaaggtcagtttggatggccatgtcttctgaaataattgattaaactcgcgtttggcatgctgtgcaacacatgcagcaggttatgtttgtaacgaatgtgtctggaatacattaggtacctttggtcaggtgttggagtgttgggacaaggaaaggaaagaaatggtggctatcaaaatcattaggggcattaaaaagtacagggatgctgcaatgatcgaaattggcatgctcgagcagcttggtaaatatgatgaaagtagatctaggtgagtttgctggttcggttaacacccttctgtatgctttacattcataagattgcttgtatatataagctggtctattttgcagttgtgttcaaattcggaactggtttgactatcgtaaccatatctgtattgtaagtacattgttagattgtggcaattatgaactgacccaaaaagataaccatgtggtgcttaaacattggtgaatttggatcaatggtgagcaggtctttgagaggcttggaccaagcttatatgattttctgcgggaaaacagttaccgctcattcccaattgccctagttcgggagattgccaaacaactgttggaatgtatagcatgtgtgtgcacagttcttcctattatcgctcctgcactataatgcatatacattagtttttttttgcaatatatgtgcagcattgtagcctatcattaatccatattactactcatgcttaaggaatatctaacatcatgggatgtttatgtatttaccctctctctgtaatgtgttgcagttatgcacgaattgtgtctcatacacactgatttaaagcctgagaacattctccttgtttctccggagtacattaaagtgcctgattacaaagtttcatcccgatccccaaaggagggatcctattacaagcgggtgcccaagtctagtgctatcaaggtgattgattttggtagcactacctatgatcaacaggatcagagttatgttgtgtcgacgaggcattatcgggctccagaagttatactgggacttggatggagttacccatgtgatatctggagtgttggttgtattcttgttgagctttgcacgggtgaggcgatattccagactcacgaaaacttggaacatctggctatgatggagagggttcttggacctttgccataccatatgttcaagagggcagatcggcactctgacaaatacatcagaaaaggacgcctgaattggcctgagggttgcacttcgcgtgaaagcatgaaagctgtgatgaaattgtccaggcttcagaacctggtgatgcaaaatgtggatcaagctgcaggagatttcattgaccttttgcaagggctgctgaagtatgatccatcaagccgtttaacagcacgagaggccctgaggcatcccttctttacccaagggttttggcgaagatgatgatactccttgcattctaccttgtttgtctgacttgatgtcttgcatttgacagtctgtacttttcagtggtgtatgtaggcggtagatcaatctgtataaagccgttgtagagttgtttcagtcttgtttggaacgtcgtgcagattaagttgtagcataatggaagtcaaatggatgcatttgactttaaatcctgacttgtttgaatttggaatgtcaatggaaatctggtttgaggagaaagtgaacatcatatattaaggccctgtttgatt

SEQ ID NO: 132331 - DNA, 1616 bp, Zea Mays
gggttagcgtatcgaaatcaatcgtgttcctcgcctgcacgacgagagcccgagaccaatccagccgccgcctccgccttcgcctcgcctagtattccctccgattcagaggccgatggagtgcatcgccgagatgccccgcgcgccgctggacagcaggctgcgcaagcgtcagcgtctcggctgggacgtcggccctgccgagatgtataaggccgtgcggccgcggcacgggtgggacgtcggccccgccgagatgtatcagttagaactttgtggacaagaagttgtgaatgccatcagtgctgcagccttgggcctttcgtcgggctgtgtttcttctcaagtcaaacaagagcagcctcatgatggttcccctcctctgagagaagatgacagggatgggcattatgtttttgctgttggagataacctcacatctcgctataagatcaatgcaaaaatgggagaaggtacctttggtcaggtgttggagtgttgggacaaggaaaggaaagaaatggtggctatcaaaatcattaggggcattaaaaagtacagggatgctgcaatgatcgaaattggcatgctcgagcagcttggtaaatatgatgaaagtagatctagttgtgttcaaattcggaactggtttgactatcgtaaccatatctgtattttatgcacgaattgtgtctcatacacactgatttaaagcctgagaacattctccttgtttctccggagtacattaaagtgcctgattacaaagtttcatcccgatccccaaaggagggatcctattacaagcgggtgcccaagtctagtgctatcaaggtgattgattttggtagcactacctatgatcaacaggatcagagttatgttgtgtcgacgaggcattatcgggctccagaagttatactgggacttggatggagttacccatgtgatatctggagtgttggttgtattcttgttgagctttgcacgggtgaggcgatattccagactcacgaaaacttggaacatctggctatgatggagagggttcttggacctttgccataccatatgttcaagagggcagatcggcactctgacaaatacatcagaaaaggacgcctgaattggcctgagggttgcacttcgcgtgaaagcatgaaagctgtgatgaaattgtccaggcttcagaacctggtgatgcaaaatgtggatcaagctgcaggagatttcattgaccttttgcaagggctgctgaagtatgatccatcaagccgtttaacagcacgagaggccctgaggcatcccttctttacccaagggttttggcgaagatgatgatactccttgcattctaccttgtttgtctgacttgatgtcttgcatttgacagtctgtacttttcagtggtgtatgtaggcggtagatcaatctgtataaagccgttgtagagttgtttcagtcttgtttggaacgtcgtgcagattaagttgtagcataatggaagtcaaatggatgcatttgactttaaatcctgacttgtttgaatttggaatgtcaatggaaatctggtttgaggagaaagtgaacatcatatattaaggccctgtttgatt

SEQ ID NO: 132332 - DNA, 1587 bp, Zea Mays
gggttagcgtatcgaaatcaatcgtgttcctcgcctgcacgacgagagcccgagaccaatccagccgccgcctccgccttcgcctcgcctagtattccctccgattcagaggccgatggagtgcatcgccgagatgccccgcgcgccgctggacagcaggctgcgcaagcgtcagcgtctcggctgggacgtcggccctgccgagatgtataaggccgtgcggccgcggcacgggtgggacgtcggccccgccgagatgtatcagttagaactttgtggacaagaagttgtgaatgccatcagtgctgcagccttgggcctttcgtcgggctgtgtttcttctcaagtcaaacaagagcagcctcatgatggttcccctcctctgagagaagatgacagggatgggcattatgtttttgctgttggagataacctcacatctcgctataagatcaatgcaaaaatgggagaaggtcagtttggatggccatgtcttctgaaataattgattaaactcgcgtttggcatgctgtgcaacacatgcagcaggttatgtttgtaacgaatgtgtctggaatacattaggtacctttggtcaggtgttggagtgttgggacaaggaaaggaaagaaatggtggctatcaaaatcattaggggcattaaaaagtacagggatgctgcaatgatcgaaattggcatgctcgagcagcttggtaaatatgatgaaagtagatctaggtttcatcccgatccccaaaggagggatcctattacaagcgggtgcccaagtctagtgctatcaaggtgattgattttggtagcactacctatgatcaacaggatcagagttatgttgtgtcgacgaggcattatcgggctccagaagttatactgggacttggatggagttacccatgtgatatctggagtgttggttgtattcttgttgagctttgcacgggtgaggcgatattccagactcacgaaaacttggaacatctggctatgatggagagggttcttggacctttgccataccatatgttcaagagggcagatcggcactctgacaaatacatcagaaaaggacgcctgaattggcctgagggttgcacttcgcgtgaaagcatgaaagctgtgatgaaattgtccaggcttcagaacctggtgatgcaaaatgtggatcaagctgcaggagatttcattgaccttttgcaagggctgctgaagtatgatccatcaagccgtttaacagcacgagaggccctgaggcatcccttctttacccaagggttttggcgaagatgatgatactccttgcattctaccttgtttgtctgacttgatgtcttgcatttgacagtctgtacttttcagtggtgtatgtaggcggtagatcaatctgtataaagccgttgtagagttgtttcagtcttgtttggaacgtcgtgcagattaagttgtagcataatggaagtcaaatggatgcatttgactttaaatcctgacttgtttgaatttggaatgtcaatggaaatctggtttgaggagaaagtgaacatcatatattaaggccctgtttgatt

SEQ ID NO: 132333 - DNA, 1051 bp, Zea Mays
gggttagcgtatcgaaatcaatcgtgttcctcgcctgcacgacgagagcccgagaccaatccagccgccgcctccgccttcgcctcgcctagtattccctccgattcagaggccgatggagtgcatcgccgagatgccccgcgcgccgctggacagcaggctgcgcaagcgtcagcgtctcggctgggacgtcggccctgccgagatgtataaggccgtgcggccgcggcacgggtgggacgtcggccccgccgagatgtatcagttagaactttgtggacaagaagttgtgaatgccatcagtgctgcagccttgggcctttcgtcgggctgtgtttcttctcaagtcaaacaagagcagcctcatgatggttcccctcctctgagagaagatgacagggatgggcattatgtttttgctgttggagataacctcacatctcgctataagatcaatgcaaaaatgggagaaggtacctttggtcaggtgttggagtgttgggacaaggaaaggaaagaaatggtggctatcaaaatcattaggggcattaaaaagtacagggatgctgcaatgatcgaaattggcatgctcgagcagcttggtaaatatgatgaaagtagatctaggtttcatcccgatccccaaaggagggatcctattacaagcgggtgcccaagtctagtgctatcaaggtgattgattttggtagcactacctatgatcaacaggatcagagttatgttgtgtcgacgaggcattatcgggctccagaagttatactgggtatctattgtgttcagtgaaaagcttttcctagttcagcctgatttggtgtcattttatgactgcgtggatcatgtgttcaggacttggatggagttacccatgtgatatctggagtgttggttgtattcttgttgagctttgcacggtatgttattgtgccttggtttgattttgcatgtacaagtacagaggatctgagttaccaaggttctgcagggtgaggcgatattccagactcacgaaaacttggaacatctggctatg

SEQ ID NO: 132334 - DNA, 2810 bp, Zea Mays
tttttctcttggtttgaattttctgtactattccatggcaattgttgaacatatacaacagcacacctttagcgctcaatttacatgtcaagcaggcaccaagaggctagtcataataagcttacaaggcagatacaaagctgcatacacaagtactaagcagcaatattttattaacattccagtgaaggttacattcacaaatcgagttgcacagaacatggaactgcattctgaaggagatataaccttacttcagaatggtcctccttcgcacggcaatgagccaaccttcatgccttttttctgagcgattgccttcaattcctccgacatcgcgctctcctcgatgatcacatgattcaacctagcggcgcgctgggcaaagagctcaacgttacctacagcaatgcccggacagcgggagatgtcaaggatctccagtgactgcccacagtgcctaagcagcgagaggagcgagcctcccgtcaggccccggcaccccctgagcctgatgtcgatgagattccggcaggatgaaagcatggcgccgatcaccttgtcgttcagtgtctcattgtaagacaggttaagtcgacggagccgcggcatgctctgactgaggaatgtcagcaacccgggctcccgctccaccacgtcgcaactcaccaaggcgagctcttctatgccggctccggcggctgtgcgtgccagggaccggaggccgtcccctgtgataaggacgcagctctggaggcgaagtgaagctaggccatgtgtagcattgtgaactgagtcagctccaatggcgaggagatgatcgttgtgcaggtcaagcgggaggcgaaggtccaaggtgtgcagaccagcagcacgctgctggatgaaccggtgaagggcctcgctgccgccgccgtcatagaccaggagggacgttagcgtgcggcaatggtcggctgcaaggaggagtacacggtcggcgacagcacggcaagcacgaagctcaagcgcgagcaagccagcaaggcaacccgcgaaggccagcgacgcgggcccgtccccggtaccgtcgcaggcgcgcagctgcaaccacttgaggctcccgcaccgccgccacagccacccaagcccgcggtcgccggagcggatgccgcaaagtgacagcttctccagcggcaatgtccctgcgacgtcctcggcctcgccgtcggcgtcatccgagctcgagcccgcggagtcaacggtggcggcggagttgacaagggcgaacgacttgaggcgcggcaacagcttgagccagcggaaagatagggggcggacagcggtgaggtggagcgacgtcagaccggcgagtgcagggcagaccgtgagcagcgcggcgggggagaccgcccaatcgggcaagagccgcagcgtggagagccgggaagcggccggcgcggccgcgacagcgagcagcacggcgtcggcgtcgtggaccggcgtaccagcggagaccacggtcagggcggcgaggaaggggtagtgagacagcagggcggcgagggtcgccgccgaggaggcaggcaggcggaggctgagggacgacgtcgcggccctgaggagtgcgagccagcggcgggagacgagggacacggccggtgcagcggagggcggtagaaggccgaacaccacctgcagcaggtcgtcgcagagcgcggtgtccatgctgccgccgtagcagccagcgcgacgagcgccgccgccgccagcggcggcggcggcgtgacgggagcttgtcggcgccgtcggtgcgttgtgggaccagtcaagccatcggattggggcacccggccggacgcgcgggtgggggagaggtggggaagcggtgggatggggaatggaattgctgcggattggggaaggtggggggtagttcttgtgcttttgtcgagccgtgctgaagtttcacgtttccagagtcttcagtccgggccccaccggcctcccgttgcaccaattgcaaacgcaacggggataacgctccacagctacaaccgcggcgggaccttcctctggcctggaactggaagcaagcacatcaacaacaaaaaatggcagcgccacctctcggcctcgcttgcagggtcgccggcgccttcaccaccccggccgtggcgcattccggcttcctcccccgacaccttgcccgtggtctcctcccttcaaagagatggagcggggtggtgaggatgggggcggtggtcggaggaggaaaggagggggaagaggacgaggagctgagacagaccaaggagcaggctgccgccaggaggcggtgggaggccctgattagggagcagaaaattaaaacccttacaccgagggaagctggctatacgttcaaactgacggacaaggttcttttggatgttaggccctcaaacgagcgtcaaaaggcttgggtgaaaggctctacctggattcctatatttgatgtggatgcatcggttgatctgggcggacttagcaaaaaagtcagcaactttgtaatgggtggctggtggagtggcagctcaacattgtccttgaataagaactttgtacagcaggttgaggagaagttttcaaaagatacagatataatgctagtgtgccagaaaggacttagatcacttgccgcctgtgaacagctgtacaatgctggttttgaaaatttgttctgggtacaaggaggccttgaagctgccgaagaggaggattttgaaagggaaggttcccagcctttcaagcttgctgcaattggagggatttctgaattctttgggtaa

SEQ ID NO: 132335 - DNA, 2320 bp, Zea Mays
aaaaagaagtttcgagtcgatggcagtgggtataccaccggagcacgacacggccagcagaccctgccccggttcaactgccgtggccgtctcgtccccgtccagtccacctttccctcttcatctccgactccgccggcggcggaaccccaaccggcgaggatggggaacatcttcgtgaagaagcccaagatcaccgaagtggacagggccatcctcaccctcaagacgcagcgccgcaagctcgcccagttccagcagcaggtccgcctccccttccgcggcaccctgtcctaacctgagctacggatggcccgacgccctcgcccgtgtcgagttccggccgtctctctgcctcctcgctgtgggatcgtatcagattcggtgtccgtctcgcgccgtcgcgcggaagcgggtgtgtgtgtgtgtgtggcaattgggatctggagttggatcgaagtaactcgcgagtttctagttttgcagggatcgattaacgtgtatcaattggctgctttcgcatagggcgccctggttagagtcgtgtcacagcaccgatccaggtcgacatatctggctggcgatcaggagtggagaaaaaatctctcctaattccatgctatagtccagtattcattgtgaacgttagaactgctaattttgttcgtccaaacatcaatacaccagtttctggcgcgcattccggaaattgtgtttgctttggccacacgttagtgtattccaataatcggtgctgcattttgttgaatttgctcgctattagaggcattttaacttaatgtactttggatggtatacttcgtattttgattctagcttaacacaaccggtggtcctgtcagcaggtgctgactattcggattagatgtttattatcctgagttcctcatatttaatcatttcaatatcacattgttagcactacggagaggagaggaggatggaacaggtagcagcagcgtgaggaagaagaaatgagtagtgatgggattatgggaagataaactgttgtgtttgttctgaatatcgataccctctcctcacacttacatcaatatataaatgtcttcccttacatgggcctgcacaacactaattcacccacgactgcccaaacacctttgcattgtgcttcgtcgtcctgtccgagcttgtcagcatcccagcagcacgcaggctgttgcctctcctgcacttccaacattaccatagccttggatcctcacacacatctgctaaaagtatcgaaggagtgtgtttatgtatgcttctcttcccttccagcttgagaaggtaattgaagcagaaaaggaagctgcacggcagttggttcaacagaagaagagagacagagctttgattgcactgaagaagaagaaagctcaggaagagctgttgaaacaagttgacacatggcaaatgaatgttgaacaacagctctcagatattgaactagcaagtaaacaaaaggctgtatttgaaagcctgaaggctggaaacgctgcccttaagtctatacagaatgagataaacattgatgatgtccaaaagctgatggatgacacagccgaggctaaggcttatcaagatgaaataaatgctgttctgggtgagcagctctcggctgaggatgaagaagctgttatggctgagtttgaaaacctagaagctcagcttgccgtcgagtctttgccagacactcctgttactgaagtaagacctgaagagaaaatgaaagctccggctgacacagaagctgtgcctgaggacatagatgaggctattgagctccctgatgtgcctatgaaagcgccagagaggcctgaagctccagaaaaaaccaaagttttggaggagccactgcctgcttagtggatgaaactgagattagtaggacacacttagtttgcaggaattgtaacatacccactatttcattgtactatcttattttcagccatatcagaattttattgtgtacagcaagaaaatttggtgtttttgcaccatcaactatcactagtttggatttctcagtgccaatttatagtcacattctacgggtggggggtaagcataatattttcattgcgtttatttgaaggcagaaatgctgaagtttgcaggcgcatacctcgttccgtatgaacacacgtatgtttttgccaaagctgtaaaatatacgccatttgtaggtgctacttgttgcttgaatttttttatggggcgtgtacaataaaatattcaaacatgtatgcggttctggcactcaatcagagcagtctgtatcgagtaaggt

SEQ ID NO: 132336 - DNA, 1294 bp, Zea Mays
acaaaaaaaatgctcaaaaagaagtttcgagtcgatggcagtgggtataccaccggagcacgacacggccagcagaccctgccccggttcaactgccgtggccgtctcgtccccgtccagtccacctttccctcttcatctccgactccgccggcggcggaaccccaaccggcgaggatggggaacatcttcgtgaagaagcccaagatcaccgaagtggacagggccatcctcaccctcaagacgcagcgccgcaagctcgcccagttccagcagcagcttgagaaggtaattgaagcagaaaaggaagctgcacggcagttggttcaacagaagaagagagacagagctttgattgcactgaagaagaagaaagctcaggaagagctgttgaaacaagttgacacatggcaaatgaatgttgaacaacagctctcagatattgaactagcaagtaaacaaaaggctgtatttgaaagcctgaaggctggaaacgctgcccttaagtctatacagaatgagataaacattgatgatgtccaaaagctgatggatgacacagccgaggctaaggcttatcaagatgaaataaatgctgttctgggtgagcagctctcggctgaggatgaagaagctgttatggctgagtttgaaaacctagaagctcagcttgccgtcgagtctttgccagacactcctgttactgaagtaagacctgaagagaaaatgaaagctccggctgacacagaagctgtgcctgaggacatagatgaggctattgagctccctgatgtgcctatgaaagcgccagagaggcctgaagctccagaaaaaaccaaagttttggaggagccactgcctgcttagtggatgaaactgagattagtaggacacacttagtttgcaggaattgtaacatacccactatttcattgtactatcttattttcagccatatcagaattttattgtgtacagcaagaaaatttggtgtttttgcaccatcaactatcactagtttggatttctcagtgccaatttatagtcacattctacgggtggggggtaagcataatattttcattgcgtttatttgaaggcagaaatgctgaagtttgcaggcgcatacctcgttccgtatgaacacacgtatgtttttgccaaagctgtaaaatatacgccatttgtaggtgctacttgttgcttgaatttttttatggggcgtgtacaataaaatattcaaacatgtatgcggttctggcactcaatcagagcagtctgtatcgagtaaggt

SEQ ID NO: 132337 - DNA, 607 bp, Zea Mays
aagggatctttttctttacacgacattgatgtgtggtaatccgtctgcactgcatttacctgcacaagggaacgttgcaaggctcgccgccggcgcggtcgcagactgaggcgtggagccggaggagctggagcgcgcgcctgcagcgcgggcaggcggcgggcttcctggtcctgccgccgcacgcggccaagtgtcgcatgagctgctcgagcccccggcggacgccgccgtcctcgcgcgacgaggctgcactggcgcacgcggaccatccctccccatcgccggcgaagatgcggtccaggaaggccatggcgtcgctgagctgcccgtacacgtgctgcgacgcgcgctccctctcccacctctcctttctctgtcagggcaaagggaggcggacgtgtccgcgtcaggaaatgggaaggggtgtgtggactcgtggtacacgtggtcgatttggatttctgtactgccactgccagcacccagcagtgtgtgtgtttggtgcacactgcacagtagcgtttggactgtgcgtctgtaccacaggatggggacaaagacaaactctagtgtcaagttgaattgatttcaggatcgcatcact

SEQ ID NO: 132338 - DNA, 1572 bp, Zea Mays
atataaaactatattagcttaattgttctttatctaaattattattattagaatgaaatttaaggatccaaacaaagctattttaatatcctgggtctatactcaactgagttagttaaaaaaacataaaaataagacatttttaatattttaatcctattttttcatttggtaagttaacaaacacgcctgtcacgtgggtccatctgtcggcctataatctttccatttctttcttctctctccttactcggttcttcctactcccgatccatccgcagagggcggtgtcggcctcctctccacccgacagcttggccggcgacgagcaccaccaggacaccaggtattttctcccccttggtctttcctccctgctgtacgaagacgtgcgcccgtgattcgtaggtaaaaccgtgcgcccgaaccctaacatactattcgtagtcggatctgaatctaattacaagtgtatatgcatgtatcatggctgctaacttcgattgctttgcaaaaactattgggtgtatcctttgctgggcccgcccctgttctgaatcccaattcgcgagacacgtccagatttgactattttatgagttcacaagccacccagcatgaagtttttagaatacacccccttcgacagtataaatttgttcctcgagcagctcgaccttggtgattgtacaatcagagggaaccttgaggccttctcatgcaagcacactgcgacagaccgccggctttcaataagcctagaacatgagattcttgattaccttggcaagtcctctgatagtgacccgtcttcaccagtggagcacttggcctccagatcaagccggaaaacattgatatatctagttctcactcttggccacatatatccagattatgatttcagtgctgttcgggcacacttgttcttccaagaagaggagttggaaagtttcaagcagatggtagacacctacttatctgatgcctctaggcaatgggcagccacaaatgaaggcagttctcttctggacagtatgactaaagcaattgatgaggttatcaaaattaaagagtgtgacatctacagctataatccagactctgacgcagatccagttcttgagaaaggggccatatggtcgttcaactactacttctacaataggaagctaaagcgagttgtgagctttcgatgttactgcactagcaaattatcaggagatgacttcttaaccggtgttgcgtctgatggtgaagaggaagatgccttgattgacatggacatatgactgaccgtgttctgctagctacctgatgtgcgtataatatagaacatgtatgctcattcctggtagggaactttcaatatgacgcacttttaccgtttcctgtaaaaaccatggcacggtttagctttgtctgtatatgcggatttgagatttggtggcgggaaacttccaatcccctaggcttgaactgccacggtaattcggtactctgttgtttgctagacctgcaatgaataatgttgcgccaactgaattgttcaatttgatcaattgtgaattc

SEQ ID NO: 132339 - DNA, 1336 bp, Zea Mays
atataaaactatattagcttaattgttctttatctaaattattattattagaatgaaatttaaggatccaaacaaagctattttaatatcctgggtctatactcaactgagttagttaaaaaaacataaaaataagacatttttaatattttaatcctattttttcatttggtaagttaacaaacacgcctgtcacgtgggtccatctgtcggcctataatctttccatttctttcttctctctccttactcggttcttcctactcccgatccatccgcagagggcggtgtcggcctcctctccacccgacagcttggccggcgacgagcaccaccaggacaccagatttgactattttatgagttcacaagccacccagcatgaagtttttagaatacacccccttcgacagtataaatttgttcctcgagcagctcgaccttggtgattgtacaatcagagggaaccttgaggccttctcatgcaagcacactgcgacagaccgccggctttcaataagcctagaacatgagattcttgattaccttggcaagtcctctgatagtgacccgtcttcaccagtggagcacttggcctccagatcaagccggaaaacattgatatatctagttctcactcttggccacatatatccagattatgatttcagtgctgttcgggcacacttgttcttccaagaagaggagttggaaagtttcaagcagatggtagacacctacttatctgatgcctctaggcaatgggcagccacaaatgaaggcagttctcttctggacagtatgactaaagcaattgatgaggttatcaaaattaaagagtgtgacatctacagctataatccagactctgacgcagatccagttcttgagaaaggggccatatggtcgttcaactactacttctacaataggaagctaaagcgagttgtgagctttcgatgttactgcactagcaaattatcaggagatgacttcttaaccggtgttgcgtctgatggtgaagaggaagatgccttgattgacatggacatatgactgaccgtgttctgctagctacctgatgtgcgtataatatagaacatgtatgctcattcctggtagggaactttcaatatgacgcacttttaccgtttcctgtaaaaaccatggcacggtttagctttgtctgtatatgcggatttgagatttggtggcgggaaacttccaatcccctaggcttgaactgccacggtaattcggtactctgttgtttgctagacctgcaatgaataatgttgcgccaactgaattgttcaatttgatcaattgtgaattc

SEQ ID NO: 132340 - DNA, 1113 bp, Zea Mays
atataaaactatattagcttaattgttctttatctaaattattattattagaatgaaatttaaggatccaaacaaagctattttaatatcctgggtctatactcaactgagttagttaaaaaaacataaaaataagacatttttaatattttaatcctattttttcatttggtaagttaacaaacacgcctgtcacgtgggtccatctgtcggcctataatctttccatttctttcttctctctccttactcggttcttcctactcccgatccatccgcagagggcggtgtcggcctcctctccacccgacagcttggccggcgacgagcaccaccaggacaccaggtattttctcccccttggtctttcctccctgctgtacgaagacgtgcgcccgtgattcgtaggtaaaaccgtgcgcccgaaccctaacatactattcgtagtcggatctgaatctaattacaagtgtatatgcatgtatcatggctgctaacttcgattgctttgcaaaaactattgggtgtatcctttgctgggcccgcccctgttctgaatcccaattcgcgagacacgtccagatttgactattttatgagttcacaagccacccagcatgaagtttttagaatacacccccttcgacagtataaatttgttcctcgagcagctcgaccttggtgattgtacaatcagagggaaccttgaggccttctcatgcaagcacactgcgacagaccgccggctttcaataagcctagaacatgagattcttgattaccttggcaagtcctctgatagtgacccgtcttcaccagtggagcacttggcctccagatcaagccggaaaacattgatatatctagttctcactcttggccacatatatccagattatgatttcaggtaatattgtctttgtagcaagtgtgttctaatattatctgggaggaaggatattgggtaatgccatagtcagctttctctgggcgatatggcaaacccgcttttgtcctttccgaccagcctaagggggtgttgtcagatggtatgacagacggattaataaccgttgctctttgagctgagagttcaattctctccatttccct

SEQ ID NO: 132341 - DNA, 555 bp, Zea Mays
atgtcgctgtcagctggagaggccacagactcgtcatccgactccgatgaggctgcatcctgtcatccccgactgtttactgctgccgcgaggaactccattcgcttcctccatccgcccagatccgcgctcgcccagatccgactcaccttccctgctctctggttccgcgaagttggcgaggcttcaggacaagagggatatacatctgcgtctttccatccagatggtcttatccttggaacaggaactactgatgctgttgttaaaatttgggacctgaaggctcagtcaaatatcgcaaagtttgagggtcatgtcggaccggtcactgttatgtctttctctgaaaatggttacttcctagcgactactgctcatgatggtgttaagctttgggatcttcgtaaattaagaaattttaggactttctctccctatgatttggacacgccaaccaatactgtggaatttgattttagtggaaactatcttgccattgttggttcagatataatagacatttatagaccccataagacaacgacccaatag

SEQ ID NO: 132342 - DNA, 1501 bp, Zea Mays
actttgaaatttgtccgtccatacgaactctacgactacgagcctactactctactactgcctacggaggagagagagagatttcatgagttcgtgttcagttagtcttggtgcaccagttccacccaccaccggatataggtcatgccccttataagctcgacacaggggcaggcacaccgcacagcaccgcaccgcactgcatcggtcgccagccgagccgagccgagccctgctctctcctccagctccccaaatcacactccgccatggccggcacgtgcgctcacgtcgagttcctccgcgcgcagccggcgtgggcgctggcgctggccgcggtgggcctgctcgtggccgtgcgcgccgccgcccgcttcgcgctctgggtctacgccgcgttcctccgcccgggcaagcccctgcgccgccgctacggcgcctgggccgtcgtgacgggcgccaccgacggcatcggccgcgccgtcgccttccgcctcgccgcgtccgggctcgggctcgtcctcgtcggccgcaaccaggagaagctggccgccgtcgccgccgagatcaaggccaggcaccccaaggtccccgaggtgcggactttcgtgctcgacttcgccggcgaggggctggccgccgccgtcgaggcgctcaaggactccatccggggcctcgacgtcggcgtgctcgtcaacaacgccggcgtgtcctacccgtacgcgcgctacttccacgaggtggacgaggagctgatgcgcaccctcatccgggtcaacgtcgagggcgtcacgcgtgtcacgcacgccgtgctgccggccatggtcgagaggaagcgcggcgccattgtcaacatcggctccggcgccgcctccgtcgtgccttctgatccgctctactccgtctacgccgctaccaaagcgtatgttgaccaattctcaagatgcctctatgttgagtacaagagcaagggtattgatgtgcaatgccaggtgcccttatacgtggcgacaaagatggcatccatcaggaagtcttccttcatggtcccatctgctgacacctatgctcgtgctgccgttcgtcacattggatacgagcctaggtgcacaccatactggccacactctgtcgtgtggttcttgatctccattcttcccgagtcccttatcgacagcgtgcgcctgggcatgtgcattaagatccgcaagaaggggctggccaaggacgccaagaagaaggcgctgtgattgatgtttcagaatgcatgttcagattcgcacatttcctcatcacctgtagtagacacgtgccttgctgtagtcactttattagctaccattacctcctgagtctgttaagaatcgagaatgtcattgttccatccgcggttatgatgatgaaaaatacgattcttcaattcaaaatgtaacactaatacgagtaatgatgcatgaaattaacttgaagaagttgtgcaactcagttgtttttctgaacc

SEQ ID NO: 132343 - DNA, 2814 bp, Zea Mays
atgggaggaggaaacgaattcttggtggggatgaccggctctgctcctgattctgcccgccagaagcggtgtcacgacactgccaacggtgaggtgcgggacggcgacactgtggtaaagaacgggaagacgtccgatgctgcctccgtagagaagagggagaaaaaggaacatctgtttaaatgcagtgcctaccatgggaaggatacggacatgtggagtggcgaccagaggataaacaagagcagggtgcctgccgcattatgtgagcagggaagggaaatggatgatgacctgaacaaaaccaacagcaaggagaggatgatgggtgttgaactggacaaggaaaagacgattacatcggatgactgcagtaaggttgagggtaagaaaaagttcaacaccgcatcccctgaggaggagaggaagaagaaacctcacaatgccagcactgggaagaatatgcaaagggatgatgacaaggaggtggtaaggattatgagtaactctgatactaaggtgaagatcaagaaggtgtccaccccattacctaagaaggagaagaataaggaaaagctaaacaaaacctaccgagagaagaagatgcaggctgctgacagcaagatgcggagttgttacagtggagtgaagaaggggaaggtgataccacgaattgttgcacccagactggagtatttgactaatcaacttgtgtatcttaaagattcaaagggaaaatgtttaaaggtcctggtatcgaaggtggttgattcccttgcttttgatcagggatgggatgtttttgtctcaaaccatttgattaaatggggtgaatttctgttgtttgagtatattgctgagcgtacattttctgtgcgggtttttggtacggattcttgtgaaagactcgacttcaatcctgagagcacaaataaaggtgaaactaagaaacaggcatggagtaatatgccacctgatgatttggtcgtcacagatggtatttcagaaaacagtggctactatgtttctggcgaatgtcctaggaccaaagtgcctcaaacatgtcatgtaacttgcaatacaaaaaaagaccctaaacgagttgaacgtgtggttggatctggaccagtggcacaagatatcagtggtaatttgattggtccacagtgcaaaacaaagggtactccactgtgcagcaaaggaaaaacagtaattatgattatagattctgaagattctgaaccttccgcgcatgaaaaagaggatacaatgaagctagccacatcaggaccagattcagatataagtcttgtggctgttaataccaatgaggaccctataagagctcaaagtggcattgggaatggaccctcagctgtactagctgacgagaaggggaatttccctgaaattgagtgtggaaccaagtgcatttcagcaacatgcagtgaagtaaaaacagtatctcaaattataagtgctacagctctcttagatttacatgattcagatgaaaatttaggcagaaaacaaagaacaaatgccattcctttagattctaggacaaccgcggaagattatcataattatagcaagatgatcattatccaaaactttaatagaaaatatgaagctcctggaggtttccgatgcttggagaagtggaggaaggatgttgtgaacaatcaaacagctcttgattgcactgcaccgattaaacatgaaaacccacaaaaaactgacggcatgttggttgatggttacggtttgattgaactgaacccagtagatgagtacatttgttccgagggaaatcatgaatgtgtccaaccagtattcacaatgcccatcaaagaaccatcaagtgctgacagagtaatcgattgcggacgtgatgggacagagatcaactatagcatcaatgagaaagatggagaggtggatactaagtgcatccaaacaaggccatatgatgtcaaagcttctgtgctgtttcattcaaaagaagaagagtttattgcggtggtgcttctgttctacttgaagcaaaaggagaacaaacccatgggaagcattgtacatagccaaagtaacaatgtctggttgagtgcaaaccctgtagttgcgggtaaatatgctgcactaggactaaaccctagcaggtctgaaggaagttgtgcctttattgaatcaatgttaacagggtccattgagaaaacctcaagtcctgacgaaatatctaaatgcaagaatagcatgatggagactgcacataatgtcaatggaaaaggtggtggaactactgctcaatttgaaaccaaaatggatcaagcggagccagcgaggagcggtgtacgcagcaaaatttgcaacagtgttgtacctgccaacgagtcagaacaccgttccaccaaacaggaaggcagaatgtctagtaaccgtgaggtcccagagtctttgttgcctacaaaggacgaaattccggagccggatcatcattctccaccagagatcaacttccaactgtgcattcctgatactactcagaaatggcttgacctatccaagtcgctttccaatgcagttagacgacagagaaggcatgactatgatgtcataatgctgaaggaccccaagaagagactatggcctgtcgtttaccacgacagcctgttatttgtgggattcaccgcgggctggaaacatttcgtggcatcaaacgaccttcgggctggggatgtttgcgaacttgttaaggagccagacgatggtgagccggtgtactctgtccggatgtctgatcacaaaatttaa

SEQ ID NO: 132344 - DNA, 2454 bp, Zea Mays
atgggaggaggaaacgaattcttggtggggatgaccggctctgctcctgattctgcccgccagaagcggtgtcacgacactgccaacggtgaggtgcgggacggcgacactgtggtaaagaacgggaagacgtccgatgctgcctccgtagagaagagggagaaaaaggaacatctgtttaaatgcagtgcctaccatgggaaggatacggacatgtggagtggcgaccagaggataaacaagagcagggtgcctgccgcattatgtgagcagggaagggaaatggatgatgacctgaacaaaaccaacagcaaggagaggatgatgggtgttgaactggacaaggaaaagacgattacatcggatgactgcagtaaggttgagggtaagaaaaagttcaacaccgcatcccctgaggaggagaggaagaagaaacctcacaatgccagcactgggaagaatatgcaaagggatgatgacaaggaggtggtaaggattatgagtaactctgatactaaggtgaagatcaagaaggtgtccaccccattacctaagaaggagaagaataaggaaaagctaaacaaaacctaccgagagaagaagatgcaggctgctgacagcaagatgcggagttgttacagtggagtgaagaaggggaaggtgataccacgaattgttgcacccagactggagtatttgactaatcaacttgtgtatcttaaagattcaaagggaaaatgtttaaaggtcctggtatcgaaggtggttgattcccttgcttttgatcagggatgggatgtttttgtctcaaaccatttgattaaatggggtgaatttctgttgtttgagtatattgctgagcgtacattttctgtgcgggtttttggtacggattcttgtgaaagactcgacttcaatcctgagagcacaaataaaggtgaaactaagaaacaggcatggagtaatatgccacctgatgatttggtcgtcacagatggtatttcagaaaacagtggctactatgtttctggcgaatgtcctaggaccaaagtgcctcaaacatgtcatgtaacttgcaatacaaaaaaagaccctaaacgagttgaacgtgtggttggatctggaccagtggcacaagatatcagtggtaatttgattggtccacagtgcaaaacaaagggtactccactgtgcagcaaaggaaaaacagtaattatgattatagattctgaagattctgaaccttccgcgcatgaaaaagaggatacaatgaagctagccacatcaggaccagattcagatataagtcttgtggctgttaataccaatgaggaccctataagagctcaaagtggcattgggaatggaccctcagctgtactagctgacgagaaggggaatttccctgaaattgagtgtggaaccaagtgcatttcagcaacatgcagtgaagtaaaaacagtatctcaaattataagtgctacagctctcttagatttacatgattcagatgaaaatttaggcagaaaacaaagaacaaatgccattcctttagattctaggacaaccgcggaagattatcataattatagcaagatgatcattatccaaaactttaatagaaaatatgaagctcctggaggtttccgatgcttggagaagtggaggaaggatgttgtgaacaatcaaacagctcttgattgcactgcaccgattaaacatgaaaacccacaaaaaactgacggcatgttggttgatggttacggtttgattgaactgaacccagtagatgagtacatttgttccgagggaaatcatgaatgtgtccaaccagtattcacaatgcccatcaaagaaccatcaagtgctgacagagtaatcgattgcggacgtgatgggacagagatcaactatagcatcaatgagaaagatggaggaactactgctcaatttgaaaccaaaatggatcaagcggagccagcgaggagcggtgtacgcagcaaaatttgcaacagtgttgtacctgccaacgagtcagaacaccgttccaccaaacaggaaggcagaatgtctagtaaccgtgaggtcccagagtctttgttgcctacaaaggacgaaattccggagccggatcatcattctccaccagagatcaacttccaactgtgcattcctgatactactcagaaatggcttgacctatccaagtcgctttccaatgcagttagacgacagagaaggcatgactatgatgtcataatgctgaaggaccccaagaagagactatggcctgtcgtttaccacgacagcctgttatttgtgggattcaccgcgggctggaaacatttcgtggcatcaaacgaccttcgggctggggatgtttgcgaacttgttaaggagccagacgatggtgagccggtgtactctgtccggatgtctgatcacaaaatttaa

SEQ ID NO: 132345 - DNA, 2048 bp, Zea Mays
gctgttgcattgacattctctaaagttgttgatccgaaaaatcctctgtaccttgatgacaactgttgtgaaaatgttgattgggactttggggttctatctccaaaggagtttaaagctcctttagatgctgtagaaactaaaactaaaccaaaaacacgtgagaacaagaaaaaagcagtttgaggaggaagaatgtgatgaagaagacatgaacatggatgcatacagtgattcatccctcgagccatatgatctatcagacgatgacacagatttgcaaaaaaaaattagccacctgagtgatcttgcagcagcactaagaaaacctgatgatccagatggtgtcgaaaatgctcttaattatgcggaaaagcttgtgagagcatcacctgatgaattacgctacaactctggtgaccttgttagagcactggtgcatgttcgctgttctgacgtggcaatggaaggagaggaagattctgctgaagaaaagagacagaaggcattggtttccttgttggtaacctgcccatttgaatctctagatgttctgacaaaattgctatattcatctagtgtggatattggtcagcgcattttgattattgatgctatgactgaggcggcacaggagcttgctgaaactaaaactgtgaagatagaacagcgacgtggtaacttgataactgacacttctccttcttggctggttccgagtaatataggacctcctggggcaggcccttggagagaggtatctgaaccaggcacacttctaagttggtcacaccgttatgaaagagaggttccatctaaatcgggtcaattgaaatcaggaaaatctcgtaaatggggtcttggaaaagcgaaagacttgcaggttgagtggtctaaaaatagatttcctttgtatgccgctgcttttatgctccctgtgatgcaaggatatgataaaaggtcacatggtgttgacttgcttaatcgggactttgttgtcctcggtaaattgatatatatgcttggtgtctgtatgaagtctatggccatgcacccagaagcatcagctctagctcctgctctccttgacatgataagatctagagatatttcacgacatgctgaagcatatgtcagaaggtccgtattgtttgcagcgtcttgcatattgatatctttgcatccgtcatatgtggcgtcatctcttattgaaggcaaccaggacatttctactggattagagtggatacgcacatgggctcttcaaattgctgaagctgatcctgatacagaatgctcatcgatggccatgacctgcctgcggctccattctgagatggctcttcagacatcgcgcgcactggaatctgcaaatcactccaagactggcagagccataccttctaagctcgacagcattattctaccattcggcaacatgatgtgataggtaaactatatataagttgtgcagggatgtgtcctgctgttgtacagaacttacgtagcaaattctggttatttagaaggtggaccgtcaagttgtaccagctggttcctgtggttgtctgaaaggtgagagtgagagattggaactctgcatttcttttggtaacaactgtggtctttggcgtattcagtgtcagatttgtcaaaagccaacatttttacggtgttattttgtttccagtccagtttaaatgagcagccccaccgtaaaaatgttagtatgttaaggatgtatttaaatcttttttgtttcttgttgtttggttgaaacaccctacattcttttgcattacaaattgtgtggaaaaacacaaatgatgccatgaagatttatgccttatcccttatgaaactacacagattcatgataacaaatacatattcactcctttatttatgttttttggaggaaagatttgtgactgtataaccagtcacctccaatcgaaaattattcatggaggagcgaaaagtgtaaccaactatatacgtttctattcatacgtcaaaggtcgacccataaggcctctacattgtca

SEQ ID NO: 132346 - DNA, 3404 bp, Zea Mays
gacacctcaaagactcgtctattcgaactgtccctccccatggcgagcacgcgaagcagctcattgccctctcgcggcgccaccgatggagagaagcgcctcgaagcactggccctgggcagggtagcggaggctgccgacgcagttgcctccgctgcttgcgccggcgaggtggtccgcgcgattcacgctgtcgcatccctcctcttccccgtggactctgaggccgtcgccggtaccgtcgaggaaccattcaggagccagattcttgatgctgtaactgtaaccctcagcaatgaggagagggaatcttggaggcatgccttttatcatggtcctgcatttcctactatgtctaagatattgcttggcaatgttgccttgaagtggttgccgaagattaatgtctctgcaaggcaagagatttacgactcattttttgtcaaagggcctccaactgaagtgattcaagctcttgttccagcgctatctgaaaaagaattttctaaggaggaccaccagactttttgcttgaaccttgaaaggctactgattctatggttacttgataataagggtgttttccaaattgttgtggacttcatttgttctaaaaagcatggtgaagatattctcagcccagataaaacaatatccgtatcaagggttgcacaactacttgcatctgttccagataaagcaagattgggagcttcagctgcacttacatcaccctcattcttcaagcatgttgtcagccaacttcttgctggtgcagaagcaacaactattgagttggctgctgacaaagaagctaatgaacattatgtcttgagttctatgtttcactttgtgggcgaagtgctatctcgtgtttgtcgtcgtgggtctactggtgttttagttgctgaattgattcctaaggttcgcaatcacatacatagatgtgtgccaccagatcatagggccacaattcctgagatggtccaacatgtttgccagtctcaattttggttcaatatggttgaagcaatgagagatcagcattctattgaaaggttgacagaagagctgttgcgtcaacttgcgtcacaacatataagcgatgaagaggcttattggattctgtggaccctctttaatcagagcttcaagcgtttaactgtcatgagggcgatgtttgttgacaaatttttgctctggaaaacatttcctttatgctgcctgagatggattcttcactatgctgtctttgaatgtccaccaaattcaaccacagaaattctgatgcaaaggacaccaaacttttttggtatattgcaaagtttggttagtatttggtccaggaaagagtttattcagtcatattcagtggagcaacaagcttatatcactgcagcaattggattatgtttggaaaagctaacaaaaaaagaattagaaacaactaaagatgtattgaattctattcttcaaggagtaagctgcaggttagagagcccaattgatttattacggaagatggctagtgctgttgcattgacattctctaaagttgttgatccgaaaaatcctctgtaccttgatgacaactgttgtgaaaatgttgattgggactttggggttctatctccaaaggagtttaaagctcctttagatgctgtagaaactaaaactaaaccaaaaacacgtgagaacaagaaaaaagcaggtgagaagaagacaaaagcaataaaacgtgatattccagacgtcagagcgaaaatcgtagagatcaattctatagatcatgatcaaatgtctgatactgctacgaatgggcagtttgaggaggaagaatgtgatgaagaagacatgaacatggatgcatacagtgattcatccctcgagccatatgatctatcagacgatgacacagatttgcaaaaaaaaattagccacctgagtgatcttgcagcagcactaagaaaacctgatgatccagatggtgtcgaaaatgctcttaattatgcggaaaagcttgtgagagcatcacctgatgaattacgctacaactctggtgaccttgttagagcactggtgcatgttcgctgttctgacgtggcaatggaaggagaggaagattctgctgaagaaaagagacagaaggcattggtttccttgttggtaacctgcccatttgaatctctagatgttctgacaaaattgctatattcatctagtgtggatattggtcagcgcattttgattattgatgctatgactgaggcggcacaggagcttgctgaaactaaaactgtgaagatagaacagcgacgtggtaacttgataactgacacttctccttcttggctggttccgagtaatataggacctcctggggcaggcccttggagagaggtatctgaaccaggcacacttctaagttggtcacaccgttatgaaagagaggttccatctaaatcgggtcaattgaaatcaggaaaatctcgtaaatggggtcttggaaaagcgaaagacttgcaggttgagtggtctaaaaatagatttcctttgtatgccgctgcttttatgctccctgtgatgcaaggatatgataaaaggtcacatggtgttgacttgcttaatcgggactttgttgtcctcggtaaattgatatatatgcttggtgtctgtatgaagtctatggccatgcacccagaagcatcagctctagctcctgctctccttgacatgataagatctagagatatttcacgacatgctgaagcatatgtcagaaggtccgtattgtttgcagcgtcttgcatattgatatctttgcatccgtcatatgtggcgtcatctcttattgaaggcaaccaggacatttctactggattagagtggatacgcacatgggctcttcaaattgctgaagctgatcctgatacagaatgctcatcgatggccatgacctgcctgcggctccattctgagatggctcttcagacatcgcgcgcactggaatctgcaaatcactccaagactggcagagccataccttctaagctcgacagcattattctaccattcggcaacatgatgtgataggtaaactatatataagttgtgcagggatgtgtcctgctgttgtacagaacttacgtagcaaattctggttatttagaaggtggaccgtcaagttgtaccagctggttcctgtggttgtctgaaaggtgagagtgagagattggaactctgcatttcttttggtaacaactgtggtctttggcgtattcagtgtcagatttgtcaaaagccaacatttttacggtgttattttgtttccagtccagtttaaatgagcagccccaccgtaaaaatgttagtatgttaaggatgtatttaaatcttttttgttt

SEQ ID NO: 132347 - DNA, 1130 bp, Zea Mays
ctcgaagcccacttctggttccggtggacccgcgtacatcgctaaggaacgcagcagctcccccgacaaccaccagataaagctgcaagctgcttatcttctcccgtcccataggttgctaggctcggccgtgtagagcagcaagagcacgccgcgccaagcaacaaagagggaccccgcatccatggaggtggtgggcggcgtgtcgctgaggccgtcgccagcgccggcgcgtatccggactaccctgccacccgtcgacgtaggcggacgcttccttctccgccgggtcgcggggcgccagccggcgaggcgcgcgctggtcgtggaggcccggggcggcaggggctggtcggagcggcagatgcagcagcagcgccgcgcgccgctgctgccgaaaatcgaggacgacggcaacccgcgattcgtcatcttcatccgcaccgccaatgtctacttctggtacccgctcaacatcatcacgggcggtacgacggcgaagatcatgctcgccgccaaggacaacttcctcggcaagtacatctacaaggacacgctcgccaggaacctcgccgccgtcatttacaaagacgaggacgtgatcatagacacagcgaaagagcagtaccgtgtgctcaagaccgaaaatcagtttcggtatggctacaaagttgtggagaaagggaacataaggtctgctctgacgacaagcaatgtgatcgaacttccaaagaaggacgagctcaaaaccgtggttgacaaggtgaaggacttctttggcgacgtgactgccggcgccaaagaatcctttgcgcagataacagggtctgctgtcagcaaggaggaagaggaagcagagagcaaagagaagttccgctccaagagacgaaagaagcagcggaagtcgaaggagggcctcaagacggagaaatgattcagtcagtcacacaagtaaagcaccggctgtagtttcgctatcgatgtccgagaactgttctgtaatttctccagcttccttttttttgtttgttttgtaaaaagacgtcgtgtaacttcattgcgactaacgtgtgctatgccttctcagtaaatctcacaaaatgtgaaggtactccctacgttctgaatca

SEQ ID NO: 132348 - DNA, 272 bp, Zea Mays
gttgacaaggtgaaggacttctttggcgacgtgactgccggcgccaaagaatcctttgcgcagagacggagaaatgattcagtcagtcacacaagtaaagcaccggctgtagtttcgctatcgatgtccgagaactgttctgtaatttctccagcttccttttttttgtttgttttgtaaaaagacgtcgtgtaacttcattgcgactaacgtgtgctatgccttctcagtaaatctcacaaaatgtgaaggtactccctacgttctgaatc

SEQ ID NO: 132349 - DNA, 556 bp, Zea Mays
ctcgaagcccacttctggttccggtggacccgcgtacatcgctaaggaacgcagcagctcccccgacaaccaccagataaagctgcaagctgcttatcttctcccgtcccataggttgctaggctcggccgtgtagagcagcaagagcacgccgcgccaagcaacaaagagggaccccgcatccatggaggtggtgggcggcgtgtcgctgaggccgtcgccagcgccggcgcgtatccggactaccctgccacccgtcgacgtaggcggacgcttccttctccgccgggtcgcggggcgccagccggcgaggcgcgcgctggtcgtggaggcccggggcggcaggggctggtcggagcggcagatgcagcagcagcgccgcgcgccgctgctgccgaaaatcgaggacgacggcaacccgcgattcgtcatcttcatccgcaccgccaatgtccgtcactagctctagacttctagctgctgctcgtagctcggttggatcggattgggatcttgctacccatccatattggttccgttctgcaaattcgatggc

SEQ ID NO: 132350 - DNA, 2180 bp, Zea Mays
aggataggatggaacatcacgcacgtatccaagatgagacgctcgtatgcttctgggattttgacgccattgtaccgcatcccatacgatagatccagttcgctttgttcggttgccatttccagtccgggttttttgacctgcaaaagttcgttctttagacatacaattctgccgcatctttttttctctcctttaaacaaagcgggaaattcaaaggctagagtttacagaggtaaatgtatgtaccgttagtttcatgtacatggcttctgatggctgcaggcgtatgacaaactcattcctgccttggtacctacatctaaaaatgtcaccaggagcatccttgaactgtacacgtatctctgctttcctcgaatttagtgctttgccagccttgaggatgaatggaacccctatgcgacagtcatttgcatttagcaccaaagaataaacattgcaatgttcagaagtatgacactggcatatgacgcagagtgggaattatccggttataaaaatatggaggttcgattaaggaagactgcagagctagacattgggagcaatggctcatcgagtaatatttaccctcccatctttcgttgtgtaccctcagtacaacagatgcaaaagtaggggtgttggagtcatctggcacagtagggtcatccttgtagccatcatattgtccgatgactacctcttcatgctttataggctccaccgattgcagaacctagcattggttgtaaaaaggcaactagtaagaaacaaaaaaaatgacaaacaacacaggattcataatctggtatcacatcaagaaagtttagaggctcgtttcctgtctgttgatagaataaaaagatgtaagaagtaagaaccttgactttttcatctctaatgtgctcgggtttaagagagacaggcttttccatagccaccaaacagaagacctgcaaaattagagcgacagtcataccagagctctctccagaacaaaacattgctatatctatgaggaatgtaattacaggtatctgctgtgtctgctcagaagattagcactagattggtgatgaaacaaaatattaatcatattaccaaataatcatgcattatattggactgtacccaatccccaccctaaacaagtactcctctagagtctagattcaagtcaaaaagtacgtgtctggaaaatcactcataaaccaacggcaaaagaagttcataagatatatttacctgcaacaagtggttctgaatgatatcacgaatgatactgcatcaacaaaagtggagtcagatacgagtattttgcaataagataaagagcaacacatggaggccctcaaagtgacaaaaaaataacggacaattgcatttttatccctgctcacgactataactccattttttgaactttgcaccgttgcccctgtttttttgaaacgaaacctctgtttgcccctattccgttgtaagcacataacggtggtaactcagcacatgactttgcacatgacaaaactgctgacttaacaccgttatgtgcttgtaacggaatagaggcaaccgggggctgcatttcgaaaaaaacaggggcaacggtgcaaagttcaaaaaacaggggtaaaatgaagttagagtcgtgaacagtggcaaccatgcaaatgccccaaaaaataacgataatgcttgcatgccctctcgaaattcaaaacaaaaccgcacaagtattggaacaacactgttgatagtatagaaggtggtgcaagcaggatagaatttaaatttagtaaaaaacaattggaaataagtacaaaagacttgtcttccaagggaaaaacaatataaactgtgcagtttgtcttttcccccaaactataaaggcacatgatcagaggacctattagggccaatggtgaaccaatgatataatacatataatgatagaagtatagagctgatattttataacctgaccatatggtgcttacaacaattttttatgcaaaggacaaccatgcaagaatgtagccgcttccaacgtacccatattgatcaaaatatcctccacgtccttcagttccaaagtcctccttaaatacgatctgcagaattcattcattacatgcaagaacatatgttaggcacaataattactgaaaaaatac

SEQ ID NO: 132351 - DNA, 939 bp, Zea Mays
gtatccaagatgagacgctcgtatgcttctgggattttgacgccattgtaccgcatcccatacgatagatccagttcgctttgttcggttgccatttccagtccgggttttttgacctgcaaaagttcgttctttagacatacaattctgccgcatctttttttctctcctttaaacaaagcgggaaattcaaaggctagagtttacagaggtaaatgtatgtaccgttagtttcatgtacatggcttctgatggctgcaggcgtatgacaaactcattcctgccttggtacctacatctaaaaatgtcaccaggagcatccttgaactgtacacgtatctctgctttcctcgaatttagtgctttgccagccttgaggatgaatggaacccctatgcgacagtcatttgcatttagcaccaaagaataaacattgcaatgttcagaagtatgacactggcatatgacgcagagtgggaattatccggttataaaaatatggaggttcgattaaggaagactgcagagctagacattgggagcaatggctcatcgagtaatatttaccctcccatctttcgttgtgtaccctcagtacaacagatgcaaaagtaggggtgttggagtcatctggcacagtagggtcatccttgtagccatcatattgtccgatgactacctcttcatgctttataggctccaccgattgcagaacctagcattggttgtaaaaaggcaactagtaagaaacaaaaaaaatgacaaacaacacaggattcataatctggtatcacatcaagaaagtttagaggctcgtttcctgtctgttgatagaataaaaagatgtaagaagtaagaaccttgactttttcatctctaatgtgctcgggtttaagagagacaggcttttccatagccaccaaacagaagacctgcaaa

SEQ ID NO: 132352 - DNA, 1929 bp, Zea Mays
ttgatattttggtacatgaaaaatagcaacgaggctcgaggcaggagaatgacggaagcgacgacggtgagaggcacagaagcaaacttgtgatcgtacacgatatgcggacaacgccgcacccttctatctaggccagactagaagggtagaagaagcaacaacggtcaagggcctagctatttgttaactctggcccctcacctgctccccttctgtccagcccacgggagggcgactagggttaggggcgaccggaggtccccgcgcctgcccaaatccacccatcccttccgttcaagccgccggagctcccaggccgctggtgtcgaagccgtcgccccttccttccaggcccgcctcctctctgtccgttctgtcttggtcgccgaagctcaagaccacagtgtcaggaagttctccaatcttccagccaaacacaattcatcagtcagatacactttgaccgaggaattattcagaatcactccacgagaggatcagctttcgaagctagagaagcagagctctaccaaacaggccaggacgtctctcaaatccccagttcagtaactggctaactgtaggagaaggagagagagatggagaacggcggcgctaaaggcgacgtccccgacgatgcgaacgagcattgccctggaacacagtctgaggaggcaggcaaggcagatgcctgcgctgggtgccccaaccagcagatttgcgccaccgcccccaaggggcctgatcccgatgtggttgctattgttgagaggttggctactgtgaaacacaaattgttagttttgtctggaaagggaggtgttggaaaaagcacattctcagcccaactctcgtttgccctagctgaaatggaccatcaggttggccttcttgacatagatatatgtggccctagcatccctaaaatgctaggccttgaaggacaagatattcatcaaagcaaccttggctggtcacctgtgtatgttgagtccaaccttggtgtgatgtcgattggtttcatgctgcctaatccagacgatgctgtcatatggaggggtccccgcaagaatggactgatcaagcagttcttaaaggatgtcgattggggggagattgactatcttgttgtggacgctcctccaggaacatctgatgagcacatctcgatcgtgcaataccttcaagccacaggaatcgatggcgcgataatcgtcacgactccgcagcaggtctctctgattgatgtgaggaaggagataaacttctgcaagaaggtcggtgttcctgtcctaggtgttgtggagaacatgagtggtctgaggcagccgctttcagacctcagattcatcaagtcagatgaggcgggcaagacagatgcgacagaatgggccctgaactacatcaaggagaaagcccctgagcttctgtcggtcatggcctgcagtgaggtatttgatagcagcaagggaggcgccgagaagatgtgccatgaaatgggggttcctttccttggtaaggtgcccatggatccgcagctgtgcaaggcggctgaggaagggaggtcatgctttgctgatcagaaatgcagtgccagtgcgccggctcttcgaaacatcgtgaagaagctgatcaaggccgagtgagaaaataatgttggcctgctggggaatctggtagtgagaaatgagatgaaatgacagatgccagagttctcgttaccaatatatatatatgttacggcgttacacactgaatctgtattagtgcttgtgttggacctgtaagtttttgttcgtgaataatcagtgggtgcacagactattaaaagcttagtttctgctctaccaagtggactatgtttgcttgaacgatatgtactgtacgcaccagaactgaatgagagtgtacggtgttagcaatatc

SEQ ID NO: 132353 - DNA, 210 bp, Zea Mays
gtccaagctctaatctctaagactcctttcgaagcctggcatggaaagaaacttagtgtcagtcatttgagattttttggttgtgttgcccatgtgaagttggttggtccaggtttaaataaactggctgatagatctagcaaaatggttttcataggttatgagtcaggctcaaaaggttacagactatttgatcctaccaagtacaga

SEQ ID NO: 132354 - DNA, 80 bp, Zea Mays
tgtgcaagcacatgttcgctggcattccacttttcattcattcaaaagaaagcaagaaagagaaagagctaccccggcca

SEQ ID NO: 132355 - DNA, 3054 bp, Zea Mays
cccgcgcgtcacgttcgcatcgcttctggttcgggtctcacctctcgcgatcaaagcagtagcgggttcagtggcttggcgaaggaaaaaaaaggaggaaaaaaaaatagcaaggctgtgcagcgaggagacgactcgactccaactgggaggcgaaaaataaaaaagaggataaggcgaggcccgaccgggcggccaccgcgctcccagatccgctccgctgccgtggagatccagctcccttgcgcgcctgagcgtggacgccggcgtctcgctcccggatcccgaccttggggttgcagctgcttcagatccagcgttaccagatctgtgacccgctggcgcctgggcacatgacaccgacggttttaatggagtttgggcagcagaggccaatgaaacggggatacgaggaaatggtcttcagggcagcctcttcccgtggttatgcagagactgttggcgagtcgggagttgcagctggtagtcctcttcgtgttgattctgaggactcatctgtgccaaagcgcaagtgcatcagcctgaacagcgttggctttgatgtgaagcgggagatcttggtgccctctaagatgtcgtcatctgaacggcggtaccttcgaaagagattccgggcagagcttgattcggtgcgggatctcctcaagaagccagagtttgcagcccctgttcctctcaatcgggcacctgctttgtcatcctcagctgcacctcgagctaagaagccacagaagtctcagcgtggtgggaccaatgttatacgtggtgcaaagggacgattcttgcctacaaaaccgcggccggagacttccactgtgttatctgaagctgcagcgtttaagcagtgtgaagctattttgaagaagcttatgactcaaaagtatagtcatatattcaatgttccagttgatattgtgaagctgcaaattcctgattattttgacattgtgaagaccccaatggatcttggtactgtcaagaaaaagcttgaatctggttcatacacaagtccatcagattttgctgctgatgtccggctgacctttaacaacgctatggcttataatccgcgggggcatgctgtgcacgacatggccatccagctgaacaagatgtttgagagtcgatggaggccaattgagaagaaattggcttctgctgccactgagaaacatgttgaggttgacagggctgactcgaagaggaggaagacacctcctgtggaccgcagtgatgtgtcaatggagtgtgcacgacagacagagccagaaacaccgaagatgacagctgaagagagggaagcctttgggaactgcttggcatccatatctgatgagttacctcctcacatatttgaactgctacaacaatgcatcgacagcaatgcagatttgtctggggatggagagatagagattgacatccatgctgtcagtgatgacttgttatttgagctgaagaaacatgttgacaagtatttgcaagagaaagagcagagccagcaggtgaaatctgagccctccgagaatgaagctgtgaatgtatctggccttagccactcttctacaaatccttgcaaaggcggcgaacctatcgaagaggatgtggacatctgtggcaatgcctcacctatcatgctagacaaagatgcacaaatcaggaatagcaagtgtggtagtccaagtagttccagcagcgactctgaatcatcttctagcgattctgattcaggcagtgactctgaaagcgaatcagaaaaagttggcagccctggaaagcttgcgaaggggactaagaaacctgatcagctggtggagcaagaaaagagtgatgttattagtccagctgatgccaaccgtcctgctgctattgtggggcttcatggggaggacagtgagtcaaagcctgcaccagggggggaaaactcagaacccgatacacaagtctcaccagacaggctattgcgagcagcccttttgaggagccgttatgctgatgtgattgtcaaagctcgtggcattcttagtcagggtggagacaaacaggaggagctggaaaagctacagaaggaagagaaagagcgcttgttggctgaaggtactgcagccatggaggcttgtagagccgaagctgaagctgaaaagaagcgtaaacggaattttgagagggagaaggctcgtcaggccctacaggagatggagagaactgtagaaattaatgataacctccatctcaaggatttggaattgcttggaacagccacaacagaacatattgtaagctctgttgatgagactagtccagaacgctctcatgatggcatggccggctatcatccaggagctgtcaatcctttggagcaacttggactgttcataaaggtagacgatgaggaagacgacgagcagtgttccctgcattaaagaaagaagagaaaggagaaatcagctgatggtgctgtgtttttccatgccctgtcacgggctaggggctggtgccaacctattgatccaaagtgatcacctgttgcgggccatcatgtgtggcaatggttctaaactggggtggtgagagccgtccattttgttaaaaatatgcatgggaaggatgaagatcatcttgcatagtcatttgcttccaggaggcgcacaggaggtggagtaaaaacgaacgtatttatggtgcctagaggacggttttttcagccactgccaaaacggcttgaatgacgccaccgaagtagtggagttcaaatggctcattgtttgccgcaacctcaatttcaagcgggtttgttcagcggcttatagcttcttctctccttttgttgtctcatctgttttagattgtagaatttgggctagttgcttcctgctgtaaatccgaattttgatgtagtgacggaagtgctacctttttgttgagcatgatcgaaaagtttacaagaaaaatcgtttttttgtagatgaacgtccagtcttgtctgtagctacaatttcttgcgcaatcagtgtaacatccgttgtgtttata

SEQ ID NO: 132356 - DNA, 2189 bp, Zea Mays
cccgcgcgtcacgttcgcatcgcttctggttcgggtctcacctctcgcgatcaaagcagtagcgggttcagtggcttggcgaaggaaaaaaaaggaggaaaaaaaaatagcaaggctgtgcagcgaggagacgactcgactccaactgggaggcgaaaaataaaaaagaggataaggcgaggcccgaccgggcggccaccgcgctcccagatccgctccgctgccgtggagatccagctcccttgcgcgcctgagcgtggacgccggcgtctcgctcccggatcccgaccttggggttgcagctgcttcagatccagcgttaccagatctgtgacccgctggcgcctgggcacatgacaccgacggttttaatggagtttgggcagcagaggccaatgaaacggggatacgaggaaatggtcttcagggcagcctcttcccgtggttatgcagagactgttggcgagtcgggagttgcagctggtagtcctcttcgtgttgattctgaggactcatctgtgccaaagcgcaagtgcatcagcctgaacagcgttggctttgatgtgaagcgggagatcttggtgccctctaagatgtcgtcatctgaacggcggtaccttcgaaagagattccgggcagagcttgattcggtgcgggatctcctcaagaagccagagtttgcagcccctgttcctctcaatcgggcacctgctttgtcatcctcagctgcacctcgagctaagaagccacagaagtctcagcgtggtgggaccaatgttatacgtggtgcaaagggacgattcttgcctacaaaaccgcggccggagacttccactgtgttatctgaagctgcagcgtttaagcagtgtgaagctattttgaagaagcttatgactcaaaagtatagtcatatattcaatgttccagttgatattgtgaagctgcaaattcctgattattttgacattgtgaagaccccaatggatcttggtactgtcaagaaaaagcttgaatctggttcatacacaagtccatcagattttgctgctgatgtccggctgacctttaacaacgctatggcttataatccgcgggggcatgctgtgcacgacatggccatccagctgaacaagatgtttgagagtcgatggaggccaattgagaagaaattggcttctgctgccactgagaaacatgttgaggttgacagggctgactcgaagaggaggaagacacctcctgtggaccgcagtgatgtgtcaatggagtgtgcacgacagacagagccagaaacaccgaagatgacagctgaagagagggaagcctttgggaactgcttggcatccatatctgatgagttacctcctcacatatttgaactgctacaacaatgcatcgacagcaatgcagatttgtctggggatggagagatagagattgacatccatgctgtcagtgatgacttgttatttgagctgaagaaacatgttgacaagtatttgcaagagaaagagcagagccagcaggtgaaatctgagccctccgagaatgaagctgtgaatgtatctggccttagccactcttctacaaatccttgcaaaggcggcgaacctatcgaagaggatgtggacatctgtggcaatgcctcacctatcatgctagacaaagatgcacaaatcaggaatagcaagtgtggtagtccaagtagttccagcagcgactctgaatcatcttctagcgattctgattcaggcagtgactctgaaagcgaatcagaaaaagttggcagccctggaaagcttgcgaaggggactaagaaacctgatcagctggtggagcaagaaaagagtgatgttattagtccagctgatgccaaccgtcctgctgctattgtggggcttcatggggaggacagtgagtcaaagcctgcaccagggggtaagcatgaatttgtaggctggtatgtatgaggccgttgatcggtctctgcagtaagctggtcggatcatctgatcctttcccaatgaaacatttaggggaaaactcagaacccgatacacaagtctcaccagacaggctattgcgagcagcccttttgaggagccgttatgctgatgtgattgtcaaagctcgtggcattcttagtcaggtacaggactttgttaacttattatcgttctttattcttt

SEQ ID NO: 132357 - DNA, 2467 bp, Zea Mays
cccgcgcgtcacgttcgcatcgcttctggttcgggtctcacctctcgcgatcaaagcagtagcgggttcagtggcttggcgaaggaaaaaaaaggaggaaaaaaaaatagcaaggctgtgcagcgaggagacgactcgactccaactgggaggcgaaaaataaaaaagaggataaggcgaggcccgaccgggcggccaccgcgctcccagatccgctccgctgccgtggagatccagctcccttgcgcgcctgagcgtggacgccggcgtctcgctcccggatcccgaccttggggttgcagctgcttcagatccagcgttaccagatctgtgacccgctggcgcctgggcacatgacaccgacggttttaatggagtttgggcagcagaggccaatgaaacggggatacgaggaaatggtcttcagggcagcctcttcccgtggttatgcagagactgttggcgagtcgggagttgcagctggtagtcctcttcgtgttgattctgaggactcatctgtgccaaagcgcaagtgcatcagcctgaacagcgttggctttgatgtgaagcgggagatcttggtgccctctaagatgtcgtcatctgaacggcggtaccttcgaaagagattccgggcagagcttgattcggtgcgggatctcctcaagaagccagagtttgcagcccctgttcctctcaatcgggcacctgctttgtcatcctcagctgcacctcgagctaagaagccacagaagtctcagcgtggtgggaccaatgttatacgtggtgcaaagggacgattcttgcctacaaaaccgcggccggagacttccactgtgttatctgaagctgcagcgtttaagcagtgtgaagctattttgaagaagcttatgactcaaaagtatagtcatatattcaatgttccagttgatattgtgaagctgcaaattcctgattattttgacattgtgaagaccccaatggatcttggtactgtcaagaaaaagcttgaatctggttcatacacaagtccatcagattttgctgctgatgtccggctgacctttaacaacgctatggcttataatccgcgggggcatgctgtgcacgacatggccatccagctgaacaagatgtttgagagtcgatggaggccaattgagaagaaattggcttctgctgccactgagaaacatgttgaggttgacagggctgactcgaagaggaggaagacacctcctgtggaccgcagtgatgtgtcaatggagtgtgcacgacagacagagccagaaacaccgaagatgacagctgaagagagggaagcctttgggaactgcttggcatccatatctgatgagttacctcctcacatatttgaactgctacaacaatgcatcgacagcaatgcagatttgtctggggatggagagatagagattgacatccatgctgtcagtgatgacttgttatttgagctgaagaaacatgttgacaagtatttgcaagagaaagagcagagccagcaggtgaaatctgagccctccgagaatgaagctgtgaatgtatctggccttagccactcttctacaaatccttgcaaaggcggcgaacctatcgaagaggatgtggacatctgtggcaatgcctcacctatcatgctagacaaagatgcacaaatcaggaatagcaagtgtggtagtccaagtagttccagcagcgactctgaatcatcttctagcggtctgtgtctcatggtgtttatctgcatctctttatatcattatagacaattcttgtgtaaagaaagtgatgcttttcttcccagttttgtattgtaaattctttgagaacatggatattatctcttcatgtgttttttgggggttcttggtatcatattcctgtattagttggactctgggcagtgacatacaaatttggcaaggaactaaaagtagagcaatggtactctataaatgccatgaataccatgttttcccttttagcaattgtttagcaggatcttgaagttttttgaattgggctgttaaatttcaatgaagttgatgcaggacatcatgctgcataacccccatggccccatcctactataatttctatcagactaaaccctttagtaatagtataagctcctgcaaactaatacagaaccttaatagcatatataattctcctgaaacttttcctgttttgagatgttgaaacttgaaagtccaagatatttacaatgttgtcggtaatgcagattctgattcaggcagtgactctgaaagcgaatcagaaaaagttggcagccctggaaagcttgcgaaggtactacagtgatttggtattgggtgcttcagaaataaaatcttaatagtgattggattatgggctatttgctgtcaagtactttgtagttgaaatattactccatctagttacacttattttgtgtgtgttc

SEQ ID NO: 132358 - DNA, 1911 bp, Zea Mays
cccgcgcgtcacgttcgcatcgcttctggttcgggtctcacctctcgcgatcaaagcagtagcgggttcagtggcttggcgaaggaaaaaaaaggaggaaaaaaaaatagcaaggctgtgcagcgaggagacgactcgactccaactgggaggcgaaaaataaaaaagaggataaggcgaggcccgaccgggcggccaccgcgctcccagatccgctccgctgccgtggagatccagctcccttgcgcgcctgagcgtggacgccggcgtctcgctcccggatcccgaccttggggttgcagctgcttcagatccagcgttaccagatctgtgacccgctggcgcctgggcacatgacaccgacggttttaatggagtttgggcagcagaggccaatgaaacggggatacgaggaaatggtcttcagggcagcctcttcccgtggttatgcagagactgttggcgagtcgggagttgcagctggtagtcctcttcgtgttgattctgaggactcatctgtgccaaagcgcaagtgcatcagcctgaacagcgttggctttgatgtgaagcgggagatcttggtgccctctaagatgtcgtcatctgaacggcggtaccttcgaaagagattccgggcagagcttgattcggtgcgggatctcctcaagaagccagagtttgcagcccctgttcctctcaatcgggcacctgctttgtcatcctcagctgcacctcgagctaagaagccacagaagtctcagcgtggtgggaccaatgttatacgtggtgcaaagggacgattcttgcctacaaaaccgcggccggagacttccactgtgttatctgaagctgcagcgtttaagcagtgtgaagctattttgaagaagcttatgactcaaaagtatagtcatatattcaatgttccagttgatattgtgaagctgcaaattcctgattattttgacattgtgaagaccccaatggatcttggtactgtcaagaaaaagcttgaatctggttcatacacaagtccatcagattttgctgctgatgtccggctgacctttaacaacgctatggcttataatccgcgggggcatgctgtgcacgacatggccatccagctgaacaagatgtttgagagtcgatggaggccaattgagaagaaattggcttctgctgccactgagaaacatgttgaggttgacagggctgactcgaagaggaggaagacacctcctgtggaccgcagtgatgtgtcaatggagtgtgcacgacagacagagccagaaacaccgaagatgacagctgaagagagggaagcctttgggaactgcttggcatccatatctgatgagttacctcctcacatatttgaactgctacaacaatgcatcgacagcaatgcagatttgtctggggatggagagatagagattgacatccatgctgtcagtgatgacttgttatttgagctgaagaaacatgttgacaagtatttgcaagagaaagagcagagccagcaggtgaaatctgagccctccgagaatgaagctgtgaatgtatctggccttagccactcttctacaaatccttgcaaaggcggcgaacctatcgaagaggatgtggacatctgtggcaatgcctcacctatcatgctagacaaagatgcacaaatcaggaatagcaagtgtggtagtccaagtagttccagcagcgactctgaatcatcttctagcgattctgattcaggcagtgactctgaaagcgaatcagaaaaagttggcagccctggaaagcttgcgaaggtactacagtgatttggtattgggtgcttcagaaataaaatcttaatagtgattggattatgggctatttgctgtcaagtactttgtagttgaaatattactc

SEQ ID NO: 132359 - DNA, 206 bp, Zea Mays
tttgttttttttcatttttcagataagttcataagaatatccttggcaaagaaggaaagaaagccgagcacaactcctatcactttcttattagccatcaccacatcgatagctcggtcatcaagctgtttcaaggataataaaaaagttccagtgaactaagaggcatgaaaaacaccaagctaactaaaggaagcaacaaaggg

SEQ ID NO: 132360 - DNA, 195 bp, Zea Mays
atgcaagggacagtaagatgctattataatgacatacgaatggtgaatatcatgcaagttcagagaagtgacataagaatggtaaataccctacaagttcaggcaactgggaaagcagttaggtacttaagttggaatctcacatcagaaattcagaattacatcagtatcaaagacatgaatacgttttactaa

SEQ ID NO: 132361 - DNA, 177 bp, Zea Mays
gatgtcatctatatggaagcggcaggaggtggaagcactatatatgacacctctatcgctcttgttgattgctggggtcaacatgtgccgctgctgcacttggtgggcctagggaattctaggactctgggctggtttggtgggtagtgaaatttaaatagcaagtgattttctctc

SEQ ID NO: 132362 - DNA, 756 bp, Zea Mays
atggtgaagagaagcaagaagagcaagagcaagcgcgtcacgttgcggcagaagcacaaggtgctgcgcaaggtgaaggagcatgacatggaaaaaatggttacaaaggctgatccaagtaaacggattgtactacttcacaacaagatagatcttgttcctaaggaagcggtagagaagtggcttacatatctgagagaagaaatgccaacaattgcgtttaagtgtaatacccaagagcagcggaccaagccgggatggaaatcttcaaaactagataaaacaaacagcatcccacaaagtagtgattgccttggtgctgagaatctaattagattgctcaagaaatattccagaagccacgagctcaaactggcaattacggtgggtattgttggactccctaatgttggcaagagcagtctgatcaacagcctgaagaggtcccgagtggttaatgtcggttccactccaggggttactagatcaatgcaagaagttcaattagacaagaaggcgccgatggaggccatggagctcgtcgtcgcgctcaccgcctgcgccgactccgtcgcagcctgcaaccacgacgtcgccaactactacctcgtgcggctgggcgagatggcctcccccgcggggcccacgctgatgcaccgcgtggccgcctacttcgtggaggtgctcacgctgcgcatggttcatgcaaaagcatttaagtttgctaagttgcattctaagaacatgtatcaataa

SEQ ID NO: 132363 - DNA, 932 bp, Zea Mays
atggtgaagagaagcaagaagagcaagagcaagcgcgtcacgttgcggcagaagcacaaggtgctgcgcaaggtgaaggagcatgacatggaaaaaatggttacaaaggctgatccaagtaaacggattgtactacttcacaacaagatagatcttgttcctaaggaagcggtagagaagtggcttacatatctgagagaagaaatgccaacaattgcgtttaagtgtaatacccaagagcagcggaccaagccgggatggaaatcttcaaaactagataaaacaaacagcatcccacaaagtagtgattgccttggtgctgagaatctaattagattgctcaagaaatattccagaagccacgagctcaaactggcaattacggtgggtattgttggactccctaatgttggcaagagcagtctgatcaacagcctgaagaggtcccgagtggttaatgtcggttccactccaggggttactagatcaatgcaagaagttcaattagacaagaagatcagtgatcctgcgccgtggtgatcgcggccatcgttcgccgatggtctgcgtcgtcttcactcgtcagggaaccggctgtgacggcttggttctaacaggcgccgatggaggccatggagctcgtcgtcgcgctcaccgcctgcgccgactccgtcgcagcctgcaaccacgacgtcgccaactactacctcgtgcggctgggcgagatggcctcccccgcggggcccacgctgatgcaccgcgtggccgcctacttcgtggaggtgctcacgctgcgcatggtgcgcatgtggcccagtcgagatctggtcattagattcaatagtgtggtactggtggcatgtggcccagccgagatctgacagttcttagaaaaattcagctttcatttccaatcgttacagctttaaact

SEQ ID NO: 132364 - DNA, 92 bp, Zea Mays
ggcaatggaaagggctggcgttggcttcagagaaccaatctgcatgacgttgattctatcacccatatccttgacgaccaaatggaggtccc

SEQ ID NO: 132365 - DNA, 798 bp, Zea Mays
ggacgcaggcgaaggagtatggcggccccgtcattcgcgccaaacggacgaggatgggtggctcctgcagcagccgcgacggcgagcagggccagcgccgcccacgctgatccccggggcacaccgcccctgccacatcacctacgcagcccacgcgcaaccaggtctcctcgacccagatctctgccccaggagtggaggcgacgccgtaagcgccccaatgcggcgagcggcaatggccggtgcgtgcgcggacgtcgacgccgccgcctgggctccgggcggcgaggcgcgggatctgcggctagggttttggcgcgcaggaggattcgggagttgcttcggcgcgagggagtgggaacgaatagggagagctggagcagcggggcgacgaccgatgaggttggaactcagaagggggagggaaaaaaatcgaggggagcagagcacgcacggacgaggatgggcggggacggggataagatatggttccatcgatccattgcagggacagtgcaagcggccgggtccggcgacggagacgaagccgaggaagagaaggccttcttggtgccgagcgccgcggccttcccccacggcatgtccgccgccgccgctggcccgtcgctggccgtggccaagaaagaggagttcagcaagtcgccgtccaactcgccggcctcatcgggtggcacggacggtggctcgtcggctgtcccgtggccggagcagatccacgcgcagaacagcagcccgacgctgttagaaccgagtcgccaagccatccctctggagtga

SEQ ID NO: 132366 - DNA, 1491 bp, Zea Mays
aaaccgttggataaagacgctgcaaactgaatagggagcaagacggttccggagtccggactcaagtcccccaaaaatcccaatcgaacccgtccgcctatcgccccaaaccctcgcccagctcgaggtcctcgccgccggccgccggccgccgtctccgtccgaccgccgccatggctcgcaacgaggagaaggcgcagtcaatgctgaaccgcttcatcacgatgaagcaggaggagaagcgcaagccccgagagcgccggccctacctcgcctccgagtgccgggacctcgccgacgccgagcgctggcgctctgagatcctccgcgagatcggcgccaaggtcgccgagatccagaacgagggtctcggcgagcaccgcctccgcgacctcaacgacgagatcaacaaactcctccgcgagcgcggccactgggagcgccgcatcgtcgagctcggcggccgcgactactcccgcagctccaacgcgccgctcatgaccgacctcgacggcaacatagtcgccgtccccaacccctcgggtcgcggaccggggtaccgctactttggcgcggccaggaagctccctggcgtgcgggagctcttcgacaagccgcctgagatgcggaagcgacgcacccgctacgagatccacaagcgcatcaacgccgggtactacggatactatgacgatgaggacggcgtgctagagcgccttgagggccctgccgagaagcgcatgcgggaggagattgtttcagagtggcaccgtgtggaacgggtgcggcgggaggccatgaagggggtgatgagcggtgaggtggctgcggctggagggcgcagcggggaggctgctagagaggttctgtttgagggggtggaggaggaggtcgaagaggagaggaagcgcgaggaagagaagagagagagggagaaaggcgaggaagttgggagggaattcgttgcacatgtgccgctacctgatgaaaaggagattgagcgcatggtattagagaggaagaagaaggagctgcttagcaagtatgccagcgattccctgctggttgagcaggaggaggccaaggagatgctcaatgtccgacgctagaagacgactggccaattgaagctttcattgtgagctcaagacgagcactgaggtacaagaaggaacatcttttgaagtgctggcaccggggggaccaaagacattgttatgtaaaagaaaacaggttttgcctgaaatcacattttatgtgttttaatcagacttgagcgagtgatactggtgcctgttgacaaattttgacgaatgctaagcttgtggtattattggtgtgcctgtgtgccctgaacgaaggctagacttgtggtattgatgtgcctgtgtgcactgtaacttaactcgtatcatgtacagccattggctgcaatgcactgatcattgatcccttaaaatttcagtgatatagcaaaatctgatcgtatca

SEQ ID NO: 132367 - DNA, 1216 bp, Zea Mays
aaaacaaggaacataaggcgccagtctaggtcaaaaggcaatctcctttttccgctacgaacaactatttattaggctctggatatatagggaataagtgagtgtgatacatcagattttattcacctacgtggaattgcagtgagcactccttccattggtgtaggcacatagggtggacagaccaaaatatttctgctgatggcaacccatatcattctttacagtataaagaaagataccatgttgtctagagctaatagtttcagtcatcgtgaatggtacctcattggggactgggagtatatatagactaccagcctgcacccttcacttcacccaagttcagacttcaagccaagttagcttgcctcgaagattgccaatcatagctagccatgtcaagggacccacttgttgtaggcaacgtagttggagatatcttggacccatttatcaaatcagcatcactcagagtcctatacaacaatagagaactgactaatggatctgagttcaggccatcgcaagtagcttatgaaccaaggattgagattgctggatatgacatgaggaccctttacactttggtaatggtggatcctgactcaccaagtccaagcaatccaacaaaaagagagtaccttcactggttggtgacagatattccagaatcaacagatgtgagctttggaaatgaggtagtaagctatgaaagcccaaagccaagtgctggaatacatcgcttcgtctttgttctgttccgccaatctgtcaggcaaactatttatgcgccaggatggagacaaaatttcaacacaagagacttctcagcactctataatctaggaccacctgtggcctcagtgttcttcaactgccaaagggagaatgggtgcggtggcagacgatatattagatgatactcactccgttcttttttatttgtcgcgttttagtttaaaaataaactagcggacgacaaatattcgagaacggaggtagtattagaataacctcctctacatgaggactgacggaattctgtatgaggccaagcacaccgaatgggtagtaaacgctggaccttaatttctagactactttcccacctctacaagatttgactatgctagaaacgaatttcacttaccatgtgaaatgtgataaatatattccaactatatgttcctgcctccttgataatgaatactac

SEQ ID NO: 132368 - DNA, 2780 bp, Zea Mays
gccacagcaccagaaagattcctagtcctccactcctcctccacttgagagtgccccacgcagcccactgctgggcagaggccgcgcgcggcgccagcgccaccacccctttctcttctcccctctcccgtcacatcctccacccaatgtggcatataaatcccagatccagatctcccacctccctcttgtttgtatagccaggcagccagcctcaccatgtgatctctcgcaggtgtttcttgtgttgttccatccttattttgcattgatgtcaaggtttttttttttttgtcagacccatctacgggtggtgtctgggcgcagtggtttatcgatctcttccttgccttgtgctggtccggccgggagtggtggttcaagcgttttattgttgcagcagctcgcaaacaacgcgggaatcggtcgataaacctctgcatccagctctcactgcggttaagggcatgagctaggcagcagtgactgactgactgctgcttcttctttgcgttctgggttcctgctccttctgagtttattatgtctagtgtctccaagttatgcttgatattactctgcgcgtgatttgaccatcgaaataccgtcgtctttgtcttcatgtaccctggcgtttgcttggtccacgtattcttttattatacagtcgatgcttacacagtaaccataaattagatatctagcgtcgctttatgttttcttattgttaatggcatcttaatattttgtggttctgattagatgatgcttgcgtattttggggggtatagctagaggtatcttgggtagtggggataagttccttcttccttgctccagaaattatggttttgattggaattagggggtggacgcctagcggatcttgcttgctgccgtcatgcccttcgaatagattccagtttgttgtggcggtgagtcacattcaggacatgtctttttgtgctcagtgttgggtgtgtcctttacagctggtcgttagtgaatggactggtctaaacccaactatctatctctttaaataggcccttgattgggagggcccacgataacctcgtttggagccccagtcacacgacactataaatataggactaaggggtcgcaggaaaaactaactctagtacctcgccccaaaaccttagtccccagaggcccccatcgtctaggcgtcgtagtgtctggaaacgcgacaacctacagcggctcggatcccgatgccagctgcttctctgcagggcaacggtatgaagatagcaacaacaacaaagaggtgtgtttgctcattcctctcagtagatcagatctactcgtcatcgaggttttactttcagttacgaattagtattctagaaacttagtaatcgatcctaggcagtatagattctaacactcaggagtataccagcatactgagcagctatgtctttttctgttatatgctgaaaattgggttagcagccatctttgggttcaacaatattcaagagtcttattgcgggcagccaaacgcagtctttattcgaataactggtggtcattgcattgcgctgccatttcattcctttttatttaatctggcatcatagtttttgtagttttgtggtttgttctctgtttaagtgagagctaatttgagagcaagtgaattgtaggattgaagggattaaaatcatcttcctattcaaaattaaatagaaagaggattttagcccctcgtttccttccaattttcttgctcctaaacttgtcttaagggcttgtttgggagtaaggataatggaaagggcttgtttgggagtaaggataatggaggagattgaggggatataatacctcactattcatttttaaatattgagggattttagccacctctattccacttgcttccaaacatgtcctaaaagattatgtattactctcccggacgagttttttatgcataattttgtattgtttacaccacagttagaatcttcagagtaattgctattcttattgatgtgcatagcgccacaaggcttctgtttgctgccagaatatgtgtgatcgagtagggcagtaggcaaacatgtccatacaaaatgtgttattataggacatgctgatttccaaagacatgttacgacttcgtttggctttaatacatactggcttctactgcttctataatatagtccgaataactagctttaatccgaagcggacaattaatttatgttatggcttgacattcgtggtgcatggaataacggagtaagaactttgaggagacacaagatggtctcaaaaactgtaactcaagatctttttatctcttagacgtatttccttttcaaccaagataatttatttgcagacccctttcaaccttgtttggatattcttgtattcaccctaatctatatgtattgaagtagattagggtgaatacgagagcatatgcctttgatgtgacatttgaaatgccactcatttacccgtttcttttgctgtaaacaattgcatatatttgggtcagagaccttgacctggcaattatcaattattttagtttcttttttttacgtatcaattattctaagctactgtcaggtactactttggtgcagttaaatctacggaggcaaagagaaaagaggttcacttgaggaatagtctataggaatatatgaaggcccttctctgcctttgcaattaaccttacttatcttgtgtacatttgtaattatgagatataagcagcagattacttc

SEQ ID NO: 132369 - DNA, 102 bp, Zea Mays
gtggtgaccaacttggaagggcagttcatatgtcaagttgggagttctgaggaaggattgtttaatggccaatttgatgctgccctatttgaccaccctcaa

SEQ ID NO: 132370 - DNA, 2877 bp, Zea Mays
acgaactggcgtgccagtgccagtgccgagcgcccgagcccttactcctcttcttccgaccccccgctggcttggaaaaaaggggaagaaaactcgcgcagtcggtcaccgaagggaggagcgcggtcgaggtgccgcccacacggagctgcgaggtgtttgtaggatctcctaggtgagcccctgctgcttggagacagccatggccaccggcgtggctccagctcctctcccacatgtcagagtgcatcatgggggcgtcgggttcaccaggagcgtcgattttgcgaaggtcttgtctgctcccggtgccggcacgatgagggcaagctcctctagaggcagggcgctcgtggcgaagagctctagtactggctcggagaccatggagctcgagccatcttcagaaggaagcccacttttagtacccaggcagaagtactgtgaatcaacacaccagacaaggaggaggaaaactcgaactgtgatggtggggaatgtgccacttggcagtgatcatcccataaggattcaaaccatgacgacttcagataccaaggatgttgcaaaaacagtagaggaggtgatgaggatagcagataaaggagctgatcttgttagaataacagtccagggtaggaaggaagctgatgcctgctttgagatcaagaacactctggttcagaagaattacaacattccactagtggccgatattcattttgctcctacggtagccctaagggtggcagaatgttttgacaaaattcgtgtgaacccaggaaattttgctgatcgtcgtgctcaatttgaaaagctggaatatactgacgacgactaccaaaaagagctagagcatattgagaaggtgttttctccattagttgagaaatgcaagcagtatggaagagcaatgcgaataggaacaaatcatggtagtctttctgaccgcataatgagctactatggtgattctccacggggaatggttgagtctgctttggaatttgctagaatatgtcggaagttggacttccacaactttgtattttcgatgaaagctagtaaccctgttatcatggtccaagcatatcgcctgcttgtggcagaaatgtataacctaggatgggattatcccttgcacttgggtgttacagaagctggagagggtgaagatggaaggatgaaatctgctattggcattgggacactgctaatggatggtttgggtgatacaatccgtgtctccctcacagaaccaccagaagaagagattgatccttgccaaaggttggcaaatcttgggacgcaggccgcaaaccttcaaattggggtggccccatttgaagaaaagcacaggcgttattttgatttccagcgtaggagtggtcaattgcctttgcagaaggagggtgaggaagttgactacagaaatgtcctgcatcgtgatggttctgtactgatgtcagtttccctggatcagttgaaggctcctgatctcctttataggtctcttgcagcaaagcttgtggttggcatgcctttcaaggatctggctactgtagattccattcttttgagggagctcccccctgtagaagatgctgaagctaggcttgcactcaaaagattagttgacatcagcatgggcgtactggcccccttatcggagcagttgacaaagccactcccacatgcaattgtacttgtcaacctcgacgaattgtcaagtggtgcacacaaacttttgccagaaggcactagactagctgtcactcttcgtggtgatgaatcatacgagcagctagatattcttaaggatgttgatgatataacaatgttgttacataatgttccatatggtgaggagaagacaggcagggtgcatgctgctaggaggttatttgagtacttacaggccaatggcttgaacttccctgtaattcatcacataaatttccctgaaaccattgacagagatggtcttgtcattggtgctggggccaacgttggtgctctcttagtcgatggtcttggtgatggtgtattccttgaagctgctgaccaggaatttgagtttctgagggacacatctttcaacttgctccaaggttgcaggatgcgcaacacaaaaactgaatatgtgtcttgtccttcctgcggccgaacactctttgaccttcaggaaatcagcgctgagattagagaaaagacctctcatctgccaggtgtctcgatcgctatcatgggctgtattgtcaatggaccaggagagatggctgatgccgattttgggtacgttggaggcgctcccggaaagatcgacctttacgtcggcaagaccgttgtgcagcgcgccatcgccatggaaggtgccactgacgccttgatccagctgatcaaggaccatggccgatgggtggatcctcctgccgaggagtagggctgtaggctgtagccaagtctgtagtttatatattctgtaaagcgaaacacgcaatgcagtaactgagcatacgatgtacatccctacacattttgtacatttattgagatctgagaaataaactagaaaccgtcggtgacggcatgtctgcagcaccccaaatgaagcacatacgatttacatattagtagtagcccatgtgagcaagacataatcctatacaatcttgaagtctgcattatatattttttccaacagaggtagcttagaaagtttttcgagcaatgcaattttgttcgttactttccgtttactttttcttttttttagcgttgagggttatataaatagatttataatacaaagagaaaaacggtcgtgattacacaacaccaaaatttttattgtggtcttgagagtttgtgatgatc

SEQ ID NO: 132371 - DNA, 1380 bp, Zea Mays
ttgtgtgcctcctgtgaggctagccgtgaccgacgaagtagcagggtggcaaacatggctcttcttctcacaggacgcgtgctcgtggtggcgtgcgtcctcgtcgcgtgctcctcctcctgcggctgccctgtagcggcggcggcggcgatgacgacggtggacggcatcacggccatctacagcttcggggactcgataacggacacgggcaacctcgtccgcgaaggcgccaccgacatgctgcgctacatcggcagtcgtccctacggcatcgacttgctgcgcggcgtcccgaccccgaccggccgctgctctaatggatacctcatgatcgatttcctcgccaagtaccttggccttcccctcctcaacccgtacctcgacaaggcggcggatttcacgcacggcgtcaacttcgcggtcgccggagccaccgccctcggcgcgacggcgctcgccgagagaggggtcaccatgccccacaccaacagctccctcgacgttcagctccagtggttcagggacttcatggcctccgccaccacaaactctagccaagaggtccgaaggaagctagcgagctcactggtgatgctggagatcggtgggaacgacttcaactacgccttcctccagctccagacccggccaacgggcggcggatacggcagcggcaacgtcacccgtatagtggaaatcctagaacaggtcggggcgctcgtgcctcaagtcgtgcaatccattacaaacgcagccaaggcgttgctggagatgggcgcggtccgcgtggtcgtcgccggcaacctcccgatcgggtgctcgccggcctacctctcgggggcgaacgtcacggagccggccgcgtacgacgccgacggctgcctggccgtcctcaacggcttcgcggagctgtacaacgcggcgctgcggggcgccgtcgcgggcctgcagcgggcgcacccgcgcgccgtcgtcgcgtacgcggactacttcgccgcgtacgccagggtgctccgcgaggcgcgcgcgcgcgggttcgacccggccaggacgcggacggcgtgctgcggggcacgggaagccgcggcgtacggcttccgactcggcaggttctgcggggcgccccggacggccgtgtgcaaggaccgggcccggtacgtgagctgggacggcgtgcacccgacgcagcatgcgtacgaggccatggccgagctgctctaccgcggggggctcgcgtgcccgccgccgatcaactggccggggtagacgatgcagggggcgaacgcaccgttgaattgataccatatgcacgctctctctctctctcgctttgatagtgtatccgtgtttgttggaaatgttatacgtaccggtgtc

SEQ ID NO: 132372 - DNA, 832 bp, Zea Mays
gtatgaagaaggattaaagctgaggccgaatggttcgctaggtttactctcccctcctcttccacggccgcgcctgcgacacccatccgccgccacgccatggccaagtacaacgtggtgcagaagaacaagcgccagtgcaatcaggaccgcaagcgcgccgcgcatggggagcccgggaccggcaagctcaagcagcggaccgcgcccgtctccatgtccggcaagcggaagaagaagctcgagcgccgcctcaaccggaagcagaaagaggctgcgatgattaaggcgctggagaacaacatgggggatgtcgacatggtctcagttgaagagtcttcagaagctgcaaagggcaagtcccaagtgaagttcagtgtgaagaaaaactcaagaatacagataaagagattaaagggcaaaggcaggaagaaagccaaaaatgcaaaaccacctgccaaggagaaagttgatgccatggtagaatgacagttgatgccatggtagcatgacggacaagactacatacatccatccctttgtatgttttctcagagtttgcagcatggaccgacctcaccgaacactggcgcgtgtctcttgcatcttctgcctgaatgttaaatagaagctacttaggcctggtgttaatgtacttcaaacatgaatctacctttaatagtggactatgcgaatttgttcatgttcttattgcgtttatggagatgcttcattgtgaatgtcggcttctatagtaagcaactagcataatcttatcaccccccccccccccccccccccccctccctccctccccagcatcggatggcaa

SEQ ID NO: 132373 - DNA, 706 bp, Zea Mays
gtatgaagaaggattaaagctgaggccgaatggttcgctaggtttactctcccctcctcttccacggccgcgcctgcgacacccatccgccgccacgccatggccaagtacaacgtggtgcagaagaacaagcgccagtgcaatcaggaccgcaagcgcgccgcgcatggggagcccgggaccggcaagctcaagcagcggaccgcgcccgtctccatgtccggcaagcggaagaagaagctcgagcgccgcctcaaccggaagcagaaagaggctgcgatgattaaggcgctggagaacaacatgggggatgtcgacatggtctcagttgaaggtgagagagattctagggccgattgcttgtttcgatccaattaggtctgtttctggagaatttggtgtagcggtgattgcaaatgattgacctagatcggctacttggacctggacgtttagtattaattgcaacagttaaagagtgtggttcgtgtatttgtacgatgattagtggctctgtaaagatttgtagcagtcccgtttcaaaagaaagttacacttgagggataactgaatgtagtgagctcattccatcatgtttgcgtctgagagtgcaaacttgaccctacaactggtgagcaaattagatgctcgtatccatggctattgcatcgttgatcatcaaaaaaagttgattgtcttgttgaca

SEQ ID NO: 132374 - DNA, 833 bp, Zea Mays
atggtcaaaatcaccgatcaaatcgaagaggaagaagaggatgaagacagtgatgataacacaaccgaccctaatgctggtgatgatggcagccatggtgatgctggattatatggtgtaggagggagtggtgcaggagggagtggtacgggagggagtggtgcaggagattggaggtccactagaggaagtcggttcacccattccacacaagattcttaccatgatgcacctcattcacagcgggggacaataagtggccggcgtcgttcggttccatttcctgtccaagatggaatacgtagctcaagtagttccggttcttctaactatccgactggacaagacctagtctataacccttatgcatggcaatggcaaccgagtcagcgaacctatggaccccctctaccatcaggcgaagcaccaccatcgatcatgtatgggtatggaaactatggacctccaccaccatattcaaatttatcaaatatgtatccaccgggaccacaatatgggtatggacaagttcccgctgcaccgacctatcactatcagtatgacggattggatcaatatcacgatccttccaacatacttgagtactatcactatgactcgagctgaacatgtgagtattgtgaaataagtcgacctatgtgtcgttgcctcgttggagaggtgtaaaagaacttgtatttgagtattgcgaagttcgctggatgtttattgcatgagaactggagtttgtggttgcatatgtatgttgtatgttatttagatgaactcatgttgtgtggatcaattaatatttactgtacaatgtgaattga

SEQ ID NO: 132375 - DNA, 1929 bp, Zea Mays
cccaccttcctctcttctcccctcacccctttctggctttctcctccgccgaggccccgagtcctgccggaattctagatcccggaggcaacttgccacgggctcctccgctccggtcgctgaatcgtactatcgtgctctcgacagaaagcccggccgaaacccagccggaccaagccctgttcgccgtgcgcgcggtgccccgggccagatctgcgagatctgcaccgacaccgctacgcctatcacgagcctgtaggtggatgctctcgtgatctctcggagtcccctggactgagcggcatctcggcggaggcgtagcctgcttagctggtggcctgccgagatgcagcggaatggggtggtggaatgcagcgtgtgccactcccgggtggtggtgccgagtccccggagcgtgtccagggcatacgacaagcaccgcagcaagatgtcgtccaagttccgcgcgctcaacgtcttcctcgttgtcggcgactgcatccttgttggtctccagcccatcctagtgttcatgtcaaaggttgatgggaagttccagttcagtcccatcagtgttaactttctgaccgaggttatgaaagtcatctttgctattgtgatgcttataattcagtctagaaagcaaaaggttggagaaaagccactcttggcacgttcaaccttcatacaggcagcccgtaacaatgtacttctagctgttcctgctcttctgtatgccatcaacaattacttaaaattcatcatgcagttgtacttcaatcctgcgactgtgaaaatgttaagtaatctaaaggtactggttatagctgttcttctgaaatttataatgagaaggagattctcagttattcagtgggaagctcttgctttattgcttattggaatcagcatcaatcaacttcgaactgtacctgcgggcaatacagcatttggtcttcctgtcactgctattgcatacatatatacattgatttttgtaactgttccttcaatggcttctgtctacaatgaatatgccttgaaaagccaatatgacactagcatttatcttcagaacttgtttctgtatggatatggagcaatattcaacttccttggcattctaacgaatgtcattttgcagggccagagagttttaatattcttcgaggacattcgagggccacgatgtttctcatatgtaataatgcagcacaaggcattctatcttcattcttcttcaagtatgcagacacaattttgaagaagtattcgtcaactgttgccacgatatttactggcctagcttctgctgcatttttggggcataccttgaccattaattttctcctgggcatatcagtggtgtttatttcaatgcaccagttcttctctccacttgctaaagtcaaagatgacaaaccagctgacttaatagagttggaagacacacaaaatcaccggtcatccgaatcttcttttgtaaatatgactgctggtgctgctgttgatgcgagccataggattggaactgatgagaggcaacccctgttgcctacatgaactagtttcttgaggtagggatagatgactctttttttgcggtgtgagcagcaggtttggtgtagcattgtaagttgaataaactattgtacactgtaaaggcaaaggaaggaaagaactaccaacatcttctccaatttctttcatttttgggacgaggccggtcggtggcctgccatctgtggccgtgggagtgacagagcagcatacattttgataggcgtataattcaatagggattttccagatacggcacttgtaacaaaattttcttggaggtgtatatgaacaacggcgatatgacaatcttttctgtacggaacatttatactattgagtgattgatttactattactatgttgtta

SEQ ID NO: 132376 - DNA, 1925 bp, Zea Mays
cccaccttcctctcttctcccctcacccctttctggctttctcctccgccgaggccccgagtcctgccggaattctagatcccggaggcaacttgccacgggctcctccgctccggtcgctgaatcgtactatcgtgctctcgacagaaagcccggccgaaacccagccggaccaagccctgttcgccgtgcgcgcggtgccccgggccagatctgcgagatctgcaccgacaccgctacgcctatcacgagcctgtaggtggatgctctcgtgatctctcggagtcccctggactgagcggcatctcggcggaggcgtagcctgcttagctggtggcctgccgagatgcagcggaatggggtggtggaatgcagcgtgtgccactcccgggtggtggtgccgagtccccggagcgtgtccagggcatacgacaagcaccgcagcaagatgtcgtccaagttccgcgcgctcaacgtcttcctcgttgtcggcgactgcatccttgttggtctccagcccatcctagtgttcatgtcaaaggttgatgggaagttccagttcagtcccatcagtgttaactttctgaccgaggttatgaaagtcatctttgctattgtgatgcttataattcagtctagaaagcaaaaggttggagaaaagccactcttggcacgttcaaccttcatacagcccgtaacaatgtacttctagctgttcctgctcttctgtatgccatcaacaattacttaaaattcatcatgcagttgtacttcaatcctgcgactgtgaaaatgttaagtaatctaaaggtactggttatagctgttcttctgaaatttataatgagaaggagattctcagttattcagtgggaagctcttgctttattgcttattggaatcagcatcaatcaacttcgaactgtacctgcgggcaatacagcatttggtcttcctgtcactgctattgcatacatatatacattgatttttgtaactgttccttcaatggcttctgtctacaatgaatatgccttgaaaagccaatatgacactagcatttatcttcagaacttgtttctgtatggatatggagcaatattcaacttccttggcattctaacgaatgtcattttgcagggccagagagttttaatattcttcgaggacattcgagggccacgatgtttctcatatgtaataatgcagcacaaggcattctatcttcattcttcttcaagtatgcagacacaattttgaagaagtattcgtcaactgttgccacgatatttactggcctagcttctgctgcatttttggggcataccttgaccattaattttctcctgggcatatcagtggtgtttatttcaatgcaccagttcttctctccacttgctaaagtcaaagatgacaaaccagctgacttaatagagttggaagacacacaaaatcaccggtcatccgaatcttcttttgtaaatatgactgctggtgctgctgttgatgcgagccataggattggaactgatgagaggcaacccctgttgcctacatgaactagtttcttgaggtagggatagatgactctttttttgcggtgtgagcagcaggtttggtgtagcattgtaagttgaataaactattgtacactgtaaaggcaaaggaaggaaagaactaccaacatcttctccaatttctttcatttttgggacgaggccggtcggtggcctgccatctgtggccgtgggagtgacagagcagcatacattttgataggcgtataattcaatagggattttccagatacggcacttgtaacaaaattttcttggaggtgtatatgaacaacggcgatatgacaatcttttctgtacggaacatttatactattgagtgattgatttactattactatgttgtta

SEQ ID NO: 132377 - DNA, 1918 bp, Zea Mays
cccaccttcctctcttctcccctcacccctttctggctttctcctccgccgaggccccgagtcctgccggaattctagatcccggaggcaacttgccacgggctcctccgctccggtcgctgaatcgtactatcgtgctctcgacagaaagcccggccgaaacccagccggaccaagccctgttcgccgtgcgcgcggtgccccgggccagatctgcgagatctgcaccgacaccgctacgcctatcacgaggtggatgctctcgtgatctctcggagtcccctggactgagcggcatctcggcggaggcgtagcctgcttagctggtggcctgccgagatgcagcggaatggggtggtggaatgcagcgtgtgccactcccgggtggtggtgccgagtccccggagcgtgtccagggcatacgacaagcaccgcagcaagatgtcgtccaagttccgcgcgctcaacgtcttcctcgttgtcggcgactgcatccttgttggtctccagcccatcctagtgttcatgtcaaaggttgatgggaagttccagttcagtcccatcagtgttaactttctgaccgaggttatgaaagtcatctttgctattgtgatgcttataattcagtctagaaagcaaaaggttggagaaaagccactcttggcacgttcaaccttcatacagcccgtaacaatgtacttctagctgttcctgctcttctgtatgccatcaacaattacttaaaattcatcatgcagttgtacttcaatcctgcgactgtgaaaatgttaagtaatctaaaggtactggttatagctgttcttctgaaatttataatgagaaggagattctcagttattcagtgggaagctcttgctttattgcttattggaatcagcatcaatcaacttcgaactgtacctgcgggcaatacagcatttggtcttcctgtcactgctattgcatacatatatacattgatttttgtaactgttccttcaatggcttctgtctacaatgaatatgccttgaaaagccaatatgacactagcatttatcttcagaacttgtttctgtatggatatggagcaatattcaacttccttggcattctaacgaatgtcattttgcagggccagagagttttaatattcttcgaggacattcgagggccacgatgtttctcatatgtaataatgcagcacaaggcattctatcttcattcttcttcaagtatgcagacacaattttgaagaagtattcgtcaactgttgccacgatatttactggcctagcttctgctgcatttttggggcataccttgaccattaattttctcctgggcatatcagtggtgtttatttcaatgcaccagttcttctctccacttgctaaagtcaaagatgacaaaccagctgacttaatagagttggaagacacacaaaatcaccggtcatccgaatcttcttttgtaaatatgactgctggtgctgctgttgatgcgagccataggattggaactgatgagaggcaacccctgttgcctacatgaactagtttcttgaggtagggatagatgactctttttttgcggtgtgagcagcaggtttggtgtagcattgtaagttgaataaactattgtacactgtaaaggcaaaggaaggaaagaactaccaacatcttctccaatttctttcatttttgggacgaggccggtcggtggcctgccatctgtggccgtgggagtgacagagcagcatacattttgataggcgtataattcaatagggattttccagatacggcacttgtaacaaaattttcttggaggtgtatatgaacaacggcgatatgacaatcttttctgtacggaacatttatactattgagtgattgatttactattactatgttgtta

SEQ ID NO: 132378 - DNA, 1888 bp, Zea Mays
cccaccttcctctcttctcccctcacccctttctggctttctcctccgccgaggccccgagtcctgccggaattctagatcccggaggcaacttgccacgggctcctccgctccggtcgctgaatcgtactatcgtgctctcgacagaaagcccggccgaaacccagccggaccaagccctgttcgccgtgcgcgcggtgccccgggccagatctgcgagatctgcaccgacaccgctacgcctatcacgagcctgtaggtggatgctctcgtgatctctcggagtcccctggactgagcggcatctcggcggaggcgtagcctgcttagctggtggcctgccgagatgcagcggaatggggtggtggaatgcagcgtgtgccactcccgggtggtggtgccgagtccccggagcgtgtccagggcatacgacaagcaccgcagcaagatgtcgtccaagttccgcgcgctcaacgtcttcctcgttgtcggcgactgcatccttgttggtctccagcccatcctagtgttcatgtcaaaggttgatgggaagttccagttcagtcccatcagtgttaactttctgaccgaggttatgaaagtcatctttgctattgtgatgcttataattcagtctagaaagcaaaaggttggagaaaagccactcttggcacgttcaaccttcatacagcccgtaacaatgtacttctagctgttcctgctcttctgtatgccatcaacaattacttaaaattcatcatgcagttgtacttcaatcctgcgactgtgaaaatgttaagtaatctaaaggtactggttatagctgttcttctgaaatttataatgagaaggagattctcagttattcagtgggaagctcttgctttattgcttattggaatcagcatcaatcaacttcgaactgtacctgcgggcaatacagcatttggtcttcctgtcactgctattgcatacatatatacattgatttttgtaactgttccttcaatggcttctgtctacaatgaatatgccttgaaaagccaatatgacactagcatttatcttcagaacttgtttctgtatggatatggagcaatattcaacttccttggcattctaacgaatgtcattttgcagggccagagagttttaatattcttcgaggacattcgagggccacgatgtttctcatatgtaataatgcagcacaaggcattctatcttcattcttcttcaagtatgcagacacaattttgaagaagtattcgtcaactgttgccacgatatttactggcctagcttctgctgcatttttggggcataccttgaccattaattttctcctgggcatatcagtggtgtttatttcaatgcaccagttcttctctccacttgctaaagtcaaagatgacaaaccagctgacttaatagagttggaagacacacaaaatcaccggtcatccgaatcttcttttgtaaatatgactgctggtgctgctgttgatgcgagccataggattggaactgatgagaggcaacccctgttgcctacatgaactagtttcttgagcaggtttggtgtagcattgtaagttgaataaactattgtacactgtaaaggcaaaggaaggaaagaactaccaacatcttctccaatttctttcatttttgggacgaggccggtcggtggcctgccatctgtggccgtgggagtgacagagcagcatacattttgataggcgtataattcaatagggattttccagatacggcacttgtaacaaaattttcttggaggtgtatatgaacaacggcgatatgacaatcttttctgtacggaacatttatactattgagtgattgatttactattactatgttgtta

SEQ ID NO: 132379 - DNA, 1286 bp, Zea Mays
ataatggcaaatttctcgtcgaataggtcagtgtgcacgcgtgaccgcgaaaagttgtttcgacctcctcggctgctgctttccgctgacctcgccgtgccattgagatgtcatagaacctgccgagccggtcgcaggcgcgaggagaatggggacggaggccgacgccgcagccgtggattcgcttcggtcgcagatcccgttccagaccgacggggagctcatcctcccgccgcgcgatgtggggctcgtcctcgtcgacctctgcaacggcttctgcaccgtcggcgccgggaacctcgctcctgttgcgccaaataagcagataagtaaaatggtggaagaggccgctaggctctctaagctgttctgtgatagaaacctgccgatctttgcattcctggatacccattatccagataagccggagccaccgtatcctcctcactgtatcattggtactggggaggagaacttcgttccagacctggagtggttggaaaaggagccaaatgtgactataaagaggaaaagttgtattgacggttacatcagctgcatagaggaggacgggtctagtgtttttgttgactgggtgggaaaatatcagatcaaaactgtcttggtactcgggatatgcacggacatctgtgttttggattttgcaagctcaactctggctgctcgaaatattgaccgagtgcctccattacgagatgtcgtgatttattcagaggggtgtgctacatatgaccttcctgttgagatcgctatgaatatcaaaggagctcttgcccatcctcaggacctgatgcatcatattggactctatatggccaaaggaaggggtgcaaaggttgttgacagggtggttattgaaccttgaataaaaaaaacttccctcatcgtagtgatgttgctagagtttcctgtcttctcatccttccattgtaacaatcagatatatatgcgtcttagcataaagttgttgagatactaatgctagcgacaactatgttgacttgtcgagtatgtagagatgggctcatcattttgtggtgagcttgtacatatttcctgagattactttgtcctgccaaacatgcgccagttctccattggttgctaatgttcggctctgggattgtatattcgtatttaataaaagtactccctcctattccaattcgaattataggatattttgattttttttaatatatgacttttgctatctacagtattcgatatctaaatacataacaaaatatatcaaaaaggcaaaa

SEQ ID NO: 132380 - DNA, 1592 bp, Zea Mays
cctgattagggtttatggcgtgctgacttgggccggcctcaaaactgggctcagcggggagtgtgtacagtccataaacggcccaaaagttgaaagaaaagaaaaaaaagtaatgaaatccaacgggattttccggcatctagcgagtacgactagcgccccacgctgccgacccgatccaaaatccgaccgttgtgcagcgcaggagcgctccccttctcctcccttctgaacagcttttccgcccgtctccactgttcactctccagttgcgacttgcgagtcttcctgcaactagcgcgcacaccgaattgttggcaagagagaaacccttcctcgtcccgttcaaccggcgccgccgactcgcgtgttcctccccgcgtcctcgttctccttgctgctggacccgctagtggggatcgacctgatttctcctgtgctgtcaattggatattacccaggctttcaaggtagaaaagaagctttttgttccatcatggccttatcaactccagcgtctattttggttgacgagaaccaacagataaatagaggtaagagggccgatggaccaagggccaaagggctgaagccatccgagaatcctggcaatcaagggaggagagctcttaaggatttgtccaacttctctaaaggcactggtttgaaggacacttccaccctgaaagagaagtcccagcagaagcctcgtagtaatgtggccaacactattaaaggcaatgctttgaaggacaagcccatcctgaaagagaagtccacccaggaacagaggtcaaaagctcttaagaacccaatgaaaattttagttgatgaagagatcaaaatgtgccatgagtgggctaaggatggggtggagggatttcactcaacacaaaataattctcaaaagttggataaggatctgctagacaaacgtgtcaagaagaaagtggcggcagtaaactcagccttgtgtggttggccagatacagtatttgattctctaatgtatccatctatggaggttgctgagcttttttatgaacaaaacgtgctggaggtggaacctgagattctcccggacatcagttggcgtctctctagttcagtagatggtaaagcaaagattgatgaagaccgtcttaccgatgctgagcttgaccagtaccattctttggagaacaatccaattatttttgagctgagagacgagccagcgatcccgcagctgggagtgtattgaagaatctgtgccagcaggacagaaagctctgtttgcttgctgcttgctctggagtctggagttgtctagtctagaattctagtaggtcttgaacctggtgttttccccagctatgttctagtgggatgttggtgatgtaggatttcagtttgagtactggtaccagttccagctgaagcgacagccttatggctgctgatgggtgatggttgtggaacaacgggcgatataattctaatattttcagcaaactagtctgtggtctctatatttattctcgtgaatcctaaacagtgctaagttttttttggccctaatctatggtctctataaaatcgatattattttt

SEQ ID NO: 132381 - DNA, 1573 bp, Zea Mays
cctgattagggtttatggcgtgctgacttgggccggcctcaaaactgggctcagcggggagtgtgtacagtccataaacggcccaaaagttgaaagaaaagaaaaaaaagtaatgaaatccaacgggattttccggcatctagcgagtacgactagcgccccacgctgccgacccgatccaaaatccgaccgttgtgcagcgcaggagcgctccccttctcctcccttctgaacagcttttccgcccgtctccactgttcactctccagttgcgacttgcgagtcttcctgcaactagcgcgcacaccgaattgttggcaagagagaaacccttcctcgtcccgttcaaccggcgccgccgactcgcgtgttcctccccgcgtcctcgttctccttgctgctggacccgctagtggggatcgacctgatttctcctgtgctggctttcaaggtagaaaagaagctttttgttccatcatggccttatcaactccagcgtctattttggttgacgagaaccaacagataaatagaggtaagagggccgatggaccaagggccaaagggctgaagccatccgagaatcctggcaatcaagggaggagagctcttaaggatttgtccaacttctctaaaggcactggtttgaaggacacttccaccctgaaagagaagtcccagcagaagcctcgtagtaatgtggccaacactattaaaggcaatgctttgaaggacaagcccatcctgaaagagaagtccacccaggaacagaggtcaaaagctcttaagaacccaatgaaaattttagttgatgaagagatcaaaatgtgccatgagtgggctaaggatggggtggagggatttcactcaacacaaaataattctcaaaagttggataaggatctgctagacaaacgtgtcaagaagaaagtggcggcagtaaactcagccttgtgtggttggccagatacagtatttgattctctaatgtatccatctatggaggttgctgagcttttttatgaacaaaacgtgctggaggtggaacctgagattctcccggacatcagttggcgtctctctagttcagtagatggtaaagcaaagattgatgaagaccgtcttaccgatgctgagcttgaccagtaccattctttggagaacaatccaattatttttgagctgagagacgagccagcgatcccgcagctgggagtgtattgaagaatctgtgccagcaggacagaaagctctgtttgcttgctgcttgctctggagtctggagttgtctagtctagaattctagtaggtcttgaacctggtgttttccccagctatgttctagtgggatgttggtgatgtaggatttcagtttgagtactggtaccagttccagctgaagcgacagccttatggctgctgatgggtgatggttgtggaacaacgggcgatataattctaatattttcagcaaactagtctgtggtctctatatttattctcgtgaatcctaaacagtgctaagttttttttggccctaatctatggtctctataaaatcgatattattttt

SEQ ID NO: 132382 - DNA, 1254 bp, Zea Mays
cagtacacagagggagacgaaccgggagcccctggccacaagtctccccggcgagtcctccaccacaagctcgcccggcagctcactgattgctcgagttgcgtgctcgcgcaggcgacttatatgcaccactcgcccccgctggatctcccctcccggcctcccctcccttgccgtccacttcttcctccaccacagtcatcagtggcgttatcctcttcgttctcgcctccctggttgttgttggctgggtgttggcgagctgggagtagagaccgagaagtggagcggccatgaagatccagtgcgacgcgtgcgagggcgcggctgccacggtggtgtgctgcgccgacgaggccgcgctgtgcgcgcgctgcgacgtcgagatccacgccgccaacaagctcgcgagcaagcaccagcgcctcccgctcgaggcgctctccgccaagctcccgcgctgcgacgtctgccaggagaaagcggcgttcatcttctgcgtggaggaccgggcgctcttctgccaggactgcgacgagcccatccacgtcccgggcacgctctccgggaaccaccagcgctacctggccaccggcatccgcgtcggcctcgcctcggcttccgcctgcagcgacgcctgcgacgcccacgactccgaccaccacgccccgcccaaggccaccatcgagccaccgcacgccgccgtctccgccgcggtgcagcaggtgccctcgccgccgcagttcctgccgcagggctgggccgtcgacgagctcctgcagttctccgactacgagtccagcgacaagctgcacaaggagccgacgctcgggttcaaggagctggagtggttcgccgacatcgacctcttccacgagcaggcgcccaaagccagcaggacgttggcggatgtgccggagcttttcggataccaggcggcgaacgacgcggcgtactacaggccggccaaaccgccgtcggcggcgctggggttcgccagagcgaagaaaggcccggatcgaggtcaccgacgacgaggattacctcatagtccctgatcttggttaaataagagagcgcaggagttttgtttcgtctcctgatgtgtacggtgtaccagagaagaattttactgtgtacaagctagtgtcaagtgttgtgcatctttgactgtagtgtcgctcaattctgaacatctattaagccacttttgttgctatgctaataccagtctgagacactgatgtttttaac

SEQ ID NO: 132383 - DNA, 2162 bp, Zea Mays
ctaaccttttcagttttcactgctccagttttcttatctcccccatcttcgtcgtcctcacagcgccggcgctccatcttccgttccttcccttactcgcgctcggcacgcaggcgacggcggcggcggcggcgctcaggctcgggctcgggctctcagcgacggcgtcagcggcttcccctcccgcctctcgctagtcgactcgcgccctcgcatccgttcctccgcacaccggccggtgaccctgcgtttcgttcttgttaactattcaagaagtaggaaatgatgagcaacttccaagccactacttgcaagcctcacagtaggatcattgtgaagaaacctatagcaagtcttggaagcacatgtcagtatccattatattcacatgctctcggattccacacgttgcaagagaaggtgtacccaaggctagttctcatttctgctagccacaaaaggcttacttctgtatgtgccttaagtggaaagggaagctctggcactgctgatgaccctttgatggaatctttgaagaaagctgtggctgatgcaaaaaagccccgttccatacaagacttactgaaggagcaggtggctaaactgagagaacaagcgtctggtggaggcagagggaatgggaatcgccgtggaggcagtggtggttctggtggcccagatgatgaatcgttcaaggaaacattggatgaagtagtgcaagttatcttagccactgttgctttcatacttgtgtacatccacataatcagaggggaggagctttaccgtcttgccagggactacaccagatatctcgtcaccggtaagaggactgcccgactgaagcgtgccatgcaaaggtggcgcaacttctcggagagcttcatgcagaaggcaggctcagaagacgaccaatatgagagaccagctgtgtcaaaacctgcatggtggcaacagcctcagaaatttgtgcattttgtggaggacctttgcaggggaaactggcgtccccatgctcaggagtcttagttgatggagtaccccccgacccattgcagaatgcatacttggctgtgattggagcaaggtcgcctgtcaggctgtcacctggggcaggttttttttttttgttatttatcggatatttgccactggtttcttaggagtatgtagaaagtcgctgaattgttggcaattttgcagttgatagaacctcgttttgagactctaacctgccaagtcgggtgtggaattgtttattaataagctgtttggtttgaggaatgatctagtccatcgtcttctcactcctcacttttttgtttggtttgtggaatggattgagttgatccatcatcaccttattccttatagttatttagttagtactaatatgagtaataaggtcatcccaccaaatttgaggaatggactcatgatgcaccaccacattttggatgaaatgattcctcaaaccaaacaccccctaagtcggcctttctatgtacatgtttgttgaggactgcagatctattgccaccaccacaagcctcagccctcagctagctagcaagttgccctgccatacatttttgttgttaggatattaggacttcaaagttacactagccgtgcaaatgtaacaatgtagtattatgttttgtaggaaatttttgcacgacctatcatgcccatgaggccatgaaactattgtcctttcaatagcgatattgctagcacagtaaacaccaatccatcgacagaacaagagagttcatgaaaatatgaaatagctcactttttatgtttcttcgctatggttatacaaactcagtatagttctgaaaaaataaccgagtgtctgcaccaaactaccaaaaagtttcatattgtaaacgtgaatcggtgcatggccgtttccccagattgaaagaaatcatttgtcgctgttatactcggtggttggcaatgctgaaagtaatccggcacagatcaactttcatcagcaggagagcctgacgcttcagcagctttcttttccttctgtttctctctgcgcttcttgtttcgcaatgcatttttgctcatctcccccctgtcacattaagcttgtaccttgtcctgaagttctgcagaacccttagcatgaggtgggcggtatg

SEQ ID NO: 132384 - DNA, 1847 bp, Zea Mays
ttacccaaatacccctaaccttttcagttttcactgctccagttttcttatctcccccatcttcgtcgtcctcacagcgccggcgctccatcttccgttccttcccttactcgcgctcggcacgcaggcgacggcggcggcggcggcgctcaggctcgggctcgggctctcagcgacggcgtcagcggcttcccctcccgcctctcgctagtcgactcgcgccctcgcatccgttcctccgcacaccggccggtgaccctgcgtgcgtgcctctttctctcttcccgcctccggtgtatcgacaacggcgcccggtcccggtggcggcgccgcgcgcggcctgagggcggtgggagccagcagccgctgctccaccaaggcggtcgcgccgctttgggagcgcttatgccccaaagcgaagcgttacccgacctcttagcgcttcaacgcgctgaagcgtgcgcttagtgccgtttttttggaaccctatatcatacagaacaaggttccctcgtactggtagcgcatgaacacgaaggattgaagttcatatggttcctgccgaggtttcgttcttgttaactattcaagaagtaggaaatgatgagcaacttccaagccactacttgcaagcctcacagtaggatcattgtgaagaaacctatagcaagtcttggaagcacatgtcagtatccattatattcacatgctctcggattccacacgttgcaagagaaggtgtacccaaggctagttctcatttctgctagccacaaaaggcttacttctgtatgtgccttaagtggaaagggaagctctggcactgctgatgaccctttgatggaatctttgaagaaagctgtggctgatgcaaaaaagccccgttccatacaagacttactgaaggagcaggtggctaaactgagagaacaagcgtctggtggaggcagagggaatgggaatcgccgtggaggcagtggtggttctggtggcccagatgatgaatcgttcaaggaaacattggatgaagtagtgcaagttatcttagccactgttgctttcatacttgtgtacatccacataatcagaggggaggagctttaccgtcttgccagggactacaccagatatctcgtcaccggtaagaggactgcccgactgaagcgtgccatgcaaaggtggcgcaacttctcggagagcttcatgcagaaggcaggctcagaagacgaccaatatgagagaccagctgtgtcaaaacctgcatggtggcaacagcctcagaaatttgtgcattttgtggaggacctttgcaggggaaactggcgtccccatgctcaggagtcttagttgatggagtaccccccgacccattgcagaatgcatacttggctgtgattggagcaaggtcgcctgtcaggctgtcacctggggcaggttttttttttttgttatttatcggatatttgccactggtttcttaggagtatgtagaaagtcgctgaattgttggcaattttgcagttgatagaacctcgttttgagactctaacctgccaagtcgggtgtggaattgtttattaataagctgtttggtttgaggaatgatctagtccatcgtcttctcactcctcacttttttgtttggtttgtggaatggattgagttgatccatcatcaccttattccttatagttatttagttagtactaatatgagtaataaggtcatcccaccaaatttgaggaatggactcatgatgcaccaccacattttggatgaaatgattcctcaaaccaaacaccccctaagtcggcctttctatgtacatgtttgttgaggactgcaga

SEQ ID NO: 132385 - DNA, 1969 bp, Zea Mays
accctcataccacactcaaactcgcatcctgtggagtttttacatagaagtcgtcacttattgcgccgtggtggatgggcaggggctcgtgtcgaacactcgaacagaaccaccgccattctagaggcatccagtattccagcccaatcctatctttgtattcctctccctcgtctcggaagtctggttcgccgaacagtcccgaacccccgattcactgccgctgccccgtctcgtcctcttcgccagcgaaaaccctagtctaggggacgggagcgcaatccacgcacggcaacatggacgccatccgcaagcagctcgaccagctcatgggggccaaccgcaacggcgatgtacgggaggtcagccgcaagtactatgatcgcgacgtctgccgcctctacctcgccggcctctgcccccacgacctcttccagcttaccaagatggacatgggcccgtgcccgaagctgcactcgctgcaactgcgcaaagaatatgaagaagccaaagccaaaggtactgataactatgaccgtgaattggaagaaaccattgaaagactaattgttgagtgtgaaaggaagattcagagagcccttaagcggttggaggaagaggatgctaaggcagctattgctatttctgttactgaggttacacagactaaagaagtaatggagttatccaaacaaattaggcagaagatgaaggatattgatgcttttgatcttgagggtaacaccgaggggaaaattcgggccactgaagaacttgacaagctaaaagaacaaagggcagaagagcaggcaaagatgttacttgaagctttcaacaaagaccgtgcttctttaataaactctcttcaaaatgccactcaaacaactacacctgtcccccctgctgctccggatgcacggacacaagaaatgataaacgagaaactgaaaaaggcagaagaactaggtgagaatgggatggttgatgaagcccaaaaattgttggatgaggcggaagctctgaagaagctggccacccgaccacaggctgttccagactctacaaaaatgagcgctcatgtccagataactgaccaaaagctgcgcctgtgtgacatatgtggagcattcttgagcgtatatgacagtgaccgtcgcttggcagatcattttggagggaaacttcatatgggttatatgcttatacgtgagagattgtctgaactgcaggaagagaagaacaaaaaacggaagctagaccgagctgagtatgacagaaggtccagggaaaggagcggggaacgtgccagggattcgagcagggatcgctacatagaccgcagcagcagccgtgacagggagtatgaccgcagaagaagccatgatcgctaccatgacagggaaagagagagagattccaggcagtctcgtagttatgattccagaagccaccgcaggtcatattcaccaaggggaagttctagggattatgatcgatctgggcgtcatgaacgccgtgatcggtactaggagcaaggaagcctccttgaaatttagggtactagattgcgttgcctcagggctagtttggccacctcatttttccaaggattgacaaccttatttttttaagggatttctattttcctaagaaaaattagttcattttcccctgggagggaataccttggggaaatggaggtgccaaactagcctaagtgttgttcgggaattctaagagggggcttaggtccaactggagaaaggcatcagctctttgcattataactaagggataggatctgacgtaatctatgcgtatcatattgttgtgttagctggtgttcatcgtgtaaacacaatgtggtggcgacgtgtcatgctttaatacgcttatatgcatttgaattaagttaatctgcccttgccatgtgtcttttattctggtaataagtttgtactcgtacgaa

SEQ ID NO: 132386 - DNA, 1901 bp, Zea Mays
accctcataccacactcaaactcgcatcctgtggagtttttacatagaagtcgtcacttattgcgccgtggtggatgggcaggggctcgtgtcgaacactcgaacagaaccaccgccattctagaggcatccagtattccagcccaatcctatctttgtattcctctccctcgtctcggaagtctggttcgccgaacagtcccgaacccccgattcactgccgctgccccgtctcgtcctcttcgccagcgaaaaccctagtctaggggacgggagcgcaatccacgcacggcaacatggacgccatccgcaagcagctcgaccagctcatgggggccaaccgcaacggcgatgtacgggaggtcagccgcaagtactatgatcgcgacgtctgccgcctctacctcgccggcctctgcccccacgacctcttccagcttaccaagatggacatgggcccgtgcccgaagctgcactcgctgcaactgcgcaaagaatatgaagaagccaaagccaaagattcagagagcccttaagcggttggaggaagaggatgctaaggcagctattgctatttctgttactgaggttacacagactaaagaagtaatggagttatccaaacaaattaggcagaagatgaaggatattgatgcttttgatcttgagggtaacaccgaggggaaaattcgggccactgaagaacttgacaagctaaaagaacaaagggcagaagagcaggcaaagatgttacttgaagctttcaacaaagaccgtgcttctttaataaactctcttcaaaatgccactcaaacaactacacctgtcccccctgctgctccggatgcacggacacaagaaatgataaacgagaaactgaaaaaggcagaagaactaggtgagaatgggatggttgatgaagcccaaaaattgttggatgaggcggaagctctgaagaagctggccacccgaccacaggctgttccagactctacaaaaatgagcgctcatgtccagataactgaccaaaagctgcgcctgtgtgacatatgtggagcattcttgagcgtatatgacagtgaccgtcgcttggcagatcattttggagggaaacttcatatgggttatatgcttatacgtgagagattgtctgaactgcaggaagagaagaacaaaaaacggaagctagaccgagctgagtatgacagaaggtccagggaaaggagcggggaacgtgccagggattcgagcagggatcgctacatagaccgcagcagcagccgtgacagggagtatgaccgcagaagaagccatgatcgctaccatgacagggaaagagagagagattccaggcagtctcgtagttatgattccagaagccaccgcaggtcatattcaccaaggggaagttctagggattatgatcgatctgggcgtcatgaacgccgtgatcggtactaggagcaaggaagcctccttgaaatttagggtactagattgcgttgcctcagggctagtttggccacctcatttttccaaggattgacaaccttatttttttaagggatttctattttcctaagaaaaattagttcattttcccctgggagggaataccttggggaaatggaggtgccaaactagcctaagtgttgttcgggaattctaagagggggcttaggtccaactggagaaaggcatcagctctttgcattataactaagggataggatctgacgtaatctatgcgtatcatattgttgtgttagctggtgttcatcgtgtaaacacaatgtggtggcgacgtgtcatgctttaatacgcttatatgcatttgaattaagttaatctgcccttgccatgtgtcttttattctggtaataagtttgtactcgtacgaa

SEQ ID NO: 132387 - DNA, 1981 bp, Zea Mays
accctcataccacactcaaactcgcatcctgtggagtttttacatagaagtcgtcacttattgcgccgtggtggatgggcaggggctcgtgtcgaacactcgaacagaaccaccgccattctagaggcatccagtattccagcccaatcctatctttgtattcctctccctcgtctcggaagtctggttcgccgaacagtcccgaacccccgattcactgccgctgccccgtctcgtcctcttcgccagcgaaaaccctagtctaggggacgggagcgcaatccacgcacggcaacatggacgccatccgcaagcagctcgaccagctcatgggggccaaccgcaacggcgatgtacgggaggtcagccgcaagtactatgatcgcgacgtctgccgcctctacctcgccggcctctgcccccacgacctcttccagcttaccaagatggacatgggcccgtgcccgaagctgcactcgctgcaactgcgcaaagaatatgaagaagccaaagccaaaggtactgataactatgaccgtgaattggaagaaaccattgaaagactaattgttgagtgtgaaaggaagattcagagagcccttaagcggttggaggaagaggatgctaaggcagctattgctatttctgttactgaggttacacagactaaagaagtaatggagttatccaaacaaattaggcagaagatgaaggatattgatgcttttgatcttgagggtaacaccgaggggaaaattcgggccactgaagaacttgacaagctaaaagaacaaagggcagaagagcaggcaaagatgttacttgaagctttcaacaaagaccgtgcttctttaataaactctcttcaaaatgccactcaaacaactacacctgtcccccctgctgctccggatgcacggacacaagaaatgataaacgagaaactgaaaaaggcagaagaactaggtgagaatgggatggttgatgaagcccaaaaattgttggatgaggcggaagctctgaagaagctggccacccgaccacaggctgttccagactctacaaaaatgagcgctcatgtccagataactgaccaaaagctgcgcctgtgtgacatatgtggagcattcttgagcgtatatgacaggcttttgggcccacttttatgaggattacttttgcagctaaagaattgaccgtcgcttggcagatcattttggagggaaacttcatatgggttatatgcttatacgtgagagattgtctgaactgcaggaagagaagaacaaaaaacggaagctagaccgagctgagtatgacagaaggtccagggaaaggagcggggaacgtgccagggattcgagcagggatcgctacatagaccgcagcagcagccgtgacagggagtatgaccgcagaagaagccatgatcgctaccatgacagggaaagagagagagattccaggcagtctcgtagttatgattccagaagccaccgcaggtcatattcaccaaggggaagttctagggattatgatcgatctgggcgtcatgaacgccgtgatcggtactaggagcaaggaagcctccttgaaatttagggtactagattgcgttgcctcagggctagtttggccacctcatttttccaaggattgacaaccttatttttttaagggatttctattttcctaagaaaaattagttcattttcccctgggagggaataccttggggaaatggaggtgccaaactagcctaagtgttgttcgggaattctaagagggggcttaggtccaactggagaaaggcatcagctctttgcattataactaagggataggatctgacgtaatctatgcgtatcatattgttgtgttagctggtgttcatcgtgtaaacacaatgtggtggcgacgtgtcatgctttaatacgcttatatgcatttgaattaagttaatctgcccttgccatgtgtc

SEQ ID NO: 132388 - DNA, 628 bp, Zea Mays
accctcataccacactcaaactcgcatcctgtggagtttttacatagaagtcgtcacttattgcgccgtggtggatgggcaggggctcgtgtcgaacactcgaacagaaccaccgccattctagaggcatccagtattccagcccaatcctatctttgtattcctctccctcgtctcggaagtctggttcgccgaacagtcccgaacccccgattcactgccgctgccccgtctcgtcctcttcgccagcgaaaaccctagtctaggggacgggagcgcaatccacgcacggcaacatggacgccatccgcaagcagctcgaccagctcatgggggccaaccgcaacggcgatgtacgggaggtcagccgcaagtactatgatcgcgacgtctgccgcctctacctcgccggcctctgcccccacgacctcttccagcttaccaagatggacatgggcccgtgcccgaagctgcactcgctgcaactgcgcaaagagtatccttccaagtgaacagttactttatcttgtgtatttgtttgtgggggttagtttttgagtcaggcttaatgtgtaaaagccaattcaacgattcataacattacatttgatttttttgtctgcttaat

SEQ ID NO: 132389 - DNA, 507 bp, Zea Mays
tttttagtttttgatggggagttgttttttctttgttgttcgtccgtccatgcaaccaagaaatttcatggagaatctgtacaaaagagtggctagctactacacgtgagtccggtctgagagaagcaacacgaggtcagtcagtggatgagcttagagagagacattcacacgctgagagggttgataatttgtgatattttcctcttttcttcttcttcctgattttgtatattgtaatatcctgctggattaacaattagtagcagtcactcatagtcagtcaacgtatgccatctgctgctagtacctcttttcttctcatgagttatagcagtttctgtttaattaatatgattatagtttctgtttaattacaatcatagtttctatttaattaaaattcatatgattgtaattacaatcatagtttctgtttttgttatccatattttaagttgctattatagttcatatgattgtaatttaaatgattgtaattagtcc

SEQ ID NO: 132390 - DNA, 253 bp, Zea Mays
actcgcagccgccgacgccaagagcccgctcttctgccccaagccgcggtgccccgcggcgccgctgcggtgccaccagagcggcggcttctccgacgccgaacgctctttccagggcgacgagagcggcctgtcgtcgtcgtccccgtagccgccgctgttctgcggctcgccgccgcggcgagcgtcgaacctggtggtccacgacagcaggttcggcgcggactgcccgcccatgcccgtgtcggggctg

SEQ ID NO: 132391 - DNA, 1213 bp, Zea Mays
ttcacatcgatatgtgtgccatctagtgcacctagacaatcctcaaaccatttccactttggatcctcaggtagagtggtttctggattaggaagcttgatgaactcatgacttaaaaatagaatccctctaagcacttcgttgaagtgtcgactgattggctcaagggaccacccataagtgctacggatcaacctcattttggtgttatgacctactataagcagaaaaattgcaagcttttcttctaccgacacatttaaggtatcatgtaggccactcttttcccgtaagatggcactcacgtcactaaaagatctcttagttaggcgcaaactgtcatagcaatagacatttgaaccctggtacatattacgtagcatttgttttctggactcgacatttctctcttgaacttcgttagcatctacgatgtgtctaggtctcctccgttgataccggtttgcaataatagccataatagacacagctaatacaacaactctctttcgcttctttctcttccttttaatttcctcctcgttagtatattgagttgatatctagaacaagtaatttatatgcaattagacatgctagttgaaagcaaaatgctctactcaagaataaaaacactactagtaggagcacaaggtggaataggagaagtaccgatgtagccatggaaattgaaggatttgtttgaggtagctagatgaaacttgaggcggcaaatcccaaaacagcgagctgttttaacactcctgcaaatgatttaatggacaggaaccaaatatccacacagattatttatgccctcagacaaagctacattacagtctccccgatcgaagcaaactaatggaacaaatgctagtaagtgatgagtatgaaatctggcttggaagaaaaaataatccaatgtgtatttcttccatgcgcacatcatcatgagctgcttgcaggctgactattctccatcaatcctaaacctctgtagcccaacgtgttcacttgagctgcctgttgacaggcccctctctttgttcagtccagttctccctactcttagaggacctgaacttgagtatcttcggaaagaaccaggggcatctatagcatcataacgcgctgatgaagtgaacagcttagcagatagcgttgggtcagcttcagagcttgaactacttcacccatgaatgggcgctggtcc

SEQ ID NO: 132392 - DNA, 708 bp, Zea Mays
attatgtccttttttggttaaatatctattattcatgggtttgctgttcacatgaatcgcatatagctatgacctttgctgcattcaggttgatgctatgctccaagaattagaaaaggagattgatgatgtggatgcacaaattggaaatcgttggcaactgcttgataaggaccatgatggcaaagtgacccctgaagaggtggcggcggcggcagcttatctcaaggacaccatagggaaagaaggcgtgcaagagctcatcagcaacctttctaaagacacagaaggaaaaatccttgttgaagatattgtgaagctagcatcccaaacagaaaacaatgaagaggaagaggaagcacggtagatgggagagtatatggaaacatcacactcgttcagcagtcaaaactcatgtattgaaaggcaatacgtccatttcttgtgtctcttgactgactttgatagtgacttccaattagcaaggtagattttctgtagaaaggctcatgctgacatgcatttagttagccgccgtgttgtgatttggcaggtaaaattgcaaccaaaatttagaccggttgcatggacgtggataatacagatcaattgtatttgttactactatgcaatcccgaaatattggatctgtttcaaattctcaagtaatcattgatggatgctatttattgaccataaagcttacgg

SEQ ID NO: 132393 - DNA, 1051 bp, Zea Mays
ttgattttttaatgctaaaatatattcaggaggaagagaaaaggaaggagaaagaagaaaaagcaaaacaagaggaagaggaaaaggcaaagctcaaagaaacgaagggttctgctgaagatttagctttgaaagaaatgattgaggctactgctagggaagaggaactgcgaaaggcaaaacaacacgacagggaaaaactctgtaatatcggccgagcattggcagtgctcgcatctgcatcatctgtaagcaaggagcgtcaggagttcttgggacttgtcaacaaggagatagaactatacaactcaatgcttgaaaaggagggtgcagaagaagctaagagagcatacatagctgctagagaggaatcagaccatcatgctgaggctgctgcagaagaaaaaatttcatcagcacttattgagaaggttgatgctatgctccaagaattagaaaaggagattgatgatgtggatgcacaaattggaaatcgttggcaactgcttgataaggaccatgatggcaaagtgacccctgaagaggtggcggcggcggcagcttatctcaaggacaccatagggaaagaaggcgtgcaagagctcatcagcaacctttctaaagacacagaaggaaaaatccttgttgaagatattgtgaagctagcatcccaaacagaaaacaatgaagaggaagaggaagcacggtagatgggagagtatatggaaacatcacactcgttcagcagtcaaaactcatgtattgaaaggcaatacgtccatttcttgtgtctcttgactgactttgatagtgacttccaattagcaaggtagattttctgtagaaaggctcatgctgacatgcatttagttagccgccgtgttgtgatttggcaggtaaaattgcaaccaaaatttagaccggttgcatggacgtggataatacagatcaattgtatttgttactactatgcaatcccgaaatattggatctgtttcaaattctcaagtaatcattgatggatgctatttattgaccataaagcttacgg

SEQ ID NO: 132394 - DNA, 1875 bp, Zea Mays
cgtttctttcttcctccacacgcctgcttgttcacctccatggctgatggctccatctcctcctgtccctaaccccctccggccctcccctcctccaaagccctaaaccccacgtagctcggtgtgtcagtccactcgcccgcccggtcggcgccgcacccatctttcggattctaccctaaaggcatgaccttggtcttccaatctggaaattgagtagcaatcaagtatggctgcaagagcaatcacgaggagaaggaagtatcttttcgaccatgttaaaacacctaacctctcatcttcatcctctactttccaacatggaagaattggttctgaagatgagccaaaaataacactactgtttctggagcaaagctctagggattcaagatctgagaaggagcaatactgtgtgaatttgactaataggaatttggcaggtattgctaatagatttctgcgacgtccagctcatgggatatctctttcatattatggaattggaaagaatgactttgggttgccactgggagctagatctatgctgcagtcagttcgtgcatcatcaactgcaaccgcagggcaacctaagttggatattgatgacgaacagagtggggatcagaagcaaaatagaaagaaaaaagagacatccccagaggaatgtgatcaggctgtggaaggcctaagcactgcaaaagctaaagccaaagctaaacaggtccaagaatctctcaaggctagccaatcggccatgcagaaattctgggcaaggcttttgggtattggtcctgctctgcgagctgtggcttcaatgagcagggctgattgggctgcaaagcttaagcattggaaggctgaatttgttactacactgcagcattactggttagggacaaagctactatgggcagatgttagaatctcatcaagattactggtgaaacttgctggtggaaaaagcctttctagaagagagaggcaacagctgacacgcacaacagctgatatcttcaggctggtaccatttgctgtgttcatcgttgttcctttcatggagttcttactgccagtgttcctgaagttatttccaaacatgcttccatcaactttccaagacaaaatgaaagaagaggaagcattgaagaggaaactaaaagcaaggatggaatatgcaaagtttttgcaagatacagcaaaagaaatggcaaaggaagtccaaacatcacgtagtggggatataaaacaaactgctgaagatctggacgagtttttgaacaaggttaggagaggtgaacgggtctccaatgacgaaatcttgagctttgcgaagcttttcaatgatgaacttactttggataacatgagcatatcacgcttggtaaatatgtgcaaatatatgggtatccggccttttggtacagatcactacttgaggttcatgcttcgcaaaaaactgcaagacattaagaatgatgataagatgattcaagctgagggtgttgaatctctttctgaagaggagcttcggcaagcctgtcgggaacgtggtcacctaggtctactgtcaactgaagagatgagacagcagctccgagactggttggatctctcattaaatcatgcagtgccatcttcacttctcatactttcaagagcttttactgtatctgggaaagtgaaacctgaggaagctgttgtagcaacactatcttcactaccggatgaagttgtggatacagttggaacagtactgccatctgaagattcagtttctgagaggaggagaaaacttgaatttcttgagatgcaagaagaacttatcaaggtgacgtgtacatatgcatctttttatttctgtagagataccat

SEQ ID NO: 132395 - DNA, 2065 bp, Zea Mays
tcgagtcgtcgcccaatcggttgaatcggggagcagaggcatcgcccccacgcccaatcatccgcccccaaatccccagaagcacccacccctccgcgcgcgagatcccacgcgcgtccctcccacagtcccaccaccccccggggacgcggactccctcctccgtcctccccccccccccgcggtcccagcccagcggtggccctgcgacgaccgatggacgcggcggcgaagaagatgacgcggagcatctcgcggcagctctcgtcgggggcggcgcggctgtggcgccagctgtcgctggacccgcacaccccgcgccgcggcggcccgggcccggtcccagcggcgggggccgggcagacgcggttcgcgatcgccaggcagtcgtcgctcgacccgacgccgcgcggcgggccggacgggtcgtcggcgcaccagcagctcgcggtgccggagaacctggacgccaccatgcgcctgctcttcgccgcgtgccagggggatgccgccggggtcgaggagctgctcaggagcggggtggacgtcgacagcatcgacctcgacggacgtacggcgctgcacatcgcggcctgcgaggggcagggggaggtcgtgcgcctgctgctcgactggaaggccaacatcaacgcccgcgaccgctggggtagcacgccagcagcagacgcgaaacattacggccattttgaagtatataatactctgagagcaagaggagcaaaagttccgaaaaccagaaagaccccgatggctgtgtcaaatccgaaacaagttccagagtatgaactgaacccacttgaactggagtttcgaagaggagaggaggtcacaaagggtacatatctggcaaaatggtatggctcgaaagtttttgttaagatactagacaaagacagcttctcagatgctgaaagcataaatgcgttcaaacacgagcttaccttacttgagaaagcacgacatcccaatttggtccaatttgttggagctgtcacgcaaaatgtcccgatgatgattgtttcagagtaccatcaaaagggtgatttagccagttatattgagatgaaaggtcggctgaagcctcacaaagctataagatttgctcttgacattgcgaggggactgaattatctccatgagtgcaagcctgagccaatcattcatggaaatttgtcgccaaagttgcagaaacatcattcgggacgatgaaggacaacttaaggtggctggttttggatcactgagtttgagtaaagtttctgaagataaagtacaaatggctcagccagttacaaaatttgacaatgtatacatcgctcccgaggtctacaaaaacgaaccatttgacagaagtgtagatgtatttgcatttggtctcattctttatgagatgattgaaggagctcctgcttttcacccaaagccacaagaggaagcagctaagatgatttgcttagaggggctgagaccaccattcaagaataaaccgaaatactaccccagtgatgtgaaagagttgatacaagaatgctgggatccgatgccttccgtcaggccaacattcgcggagataattgtgcgcctgaacaagatacatgcgaactgtgctaagcagggtagctggagagacaccttcaagcttccatggaaacaaactggagagagataattgtaaagccccgcgaggctgccgtgtcaagatttcgccccttcccttcagcaagtgtgagtaaacacgagtcaagaaacgtacagagttacaaacagaaaggcaaagttcctatttagttcaggtttcagaccagtttgtgctttgtagcctgtataactgtatctaggcttatgccaccggcccaatttctcttgagctatcttcatccaaacgggaacaacagagtattaatcagtattctgaacattcagggcgtgcctattccttttgaactcctacgtgaacgttgtaaattctgcacgatttcctttcgtgccttttgtgtacgttgtgctgaaagagaaccagaggcatacgcatatcccgagaaaa

SEQ ID NO: 132396 - DNA, 2137 bp, Zea Mays
tcgagtcgtcgcccaatcggttgaatcggggagcagaggcatcgcccccacgcccaatcatccgcccccaaatccccagaagcacccacccctccgcgcgcgagatcccacgcgcgtccctcccacagtcccaccaccccccggggacgcggactccctcctccgtcctccccccccccccgcggtcccagcccagcggtggccctgcgacgaccgatggacgcggcggcgaagaagatgacgcggagcatctcgcggcagctctcgtcgggggcggcgcggctgtggcgccagctgtcgctggacccgcacaccccgcgccgcggcggcccgggcccggtcccagcggcgggggccgggcagacgcggttcgcgatcgccaggcagtcgtcgctcgacccgacgccgcgcggcgggccggacgggtcgtcggcgcaccagcagctcgcggtgccggagaacctggacgccaccatgcgcctgctcttcgccgcgtgccagggggatgccgccggggtcgaggagctgctcaggagcggggtggacgtcgacagcatcgacctcgacggacgtacggcgctgcacatcgcggcctgcgaggggcagggggaggtcgtgcgcctgctgctcgactggaaggccaacatcaacgcccgcgaccgctggggtagcacgccagcagcagacgcgaaacattacggccattttgaagtatataatactctgagagcaagaggagcaaaagttccgaaaaccagaaagaccccgatggctgtgtcaaatccgaaacaagttccagagtatgaactgaacccacttgaactggagtttcgaagaggagaggaggtcacaaagggtacatatctggcaaaatggtatggctcgaaagtttttgttaagatactagacaaagacagcttctcagatgctgaaagcataaatgcgttcaaacacgagcttaccttacttgagaaagcacgacatcccaatttggtccaatttgttggagctgtcacgcaaaatgtcccgatgatgattgtttcagagtaccatcaaaagggtgatttagccagttatattgagatgaaaggtcggctgaagcctcacaaagctataagatttgctcttgacattgcgaggggactgaattatctccatgagtgcaagcctgagccaatcattcatggaaatttgtcgccaaaaaacatcattcgggacgatgaaggacaacttaaggtggctggttttggatcactgagtttgagtaaagtttctgaagataaagtacaaatggctcagccagttacaaaatttgacaatgtatacatcgctcccgaggtctacaaaaacgaaccatttgacagaagtgtagatgtatttgcatttggtctcattctttatgagatgattgaaggagctcctgcttttcacccaaagccacaagaggaagcagctaagatgatttgcttagaggggctgagaccaccattcaagaataaaccgaaatactaccccagtgatgtgaaagagttgatacaagaatgctgggatccgatgccttccgtcaggccaacattcgcggagataattgtgcgcctgaacaagatacatgcgaactgtgctaagcagggtagctggagagacaccttcaagcttccatgaaacatggacgtaactcgctatcatggcataaaaatctgtctcgtggggggttgttggtctcaatcacactcctcgttttacctgacgcaggaaacaaactggagagagataattgtaaagccccgcgaggctgccgtgtcaagatttcgccccttcccttcagcaagtgtgagtaaacacgagtcaagaaacgtacagagttacaaacagaaaggcaaagttcctatttagttcaggtttcagaccagtttgtgctttgtagcctgtataactgtatctaggcttatgccaccggcccaatttctcttgagctatcttcatccaaacgggaacaacagagtattaatcagtattctgaacattcagggcgtgcctattccttttgaactcctacgtgaacgttgtaaattctgcacgatttcctttcgtgccttttgtgtacgttgtgctgaaagagaaccagaggcatacgcat

SEQ ID NO: 132397 - DNA, 894 bp, Zea Mays
atagcgaactttactacaaaacgaaggcaagctgatttcgaatctctcttcgctgaagtaaacagttatgctatgcatcttattcggacagtcgatgggatacatatgcaacctcaacgcgcattaaaaaggggcattattgaactcgcaggccagggagttcacaacatgaaagaaacaagtcctgtaattgcacaacacatcccagcgcgagatggtctgatctataacaacaaaccaagctctttatcgggtccaccaccaatcacaaatgccaggctacaatggaagagagtaaccgcggaggtacttggagtcgaccttcgattcacggaccagtgccactcgtccagttctggcgacctgtcatatgccatatggctctaataacctttgtagtgcaaccatcttgtcaagatctccagtaagctgaagggttactgtatggtcagaaacgtcaataggttttgctcggaagatttcagcaatatctagaatttccctccgagcagcagtgtttacagaaaccttaataagcatcagctccctttcagcaaaaggtgaaagttacatgcagcttacttcatgcacatcaataagcttgtaaagctgctgaactaacttcccaatggattcaacagtaccaggaacaactgttgtaatacgtgaaatgccttccttctcagctgagccaacagcaaggctctgacaagtacccacttgttaataattaacctgctactatattcaacaagaagagctttttcgaaaaaaaaagaaaacctgtatattgtagcccctgcgagcaaagactcctgttacaatgttgagaacaccaggacaatcattcacaaggatggagagggtatgcgagcaaagtccagttgcctgtac

SEQ ID NO: 132398 - DNA, 240 bp, Zea Mays
atggtgaccacatacagtttggagacacattggcagcacgacaacacaatacctgaaacaagaggaaatgaacacactagagagtatataactgacgttgaggtccaaggcatggatcagacggacttaaagatcctcaaaccagccaagcaggatctatatttctgcgtcacgaccagccatggttattcggtgctcgatgtgctcggaggtttctcctttggatgctttgatccatag

SEQ ID NO: 132399 - DNA, 2160 bp, Zea Mays
atggcgtcgccgcgccgcattccctctgtgcctgccagatccggcaacaaagagaatatatctcaagatggagaagctcccttggattttgcaaccttgcctaaagaagggcctgccactacaaggcggaagaagaagcttgcaggtttcaacttgaggaaaagcattgcctggaatcctgcttttttaactgaagaaggtttaatagtaacatcaaagaactttgtaggtgttttggataactcggagctttctgtgcttactggctcccaaccgatggcaaataggagccctggatcagggatgtcaagaataccaaaacaattacgaccttctcttcctaaggtcccaagaagtacttcatctgtgacaaacaatttggaatcacacaaaaaaatagctccagttaaagctgaactagttcacagagtaactggattccctgctagattgaagatcaatcctgtatcttctggacctagcatagagaaggctgtggtgcctgctgttactgccatacatgaagaagccactgtgaaatgcaaaaaaaacccagcacacccacaaattagcccatccaccccctttgatagcactgtgtcaaaacttgctaagccatcagcacttcgattgccttcaccttcacttggttttttcactcaggaaaaagcgcatgtgccacatggtgatgctgctaaaagaaacgtggggaggtgtttctcttcaaatacttcagcgcttgatagacctcccagatacaggcagtctgaggaaagcagactccacctagcaaagcagctgtcaaccaatggcactgttgcttccaatcttgtgctacctgtgactagagagggccatctcaaatctttggtggttccagaaaatgaatcatcgtcaaaagttatcattacatacttagaaaaatctggaaatgtaaataatcaagcaatgccaaaggctgatttcttattggcaggaactggagctactgatactacacaaccaatgaatttagaaaagaaagatgacgctggaaatagtgagacattgcttgtagaaggaatggatgatatcaaagagattgaacctcttgataatttctacgctcctgaagctatttgttcctcaaccattcgacctgttgaggattctttctcgcttgaagccagttattcctcaactaaacctattgtagagagtaaattgtcactctcttgcatttcttctaaagtacactcctctagtgagcttagttgtcaaggcaagtcagtcagtgatcccagtgcagcgatggacatggaaaactctaatgttggagatactgcacttagcgcttctttgtcgaaaggcaggagttgcactccagctcttgatttgttgcaaggattttattcatttgatcgccagaatattgaatgtcctatgctgatggaatcagtatctacaatatgtgcagaccagctgccacattgtgacagtttaagcgatgaaacgccagccctagctggcagtcattcagatttgaatgattctttgtgtgatgaagctaaacctgctttgtcaaaagaaccaaatactgaaggtgaaatggagcttcaaacaaacagtaccatagctgtaaaggaaactccgttgttagatgtggggtgtgggcatattcacaattataggaccacagattgttctacgagattggaagcacctacaccttgtgtggaaagacgtcatgctttattagtagaaccaaatatggaagaaaaaatggtgcttgacacaaacagattgtcagctatacagtacacaccacatatagaaaagaacaaggcactggaaagatcaccggcaaatacaatccgtaaagatcatctgaagaacttgataccatttacagaagaatggcttgctgtcatggagtcttgtgggcaggaagttttggaacaaaagaccggtgctgtgcaaaattctcctcctgacaaaacacctccagaaccgagtccttggtcaccggttaaacggaaggcgcaagatgttggaccatttgactgtacgaagtactccaaaagcatccgaacctctgggcaactgaaacagttggagacagaacagctggaacagccacgtcctgttgccctattttgtccgtctaattctgacgaatag

SEQ ID NO: 132400 - DNA, 1753 bp, Zea Mays
aattcccgaatctcacacccaaaagtttcccactgccctggtcccccattcaattcttccaactccgccgcttcgcctcgttccgtccgccgcccccatggcgtccgccgccgccacgaccacctccgcccccgcccagaacctcaatccccttagtatcaacatcaagctccccccatggctcagcgggctgcgctgccccttcaccttcgtctgcccgcccccgcccccgcctccgccgccgccgccgcctcctcccccgctgccacctacggaacccgtggtcccacggtcgcggaggttaccaagcctgcgggtgaccacggagtacgatagcgaagagggcgtgtttgtgaacaaggtgtcgtgcaagcttgcgggggacctcgccaaactgcggctctccttccagagcgacccgcaggggcagtggcaagggggcggggaggaaggggacccgctacagcagctcttcgccgcgccgttggtggggctcatcaccaagcgtttctccgtgctctacgacgtcgaggcacgcaacgcgctgctccgcggagactgctcgcttcccggaggcgccgtccagctccgtgcctcgcatgatgtcaaggcacaacaaggagaagtttcggtgatcactagtttgggtgatccattgtataaaatggagttatcatctttggtgccttacagtggtttgccaagggcaacattccactttcctattggtcaagtttcagtggaagagaagagaaatgaagatgatgagaaggtgctgtctgtatatgggattggaaaatctgatttcttggacggtgttcttactgctcagtacaatgaaaatgatcttaatctaagatattgttataaggacaaggaattaactttagttccaagtgtctcgttgccttccaatgcagtatccatagacttcaaaaggcgttttggtcctgatgataagttgagaaattggaaccagtttcaccacgaagcttgtcttgttagttgttaccttcatcaattgctcttcttggaatcacaaaaggagatggagacttctaccgttacatcttcgacactgatgaatggaatgctgtttataaacataaagtgggtaaaaatttcaaagtgaaagctggttatgattctgaggtgcgagtcggatgggcttctctttgggttggagaagaagggggcaaggcgaagactgcgccaatgaaaacaaaacttcagcttatgcttcaagtaccccaggataatcccagaaatccttattttctcttcaatgtgaagaaacgatgggatctgtaaataggtgtaagttatccattatgtggactccaaaggcttcggccaaccttttgttgcaatcttcgtaggtcaacagcaacacaatccatgagctctttctatttatcatatattttcaactactgtacgtagttagtacacagcgccccaagtaatccaaaatttatgtaaactctaaccctaaaccctaagtacttgttcgttttgttctcaatccatgtagattgagtgggattaagtgagtttcaattctaatcaagtcaaaatcttttatatttttttttcaatctcatctaatccacatgggataggaataaccgaacaaggtataaagtgggaaatttggtagtctcggcataccctaaatcttaaagttgtaataccatcaaagtcgtaatagcatctccaacttgagccctaaacgtagttatattttgaaata

SEQ ID NO: 132401 - DNA, 1661 bp, Zea Mays
aattcccgaatctcacacccaaaagtttcccactgccctggtcccccattcaattcttccaactccgccgcttcgcctcgttccgtccgccgcccccatggcgtccgccgccgccacgaccacctccgcccccgcccagaacctcaatccccttagtatcaacatcaagctccccccatggctcagcgggctgcgctgccccttcaccttcgtctgcccgcccccgcccccgcctccgccgccgccgccgcctcctcccccgctgccacctacggaacccgtggtcccacggtcgcggaggttaccaagcctgcgggtgaccacggagtacgatagcgaagagggcgtgtttgtgaacaaggtgtcgtgcaagcttgcgggggacctcgccaaactgcggctctccttccagagcgacccgcaggggcagtggcaagggggcggggaggaaggggacccgctacagcagctcttcgccgcgccgttggtggggctcatcaccaagcgtttctccgtgctctacgacgtcgaggcacgcaacgcgctgctccgcggagactgctcgcttcccggaggcgccgtccagctccgtgcctcgcatgatgtcaaggcacaacaaggagaagtttcggtgatcactagtttgggtgatccattgtataaaatggagttatcatctttggtgccttacagtggtttgccaagggcaacattccactttcctattggtcaagtttcagtggaagagaagagaaatgaagatgatgagaaggtgctgtctgtatatgggattggaaaatctgatttcttggacggtgttcttactgctcagtacaatgaaaatgatcttaatctaagatattgttataaggacaaggaattaactttagttccaagtgtctcgttgccttccaatgcagtatccatagacttcaaaaggcgttttggtcctgatgataagttgagctaccgttacatcttcgacactgatgaatggaatgctgtttataaacataaagtgggtaaaaatttcaaagtgaaagctggttatgattctgaggtgcgagtcggatgggcttctctttgggttggagaagaagggggcaaggcgaagactgcgccaatgaaaacaaaacttcagcttatgcttcaagtaccccaggataatcccagaaatccttattttctcttcaatgtgaagaaacgatgggatctgtaaataggtgtaagttatccattatgtggactccaaaggcttcggccaaccttttgttgcaatcttcgtaggtcaacagcaacacaatccatgagctctttctatttatcatatattttcaactactgtacgtagttagtacacagcgccccaagtaatccaaaatttatgtaaactctaaccctaaaccctaagtacttgttcgttttgttctcaatccatgtagattgagtgggattaagtgagtttcaattctaatcaagtcaaaatcttttatatttttttttcaatctcatctaatccacatgggataggaataaccgaacaaggtataaagtgggaaatttggtagtctcggcataccctaaatcttaaagttgtaataccatcaaagtcgtaatagcatctccaacttgagccctaaacgtagttatattttgaaata

SEQ ID NO: 132402 - DNA, 1651 bp, Zea Mays
aattcccgaatctcacacccaaaagtttcccactgccctggtcccccattcaattcttccaactccgccgcttcgcctcgttccgtccgccgcccccatggcgtccgccgccgccacgaccacctccgcccccgcccagaacctcaatccccttagtatcaacatcaagctccccccatggctcagcgggctgcgctgccccttcaccttcgtctgcccgcccccgcccccgcctccgccgccgccgccgcctcctcccccgctgccacctacggaacccgtggtcccacggtcgcggaggttaccaagcctgcgggtgaccacggagtacgatagcgaagagggcgtgtttgtgaacaaggtgtcgtgcaagcttgcgggggacctcgccaaactgcggctctccttccagagcgacccgcaggggcagtggcaagggggcggggaggaaggggacccgctacagcagctcttcgccgcgccgttggtggggctcatcaccaagcgtttctccgtgctctacgacgtcgaggcacgcaacgcgctgctccgcggagactgctcgcttcccggaggcgccgtccagctccgtgcctcgcatgatgtcaaggcacaacaaggagaagtttcggtgatcactagtttgggtgatccattgtataaaatggagttatcatctttggtgccttacagtggtttgccaagggcaacattccactttcctattggtcaagtttcagtggaagagaagagaaatgaagatgatgagaaggtgctgtctgtatatgggattggaaaatctgatttcttggacggtgttcttactgctcagtacaatgaaaatgatcttaatctaagatattgttataaggacaaggaattaactttagttccaagtgtctcgttgccttccaatgcagtatccatagacttcaaaaggcgttttggtcctgatgataagttgagctaccgttacatcttcgacactgatgaatggaatgctgtttataaacataaagtgggtaaaaatttcaaagtgaaagctggttatgattctgaggtgcgagtcggatgggcttctctttggaagggggcaaggcgaagactgcgccaatgaaaacaaaacttcagcttatgcttcaagtaccccaggataatcccagaaatccttattttctcttcaatgtgaagaaacgatgggatctgtaaataggtgtaagttatccattatgtggactccaaaggcttcggccaaccttttgttgcaatcttcgtaggtcaacagcaacacaatccatgagctctttctatttatcatatattttcaactactgtacgtagttagtacacagcgccccaagtaatccaaaatttatgtaaactctaaccctaaaccctaagtacttgttcgttttgttctcaatccatgtagattgagtgggattaagtgagtttcaattctaatcaagtcaaaatcttttatatttttttttcaatctcatctaatccacatgggataggaataaccgaacaaggtataaagtgggaaatttggtagtctcggcataccctaaatcttaaagttgtaataccatcaaagtcgtaatagcatctccaacttgagccctaaacgtagttatattttgaaata

SEQ ID NO: 132403 - DNA, 1308 bp, Zea Mays
atggagccggacgcagatgagaactacatgggcgacctctcccgcttcctcccaccgagtccgtcctcctccccaccgaagaatctcgggcgccggaagcagccatccacgcaggcgcaggcgcaggcgcagccgagggcaaagcgcgggaagggggtgctgtggcaggagcggcggcggcaggagcgcgagcggaagcagcgggaggaggacgcacgcacgatggtcgggctcgcggaagctatccctgagagcaacgtagggttcaggatgttgaagcagatggggtacgatcccgactcccgcgccggcgccgaaccggtcagcatcgagatccgtcgctcgcgggcggggctcggggcggaggagcctgtgttggctctgacgtcggcgttggcgccggtggagaagccccgggaggtgtcggagcggaagcgtaggcagcaggaggagatggcagcagagctaagggaagacagccggaacggtctcccagaacacctggtgcgcctcgggcgaccggatctggtagccgagcagcaccacgccgcgctcggcgtcggcgagcgcatccatggccgcgatgaggtgcggcacagactcctgcacgtagaccacgtctgcggcgacgacgagatcgaagcggcgcggggtggctagcgtggcgagatgcgcggggcagttccagtggagctgggcgaggcgaggcgtgcgggagaggtggactcggttgcgccgcaggttgcgacggagcgccgggagcacggcggcgatgtcggtgaggccgaggcgggagaggccaagtcctgccgggccgcacccggacccgagctccacggcccgagttcccgggaagcggagcacgtcggcaaaggggagggccgggtcgcggatgcagcgctcgacgaacttgacgaggaccagggacgagggccacacagagatgcccacctcgaaggagtcgttgtcctgctcgaacatcagcaccgcgccgccgaccggaagctccaccaccggagacgctgtgaactgcatctccgccggcggcccgtgaagacactgaagcgaagcgaccataaaagacaaccaactgcgaaccccaggatctacagcttgatatatctgggagatgcatgcctgattacatattgccaactaccttagctaaggttcctaactgtatgccattgttgagaaaaatatttctgaagggaaattattggctttctgataatggtttggtcacaatcatctcggctgcaccttctttatgttccataaatctgtgtgagtgttctcttctcactt

SEQ ID NO: 132404 - DNA, 2041 bp, Zea Mays
cagcgctgctgctaaaacctcccgactaaaccctagcagcggttcctctccagtctccagcagtccagctcgatcgcgatcggaggccagaaatccatggccgctcccgccgccgcgccgctcgacgagggcaaggcgaagaaagtccttcgccaggtcgagttctacttcagcgacagcaacctcccccgcgataagttcctgcgggagacggtcgagcagagcgatgacggattggtgagcttgcccttgatatgctccttctcgcggatgaagtcccacctggggctggacgcagatgtcaagcccgagactgtgccggaggagaccgtgcttgcggttgctgaggtgctccggccttctcctgccctccgcgtatcggaggatggaaagaagattggtagagctagtgaactcttgaagccagatgagatcatagaacaagtagactctaggactattgctgtatctccgctgccttgcaatgtaaagcaggaagacgtccaatcttttttcacaaattatgcaaaggtaaacagcgtgagacttccacgcaatattgccaacaaaaaacacttctgtgggactgctttggttgagttttctgaagaagaggaagcaaaaagaattatggagactgctttagtatttgcaggggcaaatctggaaataaggccaaagaaggagtttgatgctgagcaaaagtccaaaaaagaagcatatgaaaagacacaccttaaaaaggacaaccagtatgaaggctatcaaaaaggcctaattgtggccttcaaattggagaaggccacagctgatactgtagtgcagcaagataacatagataaagagaatgactctgctacgaaattagatgtttccagttccatggaaaaaccttcaggccaggggccagaggagtctatccttgagagcgatgttattaagcaagggatgtcctcagatgacatgaccaaagagaaagatctaaacactggggaagctacagaatctgagaagtgtattagtgatgtccccatagaaagtgataaacatggtgatagtgaaccattgagcagggaaggcaaaatcatttctggcaatgtgaatgtgaagaaccaaatatcgagggaggatctaaaagaagcattcaaaaaatttggagctgtccggtatgtggacttcagcatcggagataattcaggataccttcgctttgaagattctaaggcagctgaaaaagcccgcatgtctgcagtacttgctgatggtggcttgataattaaggaccacattgttactttggagcctgtgactggtgaagctgagaaggattattgggacacaatccgcagtattcaaggaaagtacaaggatagtagaagctacaagggaagggcttcaaataaccagagaggaggaaagcgtttcaacgcgaagcgagatagaaacccagactcggagaagaattctaacaaggctcggaaggttgaagctatcgcatgaggttaatttaggtaccttagctcgactaaagaagtaacatgttatgccagcatgatcgacttcagtactctccaagtttctagaatcgacttgttttttagctatcgttttcattttggtcgttttgccaccttattcgatgttcgtcccttagctataatccttttgtaatggctttactgtgatgcgagggctcacccgatggcgtgtaatttgagcacaccaagcttaggcttcccttgcgaaagggtggaagcctttctattctttcactagcaaatatgcagttagggcttattcggttatttccatttctaacatagcctaaagcttaagggccgtttggatcccttgcggctgcttgctttaggaggatgggcaagaaattgtgtttggtttgtttattggctttctcaatttttgcactatcaatgtttcgtattgctaacttgggttgagatagaaatgctctccgctgctgccaaggttagtcttgctgagcggggcgaggccagttgcacaggttcaccgcaaaaaaaaa

SEQ ID NO: 132405 - DNA, 2068 bp, Zea Mays
cagcgctgctgctaaaacctcccgactaaaccctagcagcggttcctctccagtctccagcagtccagctcgatcgcgatcggaggccagaaatccatggccgctcccgccgccgcgccgctcgacgagggcaaggcgaagaaagtccttcgccaggtcgagttctacttcagcgacagcaacctcccccgcgataagttcctgcgggagacggtcgagcagagcgatgacggattggtgagcttgcccttgatatgctccttctcgcggatgaagtcccacctggggctggacgcagatgtcaagcccgagactgtgccggaggagaccgtgcttgcggttgctgaggtgctccggccttctcctgccctccgcgtatcggaggatggaaagaagattggtagagctagtgaactcttgaagccagatgagatcatagaacaagtagactctaggactattgctgtatctccgctgccttgcaatgtaaagcaggaagacgtccaatcttttttcacaaattatgcaaaggtaaacagcgtgagacttccacgcaatattgccaacaaaaaacacttctgtgggactgctttggttgagttttctgaagaagaggaagcaaaaagaattatggagactgctttagtatttgcaggggcaaatctggaaataaggccaaagaaggagtttgatgctgagcaaaagtccaaaaaagaagcatatgaaaagacacaccttaaaaaggacaaccagtatgaaggctatcaaaaaggcctaattgtggccttcaaattggagaaggccacagctgatactgtagtgcagcaagataacatagataaagagaatgactctgctacgaaattagatgtttccagttccatggaaaaaccttcaggccaggggccagaggagtctatccttgagagcgatgttattaagcaagggatgtcctcagatgacatgaccaaagagaaagatctaaacactggggaagctacagaatctgagaagtgtattagtgatgtccccatagaaagtgataaacatggtgatagtgaaccattgagcagggaaggcaaaatcatttctggcaatgtgaatgtgaagaaccaaatatcgagggaggatctaaaagaagcattcaaaaaatttggagctgtccggtatgtggacttcagcatcggagataattcaggataccttcgctttgaagattctaaggcagctgaaaaagcccgcatgtctgcagtacttgctgatggtggcttgataattaaggaccacattgttactttggagcctgtgactggtgaagctgagaaggattattgggacacaatccgcagtattcaaggaaagtacaaggatagtagaagctacaagggaaggtactagtgtgttctcggtcaactctggttttatctgtcttgtttgccctgtactatctcaggaagttcacaaaaagaacatttatgcacttcatgatatgtttaagcaattctcctcatggaagctgacactaacataaatgatacctttgctaactgttgcaattaaaccacgacaccttgtttgcttaatataattacctgggctaactgttgaagttgacacaacagacaccttatttactcaatatgatagatttagattaaattgcagttttttcctggacactcctaactgaaccttcaaggcactaggtggctttatgttataaaggcaacatgcacctaaatttgcctcgatgagaacttgtaattgaacctggttggtttgggtttacacctgcaccttcaggcttcagccagctgaggctcaatttccttagatttacagttttgtttgttcatgtaaaactaggggcaccactctcaagcgaaagcccttgggtttttgcccttaaattttacagacccaacaaggtctccaaaaaaatatctaaattactgcgtctacagtgtttatgtctctatagattgcagttacaacagtccaaacaaccggctttaatccgaagcgaacagtgttatgatctggcacttttgcacaagggaccttgctg

SEQ ID NO: 132406 - DNA, 1421 bp, Zea Mays
ctttcggcccaaaacacttccctgctctctcggtctctcccagagtcccagctccctcactctactctggacgcgactcgaacttaaaccctagagccgcagccccggtcgctccaccgaccccaaatctcaaatcagcgggagggaactcgcacgcgaaggcaaatacgctttagatcccccattgcttctggctactaggccagcgcgcctcgattttcttctccgttttggtctaattcgtgaggaatttgggttttctcggtggagcttggttccgctccgccttggagtggatttcggtgacttctttgttcagattgtttcgctcttgcaggctgaactcatggctcgcgtctacgttgggaacctggatccgcgtgtcacggcgcgggagatcgaggacgagttccggatgtttggggttctgaggagtgtatgggttgctaggaaaccaccagggtttgccttcattgactttgatgaccgcagggatgcacaagatgccattcgtgaattggatggtaagaatggttggagggttgagctgtcaactaaagttggtggtggccgtggccgagaccgtaacggttctgatatgaagtgctatgagtgtggtgaagctggccactttgcacgtgaatgccgcttacggattggttcaggaggcttgggtagtggaaggcgtcgcagccgaagtcctagatatcgcagccgcagccgcagccgcagcccaagatatcgaaggagcccaagctatagcagaagcccgcgagatcgttctcctaggaggcgaagttacagcaggtcgccactgggatctcctgcacggagtctcagcaggtcaccgccgctgccgccgcctcctcccagaaataacagcaggtcaccacctggagcccgagaagtgagcaggtcgccgccgccacctcctcccagaaataacagcaggtcaccaccggcagcccgagacgtgagcaggtcaccaccggcagcccgagacgtgagcaggtcgccaccaccacctcctgatgccagaagaagctatagtggatccccaggacagcagccacaacgcgacgagtccccatatgccaatgacgcctgagattctcttagctgccccaagatgctggaaaatgctaggggcccccagcatgttttgcctgtccggtcggcacaactgtaattctgtaggatcgagtctgagattttgttccagtgttttgggtttcccttgacacatcgctgctgatacaattgtggaggcaggagcacaacgtttctgttttaagtattgactggatgactttgggcgcttgtagttgtcaaggcaggacctgatttgtgttaggcttgtattactagactgcattcgaatttggagaaagtgttcatcgtgctgtatgttgagatatctc

SEQ ID NO: 132407 - DNA, 1247 bp, Zea Mays
aactgctttcggcccaaaacacttccctgctctctcggtctctcccagagtcccagctccctcactctactctggacgcgactcgaacttaaaccctagagccgcagccccggtcgctccaccgaccccaaatctcaaatcagcgggagggaactcgcacgcgaaggctgaactcatggctcgcgtctacgttgggaacctggatccgcgtgtcacggcgcgggagatcgaggacgagttccggatgtttggggttctgaggagtgtatgggttgctaggaaaccaccagggtttgccttcattgactttgatgaccgcagggatgcacaagatgccattcgtgaattggatggtaagaatggttggagggttgagctgtcaactaaagttggtggtggccgtggccgagaccgtaacggttctgatatgaagtgctatgagtgtggtgaagctggccactttgcacgtgaatgccgcttacggattggttcaggaggcttgggtagtggaaggcgtcgcagccgaagtcctagatatcgcagccgcagccgcagccgcagcccaagatatcgaaggagcccaagctatagcagaagcccgcgagatcgttctcctaggaggcgaagttacagcaggtcgccactgggatctcctgcacggagtctcagcaggtcaccgccgctgccgccgcctcctcccagaaataacagcaggtcaccacctggagcccgagaagtgagcaggtcgccgccgccacctcctcccagaaataacagcaggtcaccaccggcagcccgagacgtgagcaggtcaccaccggcagcccgagacgtgagcaggtcgccaccaccacctcctgatgccagaagaagctatagtggatccccaggacagcagccacaacgcgacgagtccccatatgccaatgacgcctgagattctcttagctgccccaagatgctggaaaatgctaggggcccccagcatgttttgcctgtccggtcggcacaactgtaattctgtaggatcgagtctgagattttgttccagtgttttgggtttcccttgacacatcgctgctgatacaattgtggaggcaggagcacaacgtttctgttttaagtattgactggatgactttgggcgcttgtagttgtcaaggcaggacctgatttgtgttaggcttgtattactagactgcattcgaatttggagaaagtgttcatcgtgctgtatgttgagatat

SEQ ID NO: 132408 - DNA, 1322 bp, Zea Mays
ctttcggcccaaaacacttccctgctctctcggtctctcccagagtcccagctccctcactctactctggacgcgactcgaacttaaaccctagagccgcagccccggtcgctccaccgaccccaaatctcaaatcagcgggagggaactcgcacgcgaaggcaaatacgctttagatcccccattgcttctggctactaggccagcgcgcctcgattttcttctccgttttggtctaattcgctgaactcatggctcgcgtctacgttgggaacctggatccgcgtgtcacggcgcgggagatcgaggacgagttccggatgtttggggttctgaggagtgtatgggttgctaggaaaccaccagggtttgccttcattgactttgatgaccgcagggatgcacaagatgccattcgtgaattggatggtaagaatggttggagggttgagctgtcaactaaagttggtggtggccgtggccgagaccgtaacggttctgatatgaagtgctatgagtgtggtgaagctggccactttgcacgtgaatgccgcttacggattggttcaggaggcttgggtagtggaaggcgtcgcagccgaagtcctagatatcgcagccgcagccgcagccgcagcccaagatatcgaaggagcccaagctatagcagaagcccgcgagatcgttctcctaggaggcgaagttacagcaggtcgccactgggatctcctgcacggagtctcagcaggtcaccgccgctgccgccgcctcctcccagaaataacagcaggtcaccacctggagcccgagaagtgagcaggtcgccgccgccacctcctcccagaaataacagcaggtcaccaccggcagcccgagacgtgagcaggtcaccaccggcagcccgagacgtgagcaggtcgccaccaccacctcctgatgccagaagaagctatagtggatccccaggacagcagccacaacgcgacgagtccccatatgccaatgacgcctgagattctcttagctgccccaagatgctggaaaatgctaggggcccccagcatgttttgcctgtccggtcggcacaactgtaattctgtaggatcgagtctgagattttgttccagtgttttgggtttcccttgacacatcgctgctgatacaattgtggaggcaggagcacaacgtttctgttttaagtattgactggatgactttgggcgcttgtagttgtcaaggcaggacctgatttgtgttaggcttgtattactagactgcattcgaatttggagaaagtgttcatcgtgctgtatgttgagata

SEQ ID NO: 132409 - DNA, 1339 bp, Zea Mays
ctttcggcccaaaacacttccctgctctctcggtctctcccagagtcccagctccctcactctactctggacgcgactcgaacttaaaccctagagccgcagccccggtcgctccaccgaccccaaatctcaaatcagcgggagggaactcgcacgcgaaggcaaatacgctttagatcccccattgcttctggctactaggccagcgcgcctcgattttcttctccgttttggtctaattcattgtttcgctcttgcaggctgaactcatggctcgcgtctacgttgggaacctggatccgcgtgtcacggcgcgggagatcgaggacgagttccggatgtttggggttctgaggagtgtatgggttgctaggaaaccaccagggtttgccttcattgactttgatgaccgcagggatgcacaagatgccattcgtgaattggatggtaagaatggttggagggttgagctgtcaactaaagttggtggtggccgtggccgagaccgtaacggttctgatatgaagtgctatgagtgtggtgaagctggccactttgcacgtgaatgccgcttacggattggttcaggaggcttgggtagtggaaggcgtcgcagccgaagtcctagatatcgcagccgcagccgcagccgcagcccaagatatcgaaggagcccaagctatagcagaagcccgcgagatcgttctcctaggaggcgaagttacagcaggtcgccactgggatctcctgcacggagtctcagcaggtcaccgccgctgccgccgcctcctcccagaaataacagcaggtcaccacctggagcccgagaagtgagcaggtcgccgccgccacctcctcccagaaataacagcaggtcaccaccggcagcccgagacgtgagcaggtcaccaccggcagcccgagacgtgagcaggtcgccaccaccacctcctgatgccagaagaagctatagtggatccccaggacagcagccacaacgcgacgagtccccatatgccaatgacgcctgagattctcttagctgccccaagatgctggaaaatgctaggggcccccagcatgttttgcctgtccggtcggcacaactgtaattctgtaggatcgagtctgagattttgttccagtgttttgggtttcccttgacacatcgctgctgatacaattgtggaggcaggagcacaacgtttctgttttaagtattgactggatgactttgggcgcttgtagttgtcaaggcaggacctgatttgtgttaggcttgtattactagactgcattcgaatttggagaaagtgttcatcgtgctgtatgttgagat

SEQ ID NO: 132410 - DNA, 1283 bp, Zea Mays
cctgctctctcggtctctcccagagtcccagctccctcactctactctggacgcgactcgaacttaaaccctagagccgcagccccggtcgctccaccgaccccaaatctcaaatcagcgggagggaactcgcacgcgaaggcaaatacgctttagatcccccattgcttctggctactaggccagcgcgcctcgattttcttctccgttttggctgaactcatggctcgcgtctacgttgggaacctggatccgcgtgtcacggcgcgggagatcgaggacgagttccggatgtttggggttctgaggagtgtatgggttgctaggaaaccaccagggtttgccttcattgactttgatgaccgcagggatgcacaagatgccattcgtgaattggatggtaagaatggttggagggttgagctgtcaactaaagttggtggtggccgtggccgagaccgtaacggttctgatatgaagtgctatgagtgtggtgaagctggccactttgcacgtgaatgccgcttacggattggttcaggaggcttgggtagtggaaggcgtcgcagccgaagtcctagatatcgcagccgcagccgcagccgcagcccaagatatcgaaggagcccaagctatagcagaagcccgcgagatcgttctcctaggaggcgaagttacagcaggtcgccactgggatctcctgcacggagtctcagcaggtcaccgccgctgccgccgcctcctcccagaaataacagcaggtcaccacctggagcccgagaagtgagcaggtcgccgccgccacctcctcccagaaataacagcaggtcaccaccggcagcccgagacgtgagcaggtcaccaccggcagcccgagacgtgagcaggtcgccaccaccacctcctgatgccagaagaagctatagtggatccccaggacagcagccacaacgcgacgagtccccatatgccaatgacgcctgagattctcttagctgccccaagatgctggaaaatgctaggggcccccagcatgttttgcctgtccggtcggcacaactgtaattctgtaggatcgagtctgagattttgttccagtgttttgggtttcccttgacacatcgctgctgatacaattgtggaggcaggagcacaacgtttctgttttaagtattgactggatgactttgggcgcttgtagttgtcaaggcaggacctgatttgtgttaggcttgtattactagactgcattcgaatttggagaaagtgttcatcgtgctgta

SEQ ID NO: 132411 - DNA, 1226 bp, Zea Mays
cctgctctctcggtctctcccagagtcccagctccctcactctactctggacgcgactcgaacttaaaccctagagccgcagccccggtcgctccaccgaccccaaatctcaaatcagcgggagggaactcgcacgcgaaggcaaatacgctttagatcccccattgcttctggctactaggccagcgcgcctcgattttcttctccgttttggtctaattcgctgaactcatggctcgcgtctacgttgggaacctggatccgcgtgtcacggcgcgggagatcgaggacgagttccggatgtttggggttctgaggagtgtatgggttgctaggaaaccaccagggtttgccttcattgactttgatgaccgcagggatgcacaagatgccattcgtgaattggatggtaagaatggttggagggttgagctgtcaactaaagttggtggtggccgtggccgagaccgtaacggttctgatatgaagtgctatgagtgtggtgaagctggccactttgcacgtgaatgccgcttacggattggttcaggaggcttgggtagtggaaggcgtcgcagccgaagtcctagatatcgcagccgcagccgcagccgcagcccaagatatcgaaggagcccaagctatagcagaagcccgcgagatcgttctcctaggaggcgaagttacagcaggtcgccactgggatctcctgcacggagtctcagcaggtcaccgccgctgccgccgcctcctcccagaaataacagcaggtcaccaccggcagcccgagacgtgagcaggtcaccaccggcagcccgagacgtgagcaggtcgccaccaccacctcctgatgccagaagaagctatagtggatccccaggacagcagccacaacgcgacgagtccccatatgccaatgacgcctgagattctcttagctgccccaagatgctggaaaatgctaggggcccccagcatgttttgcctgtccggtcggcacaactgtaattctgtaggatcgagtctgagattttgttccagtgttttgggtttcccttgacacatcgctgctgatacaattgtggaggcaggagcacaacgtttctgttttaagtattgactggatgactttgggcgcttgtagttgtcaaggcaggacctgatttgtgttaggcttgtattactagactgcattcgaatttggagaaagtgttcatcgtgctgta

SEQ ID NO: 132412 - DNA, 1683 bp, Zea Mays
ctttcggcccaaaacacttccctgctctctcggtctctcccagagtcccagctccctcactctactctggacgcgactcgaacttaaaccctagagccgcagccccggtcgctccaccgaccccaaatctcaaatcagcgggagggaactcgcacgcgaaggcaaatacgctttagatcccccattgcttctggctactaggccagcgcgcctcgattttcttctccgttttggtctaattcgtgaggaatttgggttttctcggtggagcttggttccgctccgccttggagtggatttcggtgacttctttgttcagattgtttcgctcttgcaggctgaactcatggctcgcgtctacgttgggaacctggatccgcgtgtcacggcgcgggagatcgaggacgagttccggatgtttggggttctgaggagtgtatgggttgctaggaaaccaccagggtttgccttcattgactttgatgaccgcagggatgcacaagatgccattcgtgaattggatggtaagaatggttggagggttgagctgtcaactaaagttggtggtggccgtggccgagaccgtaacggttctgatatgaagtgctatgagtgtggtgaagctggccactttgcacgtgaatgccgcttacggattggttcaggaggcttgggtagtggaaggcgtcgcagccgaagtcctagatatcgcagccgcagccgcagccgcagcccaagatatcgaaggagcccaagctatagcagaaggtaatttgctaatgacaccaattcaccacatgtattcatccagtagttttaattaagggttgggaaacacgacctagaaatcctaaaacttttgagaacgaagcaaaatttcggagataacacgttccctttaaccaagtgagtatccactatccagtatggtctcagatttgttggatagtatttaaccaaacattcgactatgcatttgacttattgagtgttgttctttatcttgcattggtactatataatacaatgcattctacaccccctcccacctgttatagctttgttagcgttggcctaatatttcaggggaacatgttgagagacttcataaaatacagatcaatgtcttcttgcctaactagcagccttttcaatgcgttattttatgttcatcctgaaaacaaatgttcggtttttccggagctacagcccgcgagatcgttctcctaggaggcgaagttacagcaggtcgccactgggatctcctgcacggagtctcagcaggtcaccgccgctgccgccgcctcctcccagaaataacagcaggtcaccacctggagcccgagaagtgagcaggtcgccgccgccacctcctcccagaaataacagcaggtcaccaccggcagcccgagacgtgagcaggtcaccaccggcagcccgagacgtgagcaggtcgccaccaccacctcctgatgccagaagaagctatagtggatccccaggacagcagccacaacgcgacgagtccccatatgccaatgacgcctgagattctcttagctgccccaagatgctggaaaatgctaggggcccccagcatgttttgcctgtccggtcggcacaactgtaattctgtaggatcgagtctgagattttgttccagtgttttgggtttcccttgac

SEQ ID NO: 132413 - DNA, 515 bp, Zea Mays
aactgctttcggcccaaaacacttccctgctctctcggtctctcccagagtcccagctccctcactctactctggacgcgactcgaacttaaaccctagagccgcagccccggtcgctccaccgaccccaaatctcaaatcagcgggagggaactcgcacgcgaaggctgaactcatggctcgcgtctacgttgggaacctggatccgcgtgtcacggcgcgggagatcgaggacgagttccggatgtttggggttctgaggagtgtatgggttgctaggaaaccaccagggtttgccttcattgactttgatgaccgcagggatgcacaagatgccattcgtgaattggatggtacttaataactatagatgcctatttattattactttgtagtgtagagaacttgccttttcttgtaagactttctacaagtaatttatgcagctttctgatattatgtagtttctttgtaaagaatgtggccctattaaattactatatgtaaaaaactaa

SEQ ID NO: 132414 - DNA, 90 bp, Zea Mays
ccctattcacccccctctaggcgactttcacacagcccaaccaaacagacccttagaagcccccacggaaaaaatccttaaaagtcattg

SEQ ID NO: 132415 - DNA, 805 bp, Zea Mays
aagaaaaacgaaaaacgaaaaactagagggtggaggacaacggtgtccagcaaaagagagagaagaggaggggaggaggtggaagtagcaagaatggcgtgctccaccaatctctgcttctcggcgtcgattcctcctcttccagcctcttcttcttcttctgtctcctcccccttcctcacggtggagcgtgtgtcctatgttccgtccttgtccaggtggacaatccgatacaagcaattggggcatgcatatcagagaagccacgttctggcctttgctagtgcagatgcatcacagggtaaaagaagctcaggtgagaatgttgtgatggttgatccactggaagctaagcgtctagctgctaaacaaatgcaagaaattagggccaaagaaaagctgaagaggcgcagtcaagcagaagctatcaatgggccattggcaatgataggactgactgctggattgatagtggaagctcagacaggaaaaggcatcttagggcagctagctggatatctgacggctatttctagtttatttggacaataatagtgggccatctttggagatttattttttcacgttccttggccaggagagctcttatctgttgcatccacccaatttttgtgggggagttaatccgagcccagacttgtatgtttatcaagcacgcatgggctgaacattaattatacatgtaacggggtcgttctatgtagcccaaccatttctgatgatagaacctgctaaagagcagttcttcatcatacttaaatgtgaaatgttaagtctttgagaa

SEQ ID NO: 132416 - DNA, 706 bp, Zea Mays
aagaaaaacgaaaaacgaaaaactagagggtggaggacaacggtgtccagcaaaagagagagaagaggaggggaggaggtggaagtagcaagaatggcgtgctccaccaatctctgcttctcggcgtcgattcctcctcttccagcctcttcttcttcttctgtctcctcccccttcctcacggtggagcgtgtgtcctatgttccgtccttgtccaggtggacaatccgatacaagcaattggggcatgcatatcagagaagccacgttctggcctttgctagtgcagatggtaaaagaagctcaggtgagaatgttgtgatggttgatccactggaagctaagcgtctagctgctaaacaaatgcaagaaattagggccaaagaaaagctgaaggtgcattgcagctgtattggagtgtatcattccttagattaaatcaatcttatatgctaaaggaagaaaacttcatgataaggaaaggaggaaaacatttatctttttttttttggaccaatagttggtgatgaatcattgtttcagataactggagacagaactaggcttttacctgttcatgttgtcctgcgagttctccaattctaatttatttatttattgtgtgggtacaaacttgattgcatgttcttcagttgaggcatctaattaactgcaaaaggatattcaacttaatattacctagtgg

SEQ ID NO: 132417 - DNA, 1320 bp, Zea Mays
ctggtatatgctgaatattgacttcagtctcgtgctctcgtcttgtattcttcgtttgatagggacaaaagttaaaagaatgcttatacttcaaaaaaagtggtatatgcatgaaacaatttcggcacctaaccaaaattggcgcgcgcttttgctcattgctgcaggtgacccacttcaagtgcggtggcgtggctatcggcgttggcatgcagcaccacgtagccgacggcttctccggcctgcacttcatcaactcgtgggcggacctctgccgcggcgtcccgatcgccgtcatgcccttcattgaccgctcgctcctccgcgcgcgcgatccgccgaccccggcctacccgcacatcgagtaccagccggcgcccgccatgctatctgagccgccacaggcggccctcacgtccaagccggcgacgccgcccacagccgtggctatcttcaagctctcccgcgccgagctcgtccgcctccgttcgcaggtccccgcgcgcgagggcgcgccgcggttcagcacgtacgctgtgctggcggcgcacgtgtggcggtgcgcgtccctggcgcgcggcctgccggccgaccagcccaccaagctgtactgcgccacggacgggcggcagcggctgcagccgccgcttccggagggctacttcggcaacgtgatcttcacggcgacgccgctggccaacgccggcacggtgacggccggggtggcagagggcgcgtccgtgatccaggccgcgttggaccggatggacgacgggtactgccggtcagcgctggactacctggagctgcagccggacctgtcggcgctggtccgcggggcgcacacgttccggtgccccaacctggggctcaccagctgggtgcgcctgcccatccacgacgcggacttcgggtgggggcggcccgtgttcatgggccccggcggcatcgcctacgaggggctcgcgttcgtgctccccagcgccaaccgcgacggcagcctgtccgtggccatctcgctgcaggcggagcacatggagaagttccggaagctcatctacgacttctgatctccaactcctccccacaagtcatcagtaccagtacgcgcaacacaaagaagcaagagaccgttgggagtaggttgcagcaatattctttgatttcacacatagttcctgcacacttttccgttcctgcctgccccctttgggcagggcgcataccttttgtgccgaattatttacgagcccctgcaattgtatgatgaatgaacaatgaatgatacagattaataagattaattaacttatctcttga

SEQ ID NO: 132418 - DNA, 1901 bp, Zea Mays
cagctctccaccaagagctgtaccccacaccactaggcactagtccactacctaacgctacctgccttttcaccgcgtcgtgcgccaccgccacgttgagctcgcgtccgtcccagatccgccgtgctcctccatcgctcgcgcaaggttggttactggcctcgcctgctcgcctttccttcaactccttcccgcccgcaggatttgggctttctcgatcacgaggcgctccggtaggtcggagtgggaggatcaatcaatcaatccggttgcgtacgaacgataacgcggtgtgtcgcgtcgcgtgcagatgaagatcacggtgcgggggtcggagatggtgtacccggcggcggagacgccgcgccgccggctctggaactcggggcccgacctggtggtgccgcggttccacacgcccagcgtctacttcttccgccgcgaggacgcggacgggaacgacctggcgggcgcggacgggagcttcttcgacggggcgcggatgcggcgcgcgctggccgaggcgctcgtgcccttctacccgatggccggccggctggcgcgcgacgaggacggccgcgtcgagatcgactgcaacgcgggcggggtgctgttccaggaggcggacgcgcccgacgccaccatcgactacttcggcgacttcgcgcccaccatggagctcaagcgcctcatccccaccgtcgacttcacggacgacatctcctccttcccgctgctcgtgctccaggtgacccacttcaagtgcggtggcgtggctatcggcgttggcatgcagcaccacgtagccgacggcttctccggcctgcacttcatcaactcgtgggcggacctctgccgcggcgtcccgatcgccgtcatgcccttcattgaccgctcgctcctccgcgcgcgcgatccgccgaccccggcctacccgcacatcgagtaccagccggcgcccgccatgctatctgagccgccacaggcggccctcacgtccaagccggcgacgccgcccacagccgtggctatcttcaagctctcccgcgccgagctcgtccgcctccgttcgcaggtccccgcgcgcgagggcgcgccgcggttcagcacgtacgctgtgctggcggcgcacgtgtggcggtgcgcgtccctggcgcgcggcctgccggccgaccagcccaccaagctgtactgcgccacggacgggcggcagcggctgcagccgccgcttccggagggctacttcggcaacgtgatcttcacggcgacgccgctggccaacgccggcacggtgacggccggggtggcagagggcgcgtccgtgatccaggccgcgttggaccggatggacgacgggtactgccggtcagcgctggactacctggagctgcagccggacctgtcggcgctggtccgcggggcgcacacgttccggtgccccaacctggggctcaccagctgggtgcgcctgcccatccacgacgcggacttcgggtgggggcggcccgtgttcatgggccccggcggcatcgcctacgaggggctcgcgttcgtgctccccagcgccaaccgcgacggcagcctgtccgtggccatctcgctgcaggcggagcacatggagaagttccggaagctcatctacgacttctgatctccaactcctccccacaagtcatcagtaccagtacgcgcaacacaaagaagcaagagaccgttgggagtaggttgcagcaatattctttgatttcacacatagttcctgcacacttttccgttcctgcctgccccctttgggcagggcgcataccttttgtgccgaattatttacgagcccctgcaattgtatgatgaatgaacaatgaatgatacagattaataagattaattaacttatctcttga

SEQ ID NO: 132419 - DNA, 1824 bp, Zea Mays
cagctctccaccaagagctgtaccccacaccactaggcactagtccactacctaacgctacctgccttttcaccgcgtcgtgcgccaccgccacgttgagctcgcgtccgtcccagatccgccgtgctcctccatcgctcgcgcaaggttggttactggcctcgcctgctcgcctttccttcaactccttcccgcccgcaggatttgggctttctcgatcacgaggcgctccgatgaagatcacggtgcgggggtcggagatggtgtacccggcggcggagacgccgcgccgccggctctggaactcggggcccgacctggtggtgccgcggttccacacgcccagcgtctacttcttccgccgcgaggacgcggacgggaacgacctggcgggcgcggacgggagcttcttcgacggggcgcggatgcggcgcgcgctggccgaggcgctcgtgcccttctacccgatggccggccggctggcgcgcgacgaggacggccgcgtcgagatcgactgcaacgcgggcggggtgctgttccaggaggcggacgcgcccgacgccaccatcgactacttcggcgacttcgcgcccaccatggagctcaagcgcctcatccccaccgtcgacttcacggacgacatctcctccttcccgctgctcgtgctccaggtgacccacttcaagtgcggtggcgtggctatcggcgttggcatgcagcaccacgtagccgacggcttctccggcctgcacttcatcaactcgtgggcggacctctgccgcggcgtcccgatcgccgtcatgcccttcattgaccgctcgctcctccgcgcgcgcgatccgccgaccccggcctacccgcacatcgagtaccagccggcgcccgccatgctatctgagccgccacaggcggccctcacgtccaagccggcgacgccgcccacagccgtggctatcttcaagctctcccgcgccgagctcgtccgcctccgttcgcaggtccccgcgcgcgagggcgcgccgcggttcagcacgtacgctgtgctggcggcgcacgtgtggcggtgcgcgtccctggcgcgcggcctgccggccgaccagcccaccaagctgtactgcgccacggacgggcggcagcggctgcagccgccgcttccggagggctacttcggcaacgtgatcttcacggcgacgccgctggccaacgccggcacggtgacggccggggtggcagagggcgcgtccgtgatccaggccgcgttggaccggatggacgacgggtactgccggtcagcgctggactacctggagctgcagccggacctgtcggcgctggtccgcggggcgcacacgttccggtgccccaacctggggctcaccagctgggtgcgcctgcccatccacgacgcggacttcgggtgggggcggcccgtgttcatgggccccggcggcatcgcctacgaggggctcgcgttcgtgctccccagcgccaaccgcgacggcagcctgtccgtggccatctcgctgcaggcggagcacatggagaagttccggaagctcatctacgacttctgatctccaactcctccccacaagtcatcagtaccagtacgcgcaacacaaagaagcaagagaccgttgggagtaggttgcagcaatattctttgatttcacacatagttcctgcacacttttccgttcctgcctgccccctttgggcagggcgcataccttttgtgccgaattatttacgagcccctgcaattgtatgatgaatgaacaatgaatgatacagattaataagattaattaacttatctcttga

SEQ ID NO: 132420 - DNA, 1910 bp, Zea Mays
ccgctgttgctttccgctggtcatccatcccaccaaacgcccagcatttttcttttcttcatccaaaaaaaaccccaacccgagactcgggcagattcacgggggacgaccacgaaggggcgcgcgcacggcagcctggctataaaaggcgctccgccccccgctagctcaccagctctccaccaagagctgtaccccacaccactaggcactagtccactacctaacgctacctgccttttcaccgcgtcgtgcgccaccgccacgttgagctcgcgtccgtcccagatccgccgtgctcctccatcgctcgcgcaagatgaagatcacggtgcgggggtcggagatggtgtacccggcggcggagacgccgcgccgccggctctggaactcggggcccgacctggtggtgccgcggttccacacgcccagcgtctacttcttccgccgcgaggacgcggacgggaacgacctggcgggcgcggacgggagcttcttcgacggggcgcggatgcggcgcgcgctggccgaggcgctcgtgcccttctacccgatggccggccggctggcgcgcgacgaggacggccgcgtcgagatcgactgcaacgcgggcggggtgctgttccaggaggcggacgcgcccgacgccaccatcgactacttcggcgacttcgcgcccaccatggagctcaagcgcctcatccccaccgtcgacttcacggacgacatctcctccttcccgctgctcgtgctccaggtgacccacttcaagtgcggtggcgtggctatcggcgttggcatgcagcaccacgtagccgacggcttctccggcctgcacttcatcaactcgtgggcggacctctgccgcggcgtcccgatcgccgtcatgcccttcattgaccgctcgctcctccgcgcgcgcgatccgccgaccccggcctacccgcacatcgagtaccagccggcgcccgccatgctatctgagccgccacaggcggccctcacgtccaagccggcgacgccgcccacagccgtggctatcttcaagctctcccgcgccgagctcgtccgcctccgttcgcaggtccccgcgcgcgagggcgcgccgcggttcagcacgtacgctgtgctggcggcgcacgtgtggcggtgcgcgtccctggcgcgcggcctgccggccgaccagcccaccaagctgtactgcgccacggacgggcggcagcggctgcagccgccgcttccggagggctacttcggcaacgtgatcttcacggcgacgccgctggccaacgccggcacggtgacggccggggtggcagagggcgcgtccgtgatccaggccgcgttggaccggatggacgacgggtactgccggtcagcgctggactacctggagctgcagccggacctgtcggcgctggtccgcggggcgcacacgttccggtgccccaacctggggctcaccagctgggtgcgcctgcccatccacgacgcggacttcgggtgggggcggcccgtgttcatgggccccggcggcatcgcctacgaggggctcgcgttcgtgctccccagcgccaaccgcgacggcagcctgtccgtggccatctcgctgcaggcggagcacatggagaagttccggaagctcatctacgacttctgatctccaactcctccccacaagtcatcagtaccagtacgcgcaacacaaagaagcaagagaccgttgggagtaggttgcagcaatattctttgatttcacacatagttcctgcacacttttccgttcctgcctgccccctttgggcagggcgcataccttttgtgccgaattatttacgagcccctgcaattgtatgatgaatgaacaatgaatgatacagattaataagattaattaacttatctcttga

SEQ ID NO: 132421 - DNA, 1382 bp, Zea Mays
cagctctccaccaagagctgtaccccacaccactaggcactagtccactacctaacgctacctgccttttcaccgcgtcgtgcgccaccgccacgttgagctcgcgtccgtcccagatccgccgtgctcctccatcgctcgcgcaagatgaagatcacggtgcgggggtcggagatggtgtacccggcggcggagacgccgcgccgccggctctggaactcggggcccgacctggtggtgccgcggttccacacgcccagcgtctacttcttccgccgcgaggacgcggacgggaacgacctggcgggcgcggacgggagcttcttcgacggggcgcggatgcggcgtcccgatcgccgtcatgcccttcattgaccgctcgctcctccgcgcgcgcgatccgccgaccccggcctacccgcacatcgagtaccagccggcgcccgccatgctatctgagccgccacaggcggccctcacgtccaagccggcgacgccgcccacagccgtggctatcttcaagctctcccgcgccgagctcgtccgcctccgttcgcaggtccccgcgcgcgagggcgcgccgcggttcagcacgtacgctgtgctggcggcgcacgtgtggcggtgcgcgtccctggcgcgcggcctgccggccgaccagcccaccaagctgtactgcgccacggacgggcggcagcggctgcagccgccgcttccggagggctacttcggcaacgtgatcttcacggcgacgccgctggccaacgccggcacggtgacggccggggtggcagagggcgcgtccgtgatccaggccgcgttggaccggatggacgacgggtactgccggtcagcgctggactacctggagctgcagccggacctgtcggcgctggtccgcggggcgcacacgttccggtgccccaacctggggctcaccagctgggtgcgcctgcccatccacgacgcggacttcgggtgggggcggcccgtgttcatgggccccggcggcatcgcctacgaggggctcgcgttcgtgctccccagcgccaaccgcgacggcagcctgtccgtggccatctcgctgcaggcggagcacatggagaagttccggaagctcatctacgacttctgatctccaactcctccccacaagtcatcagtaccagtacgcgcaacacaaagaagcaagagaccgttgggagtaggttgcagcaatattctttgatttcacacatagttcctgcacacttttccgttcctgcctgccccctttgggcagggcgcataccttttgtgccgaattatttacgagcccctgcaattgtatgatgaatgaacaatgaatgatacagattaataagattaattaacttatctct

SEQ ID NO: 132422 - DNA, 1377 bp, Zea Mays
aggggcgcgcgcacggcagcctggctataaaagatgaagatcacggtgcgggggtcggagatggtgtacccggcggcggagacgccgcgccgccggctctggaactcggggcccgacctggtggtgccgcggttccacacgcccagcgtctacttcttccgccgcgaggacgcggacgggaacgacctggcgggcgcggacgggagcttcttcgacggggcgcggatgcggcgcgcgctggccgaggcgctcgtgcccttctacccgatggccggccggctggcgcgcgacgaggacggccgcgtcgagatcgactgcaacgcgggcggggtgctgttccaggaggcggacgcgcccgacgccaccatcgactacttcggcgacttcgcgcccaccatggagctcaagcgcctcatccccaccgtcgacttcacggacgacatctcctccttcccgctgctcgtgctccaggtgacccacttcaagtgcggtggcgtggctatcggcgttggcatgcagcaccacgtagccgacggcttctccggcctgcacttcatcaactcgtgggcggacctctgccgcggcgtcccgatcgccgtcatgcccttcattgaccgctcgctcctccgcgcgcgcgatccgccgaccccggcctacccgcacatcgagtaccagccggcgcccgccatgctatctgagccgccacaggcggccctcacgtccaagccggcgacgccgcccacagccgtggctatcttcaagctctcccgcgccgagctcgtccgcctccgttcgcaggtccccgcgcgcgagggcgcgccgcggttcagcacgtacgctgtgctggcggcgcacgtgtggcggtgcgcgtccctggcgcgcggcctgccggccgaccagcccaccaagctgtactgcgccacggacgggcggcagcggctgcagccgccgcttccggagggctacttcggcaacgtgatcttcacggcgacgccgctggccaacgccggcacggtgacggccggggtggcagagggcgcgtccgtgatccaggccgcgttggaccggatggacgacgggtactgccggtcagcgctggactacctggagctgcagccggacctgtcggcgctggtccgcggggcgcacacgttccggtgccccaacctggggctcaccagctgggtgcgcctgcccatccacgacgcggacttcgggtgggggcggcccgtgttcatgggccccggcggcatcgcctacgaggggctcgcgttcgtgctccccagcgccaaccgcgacggcagcctgtccgtggccatctcgctgcaggcggagcacatggagaagttccggaagctcatctacgacttctgatct

SEQ ID NO: 132423 - DNA, 1095 bp, Zea Mays
agctctccaccaagagctgtaccccacaccactaggcactagtccactacctaacgctacctgccttttcaccgcgtcgtgcgccaccgccacgttgagctcgcgtccgtcccagatccgccgtgctcctccatcgctcgcgcaaggttggttactggcctcgcctgctcgcctttccttcaactccttcccgcccgcaggatttgggctttctcgatcacgaggcgctccggtaggtcggagtgggaggatcaatcaatcaatccggttgcgtacgaacgataacgcggtgtgtcgcgtcgcgtgcagatgaagatcacggtgcgggggtcggagatggtgtacccggcggcggagacgccgcgccgccggctctggaactcggggcccgacctggtggtgccgcggttccacacgcccagcgtctacttcttccgccgcgaggacgcggacgggaacgacctggcgggcgcggacgggagcttcttcgacggggcgcggatgcggcgcgcgctggccgaggcgctcgtgcccttctacccgatggccggccggctggcgcgcgacgaggacggccgcgtcgagatcgactgcaacgcgggcggggtgctgttccaggaggcggacgcgcccgacgccaccatcgactacttcggcgacttcgcgcccaccatggagctcaagcgcctcatccccaccgtcgacttcacggacgacatctcctccttcccgctgctcgtgctccaggtgaggaaaatcgatccatccccacctaacatcttcgggcttcagttctctgcatttcactagagttttgacgatttgatcggggtcggggaagggttgaaacaaagtggtgggcttcggttatctgagtcgccgccagcgcacaacgtctgggtcaacgtaggtagactcgtcacaattgttgggtgcatgtgcggcgtgtgtatagtatacatgggctggcgccgacgcggatcgatgcgcgtggagacaacctgtcaggcctgcatccgttgttcagctgactagccgaggtgtggaggacgatctccagatcttcttacatttatgaatgaaagatgtggccaa

SEQ ID NO: 132424 - DNA, 1467 bp, Zea Mays
ctcgatccattcccaatttttcatccatccatccgaaggctagagttatctcgtacctcgcccgctgctgcctgctctgctccccgaaggccgaatccgatagccagcgccaacaaaacccctctccgcgcccgctccccaccggtgacagcgcgcccatggctgccttactccgaacggccgcggccctcgtgcccccgccctcgtcgcccctgtccgcacgggagccgcgtgggcggtgcctgcggctagcctgctcccggcgcgcgccggtccgacagcttcgggcgtggccactgccgactccgcacgtcttcggtcgctctgggggccggttccggcgcctgagcgtcaccgaggccgaggaggccgcgcagacggcggcgcaggaggatccagaaaccgaagttactggagagagtgctgcagatgacagtgctggaagcacagacgaaactccatctattattgtgacaacactgcaatcatacagagtagctctgattaatgatgatgacgcaaaagctgctgagatagaatcctttttactttctatcgaggatgagaagaactctcttttgaacaaaatcactgctctagatgtggaactagcaactcaacgagaacgtatcttgcggattagtgctgattttgacaatttcaggaaaaggacagaaaatgagaagcttaacatgatggaaaatgtgcaaggggaacttatagagagttttttgcctgttctcgataactttgaaagagcaaaaatgcaaataaaggtggaaacagagggagaggagaaaataaacaatagctatcagagcattaataagcaattcatcgagattcttaattcattgggtgttgaagatgttgaaactgttggcaaaccatttgatcctatgctgcacgaggctattatgagagaagaatcatcggagtatgaagaggggatcatactccaggaattcagaaaaggcttcaaacttggggaaagactacttcgcccagcaatggtcaaggtgtctgcagggccaggccctgaaaattctggagatgatgaccctacagttgttgaagatagtgtggcacctcaaaaggttgaggatgttgaagaagacggttttgatgacggcgatgcagaataggtggctggagcttcagctgtgaatcaacaagaacaggtccagaaattttgatgtttttctggagcgtgccaagcaggtaataggatagtgccaattcgttcaagctagagttaggtccccaaatgtgctgttctttactgctactgacatgggggtgttggtattgcgacaaatttgtgtttctacccgccgtggtcaactttttgttcttacgaaggggaattttcgtggttcatacatgaaaaaaaaaatgatatttgtaaggactaaattggctcagtttgctattgataatcaatatatgaattccattgtttgtaca

SEQ ID NO: 132425 - DNA, 1214 bp, Zea Mays
tttcagcaacaacacctcaatctgtttcagtttcagattttagcaacaagatgcaacaacacactgatttcagcacatgcatcacatcaattcagtccgcgaagctcttacaacacatgcaaatttctgtcatttcagcaaagctcctacaacacaatgagcctacaagcctactgtcgttcactgaaaccccaccgcgaggggaggaggccgcagaagttgctaatgtccccgcttgacggagacggatagtgccgcggacggggcatgaacagctctgttgttcgatggagcaggagcgcgacgcgaggagaggagctcgacaaggccggagtcctgacgaagccgaaggaagcagcagatcgacgcgtacaggaacacgcagctcgagtctcgctgcatcacgacgcgcagctgaaggtcgggcgaaggtgggcgtggagtagggaggagcacaccgccggccgtgggcatcgcagcgacgaaagctgacatgaggttgtgcggcgccggcgcagaggagcacgccgccacgacatgggaaacacagagacgggcgcgacgccggcgaagaggactcctcgacgacgggaccggatggagcaggcgagcacgacggtctgcctcgggcgatgggggcgcaaggaggcacagcgggccgcgcgtccgcctcctgcttgcgcatccgacggaggcgcagcggaccgcacgggccgcgcgcgcggcatcggagaagtagcagtcgacaccatccggagaattagtagcccgcccagagagctagcaggccgccgcgtcgtggagccagggagaggaggtgcttcgaggagggagacgagatgcggcccggcggcgcgtgctggccgactcgggagcaagaagctgctgtttgattcagaatgagattggggaaagttttaggtgggccccactgtcaagcacaataaagtggacggaaatcagatgtaaaccgcgtataagtgtccccctgaggtcagttagctcgtggaggggcaaaactgagcacaaagtaaaattaggggtagcaatgagaaggcagtccaaagtaagggcaccaatataaagatcccaagataattcgacgtatgtcagttgcaaatatttgaataataaagcaaatgtaaaagataaagaattcataagtgttcatacataaaaatacaaacaaattttacattaccattgcatgtgag

SEQ ID NO: 132426 - DNA, 244 bp, Zea Mays
aagcaaccccgaaatcttcaacgctattgccactgcgccatgcctgtcccgcacctcctctcgagtctcgccacttcccctaacctagtcaccgccgctccaccggaatggagcaacgtggcggtgcccgacacaacttcgtgccgcactacgactcccgcctccgcttcaccagggactcaccgcccgtgatgatatggcgtgaggcgatttgtggggaagttgggctcgaagagagcgtgag

SEQ ID NO: 132427 - DNA, 601 bp, Zea Mays
gttgactttgatgaagaagaggatgattacgtccaagagacgtcgtcgctaaaagctgtgtggaacagtcgttgctacatgcagctgtttctggtgtccagtcgctgcagaagagtccacagcgagcagcaagtatccggatttcgccctgctgtgcctgtactgttcctccttttcgggctagtttggagccacaaaactagagcagattggaggggccaaaatacacttcttattcaaaatttgaataataagtggatttttgtttctccaatcccttccggttttatggctcccaaactagtccatctagtgcgtcggttttacatgtggttcaagtggggtactgtgtgctaacagatacaacaacgaggcttgtctgtatgtctgctgacactagagaccaatgcatataatgattctaatttaggccccgtttgatgattctaatttaggctccgtttggtaaggcttcggtttctttaaaaacagttctgactcggagccggagccgttttacaattcgtttggtaaaatagtttttcttgtatttattttgaattatgtattagagaaatgatagagaagccagtagaaacca

SEQ ID NO: 132428 - DNA, 725 bp, Zea Mays
actcgagccaaaccccctcaactcaactgctgaacgcagagttcgatctagcacgcgcagcggcggccgccgcccacaatggcgtcccttttcaaggacccgagcaagctctcagcgtacagggaccgccgattcaagggcacacaggaggagtatgaggcaacgctgcatgcgtcgacaacgctgtacattgggaatatgtccttctacaccacggaggagcaggcctacgagctcttctcccgcgctggcgagatcaagaagatcatcatggggctcgacaagaactctaagaccccatgcggtttctgcttcgtactgtactactccagggaggatgctgaagatgctgtcaaatacatcagtggaacgatgcttgacgatcgtccaatccgtgttgatttcgattggggctttgaagaaggcaggcaatggggccgtggacgaagtggtggacaagtgagagatgagtaccgtacagattatgatcctggtagaggtggttacggtaagatggttcagagggaactagaagcacaaagagaactagttgactatggtggatctttccaaccaaatgcaccacctccctatgagagaggtgagcggaagagaggatacggggactctcataggaatgacagaggagattaccagcggaaacgctaccggagcagcgatgaccggtcagcaccagaggagtccaagagagcgcccgactctga

SEQ ID NO: 132429 - DNA, 612 bp, Zea Mays
actcgagccaaaccccctcaactcaactgctgaacgcagagttcgatctagcacgcgcagcggcggccgccgcccacaatggcgtcccttttcaaggtacggatccccgaaaccctaattccacgagcacccgggccccctcgctccgccatgctgacgcggctcttcgcggcttctcctgctgcctccaggacccgagcaagctctcagcgtacagggaccgccgattcaagggcacacaggaggagtatgaggcaacgctgcatgcgtcgacaacgctgtacattgggaatatgtccttctacaccacggaggagcaggcctacgagctcttctcccgcgctggcgagatcaagaagatcatcatggggctcgacaagaactctaagaccccatgcggtttctgcttcgtactgtgcgacctcttcttcttccttgatgcgtcgcgttgcatttcctgtttgttcttgtgctcgatgacttcggattcggtgctgtagtttctttcaatttacaggaacatagtcctcgccctagtttagttagaagtgaagattgccccaattgttctgttggtgtgtagtttgatgcagttggacgctgagtagatga

SEQ ID NO: 132430 - DNA, 587 bp, Zea Mays
atccaaatcagtgttcaccatcttcgaatccggatccagacggatattttccgaaccatattacatccctaatggtggtggtctgggtttgtccgatcagtggctggggcagctcatggcgtgcacaacagtgggcatgaagtggaggatactggttgagggaagagagggggagagcacaacgatttggagcagggttttataggcgcacggggccgaaacgaggaggcagggcgcgacggagccgggagaacaactagtgctcaggcgtgggcacgacacaccatcaagcacgttgcgacgttgcccctacctatgttcaaacacccattggttgatattcattgcgaattcgacaaaatctctggaataaagattctccttgaactataagctttctatcttatgtgaaggttgaaagggaaatgtgcccttgggcaatttctatcaggttttggtgattaagtgcccaacacatttaatgagttcttatgtgctaaatgaagagagaagtgcaaatcaaagagaaggtatgtttctagacttagtacatagtttttaagtactaatatgttttatctaagtgc

SEQ ID NO: 132431 - DNA, 1720 bp, Zea Mays
atgctgccgcgccgttatatacgccagctccgcgacccgggtcctcctgcccgtctcatcccccacgattcaaaacggccgtgcgcaccaactataacctgcgacagcggctccttttgcgatccatcggccatgtgcactcccgcggcgtgccgcgggcgcgtgcgcatcaacgtcggcgggcgggtgttcgagacgacggccgccacgctctccagcgcggggcgggacaccatgctcggcgccatggtggacgcctcctggaacgcgtgccccgacggcgcggccgagtacttcatcgaccgcgacccggcgtgcttcgcggtgctgctggacctcctccgcacgggggcgctccacgtgccgccgggcgtccccgaggcgacgctctaccgcgaggcgctctactacggcctcctggaccgcgtccgcgccgcgcgcctcggggagctggacggcgaccgcgtccgcctggcggcgtccgtgcccgggcgcgcgccgggggacggcacggccgtccgcgccgcgcccgacggcggctgctgcgtcgcgcacggcggcgccgtgcgcgtctacaactggatgctcgaggagcgccgccccgtgtgcctcgcccacgcgccggtcaacgacgcggcgtacctggacgccgccacgctcctggtcgccgcgcgggagcggcccggccgccgcgacggccacgacggcggcgtggccgccttctccgcgctcacgggcggcctgcgccaccgcttccgcgtcgcgcacgcccgccagcctcggtcgttcaccgccggcgccctggccttcgacgggggaggagggtcagggtgcgccgtcttcgcgagctgcaagggccggctcaacgagtacggcgtcggcgtctgggaccgcaacacgggcgagcaggccgacttcttctacgagccgcccggctgcgcgctaggcgacgccgacaggctccagtggctggacggcaccggcgcgctcatggtggccacgatgttcccgcgggccgactcctcctccatcagcctgctcgacttcagggacaggagcgtcgtctggtcgtggtccgacgtcggcacgccggcgtcgctcgaggacaagcacgcggtacacgccgtcgcgatggaggacgggaggtcggtgtgcgtgatcaaccagtacgacgacctcggcttcctcgacctccggagcagcgccggcggcgtgcggtggcgatcgcggagcaagctggcggcgggcgggaaggcgaaagcgctcggcgaggaggtctgttacccgaagctcgccacgtacggcggccagctgttcgcgtcgacgggcgacgccatctcggtgttcagcggccccgaccacgtgctcacgtcgacgctgcgccgcagcgaaggcggcgccatctgcgacttctccatcggcggcgatcgcatcttcgctctgcacagcgacgagaatgtcttcgacgtatgggagacgccgccgccggcgatcatctgaccgtgtcacggcaggattagccgtgtttctcttgctcgttggtggtagtagtaattggtaaaaggaattactgacacaggtttcgacagaaaacacacaacacacacatagtactgtaacttgctcatcgttgtgatgacactggttcttttgcttgtggaaaggaatatggatatcagtggagcacacacagtattgtcattatcgacaaacgcctttc

SEQ ID NO: 132432 - DNA, 3013 bp, Zea Mays
acccccaggcagaagcgaacacaacagccccttccgcgccgaaacctcgtcgcgtcgcgcggaagagaggagagggacgggggccgcggcccgcgggggcgagaagagaacaccactacggattgcctcgtcatccaccaccgctccaccgctaaaccctcgagtgctcttccgcgcggcggggcgccgagcgtgaaagccacctgctctcgtccagtcgcactcgcgccgcgaggggaaaccctaggagcggcagatctagagcgggcgctctcgatccggccgcgtagacgcccgttttggccggggaaatggcggaggatcctgccgccgaacaggagacgcggcagctagaggaccggctcagggaggtcggggaacggctgcaggcgcctcccgacgacgcggaggacctgctcaacctcctcatcgaagttgaggagtgtttactaaaagttgagcagtcacctcctgaaagcacatcgaatgctcttcaactagcaactgcagctcttgtcaagaaagagctgctggcccatgctgattcaaatattagacttgccgtggcatcatgcatatctgagatcacacggatcacagcgccagatgctccatatgatgacgatgcaatgaaggatgtattctctttaattgtggaggccttcaagcatctggatgacatagagagccccttctttggaaggagaacttcaattcttgatacagtcgcaaaagttcggtcctgtgtggtgatgctagatcttgaatgtgacgatttgataaatgatatgttccatcacttcttgaggactgttaattctgggcattcagaagccgtcatatgctgcatggaaacaataatgagattggtaattgaggagagtgaggatgtccaaccacagattgcttcatgtctactccaaaatgttagaaaagaagaaaaggaatcttcttcagcttcctttgagcttgctgaaaaagtgataggcacatgccgtgagaaacttaagccagtctttctgcaatcactaaaaggcacttccttgagcgaatacagccaaatcgtcgcatcggtttgtgaagatgtttcagatgacagggaagataacaatgctgatccttctgggaaggacacggtggatgatggcaagctctctgaaaggactatttctgatgaattgcctcaggaatcttcaaaggcagagcaagatgttagccgtcctgaacaagacggtacttgtatgaatggtaatacaggtactgctattagcagtggtgctaccctaccagatactagcgaatctgatcaaggaccaccaaaagagaagactgaacaaccttgctatgctgatgacataacagatactgatcagttgaaatctgaccacaatgaaggtgcggagttcgatactgcaaagcccgaaaagaaagctgccgttgattcagacaaaagtgctaagcttaaactgtccgataaatgtgaagcacctgtgcattctgatgctgacactaaaaaggaagcatctgcagagggtaccgatggagccgctgatgatacatcaacggctgctgattgtacacctaaaccaaagcgaggccgtcctcctggcccaaagtcatcgcagaagaaggctgctggaaaggatcaatcttcaggttcagatttgaaaaaggtcaatgaggcaggtgattcagccggaaagttggcgaaacgatcagcgaaggatgagaagtccacaaagaaggctggtgaaggagaatcatctaagaagacccaaaagtacaattcaaagcaacagaaggatgaaaacctatctgaggatcctgccaaggatctgagtttaaaggaaatgataacaccaaaatcttcgactaaggtcccaggtagaaccaaagggcaaagcacagagaatagcacacctaaaatgaagcaagaacaagaaactgaagagcctcctcgttcaaggaaaagcaaaggacttgataaaagtctagttggtgcaaggatcaaagtttggtggccagatgataagatgttctacaatggtgttgtggagtcatttgattctgtttctaagaggcacaaggtcgcatatgatgatggggacgtagaggtactactgttgagggatgaaaagtgggaattcatcagtgaggagaagggagcttctgtggcatctgaaacgccaggaggcagaaaaagaaaagctgatgcagtgaaggaagaaaatacagagacacctaaaagtgatgctgttgatcatccaaagaaaagaggacgtccaaaaggtgtaagatccagcaatggcacacctagtaactcagctactccgagcacaaaggggaaaactgccggcaagaataccaaagaaacaccaaaaactggccccaatcttataaaggaactcgagaagagctccaaggacaaagctagtgtatcaactgagacaaaggatgaattgcctaaagatgacaggagtgcaagcagacctaaggaggctattagcaaaggcaaggattcaaaagacgaaggcaagtccactgaaggaaaagctaggccaggtcggaaactaaaaaatgctggtactcctgcgggtgacgctgacaaagagaaggggaaggagaaagaagttaaggcagctgaaatagagcaggaggcaccaggaaacgcttctacaggaaagaagcgcagaaggaaggcttgaagctaacactgatggaacttcttttgtaaatggatgtgcaccttgtattattgagtgttaactcgaaatttcgtcagtttggtctctgatagttaggtgtggaagcaacatttgctatagctgtaatgctaggattaacatgtgttcattgtggtcagatgcatggtgcattggtgttgagctttgagcggaatcaacccaatgctcgctgtgaggcccatggcatcgtgttgtctggtggtgttgtagcttattgatgttctatttattataagcaatttaagcagtggattttgtagcaaatgcac

SEQ ID NO: 132433 - DNA, 1138 bp, Zea Mays
aataaacgacccccgcaaccaaagacctctccccttctatctatctactatatatcgatccacccatccctcgcagctccaaagcattgaagcaaagaaccctgcaactgcaacaagccctgacgcttaatacatcggccggcactcgatcggcagcagatcaaagatggcggcggaggagggggagaaggcgaagagcggcggcggcgggcagcagatgacggtggtgcgggggctggacgtggcgcggtacatggggcggtggtacgagatcgcgtcgttcccgtccttcttccagccgcgggacggccgcgacacgcgcgccacctaccggctgctggaggacggcgccacggtgcacgtgctcaacgagacgtggagcaagggcaagcgcgactacatcgagggcacggcctacaaggccgaccccggcagcgacgaggccaagctcaaggtcaagttctacctcccgcccttcctccccatcgtccccgtcgtcggcgactactgggtgctctacgtcgacgatgactaccagtacgcgctcgtcggcgagccgcgccgcaagaacctctggatcctgtgcaggaagacgagcatcgacgaggacgtgtacaaccagctggtggagcgggccaaggaggaaggctacgacgtgagcaagctgcacaggacgccgcaggacgacccgccgccggagagcgacgccgcgcccaccgacaccaagggggtgtggtggttcaagtcgctcttcgggaaatgactgcccgtcaccgcacgcgcgcgtgctccggtactgtgcttgcagttgcagcaaataaaaccaggcctgagtgagtgaggattggtattttagctttgtagtatctgtctcgctatctgtgtgtgtggaactgtggactgtgctgttacgttatacgtgcatgtatttttaagatttctctagctaattgcatcgatcggcgaggtagtcactcaggggattatgtgagtttgcaaaaagccaaaaaagtctatacgcgtatagaatttgcttgcttgcttgacagccagccaactgttgtcgaatgatagttctggcgttgctaactgtcaggcttttgaaagcgagtcaaagacggtccagctcgcgaaaggt

SEQ ID NO: 132434 - DNA, 1915 bp, Zea Mays
gtactatcaaactacatctcacctgccgtacacgccctcgtcgttggtgggtgccgccgactcgatcgagtgcgccgtgtgcaatatcaggacccggtaggcgctgcggcgcatgcatgctgcggccgggtagatgatcccgagttccggctgaaaacttcccttcctatcctacccgcagcaaggactgcgtgcacatcttagcagcgggattggagtagcggtccgagtcacgctgctgcacgcgcgggcggtcgttggagtggccgactgcgagatcgatcggagcagctcgggacgggaacccggccgcgtccgtgcgtgactccatggagaacggcggccgcgtggccgcgatcgccgtgcctctcctcgtctccgcgctcttcgtcgcagcctttttgctgccgccttactcctcctccttgggcggcggcggcggcggcgccgagtcagccagcatccgggagcacttcctgcggcacgttccgcaaaagccgtcgcggacgccgccggtgccgagcgcgcaactcgccgggaaggtgagcgtcgggccgatcgaggaatccctggcccggtctcgggcggccatccgccgcgcggctcgcggggctccagcagcgactgcggcggcggagaacgctcggcgtcggcggagcttcaaggacgtcggcgacgccttcgtgccgcgaggcgccatctaccgaaaccccagagctttccacaggagctacctggagatggagaggaagttcaagatatggacgtacagggaaggagagccgccgctggcgcacctcggcccgtccgccgacatctactccatcgagggccagttcttggaggagatcgaggacccccggaaccccttcgccgcgcgcgaccccggcgaggcccacgccttcctgctcccggtcagcgtctgcaacctcgtgcactacatctacaggctcaacaccacggcctacatggcgcacatgcgccgcgcgctcgccgactacgtcgacgtcgtcgcccacaagtacccctactggaacaggtcgcgcggcgccgaccacgtcatcgtctcgtgccacgactgggcgcctctggtctccgaggcgaaccgggagctctacgccaacgcgatccgggtgctgtgcaacgccaacacctcggagggcttccgcccgcgcaaggacgccacgctgccggaggtcaacctcgccgacggcctcctccgccgccccacgctcggcctcccgcccgagaaccgcaccacgctcgccttcttcgccgggggcatgcacgggcacatccgcagggccctgctggggtactggctcggcaggaaggacccggacatggacatccacgagtacctccccgcggggcaggactaccacgcgctcatggccagggcccggttctgcctctgccccagcggcttcgaggtggccagcccgagggtggtggagtctgtgttcaccggctgcgtgcccgtcattatctcggatgggtacccgccgccgttcagcgacgttctggactggagcaagatgtcggtgaccgtgccgccggcgaggataccggagctcaaggccgtactcaagggggtgtccgagcggaggtaccgggtgctgcgcgccagggtgctgcaggcgcagcggcacttcgtggtgcaccggccggcgcggcggttcgacatgatccgcatggtgctgcattccatctggctcagaaggatcaacgttaggctcccatactgacgcagctttcggtcagcttcattcatgtgctcaattattgtacattattcgtgtcttccggttttatttcggacatgtattgatatagtagggtttttttttgttgaccgtcaaatgtgttatcttgagttgaagattatacggttctagctatcttttatacagct

SEQ ID NO: 132435 - DNA, 2643 bp, Zea Mays
ttccgcctccgttttcctccccctccgacaccagcccaccacgcgagaactcgtcagatatttatgagcgcagccgcgggttaaccttcccttctcgctgccgtgctcctgctcgtgcgcgcgttcgcaatcgtagcgctggggttgagccgcgagtggataaaccctagccggtggtgtagctgggttggtggctttgatgccggcgacggcccgcttgtccccgggtgggtgagaattctgcgaccgaatggagtgaggtgacgaaggctgccatgggctctaactatgccacgattggattataggatagtagctggcagctaccagtttcctagaaccaatttgtggatagcgagaggagtgactgttgttcagtactttcacctcgatcatgggtggtgtctgctcaaggaagagaagccaattggtggatgaaggtgacgctctccagacatccccaaggttctcaaagaccagcagcttaaaatggctgttgcttacactgcctcgcagcagttctgatgtttccgggaagggacagggaaatgaacctgggcggtgcccgtccctcatggagctttgtgtggctagagtttgccaggatatcgacaggtattctacttttgcaatgctgccaagggatctcagccagcagattttcaatgaattagtaaattcaaaccgtcttacagaggcatcacttcaagtttttagggattgtgctctgcaggacattggcttaggggagtaccctggagtaaaggatgcttggatggaagtagtggcatctcaaaagcagtcattgttgtcggttgatatttcttgctctgaagtagctgatagtgggatagatcttcttagagattgctcaagcatgcaaagtttggcatgtaattactgtgatcaaatatccgaaagtggtctgggagtactgtcaggattgtcaaacctatcttctttaagcttcaagcgaagtaatgctgttactgctgaaggaatgagagcctttgcaaatttagttaacttactaaatctcgaccttgaaggttgcctaaagattcatggtggccttattcatttaaaagatctgacaaagctcgagtcattgaatatgagatattgcaattatattgcggattcagatatcaaatatttaacagatctgacaaatttgaaggaccttcaattgtcatgttgtaagatcacagatctgggggtgtcgtatatcagaggcttgcagaagctcactcacttgaacctagagggctgcccagtgactgctgcttgtttggaagctatttcaggattgtcttcattggtattgttgaacttgaaccgttgtggtatatacgatgatggctgtgaaaactttgaaggtcttaaaaggttgaaggttttaaacttggggtttaactatattacagatgcttgtttggtgcatctgaaagaattaatcagtttggagtctttgaacttggattcgtgcaagattggagatgatggtctatcacatctgaaaggtcttgtgctactgcaaagcttggagctttctgatactgaagttggaaacaatggactccagcatctatctggtcttcgtaatctgcaaagtattaatctctcatttactttggtcacggacattggtgtgaagaagatctctgtgttgaattcgctgaagtcagttaaccttgacaatcgccaaattactgatgttggcctggcagcacttataagtctcactaggctgactcatcttgacctttttggagcttgcataactgacaatggcacaaattgcttcagatattttaagaatcttgtttctcttgaagtctgtggtgggttcgttactgatgctggagtgaagaacatcaaggatctgaaggccctgacgttgctgaatctttctcaaaatgctaatctgacagacaaaaccttggagctgatctctggcctgactgctttgatcaacttgaacgtgtcaaactcacgggtgtccaatgctggtctcaaacacctgaatgacctgcacaacctgcgttcactgtctctagattccacccgggtgacggcaaacgagatgaggaagcttcgagcaacagtgctgcataatctgatcagcatgcggccagagtagtacccatttggcacctgctgtaaataatcattaggttcgagcaggttgttctgttggtaagtactgccttcgttctcgaatatttgtcgtccgctagttcatttttgaactagaccgcgataaataaaaaagaacggagggaatatcttgtaagaacctgaattgaaggcaggcatataattatataagttaacaatgtggtcttgtgctgtgtcagcgagctcgttcgtttcagggtgatgctgaagaaatggcactatggcagctgctttgcactgaattgtaaatagcctttctcgccatctgggaactgggatgcatacgtgggtcgcccttttttatgtttgggtagattagagttgaatgtgcgttatgtacttgtgttctgatgagcaccgaatgcttattttgtcacatgctgttatttaccggccttccccagtttactctgcaacagagggcttgtttgtttgagattattatattatataatctgatta

SEQ ID NO: 132436 - DNA, 2621 bp, Zea Mays
ttccgcctccgttttcctccccctccgacaccagcccaccacgcgagaactcgtcagatatttatgagcgcagccgcgggttaaccttcccttctcgctgccgtgctcctgctcgtgcgcgcgttcgcaatcgtagcgctggggttgagccgcgagtggataaaccctagccggtggtgtagctgggttggtggctttgatgccggcgacggcccgcttgtccccggaatggagtgaggtgacgaaggctgccatgggctctaactatgccacgattggattataggatagtagctggcagctaccagtttcctagaaccaatttgtggatagcgagaggagtgactgttgttcagtactttcacctcgatcatgggtggtgtctgctcaaggaagagaagccaattggtggatgaaggtgacgctctccagacatccccaaggttctcaaagaccagcagcttaaaatggctgttgcttacactgcctcgcagcagttctgatgtttccgggaagggacagggaaatgaacctgggcggtgcccgtccctcatggagctttgtgtggctagagtttgccaggatatcgacaggtattctacttttgcaatgctgccaagggatctcagccagcagattttcaatgaattagtaaattcaaaccgtcttacagaggcatcacttcaagtttttagggattgtgctctgcaggacattggcttaggggagtaccctggagtaaaggatgcttggatggaagtagtggcatctcaaaagcagtcattgttgtcggttgatatttcttgctctgaagtagctgatagtgggatagatcttcttagagattgctcaagcatgcaaagtttggcatgtaattactgtgatcaaatatccgaaagtggtctgggagtactgtcaggattgtcaaacctatcttctttaagcttcaagcgaagtaatgctgttactgctgaaggaatgagagcctttgcaaatttagttaacttactaaatctcgaccttgaaggttgcctaaagattcatggtggccttattcatttaaaagatctgacaaagctcgagtcattgaatatgagatattgcaattatattgcggattcagatatcaaatatttaacagatctgacaaatttgaaggaccttcaattgtcatgttgtaagatcacagatctgggggtgtcgtatatcagaggcttgcagaagctcactcacttgaacctagagggctgcccagtgactgctgcttgtttggaagctatttcaggattgtcttcattggtattgttgaacttgaaccgttgtggtatatacgatgatggctgtgaaaactttgaaggtcttaaaaggttgaaggttttaaacttggggtttaactatattacagatgcttgtttggtgcatctgaaagaattaatcagtttggagtctttgaacttggattcgtgcaagattggagatgatggtctatcacatctgaaaggtcttgtgctactgcaaagcttggagctttctgatactgaagttggaaacaatggactccagcatctatctggtcttcgtaatctgcaaagtattaatctctcatttactttggtcacggacattggtgtgaagaagatctctgtgttgaattcgctgaagtcagttaaccttgacaatcgccaaattactgatgttggcctggcagcacttataagtctcactaggctgactcatcttgacctttttggagcttgcataactgacaatggcacaaattgcttcagatattttaagaatcttgtttctcttgaagtctgtggtgggttcgttactgatgctggagtgaagaacatcaaggatctgaaggccctgacgttgctgaatctttctcaaaatgctaatctgacagacaaaaccttggagctgatctctggcctgactgctttgatcaacttgaacgtgtcaaactcacgggtgtccaatgctggtctcaaacacctgaatgacctgcacaacctgcgttcactgtctctagattccacccgggtgacggcaaacgagatgaggaagcttcgagcaacagtgctgcataatctgatcagcatgcggccagagtagtacccatttggcacctgctgtaaataatcattaggttcgagcaggttgttctgttggtaagtactgccttcgttctcgaatatttgtcgtccgctagttcatttttgaactagaccgcgataaataaaaaagaacggagggaatatcttgtaagaacctgaattgaaggcaggcatataattatataagttaacaatgtggtcttgtgctgtgtcagcgagctcgttcgtttcagggtgatgctgaagaaatggcactatggcagctgctttgcactgaattgtaaatagcctttctcgccatctgggaactgggatgcatacgtgggtcgcccttttttatgtttgggtagattagagttgaatgtgcgttatgtacttgtgttctgatgagcaccgaatgcttattttgtcacatgctgttatttaccggccttccccagtttactctgcaacagagggcttgtttgtttgagattattatattatataatctgatta

SEQ ID NO: 132437 - DNA, 1692 bp, Zea Mays
ttccgcctccgttttcctccccctccgacaccagcccaccacgcgagaactcgtcagatatttatgagcgcagccgcgggttaaccttcccttctcgctgccgtgctcctgctcgtgcgcgcgttcgcaatcgtagcgctggggttgagccgcgagtggataaaccctagccggtggtgtagctgggttggtggctttgatgccggcgacggcccgcttgtccccggaatggagtgaggtgacgaaggctgccatgggctctaactatgccacgattggattataggatagtagctggcagctaccagtttcctagaaccaatttgtggatagcgagaggagtgactgttgttcagtactttcacctcgatcatgggtggtgtctgctcaaggaagagaagccaattggtggatgaaggtgacgctctccagacatccccaaggttctcaaagaccagcagcttaaaatggctgttgcttacactgcctcgcagcagttctgatgtttccgggaagggacagggaaatgaacctgggcggtgcccgtccctcatggagctttgtgtggctagagtttgccaggatatcgacaggtattctacttttgcaatgctgccaagggatctcagccagcagattttcaatgaattagtaaattcaaaccgtcttacagaggcatcacttcaagtttttagggattgtgctctgcaggacattggcttaggggagtaccctggagtaaaggatgcttggatggaagtagtggcatctcaaaagcagtcattgttgtcggttgatatttcttgctctgaagtagctgatagtgggatagatcttcttagagattgctcaagcatgcaaagtttggcatgtaattactgtgatcaaatatccgaaagtggtctgggagtactgtcaggattgtcaaacctatcttctttaagcttcaagcgaagtaatgctgttactgctgaaggaatgagagcctttgcaaatttagttaacttactaaatctcgaccttgaaggttgcctaaagattcatggtggccttattcatttaaaagatctgacaaagctcgagtcattgaatatgagatattgcaattatattgcggattcagatatcaaatatttaacagatctgacaaatttgaaggaccttcaattgtcatgttgtaagatcacagatctgggggtgtcgtatatcagaggcttgcagaagctcactcacttgaacctagagggctgcccagtgactgctgcttgtttggaagctatttcaggattgtcttcattggtattgttgaacttgaaccgttgtggtatatacgatgatggctgtgaaaactttgaaggtcttaaaaggttgaaggttttaaacttggggtttaactatattacagatgcttgtttggtgcatctgaaagaattaatcagtttggagtctttgaacttggattcgtgcaagattggagatgatggtctatcacatctgaaaggtcttgtgctactgcaaagcttggagctttctgatactgaagttggaaacaatggactccagcatctatctggtttgtcttgacttttgaaaaaaacgaaatcgtctttttagctcttacctcgtagattgattgaatcctctacatcgtagaacccttgatgaaagttgtagggttgcttttgacagcaa

SEQ ID NO: 132438 - DNA, 1076 bp, Zea Mays
cggagtcccgtacacgctagtgttggcgactccaagagtgttcttatcgccccgaaggcggtctccactctctacagacagccgccaccgccgccggtggttcacaagcagccggtaggtactcaacccaaaccgcaaggaggacacggaacccaaattccagcacgactcatccagccagcagcccaagcgaacctagggcccttgagctccctcccgcatggcgttcccgtggtgcctctcggctccggccgccgtcccgcctgtggcgcccgcgccgggcacctttggcgtatccgcgtcggtcaccgccctcgcgcgtgtgccggttctcgccggtaggcggcgcaggtggagcacgctcgtggtctgcgcggcccccgacgaggagaagattaccaagcggtcgcccctcgatttccccatcgaatgggagagaccaaagcctgggaggagacctgatatcttccctaagttcagcccaatgaagacaccattaccgcatccgttaccagctgatgatcctctggatgatgatcaagaggaggaagaggaagaacaaccaccaccacaggaggagccacaagaggatgatccagacaaggaagaacctgaggaagatgacccggacaagccaaccgagtaacttctggatggcttgaactgtggtagatataggcagcgggcaaagatgtgctacatctttggagcacgccaagagatctcagttctattcgaactgtttgttctgccggcttatataggctctagatgcataagtttgttatgacctttgagcttttctaaagctatggaagttttgttttacggattacagattacggtgccatatctgtgatgatatgcattcacacttctatcttaagttagcgtgtacattacaacaagaagtctgcagcaagccagcaactgttactccaaattcttttgctcaggtgtgtttggtcataggaactaaagtttagcatatgtcacgttgaatgtttgaatgactattaagagcattaaatatagtctaattgtaaaattaattatatatctgaagaataaatagt

SEQ ID NO: 132439 - DNA, 1882 bp, Zea Mays
cttgtgcggagatgcacgctgcacgttgcgcttttgatcacctgacgccgtctccagcttctcaacctcagagaaatcatggagcaggttcatctcagatgatgccatgatggacgcacaggcaccaccgttctcgttgcctgacctgaacttgtccagttcagaaaccagagcagaagcccaggattcagactgagtgttggcgtcactcagctgcctgttctcctccgtcagctccttgacctgcatctgagccgccgtcagcttgcaggcctcgtcggcgtacttcatctgcatgaactgcagctcgctctccctcttggccagcgcctgcttcagcgccgtgttctcgtcctccacggcgcggagcctgaacgcgtagccgtcggcgccgcccgagacggatcgccgcggcgacggggtccgcggcgagaacggcgcgacggccgaccgcggcgaggagggcgtcgcgggacggggtcgcctcgggctggctgtgggggtctgggcctgctgctgatcgacctcgtccctcatcttggcgatcgctgccggcccgggaagcctcttgcggaccatggcgcgcagccgctggcactcagcctccagctgcgcgatccgcttctggtgctccgcctgctgccggcgcgcggcgtcgacggacttgaggtcgtactcccgctcctggccccggacctccagctccttctggagcatgcgcacctcgtactccaacgacccggcttgtttctgcgccgactctagcctcgccgtcgcgtcggcgagcttgtccccagtggccgctgcggactccctcagctccccgatcagcgcgtccttgacgtcagcggccttgcagaggttgctgttctcggcggcgagcttcgcgatcttcttgttcgcgtcctccagcttcagctggagctcgcgcactttcttcttcttggaggatatctcgttggccgcctcgacgatgatctgctcccgctcttctctggcaaccaccagccgctccatgcaggggatcgatgtggcattgcacctcgtggacgtcgggtcgacgaagacagtcggggcgcactggcaagtacgtcaggaaagttgtgaaaccgtcgtccgaacacaggagaaatgtggagcacgacatcggacgtgctctcgaggagttaggtcgatcgacagcacgtgtgaatattactcaaggcgaaaagaggggggaaaaaaggtcaacactttttggtgctgaatcaaagccatccatcaccccagtgcacctatctgtgagagacatgagttcttcacaatcacattgcgcgttttttctttctttggaaggactgaccggatgaacagtccttaaggcgtaagcgaccgttcctctgcacttgtcgtcggctactggtagtttgcagcggttgggcagtgcgtagcgtcgtctaaggcgacggatcggggtggaatgccaggacatgaacgggacgcacttgtcactagcgcagccagagacgcgtcgcgtccccgtcgcccggctgctgcctgccggtgccgtggggcagtcgcgtgaggtgagctcggcaccgaacgaaccactggcgccgtttgcaatgggttcagcgaccacccagcacttcgttgtcgctcggtcaagcggttggttgcacggcgacatcccactgatcagaatcagatgccgggtgctccgcgagtgaggtggtgtggtgaaaaggattaggccacagcacttgagcttgttcccccgcccctttgttggcgttccgtgcttgcaactaaaaatggagtgtcaccacataggatttaaagtgtgatatccttcgtaatgtgtactatcataattatatatttaaactagttaattggtgtg

SEQ ID NO: 132440 - DNA, 1903 bp, Zea Mays
atggcggcgctgtggcttaagctgctgctcgccgtcgggctccccatcgcggcgctgatcgcggtcgtgtttctggtgtaccggcgtaggagcttgccccgtaatgcgccgccggcgctgccagaagtttcccctacggccgttgcggagccgacggcgagccccgggctggcgaagctcaacatgaggtacaacgccgccagcggccgcgtggggctccggttccagcagttgcaccagcaccagcaccacgcccgcgtcgacgcgaggcaccgtggctcgggcggcggcgcgcagcagggcccgttccagtgggccgaccacccgcggctggtgaccgaggcggcggagaacgggtgggcgcagttcgtgttcgcggtggcgccgccgcggtccaagtccaagtccgcgtcgtcgtcgccgctgtgggggacgtgcccgctctgcgacgccgggacgagccgcgacatggcggaggcggcagcgtgggagctgcccatgggatcgtccgagcggatgcaagcggtgcggctcgacccggcggccgccgccgcgtccagcaggaagtggctccccgggagcaacccgagcccgctccgcggcgacacggacgcggggaaccccaacgcgctgtgcctcgccaggatgagccttccgctgccgggcccgcccctcgccggcgcgccgttcccgcaggacgcctacttcgagatcaccatcatctacctgaacacgaaacggccggagtggtccgcgtcgagggcgagcaggcgtgggcgggacggctccagcgagagcgaccgcgtcaagctcgtcagttttgcacctgccgccaagaacccggtccaagaaaacagagccgtcaaggacgacgaacaggataaacggaggcatttggtcatgtcgctcggcctcgccaccgcgtccgccgctccacaacggccgtcgctggtcggaacgtacgcgtcgtccatcggcttccattccgacggcgcggtctaccttgacgggatgaagctggtgtacgaatcggacaagtcctcgtgggcgggcgtggacaaggttgtggggtgcggcttcgagccggcgaagcgcaaggtgttcttcacggtggacgggcagctggtccacgccgtgagctgcaacgcggaggcgttctcgagcccgctatacccggtgctggcctccagcttcgacgtgatggcgctggtcaacctcgggcagagcaagttccggtacgcgccgggcaacgcgcggcgcacggccaacccgtgcttcgtacgcgccgcgtccacggtggacgcccgcggcagcggctcgatgggcctcgacttcgacgacagcggcgagctcttctccgtgggccgcgtggactccgggtggctggagacggcgaagacgagcaggagcaggaaggagagcgtcggcggctccggcgcggcgtccgtcggcgacccggaggccgagtccgacctgttcgagatcccgctacgagactgacgaacagcggagaccgacaggtggcccatttgtcaaacaggaattaggtgtagtaatggcgaatggtcacggcgatactgacacacatgcttaggagttagggcacgcagcttgatttggccgctattaagttgttgttctgctgctggtgatgtatcatagtctagctgctgttatctagatgtgaagaagtattatataggtcggttaaaaggatgaaaagcttgtcttatgcaatgagcttttggttcgttgttttcttcttttatattataccctggtgcgtgtctctttatccttatgctttcattgctcaagttgtacatatatatggtggagatagattctagaactataatttcgaataaagaggaggaaagaagcggctagaaaaaaataaaaa

SEQ ID NO: 132441 - DNA, 3310 bp, Zea Mays
actccattgtttgcagaggacgtcgtacgtaactaccgtacgtatgcttagggcgctaacgcaggccttatgtcctctctgtaaacaggccatgaacctctacatgcttaaacaaacgtccctcctcctaccgctgctcctttgctgtgtctgtaataccgtccgctgctcggcagccccggacaccaacaccagcgcggaaacggacgcgctcgcgctgctcgagttcaagcgcgccgccagcgatccagggggagcgctgagcagctggaacgcgagcaccagtctctgccagtggaagggcgtgacgtgcgccgacgaccccaagaacaacggagcagggcgagtgacggagctccgcctcgcggaccgcgggctgtcgggcgccatcgccggctccgtcggaaacctgaccgccctccgcgtcctcgacctgtccaacaaccggttctccggccggatacctgctgtcgacagtatccgcggcctccaagtccttgatctgagcaccaactcgttagaggggagcgttccagatgcactcacaaactgctccagcctggaaaggttgtggctctattccaacgcgcttacgggttcaattcctcgaaatataggctacctttcgaacctagtgaatttcgacctgtccgggaacaaccttaccgggaccatcccgccgtcgatcggaaacgccagcagactggacgtgctgtaccttggtggaaatcagctgacggggagcattccggacggtgtaggggagctgtcagctatgtctgtgctggaactaaacaacaatttgctgtcaggtagcatcccatcgaccctttttaatctgtcgtctcttcaaacgctggacttgggttcaaatatgctggtcgacacccttccgtctgacatgggggactggctcgtcagcctccaatctctcttcttaaacgggaaccagctccaaggtcagataccatcgtccattggcagagcttcagagctacaatctatacacatctcagccaaccgcttctctggcccgatcccagcttctctgggcaacctctccaagctctcaactctcaacctcgaggaaaacgccctcgaaacacggggagacgaccagagctgggggttcttggccgccctgggaaactgtgcccttctgaactcactctcactagataacaataatctacagggagagctaccagattcgatcggtaacctggccccaggtcttcaagtcctgcgtatgggcttcaacaacatgtcaggaacagtccctccaggcataggcaagctgcggaacctaacgacgcttgggctaagccacaacaggtttactggtgtacttggaggatggctcggaaacctggagaacctgcagtacgtagatcttgagagcaacggttttactgggcccatcccaccttctgctgggaaccttacacagctcttggcgctcaagctagcgaacaacgggttccagggctccgtaccagcgagcttcggtaaccttcagcagctcgcgtatctggatctgagctataataatctccgaggcagcgtacctggcgaggccctcacttcaccaagaatgaggacgtgtgttttgtcctacaacagtttggaaggctccataccgcttgattttagcaggcttcaggagttaactgagctatctctctcctctaacgcgttcacaggggatatccctgacagcataggccagtgtcaaatgctacagacagtcgagatggacaggaacctcctcacgggcaacgtcccagtatcgttcggcaacttgaagagcttgagcactctgaatctttcgcacaacaatttgtcaggtcccatcccgtcagcagctctcactggcctacagtacctgacacgcctagatatctcttacaatgacttcaccggagaagttccgagagacggagtgttcgcaaacgccacggctgtttcactccaaggcaaccggggactgtgcggaggagcaacgaccctccatatgccttcgtgccgaactagatctaataagagggcggaaacacagtactatctgatagaagttttgatcccagtatttggcttcatgtcgcttgcattgctgatatacttcttgctcattgagaagacgaccaggagacgacgacggcaacatttgccgttcccttcgtttggcaagcagttccctaaggtcacctaccaagatctcgcccaagcaacgaaggacttctcggagtctaacctggtcggcagaggaagctacgggtcagtgtacagatgcaggttaaaggagcacggaatggaggaggagatggcggtgaaggtcttcgacctcgagatgccaggcgcggagaggagcttcttggccgagtgcgaagcgctgaggagcatccagcatcgcaaccttctgcccatcagaaccgcgtgctcggcggtcgacaacaggggcggcatgttcaaggccttgctctacgagttcatgcctaacgggagcctggacacgtggttgcaccctagagcggcgccgccggcggggggcgggaaagctccgaagcgtctaggcttctctcagagagtgaacgtcatcgtcaacgtagccgatgtgctggactatttgcaccacgagtgcgggaggccgactgttcattgcgacctgaagcccagcaacatcctcctggacgacgacctcaacgcccttctgggagatttcggcatcgcgaggttttacgctgactccaagtcagcaccgccgccggcggtagacgacccaactagttccgtcggtgtgagagggactataggatacatcgctccagagtacgcgggaggtgtccgcctggcgtctacctctggagatgtttacagctttggtgtagttgttttggagatggtgacaggcaagcgaccaacagaccctaccttcaaagatgggctggatatcgtcaactttgtgagcagcaactttccgcatcagatatcccgcgtcgtcgatcctcgtctcagcgaggagtgcaaggagttttcccgagataaggtggaaccagaaaatgcagcttaccagtgtttactgtgcctgctacaagtagctctttcatgcacgcacccgtcaccaagtgaaagggtcagcataaaagaagtagccaacaaactgcatgcaacccagatggcatatgaaggagcgaaagaaaagaaataaaatacatgtttcagcatagtgatagtgtgataccatgctacgagaaaaagggaccagagtggttgtcttagccgtgtttgaccgcgttcctcctgccgcggc

SEQ ID NO: 132442 - DNA, 1251 bp, Zea Mays
cacacttcacgcgctgagggagcaaccagaacaaggctcctctcgtcgttattgctgaggctccggccgagtagagctcagacgaccaggagacgacgacggcaacatttgccgttcccttcgtttggcaagcagttccctaaggtcacctaccaagatctcgcccaagcaacgaaggacttctcggagtctaacctggtcggcagaggaagctacgggtcagtgtacagatgcaggttaaaggagcacggaatggaggaggagatggcggtgaaggtcttcgacctcgagatgccaggcgcggagaggagcttcttggccgagtgcgaagcgctgaggagcatccagcatcgcaaccttctgcccatcagaaccgcgtgctcggcggtcgacaacaggggcggcatgttcaaggccttgctctacgagttcatgcctaacgggagcctggacacgtggttgcaccctagagcggcgccgccggcggggggcgggaaagctccgaagcgtctaggcttctctcagagagtgaacgtcatcgtcaacgtagccgatgtgctggactatttgcaccacgagtgcgggaggccgactgttcattgcgacctgaagcccagcaacatcctcctggacgacgacctcaacgcccttctgggagatttcggcatcgcgaggttttacgctgactccaagtcagcaccgccgccggcggtagacgacccaactagttccgtcggtgtgagagggactataggatacatcgctccagagtacgcgggaggtgtccgcctggcgtctacctctggagatgtttacagctttggtgtagttgttttggagatggtgacaggcaagcgaccaacagaccctaccttcaaagatgggctggatatcgtcaactttgtgagcagcaactttccgcatcagatatcccgcgtcgtcgatcctcgtctcagcgaggagtgcaaggagttttcccgagataaggtggaaccagaaaatgcagcttaccagtgtttactgtgcctgctacaagtagctctttcatgcacgcacccgtcaccaagtgaaagggtcagcataaaagaagtagccaacaaactgcatgcaacccagatggcatatgaaggagcgaaagaaaagaaataaaatacatgtttcagcatagtgatagtgtgataccatgctacgagaaaaagggaccagagtggttgtcttagccgtgtttgaccgcgttcctcctgccgcggc

SEQ ID NO: 132443 - DNA, 3188 bp, Zea Mays
tggagtttcagatctttttgtttgcttttcagggtttcatgttccaaatggactgttttaagctgggtgagctacattttatcaggagaaattgatcaattgatttgaagtttgaacaatgtaccagaatgtatgaaataaagccagtaattgatcacgctcatggagatggactatcagttcaaagaatcatctcagaattgaagaaaattaccagtcctgttgaggaaaaacttggtgacgatgacaattcttcaagcagaaaatgtaacacatcatcattaaaaatgttactagagaaggagatgtctaaagaagcagagtcaaagagaagacatccaagtgtcattgccagattaatgggtcttgaggaggatttacctactaaagaaccaactgtacaccataccgtaagtgacttgagtagagatttgaatgccacaaacaacaccttacagggaaaagaacaccatcactttataatgtcgaagacacaaaactaccaatcctgtcatgaaaaaatcgaatacaatgatgtttttgaagtatctgaaggacaaccgggaacagactgttttcatgatagaacttcacagaaaggatggtcttccgagaacaagagtgagcaattcaatattgcacgagacaagatcatggaaccagaacagttagctattgaagagaagctcctttgtacaaaggagttgcctgaagctcttgtttttccatgttcaaatagagatttatttcttgaatttcctgaagaacataaccccacattctcaagacagtcgagtgggcttcatgcaaaccaagcaccgcctcaaacaaaacgcattacagtgctgaaaccaattagatctgttgatagtgatggcataagacgacccagagcagaaattggtaagcaaaatgtattgaagatgagaaggttccatcagattcctagttcaaaggaagagataccttcccaaccaagtagaataatccttttgaggcctaccccagggaagccaggtatatcaaaggcaaagctgacatccagggcaacttcatttcagttacctaaccgtaacagtctcaatggatcattagatgataaccaggcatccataggatctgcaggactagtgcatggtatgatgcagtgccggcaagatggatgtcaccaaagagatgattctttattatcttctgcatactcaaatggatatgggggagatgaaagctcattcagtgattcagaagttgattataccagtggctctgaaatcaactatattgaagattgtgataccctcagtgactccgagggaggtagccctctgtcaagacactcatggaattacataagaagatatgaaggtcaatgctcaagttcatcctttagcaaaatatcccacttttctgagtcgtcagttgtaacggaggccaaaaaacagatttcagagcgatggtcaatggttacatgcaatgagatgagtcaagtgcaactgtcgagaagaaaatgcacgttaggtgagatgctctccattaaggaagcaaaggaagacgaggccaccactgggatgttttatgtttccagcaaccagtcatgtggcctggagaatgaactgactacacgttctacaaatgtaactacttctagaaaaaatggtgacaatggggagagatcttcgaaattgccaagatcaaaatctgttccagtgatttcatccacgtctgataacatgacggtgaacatgcaagcttcaaatcctgagagctgcaaacttaaagtggctgttgtgtcaaataaaggaaaatcagctttcaagggaagagtttcagattttttcttgtctaaaagtaaaaggccaagaaggcagatgcctgcttatcatcaatctgattgtattgctgaggggcttgaaggctgtattactcataatagacaggactgcaatcataaaatggatgccatcgagaaagcgatgcattacgatgatgaattcaatagtttttcgacacgaatatcaactagcataccagatagaacaacttctggtgcatctgtttcattgggcagttcaaccggaaacctggataaactaggagtaaacaaatgcctaaatggtaaccgtgatcaaccaagccctacctcagttcttgatgcaccctctgaagatagcagttgtaatgagcctgaaacacttggaacaactacttccaagaatgcgatatcaagatcttcagcaattgaaactgtggcccgtttcttgtcattggatgacaccgcctcagagtcacagtcactttgtaacccaagaccgagttctcttctccctgatgcagatgatgatgagtcagagtgccacgtccttgtgcaaaatataatgtcatcagctggattaggcacttcacagtcacgtatggttttcgccggctggcatttacctgatcaccctcttgacccggtgctgcgtaacaaagtatctcagctgcaggagaaaagttcatacagaaggcttctttttgactgcgtgaatgttgctctaattgagatcggtgagaacgccttactgagcgccctcccatggagtaaaagaagttccagaacatggaggggcacctcatctcctgatctgggggtggaggtctggagtattctcaaggactggatacacggggcacggatgtttgtggtgagcaagagagataatgctgggatcatactggacagaattgtgaagcaggaggtcgaagcaagagggtgggtgaaactgatgatggcgcaggtggttgtcatcaccgaggagctcgaagggggagtaatggaggagctggttgaagaagcggtgctggatttttacagtctgttttcagtggtgagatatcgattgtgactggtaaaactttccacggagcagctggtttgtgtatgctcttgttttgcagctacaccggtcgttcgccgccgtatccattcccccctggttctctttctagctggttctgcttcttgtattacaaagtttgtataaacttctggtagatgagaacatggtaattgtgcagttcatgagaagttttgtaggcaaaataaagtgagccaaactttccatggtgggatctgctgtttgtgcatttcacattgttcgttcattgttaatgagcaagagcagcgaaaggttttgccagattaataa

SEQ ID NO: 132444 - DNA, 2417 bp, Zea Mays
cgcaactggcaacccacaacacgcgaagccgtgaaccgaagttgcttcgagttttggcgcgcgccgacccaaacaacggcgctccgcgcggcggaggcgatggaccgactccagcgcaggaaccctagcagccggacccatgccacttcgctgaagcacccacggcctccgcgagtgccgaccttccagccccagccggcgtcgaggtccctacaggagccggagccctcctccccagatggaaggcaaaggaaaagggttcgatttgcaaatgaagctggtagtcattgtatcagcgggaaacaagtcgtgaacatacacgaagatgcgaaaaacaaacctcatgtatgtgatgctaaaactgcagaatataagttctttaagaaattgtgtgaacagccaggccatagctctctttcatacaaacattctcatcaaagccttgaatcaaatgtgtacaggcaaaaacaaggatcgcgcaatgtaactgccccaaaaaagttacatgtccatgataatactgtgtactgtgatgaaccccttgctacaccagctaagaatgaggaaattcctggcgagaaaattagcgtgcaatcctcccattctgaatatgacgataaagatacacctcaagtcggtccacatgatcgcttgctgggtattcatgttctcacacctatatctcatacatcatttgatgttaccgggatttcagtaaatgttgacagagagcctatcagtggacatatcttttcaggaaagagaagcaaattattgaagatagcagccaaaaccatgtccatgggaagtgctgagttgtttcaaagaaggtcggaatttatagttggcatcctgcagagactaggcaccaacaacatcatgagaaagcaagaagggtccatgagtcacagaaaaatggactgcagacatgctcttgctattcccgaaggccattttgataacttgatagactacaagcgaagcaactttaatccattagctaagctgaggaatggtaaaattccatcctcttatgcaagtgatgaagcatgtgagttcatggctttaccatcaggatacaatcagggccctggaagtattgttgatcagaaaaatgacttatctcatgggggtagtggagcaagtgagtgcatggcattgccatgggcgtgtgttaatgatactctgagttctgatcggaagggagacattgttcacaaccaggtttcaaacttgttactagaagatgtcgatcgatacgtccatggaagacatgcttctgctaatgaattgagtttgaatggtcaaacagattcatatggtcaacacagatgggaccctatgttgtcagtaacgttcttgaagtcatttcatgacagactgtacttcccctgtcagaatgaggagcggcatgcagtaccatatgggatttcaaatacctctgagcaacctgaactatgcagctccatagaactgtgtacttgtagttcaataggactggagatagaagacccaaaagaggcgggattgtgtggtaattctgatgctgggtttccatcgtggcttgctcaattagttgggaaaccaactatttcaagcatttttgacagtgggaatgaaattctggatcacaatgacttcagatgcatctccaacttccacagcaacatgttcagttcaaactcaagttgtttgaattccatgtcgactccagagcagtcgtacaaggttggcgcaaagggcctgcttgattcttcatttggtctctcttgtttggctggactggaggagtactccacggacgcagaactgccagatgattctgatagatttcttcaggtgttggaccagttacctgtgaaattcatctcttcagggttttcaaacaacgattccagaatctgggaccatcggtcttcaaatgcagaacctccttttaaccaagattggggcactacacaaccgtggtcatcagtgcatcaactccaacctcattctgattcaggaaccgtgcttggtttcatgccaaatggaagtgcttacagtgatttggtggaacgccatcacagcctcatgctagtccaaggaaacctgagcactgacgttcttggtgctactgatttatcgttctttggatcttgctcaagtttggataacatcacggaggctcctacgttatcttctgatggcataacgtggtagctgtgttggtccactctgaaattttcatccagatcagttcgctacacaaccaaccgttcgctgtatgaaattttgaattcgaagttgcaccacgtataggtgaagttattagctttaatataagttgggaagcaatgtccagaaaattgtgtaatgttagcaaccattactagactttagcatgaagagataccatctggtccaaaattttgacc

SEQ ID NO: 132445 - DNA, 1969 bp, Zea Mays
gcaccatttccaccgtatcactgcacggccgcgcgaaaatgtgcagcgccacaagtgcattccggccccgtgagtaatcgtaacagaggatcgctagctagtgtgctaccctgtacggcgcaggcgcagccatgagcaacagcggcaggtggcggaggaggacgaggtccgtagccccttcgccggccacctcttctccgtcgtctcctggcctccgagaagcgcagccgttccggcttccccagtggaagttctcccaggtcctcggcgaactgccgcccgcggccgaagcccgccgcgacggcgctccccgtccgcaggacgacgacgatgcggacgaaatctcggctatcgagttcgacggccgcggcgagtacttggccggcggcgacaacgccgggcgcgtcatcctcttccggaggaccgacggcgacggcgacgacgcgcggcctcgcgcggagcttgagcgcacggaccgtgccggagcgccgccgccgaggtacagctacgcgacggagttccagagccacgaacgggagttcgacgtgctggacagcttggacatcagcgagaggattaagaaggtgaggtggtgcgcgcggcccaacagctccctgctcatgctcgccgcgaacgaccgcacggtcaagctctggaagggcaggtctccgaacacaaggcggaggcgccgaagaaagggaacggtcggccgagttggggcaccgcggcgctgtcggcagccacgaaactgccgaggggctgttcgtctgcagagcctgacgaacgtcctgaaaaggcagcaggcgatgtcggagacggctactctgcgaaatgccggagagtcttcggccgcgctcacgagttcaacatccactccgtctcgaccaactgtgacggggagacgctggtgtccgcggacgacgtgcggatcaacctgtggcatgcggaggtgacgcgccagtgcttcaacatcgtggacatgaagcccgcggacatggaggacctcgtaggtgatttcgttgtttttcttcttgtccttccttacccaccgacgtacgtacgtacgtacgtaggagtggtatactagcatatgctgtcctccagtttgtgaaagccgcagcgatcactggcacttacattacattacatccgagattccgagtgttgtgttggttgggtgatgatgatgaagcagaggtgatcaccacggccgagttccacccgtcgtcctgcagcatgctggcctacggcagctccagcggcctcgtcaggctggtcgatctgcggcgatcggcgctgtgcgaccacagcgtgagaatgttccaggaccgcgagaaccgccctcagcccagcacatttttcagtgagataatctcctgcatcaccgaccttaagttcacaggcgacggggaacaccttctgactcgcgactacatgaacctcaagctctgggacctgcgcgtggaaacctcacccgtcgcaacgtacaaagtccacgagttccttcgcccaaagctgtcggagctgtacaccgacgactacatcttcgacaggttcggctgctgcgccagcaacgacggggcctacttcgctaccggatcttacagcaaaaccttcagagttttctcccgtgccgctgcgcagacatgcggcgctacgttggaggccagcaccaacccttacaggatacaattacatgctcctacgaagatcccagcgctgcttagcaatttctctctcggagttcatagaaaaggtcaggatggtcatccgaggtcagacggcaaggaacaagtctcgtgcaacatggcgtccaaggtgaagcatctagcatggcacccggcagaaaacttcatcgtttgcgcagccaatagcagcttgtacatgtaccatacataagcacgctcatgttatgtgtgcagagtgcaaatcacagaacagcgttcgtagctaattagattgaagccag

SEQ ID NO: 132446 - DNA, 1964 bp, Zea Mays
gcaccatttccaccgtatcactgcacggccgcgcgaaaatgtgcagcgccacaagtgcattccggccccgtgagtaatcgtaacagaggatcgctagctagtgtgctaccctgtacggcgcaggcgcagccatgagcaacagcggcaggtggcggaggaggacgaggtccgtagccccttcgccggccacctcttctccgtcgtctcctggcctccgagaagcgcagccgttccggcttccccagtggaagttctcccaggtcctcggcgaactgccgcccgcggccgaagcccgccgcgacggcgctccccgtccgcaggacgacgacgatgcggacgaaatctcggctatcgagttcgacggccgcggcgagtacttggccggcggcgacaacgccgggcgcgtcatcctcttccggaggaccgacggcgacggcgacgacgcgcggcctcgcgcggagcttgagcgcacggaccgtgccggagcgccgccgccgaggtacagctacgcgacggagttccagagccacgaacgggagttcgacgtgctggacagcttggacatcagcgagaggattaagaaggtgaggtggtgcgcgcggcccaacagctccctgctcatgctcgccgcgaacgaccgcacggtcaagctctggaaggtctccgaacacaaggcggaggcgccgaagaaagggaacggtcggccgagttggggcaccgcggcgctgtcggcagccacgaaactgccgaggggctgttcgtctgcagagcctgacgaacgtcctgaaaaggcagcaggcgatgtcggagacggctactctgcgaaatgccggagagtcttcggccgcgctcacgagttcaacatccactccgtctcgaccaactgtgacggggagacgctggtgtccgcggacgacgtgcggatcaacctgtggcatgcggaggtgacgcgccagtgcttcaacatcgtggacatgaagcccgcggacatggaggacctcgtaggtgatttcgttgtttttcttcttgtccttccttacccaccgacgtacgtacgtacgtacgtaggagtggtatactagcatatgctgtcctccagtttgtgaaagccgcagcgatcactggcacttacattacattacatccgagattccgagtgttgtgttggttgggtgatgatgatgaagcagaggtgatcaccacggccgagttccacccgtcgtcctgcagcatgctggcctacggcagctccagcggcctcgtcaggctggtcgatctgcggcgatcggcgctgtgcgaccacagcgtgagaatgttccaggaccgcgagaaccgccctcagcccagcacatttttcagtgagataatctcctgcatcaccgaccttaagttcacaggcgacggggaacaccttctgactcgcgactacatgaacctcaagctctgggacctgcgcgtggaaacctcacccgtcgcaacgtacaaagtccacgagttccttcgcccaaagctgtcggagctgtacaccgacgactacatcttcgacaggttcggctgctgcgccagcaacgacggggcctacttcgctaccggatcttacagcaaaaccttcagagttttctcccgtgccgctgcgcagacatgcggcgctacgttggaggccagcaccaacccttacaggatacaattacatgctcctacgaagatcccagcgctgcttagcaatttctctctcggagttcatagaaaaggtcaggatggtcatccgaggtcagacggcaaggaacaagtctcgtgcaacatggcgtccaaggtgaagcatctagcatggcacccggcagaaaacttcatcgtttgcgcagccaatagcagcttgtacatgtaccatacataagcacgctcatgttatgtgtgcagagtgcaaatcacagaacagcgttcgtagctaattagattgaagccag

SEQ ID NO: 132447 - DNA, 3451 bp, Zea Mays
aaaaactccgccgcaacaagggccaacatggcgaggcggcaaaccatttctttcccttaaaccctagccaaaaacccttctgctgctccccgcccgccgcccgccaccatgtcgatggcggtggcctccctccgctccctggcgcgccgccaaccccgcctgcgcttgccccctgcgccgctcgtcgtacccggcggccgggcagcattactttccggcgcggccgaggaggcggccccgttggctgccgcggaagcggcggcgccgccacctgttcccggtcggaaggtgctggagagtttccgcgaggagtttgagatcggggggcgctccatcgccttcgagacgggaaagatggcgcgcttcgccaacggttccgtggtgatctccatggaggacacccacgtcctctcaactgtcgccgccgccaagtcctctgagcccattcgagacttcctcccactaactgttgactatcaagagaaacaatatgctcaaggtgttatccccacaacatatatgcgcagggaaggtgctcctaaggaaagagaacttctatgtgggcgtataattgatcgaccaataagaccattgtttcctcctggcttttaccatgaagttcagatcatggtaaatgttctttcatcagatggaaagcaagatccagatgtaatggctgcaaatgcctcttcagctgcactaatgctatctgatataccttggaacgggccgattggagtaatacgtgtagggaggattgatggggcttttatattaaaccctacagtggatgagctaggtttgagtgacctcaatcttgtttatgcatgttctcgggataaaactttaatgattgatgtacaagctcgtgaaataagcgagagggatcttcaggcaggaatgaaacttgcacactctgaggcaattaaatgtatcgaccctcaaataagtttggctaagcgagctggcaaaaagaagaaagaatacaagatatcactgatttcagatacatcctatgagaaaattagaacattctcagaagcacccattgaggaagtcttcactgattcatcatatggcaagtttgaacgggggggagctttagaaaaaatcacacaatctgtgaaggcaaagcttgaagaagaaaatgatgaggacagcttgaagtttcttcacaaggcagttgacacagtgagaaaacaggttatacgtaaaagaataattgaagagggacttagagtagatggtagacaacttgatgaagtgagaccattgtattgtgaatccaacacatatccattattacatggttctgccctgttttcacgtggagacacacaggttctatgtacagttacccttggtgctcctggcgatgctcagcgactggattccattgttggtcctccaacaaagcgtttcatgcttcactatagctttccaccattttcaatagatgaagttgccaaacgtggaggccttaatcgacgagaagttggacatggcactcttgcggagaaagcattgcttgctgtgcttcctccagaaagtgattttccatacaccgttcgggtaaatgcagaagtcatggcatctgatggttcaacatcaatggcatcagtatgtggaggaagtatggctttaatggatgctgggatacctgtaagagaacatgttgccggtgtttcagtgggtcttgtaagtcaggtggatccagctactggagatatttctaattatcgcatattaacagatattctgggccttgaggatcacttgggtgacatggacttcaaaattgcagggacaaggaaaggtattactgctattcagctggatataaaacctgctggaataccattggacataatatgtgaaagtttagagcctgcacgtaaggctcgaaatcaaatccttgaccgcatggaccaggaaataagtaccgcacgtggtattaacgatggaagttcccctcgattagctacactgagcttcagcaacgagtctcttaggaaactgcttttccacaggaaaaaaatcgagcaagaaacaggtgcacgggtatcaatcagtgatggtacagtcactattgttgctaaaactcaagaaattatggataaagctattgagaaggttgagttcctcgtgggacgtgaaattgaagttggtcgtacatacaaaggaattgtttcttcgattaaggagtatggcgcttttgtggagttcaatggtggacaacaaggcttacttcatatttcggagttgtcacatcaaccggttacgaaagtctcggatgttgtaactcttgggcaatctctctctctgagatgcattggacaggacatgcggggtaacattaaactttcacttaaagcaaccttaccccaaccacgtatcaagaaggatttgaaaaataaggatcctttgccaagtgaagttactggttgggctgctgtggagaacatgagtagtgtggatgttgatgctcagctatcaagtaccgaacatgaaaatggcacaactgaggaggcagctgcattttcgactccttcagttataattcgaagtgctgctgactgtgatgctcaagatgatgcaaatggttctaagaagcgggcgaaggttgcaaagtcatctcctagaccaaataaaccagccagcgaatgccatgatgttaggaaagctaccgctaagaaagctacaggtgccactaccaagaaaactaagaaagtaaagattgaggaatctgtgagtaatggactagaaaccagtggttctgatgttccagaacagagtgctgacaacacttctgaccagaatcagagtcccacgaaattccaatctggggcaatgaagttgggtgatgtagttacagcaaaggtctaccagattcgagcctatggactagtacttgagttgagtgatggtgtgcgtggaatgcataaatttgaggcaaatggcctaaaggaatttgaagttggacaggaactagtagtgaaatgttctagtttcaatgcgaaggggattccgttattctcattgctggactagcaatgccaccatttgggaaccggatacaaatgacaccttagcagctaaccaatcaacttgtggaacacatggctagcgaagttttgttctttcgctgttgttgaagcgttggtcaagttctttattcgtacaaccatgaatagaatggaggtcaatcacatgaagtgtagagcgtacggactgagtacgaaccatcggaacctgctgtagccattatatataactaggattacgttacttatctatctattggttaaaataatagggacgatgaattctttgtaagacgtactgaagcagagtgtcccacttacaggaatccagttccagtttgtagtttctttacctaagattgttcagctgtacctttattttatttttagcagggctgtttacaaaa

SEQ ID NO: 132448 - DNA, 447 bp, Zea Mays
atggatggcgggtgcagcggattttgcctccatcccgcttggccccctccgcgcacagccagccgcatgcccgcgcatggcggatccgcctcccccttcgccaacgagcatgcgccagcacccgatcctcgctcgctcagccatgccctcgctcggccccctccgcgcacgcgcaaaccacgttcccccgcctgctccactgatccccatccccctcagatcctccctgcaaatcagatccccacgcccgcagcgcctcgcctcggctgctctacctcaatcccgcgacccgggttcagcaagtcgctggccatgacggtgctctccgagatcagggacaagaccttcttcgccgtcgcgacgggtcgggtgcactcccaccaggtgttcggcggtatgccgtcgcggcgtgcctctttgctcggctgttgggtgcgaccgtgggag

SEQ ID NO: 132449 - DNA, 306 bp, Zea Mays
atgtacttgatagtgaagccatcatgctcgacgcgggtcttcacaagggagtctagaaccctcttctcaagctgtcaatgcaacagaacaagtaaaaatgtagtagaatgcaaaatcacaagagctaaatctagtccgggtaatcctaggaatgtacttgatagtgaagccatcatcctcgacataggtcttcacaagggagtctggaaccctcttcccgagctccttgagcacctcggcgagcggcttgccgatgctctcggtgagggcaaaaacctcgctgtcggtgaagtcgcaacatcctag

SEQ ID NO: 132450 - DNA, 84 bp, Zea Mays
cgtccaggaaccgcaaatcagcccaagtcaggatcatgctccatgcttcctcggcgaaggggcaatccttacaaaggtgagcag

SEQ ID NO: 132451 - DNA, 285 bp, Zea Mays
cgcccggcccctgcgcttgcagctactgaagagacaggagcaaagagttaacaggagatgaatgcccctgaccgttatgagcgtttcgtcgtgccagagggcaccaagaaagtgtcctatgagagggatacaaagattgtgaatgctgcatcattcactgttgaacgcgtggatcacactgtaggcaatatcctccgcatgcagttgcacagagacccaaatgttctctttgctgggtataagctccctcacccactccagtacaagatcattgttagggtatga

SEQ ID NO: 132452 - DNA, 176 bp, Zea Mays
actgaagagacaggagcaaagagttaacaggagatgaatgcccctgaccgttatgagcgtttcgtcgtgccagagggcaccaagaaagtgtcctatgagagggatacaaagattgtgaatgctacatcattcactgtcgaacgcgaggatcacactgtaggcaatatcctccgcat

SEQ ID NO: 132453 - DNA, 497 bp, Zea Mays
caactttggagcaataatggctaaagaaattcctcgtcaaatccattagctagaggagttcctggacccatgcctctgctacctttctagtagaaacttgcagttcgttgtgaagagattcgttgaattgttgctaataatactcttgtgctagaggatattcatggccttaggcaagaattatttgtcattgaagatgagatccatatacttgccaaacaatccattcctagagttagtgttgataatgaaatggaatacaaggatattatcaagggtggcatgaaagaagtgttggtgctaagttatgaaagatggagttcgaagctttgcgcaaagagttgtttgtgaaggttcagtcattgtaccgggagctagagcagatcagatttgagaacaagcagctacctgctataagagaaggattgcatgatatacaagaggagatttcgagggctaggtttgtgttttgtgatcttatgtacaatgcattgatg

SEQ ID NO: 132454 - DNA, 322 bp, Zea Mays
tttttctttacttaactaaatcttgatttatcagggatcattatgtaaggtcaggtccccttgtatgttttggatgtgccaacaaaatattgttccattaaaatacacaaactaacatttgatcatacaattttcaaaaggatactgtggcatgtagacctggtgatcctgaagaataacttagatagatgtctcaagaagtttgtggttatattgaggctgttttgaatagtctggcagcaaatgttccaaaggctattttgctttgacaagtggagaaagcaaaggaagacatgcttaaccagatatacaactcgataag

SEQ ID NO: 132455 - DNA, 273 bp, Zea Mays
atggctgaaacaacaatttcccggaaccaaagggttctctccgccatggctggaacattagggaagttgggcttcccaccgcttccgcctaaaaatcggaaacaggccccttccttccactccaacggaagcaagcagccagctaaaaggctcaagcgcagcagcggctgccgcgacgcgcccacctccctctccaactttccgtttgccacacctctattgcaaccgccacaacccctagctccagcaacaaccaactccctcctcccctaa

SEQ ID NO: 132456 - DNA, 286 bp, Zea Mays
ctgagcgttttgttttcaggatgagaagaacaggtacgaggacaggatgaagcaggggttctagatgaatggaatggtgtgggagataaacttcccgtgttagttttatcctaggcgagtcaacaatgaaacgaatgcccaaggattgtgaatgtctgatccctgaactgaggttgcttgctgtcgttttactgtcatgcttgtgtcaatatcgtattattgcaaacacaccaatggagttttacattgacatcctcagattgtccgcaactagataattacatgc

SEQ ID NO: 132457 - DNA, 103 bp, Zea Mays
ttaaaaaaactagtaaagtacttgtttgtgtaggtgctcaccatgccgccatcctcacacatctccggtggagagccaacgcccccgccggccgccgccttgc

SEQ ID NO: 132458 - DNA, 1218 bp, Zea Mays
acgatcgaaggtggacgactgagaggagaggagagatcaggaatggacgggcagtttggttggggaagagaggagggaggctggaggaaagggccatggacggcgcaggaggacaagctgctggtcgagtacgtcaggcagcatggagaagggaggtggaattctgtcgccaagttaactggtctgaagcgaagcggcaagagctgccggctccggtgggtgaactacctgaggcccgacctgaagcgaggcaagatcacgccgcaggaggagagcgtcatactccagctccacgccctgtgggggaacagatggtcgacgatcgcgcgcagcctgccggggcggacggacaacgagatcaagaactactggcggacgcacttcaagaaggccaagccgtccaagaacgtcgagcgcgccagggcgcggttcctcaagcagcgacgcgagatgcagagccagctgctgctgctgcaggggcaagatcagcatcggcaggaggaggaacagcccgatcatgacgacgacggcgccagtgaggcaacgccgggtgttccactggaggaggaggaggagcagcagcagcagcagcatgaggacctgcggatgatgctgcagcaggacatggacgacctgctgttccagttctgcccgatggcctcctgcacttcctcctcctgcctcctccccggcggcggcagctgcgcctccgtcgtcagcgcgtcggcgagcgaggacggctccagcggggaccaccagctcgacggcgccgccacgtgggggtggggcagcctgtggaacctcgacgacgtggtggatgacgtcgacggcggcgcctgggatagcagcttctctttcctgcaggatcaagggctcgctttctactagcagctgtctggcctacaactttattataatagccctggtgcacacacttagatgttcttttcgagttcgactgtttgctgctgcggcctagctagtatgtgtggagggtgagagcgagagaccactctgattgtttacatgtgcgtttggacaaggatgcaacaccaaccatagagaccacttcgatcgagtagcccgtcttcgtgacttgtttagctcacctttaagaactttttcatgggggtgagagagtttttttctcttttttgaaaaaaagaggtataagaggggaagaaagatcacggtgtgttgaaagtgtaacttagctct

SEQ ID NO: 132459 - DNA, 97 bp, Zea Mays
cgcaactcaccatgtgtggcacaatcactcactgactcacacaacacacgagttaattaccgctcacagcgttcgttccttcctatccctcctcgag

SEQ ID NO: 132460 - DNA, 2639 bp, Zea Mays
atccccatcctcctcgcaatctccctctactagtgctgctgctctcattcctccaacaatccaaggttcgagctcattcattacacgaatctgcggccgcgtgggtgccggagagcggcgagcaatggagggggtgtggaggaaggccaagagggcgctgggcgccagcctctgtgtgcgcctccccgccgtcgccggcgaccgcgaggacggcgccagcgagcgccgcgcctcggatgcgctctccctcgactctacagcggcggcgcacgcatcggcgcccaacacgccggccgcgccggggaccggcgcgctgcggaggtccaagtccggaggcaagtcctccaagagaatgtgtgcaatatgttttgattccatgaagccaggtcttggacaagccctattcactgctgaatgttctcatatgtttcacttccactgcatctcctctagtgtgaaacatggaaaccatgtatgcccagtatgccgggcaaaatggaaagagatccccttcaatcgctcattatcttctatagttcctcgtggaagaggtggactgaatgtaaaccaagctcgattgccccaacaaggtgcctacatggctcttctccgccaggttccaaaccgtcagcgagaaggtccagtattggttacttctgagccatcagacttcaatgatgatgaacctttgcataagatggagcctgctaatattggatctagtagaactgtggaaattaagacatattcagagttttcagccattcaacagtcatctcaagatgactttgctgttctgatccatctgaaagccccatatgctaacccagagcaggtcataggcagaccggtcaatgcaacctcagttggttatcctactgcccgcgccccagttgatcttgttaccgtgcttgatgttagtggaagtatggcaggcactaaactggcactcttgaagcgagccatgggttttgttatacagcatcttggcccatcggatcgcctttcagtcatcgctttctcttcaaccgccagaaggttgttccatctccaacggatgtcacactctggccggcagcaggccctgcagactgtcaactcgcttgttgctagtggtggcacaaacattgctgatgcactgaagaaagctgctaaggttattgaggaccgaagccatcaaaatccagtatgcagcatcattctcttgtctgatggccaagatacgtacaatattccctcaaatattaggggtgcccggccagaatacagttcactagttccatcctccattctaaaccgcacatttggcttagtgccggtgcatgggtttggttttggagtagaccatgattcggatgctttgcattcgattgcggaggcctctggcggtacattctcctttatcgaggatgaaggtgtgattcaggacgcatttgctcagtgcataggtgggctcctcagcgttgttgttcaaaacatgcaagtaaatgtggagtgtgtccatcctggtgtccagcttcgctccatcaaatctggtagttaccacagcaaggtggctgcacatgggcgaaatggttccattgatgttggccatctctacgccgacgaggaaagggacttcctactgtcggtgagcttaccacattgtcgtgaacagaccacacttctgaaagttgcctgtgcctacagagattcattgaccaacgaagagatcaagattcagggtggcgaggtagcaatcttgaggcctagatcacccgtatctgagccagtttgcatggaggttgaccgcgagaggaaccgtgtccgtgctgcggatgctatcgaggccgcaagggctgctgctgagagaggtgctctttctgatgctgtgtcaatcctcgaagactgccggaggatactttcagaaactttttcaagccggagcggggaccggctgtgcatggcccttgatgcagagctgagggagatgcaagagaggatggctaaccggcaacgctacgaggcttcagggcgggcatatctgctgtctggcctcagctcacattcttggcagagggccactgcgcgaggcgactccactgacagtgacacacttgtttattcctaccagacaccatccatggttcacatgctacagcgctcacagaaccactgcccttctcctcaaggcccttcacaacctagggtcttggtgaaaccccagccaaggtagaaggcaactgagcaattcagcattatcttgcgaagcgagggcacagatgtcggtgaagaaattcaattcgtatggctgcgtattaggtcatagtgtagttctccagcacctttattttgttgtctaagtcgtggtggtgggtgggtataccagaggcggtgaggcgggcttggaggtaaatataatctggttgggtatactggggaacctaaggtgggggctttggtggtaaatacattgtggggggtatactcctgtggtgttaagaaataagtagggtagtagtagtagtagatgaggggctggagaaattgtgtaatagtttcaacgggttggagctaggtagtttagtggaggtcagttcttgtcaaagtctttatttgatctttggtgatgtagataagagggtatgatctcggggtgg

SEQ ID NO: 132461 - DNA, 1476 bp, Zea Mays
gctggccgcgtccgcgatctgcgtgctctgcatccccttgggcctgctgctcaagctcaagtcgtcgtcgtggtacgcgtacgcgaacccgccgtgccgcgtctggtccatgccggccatctcgtcctcggccgagactcggagcagccccatcttgttgagcgccaggaacagcggagccatggtgacgctaacccacgcggcgatcaccaggatcatcaccacgttcgcggccagcagcctcccgccgccgcccatgaacaggccgtacggccgccccggcgtgccgtagatctgctccacgtactccctgcgcgcgaacaggcccgtgaagaggaccccccacgcgccgcacccaccgtgcaactgcgcggcctccagcgggtcgtcgaaccggagcctcgcggccagcgcgttgagcccgatgagcacccacgccgacacgaacccgcatatgatggccgcccaggggtcgaccacggagcagcccgcggtgatcgccgcgaagccgccgaggaggccgttgcagacgtcgaccacgttccagtgccccgtctggagcctcttcccgaagagcgtcgtgagcgccgccgtgctgccggcgagggtggtggtcacggccgtgcggcccacggccgaccactgcccgtggatgctgccggccgggccgtagctcttgaggatggtgaggaacgacccggggttgaacccgaaccagccgaaccacagcaggaaagtgccgagcacgacgagcgacgcgctgtggccgcgcagcgccaccgagcggccggcgtggtcgaaccggccaatgcgggggccctcgatgagggcgccccagaggccggcgattccgcccaccatgtggacaacgctggacccggcgaagtcgatgatgccggagccgaagaggagcttccccgacgtccgtgacggcgaggcccagccgtcggcggaccagacccagtgggacaccaccgggtacacgaagccggtgaggaaggcggagtagatgaggtacgccacgaactgcgtgcgctcggcgatggagccggacgtgatcccggcggcggcgatggcgaaagcccactggaagaggaagaagtcgtagtcgaacccgacctggggaagccgcttgaggccgaagaagtgcttgccgatgaagccgttggacggggtcccgtacgcgaaggcgaagccgaataggtagtagaagagcgcgccggcggcggcgtcgagcacgttggtgagcatgatgttcatggtgttcttggcgcggacggagcccgcgcagagcatggcgaacccgagctgcatggcgaagacgaggtaggccgagaagagcaggtacgtcgagtccaccgccgacgtggtgtccgcgaattggttgcaaaggtactccgtcgcgtttgccgccgggcccagaagaggtgcgagggtcgtagcgcacgtcgccatctcggcaagcttgtttcctcc

SEQ ID NO: 132462 - DNA, 2025 bp, Zea Mays
cgggggccaagccccccccccccccccccccccccccccccaaaaaaaacacccactcaaaaggccaaagcccgcgcccgggcggagccgccgagccgctatcccaccgcgacttcgtcgccgtgctctcccgctgctccacccgcgcgcacctcgagcagctccacgctcacgccctcgtcgcgggggcgcgccgccgcgcagcccaccaccttccacctcatccgcttcgccgccctccgcctttcctgcctcgcctatgccccgccacctcttcgacgccacgccccaccccaacgtcttcctctactccgctattctctctgcatatgcctccgccgcagccgctgcctcaccttcatcctacgcccacgcccgcgacgcgctcgcgctcttccttcgcatgcttcgtcacggtcgcccatcgcccaaccagttcgtgtacccgctcgtgctccgcgctgcctgcgccgtcgacgtccgcattgtcaggtcgatccactcccacgcctgcaagagtggtttctgtggatatgaatacgatgtcataaggacctcactcctcgattgttattcgaggcacgctatgatggccgacgcgcgcaagctgtttgacggtttgacagagaggagcgtggtctcctggactgcgctggtgtccgggtatgcaagggcaggaaagattggggatgcgatcatgctcttcgagcgtatgaccgaaagggacgtggctgcatggaatgcaatcatcactggctgctctcagaacaggctgtttgcagaggcggttgggatttttgggaggatggtgggcacagggttgaggccaaatgcaaccaccatttcttgtgtactatctgcttgtgggcatcttggaatgctgaagatcgggaagttgatccactgctgcgcgtggaggacctgtgttggttttggctcatccgttctgaatgggttgattgatatgtacggtaaatgtgggaatctggagggggcaacgtggatattttatgaggtttcagatagaagcctaacagcttggaattctctgatcaattgtctggcactgcatgggcacagcaagtgtgcaatatcagtgtttaatgagatgaggggtgaaggggttgaacctgatgtgattactttcgttggactgcttaatgcatgcacccatggagggtttgttgatgaaggcattaagtactttgaattgatgcagcatgagcacggaattgaaccagagattgaacattatgggtgtatcattaaccttcttggtcgggcaggccggtttcaggatgcattgaatgttatcagcaatatgagaattgaatcagatgaagtcatatgggggtcattgctcaatgcatgtagagtacacagaaatgtagaacttgctgagttagcaattcgaaagttactagaattggatccaaataatgcaaactatgtggtgatgctagcaaatgtgtacagtgaaggtggcttgtgggaagaggtgaggaaagcaagaaagttcatggaggaggagaatataggcaagaagctgcctggttgtagctggatcgaggtggaccgcaagatacaccggttttactctggtgatgatgctcattctgagtcagagaatatatatgacactcttgaggatttagctgcctcaatggaattatgaaaaaaatatactgccagctaaccatgtttccagaaacttgcatagctgcataactttcataaattgtcttcattattggaaggtcatgaacttaacttctgtgtggtaaacaaagtgggcttccctaagacaaacatttgacctagatcgcacatttattggaggtacacaagaagttcttccatcaaagccttctatcaagctatacttcatggcaagaggtacagcaaaaaagttagttctgatgcctgaactggactgtacttatgttatgtacaggatctgtgtttttctgtgtcaaaatgccattatgcagacatgaaagtatgcatatattctcatttgattca

SEQ ID NO: 132463 - DNA, 2491 bp, Zea Mays
gcctgccctgcacctgcgcggttataaaacgctagggagagggcgggagcaagagcgcttggcgaggtcctggatgactgactgaccacactagcgcagcgcgcacaggagcaaaggggggcatcctctatcgcgcgcgcgccatggccaccaggccgggccctttgactgaatggccatggcaaaggcttggaaacttcaagtacttggtgatggctcccgtggcggtccacggcgcgcggcgggtggtcgcgcggggctggggcgacatcgacctggccttcgcgctcatcctgccgtcgctgctgctgcggatggtgcacaaccagatctggatcagcgccgcgcgctaccagacggcgcgcagcaagcaccgcatcgtcgaccgcggcatcgagttcgaccaggtcgaccgggagcgcggctgggacgaccagatcatcctcaacggcctgctcttctacgttggctacctggcgatccccagcgcgaggcgcatgccggcgtggaggtcggacggcgccgtggcgatggcgctgctccacgccgggcccgtggagttcctctactactggttccaccgggcgctgcaccaccacttcctctactcgcgctaccactcgcaccaccactcctccatcgtcaccgagcccatcacatccgtgatccatcccttcgctgagcacatggtctactacgtcctgttcgccatccccatgctttcgactctctacatggggaacgcctccgtcctgggcatcgtgctctacatcgcctacatcgacttcatgaacaacatggggcactgcaacttcgagctggtgcccaggtggatgttccagctcttccctcccctcaagtacctcatgtacacgccgtcgttccattctctgcaccacacgcagttccgcacgaactactcgctgttcatgccgctctacgactacgtatacagcaccatggacaagtcgtctgaccagctgtacgagacctcgctcaggggagcggaggagacgcctggcctcgtccacctcacgcacatgaccgacctgcagtcggtctaccacctgcggatcggcttcgcctccgtggcgtccagaccgtctgccaccggcgccatgtggtggtacatgtgggtgctgtggcccgtggcgtggctgtccatggcgctcgcgtgggcctacgggtcctccgcgttcgtcgtcgagaggatcaaactcgggaagctgaggatgcaaacgtgggcagtgccaagatacaacttccagtacggcctgagctgggagagagaatcgatcaacggcctaatcgaaagggcgatactagatgctgatgcgagaggtgtcaaggtgctcagcctaggactgttgaaccaggcgaaacagctgaacggcggcggcgagctgttcaggcacaggtatcccaagctcagagttcgcctcgtcgacggaagtggcctagcgactgctgtggtgctcaggagcattcctcgtgacgcgaagcaggttctcctccacgcaggcccttctaaggtagcgtgcgccacggctgctgcgttgtgcgagaggggcgtccaggtcgtcatgaacccaaacaaggaatatgatatgctcaagtcacagattgcagatagcaaagcaagctatttggaacgacgctccgacaaccaccacacgcctcaggtttggctagtagacagcatcgacgacgaggaacagaagatggcaccgaaaggagccgtattcgtcccaatctcacagttccccatcaagaaaatccgcaaggattgcacctacctgagcactccagcaatgaagatccctgaaaccatgcaaaatatccatgcctgcgagaactggctgccaagacgggtgatgagcgcctggcgcatcggcgggatacttcacgccctggaagggtggaccgtgcacgagtgtggggacgccatggtgcatgctgacaaagcatggtcagctgctattaggcacggattcgttcctttgacgaaagcctgaaagcctgcgaagcccggggttctgtggctggggcctgcgatagatatatgtacgcagatctggacgccattcgacgatggctggaaaactacgtttcagcaatcggtagcacaaattctcccccgctagagaaggcgacttatatggtcggcgtgatgaatgacgaccttgattccaacagcatatagtaactacagttatgttgtggcattgtatgatgcaagtgcgagaaactgctttgtggctgtctgggtgacatatacaattataataaaatgtcgatttggcttgtccttttgaaatgtgccgaggaatactcttttgctgaaaaacggatagggctagtttggatattacaattttccaagaaattactatttttccaagtaaaaataaactaactttctttgggaaaaattaaaatctcgtggaaaaataggatttccaagctagccctaagcagttttttttataca

SEQ ID NO: 132464 - DNA, 1065 bp, Zea Mays
aagagcgcttggcgaggtcctggatgactgactgaccacactagcgcagcgcgcacaggagcaaaggggggcatcctctatcgcgcgcgcgccatggccaccaggccgggccctttgactgaatggccatggcaaaggcttggaaacttcaagtacttggtgatggctcccgtggcggtccacggcgcgcggcgggtggtcgcgcggggctggggcgacatcgacctggccttcgcgctcatcctgccgtcgctgctgctgcggatggtgcacaaccagatctggatcagcgccgcgcgctaccagacggcgcgcagcaagcaccgcatcgtcgaccgcggcatcgagttcgaccaggtcgaccgggagcgcggctgggacgaccagatcatcctcaacggcctgctcttctacgttggctacctggcgatccccagcgcgaggcgcatgccggcgtggaggtcggacggcgccgtggcgatggcgctgctccacgccgggcccgtggagttcctctactactggttccaccgggcgctgcaccaccacttcctctactcgcgctaccactcgcaccaccactcctccatcgtcaccgagcccatcacataaatatcctgggcgggcctgtctggtccatcaacagtgcgggcccagaccggcctagtacagtacaggacaccacatgcatccggcccgttccactgaccaagcatgttggtgccataaaatcggcgcatgtgatcgcctctgagaaagctgcagtggtgccacgtttgtccggctaagagttaagatgcctttcgaatgtgaacccaataataatgcggtgcgggtgcggccgggaaatcacaggccgaaccgaactgctgaatgaaagagaccactcacgctgctgctgtgtcaggtcagcgacgagacttttgctccagctgctggggaccatccaaaaccagccattatagatcaaatcaagtagagtttaagtgctaggaaataattcaatgcatggtgtatctttggtaacgtgacatgacaacaatgcaatgcaacgcggcgggtttc

SEQ ID NO: 132465 - DNA, 861 bp, Zea Mays
aagagcgcttggcgaggtcctggatgactgactgaccacactagcgcagcgcgcacaggagcaaaggggggcatcctctatcgcgcgcgcgccatggccaccaggccgggccctttgactgaatggccatggcaaaggcttggaaacttcaagtacttggtgatggctcccgtggcggtccacggcgcgcggcgggtggtcgcgcggggctggggcgacatcgacctggccttcgcgctcatcctgccgtcgctgctgctgcggatggtgcacaaccagatctggatcagcgccgcgcgctaccagacggcgcgcagcaagcaccgcatcgtcgaccgcggcatcgagttcgaccaggtcgaccgggagcgcggctgggacgaccagatcatcctcaacggcctgctcttctacgttggctacctggcgatccccagcgcgaggcgcatgccggcgtggaggtcggacggcgccgtggcgatggcgctgctccacgccgggcccgtggagttcctctactactggttccaccgggcgctgcaccaccacttcctctactcgcgctaccactcgcaccaccactcctccatcgtcaccgagcccatcacatgtgagtaaataacacagtgcattgtttgagtcagtaacacgtcacacaccagtacaggaaaacacggcacaccaagtggagcatccattttattactacttcctccaaactaaaagcacatccaaccagaaatatcctgggcgggcctgtctggtccatcaacagtgcgggcccagaccggcctagtacagtacaggacaccacatgcatccggcccgttccactgaccaagcatgttggtgccataaaat

SEQ ID NO: 132466 - DNA, 673 bp, Zea Mays
gcctgccctgcacctgcgcggttataaaacgctagggagagggcgggagcaagagcgcttggcgaggtcctggatgactgactgaccacactagcgcagcgcgcacaggagcaaaggggggcatcctctatcgcgcgcgcgccatggccaccaggccgggccctttgactgaatggccatggcaaaggcttggaaacttcaaggtgcgtatatggcaagcgttcacgcatggtgtgcttgctactctcctatcctctttctttcatcttcaccacgccttcttcttccttggtttcgtttcgcctgcgggcgcgtgagatctatccgatgcgcgcgtcggaggccatggctgtgctccggcggtttcggtgctgtaggactaccgtcactcgtactgtttgcatgcgtgtgatggtaagcttcatctaggaggttactgtctgtgcgtgtacagaggggcgtgatgagtatattaaaacgagattactgtagtagctcatgcacatgtaactgctttccgcaacgaggtggtgccttttttccccccacttcagatatggtaatgacggtgttatcattagagaagtataataagtggccgtaatcaggctaaatgttgatgtggagcggaaagaagaggaggaaaatgagaagtaaacttatagccagcttc

SEQ ID NO: 132467 - DNA, 1806 bp, Zea Mays
aatttatctagaggaaaaagtcaaaacaaacagcgctacgccatcggtcccctgcccctccccgacgcttccggctttccgtgcgaccgtgcccttttcctcctctcgcagctcgcaggcgcaacagattccacccgttccttcgggtggccggacggaacgaggaaggaggcaggatggcctccgatggccacccgccggagccggggaagaaggaggatgtcgccaccacggccgccgggcctggagcaaacgatctggacgacccgcaattcatgtgctgcggatcttctgtacaaaccagttgttatatcatgtggtcatatgtcatgtttctggtgtgtccacaaagctatgcatattttccgggaatcgcattgtgctgtgtgtaggcagccctatatacacttcccgagtatttgtcagctcttgcatcatttgcttctaaagcttgaaactaatgattacaaaagaagggaaaaagaagtactagaggaagagaagcgcatgcaaacatactctccccaaatcattgagttcttaaactacaagactaacgttggaagctataaggagaacagaaatgaagacagtaaagctagacctccacaagaagttccattgaatgacagcgttccagatgagcatttgaagaaaattaaattggaggatgtttcatgccctctctgtatggagatgctgtatcaacctgctgttcttaattgtggtcatgtgtattgtgtatcctgtttgtcatccttgaatgaggaaacgctgaagtgccatgtttgtggaagtcttcaccctggagatttccctaatgtttgcctggaccttgatcatttccttgaagaatattttccagcagaatatgaattgagagggcagaaagttcaatttaagaaggatcagtgcaatcgtgaaacatcatcttcaggtacttcaggcagaaaaggaagcactagggcactgcatgctgaagacccgtcaaatattcacattggagtaggatgcgactcatgtggggtatatccgatacgtggtaagagatacaaatgccaggactgcactgagttaataggctttgacctttgcgaagcctgctacaactccagttcaaagctcccaggacgctttaaccagcggcacacccctaatcacagaatggaagttgacaattcagcactcgtgcataggatactgagacaccatggcatacccgaggaaggccctgagggactgatgatggaagtggttggtcctgatgcaatggtgcagatactcattgataatcaaggaatggaggagggcaatgacgagggcccaggagaggcggccattgaagaaccagttggttctcttggctcaatgtcgcgtctgtcgcatctattcatgtataatccagaaatggaggatggcaatgacgaggactcaggagaggaggcggccattgaagaaccagttggttctcttggcgcaatggcgcctctattcatgtatgatcaagaaatggaggacaacgaggaggatcaggcacactagatgcagattgcaccagctgcagcgaagcctttgttttgtgttgctggggcggctctacttatgtaatgtggaatggagggattgcgcaagcttaaaagtatggctggatcggccttgttttttaactggttctctagttactgccatctaatagccaacatttttcccgcttttgtaaatccgtgcagttgtttgtttcaaaggaaaatgcaataaggatatgcagaactatattccttattttaaactctactcctttcgtcc

SEQ ID NO: 132468 - DNA, 1814 bp, Zea Mays
aatttatctagaggaaaaagtcaaaacaaacagcgctacgccatcggtcccctgcccctccccgacgcttccggctttccgtgcgaccgtgcccttttcctcctctcgcagctcgcaggcgcaacagattccacccgttccttcgggtggccggacggaacgaggaaggaggcaggatggcctccgatggccacccgccggagccggggaagaaggaggatgtcgccaccacggccgccgggcctggagcaaacgatctggacgacccgcaattcatgtgctgcgtatgtctggatcttctgtacaaaccagttgttatatcatgtggtcatatgtcatgtttctggtgtgtccacaaagctatgcatattttccgggaatcgcattgtgctgtgtgtaggcagccctatatacacttcccgagtatttgtcagctcttgcatcatttgcttctaaagcttgaaactaatgattacaaaagaagggaaaaagaagtactagaggaagagaagcgcatgcaaacatactctccccaaatcattgagttcttaaactacaagactaacgttggaagctataaggagaacagaaatgaagacagtaaagctagacctccacaagaagttccattgaatgacagcgttccagatgagcatttgaagaaaattaaattggaggatgtttcatgccctctctgtatggagatgctgtatcaacctgctgttcttaattgtggtcatgtgtattgtgtatcctgtttgtcatccttgaatgaggaaacgctgaagtgccatgtttgtggaagtcttcaccctggagatttccctaatgtttgcctggaccttgatcatttccttgaagaatattttccagcagaatatgaattgagagggcagaaagttcaatttaagaaggatcagtgcaatcgtgaaacatcatcttcaggtacttcaggcagaaaaggaagcactagggcactgcatgctgaagacccgtcaaatattcacattggagtaggatgcgactcatgtggggtatatccgatacgtggtaagagatacaaatgccaggactgcactgagttaataggctttgacctttgcgaagcctgctacaactccagttcaaagctcccaggacgctttaaccagcggcacacccctaatcacagaatggaagttgacaattcagcactcgtgcataggatactgagacaccatggcatacccgaggaaggccctgagggactgatgatggaagtggttggtcctgatgcaatggtgcagatactcattgataatcaaggaatggaggagggcaatgacgagggcccaggagaggcggccattgaagaaccagttggttctcttggctcaatgtcgcgtctgtcgcatctattcatgtataatccagaaatggaggatggcaatgacgaggactcaggagaggaggcggccattgaagaaccagttggttctcttggcgcaatggcgcctctattcatgtatgatcaagaaatggaggacaacgaggaggatcaggcacactagatgcagattgcaccagctgcagcgaagcctttgttttgtgttgctggggcggctctacttatgtaatgtggaatggagggattgcgcaagcttaaaagtatggctggatcggccttgttttttaactggttctctagttactgccatctaatagccaacatttttcccgcttttgtaaatccgtgcagttgtttgtttcaaaggaaaatgcaataaggatatgcagaactatattccttattttaaactctactcctttcgtcc

SEQ ID NO: 132469 - DNA, 1068 bp, Zea Mays
acagcgccagccgccagcgctccccttcttcagaaggacgtggccgcacccgcctctcgtctccctcccacccacgcgattccatttcgcttacatttcatccgtgaaaaatcacggaagtgccacccgcagtggcgggacccacgctccacgctttcctctcgttctccggctcgaccgcattcttttttttctcttctactattttcgtgtcccaccagccaccaccagtcggcgacgggcaatttctgtctctggcttagcgatgcaggcgccacgtggcggcgggttcttcgggaagcggaaggagcgcgactactactacccctacccctcggtgtcgtcgtcatcagagcaggcggtgctgctccagcggcaaccgccgccgtacgctaggcccgagcccgacacgcggagcgtcaagccggatcgcccggcgatgaggtttggtgccaagccgccgctccctcagccgggggcccaggtcggctgcaacaagctgctggctgggtacctggcgcacgagttcctgcggtgcggcacgctcctcggcgagcggaggctggagctgccccgtctgaaggagaaggatccctccgcctccacctccacccctgcgccggagccgagcaggcgctacgcggaggtttcgcggctgcttatggcgggcggggcccgcatacccggcgtcgtcaacccgtcgcagctcggacgctggctccggatcaaggagtgaccgggtggccatgcgcccaggccgctggaggtcgggtgcatgcggagcatggccgcattgcctactgcttcgttccctcgtcagcggccgatcagaggaaccgttgtttttgaacaaagcaggcgggtttctcatgtctcagtctttctttcccttcgaaatttgtcgtgtagtaattagtaaatcaagtgttcttgtaaaaaaaattagggtagctgttggacgagaaattatctgctgctagcttttgctgcgtcggttcacattttttcccccgctgaaatcctctgcatcggcaaaatctgtgatgcatgacgtggatgaatccgccc

SEQ ID NO: 132470 - DNA, 1029 bp, Zea Mays
atgccacccgcgcccaccaccggcggcgcaggggaggagccggccatcctcaaggcggcgctgggctccggcaagctgcgcatcgagggatattgtagattcatatcagcgggacacccgcaaggccgcaagaagaaacatcgcaacaacaaatacgctgaagagtggaaagtgagagcctgtgctggtcgactgccgtcaacgctgccgccgccgaaagcgccggcctcggcctggcggagccctccctggcagccccggaggctgcggcccggcggacgtcggaggaggtgtggaaggagatctctgccgctggagggctccccacgcccatcctccctatccctcccgctggggttccctgacggtgacggagatgcggcagggagtgtggcggggggagtgggcggcgtgaggggaggcgggaagcgggcacttctggatcccgcggaccgcgccgtgatgcagcggcagaagcgcatgatcaagaaccgagagtccgcagcgagttccagggacaggaaacaagccgcacttgaagaaatcttatatcagtttgaggaaaaactccaagctgaaagagaggaagctgctaggaagtaggaagagttgcaagcacaactacaagctcaacaggccgcacttgaagaaaaccaaagtttgttgcgccagacccaagaggaagtgaaggggatgcataccaagtttgaagagaccaatgcactactacgagctatcttgaaacttcagaaagattgaggtagggatgcataccaagtctgaggatgatgcctttgcttaaggtttttctaccttgctagaacatatctgtggttagaactttatcagaactacgtgcaatctgtttgaatgcttcaaacctttgtggtggaacctttgtatgtttgaacctctgttgtggaagaactagtgtgctggaattgtgtatgacttgtgatgagaatgttgtgtatgatggcttttctgtgtattatgattctgtgagttatcatgagagctcagtgtgtc

SEQ ID NO: 132471 - DNA, 1283 bp, Zea Mays
acacaccctccttcctaaaaatagtagccggcgccatgcaaatgcgattccccacagctccccgttcctgatggagctcctccgcagatcaatggacctatgagacgacgagcgacgccagtcagcaaccaggtcgtccaggtaccgcaggaactcccagcggccacccctactagcaaccactccagtctccagctgagctgagctgagcaacaaaggttcagctccattccaacgcgcggccgctgcctcggctgccaccgccgagatcagccgccatctccaccaaaggttaatcgatggacctgcccccaaaccccgagagcccgggaggcggtggtgatggcggcggaggaggcggagccggtggatcgagcggcggggcgtcttcgtcggcgccgggcggcggcacgccgcagacgccgagccggtacgaggcgcagaagcggcgggactggaacacgttcgggcagtacctgcggaaccaccggccgccgctgagcctggcgcagtgcagcggcgcgcacgtgctggagttcctgcggtacctggaccagttcggcaagaccaaggtccacacggcggcgtgccccttcttcggccacccgagcccgcccgcgccgtgcccctgcccgctgcgccaggcgtggggcagcctcgacgcgctggtgggccgcctccgcgccgccttcgaggagaacggaggccgcccggagtccaaccccttcgcggcgcgcgccgtccgcctctacctccgcgaggtccgcgagcaccaggcccgcgcgcgcggcgtcagctacgagaagaagaagcgcaagaagccgcagccagctgatcacgccagcgggagcggaggacaaggccctcaccacccgccgcctccggcaccgccgcccgccggcgcggcgtgctgaggcctgaggaacagtactacgacacacgcaccccatttggtatgccggccggactgagcatattttatgtaggtttcgatcgatttgccggtgcatgcatgcatggtttatttgctactaccgttttgctcgcgctgctggtgctgcttcttcttcgcttagactctctctaccgatcgtgtgccgtgctacattgttatttcttcttctccgtctctctctctctctctcctgctacacgcttcagttcctagctaccgcttattttcgtttcaagcagtttaatttgcttgtagaagcaaatcttatcattggatcattgaattgaagcctatatatatatgcttttcattcagtactgctcattgt

SEQ ID NO: 132472 - DNA, 2259 bp, Zea Mays
atgatccttgcgctgttcgccgcatcggtcctgtcgacggggcctccgccagcgatggcggcggcgatgcagccgagcgcgacgtgcctgcggcggtgcggcgacatcgacatcccgtacccgttcggcgtcggccccgggtgccacctcgagacgggggactggacgttcatgctctcctgcaaccgcagcgaggacggacggctccggctatacaactaccagatcgaggtgctgaacatgtcggtgcgcctggggcagctgcgcatctacaacatcatcaacccatggtgctacaacgccacgacgcgggcgatgaacgaccagagcaactggtggtacgacatgtccatcaccaacttccgcatcaacgacgcgcagaacaggttcaccgtcatgggctgcaactcgctcgcctacatccggtggcccaacgacagcgccgccgcgtacatgaccgggtgcatggccatgtgccccggcgtggggcggctgaataacggcgcctgcaacggcttcgggtgctgccagaccgccatccccagcgacctgaacgcgtactcggtctccttcgaggagaagttcaacacctcccggatcgccaacttcagcccgtgcagctacgccgtcctcatggaggccgccgccttcaacttccgcaccacgtacgtgacgaccgacgcgttcatgacgaacaacgacggccaggtgccgctcgtgctcgactgggccatcgggaacatgacgtgcgaggaggccaagcggagcgcgtctgcgtacgcgtgcgccagtagcaacagcgagtgcatcgactccaagtacggcaagggccggggctacctctgcaactgctccgccggatacgacggcaacccctacctgctcaacggctgccatgatattaacgagtgcgaagatgcaaggttcaggtacccgtgctctgttcctggtacctgcgtcaacacgatcggatcattctactgcgcgtgccctcacaggacgacgggcaacgccgtaaacggaacgtgcgaggacgaaaagaaccaaattgggtggcagatcgccgttggtgttagcagtggcgttgtcgtactgatcgtcacggcgacctgcctctacatgatccacgagaagaggaggctcgccaagatcaaaagcgactacttcaagcagcacggcggcctcctgctgttcgaggatatgaggtcgaggcagggcctgtcgagcttcacgcacttcactcaagaggagctcgaggtgtcgaccaacaagttcgacgagcgcaacgtgatcggcaagggcggcaacggcaccgtgtaccggggcaccaccaaggacggcaccaccgtggcgattaagaagtgccggctggccaacgagcggcagaagaaggagttcggcaaggagatgctcatcctgtcccagatcaaccaccggaatatcgtcaagctctacggctgctgcctcgagctggaggtcccgatgctggtgtacaagtacatccccaacggcaccctgtaccagctcatccacggcaggcgtgaccgcggcgtgccgcgcgtcccgttggcactgcggctcaagatcgcccaccaggccgccgaggcgctcgcgtacctgcactcgtgggcgtcccctcccatcatccatggcgacgtgaagacgtccaacatactcctcgacgaggactacgccgccatggtaaccgacttcggggcctccacgatggcgccgacggacgaggcccagttcgtgacgttcgtgcaggggacatgcgggtacctggaccccgagtacatgaggacgtgcaagctgacggacaagagtgacgtgtacagcttcggcgtcgtcttgctcgagctcctgacgtgccggaaggcgctgaacctgggggagctcgaggaggagaagtacctctcgtcgcagttcctcctgctgctcggcgaggaccgccttgaggagatactggacgagcaggtgaagggcgagcagagcttcgagctgctcgagcaggtcgcggagctggcgaagcaatgcctggagatgaccggcgacaagaggccgtcgatgagacaggtagctgaagagctagacaggctgagtaggctgtcccggcatccctgggggcggcagaactccgaggagattctggcattgcttggcggatcgccgagcacggcctcagaagtagaacttagtaccagtcggaatatcagttttactgatacggcgtacattggaattaggtctccacgttag

SEQ ID NO: 132473 - DNA, 977 bp, Zea Mays
agcccagctctttctcggccgggagatcgagacatggggcgcgctccgtgctgcgagaagatggggctcaagaggggcccgtggacgcccgaggaggacaggatcctggtggcgcacatcgagcgccacggccacagcaactggcgcgcgctgcccaagcaggcgggccttccccgctgcggcaagagctgccgcctccgctggatcaactacctgcgccccgacatcaagcgcggcaacttcacccgcgaggaggaggacgcagtcatccaactccaccaaatgctcggcaacagatggtcggcaatcgctgccaggctgccggggaggacggacaacgagatcaagaacgtctggcacactcacctcaagaagcgactggagcctaagacagccacgcaggcgcccaagcgaaagcccaagaagcagcagcagccagaggcggtgacgctcgcagcgccggtctcgccggagcagtcagtctccacgtcgaccaccagcaccaccactgactactcggcggcctcgtcgtcgttggagaacgcggatagcttcacctcggaggaggaggactaccagattgacgacagcttctggtccgagacgctggcgatggcggtcgacagttccgactccgggatggaggaggcagagggcgccttcggcgcgtcgccgccggcgccgtcgaccaacgacgacgtggacttttggctcaagctgttcatgcaggccagcgacatgcagaattcgccccagatttatgcatgaacctagacggttctctctcgatcggctgatgatgttcttggcctcagaattctttcaatccttttgttctgctccgtttcggtggacgtatatctgactgaaaacttgtgcagcggaaagcgattgtgcttcatcatggcggtgttcactttttgcgcattatatactacgattttagttgagttttctgtcacctgtgctttccgccg

SEQ ID NO: 132474 - DNA, 1532 bp, Zea Mays
acttcacacccagcgcactcgagctcgagccctcgccctctcctcaaacacaagcctcagatctcagtcacctgcgccgccgcttcgttcgtgtggaggggagaagagaggaaatggcggcgaccgagggcgtgctcctggggatgggcaaccccctcctcgacatctccgccgtcgtcgatgacgccttcctgacaaagtatgacatcaagctgaacaatgctattctcgctgaggagaagcacttgcctatgtatgacgagttggctagcaagagcaatgttgaatatattgccggaggagccacccagaactctatcagggttgcccaatggatgcttcaaactcctggtgcaacaagttacatgggatgcattggaaaggacaagtttggtgaggaaatgaagaaaaacgctcaagctgcaggagttactgctcattactacgaggatgagactgctcctactggcacatgtgctgtatgtgttgttggtggtgaaaggtcattgattgcaaatctgtcagcggcaaactgttacaaatctgagcatctaaagagaccagagaactgggcactagttgaaaaggcaaaatacatctacattgctggatttttccttacagtgtcgcctgattctatccagctagtcgctgagcatgctgcagcaaataacaaggtgttcctgatgaacctctctgctcccttcatttgtgagttcttccgtgatgcccaagagaaggtcctcccgtatgctgactacatcttcggcaacgaaactgaggcaaagatctttgccaaagtcagaggatgggagactgagaatattgaggagattgctttgaagatctctcaacttcctttggcttcaggcaagcaaaagaggattgctgtgattactcaaggtgctgatccagtggttgttgctgaggatgggaaggtgaaaacgttccctgtgatcctattgcccaaggagaagcttgttgacaccaacggcgcaggtgatgctttcgttggaggcttcctctcacagttggttctaggcaagggcattgaagactgcgtgagggcaggttgctatgccgcaaacgttatcatccagcgcccgggctgtacttacccggagaagcctgacttcaactagtgcaaaactgaggcacgtcatgagagggactgttataggcacacttaattgttaaccagtgcgtggttcggtgtctacacaccctgtattcttccgaggcttctcttctgatccggccaatatttttgccgtgaaatttgtgttctgcaactatggacgtctcctttgttgctgtataaggcatgatttgccatcattctgttgcttcggtgatgcttgcaatgcaatgagaatgtgttggaacgagatgtttttgattgcgttttgctttgttcctagcaggccagcaaggtagcatcagccttgccctaagttgaaggccgccatctatttatatgttgcagtcatcgatcaatccaattagataacttgctgtttctttttcataaa

SEQ ID NO: 132475 - DNA, 1256 bp, Zea Mays
acttcacacccagcgcactcgagctcgagccctcgccctctcctcaaacacaagcctcagatctcagtcacctgcgccgccgcttcgttcgtgtggaggggagaagagaggaaatggcggcgaccgagggcgtgctcctggggatgggcaaccccctcctcgacatctccgccgtcgtcgatgacgccttcctgacaaagtatgacatcaagctgaacaatgctattctcgctgaggagaagcacttgcctatgtatgacgagttggctagcaagagcaatgttgaatatattgccggaggagccacccagaactctatcagggttgcccaatggatgcttcaaactcctggtgcaacaagttacatgggatgcattggaaaggacaagtttggtgaggaaatgaagaaaaacgctcaagctgcaggagttactgctcattactacgaggatgagactgctcctactggcacatgtgctgtatgtgttgttggtggtgaaaggtcattgattgcaaatctgtcagcggcaaactgttacaaatctgagcatctaaagagaccagagaactgggcactagttgaaaaggcaaaatacatctacattgctggatttttccttacagtgtcgcctgattctatccagctagtcgctgagcatgctgcagcaaataacaaggtgttcctgatgaacctctctgctcccttcatttgtgagttcttccgtgatgctttcgttggaggcttcctctcacagttggttctaggcaagggcattgaagactgcgtgagggcaggttgctatgccgcaaacgttatcatccagcgcccgggctgtacttacccggagaagcctgacttcaactagtgcaaaactgaggcacgtcatgagagggactgttataggcacacttaattgttaaccagtgcgtggttcggtgtctacacaccctgtattcttccgaggcttctcttctgatccggccaatatttttgccgtgaaatttgtgttctgcaactatggacgtctcctttgttgctgtataaggcatgatttgccatcattctgttgcttcggtgatgcttgcaatgcaatgagaatgtgttggaacgagatgtttttgattgcgttttgctttgttcctagcaggccagcaaggtagcatcagccttgccctaagttgaaggccgccatctatttatatgttgcagtcatcgatcaatccaattagataacttgctgtttctttttcataaa

SEQ ID NO: 132476 - DNA, 2783 bp, Zea Mays
cccacccggcgtgcctggccacggcccccggccatccccctatttaagcgcggccagcccccgccgtttccctccaagaagagcacgcccactcctccggctcttcttctccaccggcaccagtccaccacctcccacctcctgccaccgcgcggccccaaccaaccacaccgcagcgcagcaatggcgggcaacggcgccatcgtggagagcgacccgctgaactggggcgcggcggcggcggagctggccgggagccacctggacgaggtgaagcgcatggtggcgcaggcccggcagcccgtggtcaagatcgagggttccaccctccgcgtcggccaggtggccgccgtcgcctccgccaaggacgcgtccggcgtcgccgtcgagctcgacgaggaggcccgcccccgcgtcaaggccagcagcgagtggatcctcgactgcatcgcccacggcggcgacatctacggcgtcaccaccggcttcggcggcacctcccaccgccgcaccaaggacgggcccgcgctccaggtcgagctgctcaggcatctcaacgccggaatcttcggcaccggcagcgacgggcacacgctgccgtcggaggtcacccgcgcggcgatgctggtgcgcatcaacaccctcctccagggctactccggcatccgcttcgagatcctcgaggccatcacgaagctgctcaacaccggtgtcagcccctgcctgccgctccggggcaccatcaccgcgtcgggcgacctggtcccgctctcctacatcgccggcctcatcacgggccgccccaacgcgcaggccgtcaccgtcgacgggaggaaggtggacgccgccgaggcgttcaagatcgccggcatcgagggcggcttcttcaagctcaaccccaaggagggcctcgccatcgtcaacggcacgtccgtgggctccgcgctcgcggccaccgtgatgtacgacgccaacgtcctggccgtcctgtcggaggtcctgtccgccgtcttctgcgaggtcatgaacggcaagcccgagtacacggaccacctgacccacaagctgaagcaccacccggggtccatcgaggccgcggccatcatggagcacatcctggatggcagctccttcatgaagcaggccaagaagttgaacgagctggacccgctgctgaagcccaagcaggacaggtacgcgctccgcacgtcgccgcagtggctgggcccccagatcgaggtcatccgcgccgccaccaagtccatcgagcgcgaggtcaactccgtgaacgacaacccggtcatcgacgtccaccgcggcaaggcgctgcacggcggcaacttccagggcacccccatcggcgtgtccatggacaacgcccgcctcgccatcgccaacatcggcaagctcatgttcgcgcagttctccgagctcgtcaacgagttctacaacaacgggctcacctccaacctggccggcagccgcaaccccagcctggactacggcttcaagggcaccgagatcgccatggcctcctactgctccgagctccagtacctgggcaaccccatcaccaaccacgtgcagagcgcggagcagcacaaccaggacgtgaactccctgggcctcgtctcggccaggaagaccgccgaggcgatcgacatcctgaagctcatgtcgtccacctacatcgtggcgctgtgccaggccgtggacctgcgccacctcgaggagaacatcaaggcgtcggtgaagaacaccgtgacccaggtggccaagaaggtgctgaccatgaacccctcgggcgagctctccagcgcccgcttcagcgagaaggagctgatcagcgccatcgaccgcgaggccgtgttcacgtacgcggaggacgcggccagcggcagcctgccgctgatgcagaagctgcgcgccgtgctggtggaccacgccctcagcagcggcgacgcggagcgggagccctccgtgttctccaagatcaccaggttcgaggaggagctccgcgcggtgctgccccaggaggtggaggccgcccgcgtggcggtcgccgagggcaccgcccccgtggcgaaccggatcgcggacagccggtcgttcccgctgtaccgcttcgtgcgcgaggagctcggctgcgtgttcctgaccggcgagaggctcaagtcccccggcgaggagtgcaacaaggtgttcgtcggcatcagccagggcaagctcgtggaccccatgctcgagtgcctcaaggagtgggacggcaagccgctgcccatcaacgtcaagtaaagaacgccaaggagaagaggagggaggggaggaaatacgtggaaaaaaaaataaaacctgtacacgtgtatgtccagatcgcgtgccgtcgatcgttcttcgttgttgatttttggttgtattgatcgatccgtatgtgtgcgtgcgtgtgtggcgttgctctttcttcttttgtgtagctgccctgccaccggccgacgtgcatgccatggtggcggacagcgttttctaaggtcatatactgttgttgtgtttaagtacatcttgcgtactcaattccttctaagtaagtatcctaatactagaatgttcctctactactgtctcgtcttgtggaaattgtgccagacagttgatcatcgctactttcaggggaactggggaagtaggatgtcatttttgttacttgactgtagtggcaaaagacccatgcttctaaaataagccgcctaccgctgtggtcgccatggtgggggagcagcagaacg

SEQ ID NO: 132477 - DNA, 2272 bp, Zea Mays
taccatgtacaccaaattgacgcacagtttttaactactgtcaagctgtgttcagccctgactctttttgttttcaacgttcacaaattagcacgtctagctactgtcagactacaacttgtcagttcagtaccgaaatctgtcgccatctatcggtgctgtcagactgaccgggccttgtgcgctggctccccttttctgcaggcatctcaacgccggaatcttcggcaccggcagcgacgggcacacgctgccgtcggaggtcacccgcgcggcgatgctggtgcgcatcaacaccctcctccagggctactccggcatccgcttcgagatcctcgaggccatcacgaagctgctcaacaccggtgtcagcccctgcctgccgctccggggcaccatcaccgcgtcgggcgacctggtcccgctctcctacatcgccggcctcatcacgggccgccccaacgcgcaggccgtcaccgtcgacgggaggaaggtggacgccgccgaggcgttcaagatcgccggcatcgagggcggcttcttcaagctcaaccccaaggagggcctcgccatcgtcaacggcacgtccgtgggctccgcgctcgcggccaccgtgatgtacgacgccaacgtcctggccgtcctgtcggaggtcctgtccgccgtcttctgcgaggtcatgaacggcaagcccgagtacacggaccacctgacccacaagctgaagcaccacccggggtccatcgaggccgcggccatcatggagcacatcctggatggcagctccttcatgaagcaggccaagaagttgaacgagctggacccgctgctgaagcccaagcaggacaggtacgcgctccgcacgtcgccgcagtggctgggcccccagatcgaggtcatccgcgccgccaccaagtccatcgagcgcgaggtcaactccgtgaacgacaacccggtcatcgacgtccaccgcggcaaggcgctgcacggcggcaacttccagggcacccccatcggcgtgtccatggacaacgcccgcctcgccatcgccaacatcggcaagctcatgttcgcgcagttctccgagctcgtcaacgagttctacaacaacgggctcacctccaacctggccggcagccgcaaccccagcctggactacggcttcaagggcaccgagatcgccatggcctcctactgctccgagctccagtacctgggcaaccccatcaccaaccacgtgcagagcgcggagcagcacaaccaggacgtgaactccctgggcctcgtctcggccaggaagaccgccgaggcgatcgacatcctgaagctcatgtcgtccacctacatcgtggcgctgtgccaggccgtggacctgcgccacctcgaggagaacatcaaggcgtcggtgaagaacaccgtgacccaggtggccaagaaggtgctgaccatgaacccctcgggcgagctctccagcgcccgcttcagcgagaaggagctgatcagcgccatcgaccgcgaggccgtgttcacgtacgcggaggacgcggccagcggcagcctgccgctgatgcagaagctgcgcgccgtgctggtggaccacgccctcagcagcggcgacgcggagcgggagccctccgtgttctccaagatcaccaggttcgaggaggagctccgcgcggtgctgccccaggaggtggaggccgcccgcgtggcggtcgccgagggcaccgcccccgtggcgaaccggatcgcggacagccggtcgttcccgctgtaccgcttcgtgcgcgaggagctcggctgcgtgttcctgaccggcgagaggctcaagtcccccggcgaggagtgcaacaaggtgttcgtcggcatcagccagggcaagctcgtggaccccatgctcgagtgcctcaaggagtgggacggcaagccgctgcccatcaacgtcaagtaaagaacgccaaggagaagaggagggaggggaggaaatacgtggaaaaaaaaataaaacctgtacacgtgtatgtccagatcgcgtgccgtcgatcgttcttcgttgttgatttttggttgtattgatcgatccgtatgtgtgcgtgcgtgtgtggcgttgctctttcttcttttgtgtagctgccctgccaccggccgacgtgcatgccatggtggcggacagcgttttctaaggtcatatactgttgttgtgtttaagtacatcttgcgtactcaattccttctaagtaagtatcctaatactagaatgttcctctactac

SEQ ID NO: 132478 - DNA, 845 bp, Zea Mays
atttaagcgcggccagcccccgccgtttccctccaagaagagcacgcccactcctccggctcttcttctccaccggcaccagtccaccacctcccacctcctgccaccgcgcggccccaaccaaccacaccgcagcgcagcaatggcgggcaacggcgccatcgtggagagcgacccgctgaactggggcgcggcggcggcggagctggccgggagccacctggacgaggtgaagcgcatggtggcgcaggcccggcagcccgtggtcaagatcgagggttccaccctccgcgtcggccaggtggccgccgtcgcctccgccaaggacgcgtccggcgtcgccgtcgagctcgacgaggaggcccgcccccgcgtcaaggccagcagcgagtggatcctcgactgcatcgcccacggcggcgacatctacggcgtcaccaccggcttcggcggcacctcccaccgccgcaccaaggacgggcccgcgctccaggtcgagctgctcaggtaacacagttcgatttcgaccggccgtatatggtctttactctttactaccgcataattggatcagatctgttattttgtcgatgatctcgtcccggctagctccagctccatgatgcggtgtggcagcctgagactgggtcactgggagcagaacactataataacgatgaacgaatggccccacgctgcactggggcccacacgacagttaaataaagcagtagcacgtaggattctttgcgtcactgtgcgccactgctgtgcttttttgcctcctgtcctgtctcccgactcctgagaatcacgagtcggacagggaaggcaaaaacgggagc

SEQ ID NO: 132479 - DNA, 108 bp, Zea Mays
tttttttgttttttggcttgctaccatcggacttgcatgtatgatggtttcttcctcctggagtccaaatgtccaaatcaggacagttgtccacggattcatcatcag

SEQ ID NO: 132480 - DNA, 2610 bp, Zea Mays
ctagctttccccagctcttcttccacagcactgtctgtctgtctgtctcgcaattagctgtactaatccgctagtggcactgctgctactctcgtgtactcccagctatctcctctctatactcttgtacgtacgcacgtgtcgcaaccgcaatggagtgcgagaccgggcttgtccgctccctgaacggcgagggcctgtgcatgtcggcggcggcggcggcgccgcgcgccgacgccctgaactggggcaaggccgcggaggacctgtccgggagccacctggacgaggtgaagcggatggtggtggagttccgcgagccgctggtgaggatccagggcgccagcctgagcatcgggcaggtggccgccgtggccgcgggcgccggcggcgaggcccgcgtggagctggacgagtccgcccgcggccgcgtcaaggccagcagcgactgggtcatgagcagcatgatgaacggcaccgacagctacggcgtcaccaccggcttcggcgccacgtcgcacaggaggaccaaggagggcggcgcgctccagagggagctcatcagattcctcaatgctggcgcgttcggcaccggcgccgacggccacgtgctgccggccgaggccacgcgcgcggcgatgctcgtgcgcatcaacaccctcctccagggctactccggcatccgcttcgagattctggaggccatcgccaagctgctcaacgccaacgtcacgccgtgcctgccgctccggggcaccatcaccgcgtcgggcgacctcgtcccgctctcctacatcgccggcctcatcacgggccgccagaactccgtcgcggtgggccccgacggcaggaaggtgggcgccgccgaggcgttcaggatcgccggcatcgagcacgggttcttcgagctgcagcccaaggagggcctcgccatggtcaacggcaccgccgtgggctccggcctcgcctccaccgtgctcttcgaggccaacgttctcgccgtcatggccgaggtcatctccgcggtgttctgcgaggtcatgaccggcaagcccgagttcaccgaccacctgacgcacaagctgaagcaccaccccggacagatcgaggccgccgctatcatggagcacgtcctggaaggcagctcgtacatgaagctggccaagaagctcggcgagctcgacccgctgatgaagccgaagcaggacagatacgcgctccgcacctccccgcagtggctgggcccgcagatcgaagtgatccgctttgccaccaagtccatcgagcgcgagatcaactccgtcaacgacaacccgctcatcgatgtgtcccgtggcaaggcgctccacggcggcaacttccagggaactcccatcggcgtgtccatggacaacacccgtctcgcgctcgccgccatcggcaagctcatgttcgcgcagttctcggagctggtgaacgactactacaacaacggcctcccgtccaacctgtccggcgggcgcaaccccagcttggactacggcttcaagggcgccgagatcgccatggcctcctactgctcggagctccagttcctgggcaacccggtgaccaaccacgtccagagcgcggagcagcacaaccaggacgtgaactccctgggcctcatctcgtccaggaagaccgccgaggcagtggacatcctgaagctgatgacgtccacgttcctgatcgcgctgtgccaggccatcgacctgcggcacctcgaggagaacgtgaaggccgcggtgaagaactgcgtgacgcaggtggccaagaagtcgctgagcctgaacgcccggggcgggctccacaacgcgcgcttctgcgagaaggacctgcagacggcgatcgaccgcgaggcggtgttcgcgtacgcggacgacccgtgcagccccaactacccgctgatgcagaagctccgcgcggtgctggtcgagcacgcgctggccaacggcgacgccgagcgcgccgcggagacgtccatcttcgccaaggtggccgagttcgagcagcaggtccgcgcggcgctgcccaaggaggtggaggccgcgcgcgcggccgtggagagcggcagccccctggtccccaacaggatcagggagtgccggtcctacccgctgtaccggttcgtgcgcgaggacgtcggcaccgagtacctgaccggcgagaggaccaggtcccccggcgaggagctcaacaaggtgctcgtggccatcaaccagcgcaagcacatcgacccgctgctcgagtgcctcaaggagtggaacggcgcgcccctgccgctctgctgagctcagctgcacgcacctgctccgcacaaagaaggaaaaaacaaaagtatagcggctcaagacagtgtttcaagatcgtttatttacaaccagactagcagaagatgctctctatatctaccgtcgccttgtattattagtagctgaagtaagttcatgtgaatgttgtcgtgttcccgcagctgcgacgccacagcgtgcgacgtgcgcgttcttgtctgtcgcagctgctgaaacttttgatggttttttaacttgtaagctgggaggatgaagtaaattattttgttctacaata

SEQ ID NO: 132481 - DNA, 1062 bp, Zea Mays
ctagctttccccagctcttcttccacagcactgtctgtctgtctgtctcgcaattagctgtactaatccgctagtggcactgctgctactctcgtgtactcccagctatctcctctctatactcttgtacgtacgcacgtgtcgcaaccgcaatggagtgcgagaccgggcttgtccgctccctgaacggcgagggcctgtgcatgtcggcggcggcggcggcgccgcgcgccgacgccctgaactggggcaaggccgcggaggacctgtccgggagccacctggacgaggtgaagcggatggtggtggagttccgcgagccgctggtgaggatccagggcgccagcctgagcatcgggcaggtggccgccgtggccgcgggcgccggcggcgaggcccgcgtggagctggacgagtccgcccgcggccgcgtcaaggccagcagcgactgggtcatgagcagcatgatgaacggcaccgacagctacggcgtcaccaccggcttcggcgccacgtcgcacaggaggaccaaggagggcggcgcgctccagagggagctcatcaggtgagaagattgggactgacttcgcttcatttcttttcttttattttttttcccacagcagctagttgtttactgcacgggatcccatcagttactgaagcaaacaaatgttcagtttttttttgggcgcggtgttagctaggtcgttgttggcttggcaatacacgttaactacctcaaactttttatccatgctggtgcacatcattcgtgcttacaacctgtacaagtataatactgcactatactggtatccaaattaaaacagtgttgccgcacaaatggaaaaagaagaaaaaaaagacacatccaggctgtggcctgtggctgttcatcccacatgcaaaccccagtcggatgcaccgaacctgccctctacaacggtgcacgcgtacacccacgctccgcccagaattaggtgtcactggccaccgctcggcgggccacccctgtcccaccgaccataccagcatagttgggcaagagagaaagcaggt

SEQ ID NO: 132482 - DNA, 2702 bp, Zea Mays
cactcctgctggttctctccaggaagagcagcactagatctctcctctacagcttcccagcaagccagttgcatacatttcactgctgttatctttctcagcttgatcagtgctttagttctctctagttgcaatggcttgcgattccccgtgcatggcgacgccccgcgccgacccgcttaactgggggaaggcggcggaggagctgatgggcagccacttggacgaggtcaagcggatggtggccgagtaccgccaacccttggtgaagatcgagggcgccagcctcagcatcgcgcaggtggccgccgtggccaccggcgttggcgaggcccgggtcgagctggacgagtccgcccgtagtcgggtcaaggcaagcagcgactgggtcatgagcagcatgatgaacggcaccgacagctacggcgtcaccaccggcttcggcgccacgtcgcacaggagaaccaaggagggcggcgcgctccagagggagctcatcaggttcctcaacgccggcgccttcggcaccggcacggacggccacgtcctcccggccgaggcgacgcgcgcggccatgctcgtccgcatcaacaccctcctccaggggtactccgggatccgcttcgagatcctcgaggcgatcgtcaagctgctcaacgccaacgtcacgccgtgcctgccgctgcgcggcacggtcaccgcgtccggcgacctcgtgccgctctcctacattgccggcctcgtcaccgggcgtgagaactctgttgcggtcgctcctgacggcagcaaggtgaacgccgccgaggcattcaagattgccggaatccagggcggcttcttcgagctgcagcccaaggagggtcttgcgatggtgaacggcacggccgtgggctctggcctcgcctccactgtgctcttcgaggctaacatccttgccatcctcgccgaggtcctatccgccgtgttctgtgaggtcatgaacggcaagccggagtacaccgaccacctgacccacaagctcaagcaccacccgggacagatcgaggctgctgccatcatggagcacatcttggagggcagctcttacatgaagcttgccaagaagctcggcgagctcgaccccttgatgaagcccaagcaggaccggtacgcgctccgcacgtcgccgcagtggcttggcccacagattgaggttatccgcgccgccaccaagtccattgagcgcgagatcaactccgtcaacgacaacccgctcatcgatgtcgcccgaagcaaggctcttcacggtggcaacttccagggcacgcccatcggggtgtccatggacaacacccgtctcgccatcgcagccatcggcaagctcatgtttgcgcagttctctgagctcgtcaacgactactacaacaacggcttgccctccaacctgtccggtgggcgtaaccccagcttggactacggttttaagggcgccgagatcgccatggcgtcctactgctccgagctgcagttcctggggaactcggtcaccaaccacgtgcagagcgcggagcagcacaaccaggacgtcaactcgctgggactcatctcctccaggaagactgctgaggccatcgagatcctgaagatcatgtcctcgacgttcctgatcgccctgtgccaggccgtggacctgcgccacatcgaggagaacgtcaagagcgccgtcaagagctgcgtgatgacggtggcgaagaagactctgagcaccgactccaccggtggcctccacgtcgcccgcttctgcgagaaggacctgctccaggagatcgagcgcgaggcggtgttcgcgtatgccgacgacccctgcagcgctaactacccgctgatgaagaagcttcgcaacgtgctcgtggagcgcgccctcgccaacggcgctgctgagttcaacgcggagacatccgtgttcgccaaggtcgcccagttcgaggaggacctgcgcgcggcgctgcccaaggcggttgaggctgcacgggcggctgtcgagaacggcacggcagcgataccgaacagaatcaccgactgccgctcctacccgctctaccgcttcgtgcgcgaggagctcggagccgtgtacctcaccggcgagaagacgcgctctcccggcgaggagctgaacaaggtgctcgttgccatcaaccagggcaagcacatcgatccgctgctcgagtgccttaaggagtggaacggcgagcccctgcccatctgctgaacagagagacggaatgacggataggaagaagactgttgtgttcattgttcaatagttcgaaatcattttttttttcttcctttagttttgcgtggcgggtagcaaaggctaatgactgtttatctggtcatactctacttatgaaacattatattttcaagaaatatatattccattcttgttattattttgttttagcagcgaaattggaaaatatttcattgcttgagaaaaggcgcggggtaggaacggcagtcccttttgcatcctccaaacctcttctcctaaacatggctccgatttgataatcatgatccatttgtctgttcagtttcaccgccgaaaatattttttaggcatgtttggaagtaaagtatttcaaaaccatagttatacaataccacggttttaaaatgttacgacacaactgcaatattttttacattactctaac

SEQ ID NO: 132483 - DNA, 114 bp, Zea Mays
atgtcgtcacatgctcaacaccccttatggtaccactaccggaatcgcgttctttgccgagtgtctaagacactcggcaaaggctattttacactcggcaaaggctttgccgag

SEQ ID NO: 132484 - DNA, 913 bp, Zea Mays
gatcactcccaggtgtagctcagttttgggtgggtgacatgactacgtgcccaaccatgacaagggtgcgtgagctatgttgcagggcttcatcgtcctgtcgtgcttgatcgcggtgtcggtgaacttcagcacgttcctggtgatcgggacgacgtcgccggtgacgtaccaggtgctgggccacctcaagacgtgcctggtgctgtcgttcgggtacacgctgctgcacgatcctttcaccgtgcggaacatcctgggcatcctcgtcgccatcttcgggatggcgctctactccatcttctcggtgcgtgagggcaagaagaagtccgcaggcgacgccctcccggtgtcacagatgcctgacaaggagacggagccgctgttggcgaccaaggacaacagcgacaccaaaaaggcgaacggggttgctcacgactgctaagatgttcccgtttgccgttgcttatagcctaattagtccagctctagtgttactacgacgcactgttctgaatctcagaaagtcagggaagaagtcattcctttttgtttcttataatattgtatatgtaatattcctctattgcgaattataagccgtttcaatttttttgaagagtcaagatatctcaaatttaattaaaattataaaaaaaattaagacaataaatacatacactattaaaatacaattaatgaaaatataataaaatttatttggtataataatagttattattttagtatataaatttagtgaaatttatatttttttattctaaaaagcaaaaatgaaatataatttaaaacagaaaaatgtactgtattttcacggcaacaggggtgtttagcacggtgtacaattgatgcaacagctcttaaaacgttaggacgcctcgaggagtgctaa

SEQ ID NO: 132485 - DNA, 1671 bp, Zea Mays
ctccccaccccacgaggcgctagctgcggcacggaaccagcgccattagaggccacaagcccgcaccacgcctccctcgttctcgcgcgcgcgcacgcatgcacgaggagctgctgcagagaagaggaggcctgtcgatttgattgaactttccaaattcagattcagaagctggccaagatgactgccggtttccagctcggcgtgatcgggtctctcacgctctccgtcgcgtcgtcggttgccattgtcatctgcaacaaagccctcatcagcaccctaggctttccattcgctacgactctgacaagctggcacctgatggtgaccttctgcaccctccacgtggcgcagcgcctgcgctttttcgagcccaaggcgatcgacgggcagacggtagttctgtttggcttgctcaacgggacctcgattggccttctgaaccttagtttagggttcaactccatcggattctaccagatgacgaagttggccataatacccttcacggtgctgttggagactatattcctgaagaaaagattcagtgagacgatcaagttttctctgctggtcttgctgctcggagttggcatcgcctcagttacggacctcaagttaaactgcctcgggtccgttctttccggcctcgccatcgccaccacttgtgtcggccaaattctcacgaatacgatacagaggaagctgaaggtctcgtcaacgcagctcctgtaccagtcagcgccttaccaagcagccattctgttcgccactggccccttcgtggaccatctcctcaccggccgcagcgtcttcgcccatagatacactttcccggttgtgggcttcatcgtcctgtcgtgcttgatcgcggtgtcggtgaacttcagcacgttcctggtgatcgggacgacgtcgccggtgacgtaccaggtgctgggccacctcaagacgtgcctggtgctgtcgttcgggtacacgctgctgcacgatcctttcaccgtgcggaacatcctgggcatcctcgtcgccatcttcgggatggcgctctactccatcttctcggtgcgtgagggcaagaagaagtccgcaggcgacgccctcccggtgtcacagatgcctgacaaggagacggagccgctgttggcgaccaaggacaacagcgacaccaaaaaggcgaacggggttgctcacgactgctaagatgttcccgtttgccgttgcttatagcctaattagtccagctctagtgttactacgacgcactgttctgaatctcagaaagtcagggaagaagtcattcctttttgtttcttataatattgtatatgtaatattcctctattgcgaattataagccgtttcaatttttttgaagagtcaagatatctcaaatttaattaaaattataaaaaaaattaagacaataaatacatacactattaaaatacaattaatgaaaatataataaaatttatttggtataataatagttattattttagtatataaatttagtgaaatttatatttttttattctaaaaagcaaaaatgaaatataatttaaaacagaaaaatgtactgtattttcacggcaacaggggtgtttagcacggtgtacaattgatgcaacagctcttaaaacgttaggacgcctcgaggagtgctaa

SEQ ID NO: 132486 - DNA, 1701 bp, Zea Mays
ataaaaatgcctctgccttgcgtctctctcttcttcctccccaccccacgaggcgctagctgcggcacggaaccagcgccattagaggccacaagcccgcaccacgcctccctcgttctcgcgcgcgcgcacgcatgcacgaggagctgctgcagagaagaggaggcctgtcgatttgattgaactttccaaattcagattcagaagctggccaagatgactgccggtttccagctcggcgtgatcgggtctctcacgctctccgtcgcgtcgtcggttgccattgtcatctgcaacaaagccctcatcagcaccctaggctttccattcgctacgactctgacaagctggcacctgatggtgaccttctgcaccctccacgtggcgcagcgcctgcgctttttcgagcccaaggcgatcgacgggcagacggtagttctgtttggcttgctcaacgggacctcgattggccttctgaaccttagtttagggttcaactccatcggattctaccagatgacgaagttggccataatacccttcacggtgctgttggagactatattcctgaagaaaagattcagtgagacgatcaagttttctctgctggtcttgctgctcggagttggcatcgcctcagttacggacctcaagttaaactgcctcggggtgcgcgcgcattctgcacgcctcatcgtcatgcgcattagttgccaaaaaatgatctgcaggaagctgaaggtctcgtcaacgcagctcctgtaccagtcagcgccttaccaagcagccattctgttcgccactggccccttcgtggaccatctcctcaccggccgcagcgtcttcgcccatagatacactttcccggttgtgggcttcatcgtcctgtcgtgcttgatcgcggtgtcggtgaacttcagcacgttcctggtgatcgggacgacgtcgccggtgacgtaccaggtgctgggccacctcaagacgtgcctggtgctgtcgttcgggtacacgctgctgcacgatcctttcaccgtgcggaacatcctgggcatcctcgtcgccatcttcgggatggcgctctactccatcttctcggtgcgtgagggcaagaagaagtccgcaggcgacgccctcccggtgtcacagatgcctgacaaggagacggagccgctgttggcgaccaaggacaacagcgacaccaaaaaggcgaacggggttgctcacgactgctaagatgttcccgtttgccgttgcttatagcctaattagtccagctctagtgttactacgacgcactgttctgaatctcagaaagtcagggaagaagtcattcctttttgtttcttataatattgtatatgtaatattcctctattgcgaattataagccgtttcaatttttttgaagagtcaagatatctcaaatttaattaaaattataaaaaaaattaagacaataaatacatacactattaaaatacaattaatgaaaatataataaaatttatttggtataataatagttattattttagtatataaatttagtgaaatttatatttttttattctaaaaagcaaaaatgaaatataatttaaaacagaaaaatgtactgtattttcacggcaacaggggtgtttagcacggtgtacaattgatgcaacagctcttaaaacgttaggacgcctcgaggagtgctaa

SEQ ID NO: 132487 - DNA, 1603 bp, Zea Mays
ataaaaatgcctctgccttgcgtctctctcttcttcctccccaccccacgaggcgctagctgcggcacggaaccagcgccattagaggccacaagcccgcaccacgcctccctcgttctcgcgcgcgcgcacgcatgcacgaggagctgctgcagagaagaggaggcctgtcgatttgattgaactttccaagtaggattccgttggatcatattgtaccacctcgggccagagcgaacccaccggtctgtacgtcctcgttcctggctcgcgtgctacgatactcaaagtagatcagagatgcgcagttgttgtacgcttggatgccccaaatgccatgcttttttttccaagtcgtacatgaccgtctgctgtgccggacggcggaacagcaggcaccccagagatgcgcagttgttgtacgcttcgtcgcacgccgtttggcagtagcctgctagtttgggatgcgtcaccacggcccaagacatcattgtgtcttacctgctgttactaaacgccaacgtttttttttatgtatatattcctggtcctgcagattcagattcagaagctggccaagatgactgccggtttccagctcggcgtgatcgggtctctcacgctctccgtcgcgtcgtcggttgccattgtcatctgcaacaaagccctcatcagcaccctaggctttccattcgctacgactctgacaagctggcacctgatggtgaccttctgcaccctccacgtggcgcagcgcctgcgctttttcgagcccaaggcgatcgacgggcagacggtagttctgtttggcttgctcaacgggacctcgattggccttctgaaccttagtttagggttcaactccatcggattctaccagatgacgaagttggccataatacccttcacggtgctgttggagactatattcctgaagaaaagattcagtgagacgatcaagttttctctgctggtcttgctgctcggagttggcatcgcctcagttacggacctcaagttaaactgcctcgggtccgttctttccggcctcgccatcgccaccacttgtgtcggccaaattctcacgaatacgatacagaggaagctgaaggtctcgtcaacgcagctcctgtaccagtcagcgccttaccaagcagccattctgttcgccactggccccttcgtggaccatctcctcaccggccgcagcgtcttcgcccatagatacactttcccggttgtgggcttcatcgtcctgtcgtgcttgatcgcggtgtcggtgaacttcagcacgttcctggtgatcgggacgacgtcgccggtgacgtaccaggtgctgggccacctcaagacgtgcctggtgctgtcgttcgggtacacgctgctgcacgatcctttcaccgtgcggaacatcctgggcatcctcgtcgccatcttcgggatggcgctctactccatcttctcggtgcgtgagggcaagaagaagtccgcaggcgacgccctcccggtgtcacagatgcctgacaaggagacggagccgctgttggcgaccaaggacaacagcgacaccaaaaaggcgaacggggttgctcacgactgctaa

SEQ ID NO: 132488 - DNA, 320 bp, Zea Mays
aaaaaatacacgatactcactttagatccttctcgtttgtcttccttgctagtggggaaggaaaaaaaaaagcagccacatcacatgatgaaagatcaggagagatgctcaatgaaattgtgttcccggcatgatcgatcagatcttgctgatcttgaccgcaacctctccaacaaatcctggctcagtcaaacaatgaaaaagtccatcacatttcctcctataattgcctcccctgaacacgtgtcctctgcttaaaaaaaactagtcatgtaaaacagtcaagtcatcctccattcctttggacatctccagaagcc

SEQ ID NO: 132489 - DNA, 2176 bp, Zea Mays
cccgtttttacctagtctcgacgaataccttaacgtttgtgaccagaagctgtgagagatcaccatggcatccggtgcttcacgaaatgtcaggttccagaacgagatcgaggtccagagcttcagaacaagccctctgcagagcctcagcagaaagcacggcaaggctcacgatcccaggaaatgccggctgggtttccgcggcggctgcctggagaaggcgtgccggaaccggaagccgatgctgaaggacagggtgctctcgcgcgccttctcggaggagctggagtccctgatgcacgccgccggcggcagccacctcttcttcgacccgcgcgggcagctgatccacctgtggaacaagatcttcctgtccgcctgcctgctgtcgctgttcgtggacccgctgttcctgtacctgacgggcacgcagcggaacacgtgcgtcgagttcaaggactcgctggcgctcacgctgtccatggtccgctcgctgctggacctcttctacgccgcgcacatcctgttccgcttccgcaccgccttcatcgcgccgtcgtcgcgcgtgttcgggcggggcgagctcgtcatccagccctacgagatcgccaggaggtaccttggccggacgttctggttcgatctcgtcacggcgctgcccttgccgcagttcgtgatctggatcgttataccaaggctgaatgagtactcccggacggcgaacacgaagaacatcctccggttcagcatcatcttccagtacctcccgcggttgttccagatattcccgctctcggggcggatcgtcatggcgacgggggtcatgacggagacggcgtgggccggcgccgcgtacaacctgatcctctacatgctcgcaagccacgtgctgggagcgctgtggtatctcttctccgtgcagaggcaggaggcatgctggagggaggcgtgtctgctcgtgagcccgacgtcccagaccatgttcttcgactgcaaggcgttgagcagcaacaggacgatctggtatgagctgagcaacatcacaacaagccggtgcacgcctggcaacggcttctacccgttcggtatctacgaggaggcgctgtacgccaagctcacgtcgtcgtctttcacccagaagtacttctactgcttctggtggggactcaagaacctcagctccttaggacagaatctgtcgacgagcttgttcatcggtgaaataaccttcgcgatcgtcgtcggcgttcttgggttagtgctgtttggcctgctcatcggcaacatgcaatcttacctccaagcaacgatggtgcggctggaggagtggcggacgaagcggacggacatggagcggtggatgcaccaccggcagatcccccagccgctgaagcagtgcgtccggaggtaccaccagtaccagtgggtggccacgcgcggcgtcgacgaggaggccttgctgcaggacctccccatggacatccgccgcgacatcaagcgccacctctgcctcgacctcgtccggagggtgcccctgttcgacgagatggacgagcggatgctggacgccatctgcgagcggctgaggccggcgctgtacacgcgcggcacgcggctgatgcgggagctggaccccgtcgactccatgctcttcatcatccggggctacctcgactcgtacacgacgcagggcggccgctccggcttcttcaactcgtgccgcatcggcgccggcgagttctgcggggaggagctcctgacgtgggcgctcgacccgcgccccgcggcgaagctgccgctgtccacccggaccgtgcgcgccgtgtccgaggtcgaggcgttcgcgctcgtggccgacgacctccgcttcgtggcgtcgcagttccgccgcctgcacagcgcgcgcatccgccacaggttccgcttctactcacaccagtggcgcacgtgggccgcgtgcttcatccaggccgcctggcggcgatacaagcggcgccgcgcgtccatggagctcagggtgcgcgaggtgcgggccggagggagcttgctgcggtcccgccgccacagcatcgagggcaaggcgtcgattaggaaacccatggaaccggacttcacggtggaagaagaggactgatcaacgaatgattacctagctagcagctttttttttcctttc

SEQ ID NO: 132490 - DNA, 90 bp, Zea Mays
ttctttttaatttgtttcgtttcctctcccttgcagttgcttagagtctgtattctccctttctttcttctctcatctaatatatatcgg

SEQ ID NO: 132491 - DNA, 993 bp, Zea Mays
atctttttcatcacctttctttgttcctccaatccaatggcggcggcaagaatcgaaaaggtagcatatgtatgtgctcctacactacaacacacgaagagaactacgtagcctacccagcatgtcttcctcgcgctttttattccctcagtgctcgtcaaagaatcaccatgcccatgtgaaagggaaaccgatcaaaaccgcaacagatatagctgctgacctgtcacgtaaacttgggcgacggttactcctcggatgccatgccagtgttcacgttcattccatgcctacaaattgaccgaccaaggtccaagctgcagctagcgcacctacaccaccagcaccatgccgccggaggccgcctcgtcaacaggccacatcgtcgcccgcatccggcgtccgctgcccgcggagcggccgcacgtgaggcgatgcaccaggctgctgtgctcggcgttcctcaccgtgctcctcgtcgccggtgtggtcctctttgtcgtgtacctcgctgtccgcccgcatcggccgcggttccacgtgacggcattctccgcgtcgggcatcggcccgtcgtccggcgggaccgtgtcgctgtcggggcagctctccatccgcaacccgaaccgggacatcgccttcttctacgaccggttctacctctcggtggagtaccgcggcgccgacgtggtgaagggccaggccctgacggccgcgccgctgtaccagccacccaagacgacgtcggccctggcgttccagggcgtggcggcgtcggcggccagcggggacatggcgcgggacgcagtggaggccggcggcagggtggagctgacggtgaaggtgcggtccaggatccgcgcgcgcctggcgttctggggcaaccggcactggcacccgctccacgtcggctgcgaggtggccgtcggacccgacggccagttgctggccgagtacatgcagaaacgctgcagcatagacttcttctaggag

SEQ ID NO: 132492 - DNA, 3595 bp, Zea Mays
acctcacttcccttctcccctctccaccattgttgctaccggtgcaagcgctcaggcgagaccagctttacgctccgtatggcctaggtcctgagaatccccgcccaacctcatcactgtacttcgtccttgcttatatggagcatttcttgatgcgaggcaccgccacatggccacgtcgttcctttctgtgcttgtctgctgtcttggtcctgctgctgctgtctccagtcgactccctgaagaagaccaccatctcctgtgacccgggtgaccttaaagccctggagggcttctctgaagctctcgacggtggcagcgtcgctggctgggagcacccaaatgcgaccagctgctgtgcatggcccggtgtcaggtgcgacggcagcgggagggtcgtccggttggacctccatggcaggaggctgcggggcgagctgccgctctcgctcgcgcaactggaccagctgcagtggctcaacctctccgacaacaacttccacggtgccgtccccgcgcctgtgctccagctccagaggctgcagcgactcgacctcagcgacaacgagcttgctggcacactcctggacaacatgtctctcccattgatcgagctcttcaatatatcctacaacaacttcagtggctcccaccccacgttccgtggctcagagcgcctcaccgcgttcgatgcagggtacaactccttcagcgggcagatcaatactagcatctgtgggtcgtctggtgagatcagcgtgctgcgattcacatccaatctctttactggggacttcccagcaggctttgggaactgcacaaagctcgaggagctacatgtcgaactcaacagcatctccgggagattgccagatgacctattcaggctgccatctctgaaggtcctgtctctgcaagagaatcaactaacttgggggatgagcccaaggttcagtaacctgtccagccttgagagattggacatatctttcaattcattctttgggcaccttccaaatgtttttggtagcctccgcaagttggagttcttctctgcacagtccaacctctttgggggcccattgcctccctcactgtgccgttcaccctcactgaagatgctgtacctgaggaacaattcgttgaatggagaggtcaacctcaactgctcggcaatgacacagcttagctcgctcgaccttggcacaaataagttcattggcacaattgatagtttgtcagattgtcgtaatctgagaagcctgaaccttgccacaaacaacctcagcggtgatatccctgatggtttcaggaagcttcagtcgctaacctacctctcactttcaaacaatagcttcacagatgtcccttcagcattatctgtccttcagaactgttcaagtctaacaagccttgtgctcacaaagaacttccgtgatgagaaggccttgccgatgactgggatacatggttttcacaacatccaagtgtttgtcattgcaaatagccatctttcaggatcagtaccaccatggctagctaattttacacaactgaaggtgttggatctgtcatggaatcagttggtcgggaatattcctccatggattggtgatcttgagtttctgttctatttggatctatccaacaattcacttagtggaggaattccagaaagcttgtctagcatgaaggcccttgtaacaagaaaggtctcacaggaatctacagagactgattatttccctttcttcatcaaaagaaacaagacaggcaaagggttgcagtacaaccaggttagcagcttcccgccctccctagttctcagccataacaggctcactggccccatattatcaggctttgggatcctcaagaacctacacgtattggacctcagcaacaacaatatttctggcatcattcctgatgatctatcagagatgtcaagcctggaatccttggatttgtcacataacaatcttaccggaggcatcccatcttcattaacgaagctgaattttctatcgagcttcagtgtggcatacaacaatctgaatggtaccattccatcagcaggtcaattcttgacattcagtagttcggcttatgagggtaaccctaaactctgtggcattcgcctaggcctaccccggtgccatccaactcctgctcctgcaattgctgcaacaaataagagaaagaacaagggcatcatatttggaatagctatgggtgttgcagttggggcagcgtttgttttgtccattgctgctgtatttgtgctgaagagtaacttcagaaggcaggatcatactgtaaaggctgtcgcagatactgatcgagcccttgagttggcaccagcctcacttgtactgctgtttcagaacaaggctgataaggcattgaccattgctgacatcttgaaatcgacaaacaactttgatcaggctaacatcatcggttgtggtggctttggtatagtgtacaaggcaacattgcaagatggagcagcaatcgctatcaaacgactatcaggcgattttggtcagatggaacgggagttcaaagcagaggtggagaccctatcaaaagctcagcatcctaatcttgtgcttctgcaaggttactgcaggattggcagtgatagactcctgatatactctttcatggaaaatggcagcctagaccattggcttcatgaaagtccagatggtccctccagattaatctggccaagaagacttcagatagcaaaaggagcagcaagaggtttggcatacctgcatttgtcatgccaacctcacattctccatcgtgacatcaagtcaagtaacatccttctagatgagaattttgaagcccatttagctgattttgggcttgctcggcttatttgtccctatgccacacatgtgaccactgacctagttggtacactgggttacattccccccgagtacggccaatcttcagtagccactttcaaaggtgatgtttatagttttggcattgtccttctggagttattaactggaaagaggcccatagacatgtgcaagccgaagggagcccgtgagctagtttcatgggttacacttatgaaaaaggaaaatcgtgaagctgatgtcttggaccgtgcaatgtacgataagaaatttgagacacaaatgaggcaggtgattgatattgcatgtctgtgtgtaagtgattcaccaaaactgcggccattaacacatcagttagtgatgtggcttgacaacattggtgtgaccagtgatgaaccaaagtgaaggcaagttcaatgacagcggtcattggggaaatccttgtgtttaattgatcctatccgggatgaatgttcttctcttttgagaaatgtaagataatgcatggtgattatatattaaataatgcatgcttcatgagagtctaacttgctaattcaataacagaaaaaggaaaattctgttattttgcatgcagtagatacaattttcgagtggtttatggaagttttgcttcttttttgactttggtgtgaatatcttgtatactgttacaggggatcttctaaataatagaataattgagt

SEQ ID NO: 132493 - DNA, 1379 bp, Zea Mays
gcctgcactgcacatacgcacgcacagctccagacacagctacgactcgaccacaagccagccatgccggccttcgcggggggcgcagcggagccgccgctggcagacagctactacgcgctcctccgccgcggcaatgacgatgaaggcgcctacacgacgtcgacagcgccatgggacgacgtctcactgcccgtggcggagtgcgagctcccgatgatcgacgtcgggtgcctgacgaccgccgacgacggcagctccccggaggcggaggcggagcgggcggcgtgcgcggccgccatcgcgcgcgccgccgaggagtggggcttcttccaggtgcgcaaccacggcgtgccgcaggagctcctggaggagatgcgccgggagcaggcgcgcctgttccgcctgccgttcgagaccaaggccacggccggcctgctcaacgactcctaccgctggggcaccccgaccgcgacgtctccgcgccagctgtcctggtccgaggccttccacgtcccgctcgccggcgtctccggctccggcaccacctgcgacttcggcgacctcaccaccctcagggatgtgactcgggaggtggcgggcgcgatgtcaaagctggccggcacgctggcgcgcgtcctggcggaggccctcctgggtcggcggcccgccggcgagcgcttcccggaggggtgcgacgagacgacgtgcttcctgcggctgaaccggtacccggcgtgccccatctccccaggcgccttgggcctggtcccgcacacggacagcgacttcctcaccgtgctctgccaggaccagcaggtcggcggcctgcagctcatgaagggggacagttgggtggccgtcaagccaatccccggcaccctcgtcgtcaacatcggggacctcttccaggcgtggagcaacaacagatacaagagcgtggagcacaaggtgatgacgaacgccaggacggagcgctactccgtcgcctactttctctgcccgtcctacgactcgccgatcggcacgtgcgaggagccttctctctacaggacgttcaccttcggggagtacaggagaaaggtgcaggaagacgtcaagaggaccgggaagaaggtcggcctccctaattttctcgcgcaaacataattatgatatccagtttttggaccgtgcatgccaacgcgcatgtgtacgttcctagctttaatttctctgtatacacaatggagaggagagtgcagtgtgatgttggtatagacgttattaataaatactaatttgtagcttaatttgatgtagctaccaccatacaagaatgtagcaggatcgagcggttgtgtgtgtgcgtgtgatcgttgccgatgataaggagctga

SEQ ID NO: 132494 - DNA, 2182 bp, Zea Mays
tccatccccagcgctgaattccgagagatctcgtctgccctctcgtcctcgtcgggccgtcacggcagcggctcggctctcactagttcgctagtggtgtgcgccaagttgtggaactggccttttgcccgcccgcccccttccttttttgagcgcatataagcgagcagcgtttcgcctttgggatcggcggggccgccgctttttggttgcgctctcccctcctctcctctcccctgtaccctgcctttccattggagcgcccaaagccggacggcaccaccatttaaaggaggccaagcgcgcacacggcggaggagaagagaccaacacctcacactccattcacgccagggatcgatcgcgccgctatagctgctgcacctgcacgctttgcctcttcttcgttctctgccgctgcgctagctagctgcggctccgagcctccgacgcaggaagtctaatgtggaagtctctcagaactgagtacttttgttagaacaaagatttgttcagtcaagctttgcaaattatcatcatagtttggatgatatccatggttactttaatgagtttatggagccctggttgcggagcttatctgggttctctgacaatggaactgtaatatttgcaaaagaacctttcttgtattggaagaaagtttcaagaggggttgacaacttataagtgtaagcttgatgacgtgttcatgagggcaaagtgggagagcaaaatttcttcgcatgcagatgtcaacaggttctaaccactatggtgtatttccacatccattctgcaaccaacatgttgtttcgtttcagacgagttcaattactagtgggtcaggagccataccagtttgtctagacacctccagtggaatgaatggcgacatggcaatgttgaacactacatcttcaacaattgtatccactggttcaccaaacatggttgctgattcttcttgccagaacctcaagtatagtgcacccttggctgtggagtggtcctatccagagctgcaattgttgaacgatggcctcaacaagtatgcaaatgaaccaggaatcatgaagtacataaagatagcagccacgttaccagacaagacagttagagatgttgccatgagatgtcaatggatggcagcgagaaaagaagctacaagacgacggaaacctgaagaacgctatcttgggaaaaagataaaagataggaaggacaaaatggctcagccatcatcatggggtaccaatcctcctgttcaggctgagatgagatcttcctcttttatgcctcgtaacgccaaacacaatggatttctctctggagactctcaaattgatcatgaaatgctaaatatattggaagaaaatgctcgactactcaatcaaatagaagtaaatattttaacatctcaggctcataacaacattaatcttttccatcacataagaaggaatattaatggtcttctacaaagcatgtgccagattcccggaataatgagcaagatgcccccattgcctgtttctgtggatgaaaggctagctagctacatactccctcgtgctcatacggcacaagttcttggcagcagtcatttgaaagaagaaccaagagtgtggtaggccactgctagacagacagcagcttaatttgcagcgacagtttgatactgtagaaaaaatatctgaagagccatgtgcttgggaatctgcatggagaagcataggtgaaaagaaggatctggcttttctgatgtctgaaagctatagaagcaatacgatccacttttcaccacatggccttaaaaaacgctgtccagcttatgagtttgagatagggagagtttccgtaatctgcagttttcctcaccttggttgcacatatcgattcttttttcgggttttgtcctggcgatcgatgttaacggaagcgtagcatagaaactaagcttggtatgaataattagcaggaaaagcttagcctttttgccagttactacaaaggtaactaaccttctgtgtgtatctagttttctagtataatgcatatgcaagcctggtcctctaaattgcaacctctctcctcatgtatgtgctgcgtctctttacaaccgcaagaaattagcagaattctaatcaaagggcctgtttggctatcgagggtcccagta

SEQ ID NO: 132495 - DNA, 2077 bp, Zea Mays
tccatccccagcgctgaattccgagagatctcgtctgccctctcgtcctcgtcgggccgtcacggcagcggctcggctctcactagttcgctagtggtgtgcgccaagttgtggaactggccttttgcccgcccgcccccttccttttttgagcgcatataagcgagcagcgtttcgcctttgggatcggcggggccgccgctttttggttgcgctctcccctcctctcctctcccctgtaccctgcctttccattggagcgcccaaagccggacggcaccaccatttaaaggaggccaagcgcgcacacggcggaggagaagagaccaacacctcacactccattcacgccagggatcgatcgcgccgctatagctgctgcacctgcacgctttgcctcttcttcgttctctgccgctgcgctagctagctgcggctccgagcctccgacgcaggaagtctaatgtggaagtctctcagaactgagtacttttgttagaacaaagatttgttcagtcaagctttgcaaattatcatcatagtttggatgatatccatggttactttaatgagtttatggagccctggttgcggagcttatctgggttctctgacaatggaactgtaatatttgcaaaagaacctttcttgtattggaagaaagtttcaagaggggttgacaacttataagtgtaagcttgatgacgtgttcatgagggcaaagtgggagagcaaaatttcttcgcatgcagatgtcaacaggttctaaccactatggtgtatttccacatccattctgcaaccaacatgttgtttcgtttcagacgagttcaattactagtgggtcaggagccataccagtttgtctagacacctccagtggaatgaatggcgacatggcaatgttgaacactacatcttcaacaattgtatccactggttcaccaaacatggttgctgattcttcttgccagaacctcaagtatagtgcacccttggctgtggagtggtcctatccagagctgcaattgttgaacgatggcctcaacaagtatgcaaatgaaccaggaatcatgaagtacataaagatagcagccacgttaccagacaagacagttagagatgttgccatgagatgtcaatggatggcagcgagaaaagaagctacaagacgacggaaacctgaagaacgctatcttgggaaaaagataaaagataggaaggacaaaatggctcagccatcatcatggggtaccaatcctcctgttcaggctgagatgagatcttcctcttttatgcctcgtaacgccaaacacaatggatttctctctggagactctcaaattgatcatgaaatgctaaatatattggaagaaaatgctcgactactcaatcaaatagaagtaaatattttaacatctcagattcccggaataatgagcaagatgcccccattgcctgtttctgtggatgaaaggctagctagctacatactccctcgtgctcatacggcacaagttcttggcagcagtcatttgaaagaagaaccaagagtgtggtaggccactgctagacagacagcagcttaatttgcagcgacagtttgatactgtagaaaaaatatctgaagagccatgtgcttgggaatctgcatggagaagcataggtgaaaagaaggatctggcttttctgatgtctgaaagctatagaagcaatacgatccacttttcaccacatggccttaaaaaacgctgtccagcttatgagtttgagatagggagagtttccgtaatctgcagttttcctcaccttggttgcacatatcgattcttttttcgggttttgtcctggcgatcgatgttaacggaagcgtagcatagaaactaagcttggtatgaataattagcaggaaaagcttagcctttttgccagttactacaaaggtaactaaccttctgtgtgtatctagttttctagtataatgcatatgcaagcctggtcctctaaattgcaacctctctcctcatgtatgtgctgcgtctctttacaaccgcaagaaattagcagaattctaatc

SEQ ID NO: 132496 - DNA, 2473 bp, Zea Mays
gttacctttcaggatcagatcaacattgaaacaaaaataaaaaatatacggtttattggggagttgtgcaagttcaagatggctcctccagctcttgtttttagctgtttgaagtcctgccttgatgatttcagtcatcataatattgatgtggcttgcaaccttctcgagacttgtggccgatttttgtaccgctcacctgaaactacgattcgcatggctaacatgctggagatactgatgagattgaaaaatgttaagaatttggatccacgtcacagtacacttgtagaaaacgcttactacctttgtaaaccacccgaaagatctgcacggatatcaaaagttcggccacctttgcatcaatacataagaaagttgcttttctcagatcttgacaaatcaagtgttgaacatgttttgcgccaactacgcaaagttaccttgggcagaatgtcaacaataccttctgaagtgctttctaaaggttcacaaaggaaagtacagccaagttcatctgattgctcttctcactgctagtctcagccgctatcatgatgactttgctgtcgcagtggtagatgaggttttagaagagataagggttggattggagttgaatgactatgggatgcaacaaaggcggcttgcccacatgcggttccttggagagctatacagctacaagcatatagattcatcagttgtttttgatacactgtaccttatcattgtgtttggtcatggaacacctgaacaagatgtgttggatccaccagaagattgcttcagaatcaggttgatcattacacttttacagacctgtggtcactatttcagtaagggatcttcaaaaaggaagctggacaaattcttgctacactttcaaagatacattattagtaaagggcccttaccactcgacatagaatttgacattcaggatttatttggagagctacgaccaaacatgtctaggtatttatcaatcgaggaacttgttgctgcgttagttgagcttgaagaaaatgagcgctcagccccagtagaaaaggttgaaaatgaaagacactcggacaatgaatctcataaaagacaggcacgagatgctggtccatctgtgaatggtggaagcgctgcaaatggaattgaggaaaatggcaaggatcatgaaatagcagatagtgagagctattcagatagtggcagcattgatggacgggaagatgaggatatattatctgaggataaatcaaatgatggctcagataatgaaggcgacgatgaagatgatggcattcctgttggttctgatgaagatgaaaatgttgaggttagacagaaagttatgaaggttgatcctaaggagcaagaagactttgatcgagagctcaaagcccttcttcaggagagcttggagtcccgcaaatcagaggcccgttcaaggctccctctgaatatgatggtaccgatgaatgtccttgaaggttcatcaaaagactcgagggccacagaatctgagagtggagaagaaacagtagatgaagagggtggcaatgctgggggtagcagcaaggtgcgcgttaaggtgctaatgaagaaagggcacaaacaacagacgaggcaaatgttaattcccgctgatagttcaatcgttcgaagcacgaagcagcaagaagctgccgagcttgaggagaagcagagcattaagcggaggatccttgaatacaatgaaagggaggaggaagaactgaatggagcatcacaaatggggaactggggtcaaggagctaccaacaccagcagtatcagatcaggtggccggggcagctgggatggttcagcacggggaggtggtcgacaacgacaccacatcgccggttctggtggtttctatcacagttatggcaggagaagatgagtttgtcctgatgggaggtggttggcagaggcgccacactgtgggttcttgtggtttctatcagttgttgcaggagaacagttagctgtgtgagctattttgtcctgagcttttttttggcagggccatgcttctctctatttaaccgcctaacgatcagattaacagggaagaaatttcggggaggttaacacagcttgatggacaattgcttccaccaccctaatctgaaagataagataattctaccactgatgggagatagcaatgccttgaaggagctatttttctggtggcccgaatggcttgagttgcttggtagttatgggcttatggctgtacctggagagcatagataccccggttgctcatgtacatataataataacataatttggcaacgagtgtgagtcgtttggagattgtgtgcgcacttgtatctgagtatggatctgatggtggtacttgcatagtttagatgtgcatactgtttcgacgccatgtgtgtgtatggggcacctgataaaaaaattactgtttgattcccattta

SEQ ID NO: 132497 - DNA, 1599 bp, Zea Mays
gattcatattctgttagagagacagcagctgctcaaaaggcccgcaacttcttaacttgatcagcaacacctaattctgttttttgacttttgtgacaattcactaactccagatgcaaactacctgagaaccctggactccagtatcaagcgaaatacaacagttataaagaagttgaagacaataaatgatgagcagaaggatgggctaatggatgagttaaaaagtgtgaatttgagcaaatttgtcagcgaagcagtttcttatatttgtgaggccaaacttcgctctgctgatatacaagctgctgttcaggtttgctcactccttcatcaaagatacaaggacttctctccttgtcttatacaaggtctactgaaggtcttctttccgggaaaatctgtagatgacttggatgcagataaaaattcgagagccatgaagaagagaagcacactgaaacttttgattgaactgtattttgttggaattgtcgaagatgctagcatatttgtaaatattataaaagatcttacatcagcggaacatttgaaggaccgtgaaggaactcaaaccaacttgtctcttctatctacctttgctcgtcaagggaagttttttttagggctacaacctcatggtcaagaagcttatgatgagttctttaaggagctaaatgttaccgctgagcagaagaagttctttaagaaagccttgaactcttattatgatactgtagctgaactactgcaatcagaacatgtgtctcttcgtctaatggaggcagagaatgcaaaagttttaagtgccaaaggtgaactaagtgatgagaacacagcctcatatgagaaactcaggaagtcttttgatcagttactacgtggtgtatcctcgttggctgaatctcttgatatgcagcctccagtgatgccagatgatggaaatacaacaagagttactacaagaactgatgccttgccttcttctggaaaagattcatctgcattggaacctatctgggatgatgaagataccaaagctttttatgaatctttacctgatctcagagcatttgtgccggctgtattactgggagaggttgagccaaagtcgaatgagcaacatgctaagggccgtgagcaatctagtgagtccacttcagaacaagagactgaactacatgacgattttcaaacttctgcaactgaacatcaactagaagttaaattagatggtggagtgaaagagagtgatgacaaagataaagagaagggaaaggatggagaaaaggaaaaatctaaggagaaggatctggataagaaaaatgacagagagaaggagaaaggaagagccatggacggtgcaagtctggataacatcttgcagaggctaccgggatgtgtcagtcgtgatctcattgatcagttgacggttgagttttgctacctaaattctaaagcaaatcgaaagaaacttgcgcgtgccttattcaatgttaataggacttcactggaactgttgccttactattctcgtttggttgcgacactatcaacttgtatgaaagatgttccaagtatgcttctgtctatgcttga

SEQ ID NO: 132498 - DNA, 1382 bp, Zea Mays
agacgagtttatggtggcactggcacatgcgctggatcgcggagctgtagaatcgccaatgcggagagcttaaacaatctcgccagccgaatctcgtcgatcagatcagatggcagacaaaataaggatcacggagtgtgcagagatatccaatccaagcacatcggaggtgctcattgaagagagaagatccttgggtccggaaaaggagacgagatcctgtcctgggcagcgccaggaggggaggagttaatacctgcgtcccctggcacgtgtgggtcgccccgtatgaaaaagctcactggccggaccatccccgtaccgagatctcgcggattcactcgccgcactggggatctcctgaccgatcgcttcctttcccccttccgtaacaggcaagaagcgcgccccccgcgcgtgtatataagcgcgcagcaccggcccaaggctgggcaagacggcgggtcgtcggagtcgacaggggagtccaagcttcagatggccagcgtcggtggagcagtggccgggggcgtgggggcgccgacgccgcacgtcctcgcggtggacgacagctccgtcgaccgcgccatcatcgccgccatactccggagctcccggtttcgtgtgactgcggtggaaagtgggaagagggccctggaactgttaggcacggagccgaacgtgagtatgataatcaccgattactgcatgccagagatgacgggatacgagctgctcaagaaggtcaaggagtcgtccaagctgaagcagatcccggtggtgatcatgtcctcggagaacgtctcgaccagaatcagaagatgcctggaggaaggagcagaggatttcctggtgaagcccgtccgcgcgtcggacgtgtcgcgcgtcttcagccgcgtgctccggtgaggactcatggagcggggctggcgcgcgcgcgcgcggcttctgcttttctattttttgtaggggctctcgggatggcaggcgcgggaaacgaaagtcgtataggggtagtcggtgtctgtaatccaagtgctgtgatgtagccgtgtgggtgtggttacgttttcttgtgtttgcatggtatacttagccaaggccagtctacaaaggctggttggtcttcgtgtgtctttacacttccttagcctcgttggattttgcagttcagagcatcaagcacctgttcaccgaaaaccaatcctatgcatagttgtggtccaaatctagatcaggcccacatgtcagtgacccatctgcagttatctcaagagaagtaactacagaggatcgtattgtctggtcttcagttatgtactaggtgaatgcccgtgcgttgctacagagtgaacatgttataataaaatatattgaaattc

SEQ ID NO: 132499 - DNA, 3812 bp, Zea Mays
agataaacttccttcgaatcagaggaggcgtcggtgccgtccattatcttctgatgatcaacgccatagaaggattctacacatgttaaagaagaagaaatttgtactgaaggtggagttacataaatggttagaacggcttgaaaagaaggacgggaaaataatggataggaagacattgactcgcacgttgaataagcttcagcaagagggaagctgtaaatgtatcaaagtcagtgctccattggtgacaaattatgctcgcagtcgtctctttgatgtaatactgcattcttctgttggagacgtgtcaccagaacttgtggagcaatttaggaccagacaaaggaactttgacaccgaatctcgcgcaggtgcagcagctaaagtgaagcaaaatcaacatatgactgccatacctggtctgaggatttcacgcagagttaaagtttacaaaccattactattagaagctatgtatgcaaatggattcataggcgcaaagatgattcgagcaaagttattccataaatttctgtgggcttatgtcaattctttgccaaattggtgcaatgcatttggttgtaccaaagcagggcattatgataagagccttaatcaatcatgcctgttattttctatggaagcagctatgaaagaaatgccccttgaactctttctacaaattgttgggtcagcaaagaagattgataacatgataacgttgtgtaggcttggaaaaacactttcagaaatacctacagaggaatacaatcagatcttggatactcatgccaatggccgactctcacgtttagtaaatattttggacaagctcaagctggttcagcttgcaaaagaattcttagaagatgctggtgtatcgtcaaatgccatgtatacacattcgatggagctcaggccttacatcgaagaacccatgccaagaattcttccatcttcccaactgaacaatcatcggaaaattcggcatgattttgtactttcaaagaaagagtttgttgattcttattgggaaacactagagtgttgttatttaacagctggtttggctgacccgttaagtgccttccctggcagttctgtcccggaggtttctcatcgtcgttcatggtgttcacttagagtcatgactactgaacaacgactggagttgcaacagcgtattatggatgttggtgagaaggggaaaattccttttaaagactgtgttagaatagcaagagaactgaatctttctgtagagcaggtacttcgcctttcatatgaaaggcaatctcggctccatgaacagcccagctttacttctaaacaaaagcagcaaagagttggttctggattgactcctgtgagaagaaagagacgtgccgatgggaccagcctgaagcttctgaaacgtacagtacaagcaagtggatctgctgaacaaatattggggcaacctattgttgatgaagaagtaccaatgatcagtcggtatgctatcttaagaaagagctgcatgagaagtaaaagattcttttggacatgtgaatctgatagaaaactgctgatggcatacattagagtgcgtgcagtacttggggcaagatattatcgtgtaccttggaagtctctctctgatcttccagctccaccacatacatgtcttagaaggatggcagtactattgaaaacaaacggaaagataagaggagctgtcatgtgtttatgtaaccttcttggggaacggtatgttagatatcttgaaaaggaaaggagtttgaaaaggagaagattgtttccccagatttcaaacagaagtcaagaaaacagtttagattcagattgtgagcaattcaattgggatgactttgaagttccagagataaagagtgcacttaatgaagtccttgaattaattcaaacagaaaaaatagatcaggccaagagaattgggcctgttaatcaaaaaaacattaacaatgataatgatgtcacaaaggacacaatatgttcacaggaactgccaaataatcaggctatacgaggtgaaaccaaaacgagtgcagtttcagaaagcggattctgtgatcctgaaaaatcatgcggacattcaaatgcagaaagtgaaaacatggaagtcttctgcaaacctcaagaaaaaatcattaaggatcaccgaaataagattattgaaagaggcatatggaaatcattggctgttgcaaatgccttggagcttctgaagttggttttcctcaacacatctttaggatcaaatgtacaagcttcactagcagcaacactgcagctttattcagagagcgagatttttactgctgtttcctttcttaaagaaaaaaaattcttggttactgggagtggtgggaagccgtacaccctttcttcacaattcttaaccaatgcttgttgttcaccttttccatttggttcagggaaaaaggcttctatattttctaattggcttatagctcagcaaaagaatactacagacagtggagtttatttgtatccagatatacaatgtggagaaattgttcatctattctctctggttttgtcaggaaaccttctcatttcacctttcttgcctagtgaaggagttggtgaggctgatgagcctaacagctctggtcctttggtcgtagataccagcggtttggctgacaacagtcataagcgcaaggctgatacagtgaaactgaaaagcagcaaggctaagaaaccgaagcctttgccaaagatagaaagtgacttttgctaccgccgggagaaaggatttcctgctatccaaataggtctaaatcttcatagaattcaaacaagcaatttcttgcaagagtttcatggtaaagaatcctctatttttacttcaagctgggcaatgagcaaaaagaatgttgatttgcatgcagaaaggcacatcatgccattgttttcaaattgcttaagttcatataggcatttattgtctgaatctcagttggagaactcatacagtggatggccttgggatgccatgacaaattatgagttatcaccagtatctgagcaccaaaatgaattgttcacattgtctcctgaactgttcaggaatgcatttcgtgttattcatcaagctggtgggcaaggagttaccttgagagaactttcgcaggcactgcatccgttagccatgcagcaggtcttaataattgttgacactctcaaaagatttcagctggctgttaaggtcaatgcatatgatggcgttcagattgtggactcattacattcgtcaaagtatcatatagctacacttgcagaatgtgatagttgctgctgtacagatcctccaacttctcaatttgttgataatgaaaacacaaaaaatctactgaaagagaagcataccaagcctattaattttcctggtccaataaaaatgcttggtgatgggcacacagtgacagtaattaatgttcaaagcaagttgagcccaccttacatgcacagcaaagatcctggggatgcggaaaggttatctactccaggagagaacaataaggagagtagtttctatcataattgtgaaaggcattgttatcagcctatattaccatggataaatggtgatggtagtactaatagcactctctatgaaggtttaagtcgccgagttattggttatgtcatgcactatccaggattatcggaggtatatttgcttttattgtttgtgcctgctctttctaaatagaaaactaatattatgcttgttcgttgagtgcaataccacaataagttct

SEQ ID NO: 132500 - DNA, 1445 bp, Zea Mays
agataaacttccttcgaatcagaggaggcgtcggtgccgtccattatcttctgatgatcaacgccatagaaggattctacacatgttaaagaagaagaaatttgtactgaaggtggagttacataaatggttagaacggcttgaaaagaaggacgggaaaataatggataggaagacattgactcgcacgttgaataagcttcagcaagagggaagctgtaaatgtatcaaagtcagtgctccattggtgacaaattatgctcgcagtcgtctctttgatgtaatactgcattcttctgttggagacgtgtcaccagaacttgtggagcaatttaggaccagacaaaggaactttgacaccgaatctcgcgcaggtgcagcagctaaagtgaagcaaaatcaacatatgactgccatacctggtctgaggatttcacgcagagttaaagtttacaaaccattactattagaagctatgtatgcaaatggattcataggcgcaaagatgattcgagcaaagttattccataaatttctgtgggcttatgtcaattctttgccaaattggtgcaatgcatttggttgtaccaaagcagggcattatgataagagccttaatcaatcatgcctgttattttctatggaagcagctatgaaagaaatgccccttgaactctttctacaaattgttgggtcagcaaagaagattgataacatgataacgttgtgtaggcttggaaaaacactttcagaaatacctacagaggaatacaatcagatcttggatactcatgccaatggccgactctcacgtttagtaaatattttggacaagctcaagctggttcagcttgcaaaagaattcttagaagatgctggtgtatcgtcaaatgccatgtatacacattcgatggagctcaggccttacatcgaagaacccatgccaagaattcttccatcttcccaactgaacaatcatcggaaaattcggcatgattttgtactttcaaagaaagagtttgttgattcttattgggaaacactagagtgttgttatttaacagctggtttggctgacccgttaagtgccttccctggcagttctgtcccggaggtttgtctcatctgctgtacatcattgatgcataggattatcacatacgttgaataaatgtacttaacgcctgtttgtttgctccccaacttacataaggtagtttctgggcatgggcagtacggtgagaaacaccacccttgatgccgaaataagtttcccatatttgcgtttaccatactgcccttgggccataagctatcttatataagtatggatgaaaacaaacagacccttcgaatttgaattatcaaattcctcaactttgaatgctaatatagctgtgttaactatttatattgacaactgtgaaaatagtgacttggatttg

SEQ ID NO: 132501 - DNA, 459 bp, Zea Mays
atgagaccgctcgcacggacgccgcacatgttctgcaagatgctcatggcatccgataccagcacacactgtggtttcttcgtgccgtgccgcgctgccgaggactgcttctcgccgttggtacgaccaatggctatgagagaggtcccttctcgtggtggtttggaggttgcttgggttattgactctgtttggtgtggcgcgcaggactacaaccagcagaggccatctcaggagcttgtggccaaggatctacacggcacggagtggaagttccgacatatctatcgaggtacaactagagagtttattggctgggcgttaccttggcttgttgacggattatgggctatactggttctgtacatcagcttcgttatttggattctctctgcatacatgggttctattttcttagcatgttattcaggtttaagtactgaatgggattcagtttag

SEQ ID NO: 132502 - DNA, 352 bp, Zea Mays
ttgttttttgtttggttagaggtataaccggggatggattggtcttgtcctttgtttggtttgagagataactgttacacttgtccttcacaaaaaatggaatttagtcaaaatgcttgcagccattgccctcatctcatgatatgttacaactaatattaagtccacaaaatacacatattattaattccacacaatacataataatgtgttctagcattacacataataccaagtttaaggtttccacaaaatttgcacgtacttagaccacatttcattgtttgatgtggttcaagcaaaagaactgcccaagcctatctactaactgccctcacactcctgggtacac

SEQ ID NO: 132503 - DNA, 1132 bp, Zea Mays
cctttctgcggcataaaagagggtggatcggcacagacgagcgtaaatctctttcttggtcaagcgcttgccgttgggatctctatcaccacagccctcgtcatcggcggtcgcgactagggccgcaaggtagcggtagttagcggggagcttggcagcccagacgcagcccgccgaggctgtgccgcggaaggcactgttgaggtgggccacctggcagatctctggctggtcgaggtagaggagtaccatcgccgcgaccgcaccaccaccgccatcggaccagagtaccagaccaccacctccacctccccccgcaccacctgctaccacactccaccgccccgcaccccgacccggccaccccgtcacccgctgctgctgtccccaccacagtacaccccggtccgtccccttcccgatgtccactccatccgcaccaccgccctgcatgcacctcgccacgcaccgactgtcctcgcgcccgctgcgcttcctccgccgctgcctgcgcgtgcgcccgctcggtcgccccgagatccggcgggacccgcgcgtgctcccacgctgctcgccctgcgccaccgtgtccccgtcccccacctcctgcctctacgcctgcctctcctgcgtcgccgtcttctgcccctcccaggctgccacgcacgcctccgcctccgcggggcccggccaccagatcgtcgtcgacatcgaccgcgctgagctcttctgtgccgcctacggggaccaggtctatgatcctgacttcgaccacgctgtcttcctcacccagtcctcctcgcttatctcatccacctccacctcctccgcctccccggccctccgcaagcgtcggcgcgtcgattaccgcacgtggttgtggacctcgagcatcacatacgcggaatggggaggggactggacgacagctgttggaggcatggcgggtttctcggtgtggcggatgcaggttttgcaggggggaagatggggggcgtgcgcgcagaggggggaggcgggggcacaggagatggtctacactattgccttaatagttagtagagatttgttgaaaccggtcttagagcatctaatggtgtgtttggttgaccagcggaggggaatggaatga

SEQ ID NO: 132504 - DNA, 993 bp, Zea Mays
atggctttatggtccaaaattttatatggcacaaagatgatgacaaatgacaatggtagcacatacaggagccctaatctccgtagatctttgaccacggaatctgaaagatatggtcggtatgatccaagtgaaattcaacgtgagagccgagcctcatctgatgcttcaaagaatgcaccttctggtccttggggtccaacttccagttctacaccaactgatgatactagctcaagtcaaccagggattaagactcgtgaagaaagacttctagagacaattgttactgcaagtgaagcttccaaattggatgcagttgccttgggccgtgcacttgagagcaaactgaattctccattatggcagtgctctatattcggacatgtcatgctctatagtgtgttagccaatttcatagtagattaccagccagcaacaccactcacaaagatggctcgtgttctgacatgggctggaatttttttacctatgactgaagctacatcagccatgaagagggtggtcatcacaggaaagagggttgtaagcttccactgtcatgaggactccttgaacatcgctggcctttgttggagaaactgggaagcatggacgctctctacagatccggtgcacatcccagtttgtgatgtctccattgcacaaggtcgcggtggccggaacatggcatcgactggtcaattgaagattgcgacggcgcgacctgcactatcgcagacgggtgcaacgcgcatgggcgggaaagcgcgggggcggtacaggtcgcggacggctgcagcgcgcatgggcgggaaagcgcaggggcggtacagggagggtgggagatcgggcgggagggcgcgggaacgggatggctgggagagcgcgggggcggtacagggagggcgggagatcgtgcgagagggcgcgggaacgaaatggctgggagagcgcgggggcgggatatggcgatttggcgagacacaatag

SEQ ID NO: 132505 - DNA, 1449 bp, Zea Mays
aggcgcacgccaattcctccctctctcgccgaaaccctcctggacactcgctgcgatgggcaggaaaccctcctccgccgccgccgccgcggcgatggaccacgaattccttgcggccgccatgcccgccgacctcctggccgcggccgactgcggtggcatccacgggcatgctctcttcttcgacgccctcgtgcagctcatcccgccgcgcttttatctcccatccggcgacgaggaccgcccgtggcaccagggcctgtccaaggcggcaaaggcggccttgaaggccaagtcccgcgccaacaccaaggccgcccgccgcgcccgcctcaatccctccacgccgcccgcctccaccctcgacctcctgaagaagtccgtcgccggccaggcagcggaggaagaggaggagaagtcagaagaagagagcggggcatctggggatgaggaaagctccgaggatgatattgatgaggaagccggggatcaagaggatgaaatgccgattgcacccgctgcagtggtgtctgaggatcgttccgtgacctatgaggagctgcgagaacgccttcaacgccgcattactgtgcttcgaggcaaccggtgcaccaggcctgagttcttgaataagcccaggaaggagaagggtaagaagtcaaaggcgaagaatgaaaagaagggcaaaggtgagggcatgaagcgtaagcgtgatgatggcaccgaagatgtggatgtcaaggatgggaagaaggtaaagaaggaagctgaggagaagccagatatcatgtacgcaaatgtgtttgttgacccaaaggaagcaaggcgcaggaagaagaggagggttaagaacaagaagaaggcactggagcaggctaaacggttgcaggaggcaaagaaggatcctgagaaggcaagcaaaattgcttgggatgtggccagaagacgtgctgctggtgagaaggtccatgatgaccccaagctgattaaggagagcttgaagaaggaggaaaagcggcagcagaagcatgctgcgcagtggaaggagaggcagaaaactgtagataagcagaggaaggacaagcagaagaaaaggacagagaacatccgggatcgggcacagcagaagaagatgcgcaagattgagaagcgtgagaaaaaacttatgcgccctgggtttgaggggcggaaggatggttatgtcaacgagtaacatctgtgtccaagtttgtctggatgatgaattactatgtcctcgtttagagtttcatttgcccctatgggtagttggtgcttgtaataggttaccagatcatggctgctgaagtgccttaattattgaatgaaccgaacttttgttatatagcagttctacagatgattttggagttgctatagtatatggttgtgtttagttttaccaattcatgccttttgctagttctttct

SEQ ID NO: 132506 - DNA, 1678 bp, Zea Mays
tatataaagtttgaacatgaatggattgctggtaggattgcggatcctaccagggatctcccttagcctataaagttcattttttttgtcctcgactaccttagattcatacttttcgaatgttgggtccaccactggtcttaacatctgtacaaaatagaggtgcgactttgtgggtgttagtgtattgtgccttggccatgaactatatagcaatacatcccctactcattagggttaggggttttcattctcctaacagctagtacagcaacccctggtaatgctaaccaggttctctaataatctggtagtttctttaactgtataatattacagatatctacctatctctctaatctttcatatttattttttcaggttgatggaaactacatatccaacttggtcttgagtgtttttcatgacccatctgtcatggaccaggagcatggactgcacatcaaagatgtcatagatcgtctcaaactaccagatgatgtagtcagtgcggccatccaaggtcatgttgatgtgggcaacatttacaacacaattgatgacttccactacaaatctgtccggaatggatgaccacgttgcaagtccagcgttcaggctccgtgtaggtatggagccgtttcaaggaagaagaaatgtaaaccctcttcaggatcgcctatattttgcagataggcttcatggtcaacagcttagcatatcggtttaggtgtgtattgctctcatatgtaatgatacataagatgtgagtagactaggtctacctgcaggacatcagtccgttcctacggaaatttgttatgaacgttttacattctaagacctatataaccgtgaagcacgcaaatcaagaatagaaccgccaaaaaaatggcagagggacattgagtaaaacttctcctgaaacgaactgactatacggacgaagatttgttcacctcacagcaaaacctcttctcttctagtacaattcagtatctcggtgattaaatttttgaaccaataattacaggatgagagcgtgtgcccacttgtcattctatgtaaaatcatgacaagccgaggaagctgtccaccttggcattggtcgatctggacaaaaacttcatgcaaattggaggctgcactttggccagagccagaatggactgcggcagggtccagatgccatctccgcagatcagccccgacgcgaccgcaggtccgaacgcgtccgctttcgccttgttcagccgctcccacacgaagaggatcatgctgcccagaaacatgtcgatggcgaagtaggatccgatgtagaacgggatcgccatcgccattggcagcgggataaacctcgacaccctgtgcggggtcaggtccctcgcaaggttgatggcgatcgctgccgcaaagaaaatgtagcagagggtgaggcagttttctgggagcgagccaaagccatccacgccgaggatggccatgttgcggtacacgatggcatagggcgccggatactcggtgccactctcgccaatgtcaccgaacgccttgtagaagagccagaagacgcagggcccgatgacacaccccatcccggtgccgatcacctggctgacaaacatagacctcggtgatgccagcgtcaggtacccggtcttgaagtcttgcatcaggt

SEQ ID NO: 132507 - DNA, 2100 bp, Zea Mays
ggcaacggcccagagtcttgccggctttgctcccccgccgcggcgccgcgagcgcgtatgtataacgcgacccccctccccagtccccccagcggcaaggcggcaaccgttctcccgcgtcccgcactcccgccccttttccttttgctccttccttcctcgggaagcctagggcttaggctttaagcgccgcgatgtacggcggcggcggcggcggcgggcactacgacggaggcagcggtggcgccgggaacgctaacgcgctcttcggcggcgggggcttcatgccctcacagtccacggtggtcccggagaacagcggcctctctaagggtcggagcgcgcagacgctgctcccgctcaccgtgaaacagaccatggacgcggcgcaaaccagcggtgacaggtctaatttcgccatcaacggcgttgaggtgtctacgattaggcttgttggacgcatgctaggtaaggttgagcgtgtcacagatgttgtattcactcttgatgatggtactggcaagatagatgtgaatcgctgggaaaatgaggcttccgatgctaaggagatggctgatgctaataacgagaactatgtcatagtcattggcggtttgaaaggttttcaaggaaagcgccatgtagttgcctatgctgtgcggcgtgtgacaaacttcaatgaaataacctgtcactttctgcactgcattcaggtgcatatggagctcacagggttaaagcagatctattcttcagctgcaacatatggaggagtagcccatgccccatcacagccaaatccggttgatggaaactacatatccaacttggtcttgagtgtttttcatgacccatctgtcatggaccaggagcatggactgcacatcaaagatgtcatagatcgtctcaaactaccagatgatgtagtcagtgcggccatccaaggtcatgttgatgtgggcaacatttacaacacaattgatgacttccactacaaatctgtccggaatggatgaccacgttgcaagtccagcgttcaggctccgtgtaggtatggagccgtttcaaggaagaagaaatgtaaaccctcttcaggatcgcctatattttgcagataggcttcatggtcaacagcttagcatatcggtttaggtgtgtattgctctcatatgtaatgatacataagatgtgagtagactaggtctacctgcaggacatcagtccgttcctacggaaatttgttatgaacgttttacattctaagacctatataaccgtgaagcacgcaaatcaagaatagaaccgccaaaaaaatggcagagggacattgagtaaaacttctcctgaaacgaactgactatacggacgaagatttgttcacctcacagcaaaacctcttctcttctagtacaattcagtatctcggtgattaaatttttgaaccaataattacaggatgagagcgtgtgcccacttgtcattctatgtaaaatcatgacaagccgaggaagctgtccaccttggcattggtcgatctggacaaaaacttcatgcaaattggaggctgcactttggccagagccagaatggactgcggcagggtccagatgccatctccgcagatcagccccgacgcgaccgcaggtccgaacgcgtccgctttcgccttgttcagccgctcccacacgaagaggatcatgctgcccagaaacatgtcgatggcgaagtaggatccgatgtagaacgggatcgccatcgccattggcagcgggataaacctcgacaccctgtgcggggtcaggtccctcgcaaggttgatggcgatcgctgccgcaaagaaaatgtagcagagggtgaggcagttttctgggagcgagccaaagccatccacgccgaggatggccatgttgcggtacacgatggcatagggcgccggatactcggtgccactctcgccaatgtcaccgaacgccttgtagaagagccagaagacgcagggcccgatgacacaccccatcccggtgccgatcacctggctgacaaacatagacctcggtgatgccagcgtcaggtacccggtcttgaagtcttgcatcaggt

SEQ ID NO: 132508 - DNA, 2097 bp, Zea Mays
ggcaacggcccagagtcttgccggctttgctcccccgccgcggcgccgcgagcgcgtatgtataacgcgacccccctccccagtccccccagcggcaaggcggcaaccgttctcccgcgtcccgcactcccgccccttttccttttgctccttccttcctcgggaagcctagggcttaggctttaagcgccgcgatgtacggcggcggcggcggcggcgggcactacgacggaggcagcggtggcgccgggaacgctaacgcgctcttcggcggcgggggcttcatgccctcacagtccacggtggtcccggagaacagcggcctctctaagggtcggagcgcgcagacgctgctcccgctcaccgtgaaacagaccatggacgcggcgcaaaccagcggtgacaggtctaatttcgccatcaacggcgttgaggtgtctacgattaggcttgttggacgcatgctaggtaaggttgagcgtgtcacagatgttgtattcactcttgatgatggtactggcaagatagatgtgaatcgctgggaaaatgaggcttccgatgctaaggagatggctgatgctaataacgagaactatgtcatagtcattggcggtttgaaaggttttcaaggaaagcgccatgtagttgcctatgctgtgcggcgtgtgacaaacttcaatgaaataacctgtcactttctgcactgcattcaggtgcatatggagctcacagggttaaagatctattcttcagctgcaacatatggaggagtagcccatgccccatcacagccaaatccggttgatggaaactacatatccaacttggtcttgagtgtttttcatgacccatctgtcatggaccaggagcatggactgcacatcaaagatgtcatagatcgtctcaaactaccagatgatgtagtcagtgcggccatccaaggtcatgttgatgtgggcaacatttacaacacaattgatgacttccactacaaatctgtccggaatggatgaccacgttgcaagtccagcgttcaggctccgtgtaggtatggagccgtttcaaggaagaagaaatgtaaaccctcttcaggatcgcctatattttgcagataggcttcatggtcaacagcttagcatatcggtttaggtgtgtattgctctcatatgtaatgatacataagatgtgagtagactaggtctacctgcaggacatcagtccgttcctacggaaatttgttatgaacgttttacattctaagacctatataaccgtgaagcacgcaaatcaagaatagaaccgccaaaaaaatggcagagggacattgagtaaaacttctcctgaaacgaactgactatacggacgaagatttgttcacctcacagcaaaacctcttctcttctagtacaattcagtatctcggtgattaaatttttgaaccaataattacaggatgagagcgtgtgcccacttgtcattctatgtaaaatcatgacaagccgaggaagctgtccaccttggcattggtcgatctggacaaaaacttcatgcaaattggaggctgcactttggccagagccagaatggactgcggcagggtccagatgccatctccgcagatcagccccgacgcgaccgcaggtccgaacgcgtccgctttcgccttgttcagccgctcccacacgaagaggatcatgctgcccagaaacatgtcgatggcgaagtaggatccgatgtagaacgggatcgccatcgccattggcagcgggataaacctcgacaccctgtgcggggtcaggtccctcgcaaggttgatggcgatcgctgccgcaaagaaaatgtagcagagggtgaggcagttttctgggagcgagccaaagccatccacgccgaggatggccatgttgcggtacacgatggcatagggcgccggatactcggtgccactctcgccaatgtcaccgaacgccttgtagaagagccagaagacgcagggcccgatgacacaccccatcccggtgccgatcacctggctgacaaacatagacctcggtgatgccagcgtcaggtacccggtcttgaagtcttgcatcaggt

SEQ ID NO: 132509 - DNA, 2181 bp, Zea Mays
ggcaacggcccagagtcttgccggctttgctcccccgccgcggcgccgcgagcgcgtatgtataacgcgacccccctccccagtccccccagcggcaaggcggcaaccgttctcccgcgtcccgcactcccgccccttttccttttgctccttccttcctcgggaagcctagggcttaggctttaagcgccgcgatgtacggcggcggcggcggcggcgggcactacgacggaggcagcggtggcgccgggaacgctaacgcgctcttcggcggcgggggcttcatgccctcacagtccacggtggtcccggagaacagcggcctctctaagggtcggagcgcgcagacgctgctcccgctcaccgtgaaacagaccatggacgcggcgcaaaccagcggtgacaggtctaatttcgccatcaacggcgttgaggtgtctacggcttgttggacgcatgctaggtaaggttgagcgtgtcacagatgttgtattcactcttgatgatggtactggcaagatagatgtgaatcgctgggaaaatgaggcttccgatgctaaggagatggctgatgctaagtaataagtacagttcaattgtagcatgccaattctgtttgtcatgcatcaaaattgatacaattgctttgttttggttttacaagtaacgagaactatgtcatagtcattggcggtttgaaaggttttcaaggaaagcgccatgtagttgcctatgctgtgcggcgtgtgacaaacttcaatgaaataacctgtcactttctgcactgcattcaggtgcatatggagctcacagggttaaagcagatctattcttcagctgcaacatatggaggagtagcccatgccccatcacagccaaatccggttgatggaaactacatatccaacttggtcttgagtgtttttcatgacccatctgtcatggaccaggagcatggactgcacatcaaagatgtcatagatcgtctcaaactaccagatgatgtagtcagtgcggccatccaaggtcatgttgatgtgggcaacatttacaacacaattgatgacttccactacaaatctgtccggaatggatgaccacgttgcaagtccagcgttcaggctccgtgtaggtatggagccgtttcaaggaagaagaaatgtaaaccctcttcaggatcgcctatattttgcagataggcttcatggtcaacagcttagcatatcggtttaggtgtgtattgctctcatatgtaatgatacataagatgtgagtagactaggtctacctgcaggacatcagtccgttcctacggaaatttgttatgaacgttttacattctaagacctatataaccgtgaagcacgcaaatcaagaatagaaccgccaaaaaaatggcagagggacattgagtaaaacttctcctgaaacgaactgactatacggacgaagatttgttcacctcacagcaaaacctcttctcttctagtacaattcagtatctcggtgattaaatttttgaaccaataattacaggatgagagcgtgtgcccacttgtcattctatgtaaaatcatgacaagccgaggaagctgtccaccttggcattggtcgatctggacaaaaacttcatgcaaattggaggctgcactttggccagagccagaatggactgcggcagggtccagatgccatctccgcagatcagccccgacgcgaccgcaggtccgaacgcgtccgctttcgccttgttcagccgctcccacacgaagaggatcatgctgcccagaaacatgtcgatggcgaagtaggatccgatgtagaacgggatcgccatcgccattggcagcgggataaacctcgacaccctgtgcggggtcaggtccctcgcaaggttgatggcgatcgctgccgcaaagaaaatgtagcagagggtgaggcagttttctgggagcgagccaaagccatccacgccgaggatggccatgttgcggtacacgatggcatagggcgccggatactcggtgccactctcgccaatgtcaccgaacgccttgtagaagagccagaagacgcagggcccgatgacacaccccatcccggtgccgatcacctggctgacaaacatagacctcggtgatgccagcgtcaggtacccggtcttgaagtcttgcatcaggt

SEQ ID NO: 132510 - DNA, 913 bp, Zea Mays
ggcaacggcccagagtcttgccggctttgctcccccgccgcggcgccgcgagcgcgtatgtataacgcgacccccctccccagtccccccagcggcaaggcggcaaccgttctcccgcgtcccgcactcccgccccttttccttttgctccttccttcctcgggaagcctagggcttaggctttaagcgccgcgatgtacggcggcggcggcggcggcgggcactacgacggaggcagcggtggcgccgggaacgctaacgcgctcttcggcggcgggggcttcatgccctcacagtccacggtggtcccggagaacagcggcctctctaagggtcggagcgcgcagacgctgctcccgctcaccgtgaaacagaccatggacgcggcgcaaaccagcggtgacaggtctaatttcgccatcaacggcgttgaggtgtctacgattaggcttgttggacgcatgctaggtaaggttgagcgtgtcacagatgttgtattcactcttgatgatggtactggcaagatagatgtgaatcgctgggaaaatgaggcttccgatgctaaggagatggctgatgctaataacgagaactatgtcatagtcattggcggtttgaaaggttttcaaggaaagcgccatgtagttgcctatgctgtgcggcgtgtgacaaacttcaatgaaataacctgtcactttctgcactgcattcaggtgcatatggagctcacagggttaaagatctattcttcagctgcaacatatggaggagtagcccatgccccatcacagccaaatccggtaacacaagttatcattagccatgctggtggatctggataaagctcgctgattgtttcttggaactccttgatgttctcattaggccgccctcctttacctttctttacttt

SEQ ID NO: 132511 - DNA, 124 bp, Zea Mays
gtagggtacaaaatacaaggacaaatgtgttttgtttgcttggtggatgcaaatgtggatttggagccaacaaccatggttcgaatccccatacgagaatttattcctttatcaaaaaaaataa

SEQ ID NO: 132512 - DNA, 1092 bp, Zea Mays
ggcggcgtagatattaatttatatgaaaaaacgtgctgaaagatttacaatatttactggcatgaaggcgcgccactgccaccaccatcgacaaacggagtcgacgacgaagatcaagccaacaagcatcaaaacattggagacccgatactgccctcgaagctacagctgagcacgaaagatctgccatggctcgtcggtggcgcggcatcccagcaatccaggttcgcattctggaagcgaaccgtggaccgcgcgaagcgcctccccgccatcctcgtcaactccttccccggcgaaggcgcaggcgactccgaccggtatgacccgccgccgggccagcgcatcctccacgtcgggccactcttcaacgtcaacgtgtcgctggctgctggtgcggcggagaataacggctcgtcatgcgtcccgttggagaagccgaacgctgcagcggccaccaccatgtggcaggcggactccacctgcatggattggctggaccggcgcagtcccgggtcggtggtctacgtttccttcggaagctgggtcgcgccgatcgggccggagaggatggccgagttcgcgctcggtttgcaggccgccggccggccgttcctctgggttctcaagaaccacccgtcgtggcgagccggcctgcccgaccggttcgtggagaccgtcgccagcagccgcggcatcggcaagatagtcccgtgggcgccgcaggaggaagttctcggtcatcacgctgtaggctgctacatcacgcactgcggttggaactcaacgctggaagccgtaaggcaccgagtccgcatgatctgctaccctatctccggtgaccagttcatcaactgcgcctacatcgttaagatgtgggaggctgggatggcaatggacagcacggaccgggatggtgtgaaggactgtattgagagggtcatggagggcgaggagggtaggcgtttgcaagagaaagtgaatgggatggagaaagtcgtggcaggtgaggcgcggagtattgccaaggggaacctcgacctattcatcaatggaatcgagagcggtgacgattgggtaacaaaactatga

SEQ ID NO: 132513 - DNA, 1626 bp, Zea Mays
atgggcgcaaaggccgagcacgtggccgtctgccccgcggcggccaccgttgtcctcgtgccgttcccggcgcagggccacatctcccccatgctccgcctggcgcgcgccctcgccgagcgaggcgtcgcggccatcgtcgccgtgcccgacttcgtctaccgccgactcgtcagcgcctgcgggcaggtgcgcacccgcgtggaggtggagctcgcatccatgcacagcggagtcccagacgacggcgtgggcgagccccccggcttcgccggcttcgcgcgcgccatggagcaccacatgcccaccagcctggaggcgatgctgacggctcagcgcggccgcggcgtggcgtgcctcgtcgccgacgtcctggcgtcgtgggcgatccctgttgcgacccggtgtggcgtgtcggccgtgggcttctggccggcgatgctggcaacttaccgcgtcgtggcggccatcccggagctcgtcgacaaggggttgatctcagattacggcattcccatatcgaccaaaaggttagacattggtgaagaaggcaaagtaaacggagaccaccgcaccagcgacagcctccacgtattgcctgcgcaactaggcctgagcaccgcggagttgccgtggctcgtgggcgacgcggcgtcccagaaaacaaggttcaccttctggcttcagaccatggagcgtgcgaagagtttccgctctatcctcgtcaacaccttccccgtcgaagccaccgccgccgacgccggcactgtgtcacagcaacgggttcttcaggtcctccaagtcggaccactactgtcactgccacccaaaggcttcgacgacgacggttgcattaccaaaggcgacgatctgtcgcatgacagtacatccaagaacccaagcatgtggcaggcggatgagacctgcgtggagtggctagacgcgcagcgtgcggggtcggtggtgtacgtctcgttcggcagctgggtctcgtcgatcgggcgggacgccatcaacgagctcgcgctcggcctggcggccaccggccggccgttcctgtgggcgcttaaggacgagccgtcgtggcgagaaggtctccccagccagtacgcggaggcggtcgccggccgtggcaagatcgtcgcttggtcaccgcaggaagacgtcctccggcacaaggccgtcggctgctacctcacgcactgcggctggaactccacgctggaggccatacagaacggggtgcgtctgctgtgctacccagtgtccggtgaccagttcatcaactgcgcttacatcgtcaaggtgtgggagacggggatcaggcttcctagcaccaacagaaacgtcgtggaggattgcatcgagaggattatggaaggagaagagggaaggcgtatgcaggtgaatgtggatgagatgagagaaagagtcgtgatgggttttgacagacttgcccgttactcggctcctagctactcactccgttctgaaatatactgtaggtttctaaagtttatactgaaatataatacattctatataatgactatttggcaaaaattatggaaaagaaaatcataatttgaggaggaactccttagttgaaagaatccacaaacacgg

SEQ ID NO: 132514 - DNA, 1241 bp, Zea Mays
aaagtttgaatgtcctggcatggaattgatacaaatatagtacaacatacacaatactgtgtcaatttatcagtatcaacagtgcagaatttccttagagttgcaataattatatccccaatagctcaattgaagcaatttaagcaacaaggacaatggggagccggacgtttccataaccataataacaaggttaaccttgccaatcctcacaccgcggaaggttcctcgacgtccctcccccgtccgccgccaacgccaccgagcctgggcacatcgaggcctccaccgattccgtcgggcatgaacgaggcaggtcgattctcgatgacctcgtcgatgaggccccagtcgcgcgcctcttcagggtccatgaagaggtccctctccatgcactgctcaatcttatcgatgggctggcgcgtgtgcttctggtagatcttgttgaggcggtcgcgcattttgaggatctccttggcctggatggcgatgtcggtggcttgcccctgcgcgccgcccgagggctggtggatcatgaccctggcgttgggaagcgcgcgcctctcacccggcgccccagccgcgaggaggagcgagcccatggaggccgcctggccgatgcagagggtggtgacggggcagcggatgtactgcatggtgtcgtagatggcgagccccgcggtgacgacgcccccgggggagttgatgtagaggtggacgggcttgagcgggttctcggactcgaggaagagcagctgcgcgacgacaagcgaggccgtgtcgtcggcgatgggcccgtggatgcagacgatgcgctccttgagcaggcgcgagaagatgtcgtaggcgcgctccccgcgggaggtggtctcgatgaccatggggaccagaccgtactcgcggtgctgcgagaacccctccggctggggcggctggtagggggacgaggagaagaacgcccgtgggggcgccgccgcgacgagccggcgcggcccgagcccggcggagcccgggcccaggctcagagagctggacctgggggagggccgcggcgtggaggacgggagcggggataccgcggcgtggtgcgcgagggcgagagctgaggatggcgtcatggccgcggccgcgtcgccctgggatgtaacggacgggcgggagatctgatgcagacgatggctggtggcggagggtcgtgggctggggatggagagagggccagaggagacgaacggcggaac

SEQ ID NO: 132515 - DNA, 125 bp, Zea Mays
taacttcagcctctacaatcgccttttgtctggtacgttgttcaaacgtttttcatggattttgtttgtcaacggtgatcgggcaccggcagttacggcaaagttcaaacgaggtggaagaaacg

SEQ ID NO: 132516 - DNA, 746 bp, Zea Mays
atggctcagggcgtgttcggctggctacaagccgacactgttgcagctgtttggattgctgcagctgcaatccatagagagaaaaatactcgaggatggatcatgaagccagcgggctacgacccctgcacggcggagtactcggaggtctacttcaatcgacccgacgtccaggcggcgctgcacgcgaacgtgacaaagatcggctacaactggacacgctgcaggagcaccgaaactgaaaagctcgaatcgaactgtgttgctgttcgcgcatggagcgatgcgatctacacttggaacgacgccgccttctccaccctccccgtcatccgcaagctggtcgccggcggcctcaggttgtgggtgttcagcggcgacaccgacggaaggatccccgtgacgtcgacgaggctcaccctccacaagctcgggctcaagaccgtccaggagtggacgccgtggtacgaccatctgcaggtaacttaacctgacttttgtttttttcaggagcagctgcatcgactgactctaacgtcttcctccgccgaaaaaaaaacaggttggtggatggacgatcgtgtacgagggcctgacattcgtcacgatccgcggcgctgggcatgaggtgcctttgcacgcgccgcggcaggcgctgacgctcttcagcaacttcctggcaggcaccaagatgcccccaacggcgttcccctaactgctgtctccccctcttctctctctctctc

SEQ ID NO: 132517 - DNA, 633 bp, Zea Mays
atggctcagggcgtgttcggctggctacaagccgacactgttgcagctgtttggattgctgcagctgcaatccatagagagaaaaatactcgaggatggatcatgaagccagcgggctacgacccctgcacggcggagtactcggaggtctacttcaatcgacccgacgtccaggcggcgctgcacgcgaacgtgacaaagatcggctacaactggacacgctgcaggagcaccgaaactgaaaagctcgaatcgaactgtgttgctgttcgcgcatggagcgatgcgatctacacttggaacgacgccgccttctccaccctccccgtcatccgcaagctggtcgccggcggcctcaggttgtgggtgttcagcggcgacaccgacggaaggatccccgtgacgtcgacgaggctcaccctccacaagctcgggctcaagaccgtccaggagtggacgccgtggtacgaccatctgcaggttggtggatggacgatcgtgtacgagggcctgacattcgtcacgatccgcggcgctgggcatgaggtgcctttgcacgcgccgcggcaggcgctgacgctcttcagcaacttcctggcaggcaccaagatgcccccaacggcgttcccctaa

SEQ ID NO: 132518 - DNA, 1264 bp, Zea Mays
tggacaggcaacgtcctcatcttcatctcccaggttttcccctccaatcacccccaggtcttcctctcgcgagttgcggtctcgcgcccccctccgccgaccgccgcctcctcacaaccgcggaagctgcttccctctccattggacgcggccagcttccatctctcggtcacctccctctacatcccacggccgctaccaccttccctctacctcacacggccgccggcctctccaaggtctgcacacgcaggaaaaaccttgccacgagtcgccgacactccatcccggaagagctaacgaggtgactccccaccgcgcccatgggtgacagccagtactccttctccctcaccaccttcagtccgtcggggaagctcgtgcagattgagcacgcgctcacggctgtcggatccgggcagacctcgctcgggatcaaagctgccaatggtgtagtcattgccactgagaagaagctgccttctattttagtggatgaaacatctgtgcaaaagattcaggcactaacacctaatattggagttgtctatagtgggatgggtccagatttccgtgttctggtgaggaaaagtcgaaagcaggcacaacaatattatcggttgtacaaggaacatatacctgtaacacagcttgtacgagagactgctgctgtcatgcaggagttcacacagtcaggtggtgtgagaccatttggagtatcactgttgattgctgggtatgatgacaatggcccgcagttgtatcaggttgatccctcaggatcatacttctcctggaaggcatcagccatgggaaaaaatgtgtccaatgcaaagacgtttcttgaaaagagatacacagaagatatggagcttgatgatgccatccacactgcaattttgactttgaaagaaggatatgaggggcaaatttcctccaacaacattgaaatcggaattattcgagctgatcgtgagttcaaagttttaagcccagcagagatcaaggatttcttggaagaggtggagtaagctgtctgttgatgatactagttcagacaacaatagcagcgtcacttatgagcagccagcctgaagattgtcttggttttattactctgtaaactgatttgctccagcgccatgtggtggttacatttgaaccctcctcaacgcatactgtagacaatgagataacgtaggatgaatgctgtatttgacatactttgcagcttgtttatgtgatgcacgttcttgcggacagt

SEQ ID NO: 132519 - DNA, 1261 bp, Zea Mays
tggacaggcaacgtcctcatcttcatctcccaggttttcccctccaatcacccccaggtcttcctctcgcgagttgcggtctcgcgcccccctccgccgaccgccgcctcctcacaaccgcggaagctgcttccctctccattggacgcggccagcttccatctctcggtcacctccctctacatcccacggccgctaccaccttccctctacctcacacggccgccggcctctccaaggtctgcacacggaaaaaccttgccacgagtcgccgacactccatcccggaagagctaacgaggtgactccccaccgcgcccatgggtgacagccagtactccttctccctcaccaccttcagtccgtcggggaagctcgtgcagattgagcacgcgctcacggctgtcggatccgggcagacctcgctcgggatcaaagctgccaatggtgtagtcattgccactgagaagaagctgccttctattttagtggatgaaacatctgtgcaaaagattcaggcactaacacctaatattggagttgtctatagtgggatgggtccagatttccgtgttctggtgaggaaaagtcgaaagcaggcacaacaatattatcggttgtacaaggaacatatacctgtaacacagcttgtacgagagactgctgctgtcatgcaggagttcacacagtcaggtggtgtgagaccatttggagtatcactgttgattgctgggtatgatgacaatggcccgcagttgtatcaggttgatccctcaggatcatacttctcctggaaggcatcagccatgggaaaaaatgtgtccaatgcaaagacgtttcttgaaaagagatacacagaagatatggagcttgatgatgccatccacactgcaattttgactttgaaagaaggatatgaggggcaaatttcctccaacaacattgaaatcggaattattcgagctgatcgtgagttcaaagttttaagcccagcagagatcaaggatttcttggaagaggtggagtaagctgtctgttgatgatactagttcagacaacaatagcagcgtcacttatgagcagccagcctgaagattgtcttggttttattactctgtaaactgatttgctccagcgccatgtggtggttacatttgaaccctcctcaacgcatactgtagacaatgagataacgtaggatgaatgctgtatttgacatactttgcagcttgtttatgtgatgcacgttcttgcggacagt

SEQ ID NO: 132520 - DNA, 1242 bp, Zea Mays
aacgtcctcatcttcatctcccaggttttcccctccaatcacccccaggtcttcctctcgcgagttgcggtctcgcgccccccctccgccgaccgccgcctcctcacaaccgcggaagctgcttccctctccattggacgcggccagcttccatctctcggtcacctccctctacatcccacggccgctaccaccttccctctacctcacacggccgccggcctctccaaggaaaaaccttgccacgagtcgccgacactccatcccggaagagctaacgaggtgactccccaccgcgcccatgggtgacagccagtactccttctccctcaccaccttcagtccgtcggggaagctcgtgcagattgagcacgcgctcacggctgtcggatccgggcagacctcgctcgggatcaaagctgccaatggtgtagtcattgccactgagaagaagctgccttctattttagtggatgaaacatctgtgcaaaagattcaggcactaacacctaatattggagttgtctatagtgggatgggtccagatttccgtgttctggtgaggaaaagtcgaaagcaggcacaacaatattatcggttgtacaaggaacatatacctgtaacacagcttgtacgagagactgctgctgtcatgcaggagttcacacagtcaggtggtgtgagaccatttggagtatcactgttgattgctgggtatgatgacaatggcccgcagttgtatcaggttgatccctcaggatcatacttctcctggaaggcatcagccatgggaaaaaatgtgtccaatgcaaagacgtttcttgaaaagagatacacagaagatatggagcttgatgatgccatccacactgcaattttgactttgaaagaaggatatgaggggcaaatttcctccaacaacattgaaatcggaattattcgagctgatcgtgagttcaaagttttaagcccagcagagatcaaggatttcttggaagaggtggagtaagctgtctgttgatgatactagttcagacaacaatagcagcgtcacttatgagcagccagcctgaagattgtcttggttttattactctgtaaactgatttgctccagcgccatgtggtggttacatttgaaccctcctcaacgcatactgtagacaatgagataacgtaggatgaatgctgtatttgacatactttgcagcttgtttatgtgatgcacgttcttgcggacagt

SEQ ID NO: 132521 - DNA, 1242 bp, Zea Mays; identical to SEQ ID NO: 132520

SEQ ID NO: 132522 - DNA, 1242 bp, Zea Mays; identical to SEQ ID NO: 132520

SEQ ID NO: 132523 - DNA, 278 bp, Zea Mays
tgtttattgtcgtctatctgcgaataattgggattcacactagcaactaccattgcagatttgctgaagtgcttggatttcgtggctacaaacaatcaagttcgctatccaactaatttactttcggcgtgtgctaagttgtcacaatctgatgcgcttgtgcaagagaattcagtgcctctttattccttaagacaggtcaatgccagaacgagacatcaatatgtctaacgtcgttgattttgacattcaattagcaatagcaaccctttggatac

SEQ ID NO: 132524 - DNA, 819 bp, Zea Mays
atgacgagtgctaaacagatacctgcatgaaaaacttttcaggtgcaaaagattcaggcactaacacctaatattggagttgtctatagtgggatgggtccagatttccgtgttctggtgagaaaaagtcgaaagcaggcacaacaatattattggttgtacaaggaacatatacctgtaacacagcttgtacgagagactgctgctgtcatgcaggagttcacacagtcaggtggtgtgagaccatttggagtatcactgttgattgctgggtatgatgacaatggcccgcagttgtatcaggttgatccctcaggatcatacttctcctggaaggcatcagccatgggaaaaaatgtgtccaatgcaaagacgtttcttgaaaagagatacacagaagatatggagcttgatgatgccatccacactgcaattttgactttgaaagaaggatatgaggggcaaatttcctccaacaacattgaaatcggaattattcgagctgatcgtgagttcaaagttttaagcccagcagagatcaaggatttcttggaagaggtggagtaagctgtctgttgatgatactagttcggacaacaatagcagtgtcacttatgagcagccaacctgaagattgtcttggttttattactctgtaaactgatttgctccagcgccatgtggtggttacatttgaaccctcctcaacgcatactgtagacaatgagataacgtaggatggatgatgtatttgacatactttgcaacttgtttatgtgatgcacgttcttgcggacagtatcgatacccagttgtagg

SEQ ID NO: 132525 - DNA, 395 bp, Zea Mays
caaagatcgacgacatcgtgggacagggctgctgctgttggcgtccatccacggaagaaacagagagcaggggagggatgagatcaccatgagagcagcagaggtggccggccaccagcagagagggggctgggcgagctgggactgggcgccgagcatctaggaggtggggaggagatgggaaagggctaggcgagatccatggcgggtgagaacactgggaacggctggtgctcaggcatgcgcgatcgtgtgaagaggagcaaggagggcgccgtgcaggggcagggcgagctcgccagggaggagaagggctgggagtggcgtgggaagggacctaggggatggcttgcgtgagggagatttgggagggaggtcagctgagagaattccag

SEQ ID NO: 132526 - DNA, 1776 bp, Zea Mays
acaagagcaccttgctgtgaacttgtaacaggtttgaacttcgaaggaaaagataattttggtgctgtgattgatttcactgtgaggagtgaaatgaggctaagtattgggcaagtccatcgaaatgttcttgcgctggcatcttctcggtcatgttttgttctgggagatcgtgtttcgttcaggatgctgtcccaaccacgggtagctggatttcatcagactgcttggcgtggtagtcaaattttggaagataacaggggaggaccattgactcttgctagcctagaagtgcaaagcagggttgaatatggaaaaaaggggaaaatggaacgaactggaggtccaaagccaagttcaagagcttcttccctctatgtgaaaccaaaggtttcttcaaatgtcaaaccagcaaagagtgccttgatgaagccagctgggataaagaagacactgaaggtagatgaggctctgttttcggccaagtcatttgaagaacttggtttgccacctttgcttgttgaccagttgaacaaggaaggtctgactgccccaactgaggtccaatccgcagcaattcctataatagcacaaaagcatgatgttgtgatccagtcatatactggctcagggaaaactcttgcttatcttcttccaattctttctgatataggccctctgaagaggactatggaacaagaccattctgagaaaagatcaggtatagaagcagtcatcgttgctccttcgagagaattaggaatgcagattgtgcgagaagtggagaagattttgggtcctaatgacaaaagactggtccagcaacttgttggcggagctaatcgttccaggcaggaagaagcattgaagaagaacaaaccaatcattgttgtcggaacacctggccgtatttctgaaatttctgcagcagatgaagtcgaccagcttctgtcttttaattaccgtgaagatatgcatagaattttggagcatgttggaaggagacctggaggcacatctagggatattcttggcccacttgcgagacgatctgagcgtcagactatcctggtttctgcaacaataccattttcagttatacgagcagcaaggagttggggtcatgatccagttctcattagagctaaaagtgtagttccacttgattcaatcactgtgccaagacctgcgttatctcaaagtgacgctaaccccagttcgtcatcgcagtcagtgaaccaagctgctgttggcagcttgccgccatctttggaacactactattgtacggccaaggcgcagcacaaggttgacacattacggaggtgcatccatgctctggaagcacagacagtgattgcatttatgaacaacaccaagccactgaaggatgttgtgtttaagttggaggcccgtggtatcaaagccactgagctacatggagaccttggaaagcttgcaaggtcgacagttttgaaaaagttcaaggatggtgaattcagagttctcgttacgaatgagctgtctgccagaggactggacgtgccagaatgtgaccttgtggttaatctggaccttccaactgactccacacattatgctcacagagctggaagaactggacgtcttgggcggaaagggatcgtggtcacaatatgcgaagaaagcgagggatttgttgtaagaaaaatgcgcaagcagttagatgtggccatcaagccatgcgagttcactgaaggcgagcttgttgtccacaaggaggaagatgtggaataa

SEQ ID NO: 132527 - DNA, 1122 bp, Zea Mays
tcacctcaaaaacctctccagccccaccggtccaccaccgccagccaccccacacacacactctctctctctccagccagcccccaacacgacgaggcaggaaggcgccatggccaccacccgcgaggtctccagcagcgccgccgccatgttccacgtctaccagacgataccgatgccgacgccatcgacggcagcggccggcggcggcggcgccatggtgtcggtgtcggcccccgcgaagccgggcaagaaggagggcggcggcaaggaccggcacagcaaggtgaacgggcgcgggcggcgcgtgcgcatgccgatcgtgtgcgcggcgcgcgtgttccagctcacccgcgagctggggctcaagtccgacggccagaccattgagtggctgctccgccaggccgagccctccatcgtggccgccacgggctccggcaccaccccggccgtcttcgtctcctcctccgcgccgtccacgtcctcctcctcctcccactaccaccaccagcagcaggccaccgtcgtcctcggcaagcgcccgcgcgaggaaggcgacgccgcggggtccgtgttctgggccgcgctgccggcggcgccgcgggccacggaggcctggggcttctcgccgctggaggcgcaggcggcggcggccgcggccgcggcggcgtacgtcccgatggcgcaggcgcaggcgcagcaccaccacctcaacctgctcgccgcgctctccggcgccgcgaggcgcgccgaggaggagacccggtgactccgccgtggcttctgacacgtactgctaccacgtccgtcgctcgcgcgcgcttaattatttgatcgctgtccgcgtgttcctgcaagcgctacgttcttgattctgtgtgtgtgctcttgtgatttccctttcaccagtccaaggcagtgtcccgtggtcgaggtttgatgaaagattgctgtggtgctaaatgtaaatacgagtccttgcttagatcttactgcattctgtgttgggttttctgcgcctttatatttggattccatggaatttgtttcggttagcatcatcttgtctgtatcagcccaatgagtcatttattagtagtacaagcataaagctcagat

SEQ ID NO: 132528 - DNA, 880 bp, Zea Mays
accaaaattccaaaaaaccaatgggctgaaagagaccctgaactatgcggcgcaatatttcgcgtagattcggtccagtatcagcccatctatggcggatgaaggaccgcgaatcggagaaaggccagaacagacgagagcaggaggacggagagcgccggcgaggaggcatggagccagacaaggccggggaggcagcgaaggagccgacggaaacggaggctggagactccgtggatccccgcgaactagtgtccagcgacgacgagatcgactactccgtcgagcctgatttctacgaccccgacctagatgacgtcgatgagcggtgggtgagcagacagaggaaaggccgcacatctgacgccgtgcttagctgccccgcctgtttcactaccctgtgcttggattgccagaggcatgagaagtacgtaaaccagtaccgtgcgatgttcgttcgcaactgcaagatcaagactgaccaggtcctgcgagagggcaagagcaagaggaagaaacgcagaggaggaagggctggtgatccagctgccgcatctgaaggcgaaagcaaggggcagtcctaccaccccgtctgctgcgaggtctgctcaaccgaggttggagtgttggacgaggacgaggtgtaccacttctttaacgtgatccctagcaactcctgaatgccgtgaactgttgctctgtaggagtggtacgttcgtagtcgtagaccccaccaccatatacgcaagcttctgcgctacgccatctgtctcttatcgctgatcagcctgtacatcgggtatgtatctttacggatgttttgtttctgcagcatgatgcggttttgaaagggggtctccgcgagctctagctgtgatgg

SEQ ID NO: 132529 - DNA, 755 bp, Zea Mays
gtcttcacataaacctttctcctctctttcttctccgtgaaccctacctctgcgattgtggcaaagaaacagctggtttcctgctctgttctagtgtggctgaatcatcgtctctgattcgccttctctttgtgtcatttccgtctctgatctgcagtgtccagcgacgacgagatcgactactccgtcgagcctgatttctacgaccccgacctagatgacgtcgatgagcggtgggtgagcagacagaggaaaggccgcacatctgacgccgtgcttagctgccccgcctgtttcactaccctgtgcttggattgccagaggcatgagaagtacgtaaaccagtaccgtgcgatgttcgttcgcaactgcaagatcaagactgaccaggtcctgcgagagggcaagagcaagaggaagaaacgcagaggaggaagggctggtgatccagctgccgcatctgaaggcgaaagcaaggggcagtcctaccaccccgtctgctgcgaggtctgctcaaccgaggttggagtgttggacgaggacgaggtgtaccacttctttaacgtgatccctagcaactcctgaatgccgtgaactgttgctctgtaggagtggtacgttcgtagtcgtagaccccaccaccatatacgcaagcttctgcgctacgccatctgtctcttatcgctgatcagcctgtacatcgggtatgtatctttacggatgttttgtttctgcagcatgatgcggttttgaaa

SEQ ID NO: 132530 - DNA, 1496 bp, Zea Mays
gcgaacagcctacgtacggctctatacctctcgccctctgagtctcgcgcggtcagtcggtctctctcactctctcttgtctccaagtttgtaaccctagccgccaagcttgaagctccagccgtgctcgtgtagggccgcaggccatccgggctccggcttccagcatctaccaggcgtccttagaatacggtgcagcgagcagcaagtcgccgagcagccgagccaccgccgaacacagggcgccgccgagcagccgagccgccgccgagcgccgagtcttctctgataaagcggagaaattggtagcagaagcagctgggtatggttcacagttggttttgtttccggaagtctttgttggtggctacccacatggatctacctttggactggttgtcggcaatcgcactgccaagggaaaggaagactttcagaagtatcacgcatctgccatagatgtgcctggtccagaagtgtcccgcttatctgcattagctggaaaatataaggtgtttctggtgataggggtggttgagagggcaggatatacactttacaacacggtgctctccttcgatccactgggaaaatacctagggaagcaccgcaaggtcatgcctactgcactagaacgtgtattctgggggtttggagatggatctacaatacctgtctacgatactccgattggaaaaatgggtgctctcatttgctgggaaaacagaatgccacttctcaggacggccatgtatgccaaaggtattgagatatattgtgctcccacggttgattgcatgccaacttggctgtcttctatgacacatatcgcccttgaagggggatgctttgtgctgtcagcgtgccagttctgtcgtagaaagaactaccctccccctcccgagtacacattttgtggcctagaggaagagccatccccggaatccgttgtttgttctggagggagtgtcatcatctcaccattgggaacagtgttggcgggtcccaactacgaaagtgaggcccttctcactgctgacctggaccttggagagattgttcgagccaagtttgattttgacgtggtgggccactactcgcgacctgaggtgctgagtttagtggtgaagagcgatccaaagcccgccgtctctttcatctcagccgctggtagggacgatgactatgtgcagacctaatgacaaacatatctttggtctttagcttccttatacggcaatcgcatgcatctgtataattgtgggtttccggaacgttgcacgttccgtcagaataataataaactgttatgtacaataaaatagtaacaataaggctttgttcggttattcccattatacatggattggacgagattggaaaaaatttaaaagaagtttgacttgtttgagatttaaactcacccaatctcactcaatctatatggattgagagctaactaaacaacctaatggatatctatatagattgagagc

SEQ ID NO: 132531 - DNA, 1763 bp, Zea Mays
tctcactctctcttgtctccaagtttgtaaccctagccgccaagcttgaagctccagccgtgctcgtgtagggccgcaggccatccgggctccggcttccagcatctaccaggcgtccttagaatacggtgcagcgagcagcaagtcgccgagcagccgagccaccgccgaacacagggcgccgccgagcagccgagccgccgccgagcgccgagtcttctctgacgacaaactttctccacacataccgcgccactccgccactcactgtgctgacggatggggtggtgctccccgtccacttcccggcagcttctctccacgacctcactcttcaccttcggcgcgggtctccttaccttcggcatccacctctcctacgtccacatcgagccccagcgcgctcgcacgctcgctcgggaccaattcgtccgtgactacctccgcaagaagcacgacaagtagcccgccttctgcggtccccaggtgattgcttggtagtcggagacgatggccctggtcccatcgaggtccgacagcgaggccttgatcccggaggtggagatgaatgccggcgccgaccagaccgcaacaacggcgcgggtcaccgtcgttcaggcgtcgtccgtgttctacgacacccctgcgactctcgataaagcggagaaattggtagcagaagcagctgggtatggttcacagttggttttgtttccggaagtctttgttggtggctacccacatggatctacctttggactggttgtcggcaatcgcactgccaagggaaaggaagactttcagaagtatcacgcatctgccatagatgtgcctggtccagaagtgtcccgcttatctgcattagctggaaaatataaggtgtttctggtgataggggtggttgagagggcaggatatacactttacaacacggtgctctccttcgatccactgggaaaatacctagggaagcaccgcaaggtcatgcctactgcactagaacgtgtattctgggggtttggagatggatctacaatacctgtctacgatactccgattggaaaaatgggtgctctcatttgctgggaaaacagaatgccacttctcaggacggccatgtatgccaaaggtattgagatatattgtgctcccacggttgattgcatgccaacttggctgtcttctatgacacatatcgcccttgaagggggatgctttgtgctgtcagcgtgccagttctgtcgtagaaagaactaccctccccctcccgagtacacattttgtggcctagaggaagagccatccccggaatccgttgtttgttctggagggagtgtcatcatctcaccattgggaacagtgttggcgggtcccaactacgaaagtgaggcccttctcactgctgacctggaccttggagagattgttcgagccaagtttgattttgacgtggtgggccactactcgcgacctgaggtgctgagtttagtggtgaagagcgatccaaagcccgccgtctctttcatctcagccgctggtagggacgatgactatgtgcagacctaatgacaaacatatctttggtctttagcttccttatacggcaatcgcatgcatctgtataattgtgggtttccggaacgttgcacgttccgtcagaataataataaactgttatgtacaataaaatagtaacaataaggctttgttcggttattcccattatacatggattggacgagattggaaaaaatttaaaagaa

SEQ ID NO: 132532 - DNA, 1955 bp, Zea Mays
cgcgtcagcagcaactagcaaggccgccaagcggcccaggagtccaggacccaggccagctccaagcgaacagcctacgtacggctctatacctctcgccctctgagtctcgcgcggtcagtcggtctctctcactctctcttgtctccaagtttgtaaccctagccgccaagcttgaagctccagccgtgctcgtgtagggccgcaggccatccgggctccggcttccagcatctaccaggcgtccttagaatacggtgcagcgagcagcaagtcgccgagcagccgagccaccgccgaacacagggcgccgccgagcagccgagccgccgccgagcgccgagtcttctctgtgttgttgatttcacaatgtcaagtgtctatggcgtctccatgcaagtacacactacactggcaccgcgattgacagtcagaactttgattgcccgtccaatagagtgacttcggtacagacgacaaactttctccacacataccgcgccactccgccactcactgtgctgacggatggggtggtgctccccgtccacttcccggcagcttctctccacgacctcactcttcaccttcggcgcgggtctccttaccttcggcatccacctctcctacgtccacatcgagccccagcgcgctcgcacgctcgctcgggaccaattcgtccgtgactacctccgcaagaagcacgacaagtagcccgccttctgcggtccccaggtgattgcttggtagtcggagacgatggccctggtcccatcgaggtccgacagcgaggccttgatcccggaggtggagatgaatgccggcgccgaccagaccgcaacaacggcgcgggtcaccgtcgttcaggcgtcgtccgtgttctacgacacccctgcgactctcgataaagcggagaaattggtagcagaagcagctgggtatggttcacagttggttttgtttccggaagtctttgttggtggctacccacatggatctacctttggactggttgtcggcaatcgcactgccaagggaaaggaagactttcagaagtatcacgcatctgccatagatgtgcctggtccagaagtgtcccgcttatctgcattagctggaaaatataaggtgtttctggtgataggggtggttgagagggcaggatatacactttacaacacggtgctctccttcgatccactgggaaaatacctagggaagcaccgcaaggtcatgcctactgcactagaacgtgtattctgggggtttggagatggatctacaatacctgtctacgatactccgattggaaaaatgggtgctctcatttgctgggaaaacagaatgccacttctcaggacggccatgtatgccaaaggtattgagatatattgtgctcccacggttgattgcatgccaacttggctgtcttctatgacacatatcgcccttgaagggggatgctttgtgctgtcagcgtgccagttctgtcgtagaaagaactaccctccccctcccgagtacacattttgtggcctagaggaagagccatccccggaatccgttgtttgttctggagggagtgtcatcatctcaccattgggaacagtgttggcgggtcccaactacgaaagtgaggcccttctcactgctgacctggaccttggagagattgttcgagccaagtttgattttgacgtggtgggccactactcgcgacctgaggtgctgagtttagtggtgaagagcgatccaaagcccgccgtctctttcatctcagccgctggtagggacgatgactatgtgcagacctaatgacaaacatatctttggtctttagcttccttatacggcaatcgcatgcatctgtataattgtgggtttccggaacgttgcacgttccgtcagaataataataaactgttatgtacaataaaatagtaacaataaggctt

SEQ ID NO: 132533 - DNA, 1767 bp, Zea Mays
cgcgtcagcagcaactagcaaggccgccaagcggcccaggagtccaggacccaggccagctccaagcgaacagcctacgtacggctctatacctctcgccctctgagtctcgcgcgggccgcaggccatccgggctccggcttccagcatctaccaggcgtccttagaatacggtgcagcgagcagcaagtcgccgagcagccgagccaccgccgaacacagggcgccgccgagcagccgagccgccgccgagcgccgagtcttctctgagtgacttcggtacagacgacaaactttctccacacataccgcgccactccgccactcactgtgctgacggatggggtggtgctccccgtccacttcccggcagcttctctccacgacctcactcttcaccttcggcgcgggtctccttaccttcggcatccacctctcctacgtccacatcgagccccagcgcgctcgcacgctcgctcgggaccaattcgtccgtgactacctccgcaagaagcacgacaagtagcccgccttctgcggtccccaggtgattgcttggtagtcggagacgatggccctggtcccatcgaggtccgacagcgaggccttgatcccggaggtggagatgaatgccggcgccgaccagaccgcaacaacggcgcgggtcaccgtcgttcaggcgtcgtccgtgttctacgacacccctgcgactctcgataaagcggagaaattggtagcagaagcagctgggtatggttcacagttggttttgtttccggaagtctttgttggtggctacccacatggatctacctttggactggttgtcggcaatcgcactgccaagggaaaggaagactttcagaagtatcacgcatctgccatagatgtgcctggtccagaagtgtcccgcttatctgcattagctggaaaatataaggtgtttctggtgataggggtggttgagagggcaggatatacactttacaacacggtgctctccttcgatccactgggaaaatacctagggaagcaccgcaaggtcatgcctactgcactagaacgtgtattctgggggtttggagatggatctacaatacctgtctacgatactccgattggaaaaatgggtgctctcatttgctgggaaaacagaatgccacttctcaggacggccatgtatgccaaaggtattgagatatattgtgctcccacggttgattgcatgccaacttggctgtcttctatgacacatatcgcccttgaagggggatgctttgtgctgtcagcgtgccagttctgtcgtagaaagaactaccctccccctcccgagtacacattttgtggcctagaggaagagccatccccggaatccgttgtttgttctggagggagtgtcatcatctcaccattgggaacagtgttggcgggtcccaactacgaaagtgaggcccttctcactgctgacctggaccttggagagattgttcgagccaagtttgattttgacgtggtgggccactactcgcgacctgaggtgctgagtttagtggtgaagagcgatccaaagcccgccgtctctttcatctcagccgctggtagggacgatgactatgtgcagacctaatgacaaacatatctttggtctttagcttccttatacggcaatcgcatgcatctgtataattgtgggtttccggaacgttgcacgttccgtcagaataataataaactgttatgtacaataaaatagtaacaataaggctt

SEQ ID NO: 132534 - DNA, 1611 bp, Zea Mays
cgcgtcagcagcaactagcaaggccgccaagcggcccaggagtccaggacccaggccagctccaagcgaacagcctacgtacggctctatacctctcgccctctgagtctcgcgcgggccgcaggccatccgggctccggcttccagcatctaccaggcgtccttagaatacggtgcagcgagcagcaagtcgccgagcagccgagccaccgccgaacacagggcgccgccgagcagccgagccgccgccgagcgccgagtcttctctgacgacaaactttctccacacataccgcgccactccgccactcactgtgctgacggatggggtggtgctccccgtccacttcccggcagcttctctccacgacctcactcttcaccttcggcgcgggtctccttaccttcggcatccacctctcctacgtccacatcgagccccagcgcgctcgcacgctcgctcgggaccaattcgtccgtgactacctccgcaagaagcacgacaagtagcccgccttctgcggtccccaggtgattgcttggtagtcggagacgatggccctggtcccatcgaggtccgacagcgaggccttgatcccggaggtggagatgaatgccggcgccgaccagaccgcaacaacggcgcgggtcaccgtcgttcaggcgtcgtccgtgttctacgacacccctgcgactctcgataaagcggagaaattggtagcagaagcagctgggtatggttcacagttggttttgtttccggaagtctttgttggtggctacccacatggatctacctttggactggttgtcggcaatcgcactgccaagggaaaggaagactttcagaagtatcacgcatctgccatagatgtgcctggtccagaagtgtcccgcttatctgcattagctggaaaatataaggtgtttctggtgataggggtggttgagagggcaggatatacactttacaacacggtgctctccttcgatccactgggaaaatacctagggaagcaccgcaaggtcatgcctactgcactagaacgtgtattctgggggtttggagatggatctacaatacctgtctacgatactccgattggaaaaatgggtgctctcatttgctgggaaaacagaatgccacttctcaggacggccatgtatgccaaaggtattgagatatattgtgctcccacggttgattgcatgccaacttggctgtcttctatgacacatatcgcccttgaagggggatgctttgtgctgtcagcgtgccagttctgtcgtagaaagaactaccctccccctcccgagtacacattttgtggcctagaggaagagccatccccggaatccgttgtttgttctggagggagtgtcatcatctcaccattgggaacagtgttggcgggtcccaactacgaaagtgaggcccttctcactgctgacctggaccttggagagattgttcgagccaagtttgattttgacgtggtgggccactactcgcgacctgaggtgctgagtttagtggtgaagagcgatccaaagcccgccgtctctttcatctcagccgctggtagggacgatgactatgtgcagacctaa

SEQ ID NO: 132535 - DNA, 1239 bp, Zea Mays
gcttctcatttggggcctgagcaacccgcaaccaccgcacgttaggtactaccgagaggcacaggccggcaagaaccgagctagctagctaataatcagggaagctgtctggcaaagtctcggccttcgtcttcgcagcgctgtgtagacgagtactcgatcggcgcgatggagaggtcgacgacgacgaccgaaggccacgtggttgggatcccggtgagcaccagggcttatggcatcgaggagcccgacttcccggcggaggagacgcagacgcccgaccacggagaattcccgagctccttccagtacaacgacagccatgatgctaccagttcaacgacgaccaccgatcggccgacgagcgatcaacaaggcaccacctgcaggaagggaggcagtatcgctcagggcatcaaagagcacgtgaccctggggccaaacctttcggacacggtgaaggggaagttctccctggtggcgaagatcgtgcgggccggcggcgtggagaaggtgttccggcggtggttctccgcggacaagaacgagaagctgctgcgggcctcgcagtgccacctgtcgacgacggccgggcccatcgccggcgtgctgttcgtgtcgacggcgcgggtggccttccgcagcgaccgggcgctggcggtgccggtgccggtgcccaccccgcgcggcggcacggcgcgcgtgccgtacaaggtggccatcccgctgcgaaaggtgagggcggtgcggcccagcgagaacaagcaccggccggagcagaagtacgtgcggctcgccaccaccgacggattcgagttctggttcatggggttcgtcagctacgacaagtcgctgcagcacctggagcgggccgtcgcgtacgcgcagcaggcgcaatgacggcagccgccgccgccgcagtagctgacggcggggtagtgtcttggtttgtgtagctgggctagttggttctggacttgtgtttgtgtatgcgtacttgcgtaggctgcaacatgtccttgtacatctggggggatcggtggcctcgtggactaaccagctggttctcgggttggccagaggcgatcgatcggggcgtctgatctttttgggcgattggggaagacggaaaattcatcacgagtttgaaacagagagtggttgtgtgacagtggcgaaaccgccaccaatatccattcttttcttctcgagaaaaaattttactgtaatttgtgtgac

SEQ ID NO: 132536 - DNA, 1678 bp, Zea Mays
gaagagatgaggactgttgctgcgtctattcccaattccaaagtgctgctgaagctgaaccaggtggctagaccaccgaggcggtttggatctttttctcgggaggagaagatagctactaggcaccagcgctataaaagaagcttccccgcttctcatttggggcctgagcaacccgcaaccaccgcacgttaggtactaccgagaggcacaggccggcaagaaccgagctagctagctaataatcagggaagctgtctggcaaagtctcggccttcgtcttcgcagcgctgtgtagacgagtactcgatcggcgcgatggagaggtcgacgacgacgaccgaaggccacgtggttgggatcccggtgagcaccagggcttatggcatcgaggagcccgacttcccggcggaggagacgcagacgcccgaccacggagaattcccgagctccttccagtacaacgacagccatggtgagggaggctgttcttcttagatttgtctgctcgagtcaagtccgctacggcaaggtgctgaagaaaccaagaaagtctgctgacgatcaagctatttctttcaccttccagatgctaccagttcaacgacgaccaccgatcggccgacgagcgatcaacaaggcaccacctgcaggaagggaggcagtatcgctcagggcatcaaagagcacggtaatattactttgcttttccatgatggatcggaatggaacaaatttgccgtgtggaaggaagccgaggctttcttcttcgccacgcgtacggcatatatacgagaaaaaaaaagaagcagactgaactgaattactgaactgaactgaggttgcttgctccgatgtgtacgtacgtacgcatgcagtgaccctggggccaaacctttcggacacggtgaaggggaagttctccctggtggcgaagatcgtgcgggccggcggcgtggagaaggtgttccggcggtggttctccgcggacaagaacgagaagctgctgcgggcctcgcagtgccacctgtcgacgacggccgggcccatcgccggcgtgctgttcgtgtcgacggcgcgggtggccttccgcagcgaccgggcgctggcggtgccggtgccggtgcccaccccgcgcggcggcacggcgcgcgtgccgtacaaggtggccatcccgctgcgaaaggtgagggcggtgcggcccagcgagaacaagcaccggccggagcagaagtacgtgcggctcgccaccaccgacggattcgagttctggttcatggggttcgtcagctacgacaagtcgctgcagcacctggagcgggccgtcgcgtacgcgcagcaggcgcaatgacggcagccgccgccgccgcagtagctgacggcggggtagtgtcttggtttgtgtagctgggctagttggttctggacttgtgtttgtgtatgcgtacttgcgtaggctgcaacatgtccttgtacatctggggggatcggtggcctcgtggactaaccagctggttctcgggttggccagaggcgatcgatcggggcgtctgatctttttgggcgattggggaagacggaaaattcatcacgagtttgaaacagagagtggttgtgtgacagtggcgaaaccgccaccaatatccattcttttcttctcgagaaaaaattttactgt

SEQ ID NO: 132537 - DNA, 790 bp, Zea Mays
actattttcctcctttccccacttcgctctgtcctcccatgcgccggattaccactgaccacttcacagtcacagtagtacagagcagcagagtggagaagtagactctaggtgagatggcggccgtggtggcggcggtggaggcaggggtggtggcggtggcaagcgggaggggatgcagcagccggctggtgcggggcctctactggcgcctgcgcgcggttctgcggcggctgcggtcggagcgagccaggcgcggcaggaggttcagcttccactacgacgcgctcagctacgcgctcaacttcgacgacggccgcgccgcccccgccccggcccccgccgcggccgacctcgtccttgcccccggcgacaacgacgcgctacggtgaatcggcgtccgacgatccgctgccaagagccagatggggtctctcttccttgctccggacgccgcttgcttttttccactctcctgtggtctcgctttttcgataaataggggttgtgtaatggaaaaaaggaagatggtagggtggtgtcgcctccgcgttctgcgattctttgcattgacgcgcagctagctagctagggggattgcgcgggctcccggtgatcaggaaagcagcgcttcggcgctgcggtgacgccgtgatttgcagggagatcgagagaaacacatgtgttcttcttcgccgtctcggtgcttgcttcctttctcgagtagtattatttcttgcttgtgcttcagaattcctcgtgtggttcgatcctgcaaattttttcccca

SEQ ID NO: 132538 - DNA, 104 bp, Zea Mays
ctcgaaggaaccttcttcgagaactctgttacagaggaaacaatggttaataggaatagccaagtttagcaatctaccatctaaaaattctgaaacaaaaaaaa

SEQ ID NO: 132539 - DNA, 1446 bp, Zea Mays
gaatccctaaaccttatgcaatgcaacaacattcccagccgccgccgccgccgcccggccgtctcgtcccctctcgtcgccttctcagccaagctaaaacctcgctctccttgtccagtcagattctcctccgcaatccgccattgcgctccgttatgcaggcgttcgcgcgcctctcctccgctgcctccaggaaagtgatcgcgggtgtctctagcgcaaccacacggtcgtgctaccggacctcccgggggttggcgcatgcggcgtcgctgcctgcgcaggagcctccaccgaaggggcagaagaggattacgaagcaggagaggaggactaggataatggaatttattgagaattatagggcttcaaatgatggcaagtttcctactattaaaaatatccgtcagcaagtggggggcagtcactacacagcgcgtgagataattcaagaaatggagtataataatgcaaaattaccactgagcaatgccaaggcagctccacttcaaggaacagttgaagtcattgagcactccatgcctaaggatgaagccatagtggttgaaagtcatggaatactagaagtttctgagcactccatgaccaaggatggtgatgaagcggctcaaattcaaggaacaattgaagtttctgagcactccttccctaaggatgaatgtaagttggctcagtgtcaaggaccatttcgatttcctgagcactcaaggcctaaggacgacagtggaaatgttgctaaacatgatatggacactccagaaacctgtaagactgcagacttccccgctttatctgatcaaacagagagcgagataatggaggacctaacggacaaaccagaccctggaaaccagcaaagggaaatagaagctatcaaatttaatttgaagcattatgaaaaacccttgaatgcaaatgattcaaatgcaaagacgcatgccagagaagacaacccaaagcttgaggaatccgcgaacacaggacttttgggcagcctgaaatcttttgcttatggcatcagaaacttctggaaaaatctgtaaatgtctttctttttggccgtcgcctagcacgcttggtcctcgtggcttcatcaatttctaaagctatggtcactagaccgtgcatatgacggtgcatcacactattttacgctgcaaactatacggtttgcagagtggagtttgaaaatggaggcgagatgagtaaagtatctggagatagcctaatcggactaaaattgagaaggctacagaattgataacttgtccctttgttaagtgtttgcgatacagggccaatttgtaaagttctttttatgcgatacaactaatgtcaacttctcgctgtggcactttgataaagctagatacaaggattattgttactgccctgttgtgctggtggtaactttgtgtttgtcaa

SEQ ID NO: 132540 - DNA, 1564 bp, Zea Mays
agggtttcggacaaccgtctctttccctctctagtctctactgcttctcggccgtcggcggctctccgagtccggtatccccgtctccccgtcggcgtcgtcggggttgggttcatcacaccgtcccgtttcctatgcacgccgtcacgcgcagaggcacgaagcgccggtcgtcgagcaacaaggctgttgggcccaggcacgcagccaacggaggggccactgccatacggcgtgcattccgccacccgtgaagccacatcgtggttacttcccccagccgccaatcaaacctaccagttccagccagagccagccttccccttcgccatggcggcctccgccgcagctcaacgtagatctgcaggaagtaggacgacgtacgagagggcagagctcgaggcgctcagggacgccccgtcgaaggaggctcacgcgcggctctgggccgacgtccgcgctacccttgtcgcctccgggttctccggtgagtatgacgggctgctcgttgccgaggaggacgtgaggagcaggaggggtaatagggggatgaaggctatgagcgtgaggaagtggcccgaagaggcggcggcggcggcccggtttttgggcgtggcagagattggtgcacacagaaatggggatctggcggtttgtcacgaacaccgatttgtatctgctcatgaccatgctgggacgtctggagtggttgaagagtcgtttcatcaaggtgaagatgttgaatgtgaagatgacagtgatgatgactataacggaattctgaagcctgcatttgctgtggatggagatccagattttgagtctggtgagccacttgatggctttgagtaccttcggcgtgtcaggtgggaagctaaccaaattcctagagtcaaggtggccaagatatattcaagtgcagctagaaatgagcaaactccttatatgccagaaattccggatataccaaagtgcttacctgatttgcgtgcgtcaaaacaatgggaggacagatttatcgtcgactttgaggaaaccaggatggtgctctctgagcttgacaattctgatgaaccatctgtatctagtgggacaaaaatctcaacaaaacctggcagcgggacggagccacagactgacccgacgctgacaatgattcgcagcatggatgcagtgtcaagagctgcgacacttcggaactacatcgatatgattcagagcttggatgcactatcaaggaacaactgcatgtggctcttcgcactctgtgttgccgttcacactcccctggacgcggagacatgtgcctcactgaggtccttgctgcgcaagtgcgccagcatccttgccaccaagactgagatggacgatgaagtcgtaatgctgaatatactgatgacaatttcgggaaggtattttggacaggacgaaagctgaaaacagcaattgaaattggagatcaggataacaccattgcaatgctgaattctcaccgatagtttgatgtcagaatatattatatttattattatatatgtgaaagttatgtttcattttcttgtaa

SEQ ID NO: 132541 - DNA, 927 bp, Zea Mays
ctagctagctgttcgacccaacaccggactcctcccaccccgatcctctacccgccgcacaccccaatggcgaccgccaccgcgtccgtggcgccgccctccacctccacctcctcggtcctcctgcaccgccgtctcccttccccggcgcccgcgcccgcgtccgccgccttcccccggctctccggcccggccccgccgccgcgccgcgcgcgcctgctcctccgggtcgcgctcaccaacgaggtggcctcggacgacgtggcggccgaggaggccgcggccgcgcccaagatcggcaggcgggtgcgcgtcacagcgccgctccgcgtctaccacgtcctcaaggcgcccgacctggacatccagggcatggagggcgtcgtcaagcagtacgtctgcgtgtggaagggcaagcgcgtcacggccaacttccccttcaaggtcgagttcgagctcgccgtcgagggccagcccaagcccgtccggttcttcgcccacctccgtgaggacgagttcgagttcgtcgacggagagtgacagcgtcgagtgcgttcgggtaagcggcgacggcgagcgccgttcttatagaataatcaaggccgcggcggtcgctggtttatactgttccggtgcaggagctcgcgaggcaaggcatgtcaagtgtttgcttactcactgtctgtgctgctcaggcttcttcctcgttcggttcagcatcggtttttcagctgtggggaattaattgttcggatgctgtgcaccatcgatagtttataatagtggtaatttggccgctgttcgttggctatgctctgcgcttagttattttgctggctcttccaagagattcgtttgtctgattggtacacattgcattgaaacccgggattgtttccttggattataaaatctggctattgtata

SEQ ID NO: 132542 - DNA, 1549 bp, Zea Mays
atacgcactgacacgaatctcacaattctcaactgaacaagtccacgtcgaagagtctaacgcgttcgttgcgcttgcgcacttgcgccggccaatcatgttgcggccgccgtctcccgtcctctacgtccaggaaaagaagaccgccgtcgccggaatcttcggcgaccgccacttcttcgacgccgcctccttctctgacatccgtgccgcccgtgtcgccgtcgcggtcccgaacccgcaggcccagccacccgcctcccgccgcgctctcctcctccgttaccatcgcctcctctcctccgcccgtaatgacacctgcgccttcgacgagacgttgtacatcacctggcacgacgccttccgcccccacctgaagcacacagccgcctccctccgcttggagaaggccgccatcgtgttcaacgtcggcgcggccgcctcgaggatcgcggcgaccgtgagccgcgccacggaggaaggggtaagggcggcgtgcggggagtttcagcgcgccgcgggggcgttccgtgcggttggggagatgatggaagaggaagaggcgacgacggtggatatgagttctcaggcctcggcgatgctggagaggctcatgctcgcgcaggcgcaggagtgctgtttcgagcgcgctctcgacgcagggaaatcacagacagtgtgctcgaaagtggctaggcaggctgccctgtactatgaagaagcttatgctgcacttgttgctcctccgctgcagaaccactttgaaagatcatggatatcccatatccaattgaaggctgctctgttcaatgccgaagcttgttacaggtacactattgaactccatgggaagacagaaattggtgaggagatatctcgattgcaggttggaattaaggcacttgtggatgcaaagcgaactgcaagaggagctcctggacccctgtatgattatgctttcagactagaacaagatatgaacaagaacatggagacagcgaaagaggagaattttcgtgtatacctttttcgcattccagctgccgaatcattggcctctctaccatcagcttcactcgtccgttctgcatccttgagtgagatcttaaatccaaagacagaaaataccactcaatctccataaatggatgcatttggtatggtaaaattatggaacggtacacgaatagttgcacttgcatgtaaagatttccctctatagcagaaattttagggttgataatgtttattgtcattcttattttgttgctttgccggagcctaaataggtgcacaattcagatgataatatttgcagaggtgcaactaatatttgtgttgacacgtttgtgatatgttatgaacttatgatgccctcgcataggaagcttttttactgctaggtagtttctatttatttggtgcttttcaacttgaagtcatcatcagttctaccatcctatcctgttggggttttaagcaaaatgagctatgtgaactctattctctgtgcataaatatccttttcttgttacgtttttgttgtagc

SEQ ID NO: 132543 - DNA, 2072 bp, Zea Mays
tcgcccgccccccgcttccttggcaaagcctcgcctcccggctttccacgcgcggcatcaagctcctcatcggtgcagttcgcacttcgcagcgggcgggcgggacacgacactccacacacacacacacagagcgacacagattgcagctcggcacgttggaggcaggcagggatggagccgatgggcagggacggcggtggaggccacgggaggggctggaaggggaagggcgtgagctcgggctccgccgcggggaggcagctggcgccagttttagaagacgcgccggcggccgcattgctccggcccttgaagaagatccgcagccccgaccggcgcctcaaccgctccctgtccgcgctctcgtcgtcggctcccccttcccctgactcgtcctccgtttccaaccccatgtcgccgccgtcgacgcgacacatatttccgttcgcgtacgatccggctccggcggcatcgacgtccacggctgcgtcgccaaggctcctgccgctgttgcagtacggcagcgtgttccagcagcctctgccgccgcagcagcctttgcagcaccagcagatgatttcgttcggaagcagacagcaacagttcggggcggccgcggctcctctgttcccgccgcagctcgtggcgccgccggaggtgcagcagcaaatgctgctgctgcgctactggagcgaggcgctgaacctgagcccccgggggttccgcgccggggccggggccggggccgtgccgccggcgctgtaccagcagctgctgcgcgcgcccaagctctaccgcggcgtgcggcagcgccactgggggaagtgggtggcggagatccgcctcccgcgcaaccgcacgcgcctgtggctcggcaccttcgacaccgccgaggacgccgccatggcgtacgaccgcgaggccttcaagctccgtggcgagaacgccaagctcaacttccccgacctgttccttggcaagggccgcgtcggcgggagcggccgcaccagtgccagtgcagccgtgtcctgctcctcctcttcgtcgtctgctccgccgacgccggacgagaatcacgcgaagcaagctcagcggcatgacggtgagcagccgtgcaacagcgaagcgaagcctctgttcccggaagcagagcagccaaacaacttggaacacgaaccgaattctcagctccaatcggccgatcaccatggcggtgacggcagcacggtcatgtttcagccgtcggtggcgtcgagcggcatgtggggcccggccgaggaggcgtggttcagcgcctggggcccgggcagctccgtgtgggactacgacatggacaacgcccacggcctcttcctccagtctcgcttcgccagtgaggctgccagcatggactacgtgtccagcatgccggaagccccggcgacaccggcggcagggactgccgtggcctccgctgcttccctttcttctcctccccctcttcctcttccccgcagtccaacctacaggtggaaggactgaacatggcacacgatcttcacgcgcaggaagtatccaccggaatcgggatgctcacaagttgcagattttaagagtcggcttgtggcgtctcgcagcacgatcaccattcaccgaacaggggcatcgaaggaccaccattttatctggacctttccctctgactgttttttttttctctcccgatgaaacagcataaggaatcccagctggatttttaaggctgggacaaggatggcctctgtttcaaccgccatccttgttgatattccgacatgatatttaggtatttcaagcatgtgtcccttgttgcatggtttgcagttgcacagcggcatggagtagtgttctgtctttaagggatctccctaaaggcttggaagaggagacgggttttatgctctcctctgatctttagttgaatgtttaagttttttgcaagtactgcattgtgtactagtactactgcacaaatatgagcgtcagtgtgtgcgtgtgtgttgtgtgctttgggtctggaatatatgtatgtcattggcaaaacaactttt

SEQ ID NO: 132544 - DNA, 717 bp, Zea Mays
atggaacctatggatcagagaacactgcttgtcaatcaagcggctgcttttgttgctgttatttatgcatacttcatgagtaggcttagggtggcacaagctacgcgtcctcaaatcacatacggcccattaagtgctatggatgaggaaaggcaagcaaacctgaacaaaatttacaattgcaatgatgtagaatgtattagcatgctgcgcatgcgtagagctccattcttcaacttgtgtaacctgtttagggatagaaacttgctaagggacaccatacacagttctatagaagagcaagtggcaatgtttcttcatgtagtaggccacaaccaaagatttagggtcattcaccaaacatttaggaggtccatggagacaatttgtaggtactttagggaggttttgtatgcaactggtgaactaaggcaggagatgataagaccaccatcacttgaaacagctagtaaaatcaggaccagcccaaggtggtacccatattttaaggactgcattggtgcaatagatggaacccatgttcatgctagggttccaacaaagatttctgcagcatttaggggtaggaagcattatcctacccaaaatgtacttgctgcagtagactttgatctgaagttcacatatgttcttgctggctgggagggctctgcacatgatgccctcattctggctgatgctttagaaagggatgat

SEQ ID NO: 132545 - DNA, 1488 bp, Zea Mays
atggccaaggtcggaatatcagtggcaggatccaccaccacggcagcccggggttgtttagccgcgatgcgtgatctggccacctgggggcggcaggcacacacacatgcgagcggcagcgaaagaagaaagaaagaaggagcggagcggaggtgtcaggtggccgtcacatgcatgcgccacccattggatttactccggcctccggacgagctttttggatggctggaagatgaacaggacgacggcgtcctcctcgctgctctcggtcgcggtcgcctccacaccgctgcacgcacgcaccagggtgctcgtcgtcccgcggatcgcgacgcagctctcatccacggaggaggatgtcagcaagccttcgacgacaccaccagctccgacgaggacgccgaactagcggaggaggtgtccaacggcttcttcatcgtcgccaggctaccgccgttgccgacgtccgaggacccgagcccggtccccgagggcggggacgacttgggcactgcgaaggagtcgctggacaggactagactctaccgcgcgcgccatggcgctgctgaatgggagatgactttgcaatacatcgttgttttaagcgttgggctgactatctacttgcgattctctacatacgaggactccgaggatttggagaaagacctaaaagctttgatggagagcaagctacttagtggaactactctcattgtagaccgctactcctattcgggagtggccttttcagctgctaagggccttgacattgagtggtgcaaggctccagaaaatggacttattgctccagaccttgtaatatatcttgatgtacagccagagaaagcggctgaaagaggaggctatgggggtgagcgatatgaaaagatagagttccaaaagaaagttgcagagcattaccattcactctgtgattcgacatggaagtttgcactttgcagtgatattagtggaatgtcagagctaatgtttctaaaatgttccaaagctaagaaaaaacaagaacaccaaaagaaagtgaaatgcaggaatgcgtccaagcaagtgcatgctctcgaagtagctggaagagaaactgcacctcctgtgcctcgagaaaagtttgagaagagatttgggcagtcagatgcatttttggcttcaacattgcaagataatggtgaaggttgtcgcttcgacatgctcaaaagccttgatgattgcatccatgtgctaagttgtgggtacgagaataagacacaatgggggaaagaggttggttggatttatggatctgtcactgaggatatcctcacgggcttcaagatgcactgccatggttggcgatctgtgtactgcatgcccaagagaccagcattcaagggatctgcacctatcaatctcactgatcgtctccatcaagttctaagatgggcacttggctctgtggagatcttccttagcaagcactgcccaatatgttga

SEQ ID NO: 132546 - DNA, 1668 bp, Zea Mays
atgccgattttaatgcctctgggctgctgcagtgctgcgctagggaacccatcttcttcttccccgcgctgcctgctgcctgctcgagcttggagatggcgttggtgcggcgatgcctctgtggatccgaggaagactgcagagggagttctaagagacggcactgaatttgccgcgaaggttctgtcctcggaatccgagcaggggatcaaggagttcctagctgagatcgagagcatatcccaggtgaagcacgcgaacctcgtcaggcttctgggctgctgcgtacagaggaaaaaaaggatactggtgtacgagtaccttgcgaacaacagcctcgatcatgcgctcaaaggagcagcagcagatctaccctggagcacgaggtcgggcatctgcttgggcaccgccaaggggctgagctacctgcacgaggagcacgagccgaacatcgtgcacagggacatcaaagccagcaatgttcttctcgaccgagactacctgccaaagatcggagatttcgggctcgcgaagctgttcccggacaacatcacccacatcagcaccgcagtggtcggaacgagtggatacttggcgcctgaatacttcgtgcatgggcagctgaccaagaaagccgacgtctacagcttcggggtgcttgtcctggagatcgtcagcgggaggagggtctcgcaaacgatccagtcggacatgttcccggcatggatgatgtaccagcaaggcaggctgctagagatcgtggacgcgagcatggggagctacccggagaaggaggtgctccggtacatcaaggtggggctggcctgcacgcaggccacgcccagcagccgccccacgatgcgccagagcgagtgggacacaaccagaaaagggacaacagaattagaggcacagattcccaagaaacgggggcatattctattacaagatgactacaacatactataattatatatatagtaaatgaatgctgtcagctactggattcatgttgcctgcctaggctgctaatgaagatgactacataaacaatgtaacggtaacactgtcaagtactcaattctgtgctataacttataacttgcctaaaaacttagcactaataaaactggctacatgctaaggctccaacctactggggtccaactttcaactgaaccagagcacgggaaaaaaaagtgtccaactacagcgctgccctttgatccatggattcctggcatacacccagaaatgaaatggagccgcaagcctgcatcaatccctggttcaaccataaaacttccaggtcaacaattatgccaagttgacagcatggggtaacactggcgactggtcaacggcagtgaaattctgtatgaagtcatggccaccattcatacttcacagtttcttggcccttccataaatatattcgtcggtactctcatggccagtggtggcctgtgagagccttggaagcccacaagaagccaagaatccagggcttgtattcaatttgtggagacctcacagttcaaagcttcgtccactttcaaaatgtagtgcccaggcacatcattcatgcaggcatctaaggagcatggccttcgattctagaatatgttccataaggaactctttgcacggtccttggaaaatctggct

SEQ ID NO: 132547 - DNA, 1499 bp, Zea Mays
gaggagcctgcgttggccgccaccgccgccgccgccgtgctgcgctagggaacccatcttcttcttccccgcgctgcctgctgcctgctcgagcttggagatggcgttggtgcggcgatgcctctgtggatccgaggaagactgcagagcgcttttgggcatggaaaatctccggctgttctcctacagagagatcagagcaggcacaaacaacttcgatcagagtaacaagcttggacgaggtggttttggaactgtctacaagggagttctaagagacggcactgaatttgccgcgaaggttctgtcctcggaatccgagcaggggatcaaggagttcctagctgagatcgagagcatatcccaggtgaagcacgcgaacctcgtcaggcttctgggctgctgcgtacagaggaaaaaaaggatactggtgtacgagtaccttgcgaacaacagcctcgatcatgcgctcaaaggagcagcagcagatctaccctggagcacgaggtcgggcatctgcttgggcaccgccaaggggctgagctacctgcacgaggagcacgagccgaacatcgtgcacagggacatcaaagccagcaatgttcttctcgaccgagactacctgccaaagatcggagatttcgggctcgcgaagctgttcccggacaacatcacccacatcagcaccgcagtggtcggaacgagtggatacttggcgcctgaatacttcgtgcatgggcagctgaccaagaaagccgacgtctacagcttcggggtgcttgtcctggagatcgtcagcgggaggagggtctcgcaaacgatccagtcggacatgttcccggtgcgagaggcatggatgatgtaccagcaaggcaggctgctagagatcgtggacgcgagcatggggagctacccggagaaggaggtgctccggtacatcaaggtggggctggcctgcacgcaggccacgcccagcagccgccccacgatgcgccaggtgcttgccttgctgtcggaacggagatgctcccgccgagtttcgccgagcaccgcggccaccacacggcccctgccctggggggtttgcccgccggtccgctaatccatgcgtcgccgagggcgaggtggccggcggcggcgccgtcagcagcaacgtcgccgaagcaggtcctgagcctgaacgcgcaaccggcaatccggcatgtaactgaaactgatatagtcacgtgtgaggcggcgttcgttctgtcacgtaatcacttgcgttagaatttgattttctagtcttgttcgtgctcgcagtttggaccgggaaaaaagggtaggaggggctaggcaggtccataaacgagcatattgtttttaatctcaatccatatgagttagagaggattgagaatctgttcattttaatctcaattcatgtggattgaaagaaattgagtagatttaaatctctaacaactcaaatttctttctaattatttccagttacctgc

SEQ ID NO: 132548 - DNA, 2640 bp, Zea Mays
ccaacacccccacacgattgcgcacacaccttctcttctccgcgtgcagcaaacttcgttccctatcccaatccgtccccgagcgacctgcgcgtgcatggcggcaaccctcctgtcccacgtcgtctccgacctctgcatcggcaggccgagggtgctcacgctgccaccctccacccccgtcgcggccgcactcgccgcgctgcgcaccggagccgacccattcgtcttcgtggacgacgaaccggctgcctgctgccacgcgaagaccacgacgtacgtgaaagtcaccgtcgccgacatcctctgctacgcctgcggcgacgcgggcaacctcagggacgtcgcggccgcgctcagccggcccgtggcagtagtggtcgcgggcgccgtcgctagcggccacggcgtcacccaccgagtggacccgcagacgaggctgctcgacgccatcgacgtgctgctgaccgacggctgccaaggcctgctcgtccctctctctgcgcgcacccgcaagaggcaccaccagcaccagggccaggccccgtcctccgacgccggcgccttgttggccacgtcgtccgactgctgcgtgctgacgcgggaggacatcgtccgccacctcttcggctccatctcccacttctccccggtcgccgcgctcaccgtcgcgtccctcggcctcgtccgccgcgacgtcgtgcacgctgtccacgtcgacgacgacgggctcgacgtgatcccgcttttgcgcagggccgtctcggacggcacggccgtggccgtcgtcgccgacgacgacgcgttggtcggcgagatctgccccagcgtgctcgcctcgtgcgacgtcgaggcggtgtcggccgccttcgcggggctctccgctggcgacaccatggcgtacatagactgctcgctgtcgtcgcactctccgccagagttcttggtgcgcgccatcagagctcagctcgccggaaagggactggacgccatggccgagctcgtggaatgcgctggaaaggacaccgccgtccttcctttgtccccgtcctcgtcgttgtcgtcgacatcctctgacgaggactcaccgtcgggacgcgcacgacgcccaaggaggatgtcatctgggagcttcgggtggcggtccacggaggacgtggtggcttgccactctgagagttcgcttgtggcagtcatggcccaggcgcttgcgcaccgtgtagggtacgtctgggtcgctaatgagaccagcggcgcgctcgtcggggtagtgagattcgccgacgtgctcgcggtactccgggagcaactccggcctcagtcggtcagtcccaggtgctagctagtgctatgcagataaaccgtgatctgcgtgtcagctcgcgcaagaatcaagatctccgacgctaaaacagttgctagtggttctcttccgtgtcaatccgtctcagtcaagttcggactgaagatgtgcagagtttgtttgtttgtgtgtgtgtattttgaatgtgctaagttttttttttcgacaagagcgagctataactcggcccaagagcagttttagcccggaatttgggatggcccgagatctcgattcagtggaaaggctggaagccgcaatacggccccgtgaggtcgtgggctctcgcttcttttgggtggcgaagccggggaatcgtcatgagtcatgacgggtaaatttaattttgagtttcataccttttttctgagaataaagagtaactagaaacttgctcgcgccttgcgcgagttttttataacataattgaatagctgatttgatgtatatagacattaagtaaattgatgttgtgggtgtatataagcaatatgtatcttagtaatatatgtgtagaagacggtatgtaatatgaacgaaaaaatatgcaagcacgaatatgtttgtaccactgaaaagttgggatatgcaaatataggatcacgtccagattggatgtgttatattacagtgggttgtaagctaaccatagttgatagcaaattcctagttatatgtacatatttgttgaggcaccaaaatattggtcctaaagaccgcaaaagatggcatgtcagaactatagctacatgcctttctagttgtagtatttgtttcggcatggatatattgtttacatcaaaagaaagttcgtaggtactttgtcaggcaaatacgttttagatcggattacaccaaagtttgtagaagacatgtgtcaaaagcaagaaaatttggcgctctaaacatctgtgtttatttctcctgcacatcgtcatcattgctttggatatgtaagcttcctttcttgaacctacatatatttaagtagtaagtaatggtgggtttgaattagggtagaatagatcgatgtagatgcgaatataggaaataatttgtgagcaggttagtatcttaatgtaaagtaaagtaaagaacaaataaagttttttctatgatcaaaaggttcgtattttcttaaaatgtatcgtgcatggtacataaaacaaatatagggaacatggtatggttttgttttgtttaagtcatagtgtacaaacttattagtagcagttgattttttttatgtaggcacctgataggaagatggataataa

SEQ ID NO: 132549 - DNA, 1553 bp, Zea Mays
cgagcgacctgcgcgtgcatggcggcaaccctcctgtcccacgtcgtctccgacctctgcatcggcaggccgagggtgctcacgctgccaccctccacccccgtcgcggccgcactcgccgcgctgcgcaccggagccgacccattcgtcttcgtggacgacgaaccggctgcctgctgccacgcgaagaccacgacgtacgtgaaagtcaccgtcgccgacatcctctgctacgcctgcggcgacgcgggcaacctcagggacgtcgcggccgcgctcagccggcccgtggcagtagtggtcgcgggcgccgtcgctagcggccacggcgtcacccaccgagtggacccgcagacgaggctgctcgacgccatcgacgtgctgctgaccgacggctgccaaggcctgctcgtccctctctctgcgcgcacccgcaagaggcaccaccagcaccagggccaggccccgtcctccgacgccggcgccttgttggccacgtcgtccgactgctgcgtgctgacgcgggaggacatcgtccgccacctcttcggctccatctcccacttctccccggtcgccgcgctcaccgtcgcgtccctcggcctcgtccgccgcgacgtcgtgcacgctgtccacgtcgacgacgacgggctcgacgtgatcccgcttttgcgcagggccgtctcggacggcacggccgtggccgtcgtcgccgacgacgacgcgttggtcggcgagatctgccccagcgtgctcgcctcgtgcgacgtcgaggcggtgtcggccgccttcgcggggctctccgctggcgacaccatggcgtacatagactgctcgctgtcgtcgcactctccgccagagttcttggtgcgcgccatcagagctcagctcgccggaaagggactggacgccatggccgagctcgtggaatgcgctggaaaggacaccgccgtccttcctttgtccccgtcctcgtcgttgtcgtcgacatcctctgacgaggactcaccgtcgggacgcgcacgacgcccaaggaggatgtcatctgggagcttcgggtggcggtccacggaggacgtggtggcttgccactctgagagttcgcttgtggcagtcatggcccaggcgcttgcgcaccgtgtagggtacgtctgggtcgctaatgagaccagcggcgcgctcgtcggggtagtgagattcgccgacgtgctcgcggtactccgggagcaactccggcctcagtcggtcagtcccaggtgctagctagtgctatgcagataaaccgtgatctgcgtgtcagctcgcgcaagaatcaagatctccgacgctaaaacagttgctagtggttctcttccgtgtcaatccgtctcagtcaagttcggactgaagatgtgcagagtttgtttgtttgtgtgtgtgtattttgaatgtgctaagttttttttttcgacaagagcgagctataactcggcccaagagcagttttagcccggaatttgggatggcccgagatctcgattcagtggaaaggctggaagccgcaatacggcccc

SEQ ID NO: 132550 - DNA, 2259 bp, Zea Mays
ccgcgcagaccccgccggggcactcgtcggtgacgatgaccgtgacggcgcggcgcgagcagacgccgtggtcgaggcaccgcaccttgtagcaggcgccgcagccctcgccggacttgaacagcacggggctcacggcgcccacgcgcgccttcatcggcaccacgtccaccagcgtcccgtacccgcacgcgccgcctgatcatggttaattattcaacacacagtacgtgatatatatatagaaatattagagagagacatgtatacagtagtgctctgtctactatggaataataatccaaactaaagttgggcagtgggcaggcagatctaaccaatgctagccaaacggcgccagaatatttgtagggacgcagagaaatgcaactagctagatcgctctcgtgtatggacggacataacagcagttccgttgagaaatgatcgaaaactggaccgttgccacactggttgtctggttcacatggtcagggtacaaaataaaaatactgttgcgacctggcctcgttgtaataaaatatgtatagctgtaacctttgacttgcaagtgaattactgtgcactccggccagagtccatttcatccattgaccattgtacgtacgtaacacaagctagctagctacatgtatataaatatagttgtaacttgtagtaattgacttatggtgcgattggttgaatgtacaaagaggtatggaatgaggcgaccacgttttctatagtgttgggttgaaagtcaagcgggaacgaggtgaacaccggagtgatttttggaggcagcgtgttctaaaaatcgaggggacggtgtcgcccccgactcaacctactttgacttcaaaccaaacacaccattaattgcaagggaattcacctctctatacatacatacatacttgtgagcccgttttgtacgtgtcaggcggaaaatacgtcagagtgtcggtggactaattaacaagtacgcgacccggccggttgttggttcctatactatagtaaaagtggcgagtgaaggacccggccggctcagtggagcacactgcacacgaccatggtggctacacgctccattgccggccaccatcgtggcatcgtacgcacgaatcttaaagcctctctctgcttgacgacattgtctttaatctacgtatcaagacacaggtgtccttgctctatcggacttgaaggacaccaaaatgggacaatatatgggaaaaggtatttacttggaagaaaaaaggaaaatactagccatgcttgctgcgaatcgagaggtttaagtgtcatgcttaggctgagtccagtgcacagcctccctctcgcccctgccacgtcagctctcgcctgcactctcgcccctgctgctccagtgcacaggctgcagcaggctacagcctcaggctacagcacacgtggaccaatcagaagtcgccacctcactgtcgcctccactctcgcccgcgaagacgccatcgccaacgcgtcgccccgctctcgcctgcctatcgccgggcggtggcagtagcgcccgccgggtcgctctcgcccgcctctagccctgctctcgcctcctgctgggcgctatcgctctcgctatagcctgcattggcaccagccttacactgctcgcgttttaatttaccccaaaaaaaaacgaggatcatggttcacaagcttgggtgtaagtgcagtcgccattgttaattctttacagagagagtgtcatcatatatacactctcttctactcaggacgaaggatgttagaattgagtgtagagccatggagaggtacattaccgtcgctgccgtcgccctcggcgctgccgtaccaggtggcggtggccgggtgccactcggggtcgaccaccctgtgcgccgcccccgaagcgttcccggagacgaagaggcacgccgcgcacacgagccacgacgcgaggaggacggagaggcaggagctcgaggaggcggccatggcgcgcacgtgaagagctagcagagaaacggcggcacaagcaggcagcgaacgcctaccgacactcccgctgtcctggtgcagaacgaaatggccgagctcgctcgagtggtggtggtggtggtacctcctcctctctctctgggatcgcttttaaggcttcgagaagccccagtccccgatgcgctgagcgctcagaggcagcccctcctcccctgcagaaatggcgggccggggaagggacaatgggaatgcacg

SEQ ID NO: 132551 - DNA, 1634 bp, Zea Mays
cgcactgcactacactgcaccccgcctccgctgacgtcgacgcgcacgccgcatccgccgccttcctccctcctcatccgatctcttccttgcaagccccaagggcagtctcatctcatctcataaaagctgagctgttagcgccatcgccaccatcacatctttttcctccgcctatttgtactacgccactgttgtgatcctgcgccctggacctgggggacagagagacggagggacgtcggctgcatcctgccgccgcagtgccgcgaacaagctgtcgagacggagtgccagagaccagctcccctggaagtgcatgaactagtcagctacaagtttagtacatggagcagacgcgcacgggtggtgccggggagcagcccaggggggctcccggcgaggaagcggcgaagaggatcatcgttggcggagacgcgccggcgtcggggacgtctggctctggctgcttcgactgcaacatctgcctcgagtgcgccacggagccggtggtcacgctctgcggccacctctactgctggccctgcatctacgagtggctacgccacgacgtcgccgaagccggcgccaggagctcggcgaggcggcagtgccccgtgtgcaaggccgcggtgtccccggacgctctcgtgccgctctacggccgcggcgggagctccagcgccaagaagccgctggccagcatcccgcgcccgcgccggccggccctgcgacagagcacgcatgacagcggcagcggaggccaccaccaccaccatcggcacgcagagaccagcacgccagcccggtcgctgcggcacccagcccacgcccacgccgcgcagttcgacgccctcctctccgcgccgtttggggaccgcgggatgctgcactcgacgacgtcgacgaccggcgggatgctcggagggatggcggtggccgtcctcccgttggtgctccgcgggcaggcgcgggtgccgggcatgtactacccgagcccgtatcatctgatgagccccaggcagagacggtggcatgtggaggtagagagatccctgcatcagatatggttcttcctctgcgtgttcgtggtgctttgcttgctcttgttctgatttccgaagcaggacaccatcctgcgcctgcgggccacgagacgtgctctgtacatagcaaagggtgagatatggatatggtgctggtgcggcagtgacctatatttggtgattgcatgacggggcgttcaagatgttaaattgagaagcagctgagttgtggttctagaaaggagaaatcggtttcgaaactgcaaaggacccttgagaagattatcagaagccatcgtccacatgttcatgcgcagacagtaacacataagctactggtaatatagagcgtcagaaaaaaaatgcttcagtatctaaatgtcacgctaccattttgagcgctttgatgacctgtgcagctgtgctccctccatctcggtggtcaccagcaatgcagcatttaactctaaaagtctgcaatgtgtgcgaaaaaggaatgccactcgtggcagcttacatagctccctttgccaaaagaacaacagcaccttgattcaaaacgtcacttaagattgtgttaagatctat

SEQ ID NO: 132552 - DNA, 1012 bp, Zea Mays
atctcattcgcagatcgcaactcgttcgaccagaaacagacctgcacggctccactccaactccctcccaagccccaagccggcaagcccccaaccaccttccttttccacatccacaccgccccgggtttcctcacgcctccgccctcccacccgctcactcccgtccctatccaccgcgatggcctcccgcctcgccgtcgccgtcgccgtcgccgcgcccgcgtcgtctccttccccggtcggcaccgtcgccccgccccgcgtcgccctccgccgaggcctcccgccgacgtggcacgctctccgcgccctccctcgatcccgtggcgcggccgtcgtgtgccaggcccagggcggccaggacaccgccatccaagttcctgatgtgagcaaatccacatggcaatcacttgtggtggagagcgagcttcccgtcctcgttcagttctgggcctcatggtgtggaccgtgtaagatgatagaccccatcgttggcaagctctcgaaggagtacgaaggaaagctgaagtgttacaagctaaacaccgacgagaaccctgacatcgcgacccaattcggcatccggagcatccccaccatgatgatattcaagaatggtgagaagaaggacgcggtgattggagccgtgccagagagcaccctggtcacctgcatcgacaagtacgttggtgggaggtgaaatctcaatctgggccactagccttggacttccatatgtagacggatgggtatgtgtataccgttcatatcgaactgctgttgagtagttgtatgtagataataatgtgatgctcactccaataaatgcgattcaaggatgggcaagtcatctggatgaaaggttgcttttggtctagctttttaggttctatgtttcattcattgagttgtggtctgtatgtagatctgatgagtcatatgcagctaattttcctcacgtgaatcagcatctgattgttctcgattggtgagttaatcgatcaggagc

SEQ ID NO: 132553 - DNA, 1524 bp, Zea Mays
agacgaagaaaaccgcgcggttgcaagtccctctccgacgctgactcgccgactcccgcctggtcaccaccgtcatagaccgcgccggacagcccagttccgttccatcccatccaccgcgcggtgctcctccctgtccctcagaaaaaaaggcgcacggttcgcgcgtcccatttcacttgttccctcgcaccggcactgctccctccaccttactctgtcggttacacctctgcctctccctctccccttgccggccggttttctccgtccgtgcccatggccatggccatggcagagtggtgggctgcggcgacggaggccgtcgcggtgtacactgggttgactcctacggcgttcttcacggccgtggctgtggccgcggcgctgtacgtcgcggtttcaggactgtttgcgcggccggcgcagacgtcatcgaggaggcaggaggaggcggcggaggagaggaccttcgaaccactgccgccgccggtgcagctcggcgaggtgacagaggaggagctccgagcttacgatgggtccgaccccaagaaaccgctgctcatggccatcaagggccaaatctacgacgtcacgcagagcaggatattttatggacctggtggcccgtacgcatcgttcgctggcagagatgcgagtagggctttggcaaagatgtcatttgaagcaagtgacttaactggtgacatttcagggttaggtccattggaggttgaggccttgcaagaatgggagtacaaattcaagagtaagtatgttacagttggaataatcaagaagactgttccattctcagagggagatgctgcaaggagcgatgtgacaactgaaagagacatagttgcaggcattgttgaaagcaacagtgtgccagaaccagaggaaactggaatgacaaaccaagggagtgtagtagagaagataacagaatcaccagacatcgatgttaacacaagcagccatgaagatgcaaagaaggcaaaggaattgccagatccagatgtgacaaatacgagcagccaagctgatgcagtggacaagccagaggaaatcccaaatgcagttgtaaagaacaggagaagcattgaaggtgcaattgaggcaaaagaaacacctcaggtagaggatgggaaagatacatatcaacctgaagacgcaacagagaagccaaatgaagcaacagatgtcgtagatttgaagaacacagccagccatgaggatgctaagcaaccaaagaaaacccggaatgaagatgaaaaggatgtaagcagccatcaacatggtgatgagaatccaaaagaaacttcaaatgtagaagtcaagaatgcatagagctgccctgttgctgggaagctttctggctgtctggtagttaacataataaattgtaatgcacattgtggcctgtattcagttgtgaatcatagtatggagtataattataattgaaataagatgatgatgatgataacaataattataatgaaggtacacattgggtct

SEQ ID NO: 132554 - DNA, 1007 bp, Zea Mays
ccccctaatcgcgaacgagcgtctttctcctccgtccgcgcccgtttgctcatcggttttgcctgccggtgggggaccgcctgcacgagcagcggctagccagacgtacgggcttcgtttgaggctggagtcctgattggcaggtgcaagcacagagctcgatcgccatgtctttcaccggcacgcaggacaagtgcaaagcctgcgacaagacggtccacatcatcgacctcctcaccgccgacggcgtctcgtaccacaagacatgcttcaagtgcagccactgcaagggcgtcctctcgattagcagctactcttccatggacggcgtcctgtactgcaagacgcactttgaacagctcttcaaggagacagggaccttctcaaagaactttcaaggtggagcatcttcaaacaagaacgaccaggcaaaggctccaagcaagctatcatctgcattctctggaactcaagataaatgcgcggcctgccagaaaacagtgtatccattggagaagatgactctggaaggcgaatcctaccacaagagctgcttcaaatgctcgcacgggggctgcatcctcaccacgtcctcctacgccgcgctcaacggggtcctctactgcaagatccatttctcgcagctgttcaaggagaagggcagctacaaccacctcatcgagacggcgcagaccaagaagaacgaggccgcggaggccggaccggagccaccggcggacgcaggcgcggctgagccggaagcacccgcgcaatcggcgtagaacgtacaaagattagcagcaacgcaaagagaaatagagccgtacgtgtctatctcctctatatatacgaaccctgcatcagtaagtagtcgtcacaagtatatgttcttattttgtaaccttggcagcttggttcagtctgggattgtaacaagtgcatgttgaattgcttgttatgtattatgaggctttggattcatgacgatgaaatgagtatatgggtgt

SEQ ID NO: 132555 - DNA, 619 bp, Zea Mays
ccccctaatcgcgaacgagcgtctttctcctccgtccgcgcccgtttgctcatcggttttgcctgccggtgggggaccgcctgcacgagcagcggctagccagacgtacgggcttcgtttgaggctggagtcctgattggcaggtgcaagcacagagctcgatcgccatgtctttcaccggcacgcaggacaagtgcaaagcctgcgacaagacggtccacatcatcgacctcctcaccgccgacggcgtctcgtaccacaagacatgcttcaagtgcagccactgcaagggcgtcctctcgattagcagctactcttccatggacggcgtcctgtactgcaagacgcactttgaacagctcttcaaggagacagggaccttctcaaagaactttcaaggtaatctacagctgaatactgtgccccctatgtttctgaacccgtccacagcgcgtgatgctgtaacgctcaactctggtgcctgatgcaatgcaatgcaattcggaccctttaatttcgttgtgttaattactcaggtggagcatcttcaaacaagaacgaccaggtgcggttcctcaaatcttctacacaaatatggctcaaatgctcaataagttct

SEQ ID NO: 132556 - DNA, 753 bp, Zea Mays
agaggcatgtccactgccgcttgcccatggcaataggtatgtgtacgtacgtggtactcgctacgtcttcacttgaacgccgtgtccagggacgcctcggcgagcacgtcgagcggcgggaacagcgagaagccgccgtgccggccgtgaaacagccccagctcttcgccggcgaagtcgaggaacatctggtactcctccagcgcctccgccacctccgtctcgttggacgcggccgaggagtcgtccccgggacccagcagcagcgcctgcgactcctgcttgatcaccgcgtccttcctcttgaccacgggcgccgcggccgtcttgcggcggaaggagtccccgatgtccgagctccacaggcgcaggaagatgtccgcgggcctggcgcatgcggtcttcaagtccacggtggaggaggaggatgaggcggaggtggccgcgatggcgccgcaggaggaggaggaggcggcggtggcgaggagggagaggcgcgcctccgcctcgagcctggccgtttcccactgcgccatgtggcgcgcggaggggcagccggcggccgggccgggcgggggctcgtcgaggcccatccgacgcagctgcttcttgaggtgcgtgttccagtagttcttgatctcgttgtccgtccggccagggagctgcgccgcgatcatggaccacctgaggaagaaggaccaacaccagaaaaaaaaagaccatcaatatactttcaagtcccagcagtagcaa

SEQ ID NO: 132557 - DNA, 681 bp, Zea Mays
ggttaaattaaagaagtttcacagactataactctaaaataaacataatcagcagaagtactatatactagaggtaaggtcttaaaagtgtttgttttgatataatggtttaattttagtattgatgtctagttgcttttgagaaaacaattatattgatgttaatgtaataggtatatcataaaatatggtgtgggaaattgtgtgctttttaatgaaaataaaaaatattaatctctttgagctactgatcaggaagaactagagaagaaaatggctgaatatgctgagaagatgaaaaacaagaaggcaatcatccataagaaggccgaggaaaagagagcgatggttatggcccagcatggtgaagaaattctcaagactgaggagatggcagctaagtaccgtgccactagggtagctccaaagaaatttcttaggtgctttagagcataaggaaggtttgatttttatgctttcttatttgtgcattaaaatgccatggtgcaactttatcaacttatgtaattgttacccttcttaattgtttgtatagactactatttatggtgcacaaatgatactattggtgtataattagaccatcattgaccaaaatgaaaagcatataaatgtgaatgtagtacttatattctttaattgtaaatctattatttgatg

SEQ ID NO: 132558 - DNA, 883 bp, Zea Mays
atatattttatcagcgtgcggccacgtacacggtacacgcccccagctgcttcgaaaccaactccagaaaactcggcacagcctaggccgattcgcctgtgcctgtgcgtacgtgagctgcgaggtagatagatggctgcggtggtggaggcggcgccggctgcggagacggcggcaaaggccgtggcagaggaggaggccggcgtcaccgcgcctgggcctccggttggtggctccaactccaaggccctgatcgtcgttgacaaggtggatgataaacctttttctttgaataatatgccaaggaactccaatgatagagacattgctcttgcaacagtggaaatagagaagataaactctttgattaaagcttgggaagagaatgagaaggcaaaagcagataacaagactgctaagaaacaatctattattctttcatgggagaacacaaagaaggcaatcatagaagctgagttgaaaaagaagaaagaagaactagagaagaaaatggctgaatatgctgagaagatgaaaaacaagaaggcaatcatccataagaaggccgaggaaaagagagcgatggttatggcccagcatggtgaagaaattctcaagactgaggagatggcagctaagtaccgtgccactagggtagctccaaagaaatttcttaggtgctttagagcataaggaaggtttgatttttatgctttcttatttgtgcattaaaatgccatggtgcaactttatcaacttatgtaattgttacccttcttaattgtttgtatagactactatttatggtgcacaaatgatactattggtgtataattagaccatcattgaccaaaatgaaaagcatataaatgtgaatgtagta

SEQ ID NO: 132559 - DNA, 1207 bp, Zea Mays
aatctacagatatgaaccaagttatataaggtactcgtacaccgaacatgttcgatagaatgctctagtgacagcgaaaaaaccaaacaacaaaaaccaacgaaatccctgccatttttataggagacgacggtgcggggacaccacgctcccgcattcagtccctccagtcgttgcgtcggacgccgttgagcgttggtggcactgtgccagcagcagcgcgccgcgggtggcaaggcaaagggggcgacgaagaggaaagcgaagaaaacgtcatggggcttggccttggcgtgcgggcggcgcccttcacgtacgcggcgcacgcgctggccgtcgcggcggcggccatggtgttggtctgggccatctacttccgcggtgggctcgccatcgaggccaccaacaagaacctcatcttcaacgttcaccctgttcttatgcttatcggttatattatcatcggcggcgaagctataatggtatacagggtacttccaacatcgaaccacgagacaaataagctgatccatctagttctccacgggattgcacttgtccttggtgcggttggaatatatttcgccttcaaaaatcataatgagagtgggattgccaatctttacagtttgcactcttggattgggatagggacgattactttgtatggtattcagtggatagttggattcgttacattcttcttccctggtgctgcgccaaacgtgaagaagggtgttcttccttggcacatactctttgggctctttgtctacatcttagcactggctaatgcggaactcggctttcttgagaagctcactttcctcgagagctcgggtctcgacaaatacggcacagaggcattcttggtgaacttcacagcgttggttgtcgtgttgtttggtgcctctgttgtggtggctgctatagctccagttcgccttgaagaaccacagggttatgttccaattccagaaaactagtacaaatgaaatgtacatcatatgcagttgccaggattggctgttaccatatggagctaagatattcatctctctttattaaggagaagaagatcatggagttatcacgataagaagatagtgcatcttcattgtgtttagatacattctgtgatacttcaaaatttcagtatatgcaaaattgaatatcctgcttcataaatgtctgtatttgctttcat

SEQ ID NO: 132560 - DNA, 1245 bp, Zea Mays
cttgagctctcggtagcacgagaatctacagatatgaaccaagttatataaggtactcgtacaccgaacatgttcgatagaatgctctagtgacagcgaaaaaaccaaacaacaaaaaccaacgaaatccctgccatttttataggagacgacggtgcggggacaccacgctcccgcattcagtccctccagtcgttgcgtcggacgccgttgagcgttggtggcactgtgccagcagcagcgcgccgcgggtggcaaggcaaagggggcgacgaagaggaaagcgaagaaaacgtcatggggcttggccttggcgtgcgggcggcgcccttcacgtacgcggcgcacgcgctggccgtcgcggcggcggccatggtgttggtctgggccatctacttccgcggtgggctcgccatcgaggccaccaacaagaacctcatcttcaacgttcaccctgttcttatgcttatcggttatattatcatcggcggcgaagctataatggtatacagggtacttccaacatcgaaccacgagacaaataagctgatccatctagttctccacgggattgcacttgtccttggtgcggttggaatatatttcgccttcaaaaatcataatgagagtgggattgccaatctttacagtttgcactcttggattgggatagggacgattactttgtatggtattcagtggatagttggattcgttacattcttcttccctggtgctgcgccaaacgtgaagaagggtgttcttccttggcacatactctttgggctctttgtctacatcttagcactggctaatgcggaactcggctttcttgagaagctcactttcctcgagagctcgggtctcgacaaatacggcacagaggcattcttggtgaacttcacagcgttggttgtcgtgttgtttggtgcctctgttgtggtggctgctatagctccagttcgccttgaagaaccacagggttatgttccaattccagaaaactagtacaaatgaaatgtacatcatatgcagttgccaggattggctgttaccatatggagctaagatattcatctctctttattaaggagaagaagatcatggagttatcacgataagaagatagtgcatcttcattgtgtttgtatatgtctacactattgtcttaaggattagtagagatacattctgtgatacttcaaaatttcagtatatgcaaaattgaatatcctgcttcataaa

SEQ ID NO: 132561 - DNA, 849 bp, Zea Mays
aaactgaatcagaataataagttgatttagagtccatcacatgttaaacattgcaggttcaccctgttcttatgcttatcggttatattatcatcggcggcgaagctataatggtatacagggtacttccaacatcgaaccacgagacaaataagctgatccatctagttctccacgggattgcacttgtccttggtgcggttggaatatatttcgccttcaaaaatcataatgagagtgggattgccaatctttacagtttgcactcttggattgggatagggacgattactttgtatggtattcagtggatagttggattcgttacattcttcttccctggtgctgcgccaaacgtgaagaagggtgttcttccttggcacatactctttgggctctttgtctacatcttagcactggctaatgcggaactcggctttcttgagaagctcactttcctcgagagctcgggtctcgacaaatacggcacagaggcattcttggtgaacttcacagcgttggttgtcgtgttgtttggtgcctctgttgtggtggctgctatagctccagttcgccttgaagaaccacagggttatgttccaattccagaaaactagtacaaatgaaatgtacatcatatgcagttgccaggattggctgttaccatatggagctaagatattcatctctctttattaaggagaagaagatcatggagttatcacgataagaagatagtgcatcttcattgtgtttgtatatgtctacactattgtcttaaggattagtagagatacattctgtgatacttcaaaatttcagtatatgcaaaattgaatatcctgcttc

SEQ ID NO: 132562 - DNA, 345 bp, Zea Mays
gccggagacgcgggcaactctcagtcgacggcgcagccggatgttccggccagcggcccgcagcagacgaacgagccaagcagcagttcccactagcgaataaaagctagaatacacatcattttttttggctgaaacggcagcgtaaacagctctagcagttagcaccacattttttgtaattctgtgcggaagtcgtggagttaagtactattttgcctctatatataccaatatcgttaccatgttccaaactagtacatggaaataaatatatcaatcatattcatgtgtctgaaccagcaaaagaaattgcaacaaaaaagcagcccagacaatcaacag

SEQ ID NO: 132563 - DNA, 888 bp, Zea Mays
ccaagacaggaaataatgcagactccagtaccttcactttcttttctgaaacaggattttggctgtcatggagcatcacaaggctcaggctgggaaattgactatctaaggcgaatgaatgaaaacagaaaagcatgccgagagcaatctagatgcagtgtttcaacgcagccaaattcaagaacaagggatggctcctcaagaattctgagtgctcctccaattgaatctttcagatatgaaagaaataaagatgcccctttcagggaccagaaccgttcagatattgaatctttcagatatcgaagagatataaacacgcttttgagggaccagagcccttcaaatgaggttcgtaggtatgggaaaggcaggggaggaactaaagcacagagccatagggtaagaaaggatttcaaggcacaacctagcataaatcatgaaaagagcataatgccatccatcgagccaacatggactcctcttgacaagagagcgagacaaaaacttacatttgcaacatatgggaacgaaaaacaaagcaagctggtttggagacatcaaagcagccccggtgttggatgtggcttccctaaaaagtaccatgaagaaggtacgtagattatcaggtccagtaatgtcctggacacccagagcgtgttattttaggagaaggtgcccacatgtaagtttttttttaatgttttggttaagacaatccatgaaatatttcttcatgagaactcgccaccatcattaacctcgcaggagctgtcaatgtacatattgtttttagcactcctgggaatgattgaatgtatccttgttagacttatatcctgtctgtttcaacttatatgaaatttatgtgccactatcatcttctat

SEQ ID NO: 132564 - DNA, 501 bp, Zea Mays
atgcggactcgcttcctcaccgccgactacttcgcgccgtcgccctcggctgccgcctcctccgacctagccatagcgctagcatcccttcccttcccttccctccccgtcccgactcttcctcccgaaccccacctcaccccattcccgttctccgccgatttcctccccgccgttagtgtagccggcgatgatctcgactcgctccccttcgactccgcggtgaccgagctcctcaccgctgtcatcccgcagcccctgcctgtgccggatatccctgtcgctgacgagggcttggatgattatctctacggtaggggtgtttacggcaacgcttttagctctactgatcccgttgctttcagagtcttcaaggttttgcagaagaaaattgcatcgtttgatgacgaagagccagatgcttgtgccggcacctattcatttggtgtccgagacatgaaaatcattccagtactctacaccatctcatctaagttttaa

SEQ ID NO: 132565 - DNA, 498 bp, Zea Mays
atggatgatttacttttaggccaagttgatcaagtaatatctgttgaatctcatgatgttcaaagtgaagatatggagaagggtaagaagtcaggctcgggcaggggctacatttcttggaatgatgatatggacaaggcacttcttgacacattcgtggagtactacaacaagggtgacagatgccaaaatgggtggaagtctcatgtctacacggctgctatcaagaatgtccgagaaaagtgcaatgtggaaatcacaaaagacaacatcatgtcaaggaacaagacatttgacaagcaccacactatcatcaatggtatgctacaaacaagtggctttggttgggattggaacaagaacaagatatccgtcgatagtgattctgtatgggaggcttatgtggcgatagttcccactactactgaagttatgtgctgtaagttaggccatcaagtgcttcttgttatgttatgtaatggtgatagggaaccatga

SEQ ID NO: 132566 - DNA, 693 bp, Zea Mays
atgtctccagtgacttccttcggcatggtctccttggccacgatggcgctctgcacaaggaatttgtccttgcaatgcatgtccggtggcgcgtcccgctgcgcttgcattgtgactacaacgtcagctttggaccggggcgccaccatgccgttgtttggccgaacacagtactttttggggctcgttgtcttgaccttgaacgcgacctgcttgtctgtcttgttcgtcagctgcagcgtgcaggagatctgcttatttaactcgaatgggaaccggaggtcgacggggtcgatcccgagcagctctcctgactcggtgctcatcctggaacagaaactcctgcgcaatcgaacgggacgcaatccgcggtggtggtgggagcggcgaggtggggattcggaatttcgatgcctcccctccgtctctctctctctctgtgtttttttttctccgtctacctatattcctgaggcacctattcctgaagcagtggagcagaggaggaagcggaggaaaacgaagggtcgaaaccggggaaaagctcgggattttggaaggggcgagaagcagccctgggccctggctgctaccgctaccgctaccgctaccgcacaccggcgacgtggctacgcagaatactcgtgtgaacggacacgtccccgcgacgcgagtttgaggcggggaggatga

SEQ ID NO: 132567 - DNA, 441 bp, Zea Mays
tccacgcaatccacaaagcatccaacatatatcacaaaccacagtttcattctgttcatatgtgcaaaatgatgccaacaattagtcaaaaaaatctctcacaatcacaaaccgaacggctacagttcaagacctcaagtcgcttgcaagatgataacagctggtgttggtaactatgacttattgattggctaaagtttataatatgaatcagaaaattacaataggcatcagatcctatgataaacagaccactgacttgtacaacaacaagcgcacacagagcacatacaattttgtttagttcagaaaagccagacaagataagtcattacatgcgctcatctcttcatgaggaaccctagcagtattcccagaatagcaaccaccagtactaaaactaatgagaaaccaccatgctgcctgctgatgtctcgcctc

SEQ ID NO: 132568 - DNA, 2523 bp, Zea Mays
ggtgctactcggaagccttaaccattacgctagaggccctttcgccatttcaaaggaaactacgtagctacaaatctacaatgttataggaatgcttattttttagaatctactgtgttgcatcttactgttacaacttaatcaagtttgactgtttgacatactttgatggatcatcttgcaaattacatattcaccagtaagttctaagttctatagaaatggcttactttactgcatttcttttcttagttttgtaagatatgtttagttcatatttactagatcacttgtccagaagttatctctctgttatcttgcagcccctagttatgtcaaacactagtaggaattcctgtgttattctgtgttcataatatttattactctgtttgaagtacatgatctgtttgtggtttgctcttgtggaccagtagttcttctggaacatacttttatttccttttactagttttaattgttccttttatcattactttatttcagacaattgcaacagtatgtgtatttctagcgtcaaaagttgaagatactccttgtcccctggactatgtagttagagtatcctatgaaacaatgtataggcgggacactgctgcggctcaaaggatccgccagaaggatgtttttgagaaacagaaagcgctcattttgattggagagagattgcttctgacaacaattcgatttgatttcaacattcagcatccttatagaccacttcttgatgctatgcaaaatcttggcatcaataaaaaagaagtgaagcaagtagcatggaactttgtgaatgactggcttaaaacaacattgtgcctacagtataaaccccagtacatagctgctggttccctttacctggctgcaaggcttcacgatatcaagcttcctttgcatggagcacatgtttggtggcaccaatttggtgttgcaccaaagcctctggaagctgtcattcatcaaatgatggagcttgcggctgtgaacaaatcgaatcctgttcgtcccaatctggttaagccaaaggaaactttatgtgaagctaaactgagcttatctaatagcccagactctgtgttgaatcaatcaagcttgttaataagcagctctagtcctgatattggcgagaccagtgaccaagtgcaggtggattcttgtcaatacttgataagcagccatacgggtgattgtagggtctcatgtcctgacaacagttcgttggatacttctggtaaagctcatgatgaagagagattggatcaggccttaataaccaagcatgacagtgggatgatgccttctactagtaaccagacatcattagatgctactgtaggcactgagagcagtgctgaatatatgaagcaggatgtaagccattgcgatgacttcaatatcagagtcaatgaccaaagcttgaaccaggcgttaagaaatcagcatggtgatgctgtcccattacctgacatggtatcactagatgctaaggtggacaaggaaagtagttggtgtctggaaccattgattgcaaacttcgactgctgcattgacagcgttaatgtggatagcttgtgcactgatcagagattggctgatgttgcttcaggccccacagctgatgtgccatccgtgctgctggccaaggagaattctgatcctttgagtgcaaagctcgaaaatattgatgttgccaggataaaaggtttactgatgaagaggaagagccggagagagatccaaaaccaagccattgcttcagatggcctcagtgaagaagcctggattgagagagagctggagtctgggattgtcacaaaacaagaagccaattgtgccgccatctcagatgagctaagtgatgaagcctggattgagagagagctcgagtcagggattgtgaccggaccaacaaacgagcaggcgatcacttttgatggtttgagtgaaaatgattggatcgagagagagcttgagtctgggatcatcattgagccagcacctgctatcaagaagcggaagctggagtcaagctgttagctctttagctgctgcattcagaggccagattccaagcaggtgaataattacagatggaggtaccctgcgactagggcacatcgaagccaagagatgtcgcatagatgggaggatcaatattttccttttttttatttctttaaccaaacacctcggaatactttggcacgagggttgtgtgtacagtgggatcttcccagtttcttgaattcagaatcacacgaggtttgtgtgtacagtgggatcttcccagtttcttgaattcagaatcatatccactgtatctgttccttgtttgtgtaaatctagcatgcccgaagttcggctttaattagattgtaggtgtaactgtagcagggattgtctcgtgttaagcccgacgaaaaaatgattcagtgtaactgttactggtaaccaaagaaaattagttattcactatagacttattgttaacaaaagaaaaga

SEQ ID NO: 132569 - DNA, 2564 bp, Zea Mays
tctaccctgcggccttgcttctgttctctcgcgtcgttctcccgtgctccccgcgtgcgctctatctgtttctggtggcgacgacttggcggtcgccggctcgccgccgccgccgtgcacagtcctttattttggggaccttcaccggcgacgagcacccaccaggttgcttcacaaaacttacaacatccaggatacaactaataaggattccttcatctttatctggattttgaggaggttgctgagagcccatccagcagggtgtctcagacatactaatggacggggcgcccaagatccttgaaaaatcatcacatgaatgcatgtactcttggtacttcacccgggaagaactcgagaaattttcaccatcaaggaaagatggtattactgaaaacaaggagtcagaaatacggcatttatattgttcatttatccgggacgttgggatcaggctgaagctacctcagatgacactagcaacggcaatcatgctttgccatcgcttctatttacaccagtcccttgccaaaaatggatggcagacaattgcaacagtatgtgtatttctagcgtcaaaagttgaagatactccttgtcccctggactatgtagttagagtatcctatgaaacaatgtataggcgggacactgctgcggctcaaaggatccgccagaaggatgtttttgagaaacagaaagcgctcattttgattggagagagattgcttctgacaacaattcgatttgatttcaacattcagcatccttatagaccacttcttgatgctatgcaaaatcttggcatcaataaaaaagaagtgaagcaagtagcatggaactttgtgaatgactggcttaaaacaacattgtgcctacagtataaaccccagtacatagctgctggttccctttacctggctgcaaggcttcacgatatcaagcttcctttgcatggagcacatgtttggtggcaccaatttggtgttgcaccaaagcctctggaagctgtcattcatcaaatgatggagcttgcggctgtgaacaaatcgaatcctgttcgtcccaatctggttaagccaaaggaaactttatgtgaagctaaactgagcttatctaatagcccagactctgtgttgaatcaatcaagcttgttaataagcagctctagtcctgatattggcgagaccagtgaccaagtgcaggtggattcttgtcaatacttgataagcagccatacgggtgattgtagggtctcatgtcctgacaacagttcgttggatacttctggtaaagctcatgatgaagagagattggatcaggccttaataaccaagcatgacagtgggatgatgccttctactagtaaccagacatcattagatgctactgtaggcactgagagcagtgctgaatatatgaagcaggatgtaagccattgcgatgacttcaatatcagagtcaatgaccaaagcttgaaccaggcgttaagaaatcagcatggtgatgctgtcccattacctgacatggtatcactagatgctaaggtggacaaggaaagtagttggtgtctggaaccattgattgcaaacttcgactgctgcattgacagcgttaatgtggatagcttgtgcactgatcagagattggctgatgttgcttcaggccccacagctgatgtgccatccgtgctgctggccaaggagaattctgatcctttgagtgcaaagctcgaaaatattgatgttgccaggataaaaggtttactgatgaagaggaagagccggagagagatccaaaaccaagccattgcttcagatggcctcagtgaagaagcctggattgagagagagctggagtctgggattgtcacaaaacaagaagccaattgtgccgccatctcagatgagctaagtgatgaagcctggattgagagagagctcgagtcagggattgtgaccggaccaacaaacgagcaggcgatcacttttgatggtttgagtgaaaatgattggatcgagagagagcttgagtctgggatcatcattgagccagcacctgctatcaagaagcggaagctggagtcaagctgttagctctttagctgctgcattcagaggccagattccaagcaggtgaataattacagatggaggtaccctgcgactagggcacatcgaagccaagagatgtcgcatagatgggaggatcaatattttccttttttttatttctttaaccaaacacctcggaatactttggcacgagggttgtgtgtacagtgggatcttcccagtttcttgaattcagaatcacacgaggtttgtgtgtacagtgggatcttcccagtttcttgaattcagaatcatatccactgtatctgttccttgtttgtgtaaatctagcatgcccgaagttcggctttaattagattgtaggtgtaactgtagcagggattgtctcgtgttaagcccgacgaaaaaatgattcagtgtaactgttactggtaaccaaagaaaattagttattcactatagacttattgttaacaaaagaaaaga

SEQ ID NO: 132570 - DNA, 756 bp, Zea Mays
tgcatcacctgctgcatctgctgtggtgtcggctgcggcagcaccatgttcgcatctttcccgcccttgcctcctcctccttctcctccgccgcccttggtctgctggcccttcgcgccgccgtcgccacccttgggctgcttgtccttcccgccgccgccgccgccgccaagctgcagcttctggagctggctcaccacgtcaagcttggcgccccacagctgcgccggcttgcccgccttgttgagcttcttgatgacggtggccggatccatgaggccggacaccgtcaccttcccctgctctgcatctatgctgctctggtacacgcctgcagatcagcgcagcactttttcatttctattcctacttacgataagattacgagggggaaatgcgttttcagaacacagaagcagcaaatctgagcagacagaacagaaccaagcgtttactaggatccaaggcagtgagttgtgcgagcacaacacaagagagcaaagcccggggtcttttttaaaaagaaagaaagaaaaagaatgaagcaatttgacttagaagaatgtttgtttgttaccatcgatcttgtgcaggatcttcttgaccttcttctcgcacccatcgcagtggatattcactttcagcgcgcaggtctgggagtgaaccaaccatccaacagaagaaaaaaaagaacggatgttcagagaacaggcatgcacacacttcgtgttggaatgaacaaaaacaatgaacctg

SEQ ID NO: 132571 - DNA, 1120 bp, Zea Mays
gacaacccgcgctgtcgcgctcccttgccaccagccactagctaggacgtcgctgcttgcttccacgcctccttacggtttatccaagcacagcgagagacctttgcgcgtgtgcgctctcgttcggcggcatgctgacgaggcgccacggagggttccggctcggccggaagctgctcagcgtctggcgctgggcgctctgccgccgccggcgccgccgcggccgcgggtacctccgcctgcagccgtgccaacgaggaggaggcaccaacaaatccccgtcccccatggcggcgcatgcagtggtgagcatcaagatgatgcagcagcagcagcagaagcacgacgtctctgctggctccccgcggatgctcacgtgggggcggtcgctggcgcagcgggtgaggctcctgcgccggcgcggggaaggaggacggaaggaccggctgctggaggacgccgccgcggaggccaccacgcccaaggggcaggtggccgtgtacgtgggcggcgggggcgagtcgatgcgctacgtggtccccgtggtgtacttcaaccacccgctcttcggggagctgctgcgcgaggccgaggaggagttcggcttccagcaccccggcgggatcaccatcccgtgcgcggcctcgcggttcgagcgcgccgccgccgtggccgccgcaggcggaggcggcggcgccgggaagaaggtgccttctgtctggtggtagcagcacgtggccacccggtggccggtgtacatacatacacacgtgcatgcccatcaggatcaggcgggcctcagccggtcagccggccctcaggactcaggaggatcccgatcgattcccatgggccatggggactgacgatccttctatatttttttttctctctccttctcgttagtttgacttttcctttttgccctcttgcgccgtttgcttgtgtggattgagcatgtgcatgggatgcgaggaggatggatagttgtagtttgtttgagagatgaacaaggcttttttttttaatttagggtcagcataaacatgttcccattcccccccaacttgcaaagtccatcatcatatatatccatttattagagagcatctaatatgta

SEQ ID NO: 132572 - DNA, 863 bp, Zea Mays
gttgtcaaatctgtaatgtcagcaacacccattcaccaaatgctcgtcttgaatctgcccaaatggttctttaaggctgttcataaaaggagaaggggattcctttggaaagggcaagaacaggccaagggaggaaattgtttagtctcatgggccaaggtgcaaagaccttacatgtttggcagtcttggagtacattatctggaaaggatgagttgggcattgtgtatccgctggttatggtttatgaaaactgatccctcaaaactatggtttggtcttcttgttaataatcctaagcaagcccaagcattcttccaaatggccgtaactgtaaatattgggaatgttatttcttccaaattctggacagacaattggttgcaaggaaagagtgtggctgaccttgctccaaatctgatcctagcaatcccaaagagagtaattaagaagcgtacagtgagccaggcattatccaacagaggctgggtggttgatgtcaagggcgctctaacagttcaggttttcatagaattcctcaaagtttgggagcttgttgagggtatagttctacatcctaatgtcccagatcatttttcttggaagttttcatcttcaggtcagtatagcagaaaatctgcatacaatatgatgttcattggctccatcaaattcctagcttggaggaggatctggaaaacttgggaccctgcaaactgcaagttcttcatttggttggccattaataatcaatgttggactcactggtcaaacgtggactaccgcatcaggccgcttgtgccctttgtgatcaagatgtggaaaccatcaaccacattctagtatcctgtgtgtttgctagg

SEQ ID NO: 132573 - DNA, 1164 bp, Zea Mays
atggagacagtgcactggatatggaggtggcaggagaaggcgcactcgtcgtggtcagaggaggtgaggagctcacgtcgcgacctcaacaacaatgatgatgacaatggtgtgcctcccatggggccaccggctgaaactcccgccatctctatggagcctgatcgaccaaggcgggtcatcagtcgctcgacaaagatcgtgcaagttgaggaggatcttcgacgtgctctgatcatgtctgtcattggacgtgaagcagctggtagcgctgcagaggtttctgatgcgctcgcattgaggtttgccctcgacgctgatgcgctcgacctcaaacgtgctgcgccaaataccttcatcgccttgctcccatctgaagcgctggctggctgtgtttacaatgaacgcagaccgtttgtcgtgccccctctccggttgcacattcaacgttggtctagacaagccatggccaccggcagaagtgatctaccgttccttgtcactgtcaaactctgtggtgtcctggcacacctctggggattgagacggctgcacgcagacacggaagggggcgttaatttgggcgaattcaagctggatgcatggtgcgcaaggccggagcttcttccttcttccatggacctccacgttgtcgagctagcagttgaggggatgttgattcctcgtaccctgaccccttcattctctgtggtgttggcattaaagagcattactccctcgagctctgccccgctggccgcggttatggcgcctatcccagaagatgtcgcgcggttggagtttctttcggaaaaggttgtctcggcaaatgtttcaatcagcccgcaggcaatggacttcaaccctgggaacgagatctcccttcggatcattgaatctgcacagctggaggggacaacttttgaacttgttaattgtgttcctgcacctgttacattgactaccgctcttccttccattgaagatgatgcctgcattgatcatgttttaaggatttggtcctacactgtaaggattgagggactcatctcaaccgtggttgatggcagtttggtttctttaccacctcctgcgctgataacagatatacagaggaattctaatgtgggatcttctgcatggagaatgatgtttcaagggtga

SEQ ID NO: 132574 - DNA, 885 bp, Zea Mays
tttaacttttttttgtttataaacggccacaactgttggttgtttcgtgtctaccgatgtaacttttaacattgtttcaagacactatgatcacctgcgccaacagagttaatacatcagcacgcctagcgagtaccgacagtaacgcgaagggattcgaatttctcacagcaccacacgatttcgttacacctctgctcgaacaagtcagcagatcacacataattaccgaaagtgtcagcagcgaaagctcttactccgactagtgaccctccgactttgctggcatgctgcggacgttcttgagcagatcctgaatcttggatagcatcatcgtcggcgtggagtcccctcccgcaccgctgctgctgcccacgccgaccgttggcctctggttctcctgcagcttgatcttctcgaagaggaactgcttctctgcctccgcctcctccaggcgccgctttaggtacatgctggcatagtcctgctcggctgtcttggacttggtgagcgcaatgctctgcagacgctccgcctcctgccgggcctcgttcgccttcagctggaacatctccgcttccgcctgcttcaaccgcacgatgctctccagctcctccacctgctgcttcttgcgctgacgctctgccttcagctcctgggcttccctaaccttctcctccagctctcggtcgcaggcctccacggcgaggcgagccttcttgtaaagtcgcatcttttcttcagccacgagctccatctttctcacggcctcttggactacctctgctatgcggttgcaggcttcctggggtgtgatcagatgcccaacatcttcattttcagagatcttgggggagtccatctcaagctctgtgtgaagatatg

SEQ ID NO: 132575 - DNA, 1546 bp, Zea Mays
ccctcgcgtcgctggactctaatagcgcgacacgcgagaggcaatggctgtgcggtggtgcctcctgctgctcgtgttagtgttggctgcggccgcggcttgcgcggagaagggggagtgggacccggtgattcggatgcctggggagaaggagcctgcagggtcgcactcgcacagcggcgagggattcgatggggaggtggatgacgccgtcgggacgaggtgggcagtgctcgttgccgggtcctcaggctacggcaactacaggcaccaggctgatatatgtcatgcgtaccagatactgcaaaaaggaggcataaaagaggagaacatcgtggtgtttatgtatgatgacattgccaatagtgcactcaacccaaggcagggggttatcatcaaccacccagagggcgaagatgtttatgctggtgttccaaaggactacactggggaccaagtcactactaagaacttctatgcagttctcttgggcaacaaaactgcagtcactggaggcagcaggaaggtcatcaatagtaaagcagatgaccatatttttatctattactcagatcacgggggccctggtgttcttggtatgcccaatctaccatatctttatgctggtgacttcatgaaggtgttaagagaaaaacatgcttcaaatagctatgccaaaatggttatatatattgaagcatgtgaaagtggcagtatatttgagggattaatgccagaagaccttaatatttatgtcacgactgcatccaatgcagaagaaagtagctggggtacatactgtccaggaatggaaccaccgcctccttctgagtacattacctgcctaggtgatctatatagtgtctcttggatggaagacagtgagactaacaatctgaaggaggaaacaataaaggaacaatatgaagtgtcacagcattgtgcacaggtgaagaagcgtacttcagacttcaatagctatggtgcaggctctcacgtcatggaatatggtgacaagaccttcaagggcgagaagctttacctttatcaaggttttgatcctgcaaatgccaatgtcacaaataagctgctttggtcaggccaagaggctgtggtcaaccaaagggatgcagatattctcttcctatggaagaggtatgagctcttacatgagaagtctgaagagaagcaggaagttctgagggagatcaccggaacagtaaggcataggaagcatctggacaacagcatcaacttcatcggaaagcttctcttcggggctgagaaagggccttccacacttgaggccgtcagacctcccggccagccactcgtcgatgattgggactgcttgaagcaaatggtacggatcttcgaatcccattgcggatcgctcactcagtacggtatgaggcatatgagggcgttcgcaaatatatgcaacagtggcacgcctggcgcttcgatgaagcgagcgagcatgggtgcttgtggcggctacaactcggcgagatggagcccgttggctcagggctacagcgcttga

SEQ ID NO: 132576 - DNA, 221 bp, Zea Mays
atgttacgtttgcagatatggaccttggtggttttgtccacgttagggaagctggaagagtcctttctactcatttttatgctaacagtggtgttatggtgaaacagagtcttgcgtgtatgtatcaacagctaaactttaaacacgacattatcatagttaagtacaagaataataatctcttgtatcttattgtaaaatctgaaacagttatcatgtag

SEQ ID NO: 132577 - DNA, 702 bp, Zea Mays
atggcacccaacctcagccccgacggccccaagttcccctccaagccgagacgcggaggagaggccgacgacgtcgaggctgcggcgccggcggcggccgtccacagaccgccggtcggccgcgtcgactacctggcccgcgcgcagtggctgcgcgccgccgtcctgggcgccaacgacgggctggtctccgtggcgtcgctcatgatcggcgtgggcgccgtcaacgacggcgcgcgggagatgctggtgtccggcctggcggggctggtggccggcgcctgcagcatggccatcggcgagttcgtgtccgtgtacgcgcagtacgacatccaggtggcgcactcggagcgcggcgcccgcggcggcagcgacgacgacagcagcagcagcgacggcgagaggctgccgagcccgacgcaggccgcggccgcgtccgcgctggcgttcgcggtgggcgcggcggtgccgctgctgtcgggcggcttcgtgcggccctgggcggccagggtcgcggcggtctgcgcggccagcagcctgggcctggctgggttcggcgccgcgggcgcgtacctcggcggcgccagcgtcgtccgctccgggctccgcgtgctcctgggaggctggctggccatggcggccacgttcacgatcctcaggctctttggcttggcgttcaagacgcacgtcgtgtccgcataa

SEQ ID NO: 132578 - DNA, 2203 bp, Zea Mays
aggaatccatcctcagctcccatcattccagaccttgcgcaaagctaaactccccctgtcgtctgattacagatccgtttctccttcccgcacaattctaattcgatcgatccccggccatccgcgccggccagatttatgcagccatgcagaacggcgggttccggaacagtttgactactgacgctgccgctgccgctgcgctgagggaccggtttcgggatccgcaatggcgagcctgtcggactcggcgggcgcgggcagcggcggccgcgccggcgcggagctgatggtgccgcagttcctactcaaggtgctgcacgccatcctcgccgcgcggtcgccgcgcccgcacgcgcccccgcccccgcccccggcagcgtcggcgttccggaggcgggaccggtggttccacctgccgctccacctgccgcccgcggcggagcacctgccggagccgtctcccgccgagccgctcgtggtggacgtgtacctggccccatcgggcggcggaccagaggaggtgctcgagaggtggaccgtggcgtgcgagccctggccctcgcccgccgccgcgggggaggggctggcggtcaaccgcgcgtacaagcgctgcatcacgctgctcaggtcactctacgccatgctccgcttcctgcccgcgtaccgcgcctttcgcgcgctctgcgcgtctggccaggtgtacaactacgagatgggccaccgcgtcggctccttctcgacgcccttctcccgcgccgaggaggcgaccatgcgcaccgaacgcctcgcccccgtcgagacccagctcggccgcctcgtcgtctccgtccagtacctccccagcctcgccgccttcagtttcaacgccacttccctcgcgtccgccgcgatcatcacggattacgtcggcagcccggcggcggagcctatgcgtgccttcccagcttcgctcacggaggccgccggctcgccctctccgcagccctcgcggcgccccaacagctgggcgtcgccagcgccctggccgcacacgatgaggcaaccggccaaattctcgcctccgccggcccattacgcgtcgcccacgccctcgccgccgatgtttggctatctgcactcgcggtttagcggcgagactgcaccaatgagcataccgcaggcgggaggtggcaggggccctatgcaccagcaccatcagaacctgtcggaacccagtagggccttcatgtttcctccaccttcgccaaaatatctgcgaggggaggcagggaggcaggagtcacctacagagactaatcgatcgttcaagagggcagatggcatccgcatgggagatctctatgcaaacttgccgtctggttataagattaaggacagtagggatgaatctggcaggtcctctggtgtcttttcttctagtggttcaccacaacttggtttctcaagaagttcaagcagattgtccatgcaggatgatactgatgatgcggattttccttttgctgtggatgatgttgatccagattcacggccagggagtagtggtggaaaggacacaggggatccagttggttcgtcattccataaatcccaagatgctgccgttggatatcttgtccacctgctgaaatctgcacgtccactgcgagattttagctactcatctcatacatcaatgggcgaatctatcgaagcaggaagcaccagctctttcatgtcccgcaggacatccgacgcactggaggagtttgaatctttcaaagaaataagagagaacctgctagcacgtagtagatcttggttgcaagactcattggataaatcctagtgttgatgcaatccgtggttccatttcttaacactgaaagcataaggttctgtgactagggataataactgggaattctccatcgggttttagctccccatctctgtccccacgacgattttttttcccgcggggatcctcaccaatacttgccgggatatttctttcccatccccgttccccgcggggataaatcccgtcggggatcttgccccgcttaaattataattagattgtacttcatttgttagatgtaaaaagattgtcacttatacacattgttagatgtaaaaattattatgtgtacattaaaatgaacacatttgtacaacgagtgatctcttaataaaataattatttatttttatcatt

SEQ ID NO: 132579 - DNA, 1078 bp, Zea Mays
ctgctttcctcaccggcacagccacggcggcaatgctttactttacacgtgccgtgcatgtagtagcatggctgccatgctctcattgaacagtgctcctacacttgtagggcagggcagctgaagaaagataaaaacacccaaaggatcaactctccaagccgagacaacggcagccgctcgcgatcgctgtcgcgggcgtcatttgccctctgcctccacacaaccagagcgctccaggcagccatggcgcgccggaccaaccacacctccacggcagcggcggcgacaacaacaatggtcgcctcctcgccgtctcccccgcggccgccgcctcccgccagcgcgggagcgtgggggccctacgccagctcccgcgccttcttctccaacgtagccaccatcctcatcatcctggcatgcgtctccctgctcgccttcaccctccacgccgccgcgcgcttcctcctccgctgcctcgcgcgccgccgcgccgcgcgggaggaggcgcaggcgccggggcagcagcccaagctcccctccggcgccgccgccgccagcgccgccgccggctcggagcgcgccggcgccaccggtgcgggcgtgtgggcggaggcggagtgcgccatctgcctgtccgagctgctggaaggcggcgagcgcgtccgcgtgctcccggcgtgcggccacgggttccacggcgcctgcgtggagggctggctcgcggcgcgagcgtcctgccccacctgccgcgcgccgtcgcgggcgggagagccgtagccacgccgagccatggctgctgccgactgccgtgccgtgccacaggctctggagcaagctctgctccgatccgtcctccatgattcccagttggaggggcttgtttcagttattattatgggcgtagtatgtataaaaaatgcaaattggatggtggcggcctggcgggcgggctagtagtagttcgcatggattacaacatgttcggctcgatcgtttctcttccactatcatgattcatgcaaaagtctgcatttcatcatctagtgaaatccttggtcacgtaggaattgactgc

SEQ ID NO: 132580 - DNA, 189 bp, Zea Mays
acatcattttcccaactgttcccactgttggagtttggaaagctgcctgcactcatgaaggtggaggaaatatcacagaccattgattccaagaacttcacagtgcaaaactgtatcaagttttcaggacctttggctacaacctcagtttccaccaatgcaaaatttgaaattagaagccccaagcgc

SEQ ID NO: 132581 - DNA, 1711 bp, Zea Mays
tccgcgtccggccccaccgcgcctccgcacccgcaatccgcgcctccgcgcccgcaatccgcgcccccacccgacgcaaccctcgcccactgtcccgtccggcgatccgcgatccccgatgccctcccccacacgcagaaactcccagcctcgccgatcctcccccgatgtcgacgatttttggatgcccgggacgccttccatcggcgtccgacgaggttttttgggagcccggccttgtggcgcacgcggcctctggcgccgaacgtgtgagccgggatgctcagcggcgccatctcccgcctcggtgctcgcctccgcctccacgccgacccctctccggcctctcttcgcctccgcgtcctctccacccgcccaccggcgtccggcgaggttttttgggagcccggccccgtggcggacgcggcccctggcgccgaacgtgtgagccgggatgctcagcggcgccatctcccgcctcggtgctcgcctccgcctccacgccgacccctctccgacctctcctcgcctccgcgtcctctccacccgccgcggtaaacgctcctcccccaccctgtcgcccgcggactgcgatgacgagggacccctgcgctgcctcttcgtgctatcccacgaccccgagtgcccaccgtggctgctggtggtgcagccgcgcctccgccccggaagcctcctcgagtccaagctcgccgaggcactcaacctcgccaactccctcgaggagcgccgcgacggcttctaccacagcgagttcggcaccaagggcgcgtcgccgcacctcgtctgggggcagctccggcggatctacaacgggcccgccccgctcgcggacctcgccgtcggcgccgaccacgtcgcggcctacgacgcctccgggaaggtggtcctatggtggcgcggcgggggccggttccccgcgcgggccgacggcgcgttccgctccctcgtctccggggacagcttctcctacgccgtccaggccaacgcgtccgccgccgtccgctgctggggtccgcagggtagcgccgtgcaggagggcctcgccaacgcgtccgctgccccgtacctcgccgcggggggcacccgcgcctgcgccgtgctcgcctccggcgccgcgctctgctcgggctcggacgcctccgccgacgcgctgccacgagacctcttcggctacggcctcgccgtcggcgactcccacgcgtgtgcgctccgccggcccggccacaccgcggtttgctggaccctcgggggacccaccaccaccctgtacgagccgaccatggggatctccttcggcttcctcgtcgccgacggcaacttcacctgcagcaactccagaaaaaggcgcattcagacctgtccttaggttggattctgctgcagatctattttttatgccattcttatttctgctgcagacttgtaacgtatttttgataaaaatacgttggattccgaaatcgcttgatcttactctggttaaactaagggcacgcctaaactaagagtgtcgtattcctttcaaggttcacaatagaacccaaagatgctacataattgtgtggtcctacaataaatttcacttatgtggttaattaggcttattcacctcatacatattttgagcttacagagcacacatacctaattgagtttcaagtatgtggaatgtggtttcagttctgttcta

SEQ ID NO: 132582 - DNA, 330 bp, Zea Mays
atggttctcagctcacctttttcttttaaaatcagtagttggcacaaccactctatagcacagctcaaagcacagaagcagatgcctaagaaacacaacacccgtcggtaccagcgcagcgtgttgcctgttggtgacacaatgacgcgcaagacattatggtgtcgactaccacctccttggacatcttcaggaatgggtccatgttgtggtggtaccagccattttgcctcactcctatgaatgttgctctccagggcaggtgagttcatctttaactcacaacttgctgcacatcgtcggaccagtagtcatcacgtcgcgcatggc

SEQ ID NO: 132583 - DNA, 1827 bp, Zea Mays
cgccgagcactatatagcacgtgttcgcgtgcaccggcggcaaccacagcccaggctcgagactacaacgttacagcacaacacactgctgcacgtacatacgcagatagagaccagcagcaagctcgatcgagactcgagaggcatggggagtgtaccggaggagaaggccaagctgggcttcggcggcctggtgggcgacctgagggaggtgtacgagagcggcaggacgcagggcctggagtggcggcagtcgcagctcaggggcctcgtcaggctcctggaggagaaggaggaggagatcttcgacgtgctccacgaggacctggggaagcaccgcggcgaggccttcagagacgaggttggggttctgaagaagtccgtcgtcgacaagctgcaaaacctcaagaactgggcggctccggagaaggctcacacgccgctcgttgccttcccggcgaccgcgctggtggtgccagagccgctcggggtcgtgctcgtcttctcatgctggaacctcccaataggcctagctctggaaccgctctcgggagccctggcggccggcaacgccgtggtggtgaagccgtcggagctcgcgccggccacctcggcgttcctcgcggccaacatacccaagtacctggactccaaggccgtgaaggtggtggagggcgggccggaggtgggggagaagctcatggagcaccgatgggacaaggttctcttcactggcagcagccgcgttgggcgccttatcatggcccaggccgccaagcacctcaccccggtggcgctggagctcggctccaagtgcccctgcatcgtcgactggcttgacagcgacagggacagccaggtagctgtgaatcgcatcatcggagcgaaatggtccacctgttccggccaagcctgcatcgccatcgactacctgctggtggaggaggagtttgctccgattctgatcgagatgctcaagtcgacgctggagaggttcttcaccaagccagagtacatggcgcgcatcctgaacgagaagcagttccagaggctgagcggcttcctggccgaccgcagggtggcgtcttccgtggtccacggcggccacttcaaccccaagacgctgagcatggagcccacgcttctgctcaaccctccgctcgactccgacatcatgacggaggagatattcggcccgctgctcccgatcatcacggtgaagaagatcgaagacagcatcaagttcctcaggtccaagcccaagccgctggcgatctacgccttcaccaggaacgagaagctgaagcaacgcatcatagacgagacgtcgtcggggagcatcacgttcaacgacgccatcgtgcagtatggcctggacagcatcccgttcggtggcgtggggcacagcgggttcggccagtaccacggcaagtactcgtttgacatgttcagccacaagaaggcggtgctcaagaggagcttcctcgtcgagttcatgttccgctacccgccgtgggacgagaccaagatcggaatgctcaggcgcgtctaccgcttcgactacgtctcgctcttcctcgcgctcatcggcctcaggagatgaagcagacggcggagagtgcgtgaacaatcgagccaacagaatttgcacccacacccaacacacagttgctagtggtcaattgtcgttcatactgatcgatgaatatgtaattgtcccttctgtacaccaaaacgtctgtagtgtcgtttactcgttttatacgtgtctgtctatttatcgcaccaaaagatatttaataataatggattattatctttctagtt

SEQ ID NO: 132584 - DNA, 1439 bp, Zea Mays
gatctggccacccgagcacggccaaaaaggcgctcgcccagcgcttcaccagatagagcaacacagctcagctcagctcagcctcggaccagcagccggcgtgcggagctgcggtgcggcgtcgtgcgtgcgccagaacaggatgctgcccgccgggtgcggcctcctctcgtgcctccgcctcgacaagcagggcgacgcgggccgaaccgacccccgcgtcgcggacgagcccgccgcgtcgctcggcaagggcagcgggtcgtcggccaggcggttcgcgtgggccgagatcgagtccgtcacggcgggcttctcctcccgcgtcatcggccagggcggcttcagcaccgtctacctggcctgcctctcctcctcccgcctcggcgccgtcaaggtgcagcgcagcagcgagcgcctccaccgcgccttccgccaggagctccacgtgctcctctcgctccgccacccgcacatcgtccgcctgctcggctactgcgacgaacgagaggaaggcgtgttggtctttgagtacgcaccgaacggcgacctccacgagaggctccacggcagcggcaaggcgccgctcccgtgggcgcgccgcatggcggtggcgttccaggtggccatggcgctggagcacctccacgagagccgcgacccggcggtgatccacggcgacgtgaaggcctccaacgtgctgctggacgccagcctcgacgccaagctctgcgacctgggcttcgcgcacgtgggcttctcggccgcgctccagccgccggaggccagcggggccagggccagggcgtcgtcggcgccgcgcgccgtcgtcatgggctccccgggctacgtggacccgcacttcctccgctccggcgtcgccaccaagaagggcgacgtgtacagcttcggcgtgctgctgctcgagctcctcacggggagggaggccatatgcgccgacacggggcgccggctcgccgccgcggtgggtcctacgctcggcgaaggaagagtagcggaggcagtggaccggaggctcggagacgagtacgacacgcacgaggcggccaccgtggcggcgcttgcgctgcggtgcatcggcgacggccccgggacgcggccctccatggtggaggtggttcgcgagctccaggagaagacgaccgcgctgatctcggccgctggatgcaaacctgccggcaagatgggttcctgagctgtattgtcggccgaagaagaccgtaaataccattagctttgtttagagagagtagaaggtgaaggtaatgtttttttatttattttacttatataagtttcttgatgtagtggattagtagtagttgaatcggattacatagaaaaatttccgtgatgtcagagttcgttgcagagagtctcgttaatcaaatcgccaaaataagctcgtccaatccgtt

SEQ ID NO: 132585 - DNA, 2666 bp, Zea Mays
ccagagggggccgtaagtatctaatctttctttttcctagagagagacgggagggagtcggggactgagagagatgggtgtagaagcaagaattctccccaattctgtgcctgaattgctttcttagacaaatgacagctgctagtactagtagtacgtatctgtagaccggagacaggagagggactgtgcgctagtcgcgggaattaagcaaaggtggtggggtggtggccatgctgcaccaccacggtggcgccgggtccccttacatggccccgacgacggctgacacgggcatggacccgttctcgccgacgccggcgacgcggcccgctgtgtctgtcaccgccataccacccccaccgacgatgcagttgcggccggcgggagcgggaccgagtgctgatttcgaggaattgccagcgggcggcgccggcgccggtgccgcggccagcctccaggacgacgacatgcagatgcaggccgactacggcgccagcgccgcgggagcgtccggctcgggcggcaaccggtggccgcgcgaggagacgctggcgctcatcaggatccggacggagatggacgccgacttccggaacgcccccctcaaagcgccgctctgggaggacgtcgccaggaagcttgccgggctgggctaccaccggagcgccaagaagtgcaaggagaagttcgagaacgtgcacaagtactacaagcgcaccaaggacgcccacgccgggcgccaggacggcaagagctaccgcttcttctcgcagctggaggccctgcacgccgcggcgccgcagccgcagcccccctcgggcatgaccacggtgcaagctggccctcatcatccgatggcattggcatggacggcgggccctacggcgctgggccctgccgctggcgccggcctgccggacctcagcttctcgtcgatgtcagggtcggagtccgagtacgactcggacgacgacgacgacgatgatgccggggaggagggcctcggcaggggcgagtaccacagggagatgatggcgatcttcgaggggatgatgaagcaggtcacggataagcaggacgccatgcagcgcgtgttcctggagacgctcgagcggtgggaggcggaacgcacagcgcgcgaggaagcgtggcggcgccaggaggtcgcccgcatgaaccgcgagcgcgagcggctcgccagggagcgcgccgccgcggcctcccgcgacgccgcgctgatcgcgttcctccagtgcgtcggcggtggtcaggggcagcccgtgcggctccctccacacagcgccggcgccagtgtcgtgcccgcgccgccaaagccggactgcgcccctccgtcgccccggctcgacgcggctgccacctcgcttcagcagctggtgcccgcgcagctcaaggcggtggaggccttggcgtgggcgggaggcgagggcggcgggtccacgtcgtcgcggtggcccaaggaggaagtggaggcgctgatccaggtgcggaacgagaaggacgagcagtaccatgatgcggggggcaaggggccgctttgggaggacatcgccgccgggatgcgcaggatcgggtacaaccgcagcgccaagcggtgcaaggagaagtgggagaacatcaacaagtactacaagaaggtgaaggagagcaacaagaggcgccccgaggactccaagacctgcccttacttccaccagctcgacgccatgtaccgcaagaaacaccgtggcgacagaggcagaataaccgcagctggaccgaacatgcaggacagcccgagccagcgcgagctcgagggaaagagcagcaacgatgttgacattgacaaccggaagagtgatgaacagggaaacgtgcatacttctcccgtcagcggcaaccgtgatacagcaccaacgaccacccggccgccaggtgacggcgccaaaaacaagacggcggaggacaacttgaaacgaacgaatgtgcagctcaagcaacaacagcatgagtttggaacggacgagacggacagcgacgacgacatggcaagaaaccacacagcctacactgaagaagacgacgacgaagccaaaataaaatacaagatggatttccagaatcctaatatgatagggagcagcagcaatatgtctgcaccaccaccacccgcagcagcagcagcgacgacggctgcggcaccgacgacttcagctgccccaacgagcaacaccttccttgccgttcagtagagggcaatgctgcaggaccggtgccagctgatcagcagttcagcaccacctttttccggcccataatcaccaagtatacctgccctgcctttgaaccatccgaataccatttattgatttgttctgtgataagtaccagatcatgaaaggttaaaaaaaaactagtagtagtaagactgaagaacagaagaggtaccagaggcgcccaaacagaaagttcttttcttttttcttaccataggtcatgttatactgtagcccattgctcacaattgtacattcttgtgtcagtctgaacttccagtaatcttatccgatagaaatcgatcgtgggatttggagcggtgaatcgaccgtttgtttcaggcataaatgacctttcatttcaatcgctcagataacatattgctgatt

SEQ ID NO: 132586 - DNA, 1587 bp, Zea Mays
ccagccactccacttgctactactacacacaaacacagctagccggcgctgccaggttggctttggcgagcaacgacgacgacgacggcgctcaggactcaggtgctttcggttcaggcggaggagggcatggagcgcggcgactgccagttcacggtggtgccgccgcggcagtacgacgaggcccagttcatgcaccagctgatggtggccggcgaccagcaggaccccgcgggcgcggggcggggagctgccgccgccggcggggagaggaagcggcggttcacggaggagcaggtgcggtcgctggagacgacgttccacgcgcggcgcgccaagctggagccccgggagaaggcggagctggcgcgggagcttggcctgcagccgcgccaggtggccatctggttccagaataagcgtgcgcggtggcgctccaagcagctggagcatgactacgccgcgctcagggctcagttcgacgcgatgcacgcccgcgtcgagtcgctcaggcaggagaagatcgcgctcgccgcgcaggtagacgagctgcgggggaggctgaacgagcggcaagaccagagcggcagctgcgaggtcaacgacgcggaggcggcggcggacgacaagaggaacaatagcaccagctccctcgtgcaggacgacggcgccacgccgccgccggctgcagtagacgcctccgaggactcggcggcgaccggcgagtactacgaccacgtcgcgtacgagtacgatggcctgcacgaccccttcgtctgcgccactccggacctgtgggatacgtggccgctgctggagtggaacgcggtggcctgaaacctcgatcgtgtactcgtcgtcatgtctctgtatctagtgcacgtgtggtggattcatggtgattccttatatagctagctagccccaactagctaccgagccagttgatccggggagggatcgacgggtaacagacgatagagagctgggtaattaggaatcaggagcgaccggcggctgtggagggaaaagagggatcgatcgacaatgtccggccaccgtgcaccttaggatccatgttcgtgagagaggtggttcagacttcagagccgaggcaaatggtgtcgcacgtgggttacgcttacgcatgctgttgctctgcacgtattccatcgcatgttctagacgctcctctccgttcgtcgccgtcgccagttagcccatctgtctaggacgttcgtcgtcgtagtaccggcgcctaaggacaacggctacgctccgagcgaggacgacgtcgccttcgacggggccgggacagagtcactctcgcacacaggagatgacccccctttccgcttgctcgtttggaaggatgcaggcgatgcgatcgtcgtgtcggccatccattcaccccggtgctgttgcgcggggcgcaaaggcggaggaggaaaaggtcgctgtcgagaatttggaacgttctggaccggtggcccggcggccagatgggtggcggaaacgactcaccggacgagaaagcgacgcccaaccgaatcacaagtacgcaaaatgttcccacgagctccccga

SEQ ID NO: 132587 - DNA, 1421 bp, Zea Mays
ataacaaccgcgagggaaacaacagatcccgctcccgcctctccgttctactactactcctttccggcggaccggcggcggaaccgcctaagcaaaacggatggccccgagaggcggccgcgaggaggctagttctggctccgaggatgaggaagaggaggccggtttctccaggagctacttcctggccaaggagaaggagccgtcatccgtgaagaagcgcgcccgcgccgccgcaggcaagctctccgacctcaatctcgtcgacgagcaggtgttgcgtgcatcccttgcacagatccccccgaagcacaaggaagaggtggagtccctgacgagaagctacaaggaccagtaccgcaactggctgttcgaactaagatgcggttttggtctcctgatgtatgggtttggatctaagaagcagttgctcgaggattttgcctccaccaccttgactaatttcactgtcgttgtaatcaatggctaccttccggccgtcaatttgaaacaggtcatagcaacaatagctgaaatgttctgggatcaaacaaaagctaaacgcaggaaacgtgcaggaacaaggtcccagttgtcacagcagtttccgtcacaatcaacagagggtatcatctcattcctaatgagacagacatctgacgatgtggatgatcacgtgtgccttcttattcataatattgacgggcctgctttgcgtgatactgaatcacaacaatgtctagcacaaatttcttgctgcccacaaatccgtgtcgttgcatcaatagaccatgttaatgcccctttattgtgggacaagaagatggtgcacaaacagttcaagtggagctggtaccatgtcccgacattcgcaccttacaaagtcgaaggcgtgttctacccattgatccttgctagtggtggtcacgcccaaaccacaaaaactgctcttgttgttctgcagagtctgacaccgaatgcacaaagcgttttcagagtccttgctgagtatcagttggcaaatgagaaggaggaaggtatgccggtcagcagtttgtatacaaaatgccgtgagcgctttctggtaagcagccaagtgacattgaatgcacacctgacggagtttaaagatcacgatctggttaagaccaggaagcactctgatgggcaagattgcctccgcattcctcttgtttctgacgcgctggagaagttgctgcaagaattggcttgacattttgcattagcgcatttatttttcatggatgatggatgggttcactgaagtatttgtagttttctctgcccacgtggaactgaaggatcttgtccttattgaaggaaaatgtattaccatggaaagaactcagatgagcatgccattgcatggattatttataactcggattccggaactgaaa

SEQ ID NO: 132588 - DNA, 699 bp, Zea Mays
tatactccacccataatcacaaaaggaagtaagtaatttcttcatctggtggtggtcttgttcaatcctcatctcgatcggggaggccgccaaccaccatatggcgggagggaaggtttactcgttcgaggaggtgaggaagcacagcgaccgcaaggactgctggctcatcatcgccggcaaggtgtacgacgtcacgccgttcatggaggagcaccccggcggcgacgaggtcctgctggcgtccgtcggcaaggacgccaccgcggacttcgaggacatcggccacagcgcctccgccaaggagctcatgccccagtactgcatcggcaaggtcgacgcggctaccttcccggccaagcccgcctgcgtcgtcaccaaggacgacgccaggtcgtccgagaaggccgcgacgagcgccggcgcttgggccacgctcctgcagctcgccgcgcccgtcctgctgctggcgctggccttcgcgctgcagcagaactatgccagggccaaggcggagtagacaagatacagatagataccatcgttgattccgctgagtcgcggccgtgcggcctctttggaagcatctgaattacattttcttcctggcaaaattaactactcgtggtttcgttactttcgtaataatggttacattttcttcctggcaaagttctttttgtcaaccgtttgggtgca

SEQ ID NO: 132589 - DNA, 2232 bp, Zea Mays
caaaaacacagcacagttgggtgatttctgcttgatcccatcgaggaaatgaacgatttccgtaagctcttttcattcaattctacgaggttgcagatgccgaggaccacaactccacaaggcttgctcatttataatggccttgtggagtccgaggcactgattgatagtagttcttgctctagccgcaccgccatggagatcaaccccgcggacgagatcgacaagtgcgaggccggcggcggcgcggagccgcaacctgcagatccggagcccgatgccgccgcggcggtcgagcagcagcagccgtggcgcgagcagctgacggcgcggggcttggtggccgcggcgctgatcgggtccatgtacaccgtcgtcgtcatgaagctgaacctgacgacggggttcgtgcccacgatgaacgtgtccgccgcgctgctggcgttcctggcgctccgcggctggacgggcgcgctgtcccgcctgggcgtcgccggcgccaggcccttcacgcggcaggagaacaccgtcgtccagacctgcgccgtcgcgtgctactcgctagcgctctgcgggttcgggtcgttcatgctgggcctgaacaggaggacgtacgaggcggccggagtgaacacgccgggaaacgtgccgggtagcgtcaaggagccaggattcgggtggatagccggcttcctcgtcgccagtagcttcggcggcctgctcaccttgatccccctcagaaaggctttggtcatcgactacaagctgacgtacccaagcgggactgcaactgctgttctaataaacgggttccacaccccccaaggagacaagaatgcagagaagcaagtacgtgcatttctgaagtactttgggatcagcttcctatggagcttcttccagtggttctacaccggtggcaacgcctgcggcttcgctcaattccctacgtttggcctcaaggcctggaaacactcgttcttcttcgatttcagcatgacgtacgtcggcgccgggatgatctgcccgcaccttgtcaacctctccgccctcctcggggcggtcctctcctggggaatcctgtggccactcatcagcagacgcaagggctactggtaccctgcagacgtaccggagagcagcatgaccagcttgtatggttacaagtccttcgtgtgcatagctctgatcatgggtgatggcatctaccacctcgtcaaggtcctcggcgtcaccgccaagagcctgcatgagcgctcaaagctcagacgcagcaacaaccgaggtagcagtagcagagtggccgacgaggacaacgcggccgcgatcgacagcctgcgccgcgacgaggtcttcaaccgagactccatcccggcgtggctggcgtacgctgggtacgccgtcacgagcgccgtcgcggcggtcgccatcccggcgatgttccggcaggtgcggtggtactacgtggtcgccgcgtacgcgctggcgcccgtgctgggcttctccaactcctacggcgccgggctcacggacatcaacatgggctacagctacggccagctcgcgctcttcgtcctcgcggcgtgggccggccgcgacgacggcgtcgtggccggcctcgtcggctgcggcctggtgaagcagctggtgctcatctccgccgacctcatgcacgacttcaagacggcgcacctcaccctgacgtcgccgcgctccatgctcgccgcgcaggccgtcggcgccgccatgggctgcgtcgtcacgccgctcacgtttctcctcttctacagggcgttcgacgtcggcaaccccgacgggtactggaaagcgccgttcgcgctcatctaccgcaacatggccctcctgggagcccagggcttctcggcgctgcccacgcactgcctgccgctgtccgcggggttcttcgcgctcgccgtgctcgccaacgtgatgaaggacgtcctgccgccgcgctacgcgaggtacgtgcccctgccgacggcgatggccgtgccgttcctcgtcggcgccagcttcgccatcgacatggtggtggggaccgtggtggtcttcgcctggcactggattgacggcaacgagaccacgttgctcgtgccggcggtggcgtcaggcctcatctgcggtgacggcgtatggactttcccttcgtcgttgctttctctggccaagatcaagccacccatctgcctgaaatttacacctggaagctag

SEQ ID NO: 132590 - DNA, 2536 bp, Zea Mays
ttaagggtttggactaatgattgtaagtgagatttttagataacgagttgttctaagtgagatggcatgtgtggttgacatttgaaggatttctctatataaatcccggctactattaacatctcaacctcaccatcttctcttgatcgaggcagggatcaagcgaccgagacccgccatggaccttgcacggagcggcggtgccgctgccgcggacgacgggggggagatcgagaggcacgagccggcgcccgaggacatggagtccgaccccgcggcggcgcgcgagaaggagctggagctggagcgggtgcagccgtggcgggagcaggtgaccctgcgcggcgtggtggcggcgctgctgatcggcttcatgtacagcgtgatcgtgatgaagatcgcgctgaccacggggctggtgcccacgctgaacgtctccgcggcgctgatggcgttcctggcgctccgcgggtggacgcgcgtgctggagcgcctcggcgtggcgcaccgccccttcacgcgccaggagaactgcgtcatcgagacctgcgccgtcgcgtgctacaccatcgcgttcggtggtgggttcggctccacgctgctgggcctggacaagaagacgtacgagctggccggggcctcgccggccaacgtcccgggcagctacaaggaccctgggttcggctggatggccgggttcgtcgcggcgatcagcttcgccggcctcctaagcctgatccccctcagaaaggttctggtcattgactacaagctaacttacccaagcgggactgcgaccgctgttcttataaacgggttccacaccaagcaaggagacaagaacgcaaggatgcaagtccgagggttcctcaagtactttgggctcagcttcgtgtggagctttttccagtggttctacacaggcggtgaagtttgcggctttgttcagtttcctacgttcggtctgaaggcctggaagcagacgttcttctttgattttagcctcacgtacgttggtgcggggatgatctgttcgcacctcgtgaacatctccaccctccttggtgccatcctgtcgtgggggatactgtggccactcatcagcaagcagaaaggggagtggtaccctgcgaacatacctgagagtagcatgaaaagcttatacggttacaaggcattcctctgcatagctctgatcatgggagacggtacataccacttctttaaagtcttcggtgtcactgttaagagtctgcatcaacggctgagccgcaaacgtgctaccaacagagtggcaaacggtggagacgaaatggccgcgcttgacgacctacagcgtgacgagatcttcagcgacgggtctttccccgcctgggcagcttacgccgggtacgccgcgctgaccgtcgtctcagcggtcatcatcccgcacatgttccggcaggtcaagtggtactacgtgatcgtggcctacgtcctcgcccctctcctcggcttcgccaactcctacggcacggggctcaccgacatcaacatggcctacaactacggcaagatcgcgctcttcatcttcgcggcctgggccggcagggacaacggcgtcatcgcgggcctcgccggcggcaccctggtgaagcagctggtgatggcgtccgcggacctgatgcacgacttcaagacgggccacctgaccatgacgtcgcccaggtccctgctcgtggcgcagttcatcgggacggccatgggctgcgtcgtcgcgcccctcacgttcctgctcttctacaacgcgttcgacatcgggaaccccaccgggtactggaaggcgccgtacggcctcatctaccgcaacatggcgatcctcggcgtggagggcttctccgtgctgcccaggcactgcctcgcgctctccgctgggttcttcgcgttcgccttcgtcttcagcgtcgcccgggacgtcctgccgcggaagtacgccaggttcgtgcccctgcccatggccatggccgtgccgttcctcgtgggcgggagcttcgcgatcgatatgtgcgtcgggagcctggccgtctttgtctgggagaaggtgaacaggaaggaggccgtgttcatggtgcctgcggttgcgtccggtttgatctgtggagacggcatatggaccttcccgtcttccattctcgctctggccaagatcaagccaccgatttgcatgaagttcactcctggaagctagaaacagtattgacagttcacagaaatggagaatgcgagatacactgaaggcatcaactgtggttggttgaagtgttgaagagcaagtcctctggtcgtcgacatgaagcggagccatatgtcccctgtattatccttgttgtgcatgtgtgggttctccaagggctacagcactcgagattttctatagagttgatcatatgttttgttgtcatgttgggttcaacctatgtttatgttttgggtggaaaaaagatacaactgtacatttttaacagaaattaatgctcattttggttgtgtatttaca

SEQ ID NO: 132591 - DNA, 675 bp, Zea Mays
aggctttggaatttctcagctggaaagtttctgaagacataccggccatgttaacacaaagtactgcatcccagcggcgttttctatcacaaatagcaagtatattgtcagtggctccgaagacaaatgtgtctacctataggacctccagtcaagaagaatagtgcagaaactggaaggccatactgatactgtcattgcagtctcatgtcatcccaaggaaaacatgatcgcatccggggcgcttgacaatgacaagaccgtgaaagtttgggtccaaaaggaagaagattgatgagctgcctggttacgctcttatctacattggctgtcatgtggactgactaatgcagctcggcgatgatattagtgaactcaagtgttctgtagagctattcctgggaggctgggatcatgtaagaaagactcaacacaacaatgcttgaacttcatttgttgtgtttctgatcccctaatctttgatgcggagctgtttttgttatctatccatattagctcaatattttgaagtctgtacgctgggttacagattcagttgctggtcatagatgctgaagtatattagctgaccttgttatggttcattgatttatttttttaagttgtggcacatagaaggaagaaaaaaaagaactttaatgtggctgctgtgct

SEQ ID NO: 132592 - DNA, 956 bp, Zea Mays
aagcttgtcgataaaaaacttggaaactaacagaacatgtccggaaataatgtctcaagttcattagtgaaggggaaaatattacctacattttttactcaaattgtggccattatggcatcatatgattcctactgccccaatggtcacctgaatacttgcagaactagaatcaaaactttctttttcagtctataactgcccctcacttatatttagctgtcttatgcagtcgtcataccttctgatgcaaggaaacaactggctctttctatgaaaagagctgcatctcttgtgccggatctctatgccgttgatgcagactatgcgctttctgaattgtgcaaagatgaacagaagcttgagaaagtgcttctgagcagggagtttcatgtaagcttgggaagacctgttgcagttcaggtgcatcagattgactcatttattgcaatgcttcgccagaagttccagccacaacaacagtactggatggagttcaataaatgggagcactttgtcaatgatgattgtacacggtcatttgtttcactagaagttacaagaactggtttgccagagataacgaggcagatacttatggtagatgaagtgtatcgattgcatggtcttcctgaattttacacgaatccacggccacatatatcgttggtgtgggcattgggtgatgtcagcggcaaactaaagcaggcactaaaggacattgaaaaatatcagagcagtatgagctcattgcaaaaatgtaatgttcgatgcaagttcagtcgtgtagtttgtaaagtaggcaagaaggtgcatgatatctgtaaagttgcagattgaaacacacatgaattacgctcgataagcttcgaggtactgacctcgtatggtctggaccaattcttgtgattggaacagtgaaacacaaattcattctcttcttcagtacatggcag

SEQ ID NO: 132593 - DNA, 1724 bp, Zea Mays
gagcactgcaccgtccagcacacaccagcattgtcctgaggcctgagcagcgctgcgccgcccaaccagaacgacgaagcggagccagcgccaacgaaccaactaaccaacggacggaagtggcgaggcaaggccgccgcgaagccgagcaatagcccccctcctctacccgttcctctcctgccttctcgggatctgcccgcccgccttgtgcccccgcggttggagctccggctgcacgacaccatgagcccccgcgcgtagaggctgggagagagggagcggggaacaaagttaggcaccaacaaagttaagtggggaggccagagctggccagctgggtcgctgttctaccagagggatggacgggagcgccggctccttcgtcgccgtccgccggctctctggctccgaccgcgccgccgccttccaccactcctcttcgggtgcctcgcctcgcctcgcctccgatttggatagttcctcgtttgttttcttacatagcggctgttgttgctcccgcctcacgccacgggacgatgcttatggttatggtctgtgctgtccctacgctgttgctgcagcggaggtcgtgacggggtcgacggcgtggatcgggagggggctctcctgcgtctgcgcgcagaggagggacagcgatgcgcgcctttccttcgatttgacgcctgtgcaggaagaatgcctacagaggttacaaaaccgtatagaagttcagtatgatagtgcaaacagagagcatcaggaagcactacagtccctttggtgtgcttcttttcctggcaccgagcttcgggggctaatatcagaacaatggaaagagatgggttggcaagggaaagacccatctacagattttagaggtggaggcttcatctccttggagaatctattgtacttcgctaggaactatccaaaatctttccaggaactccttcgcaagcagaatggtgaccgtgcaatctgggagtatccatttgctgtcgctggtgtaaatataaccttcatgctcattcaaatgcttgatctccaatcagttaaaccgaggtcattgttcggagcagttttcctaaagcttctttcagaaaacgatcaagcttttgacattctctactgcataaccttcaagctgatggatcagcaatggcttgacatgcatgctacttacatggacttcaacacggtcatgaagtctacacggcgtcagctagaaagggagctgttaattgaagatattcagaggattgaggacatgccatcatacaggcttctggcccggtagctagaagaaactgaaaccttaacatggctacatattgcaaggcggcttgagatgctaatggatcgcaacttatgtggacggcgacaatcttgaaatgtagatgacatgtatccttgtgtgttaggtacttgtggtctctggtaacctgatctctgaagattacaaggtagggtttttttcctggtgatagaatgccacgtagggtaactgaagtgtctgatcagctcccatggccaaaaaaaaaatttgtagggtgtgttattacaatctggtcgttgtccatcataccacgaaaggaagtattcctagggttgttgttgtaaacaggaggatttgggaaagatgatctgtgttgtctcccatttgcttgaagataagaggctagttctttttaagtgggcagctactctgctgtgccgctccc

SEQ ID NO: 132594 - DNA, 1586 bp, Zea Mays
gagcactgcaccgtccagcacacaccagcattgtcctgaggcctgagcagcgctgcgccgcccaaccagaacgacgaagcggagccagcgccaacgaaccaactaaccaacggacggaagtggcgaggcaaggccgccgcgaagccgagcaatagcccccctcctctacccgttcctctcctgccttctcgggatctgcccgcccgccttgtgcccccgcggttggagctccggctgcacgacaccatgagcccccgcgcgtagaggctgggagagagggagcggggaacaaagttaggcaccaacaaagttaagtggggaggccagagctggccagctgggtcgctgttctaccagagggatggacgggagcgccggctccttcgtcgccgtccgccggctctctggctccgaccgcgccgccgccttccaccactcctcttcggcggaggtcgtgacggggtcgacggcgtggatcgggagggggctctcctgcgtctgcgcgcagaggagggacagcgatgcgcgcctttccttcgatttgacgcctgtgcaggaagaatgcctacagaggttacaaaaccgtatagaagttcagtatgatagtgcaaacagagagcatcaggaagcactacagtccctttggtgtgcttcttttcctggcaccgagcttcgggggctaatatcagaacaatggaaagagatgggttggcaagggaaagacccatctacagattttagaggtggaggcttcatctccttggagaatctattgtacttcgctaggaactatccaaaatctttccaggaactccttcgcaagcagaatggtgaccgtgcaatctgggagtatccatttgctgtcgctggtgtaaatataaccttcatgctcattcaaatgcttgatctccaatcagttaaaccgaggtcattgttcggagcagttttcctaaagcttctttcagaaaacgatcaagcttttgacattctctactgcataaccttcaagctgatggatcagcaatggcttgacatgcatgctacttacatggacttcaacacggtcatgaagtctacacggcgtcagctagaaagggagctgttaattgaagatattcagaggattgaggacatgccatcatacaggcttctggcccggtagctagaagaaactgaaaccttaacatggctacatattgcaaggcggcttgagatgctaatggatcgcaacttatgtggacggcgacaatcttgaaatgtagatgacatgtatccttgtgtgttaggtacttgtggtctctggtaacctgatctctgaagattacaaggtagggtttttttcctggtgatagaatgccacgtagggtaactgaagtgtctgatcagctcccatggccaaaaaaaaaatttgtagggtgtgttattacaatctggtcgttgtccatcataccacgaaaggaagtattcctagggttgttgttgtaaacaggaggatttgggaaagatgatctgtgttgtctcccatttgcttgaagataagaggctagttctttttaagtgggcagctactctgctgtgccgctccc

SEQ ID NO: 132595 - DNA, 477 bp, Zea Mays
atggcgacgtcctctggcaggccgacgcaccccgggcagcgcggggacggcggccagaagttctccgggcggcagcggcagccgtgggcgacgaagagaaacgccctggccggccccgcagcgggaagcacatactctgctttccatccaatcctcaaatcaaaccatgggaacaagctgagttttgatgagggcgcagcggccgagcgccttgacgtcgccgatgcgattgaggacgtcgagcaacactgcgtcgtggagccgctcgaactggtcggcggactcggcctcgccgcacgggcactcctcctgctgctgccgcgccgcctccatcccacggaggttgcaagcagccaggcacacatatcgggatcggggagaggagcgcgcgtgctcgtgctcccgccacctcctggctcgccgccgtccgcggccatctcgccgtccgagtccggcaccgcggccccctggggatga

SEQ ID NO: 132596 - DNA, 1288 bp, Zea Mays
aaagcaaactgcagacccattggtttctctctttcctcctcccctcccgacttctccaaatcgccgccttttgttgatttatctattttgcttgcaattagtttttggaaagcaaggtgggtgcaatgggaggtagcggaacgctgatctcggtttaccccgaggagctcaccttcttgtttgagctggagaagccgtgctattgcaatctcaaggtggtgaacaacagcgagcatcatgtcgcattcaaggtcaaaacaacatcgccgaggaagtatttcgtccggccgaacgcgagcatcgtccagccatgggattcttgcacaataacgattacgctgcaggcacagaaagattacccaccagacatgcaatgcaaggataaattcttgattcagagcacgaaggtggccgccagtaccgacatggatgagatcccccctgatacgttcaacaaggaagctgataaggtaatcgaggaaatgaagctcaaggttgtctacacattacctagctgcggaggttcagatgactctagcgtatcatctttaggaagccggagcttcaaagcagcgtctgacgatctgatgatgctgaagaatgcaagccttgaagagatccagacaattcagcggttgaaagaagaaagagacaacatgcttcagcaaaatcagcaaatgcaacgtgaattggatgtgcttcggaggcgcaggagccgcaaaggcgatgcaggtttctccctgacgttcgccgcgtttgctgggctaataggtctcatggtggggctcctgatgagcctcatcttctcgtccgcgccggctgatgcgtagtaagatgcaagaaaaggttgcagccaacggaagcgttgttgagttgagaccgacgtgggggaaaaggctcgctcgggggaagaagatgaaatttctgctctagtctccatttttctttcttttgctgtttgcatcctagttattattatacgaaatggcaacggggtgcagatctttccttccactcgtgcttggttcatcctccagtttgtattttgccccttggtttctcattctttctgtatttagtatgtcaagacggaacctgtattcattcaacgattgggtagtgaagaactgagctaggagtaccaagaaagggtgatgatgggtgttagggttatacggaacctgtattcattcaacgattgggttttagggttctagttctacacgtacgcacgcatgtatgcttccacatccagtacgcagcaggtaaaaaatagacgttcgatgtg

SEQ ID NO: 132597 - DNA, 1260 bp, Zea Mays
agtgccacgggcccaagaagtgagtgctgccccgtcaatgccgctgggagccaagaaaagcaaggcaaagcaaactgcagacccattggtgggtgcaatgggaggtagcggaacgctgatctcggtttaccccgaggagctcaccttcttgtttgagctggagaagccgtgctattgcaatctcaaggtggtgaacaacagcgagcatcatgtcgcattcaaggtcaaaacaacatcgccgaggaagtatttcgtccggccgaacgcgagcatcgtccagccatgggattcttgcacaataacgattacgctgcaggcacagaaagattacccaccagacatgcaatgcaaggataaattcttgattcagagcacgaaggtggccgccagtaccgacatggatgagatcccccctgatacgttcaacaaggaagctgataaggtaatcgaggaaatgaagctcaaggttgtctacacattacctagctgcggaggttcagatgactctagcgtatcatctttaggaagccggagcttcaaagcagcgtctgacgatctgatgatgctgaagaatgcaagccttgaagagatccagacaattcagcggttgaaagaagaaagagacaacatgcttcagcaaaatcagcaaatgcaacgtgaattggatgtgcttcggaggcgcaggagccgcaaaggcgatgcaggtttctccctgacgttcgccgcgtttgctgggctaataggtctcatggtggggctcctgatgagcctcatcttctcgtccgcgccggctgatgcgtagtaagatgcaagaaaaggttgcagccaacggaagcgttgttgagttgagaccgacgtgggggaaaaggctcgctcgggggaagaagatgaaatttctgctctagtctccatttttctttcttttgctgtttgcatcctagttattattatacgaaatggcaacggggtgcagatctttccttccactcgtgcttggttcatcctccagtttgtattttgccccttggtttctcattctttctgtatttagtatgtcaagacggaacctgtattcattcaacgattgggtagtgaagaactgagctaggagtaccaagaaagggtgatgatgggtgttagggttatacggaacctgtattcattcaacgattgggttttagggttctagttctacacgtacgcacgcatgtatgcttccacatccagtacgcagcaggtaaaaaatagacgttcgatgtg

SEQ ID NO: 132598 - DNA, 1490 bp, Zea Mays
agtgccacgggcccaagaagtgagtgctgccccgtcaatgccgctgggagccaagaaaagcaaggcaaagcaaactgcagacccattggtttctctctttcctcctcccctcccgacttctccaaatcgccgccttttgttgatttatctattttgcttgcaattagtttttggaaagcaaggtgggtgcaatgggaggtagcggaacgctgatctcggtttaccccgaggagctcaccttcttgtttgagctggagaagccgtgctattgcaatctcaaggtggtgaacaacagcgagcatcatgtcgcattcaaggtccatgtcttccctgtcccgtgaagttcacctcagaatctccgcgttttgctcgctgaaaatcgaaccaggtttgatgttgagatgagaagaaaactagactaggtctggtcaaatttgccccatttattttcaggtcaaaacaacatcgccgaggaagtatttcgtccggccgaacgcgagcatcgtccagccatgggattcttgcacaataacgattacgctgcaggcacagaaagattacccaccagacatgcaatgcaaggataaattcttgattcagagcacgaaggtggccgccagtaccgacatggatgagatcccccctgatacgttcaacaaggaagctgataaggtaatcgaggaaatgaagctcaaggttgtctacacattacctagctgcggaggttcagatgactctagcgtatcatctttaggaagccggagcttcaaagcagcgtctgacgatctgatgatgctgaagaatgcaagccttgaagagatccagacaattcagcggttgaaagaagaaagagacaacatgcttcagcaaaatcagcaaatgcaacgtgaattggatgtgcttcggaggcgcaggagccgcaaaggcgatgcaggtttctccctgacgttcgccgcgtttgctgggctaataggtctcatggtggggctcctgatgagcctcatcttctcgtccgcgccggctgatgcgtagtaagatgcaagaaaaggttgcagccaacggaagcgttgttgagttgagaccgacgtgggggaaaaggctcgctcgggggaagaagatgaaatttctgctctagtctccatttttctttcttttgctgtttgcatcctagttattattatacgaaatggcaacggggtgcagatctttccttccactcgtgcttggttcatcctccagtttgtattttgccccttggtttctcattctttctgtatttagtatgtcaagacggaacctgtattcattcaacgattgggtagtgaagaactgagctaggagtaccaagaaagggtgatgatgggtgttagggttatacggaacctgtattcattcaacgattgggttttagggttctagttctacacgtacgcacgcatgtatgcttccacatccagtacgcagcaggtaaaaaatagacgttcgatgtg

SEQ ID NO: 132599 - DNA, 1478 bp, Zea Mays
agtgccacgggcccaagaagtgagtgctgccccgtcaatgccgctgggagccaagaaaagcaaggcaaagcaaactgcagacccattggtgggtgcaatgggaggtagcggaacgctgatctcggtttaccccgaggagctcaccttcttgtgtaagctgtgtggatttattgatatattcgttcgcattgcgattggttaaatttctcctccgcgttgaattcttgcgcgtagttgagctggagaagccgtgctattgcaatctcaaggtggtgaacaacagcgagcatcatgtcgcattcaaggtccatgtcttccctgtcccgtgaagttcacctcagaatctccgcgttttgctcgctgaaaatcgaaccaggtttgatgttgagatgagaagaaaactagactaggtctggtcaaatttgccccatttattttcaggtcaaaacaacatcgccgaggaagtatttcgtccggccgaacgcgagcatcgtccagccatgggattcttgcacaataacgattacgctgcaggcacagaaagattacccaccagacatgcaatgcaaggataaattcttgattcagagcacgaaggtggccgccagtaccgacatggatgagatcccccctgatacgttcaacaaggaagctgataaggtaatcgaggaaatgaagctcaaggttgtctacacattacctagctgcggaggttcagatgactctagcgtatcatctttaggaagccggagcttcaaagcagcgtctgacgatctgatgatgctgaagaatgcaagccttgaagagatccagacaattcagcggttgaaagaagaaagagacaacatgcttcagcaaaatcagcaaatgcaacgtgaattggatgtgcttcggaggcgcaggagccgcaaaggcgatgcaggtttctccctgacgttcgccgcgtttgctgggctaataggtctcatggtggggctcctgatgagcctcatcttctcgtccgcgccggctgatgcgtagtaagatgcaagaaaaggttgcagccaacggaagcgttgttgagttgagaccgacgtgggggaaaaggctcgctcgggggaagaagatgaaatttctgctctagtctccatttttctttcttttgctgtttgcatcctagttattattatacgaaatggcaacggggtgcagatctttccttccactcgtgcttggttcatcctccagtttgtattttgccccttggtttctcattctttctgtatttagtatgtcaagacggaacctgtattcattcaacgattgggtagtgaagaactgagctaggagtaccaagaaagggtgatgatgggtgttagggttatacggaacctgtattcattcaacgattgggttttagggttctagttctacacgtacgcacgcatgtatgcttccacatccagtacgcagcaggtaaaaaatagacgttcgatgtg

SEQ ID NO: 132600 - DNA, 1339 bp, Zea Mays
aaccccagagagaagaactgccacagtgccacgggcccaagaagtgagtgctgccccgtcaatgccgctgggagccaagaaaagcaaggcaaagcaaactgcagacccattggtttctctctttcctcctcccctcccgacttctccaaatcgccgccttttgttgatttatctattttgcttgcaattagtttttggaaagcaaggttcggaatccgttccaaacagaacgtcatcacttccctccccccttttaatgcagcagtatattcatcttctggcttctgtttctgtttctttgatcaggtgggtgcaatgggaggtagcggaacgctgatctcggtttaccccgaggagctcaccttcttgtttgagctggagaagccgtgctattgcaatctcaaggtggtgaacaacagcgagcatcatgtcgcattcaaggtcaaaacaacatcgccgaggaagtatttcgtccggccgaacgcgagcatcgtccagccatgggattcttgcacaataacgattacgctgcaggcacagaaagattacccaccagacatgcaatgcaaggataaattcttgattcagagcacgaaggtggccgccagtaccgacatggatgagatcccccctgatacgttcaacaaggaagctgataaggtaatcgaggaaatgaagctcaaggttgtctacacattacctagctgcggaggttcagatgactctagcgtatcatctttaggaagccggagcttcaaagcagcgtctgacgatctgatgatgctgaagaatgcaagccttgaagagatccagacaattcagcggttgaaagaagaaagagacaacatgcttcagcaaaatcagcaaatgcaacgtgaattggatgtgcttcggaggcgcaggagccgcaaaggcgatgcaggtttctccctgacgttcgccgcgtttgctgggctaataggtctcatggtggggctcctgatgagcctcatcttctcgtccgcgccggctgatgcgtagtaagatgcaagaaaaggttgcagccaacggaagcgttgttgagttgagaccgacgtgggggaaaaggctcgctcgggggaagaagatgaaatttctgctctagtctccatttttctttcttttgctgtttgcatcctagttattattatacgaaatggcaacggggtgcagatctttccttccactcgtgcttggttcatcctccagtttgtattttgccccttggtttctcattctttctgtatttagtatgtcaagacggaacctgtattcattcaacgattgggtagtgaagaactgagctaggagtaccaagaaa

SEQ ID NO: 132601 - DNA, 1608 bp, Zea Mays
caaccctgttcacaaaaataaatggaaccccagagagaagaactgccacagtgccacgggcccaagaagtgagtgctgccccgtcaatgccgctgggagccaagaaaagcaaggcaaagcaaactgcagacccattggtttctctctttcctcctcccctcccgacttctccaaatcgccgccttttgttgatttatctattttgcttgcaattagtttttggaaagcaaggttcggaatccgttccaaacagaacgtcatcacttccctccccccttttaatgcagcagtatattcatcttctggcttctgtttctgtttctttgatcaggtgggtgcaatgggaggtagcggaacgctgatctcggtttaccccgaggagctcaccttcttgtgtaagctgtgtggatttattgatatattcgttcgcattgcgattggttaaatttctcctccgcgttgaattcttgcgcgtagttgagctggagaagccgtgctattgcaatctcaaggtggtgaacaacagcgagcatcatgtcgcattcaaggtccatgtcttccctgtcccgtgaagttcacctcagaatctccgcgttttgctcgctgaaaatcgaaccaggtttgatgttgagatgagaagaaaactagactaggtctggtcaaatttgccccatttattttcaggtcaaaacaacatcgccgaggaagtatttcgtccggccgaacgcgagcatcgtccagccatgggattcttgcacaataacgattacgctgcaggcacagaaagattacccaccagacatgcaatgcaaggataaattcttgattcagagcacgaaggtggccgccagtaccgacatggatgagatcccccctgatacggtgagcaagaagtgcagaacaaatttttcaacaaggaagctgataaggtaatcgaggaaatgaagctcaaggttgtctacacattacctagctgcggaggttcagatgactctagcgtatcatctttaggaagccggagcttcaaagcagcgtctgacgatctgatgatgctgaagaatgcaagccttgaagagatccagacaattcagcggttgaaagaagaaagagacaacatgcttcagcaaaatcagcaaatgcaacgtgaattggatgtgcttcggaggcgcaggagccgcaaaggcgatgcaggtttctccctgacgttcgccgcgtttgctgggctaataggtctcatggtggggctcctgatgagcctcatcttctcgtccgcgccggctgatgcgtagtaagatgcaagaaaaggttgcagccaacggaagcgttgttgagttgagaccgacgtgggggaaaaggctcgctcgggggaagaagatgaaatttctgctctagtctccatttttctttcttttgctgtttgcatcctagttattattatacgaaatggcaacggggtgcagatctttccttccactcgtgcttggttcatcctccagtttgtattttgccccttggtttctcattctttctgtatttagtatgtcaagacggaacctgtattcattcaacgattgggtagtgaagaactgagctaggagtaccaagaaa

SEQ ID NO: 132602 - DNA, 1159 bp, Zea Mays
agcctcccacccacaaagagataggaggatagcgtctatccccaatcctcccgccgcggcgacgccttcccctccctccttcctccgtcccatgctccgccgctgacacgttggcccgacttaaccttacgatggccgccgcctccgccatcaccgccgtctccggcgttgtgcttccccaaaccttcctatcccaccggtcgccgccgccgcaggtcctagccgtggcctcctcattccaccggctctccttgtgcgcttcccatcgccgaatcactcacataatcccccgcgctgatgcaagtgccgaagctggagaaccggagcctgtcactacttcagctgaatccgaagaggaggtggccgaggggtctgtcgctgtggcggaggcggaggaaccgacgccgccgagcaagccgaagattctgaataagcagttcattgaggaggctgagaaggtgaagactgtaccggatctgaggcctggcgatatcattgagcttaggatgcaacggcccaacaaaaggagattgtcgctctttaagggcataatcatcgcaaagcacaaagctggtgttcacaccacaatccgtgtcagaaggatcattgctggtgtaggagttgagattaccttcccagtgtactcacccaggatcaaggaaatcacggttatcaggcacaagaaagtgaggagagcaaagttgtactacctgaaagacaagcttccccgcttttcaacattcaagtgaaatcagatatgctgacagaacaacttttccaccaccatctcgatttctcttaaacctttttttcacttccctatcgatatcatcatatttcactgtaatctctgggtatcagatatgtaatatctacagctttatagcatacttggcttagcgcaatgttttgtttgttgtcagtgtacaaaattcatactagcaccttgttattatgaatttgcaaatacaaggttatgtactcttgtgcgtcgagtttgtgatgaatgattgttaggtcattcttaattggagtttcatactcattaaatatggtgatacatcatcatgcttggtgatatgacaatgtaattaagagtagagatatagagagagtttggtgtgagatgatagagtttcatggggatgaaaccctgcat

SEQ ID NO: 132603 - DNA, 1225 bp, Zea Mays
tcacttctggatagaagtttgggggcccgcgtgcagcgtcacagcctcccacccacaaagagataggaggatagcgtctatccccaatcctcccgccgcggcgacgccttcccctccctccttcctccgtcccatgctccgccgctgacacgttggcccgacttaaccttacgatggccgccgcctccgccatcaccgccgtctccggcgttgtgcttccccaaaccttcctatcccaccggtcgccgccgccgcaggtcctagccgtggcctcctcattccaccggctctccttgtgcgcttcccatcgccgaatcactcacataatcccccgcgctgatgcaagtgccgaagctggagaaccggagcctgtcactacttcagctgaatccgaagaggaggtggccgaggggtctgtcgctgtggcggaggcggaggaaccgacgccgccgagcaagccgaaggttaagttcggcgaaataattgggattctgaataagcagttcattgaggaggctgagaaggtgaagactgtaccggatctgaggcctggcgatatcattgagcttaggatgcaacggcccaacaaaaggagattgtcgctctttaagggcataatcatcgcaaagcacaaagctggtgttcacaccacaatccgtgtcagaaggatcattgctggtgtaggagttgagattaccttcccagtgtactcacccaggatcaaggaaatcacggttatcaggcacaagaaagtgaggagagcaaagttgtactacctgaaagacaagcttccccgcttttcaacattcaagtgaaatcagatatgctgacagaacaacttttccaccaccatctcgatttctcttaaacctttttttcacttccctatcgatatcatcatatttcactgtaatctctgggtatcagatatgtaatatctacagctttatagcatacttggcttagcgcaatgttttgtttgttgtcagtgtacaaaattcatactagcaccttgttattatgaatttgcaaatacaaggttatgtactcttgtgcgtcgagtttgtgatgaatgattgttaggtcattcttaattggagtttcatactcattaaatatggtgatacatcatcatgcttggtgatatgacaatgtaattaagagtagagatatagagagagtttggtgtgagatgatagagtttcatggggatgaaaccctgcat

SEQ ID NO: 132604 - DNA, 438 bp, Zea Mays
atgggcggagacggtggcggggtggcgggagcgggcggcgggcttgccgggggagacggtggcggagtggtgggagcgggcggtggcgacgccggtggggacggaggcggcgtggtgggggccggaggtggagttgtcggcgccgggggcggcgttgtgggagccgggggaggagtggtcggggccgggggcggagtggtcggggccggaggtggagtggcggtgggcgcgggtggcgggttgcctgccggcggcgcctggggcgccggcggcgggttgccggctggaggcgcctggggcggcgagttggccggtggcgcgttcggcgttggcgggggctgcgccggcggtgactgctgcgctgcgcaggaggcgatcaggagcacgaggacgagagggcggagaagtgacgccattttctgtggttccttgagctga

SEQ ID NO: 132605 - DNA, 976 bp, Zea Mays
gcacctgcatcgcaaccctatatataaccactgatcactccgagtcaccgcactcagcggtccgtgttcttgatcgattaagctgtcctcaaccatcatggctgccattatggcggcaggtctggtagtactggcactcctcgctgccgtcgccgctccggcgcacgccacggactacgtggtgggcgactcggccgggtgggccagcggcgtggactacgccacctgggcgagcggcaaaaccttcgctgctggggacaacctagtgttccagtacagcgcgatgcacacggtggcggaggtgagctccgcggactacagcgcctgctcggccagcaactccatccagtcctacagcgaccagaacaccaaggtcgcgcttacggcgcccggcacgcgctacttcatctgcggcgccccgggtcactgcggcaacggcatgaagctcgccgtcacggtcgccgccgcggccgccaccaccaccccggagacgtccacgtctacgcccgccgcaacgacgacgcccaccacgaccaacgctgacacgcccaacgctgacacgcctccggagacgtccacgtctacgcccgccgcaacgacgccgcccaccacgaccaagtccacgtccacctcgagcactagcagcactggtgctgcctgcggtggggaggcccggctcggtatgggcattttggccgcggccgcgggcctcgccgggctcgccctgatgggctaggctaggcaagaggcagtgctgtttcggttttccttatgtcccctgcttttcctgttggttgcagccctgtagcccattgtgtttactgtctacgcaccctcctccattcacgtttatgctcacgatggcttgttcgaggctcctgctgaatacatgtacgatcattcttactcagctgtttgcctctctcttccttctagagctagctggtaacgaatcaaaatggaagaaaaaaactaa

SEQ ID NO: 132606 - DNA, 438 bp, Zea Mays
aatttaataatctcagtgatacttatctactactacacatcgtgcaagggtagcaggtgggctttgggagagatgtattatatgtttttactataatagatatagacataaacaaacatgtggtgtagtggtagctacaaacacatttatttgagaggtcgcgggttcgaatccccttggagcctgtttttttaatttaattttagctaggcgtgggatgcacgtgggaatgggaatagactttgtgggagggggaatgagaaagacacgtgatagccgggaatggaaatgtgaatgggctttgcagggagggggaatgagaaagacaggcagctgggaatgggaatgggaatgggctttgcagtgaggacggaatgggaatggcagaacacggaatggggcagcctaccccttaccgtcttaataggtagtagagat

SEQ ID NO: 132607 - DNA, 108 bp, Zea Mays
gttcgaactcacctcctgcactgtttttttaacattttacgctgatttaagcaaatggcccgacgggctaacgggccggcccagcacagtcagcacgccagcatgccg

SEQ ID NO: 132608 - DNA, 1780 bp, Zea Mays
acttattagtctcgaagcgagaatgggagctgcctcgtcgcgggaaggggacgctgcccgcgcggcggcgcgcgagcacacgaagcggtgccgggagcggcggcggctcgcgcgggaggccgtgcgcctgcggcggcacctcgcggcctcgcacgccgcgtacctccggtcgctcggcgtcgtcgcgtccgcgctcacgcgcttcgcggtcggcgagccgctcccggtgtccgaccacaccccgcccgccgtgatcgcgcaccgcccggtcgtcgtcccgtcctcgcctccgccgttgctccgcgccatcgaccaacaaccgcagcccgaggcgcggcggggcggcgccgttcctgctgacgtcggcgctgtttttgaggagacgaggatggtggtgaggcaccggagcctcgcggaggtcgcggcggggctggaggagtactttgtcaaggccagcgtcgccggagacacggtgtcggccctgtttgaggccagtaccaccgagttcaacggtgcctcagcctcacacagcttcttgggcgcgctctgctgcctttcggcgccaacgctcgaccgcatcgacagcatgagcagccggcagaggcacagcgccaccttgcagcagctcctggcatgggagaagaagctctacaaggaagtcaaggccagagagaaatcgcaaataaggcacgacaagaagctcgctgagctgcgggaccaggagtacagccggaagatcgacgtcgacatccagaagctcaaggcggcgtgggacagggcgcgcgggcagctggagacggcctcccagtccgtggacgcgacctcctccgccatctcccagctccgcgacgcccacctcgcgcgccagctcctggagctctgccacgccgtgctcgacatgtggcgggcgatgcggcagcaccacgaggcgcagggcctgctcgcgcagcagctgcgcgggctgagcagccgcacgtccatggaccccacgagcgagatccaccaccgggccacgcgggcgctcgaggccgccatgaacgcctggtccgcggccatggcgcacatggcgaagcaccagcgcgactacgtccacgccgtccacggctggctcaagctgacgctgacgccggtcaacggcgccgccgaggcctctcccgtggcggcggagctcgccgcgttcgtcgaccggtgggggaaggtgctcgaccgcgtgcactgcgtggacgtgctcaagtcgatcaagagcttcgcgggcgcggtccgcgcgatccacgcgctccagagcgacgagctgcgggtggcgcggcgcgtgaggcagtactcccgcgagctggaccgcaagtcccggatgctgcggcaggtcgagaagagctactacgactcgtacctgcccgggggcatgtcgatgtggcactgggggaggcaggcgcacgatgcgggcaacgaggtggcgcagcgcagggacgagatcgcggcttgccggaagatggtggaggacgagatgcggaggcatgccaaggccatagacgccacgaggacggccacggtcacggccgtgcaggggaagctgcctgccgtgttccagtcgatggccgcgttctcggcgtcgcttgcgaactcgctggaggccgcgtacagggctccacagcagaacaccaacatgcaggagtagctaatatccgctcgttcttccttgcgtttgcaatttgtttttcttgttttcaggacctatacatacaatacaaaatacaaatagagaacgtagaataaggcacaagac

SEQ ID NO: 132609 - DNA, 1530 bp, Zea Mays
aatcaatttatagttgtgctactagaaacaaagccatactatagttcttccatccgtagcttcgaaaacgatcgaaccacgtgacagtaacaccggaaaattcaaggaaggtcatctagaagcgcgacgacaaatggtgatgcagctccacctctccagtccccgctatataagcctgggccgtggccagcctccttccgaaccaaaattttccaaatcaagtgctgaaattccctccgaaccacgacaccacgtgaggggcaccggagaccaacaaagatgctgcttaacccggcgtgcgaggcggcagcgccgatggacagcatccggcatcacctcctggacgagccggcggcggcggcgaccgcgagcgcggctccgcggccggtgtactgccgcagcacgagcttcggcagcctagtggcggaccaatggagcgagtcgctcccgttccgccccgacgacgccgacgacatggtcgtcttcggcgcgctccgcgacgccttttcccagggctggctccccgacggctccttcgccgccgtgaagcccgagcccctggcgttcccggactccccctacgagcgcggatcctatccctgccttggtggcttccttctcgcggaggggcctgagacgccgaccgaggcggcgacgacgcccgggagcgaggaggaggccgcggcggcggtgtccagggggaagcactaccgcggggtgaggcagcggccgtggggcaagttcgcggcggagatccgggacccggccaagaacggcgcgcgcgtgtggctgggcacgtacgacagcgccgaggacgccgccgtggcctacgaccgcgccgcgtaccgcatgcgcggctcccgcgcgctcctcaacttcccgctccgcatcggctccgagatcgccgcggcggccgccgccgtcgcggccactgcccctgccgcgggagacaagcgggcgtccccagagccgaccgcgagctccgactcctccccttcggcctcctctgcgacaccgaagcggaggaagagaggcgaggccgctgccgcgaccatggccatggcccttgtgccgcccccgccggcggcgcaggcgcccgtccagctgaccctcccggcccgtccgtggttcgccgccggccccgtccagcagctagtgagctaactgatggtgtaccagtggttcgtggttcatggattcatctcagtgcaagaacagagcaacaagatgcgcatcaattcaaacacaggcacacgcgcgcgcgcgcgtgcgctggtccaagaaatgcgtgtgacgagctcgagggcatcgtcatctggatgttctctggttcgcatggaaactgttcctccatggtcgctagtgtggtggcttgtgaattgtgatgtgtagaaccagaatgaatcgtgtttgtggcgtcattgcattggattcggacgagttgaaatcggaagcttctctgtctgtgagagaggctggtgcaagtttgcatcaccatgtctcgaatggatattattctttgttctttgg

SEQ ID NO: 132610 - DNA, 1660 bp, Zea Mays
gataagagtgacgatgatagataatacgatcgttaaagtagtcggaaacggaaaagtgattaccctcaccaatcgttaagcaacagctcatcaatcaaaaaggaaataaaaaacaatagcgtgaagatagcgacacatccggggtgaaacagtgattattactccttaattaaccagatcgaaacgaaaaggcagagagggagggatctccgtctccacgccgcgtcctcccgcacgaatccgcgctccggccaacgggccaagccctagccacccccgcccattcatggtgggcgggccgtgagatctctagggaggcttgtcggcttcgtcgggcgggaggggaggagatgggcgcccggaacagcgctgccgccacgccggtgctgctcaacgtgtacgaccttacggccgcgaacgattacctctactggctcggcttcggcgtcttccactccggaatcgaagtccatggcacggaatatgggtttggagcccacgactacccatccagtggtgtgtttgaggtggaatcaaagagttgccctggctttatctacagaagaacagtgtggctaggcacaacagacatgtctcaggaagaattccgctcgtttattgaaaaacttgcaggtgattatcatggcgacacatatcatttaattaacaagaactgcaatcacttcacagatgatgtctgccagaacttaactgggaaacccatcccttcctgggtgaataggcttgcaagagtagggtcagttttcgattgccttcttccagaaagcgtacaagtttctcctgtaggtcgtgtcccaacgagtcggcgaatatctgatgatgatttgtattcaatacattcaccaatggccgacaaagatgacaatgatgaggacgaggccaaacacctgctgccagctccatccaacgaccagctttctgtagatgtaccgccaaagctagcgaaagatcttctctgaaccactccatgttcataggcgcctaccatacttcaactcatatagccattggtgctaaagtgatcctcaagatggcttgacacagatagggattgggcatatttgattaaagatgaagctctaatttcttgtggtttaccagtttgcagtttcaccttgctgtctcatctcagcaaacaattgtcatctatggtagtagtggcatgattgttaccctgtcatttagcacatctggaaattgcaaatttggaatgtggggttccggtacctgttaggaatcaggactgtcgatgcttgttgagccccagtgttgaaggcacatactgtatcatgttactatcaaaaacagtgtacatgtacatggctaccgagtatttgccacgaatccaaatgagcgatctctgttgggctgcttaagcgcctgtagtgacatggaacatctttttgttccgggctattgaacatcgaacattcgaacccaaccatgtggttctgtcgctgatgcctgttatgctgtaataatgtgagattactttttgctgtcgctgacgcctgttatgctgtaataatgtgagattactttttgctatcgctgatgcttgttatgaaatgatgtatcttgttcatctctgtatccaaagccatgtgcttatattatagaactagccagttactcgtgc

SEQ ID NO: 132611 - DNA, 107 bp, Zea Mays
caaggactagtttacaataaatgctattttataatcatttgtctcatttaaacctttccttatccggatttagtgtgacaaactcttgtgtggcttctcccacacat

SEQ ID NO: 132612 - DNA, 1526 bp, Zea Mays
cctccaccccgcagtctgcagtcgcgcacgcatccaaactcccgagtcctcttgtgtgtcgcgacctccacttcagctccacacaccccgcccgcgaggctgcgagctaacacaaaccccacacggccacacctgaaccatggacttcagcggtgaaatcgacgacttctccctgcagctcatccgcgagcagcttctcggcggcgaggctagcctccccatcgttactaacgccgcggcgtactctgcttcggtcgttcaccatcccacgcaggcggagttccaccagcccgcggcgttcttgccgcagccgtcgcatgttgcgtacgtggacttgacgaacgagtacgccgcggacgccactgtcgcctcggccggcggcgaggcggccttccgggcggagccggtgatgatccggttcgggggtgagccttcgccggtgtccgaccccagccggaggccgctgctcacgatctctctgcctccggcctcgcacgcttggggcccggcggccgtgccgctggaggcacctggcgcggcggccctggacgcgaacgacttccgcaagtaccgcggcgtgcggcagcggccgtggggcaagttcgcggcggagatccgcgaccccaagaagcggggctcccgcgtgtggctcggcacctacgacaccgccatcgaggccgcgcgcgcctacgaccgcgccgcgttccgcatgcgcggcgccaaggccatcctcaacttccctaacgaggtaggcacccgcggcgcggacttcctcgcgccgccgccgccgccgccgcaagccgcggcaacgtcccagaacaaacggaagctgatgcacgacgccgaggccacggccacggccggggccggagccggagccgagccagccaagtccgtcaaggccgaggcgtccgggtcgccggcgtcgtcgctgtctcccgcgacaacgaccaccccggcctcgacggtgacgacgtgctctccttcgtcggacgctggagccggccacgagatgtttcccgtgacgccgtcgagctggacgtgggagcagctggagggcgtgttcgggatcctgtcgccgctctcgccacacccgcagctcggcttcccggaggtcaccgttaactaaggggacatcggtcagtaagcatcaataggtgtaaagacgttaataattgttagcggtttctagttatggacggacggacctggctttgaactcgtctagaggatttgacgtagcttttggagctgcatgtgtgtgtacagaacgataagaaaaaggaggcgatagaatatttattagggtatatgtatatgtgtcggtgaaatctgaactacacatgtcgacatagatcgatggcatagatatactggggtaattatatgatcagaaatggtggtacatacgtatataaggtgtttgattatgtgaactttttgtacattaagtaaataaaggactgtacatgcttatgtaatacagtatagctatatgtttctgaatcatatcgccaattcgccat

SEQ ID NO: 132613 - DNA, 579 bp, Zea Mays
tcatctctgcaccatggcgtcggcacgcccgtccttgagcctccaactggtgctccagctcctggacccatggatgaaggcggcgctgtggtcagacaccacgtcatcgtcgttgagctcaggcatggcgcgcgcgaccgccgccgacggggcgtggccgcgtccaaagcaggcgaagacgctgcagaggaagcggcggacggtgcccctgtccgtggccgcggcctgcctggcgccccacgagatccgcctgggcgcgtggccgctgttaaagttgaactcgccttccatctccgtgtacaccatggggagctccctctcgtcgggcctcgacccgccggcgaacctcccgaccgtgacccgccgccggggagcctccagatggtgagcctgaccctggcgtcctcgtctgcggcggcggcggcggcggcagcgcgcggggcggcgttgaggaggctgaagttggcgcccggcgcggcgagggccgcgcatggtcccgcagaggtggtgatggcgacgggtggtacggcgagtcccgccagcgcggcggcgttggggcgggcggcaggacgtgcctga

SEQ ID NO: 132614 - DNA, 1663 bp, Zea Mays
cccgttgtcagcttcgtttcgcctccggagtctggcatccgcgtcgcgagtcgccaaaccaaacccaccgcccttataaagacaccttcccctttcccgtcgccctcctctgccctgctcgagctccccttccgcgctccctacccacaagcctttccgcaggtgcgccgcctctgcgaggtggggtgactccgtgaatgggtgacctgggaggaggagactggcgggaggcggtggccgagaaggggttggcggaagccgacggcgggcccgaccatctggtgatcatggtccacgggatcgtcgggagcacagcagattggaagtttggagctgagcagtttggtaaactgctctcagacaaagttatagttcattgtagcaaccgcaacatgcacaagctcactttagatggtgttgatgtgatgggtgaacgattggcacaagaggttattgaagaaatcaacagaagaccgtatatcaaaaagatatcttttgttgcacactctgttggaggattggttgctagatatgctattggaagactttataaaccacctaaacgaacatcagaaaatactccacaaactctggatgacaacaatataggtaccatacatggacttgaggcagtgaactttataacagttgcgtcaccgcatcttggttccagaggaaataagcaggttcctttcctttttggagttactgcaattgaaaattttgcatgctacatcattcatttgatatttggaagaactggcaaacacctctttcttactgacaatgatgatggaaagcctccattgctacaacggatggtggacaattggggtgacctgcaattcatgtctgctttgcaagcatttaggcggcgtgttgcatactccaatgttggtcatgatcgtatccttacatcactcctgaaattagcatgcagtaataagccttgtttaaagttttttccataactgaatgttgattaagatattgttgggtggagaacatcatctatcagaaaagattctgaactacccaagtgggttgattcaaccaacaagatttacccgcatattgtatatgaggaactatccaaagcagaagctcctgatcaatgtgctgacacagataactgcacactagaagaacaccttttacaaggacttaagcgcgtttcatgggaaaaggtggatgttagtttccacaatagtaaagtaagatctgcagcacatagtgtgattcaggtaaaagatcctgtgatgcatagcgaaggtgccgacgtcatacagcatatgattgaccaatttattctatagtaaaagccctggtctttggaaacagacctggaccaggatacgtcatttgctaactgcgggctgagtcaccagcctggtgagcacgtttatggaaatcccaggtataagacttagtctctgaatggtggatcaggtatatagttatagagggtggaaacacgtgcgcatgcctgttggttcatttagtcatatgtgatcatatacatgttgtacggtgcatgtaactttagtactatccttgtcattgtaaatgttcatttatttatagtattggtcttctacaccgtaattttgtgagaatattataagaaaaaaccggttgctttaatggagttccacccagatta

SEQ ID NO: 132615 - DNA, 1416 bp, Zea Mays
gccctgctcgagctccccttccgcgctccctacccacaagcctttccgcaggtgcgccgcctctgcgaggtggggtgactccgtgaatgggtgacctgggaggaggagactggcgggaggcggtggccgagaaggggttggcggacacagcagattggaagtttggagctgagcagtttggtaaactgctctcagacaaagttatagttcattgtagcaaccgcaacatgcacaagctcactttagatggtgttgatgtgatgggtgaacgattggcacaagaggttattgaagaaatcaacagaagaccgtatatcaaaaagatatcttttgttgcacactctgttggaggattggttgctagatatgctattggaagactttataaaccacctaaacgaacatcagaaaatactccacaaactctggatgacaacaatataggtaccatacatggacttgaggcagtgaactttataacagttgcgtcaccgcatcttggttccagaggaaataagcaggttcctttcctttttggagttactgcaattgaaaattttgcatgctacatcattcatttgatatttggaagaactggcaaacacctctttcttactgacaatgatgatggaaagcctccattgctacaacggatggtggacaattggggtgacctgcaattcatgtctgctttgcaagcatttaggcggcgtgttgcatactccaatgttggtcatgatcatattgttgggtggagaacatcatctatcagaaaagattctgaactacccaagtgggttgattcaaccaacaagatttacccgcatattgtatatgaggaactatccaaagcagaagctcctgatcaatgtgctgacacagataactgcacactagaagaacaccttttacaaggacttaagcgcgtttcatgggaaaaggtggatgttagtttccacaatagtaaagtaagatctgcagcacatagtgtgattcaggtaaaagatcctgtgatgcatagcgaaggtgccgacgtcatacagcatatgattgaccaatttattctatagtaaaagccctggtctttggaaacagacctggaccaggatacgtcatttgctaactgcgggctgagtcaccagcctggtgagcacgtttatggaaatcccaggtataagacttagtctctgaatggtggatcaggtatatagttatagagggtggaaacacgtgcgcatgcctgttggttcatttagtcatatgtgatcatatacatgttgtacggtgcatgtaactttagtactatccttgtcattgtaaatgttcatttatttatagtattggtcttctacaccgtaattttgtgagaatattataagaaaaaaccggttgctttaatggagttccacccagatt

SEQ ID NO: 132616 - DNA, 1560 bp, Zea Mays
cctccggagtctggcatccgcgtcgcgagtcgccaaaccaaacccaccgcccttataaagacaccttcccctttcccgtcgccctcctctgccctgctcgagctccccttccgcgctccctacccacaagcctttccgcaggtgcgccgcctctgcgaggtggggtgactccgtgaatgggtgacctgggaggaggagactggcgggaggcggtggccgagaaggggttggcggaagccgacggcgggcccgaccatctggtgatcatggtccacgggatcgtcgggagcacagcagattggaagtttggagctgagcagtttggtaaactgctctcagacaaagttatagttcattgtagcaaccgcaacatgcacaagctcactttagatggtgttgatgtgatgggtgaacgattggcacaagaggttattgaagaaatcaacagaagaccgtatatcaaaaagatatcttttgttgcacactctgttggaggattggttgctagatatgctattggaagactttataaaccacctaaacgaacatcagaaaatactccacaaactctggatgacaacaatataggtaccatacatggacttgaggcagtgaactttataacagttgcgtcaccgcatcttggttccagaggaaataagcaggttcctttcctttttggagttactgcaattgaaaattttgcatgctacatcattcatttgatatttggaagaactggcaaacacctctttcttactgacaatgatgatggaaagcctccattgctacaacggatggtggacaattggggtgacctgcaattcatgtctgctttgcaagcatttaggcggcgtgttgcatactccaatgttggtcatgatcatattgttgggtggagaacatcatctatcagaaaagattctgaactacccaagtgggttgattcaaccaacaagatttacccgcatattgtatatgaggaactatccaaagcagaagctcctgatcaatgtgctgacacagataactgcacactagaagaacaccttttacaaggacttaagcgcgtttcatgggaaaaggtggatgttagtttccacaatagtaaagtaagatctgcagcacatagtgtgattcaggtaaaagatcctgtgatgcatagcgaaggtgccgacgtcatacagcatatgattgaccaatttattctatagtaaaagccctggtctttggaaacagacctggaccaggatacgtcatttgctaactgcgggctgagtcaccagcctggtgagcacgtttatggaaatcccaggtataagacttagtctctgaatggtggatcaggtatatagttatagagggtggaaacacgtgcgcatgcctgttggttcatttagtcatatgtgatcatatacatgttgtacggtgcatgtaactttagtactatccttgtcattgtaaatgttcatttatttatagtattggtcttctacaccgtaattttgtgagaatattataagaaaaaaccggttgctttaatggagttccacccagatt

SEQ ID NO: 132617 - DNA, 1352 bp, Zea Mays
gccctgctcgagctccccttccgcgctccctacccacaagcctttccgcaggtgcgccgcctctgcgaggtggggtgactccgtgaatgggtgacctgggaggaggagactggcgggaggcggtggccgagaaggggttggcggagcacagcagattggaagtttggagctgagcagtttggtaaactgctctcagacaaagttatagttcattgtagcaaccgcaacatgcacaagctcactttagatggtgttgatgtgatgggtgaacgattggcacaagaggttattgaagaaatcaacagaagaccgtatatcaaaaagatatcttttgttgcacactctgttggaggattggttgctagatatgctattggaagactttataaaccacctaaacgaacatcagaaaatactccacaaactctggatgacaacaatataggtaccatacatggacttgaggcagtgaactttataacagttgcgtcaccgcatcttggttccagaggaaataagcaggttcctttcctttttggagttactgcaattgaaaattttgcatgctacatcattcatttgatatttggaagaactggcaaacacctctttcttactgacaatgatgatggaaagcctccattgctacaacggatggtggacaattggggtgacctgcaattcatgtctgctttgcaagcatttaggcggcgtgttgcatactccaatgttggtcatgatcatattgttgggtggagaacatcatctatcagaaaagattctgaactacccaagtgggttgattcaaccaacaagatttacccgcatattgtatatgaggaactatccaaagcagaagctcctgatcaatgtgctgacacagataactgcacactagaagaacaccttttacaaggacttaagcgcgtttcatgggaaaaggtggatgttagtttccacaatagtaaagtaagatctgcagcacatagtgtgattcaggtaaaagatcctgtgatgcatagcgaaggtgccgacgtcatacagcatatgattgaccaatttattctatagtaaaagccctggtctttggaaacagacctggaccaggatacgtcatttgctaactgcgggctgagtcaccagcctggtgagcacgtttatggaaatcccaggtataagacttagtctctgaatggtggatcaggtatatagttatagagggtggaaacacgtgcgcatgcctgttggttcatttagtcatatgtgatcatatacatgttgtacggtgcatgtaactttagtactatccttgtcattgtaaatgttcatttatttatagtattggtcttcta

SEQ ID NO: 132618 - DNA, 1526 bp, Zea Mays
ggccgtttcctcctcccgttgtcagcttcgtttcgcctccggagtctggcatccgcgtcgcgagtcgccaaaccaaacccaccgcccttataaagacaccttcccctttcccgtcgccctcctctgccctgctcgagctccccttccgcgctccctacccacaagcctttccgcaggtgcgccgcctctgcgaggtggggtgactccgtgaatgggtgacctgggaggaggagactggcgggaggcggtggccgagaaggggttggcggaagccgacggcgggcccgaccatctggtgatcatggtccacgggatcgtcgggagcacagcagattggaagtttggagctgagcagtttggtaaactgctctcagacaaagttatagttcattcaaccgcaacatgcacaagctcactttagatggtgttgatgtgatgggtgaacgattggcacaagaggttattgaagaaatcaacagaagaccgtatatcaaaaagatatcttttgttgcacactctgttggaggattggttgctagatatgctattggaagactttataaaccacctaaacgaacatcagaaaatactccacaaactctggatgacaacaatataggtaccatacatggacttgaggcagtgaactttataacagttgcgtcaccgcatcttggttccagaggaaataagcaggttcctttcctttttggagttactgcaattgaaaattttgcatgctacatcattcatttgatatttggaagaactggcaaacacctctttcttactgacaatgatgatggaaagcctccattgctacaacggatggtggacaattggggtgacctgcaattcatgtctgctttgcaagcatttaggcggcgtgttgcatactccaatgttggtcatgatcatattgttgggtggagaacatcatctatcagaaaagattctgaactacccaagtgggttgattcaaccaacaagatttacccgcatattgtatatgaggaactatccaaagcagaagctcctgatcaatgtgctgacacagataactgcacactagaagaacaccttttacaaggacttaagcgcgtttcatgggaaaaggtggatgttagtttccacaatagtaaagtaagatctgcagcacatagtgtgattcaggtaaaagatcctgtgatgcatagcgaaggtgccgacgtcatacagcatatgattgaccaatttattctatagtaaaagccctggtctttggaaacagacctggaccaggatacgtcatttgctaactgcgggctgagtcaccagcctggtgagcacgtttatggaaatcccaggtataagacttagtctctgaatggtggatcaggtatatagttatagagggtggaaacacgtgcgcatgcctgttggttcatttagtcatatgtgatcatatacatgttgtacggtgcatgtaactttagtactatccttgtcattgtaaatgttcatttatttatagtattggtcttcta

SEQ ID NO: 132619 - DNA, 97 bp, Zea Mays
cgagtctagtttcatgctcgtgcagcaaatgtgccaaccggaaaagacttatgttcttgagtgttggatacttatgtttgtgttcgaacatgttggt

SEQ ID NO: 132620 - DNA, 1852 bp, Zea Mays
tctcagtcgcacagtgataaaggcctcgagccgaggcgacaagaatctctcaagacagccagccacgcacctccgcgccgagctcctccctttgcctaccgcccttcccaccgcgcgaggaaaaagccagcagcagcagcaagcaagcaactcagcggagcacggcaaagcaaacgaagagctcgcgttggcgttgccgacttgccgtgccttgcctagctagcttcgccacgacgaacctgacgtgagagcgcggcgaccacccccaccggccaccggcgcgcgagtagcttcctgtcgttcgttccctccgagagcgtctatttacccccgagagagccggacgcgcgagatggagatggcgggggcggccgaggccgacacgccgtcgcacgagccggtgcgcacgggccggagcaacaccatcctgctccccatcgtcggcgtcctcttcgcctacctgctctaccgcttcctccgcccgcgcctccgccgcggcctgcgcctcgaccgccacgtcccgttcccgtcgggcgcctccctgcccgcctggctccgccgccgcgcgcccagcgggagcgccgtgctgccctacttcgcgcccatcgccgaccgcctcggcgcgctgccgtacctcggccccttcgccgaccgcctcccgcacggcggcggcgcccacgcgctcgtcacgttccccggcggggaggcgctgtcggtggcgaccatcctcgaggcgcccggggaggtcgtcgccaagtccgcgcacagcacgctgtaccgcgccgcggtgcggtccggggaggccgcggtgctgctccggttcgtgcgccccgcctgcgccgtcgccgccgaggaggcctacgccgccgcgcggagggtcggcgcggtcagccacccgaacctcgtgccgctccgcgcggtgtacgtcggccccaggggcgagaagctactcgtgcaccccttctacgccgccggctcgctccaccgcttcttgcaagaggggatcgaggagtctcatagatggagcatagtctgcaacctttctctgggcattgccaagggactggatcacctgcacacaggcttggacaaaccgatggtccatggcaacctcaagacgagcaacgtccttctggacgccaactacgagtgcaggatatcggactacggcctctacctcctgctgagccccgccgctgcccaggagatgctggaggcctccgcggcgcaggggtacaaggcgccggagctggtcaagatgcgggacgccacgtgcgagagcgacgtctacagcctgggagtggtcctgctcgagctgctcgcgcagaaggagcgcgcggacgacgacggccggccgaacccgcgggacatcctcctcccggcctccttcaagaacctggtcctggagaggaagatctcggacgcgttcagctccgaccttgccaggcactgcaagaggtcggggaaggagaagagcctgaacgccttcttcgagctggccacggcctgctgcagcccgtcgccgtccctgagacccagcacgaggcaggtactcaagaggctcgaggagatcgcgagataaatggacgcgagtgctgagcaggcctggcgacttgctgcttaatctgcatcgctctctattgcagcataccgttgagctgagaagcgtctaccttccctaagctaaacgaagaacgtatttttgtggtgggcgagtaggaaatggatgcatgtttttcacgtccagtaacctgtactgtacagtttcaccgagatgcagggttgttcatcagaaaacatacagggtgtgctttcggtgcatgaggaatctccatgtggcggaatgttctct

SEQ ID NO: 132621 - DNA, 1466 bp, Zea Mays
cgtcttccctgcgcgggctgcggtcctgctccatagttgctttgcagccaagccatgtctcgggcaccgccagcttatctcctcgccacaaagcaaggaatccaaagcaaaggcaacggcggccaagttagtagctaggtttacagccaaaacacggcgatcctaaaaccacaacccaaaaacgggaagcgtgcacgcggcaggcacacgcacacgcacacgcacacaaacctgggctctagcctctagctcactccccgcgcgcaatggccaacgcagccccaactcccacgcaaacgagccatgtctcgcggccgattcctacaggcctcgtgcccgtggccgtgcttgtcgccgccgccgccggcctcctcgcgctgctgccgtcagtggcccaggcggtgtgggaggtgccgcacctcttcctcctaggcgccgtcatctccttcggcgtcttcacccagagccagaggaacaacggcgccgacggcagtggcaatggcaacgccgccagcgccaaggacagcccactggcgtggaacgcgcggtaccaccccgacgacgaccccctcgtcgtggtcgaagatcacgcggtgccgcgcggcgacgacgacgacgggctggaaggcgcgcgggagaggccgctttccctgccggtgcggaggctgaagctgaagcctgcggctgcgtcgcggtcgcaggagtccgaaaccggcggcgatgccagtgacggtttcggtgaggagacggatagctgtgcgtcgtcgtccgggttttgggccggcgcgcgcgccgtcccttcgccgccctctgttctcgacgcccaacagtgtgaagaacgaccgttctttgtccaacacagcgccagcaagtcccgtgggtgcagtgccgcgactccggctccgggtgcgcccaccgtctcgaggggcttcgtccagtggtgccatccttcggtgcccggcgacaagcagccgttgagcgacgacggcgaggtcaccgactgggataatgaggatgccgacgggtcgtccgatgagatgacagcggccgtgtcgtcagaaaggtcggtccctggggacttggcctcttgtgccagtgactgtaacgacggcgacggcgacgacacgtctgtggatgaagagcttttgaagctggcggcgaaggcggagccggacagggaggaggaagtggacaggaaggccgacgagttcatcgccaaattcagggagcagatcaggctccagaagcactagccggacatgcatacatgctctgctgagtgccgacacacgtaatgccactgctggtccagcacgaaggagaacgcagtggtagtttgttcatctatctatcccagcatgttattatctgtatcattttattttatttttttgttgctccgatgcaacaacaaggagccaaaaacatggtgtacatgaaatgcatattgagcactgttttttttc

SEQ ID NO: 132622 - DNA, 904 bp, Zea Mays
taatttaacatgcagattgcacacaaggcaaagcaagtcttccaaggaagcttatatatgcaagcaaccatggggaaaacactaaccagagttgtccggtgaaggaagccaaacccacagaaattcagagctctccacaaggcagctatgctgatatttgggttaggggtctggatcattccaatgacgctcatctttgcaccatgcaggcgcctggttctccttgttgtcaagttccaggaactagaagcgagcatcatgcgcagtaggtcatcatatccagaagtatggagtcgcatagcgaggatacaaacaataagcatcacactgtgaaggaagattggaagtaattcccagttgagatatgcatttgaactttcatcagggaactctacttggcggaataatttaaagcatacaaacaagaactcagatatgcaagtagggctggaaacgagccgagccgagctcggctcggctcggtgtctgaacgagctcggctcgcgagccatattctggtacttatcgttgcattatttggtgttgggactatgcttcgtcgccgaaggtcttgtaggaagaagctgctttcggctgaagctgtttgtatgagatggtcgaaggttcctcttcatgaatcttcggtattacaaaccgacttaaagatagaatgacctttttagtccataaaggcctgagtcaatgttgtaaacttttataaagggcataattgtaattccccacaggctgtgtcctgtgcctataaatagtgaacagtattcctttactgttcacggattcctgtaattgcaatcgcatcatttgggaatcaatctttgtcaaggcagaggtataattgtattcaatgatttaatatatcaaaatatgattcatttatgattca

SEQ ID NO: 132623 - DNA, 105 bp, Zea Mays
gtggtagacaaagaaaatttaaggttgccatgggaagtaaagttgaatgtagaagcttacagacatatcatataacagacaagcaacttggcaggctaaaagttc

SEQ ID NO: 132624 - DNA, 234 bp, Zea Mays
atgtcctcctgccttattttatccggattctttgagaaagagacatggatgcacccgattttccctgccctcttctatgcctgtgatagagtcatcaggaaatttcatgagaacgactaccattcaagtattgtgaggcgccccttctctataactgtggcaccaggagataactacttgactgtgcatatccgcacgctgggtgaccggacatccaaactttcgattctctga

SEQ ID NO: 132625 - DNA, 1475 bp, Zea Mays
cctagcaataccaatactcaacccttccgaatatttcgtcgcaagatttttcgctagtgctcaaagctccaaaggccccaagactccttcctgctcaaacctttttttatccatccttttgcgcggaggctgttggagcgttggatagtgcgcggtgccggcgcactcgctcgcagtccaagaacgaaggcagcctctgtttccttccgaccggcgatgaggaacccgccgggcaggcacctcctctgtctcagcagccgcgccgtgcgctcttcctcctcctcatcggcgctcggccccggacccggcgctgttacctccgccgcgtccccacgcccgcgcgccatcgcgcccgggcggcccctgcgcgccagttccccatccccgccttacgcagtcgccgccgccgcgtacgtggaggacggggactgggaggaggtcgtcgctggggggcctggtactggggagatggaggaagaacaggactacagggtggtgttctggtccccgccgaccatagacgaggttaccggcgcagtcaccagcatccagcaagtatttgagaatcctcttggactggattcagatacaactgacagacagacaacactactgtctgcatcaggacattcatctggaaattcatcaggatcagatgactggattgaacctgctgcctatgttcttaactcaactgctcttctgtcaagggaacataggaatgttgtggatgctttccgtctgttgcaaaaggatcccaccgttcagaaaatggttatgtctttgtcatgcgataaggctgtttggaatgctgtcatgaataatgaggcagttcaagatttcaggagatctttacacgatggaaaagaaaatgatagaaacgaaaacactggtggtcctgctgaagtgcttaagtggatcctggaaagcgcccaggcaaaaatagttgaattcctagagaatgttcagaagataatcaacatgctgatccacactccagaggatgatgataatccagatggatacagcgatgcagttaaggtgtcgttcatgctcacggtattcgtcttcatcgtggtggccattgctcgtatcaattatgaacattgggattacaaagtgtggtgaggcgagattctggcatcctacaagcccgtctatatatgttttgtagaacacaccaaagttcgataacttatcctacacacagttttactcaatgctttggctgtatcatttcatcccggcagatcatgcaagggaatgttgttctgggtcatatttgtgttgttcgactttggagccggatggacctctgtagctacacttccttactccagcagtccagcgccagcaaatttcatgtttgcagtccattttaagcatacagcattaactgttggaatagcctgtataaatgttacttgaggaaattattttacagggtgtttggatccattcatttcgagggaatt

SEQ ID NO: 132626 - DNA, 1380 bp, Zea Mays
cctagcaataccaatactcaacccttccgaatatttcgtcgcaagatttttcgctagtgctcaaagctccaaaggccccaagactccttcctgctcaaacctttttttatccatccttttgcgcggaggctgttggagcgttggatagtgcgcggtgccggcgcactcgctcgcagtccaagaacgaaggcagcctctgtttccttccgaccggcgatgaggaacccgccgggcaggcacctcctctgtctcagcagccgcgccgtgcgctcttcctcctcctcatcggcgctcggccccggacccggcgctgttacctccgccgcgtccccacgcccgcgcgccatcgcgcccgggcggcccctgcgcgccagttccccatccccgccttacgcagtcgccgccgccgcgtacgtggaggacggggactgggaggaggtcgtcgctggggggcctggtactggggagatggaggaagaacaggactacagggtggtgttctggtccccgccgaccatagacgaggttaccggcgcagtcaccagcatccagcaagtatttgagaatcctcttggactggattcagatacaactgacagacagacaacactactgtctgcatcaggacattcatctggaaattcatcaggatcagatgactggattgaacctgctgcctatgttcttaactcaactgctcttctgtcaagggaacataggaatgttgtggatgctttccgtctgttgcaaaaggatcccaccgttcagaaaatggttatgtctttgtcatgcgataaggctgtttggaatgctgtcatgaataatgaggcagttcaagatttcaggagatctttacacgatggaaaagaaaatgatagaaacgaaaacactggtggtcctgctgaagtgcttaagtggatcctggaaagcgcccaggcaaaaatagttgaattcctagagaatgttcagaagataatcaacatgctgatccacactccagaggatgatgataatccagatggatacagcgatgcagttaaggtgtcgttcatgctcacggtattcgtcttcatcgtggtggccattgctcgtatcaagtgagcacaacaatcccccgactttacatatttctatgtttcattgtcccttggttatacacagggcaactctagttagttagtcagattgaggtcatggaaaggttgactggccaataaatttgaattgatattgtgccatcgtgtggaattatgatatgtcctagggatattaccattattatccttgcattcagcgtgcttatgcttttcatttcctggtggttttggctacagttatgaacattgggattacaaagtgtggtgaggcgagattctggca

SEQ ID NO: 132627 - DNA, 1091 bp, Zea Mays
gcatcagcgaagcagcaacatatcaagctcagagcctcagagcgccagccaagtcttgcggtcgcgaagagcaacgcaacaagatggtgaagctcgcattcggaagcgtcggcgactccttcagcgtcacctccatcaaggcctacgtggcggagttcatcgccaccctcctcttcgtcttcgccggcgtgggttccgccatcgccttcgggcaactgacgaatggcggcgcgctggaccctgcgggactggtggcgatcgcggtggcgcacgcgctggccctcttcgtgggcgtctccgtggccgcgaacacctccggcggccacctgaaccccgccgtgacgttcggcctggccgtgggcggccacatcaccgtcctcaccggcctcttctactgggtggcccagctgctgggcgcgtccgtggcgtgcctgctcctcaggttcgtgacccacggcaaggccatcccgacccacggcgtctccggcggcaccaccgagctggagggcgtcgtgttcgagatcgtcatcaccttcgcgctcgtctacaccgtgtacgccaccgccgccgaccccaagaagggctccctcggcaccatcgcgcccatcgccatcggcttcatcgtcggcgccaacatcctcgccgcggggcccttcagcggcggctccatgaaccccgcccgctccttcggccccgccgtcgccgcggccgacttcgccggcaactgggtctactgggtcggcccgctcatcggcggcggactcgctggcctcgtctacggcgacgtcttcatcggcggctcctaccagcaggtcgccgaccaggactacgcctaagtagtgtgctccgttcgtctggattcagctcatccaacgcaggcgcgcgtttcgatcggcgtcgtcatttgctttgctcttcatttcatcacgttatgtaacgtgccaatgatgtgtgtcgtcctggtctgttccattccgtccttgtattcatttcccttcttttttcggggtaaaatcgatgtaaagatctcatccgatctgccgttttcgatcgccttggagtgggaaaaaacaggtgattttcgtttcgac

SEQ ID NO: 132628 - DNA, 786 bp, Zea Mays
tcgatctcctgcgctggctgccatcgcgcgcgaacgaatctatttctcctctccccggccggcctccaaggtaatatattttaattatatcgtcatccattcaactccacacgagctaggaggacgcccggcctcgtccccgtccgtgtcgtccatggacggcaccaccgtgtgctccatgtgcggcgacgtcgggttccccgacaagctcttccgctgcgcccgctgccgccgccgcttccagcactcctactgcaccaactactacggcgccgcggccccggcgcaggcgggcgccggcgtgtgcgactggtgcctcagtgacgacgtcgtcagcgggaagaagcggcagtactcttcggcgtcgggatgcagcaagcggcatccgcaggtggaagaagcagactggagcacgcagcagccggcgttcccgcccagcagcgggtgcagcaagggcgccggcaaggtaaccggcagcgagcaggccgagggtggccggaggccccgcaggtacaagctcctcaaggacgtgctttgctagttagccaggtgctcgtacgtcgttgtactatgtactgtacgaaacaatgttttctactctaattagtagacaggtaaaactaggttactagtagctagctggtttaattagtttcatcttttttaattaccttagcttcgtccttgtacgagcgagtgtagttttgcgtgttgtgaaaagagacgctttggctactatgcatgcatgtgcataattaagctagctgctgccctgcttgtcgagcg

SEQ ID NO: 132629 - DNA, 1273 bp, Zea Mays
cattgttttgttttatatgttgatcagcccatcacaatgcctttgacagtgactttgctttttaaggtgcagtcaatacacatggcatccatcaaattacagaagaagttatttgtaggtatctaagaagttggagttgcatcaaaaggcgagggtgtcgctaagttccaacatgcattaaaattctatttttgtgatataatattttattaaataatttgtgtgtctttgcaacgcactagcattacgcaaactcaaatagaaatttatatattatagtcattcttgtcattccgtatctatgttttattctaatttttaactttcgtggcaacgcacgggcacatacctattatttcatgatgtgtgatctctttctaagacttctatttccatctgaactacaatatatgatatttatcatcatttttttctagatccatctttcatcccatccactctctgaaaatctaagcttgaatgcccaatactaaattttgcattatggaagcagtttgaacaaagaacaatctctgtcactttgtgtggcccaccagtaaaaataagacaacttgttagtctgattatatgcttctttgattaagagggctatgttcaaataaaacattccagtaaactggacaaagtatcttgaactggaagaagcctttcaaaaatacacatcctttttctacagttcaataactcacaacttcaattctggatgcaagtgtttattattctacactctgctgattcagacctgaaaatgtttgcagttgcaaagagaatatcaaataaaatacttgttgagcttaagtttcttcatcaaatcatttttgggaggcttcaaatgcactataccatggtttggtgaaaggagagaagatgaaggtgctggtacatcacaatcaatactagaagcaagacagacgcacccactattgttactgaaggtcaagatgcacaagatgatctgacaacaccacatgcacctaagatgtccaaaaagattactccaaggaagaaaagcaattgaactaccttatgtatattcaaaattagtgtattatccactatgttgtgtcaagaactatgacttcaaaattagtgtgtcatgaactatgctgtttcatgaactatgtcttcaaattctgggaagtggagtgcagtttcttgtataattttgaacatgtccatgtgcacctactctgctaattgtgtcatggactgacatgaattatgtcatgaactctgccaactgtgtcatgaa

SEQ ID NO: 132630 - DNA, 1258 bp, Zea Mays
cattgttttgttttatatgttgatcagcccatcacaatgcctttgacagtgactttgctttttaaggtgcagtcaatacacatggcatccatcaaattacagaagaagttatttgtaggtatctaagaagttggagttgcatcaaaaggcgagggtgtcgctaagttccaacatgcattaaaattctatttttgtgatataatattttattaaataatttgtgtgtctttgcaacgcactagcattacgcaaactcaaatagaaatttatatattatagtcattcttgtcattccgtatctatgttttattctaatttttaactttcgtggcaacgcacgggcacatacctattatttcatgatgtgtgatctctttctaagacttctatttccatctgaactacaatatatgatatttatcatcatttttttctagatccatctttcatcccatccactctctgaaaatctaagcttgaatgcccaatactaaattttgcattatggaagcagtttgaacaaagaacaatctctgtcactttgtgtggcccaccagtaaaaataagacaacttgttagtctgattatatgcttctttgattaagagggctatgttcaaataaaacattccagtaaactggacaaagtatcttgaactggaagaagcctttcaaaaatacacatcctttttctacagttcaataactcacaacttcaattctggatgcaagtgtttattattctacactctgctgattcagacctgaaaatgtttgcagttgcaaagagaatatcaaataaaatacttgttgagcttaagtttcttcatcaaatcatttttgggaggcttcaaatgtagcactataccatggtttggtgaaaggagagaagatgaaggtgctggtacatcacaatcaatactagaagcaagacagacgcacccactattgttactgaaggtcaagatgcacaagatgatctgacaacaccacatgcacctaagatgtccaaaaagattactccaaggaagaaaagcaattgaactaccttatgtatattcaaaattagtgtattatccactatgttgtgtcaagaactatgacttcaaaattagtgtgtcatgaactatgctgtttcatgaactatgtcttcaaattctgggaagtggagtgcagtttcttgtataattttgaacatgtccatgtgcacctactctgctaattgtgtcatggactgacatgaattatgtcatgaactc

SEQ ID NO: 132631 - DNA, 728 bp, Zea Mays
ctgatagtgccttcatgttttgtgttgtgctttcacatcttgatattatgtgcctcagtcaaagtttcatatttgtttctattgttttcttggttcaaatcatgcgttgcttgatggtgctgctgatttagctctagagatatgggggaaactacggaggaggaacaaatacatagtgatattgccagctggcctggcattaatatgtctgtaaaacctaccaactccagccttaagttgtatggtggtgcagcttttgggagacatgcatgatttcattgtgtaatgtatttaatgaaatgcccacaagtccagtctcaagggagaaggtagtctttagcctgcaaccatacacatacacaatttattacgagaattgcttatataattatgtcattaggttgcaaacatactacttgctcatgttggatgacatggaagcagtaggttgaccaaggcaacagctgagatagctcgtgcagccaaccgatcatggcttgctcttcttatcgatactgcatgtgaccagttttcatttatcctacaaagtctgtttgatctcgctatggagcacaaccgcaataaggactcacaatgtaagagcttgaccttgctattcatgctggttcgtcttgctttacatttgcctgggtatcatttggttcacagtgaagtaaattataattgtttagtaaatatttcattttattttgttctacatgttcatc

SEQ ID NO: 132632 - DNA, 588 bp, Zea Mays
ccaaaagtaaggttggttgcattgctatggttaactgatgatagtgagacatttcttatcgcatccaatggtccacatttaaaatcaataatgacaataacaaaatgttgtctctgccaatgtggatttatgtggaggtagatatcatttgacctcaaaaatagagattgcaaaaaatgctggcgcactactaatcatcatgtgatcctgaattccccctgatatcagctaacgagcagagtcaggtactattcctgtgaccgaagaaccatgtcggtcactaattattatttgcaaacttaacattgcttagaactggaactgcatctcctttgtgtagttgagctcgtcaaggtgtgcagccatggccttgttcatcggaggaggaccacatctcaggatctgaaatagcaggcgctggacaatgagattggatcatttccttagacacaaacccaacaccaccgttccagttctcaggaggctgattcaacacatagtagatcttaaagcggccaggataggttttggccatgtcgtccagcccatcctgtatgattggattgaatagaaattatcaaattcagt

SEQ ID NO: 132633 - DNA, 2155 bp, Zea Mays
acctccagcattccaaacctcagatcccccgcacgccgcgcctccgaaattccgaaacccaaatcagagcgccgcccccggcccccgctgcacgcaccgggcgggggcccatgcggccgcgcggctccgcgcccgcgccacaccgttggaaccgagcgggcgcgctagatgcctgagcccggcggccgctgcctcggcgacctcggcggtcagcgccaggtgctcaagggctggcctgacctgtggctggtgggggacaagcccggcctccgcgcgctctccaccgcggccatggccgccgcgccccagccgccgccgctcgaggccgaccaaaccctagcgctcccggacgtgcttctcctccgcgtcctcgcctgcctccctgagccccagctcacgggcgccgcctcgctcgtctgcaggcggtggacgcgcctcgcggggcgcctgcgccgccgcctcgccgtgcgggactgggccttcgtcgcgcaccgactgccataccgcttcccggacctggccgacctcgacctgttcccggcctctatcgccgcgcccaccacggcggtgccccacggcgccgctgcctccccgcttctcacctgcggcgtggtctcgctaaccctagacaccagcgcagacccgccgctcggcgcctgccggttcatcgacgacgacgcgctcgaccggggactcgccgccgtcgccgctagcttccccaacctcagccgcctctcggccaccgccgcctctgagtccggcgggctcatggccatcgctgtcggatgcccgacgcttcaggagctcgagctccaccgctgcaccgacctcgccctccgcccggtttccgccttcgcgcacctccagatcctccgcattgtcgccgcgtcccccgcgctctacggcaccgccgagggcggcggcgtcactgacatcggcctcaccatcctggcccatggatgcaagcggctggtcaagctggagcttcagggttgcgaggggagctacgacggcatcgcggctgtggggcgctgctgtgcgatgcttgaggagctcaccatcgctgaccacaggatggacggtgggtggcttgccgcgctagccttctgtgggaatctcaagaccctgcggctgcagagttgcagtaggatcgacgacgaccctggcccagcggaacaccttggtgcttgtctcacgctcgagagcctgcagctgcatcggtgccagctgcgtgaccgtagcgccctccacgccctctttttggtctgtgagggagcccgtgagatacagttccagaattgctgggggcttgaagatgatatgtttgccttggctggcctatgcaggagagtaaaaatcctgttgttagaagggtgctcactattaacaactcgaggtctagaatcggtgataacctcatggggcgacctccagagtctagaagttgttacctgcaacaaaatcaaggatgaggaaataactcctacccttgcagagcttttctccaatctcaaagagctgaagtggcggcccgacaacaagtcacttcttgctgcaagcctcgttggcactgggatgggaaagaagggcagggtatttttcaaaagggtatgaagtctgatctccttggtgctccattccctgtgatgcgcttcacctgttatctgccctgtaaggattgtcctctcttgcagcttatcttacctgcccatcaacgaatcaaagggaaggtgctcaacaattcagcaggtgttgctgcttagttggattgctagtcgaaactaggctaccgcacaaagttcctagttcttgacttgatcaaagtcaaccacgtttcttgatactcaaaagccgtacacaatgtggcatctgttcttccacttaagaccaaggacagtcataactagtcagaacctggtagtttgatgatgcacagtttcgggtaccaggcgcctgatttgtgtttgtacctgtgttcatgtgttgtaactgacaagctgaggtttgctcagaggagcctgaccgtagtatttctgtatgaggaaaagcattgcttcataaattatggcagagttaaattatggatagaaccagtagaaccacatgtttacagcacatggtctaactgtcgaatgaaagtgtgcctgacgtctga

SEQ ID NO: 132634 - DNA, 2013 bp, Zea Mays
acctccagcattccaaacctcagatcccccgcacgccgcgcctccgaaattccgaaacccaaatcagagcgccgcccccggcccccgctgcacgcaccgggcgggggcccatgcggccgcgcggctccgcgcccgcgccacaccgttggaaccgagcgggcgcgctagatgcctgagcccggcggccgctgcctcggcgacctcggcggtcagcgccaggtgctcaagggctggcctgacctgtggctggtgggggacaagcccggcctccgcgcgctctccaccgcggccatggccgccgcgccccagccgccgccgctcgaggccgaccaaaccctagcgctcccggacgtgcttctcctccgcgtcctcgcctgcctccctgagccccagctcacgggcgccgcctcgctcgtctgcaggcggtggacgcgcctcgcggggcgcctgcgccgccgcctcgccgtgcgggactgggccttcgtcgcgcaccgactgccataccgcttcccggacctggccgacctcgacctgttcccggcctctatcgccgcgcccaccacggcggtgccccacggcgccgctgcctccccgcttctcacctgcggcgtggtctcgctaaccctagacaccagcgcagacccgccgctcggcgcctgccggttcatcgacgacgacgcgctcgaccggggactcgccgccgtcgccgctagcttccccaacctcagccgcctctcggccaccgccgcctctgagtccggcgggctcatggccatcgctgtcggatgcccgacgcttcaggagctcgagctccaccgctgcaccgacctcgccctccgcccggtttccgccttcgcgcacctccagatcctccgcattgtcgccgcgtcccccgcgctctacggcaccgccgagggcggcggcgtcactgacatcggcctcaccatcctggcccatggatgcaagcggctggtcaagctggagcttcagggttgcgaggggagctacgacggcatcgcggctgtggggcgctgctgtgcgatgcttgaggagctcaccatcgctgaccacaggatggacggtgggtggcttgccgcgctagccttctgtgggaatctcaagaccctgcggctgcagagttgcagtaggatcgacgacgaccctggcccagcggaacaccttggtgcttgtctcacgctcgagagcctgcagctgcatcggtgccagctgcgtgaccgtagcgccctccacgccctctttttggtctgtgagggagcccgtgagatacagttccagaattgctgggggcttgaagatgatatgtttgccttggctggcctatgcaggagagtaaaaatcctgttgttagaagggtgctcactattaacaactcgaggtctagaatcggtgataacctcatggggcgacctccagagtctagaagttgttacctgcaacaaaatcaaggatgaggaaataactcctacccttgcagagcttttctccaatctcaaagagctgaagtggcggcccgacaacaagtcacttcttgctgcaagcctcgttggcactgggatgggaaagaagggcagggtatttttcaaaaggcttatcttacctgcccatcaacgaatcaaagggaaggtgctcaacaattcagcaggtgttgctgcttagttggattgctagtcgaaactaggctaccgcacaaagttcctagttcttgacttgatcaaagtcaaccacgtttcttgatactcaaaagccgtacacaatgtggcatctgttcttccacttaagaccaaggacagtcataactagtcagaacctggtagtttgatgatgcacagtttcgggtaccaggcgcctgatttgtgtttgtacctgtgttcatgtgttgtaactgacaagctgaggtttgctcagaggagcctgaccgtagtatttctgtatgaggaaaagcattgcttcataaattatggcagagttaaattatggatagaaccagtagaa

SEQ ID NO: 132635 - DNA, 657 bp, Zea Mays
atgaaaagattgcgtggtacaaacacacacagcttgataaattggcatgcgacatcagtctcgtcgcgcctctcgcaactacgggacgacaaagaaaaaaaaagagaaaaaaacaaaattacagagaaatcaacagcacgttcagacatcactagggactgcagagaccgtggagggagagggaagaattccattcctcaacctcctcctcatcttctggcaccgcctctcgcaaaagccaggatgcatgcaacgccgcctcccgaaggccgaagcacaccctcgatcacgctcccagctagctgtaatttaagggtaataattcaccaaggagcggtacgtccctccggccttccagctggccgggatgacattgctggcgacgaggaccttgccggagtcggaggtgagccggagcgagaagggcgcgctcagcgccttgccggagttggagttgtagcgccacagcgcgccccagttctgcaccatcggggtccatgtgccgcacccggcctccatgaggtcgacggcgctgaggtcgccgtcgccgtcctcgaactcgaccagcacctcgaagtagaacgggttggagccctggtccacccggaaggcgatgttcacgccgctgtacttgcacgggaccctgccgcaaattaa

SEQ ID NO: 132636 - DNA, 1727 bp, Zea Mays
aactcaccaaacaaacactcgagcaaagctcagcctcacacagcctctcctctcgagctagagtgctactagcttagaagaagcagaagcttacagctgaagctgcagcaatggcgaaatcttacaccttactgttcgtcgcactggtcgttctggcccttctagtgagccccattgcttgctcccgcaagctcgccaagccgaacaagcccaagccgacccacaagccggcggccagggtcacgcccggcagcaaccacaccgatatccctgcagtgtccgccgcctacggctccggcggctggttgtctgccggcgcgacgtactacggcgccccaaacggcgacggcagtgacggcggtgcgtgcgggtaccagaccgccgtcgggcagcgccccttctcgtcgatgatcgcggccgggagcccgtccctgttcaagggaggcaagggctgcggcgcctgctacgaggttaaatgcgacagcaacccggcatgctccggccagccggccaccgtggtcatcaccgacgagtgccccggcggtgtctgcctcgcagaggcggctcacttcgacatgagcggcacctccatgggcgccatggcgaagcccggcatggccgacaggcttcgctccgccggcatcctcaagatccagtacaagagggtgccgtgcaagtacagcggcgtgaacatcgccttccgggtggaccagggatccaacccgttctacttggaggtgctcatcgagttcgaggacggcgacggcgacctcagcgccgtccacctcatggaggccgggtgcggcacgtggaccccgatggtgcagaactggggcgcgctctggcgctacaactccaacaccggcaaggcgctgaaggcgcccttctcgctccggctgacctccgactccggcagggtgctcgttgccaacaacgtcatccccgccggctggaaccccggagccacgtaccgctccttggtgaactactcctgattgatgaactgcggcagcggttcggttctccgccccccattgcatgcgcttggctggattattatgcgtggccaagaagtgctttccagggtgcgtggtgtttaaagaacgagtctcgagtttgttttctgagaagaagaagaaaatgtctgttcgggtgtccgcgagaggcggtgtaagaagaggaggaggaggacaagaaggttaaggagccgtgcgttcttcactccctccacggtctctgcagtcacctagtgatgtgtgtagtggtcggtgtcggtttctttttcgttgtgatggctcaggacaggagttgggcgttgtatcagtctctgtgtgtgtgcgtagttttctgtaccacgcaatcctttcagagaattgagttcctgctttcttgtttcaccgtgagcgcactccaaataagctccaatgactactgaaccagcaccagctattagctgcatactagctctactcttgggaaaactgaatcgttggagacaataaaacgtatagtctgccactgccatgtatgtactccgatcatttggtaatctggcccaccaagtttgcagacgcaatagactgactgcaccagttttcccctgaacttgctaactgaagcaccatgtttcgttcacaaaaaacggcactgcaatctactactctgttctcgaatatctgatactcactagttaatttttaaactaaaacacaacaaataaaaaagaa

SEQ ID NO: 132637 - DNA, 1505 bp, Zea Mays
aactcaccaaacaaacactcgagcaaagctcagcctcacacagcctctcctctcgagctagagtgctactagcttagaagaagcagaagcttacagctgaagctgcagcaatggcgaaatcttacaccttactgttcgtcgcactggtcgttctggcccttctagtgagccccattgcttgctcccgcaagctcgccaagccgaacaagcccaagccgacccacaagccggcggccagggtcacgcccggcagcaaccacaccgatatccctgcagtgtccgccgcctacggctccggcggctggttgtctgccggcgcgacgtactacggcgccccaaacggcgacggcagtgacggcggtgcgtgcgggtaccagaccgccgtcgggcagcgccccttctcgtcgatgatcgcggccgggagcccgtccctgttcaagggaggcaagggctgcggcgcctgctacgaggttaaatgcgacagcaacccggcatgctccggccagccggccaccgtggtcatcaccgacgagtgccccggcggtgtctgcctcgcagaggcggctcacttcgacatgagcggcacctccatgggcgccatggcgaagcccggcatggccgacaggcttcgctccgccggcatcctcaagatccagtacaagaggtataatatgcgctatatacttactggaacgtcgttgagagctttgtccagtcaaacggcgcgtgaatctcggcggtaaactctgccgtctcgtccgtcgcagggtgccgtgcaagtacagcggcgtgaacatcgccttccgggtggaccagggatccaacccgttctacttggaggtgctcatcgagttcgaggacggcgacggcgacctcagcgccgtccacctcatggaggccgggtgcggcacgtggaccccgatggtgcagaactggggcgcgctctggcgctacaactccaacaccggcaaggcgctgaaggcgcccttctcgctccggctgacctccgactccggcagggtgctcgttgccaacaacgtcatccccgccggctggaaccccggagccacgtaccgctccttggtgaactactcctgattgatgaactgcggcagcggttcggttctccgccccccattgcatgcgcttggctggattattatgcgtggccaagaagtgctttccagggtgcgtggtgtttaaagaacgagtctcgagtttgttttctgagaagaagaagaaaatgtctgttcgggtgtccgcgagaggcggtgtaagaagaggaggaggaggacaagaaggttaaggagccgtgcgttcttcactccctccacggtctctgcagtcacctagtgatgtgtgtagtggtcggtgtcggtttctttttcgttgtgatggctcaggacaggagttgggcgttgtatcagtctctgtgtgtgtgcgtagttttctgtaccacgcaatcctttcagagaattgagttcctgctttcttgtttcaccgtg

SEQ ID NO: 132638 - DNA, 2053 bp, Zea Mays
acagaagaatcgaattagatacagttgggagctgttcgctcaaacaacacctatcctattccgatcctatatatcgatcatatagtagtgatccactaatctgtctcatgtcctataatataccgtaatttttttagtaccagatcttacgtatgtatcaaaaaaaattgagaattacattatatcctttttcctcaatttgagaatccgtgggcagctgcccccgcgtcgcctccgcctcggcgacacgggcgacgccctgcacccttaccgctgtcgtccgcaaattctctctcccctcccattgccatcgccggaggggtctgctggaggccggctcagcccctaggatggtggcggcggggtgtttcgcgcggatctggtgagagatggcacggcacaagcatgcggcggcacggtacctatgggtggccgtagccgtgctggggcacgccgtggcacgcgccgcagtgctcatcggatggcggctgaggcccaggcggccatgcatggcggggcgccgctgttaggacgtcgtggcctgcctccgtgcctcgctcgaggatctgctccggtcgtcgccaccgtgcgctgttggtgggactagggcgacgccgagctgtgcttcttcgaggcgaaggccgtcgacacgtgcgtcggtgggcagatctgtgcgggggtcgcgcaccgcggcatgggcgactcggctgggccggtgcgctggttgcggcgaggatgtccactggctggtgactgcggtggagatctggcggtgcggtcgcagcgctgttgctgcctgctggggctacattttggtcccgcggcggtggcgggcttcccggttgtgggcgagtggctactgtgttgagtgcttccggtggttgcagaagtgagggtcggtgaggagcagaggttggagcagcgacctgtggcctgctcgtgcgggcggcgtggccttgtctggtgctgcggtcgccggatatggctcctcagtggtggtgtgtggcgacggcaggtgggcagcaacctgtcgtgccctactggcgtctgcggtggtgcgcgtgccagcggatctcgcgcgtcgcagcggctgctgccagggatggccgatgggaggtgcggcacgaggtgctgccgccgctcgaccaggtccatgggcctagctagaggtggtggtcgatgtagctttgcggttgttgtggcagtcggcgcgtcgatgtccctttggatgggtctgtgtgggttgtctgggcggcggtggcggtggaggtggttgctttgtcctgggttcctggccggtcattttgctggggttttcttgggcgaaagctttggtgacggcgccgcccctgggcgccgcttctcctgttgagggcgtcagctcagctccccagcactgtcttacgtgggcgaaagcccggtccatctcgaaccggcgacgatggcgtccccgacgtcactcccttcctgaaggcgtcgctactgaagtttgtatcgaccacgtcgtagcctgtggtggttgatttcgtctttcggtgacattttgcgtgtggaggtgggggcttgcatcatgaagtcgaagctgctacgtcaggggatgtggctcgacaacgatgacgtggggcgaaccccctgcttcgtgggttggtctgcttcgaagatgaggcatttggcggaggcggggcagtggattaaggttttggaagtctcgctggtgaagaattggagctgtctagagtggggtgtctcgtggcttggcaacgacggcacgccgcagtcttccttctcttgtgccagtgtttgtaatcgtggtcgtgtttcctttggccttgtgctgcctgtcttgggagtcggggctcgtcacttgtgttgagctcgataacgatgactcagggtgggcactgtgtgagttgtttgtgcgcctggtattggttttgggtccggtttcctttaaaactgggtcaattcttttcttcttaattgattggcagagatcctgctattacgttaatttttttttactttgaatattcagattgaaatacggccggcc

SEQ ID NO: 132639 - DNA, 408 bp, Zea Mays
aagttttgcctggtggagatggaggtccgtgactgcgagcttgaccagtacgggcttgtcagcagtgatgtatacgtggattacctcgaaaatgctcgggaagtgtttgcttcgaggctcggcatcggcagagattcgatcgcacgaacaggcaacgctctggcactctccgagcagaaactcaactactacacgcctctcaagcgtggcgctaggttcgttgtcatggtgagggtcgtccagatcaagggcgcgcggatggtcctcgagcacttcgtcgagacgctgccgccggagcgcaagctcgtcctggaagcgacggccaccgtggtcttcctcgacaaagactaccgtccgacgcgcgtgttcccggaggtggcgtccaagatgcggctgcacttcttctga

SEQ ID NO: 132640 - DNA, 1207 bp, Zea Mays
aaaccgaaacaaacagtcactcatcctctttctgtctttcacccccgcgttcacgccggcccaaaccccaaatcgcacgcgtcatcccaatcccaacccaattacgacacgcctgccgccgccacgccgcccgaaatccggaggggaagctcctcgacgacgtagcggccagtggcagctcggacgatggcctcgtccaactccgccgccccggctcccgccgacgggggcgacgacctcgaccagctcctcgacagcgcgctcgacgacttcaccaacctcgatctctctgcctctgccgcccccaaaagctccggcgaggcatcggggtcaggatcgggaggcaaggggccagtgaaggggctggggctggggcttccggaccccaaggcgccgaagcggcgcgcggggaagcagccgccgccgaggggcgcgtgcgccaaagaggcgctcgaggagctgacgcgcgagacgcgggaggctgtgcgcggtctcgagacggccactgggagtgtcccgtcactggacgatgacgccatgatggaggagtttgtcaagcagttccaggagttcgcaggggcacaggatatggactccattgttgaaacaatgatgcagcaacttctgtccaaggagattcttcatgagcccatgaaggacattgtagaaaagtatccaaaatggctggaagataataaagataagataagcaaagaagaatatgggcgttataataatcagcttgaactcatggtgaagcttattgaggtctatgaaaatgatcctgagaacatgactaggatttttgacatcatgcaaaacatgcaagaatgtggtcaaccccccagtgatcttgtccaagatattgtacctgatctggatctaagcaagttgggacaactgtctcctgagatgcttgaatcagctccaaattgttgcgtaatgtgaggaccaaaagcattccatttgggattcgaattccatgaagttttctttacctgtacgaacccccctttctggctttagtagattgaagataatttccatctggataatctgtaaagccttgcaaatatataatgagttcaatgttctttctggttcttgaatggaatctatattctttctgttgatgtactgtaacactcccttccctcttatacaatgagtacatgcattgcctttcaaaagcccctccttttgtgac

SEQ ID NO: 132641 - DNA, 1752 bp, Zea Mays
gtcctccgttctcctcttcctctctctctcttctctctctctctctacggattgcctcacacgcatctcgcgtgcaattcaagcgaaactttctgaatatcaaagtggcatagagctccacttttatggccatccctatgaaggcctctccgggttcctgatatagatgtttccttgttctgaacatgaaaagttctcaggtactccgccgttgatgaactgcctccacacctgcggcgacaagaagacgctgaagaagtggtttttcatcgacaagacagtaggctaaatccagtcccagagaacaaattgaagcaccactccccaccgcacagcagcacagctcttctcttcaccgatcccgatggatatgggcagcggctcgtcacctgtcatcaccgatccgatatcgataagcccaccgctgctgggaggcttgacgtcgaacctgatgccgttctcggtcatgtccggaggctgctcctccagtcctagcatgagcgccagcagcaggcgtaaaatcgaggaggtccttgtcaatggcctgctagacgcgatgaaatcgtcgtcgcctcgcaagaagcacaacctcgccttcggacaggataattcgcccgacgaagatcctgcttacactgcatggctgtcaaaatgcccttctgcgctggcctccttcaagcagatagtagccaacgcacagggcaggaggatcgctgtgttcttggattacgacggcaccctgtcgccgatcgtcgacgatcccgacaaagcgttcatgtcccctgtgatgagagctgctgttagaaatgtcgcgaagtacttccctaccgcgattgtcagcggaaggtcccgtaagaaggtgtttgaatttgtaaaactgacggaactgtactacgctggtagtcacgggatggacatagtgacatctgcagcagcacatgctactgaaaagtgcaaagaagccaatctcttccaacctgcttgcgagtttctccctatgattaatgaggtttccaagtgcctcgtggaggtcacgagttcaattgaaggtgcaagagttgagaacaacaagttctgtgtatctgtacattaccgcaacgtagcagagaaggactggaaagtggtcgcaggactcgtgaaacaagtcttggaggccttccctcgtctcaaagtaaccaacgggcgaatggttttagaggttcgcccggtgatcgactgggacaagggaaaggctgtcgagttcctgcttcggtcgctcggcctaagcgactccgaagatgtggttcctatctacatcggagacgatcgaacagacgaagacgccttcaaggtactgcgagagcgaagctgtggatacggaatcctagtctcgcaggtgcccaaggacactgaagccttctactcgctgagagacccgtctgaagtgatggggttcctcaattccttggtgagatggaagaagcacccgctgtgacgcaactgaaaacacaacgactgattcagaagccgtaaagcgactgtacttcgtgcggcggcaattttgtagagtttttggctcaccgggtggctcattctttcatgcgtttttattttttatttttttaactgtcacagtccttcgtcactgagaaataacaagtggttgtcccacaccctcttgcaactgtaatctgtaagcaagaggccctccctgttcggtctatatatatatattgaataaaaccgggacgcttttgccttgccctgaaactg

SEQ ID NO: 132642 - DNA, 1716 bp, Zea Mays
gtcctccgttctcctcttcctctctctctcttctctctctctctctacggattgcctcacacgcatctcgcgtgcaattcaagcgaaactttctgaatatcaaagtggcatagagctccacttttatggccatccctatgaaggcctctccgggttcctgatatagatgtttccttgttctgaacatgaaaagttctcaggtactccgccgttgatgaactgcctccacacctgcggcgacaagaagacgctgaagaagtggtttttcatcgacaagacagtaggctaaatccagtcccagagaacaaattgaagcaccactccccaccgcacagcagcacagctcttctcttcaccgatcccgatggatatgggcagcggctcgtcacctgtcatcaccgatccgatatcgataagcccaccgctgctgggaggcttgacgtcgaacctgatgccgttctcggtcatgtccggaggctgctcctccagtcctagcatgagcgccagcagcaggcgtaaaatcgaggaggtccttgtcaatggcctgctagacgcgatgaaatcgtcgtcgcctcgcaagaagcacaacctcgccttcggacaggataattcgcccgacgaagatcctgcttacactgcatggctgatagtagccaacgcacagggcaggaggatcgctgtgttcttggattacgacggcaccctgtcgccgatcgtcgacgatcccgacaaagcgttcatgtcccctgtgatgagagctgctgttagaaatgtcgcgaagtacttccctaccgcgattgtcagcggaaggtcccgtaagaaggtgtttgaatttgtaaaactgacggaactgtactacgctggtagtcacgggatggacatagtgacatctgcagcagcacatgctactgaaaagtgcaaagaagccaatctcttccaacctgcttgcgagtttctccctatgattaatgaggtttccaagtgcctcgtggaggtcacgagttcaattgaaggtgcaagagttgagaacaacaagttctgtgtatctgtacattaccgcaacgtagcagagaaggactggaaagtggtcgcaggactcgtgaaacaagtcttggaggccttccctcgtctcaaagtaaccaacgggcgaatggttttagaggttcgcccggtgatcgactgggacaagggaaaggctgtcgagttcctgcttcggtcgctcggcctaagcgactccgaagatgtggttcctatctacatcggagacgatcgaacagacgaagacgccttcaaggtactgcgagagcgaagctgtggatacggaatcctagtctcgcaggtgcccaaggacactgaagccttctactcgctgagagacccgtctgaagtgatggggttcctcaattccttggtgagatggaagaagcacccgctgtgacgcaactgaaaacacaacgactgattcagaagccgtaaagcgactgtacttcgtgcggcggcaattttgtagagtttttggctcaccgggtggctcattctttcatgcgtttttattttttatttttttaactgtcacagtccttcgtcactgagaaataacaagtggttgtcccacaccctcttgcaactgtaatctgtaagcaagaggccctccctgttcggtctatatatatatattgaataaaaccgggacgcttttgccttgccctgaaactg

SEQ ID NO: 132643 - DNA, 1642 bp, Zea Mays
gtcctccgttctcctcttcctctctctctcttctctctctctctctacggattgcctcacacgcatctcgcgtgcaattcaagttctcaggtactccgccgttgatgaactgcctccacacctgcggcgacaagaagacgctgaagaagtggtttttcatcgacaagacagtaggctaaatccagtcccagagaacaaattgaagcaccactccccaccgcacagcagcacagctcttctcttcaccgatcccgatggatatgggcagcggctcgtcacctgtcatcaccgatccgatatcgataagcccaccgctgctgggaggcttgacgtcgaacctgatgccgttctcggtcatgtccggaggctgctcctccagtcctagcatgagcgccagcagcaggcgtaaaatcgaggaggtccttgtcaatggcctgctagacgcgatgaaatcgtcgtcgcctcgcaagaagcacaacctcgccttcggacaggataattcgcccgacgaagatcctgcttacactgcatggctgtcaaaatgcccttctgcgctggcctccttcaagcagatagtagccaacgcacagggcaggaggatcgctgtgttcttggattacgacggcaccctgtcgccgatcgtcgacgatcccgacaaagcgttcatgtcccctgtgatgagagctgctgttagaaatgtcgcgaagtacttccctaccgcgattgtcagcggaaggtcccgtaagaaggtgtttgaatttgtaaaactgacggaactgtactacgctggtagtcacgggatggacatagtgacatctgcagcagcacatgctactgaaaagtgcaaagaagccaatctcttccaacctgcttgcgagtttctccctatgattaatgaggtttccaagtgcctcgtggaggtcacgagttcaattgaaggtgcaagagttgagaacaacaagttctgtgtatctgtacattaccgcaacgtagcagagaaggactggaaagtggtcgcaggactcgtgaaacaagtcttggaggccttccctcgtctcaaagtaaccaacgggcgaatggttttagaggttcgcccggtgatcgactgggacaagggaaaggctgtcgagttcctgcttcggtcgctcggcctaagcgactccgaagatgtggttcctatctacatcggagacgatcgaacagacgaagacgccttcaaggtactgcgagagcgaagctgtggatacggaatcctagtctcgcaggtgcccaaggacactgaagccttctactcgctgagagacccgtctgaagtgatggggttcctcaattccttggtgagatggaagaagcacccgctgtgacgcaactgaaaacacaacgactgattcagaagccgtaaagcgactgtacttcgtgcggcggcaattttgtagagtttttggctcaccgggtggctcattctttcatgcgtttttattttttatttttttaactgtcacagtccttcgtcactgagaaataacaagtggttgtcccacaccctcttgcaactgtaatctgtaagcaagaggccctccctgttcggtctatatatatatattgaataaaaccgggacgcttttgccttgccctgaaactg

SEQ ID NO: 132644 - DNA, 1850 bp, Zea Mays
gtcctccgttctcctcttcctctctctctcttctctctctctctctacggattgcctcacacgcatctcgcgtgcaattcaagcgaaactttctgaatatcaaagtggcatagagctccacttttatggccatccctatgaaggcctctccgggttcctgatatagatgtttccttgttctgaacatgaaaagttctcaggtactccgccgttgatgaactgcctccacacctgcggcgacaagaagacgctgaagaagtggtttttcatcgacaagacagtaggctaaatccagtcccagagaacaaattgaagcaccactccccaccgcacagcagcacagctcttctcttcaccgatcccgatggatatgggcagcggctcgtcacctgtcatcaccgatccgatatcgataagcccaccgctgctgggaggcttgacgtcgaacctgatgccgttctcggtcatgtccggaggctgctcctccagtcctagcatgagcgccagcagcaggcgtaaaatcgaggaggtccttgtcaatggcctgctagacgcgatgaaatcgtcgtcgcctcgcaagaagcacaacctcgccttcggacaggataattcgcccgacgaagatcctgcttacactgcatggctgtcaaaatgcccttctgcgctggcctccttcaagcagatagtagccaacgcacagggcaggaggatcgctgtgttcttggattacgacggcaccctgtcgccgatcgtcgacgatcccgacaaagcgttcatgtcccctgtgatgagagctgctgttagaaatgtcgcgaagtacttccctaccgcgattgtcagcggaaggtcccgtaagaaggtgtttgaatttgtaaaactgacggaactgtactacgctggtagtcacgggatggacatagtgacatctgcagcagcacatgctactgaaaagtgcaaagaagccaatctcttccaacctgcttgcgagtttctccctatgattaatgaggtgtgttttatcttacagctactgcactaacaaactgcatttcttagtcgcagtacctcaacttgatatatctggaactctgttactgttcctagcgggtttccaagtgcctcgtggaggtcacgagttcaattgaaggtgcaagagttgagaacaacaagttctgtgtatctgtacattaccgcaacgtagcagagaaggactggaaagtggtcgcaggactcgtgaaacaagtcttggaggccttccctcgtctcaaagtaaccaacgggcgaatggttttagaggttcgcccggtgatcgactgggacaagggaaaggctgtcgagttcctgcttcggtcgctcggcctaagcgactccgaagatgtggttcctatctacatcggagacgatcgaacagacgaagacgccttcaaggtactgcgagagcgaagctgtggatacggaatcctagtctcgcaggtgcccaaggacactgaagccttctactcgctgagagacccgtctgaagtgatggggttcctcaattccttggtgagatggaagaagcacccgctgtgacgcaactgaaaacacaacgactgattcagaagccgtaaagcgactgtacttcgtgcggcggcaattttgtagagtttttggctcaccgggtggctcattctttcatgcgtttttattttttatttttttaactgtcacagtccttcgtcactgagaaataacaagtggttgtcccacaccctcttgcaactgtaatctgtaagcaagaggccctccctgttcggtctatatatatatattgaataaaaccgggacgcttttgccttgccctgaaactg

SEQ ID NO: 132645 - DNA, 1805 bp, Zea Mays
gtcctccgttctcctcttcctctctctctcttctctctctctctctacggattgcctcacacgcatctcgcgtgcaattcaagcgaaactttctgaatatcaaagtggcatagagctccacttttatggccatccctatgaaggcctctccgggttcctgatatagatgtttccttgttctgaacatgaaaagttctcaggtactccgccgttgatgaactgcctccacacctgcggcgacaagaagacgctgaagaagtggtttttcatcgacaagacagtaggctaaatccagtcccagagaacaaattgaagcaccactccccaccgcacagcagcacagctcttctcttcaccgatcccgatggatatgggcagcggctcgtcacctgtcatcaccgatccgatatcgataagcccaccgctgctgggaggcttgacgtcgaacctgatgccgttctcggtcatgtccggaggctgctcctccagtcctagcatgagcgccagcagcaggcgtaaaatcgaggaggtccttgtcaatggcctgctagacgcgatgaaatcgtcgtcgcctcgcaagaagcacaacctcgccttcggacaggataattcgcccgacgaagatcctgcttacactgcatggctgtcaaaatgcccttctgcgctggcctccttcaagcagatagtagccaacgcacagggcaggaggatcgctgtgttcttggattacgacggcaccctgtcgccgatcgtcgacgatcccgacaaagcgttcatgtcccctgtgatgagagctgctgttagaaatgtcgcgaagtacttccctaccgcgattgtcagcggaaggtcccgtaagaaggtgtttgaatttgtaaaactgacggaactgtactacgctggtagtcacgggatggacatagtgacatctgcagcagcacatgctactgaaaagtgcaaagaagccaatctcttccaacctgcttgcgagtttctccctatgattaatgaggtaatcacatgagtaaactgctgagcacggtctaaaccgcacttctgcaacaggtttccaagtgcctcgtggaggtcacgagttcaattgaaggtgcaagagttgagaacaacaagttctgtgtatctgtacattaccgcaacgtagcagagaaggactggaaagtggtcgcaggactcgtgaaacaagtcttggaggccttccctcgtctcaaagtaaccaacgggcgaatggttttagaggttcgcccggtgatcgactgggacaagggaaaggctgtcgagttcctgcttcggtcgctcggcctaagcgactccgaagatgtggttcctatctacatcggagacgatcgaacagacgaagacgccttcaaggtactgcgagagcgaagctgtggatacggaatcctagtctcgcaggtgcccaaggacactgaagccttctactcgctgagagacccgtctgaagtgatggggttcctcaattccttggtgagatggaagaagcacccgctgtgacgcaactgaaaacacaacgactgattcagaagccgtaaagcgactgtacttcgtgcggcggcaattttgtagagtttttggctcaccgggtggctcattctttcatgcgtttttattttttatttttttaactgtcacagtccttcgtcactgagaaataacaagtggttgtcccacaccctcttgcaactgtaatctgtaagcaagaggccctccctgttcggtctatatatatatattgaataaaaccgggacgcttttgccttgccctgaaactg

SEQ ID NO: 132646 - DNA, 1934 bp, Zea Mays
gtttctgcttaatttgtgcagcgaaactttctgaatatcaaagtggcatagagctccacttttatggccatccctatgaaggcctctccgggttcctgatatagatgtttccttgttctgaacatgaaaagttctcaggtactccgccgttgatgaactgcctccacacctgcggcgacaagaagacgctgaagaagtggtttttcatcgacaagacagtaggctaaatccagtcccagagaacaaattgaagcaccactccccaccgcacagcagcacagctcttctcttcaccgatcccgatggatatgggcagcggctcgtcacctgtcatcaccgatccgatatcgataagcccaccgctgctgggaggcttgacgtcgaacctgatgccgttctcggtcatgtccggaggctgctcctccagtcctagcatgagcgccagcagcaggcgtaaaatcgaggaggtccttgtcaatggcctgctagacgcgatgaaatcgtcgtcgcctcgcaagaagcacaacctcgccttcggacaggataattcgcccgacgaagatcctgcttacactgcatggctgtcaaaatgcccttctgcgctggcctccttcaagcagatagtagccaacgcacagggcaggaggatcgctgtgttcttggattacgacggcaccctgtcgccgatcgtcgacgatcccgacaaagcgttcatgtcccctgtgatgagagctgctgttagaaatgtcgcgaagtacttccctaccgcgattgtcagcggaaggtcccgtaagaaggtgtttgaatttgtaaaactgacggaactgtactacgctggtagtcacgggatggacatagtgacatctgcagcagcacatgctactgaaaagtgcaaagaagccaatctcttccaacctgcttgcgagtttctccctatgattaatgaggtgtgttttatcttacagctactgcactaacaaactgcatttcttagtcgcagtacctcaacttgatatatctggaactctgttactgttcctagcgggtaatctatcaaatttccgtacttgctaagactatcttcacatactcatattcaaacttcgctctgcgaacaatgaaaaacagtgttttagccttttaggtaatcacatgagtaaactgctgagcacggtctaaaccgcacttctgcaacaggtttccaagtgcctcgtggaggtcacgagttcaattgaaggtgcaagagttgagaacaacaagttctgtgtatctgtacattaccgcaacgtagcagagaaggactggaaagtggtcgcaggactcgtgaaacaagtcttggaggccttccctcgtctcaaagtaaccaacgggcgaatggttttagaggttcgcccggtgatcgactgggacaagggaaaggctgtcgagttcctgcttcggtcgctcggcctaagcgactccgaagatgtggttcctatctacatcggagacgatcgaacagacgaagacgccttcaaggtactgcgagagcgaagctgtggatacggaatcctagtctcgcaggtgcccaaggacactgaagccttctactcgctgagagacccgtctgaagtgatggggttcctcaattccttggtgagatggaagaagcacccgctgtgacgcaactgaaaacacaacgactgattcagaagccgtaaagcgactgtacttcgtgcggcggcaattttgtagagtttttggctcaccgggtggctcattctttcatgcgtttttattttttatttttttaactgtcacagtccttcgtcactgagaaataacaagtggttgtcccacaccctcttgcaactgtaatctgtaagcaagaggccctccctgttcggtctatatatatatattgaataaaaccgggacgcttttgccttgccctg

SEQ ID NO: 132647 - DNA, 1849 bp, Zea Mays
gtcctccgttctcctcttcctctctctctcttctctctctctctctacggattgcctcacacgcatctcgcgtgcaattcaagcgaaactttctgaatatcaaagtggcatagagctccacttttatggccatccctatgaaggcctctccgggttcctgatatagatgtttccttgttctgaacatgaaaagttctcaggtactccgccgttgatgaactgcctccacacctgcggcgacaagaagacgctgaagaagtggtttttcatcgacaagacagtaggctaaatccagtcccagagaacaaattgaagcaccactccccaccgcacagcagcacagctcttctcttcaccgatcccgatggatatgggcagcggctcgtcacctgtcatcaccgatccgatatcgataagcccaccgctgctgggaggcttgacgtcgaacctgatgccgttctcggtcatgtccggaggctgctcctccagtcctagcatgagcgccagcagcaggcgtaaaatcgaggaggtccttgtcaatggcctgctagacgcgatgaaatcgtcgtcgcctcgcaagaagcacaacctcgccttcggacaggataattcgcccgacgaagatcctgcttacactgcatggctgtcaaaatgcccttctgcgctggcctccttcaagcagatagtagccaacgcacagggcaggaggatcgctgtgttcttggattacgacggcaccctgtcgccgatcgtcgacgatcccgacaaagcgttcatgtcccctgtgatgagagctgctgttagaaatgtcgcgaagtacttccctaccgcgattgtcagcggaaggtcccgtaagaaggtgtttgaatttgtaaaactgacggaactgtactacgctggtagtcacgggatggacatagtgacatctgcagcagcacatgctactgaaaagtgcaaagaagccaatctcttccaacctgcttgcgagtttctccctatgattaatgaggtttccaagtgcctcgtggaggtcacgagttcaattgaaggtgcaagagttgagaacaacaagttctgtgtatctgtacattaccgcaacgtagcagagaaggactggaaagtggtcgcaggactcgtgaaacaagtcttggaggccttccctcgtctcaaagtaaccaacgggcgaatggttttagaggttcgcccggtgatcgactgggacaagggaaaggctgtcgagttcctgcttcggtcgctcggcctaagcgactccgaagatgtggttcctatctacatcggagacgatcgaacagacgaagacgccttcaaggtactgcgagagcgaagctgtggatacggaatcctagtctcgcaggtgcccaaggacactgaagccttctactcgctgagagacccgtctgaagtaaacctcttgtggtctttttttttccttcagtacttgcttctaccctgtcggcttcgttcggtctagtctggtgactctaatctgtgtgtctgcttgtctgtcacacaggtgatggggttcctcaattccttggtgagatggaagaagcacccgctgtgacgcaactgaaaacacaacgactgattcagaagccgtaaagcgactgtacttcgtgcggcggcaattttgtagagtttttggctcaccgggtggctcattctttcatgcgtttttattttttatttttttaactgtcacagtccttcgtcactgagaaataacaagtggttgtcccacaccctcttgcaactgtaatctgtaagcaagaggccctccctgttcggtctatatatatatattgaataaaaccgggacgcttttgcc

SEQ ID NO: 132648 - DNA, 1298 bp, Zea Mays
ctcagtctcagcccaccgctgtatccatccttccctccaactccacagaaccaacaccgacatcgaagcggcgaaccaaccgccgcaatcgggccacaccaatcaccgccgcaacaacaggcatgccgcggcccccgccgccgggccgcgggaccccaggcgcaaggcggccgatccgggacttcttcgccacctggctcgccaccctccgctcaccgctcctcccgctgctccgccgcgcgctctccacctcctcctcgtccggctcctgggacgacccgctctcctccgccgccgcggctgtcgaggctcacttccaggcgcactggtccgcgctcgacgctgccgcacgccaggacccaacgcgggtcatcgccgcgggggactggcggtccccgctcgagctccccttcctgtggcttggggacgtccacccctccctccttacctcgctcctccgcacgctctcgccctcgccgcgactcctcgctgccgtcgaccgcgtcgaccgccggatccgcaccgccgtccctgccgtctccgaccgcctccgccaggcccaggaagcttttgtggccgccgaggcaaccggcgccgccgacgtggaggcgttcttggcggagctaaagggcgtcgctctcgaagccaaccggctgcgtcggggcgtactctcagacctcgtcgccgccgctggggggtaccaggcggcgctgtacctcgaggcgctctcgcgcttcgtgttgtccatgcacgaccccgaggtgctccgccgcttcgaccagtgtcgcgcctcgcctcgtagctagttacccttcttgttctcaaggcatctttgggaagcatgagatgggctagcaagtggctgaggcagtgcgaaacagaacaaaaccaagacgacgagtggccagttgggcgttaggtgctggtgagcgactcgaaaacgttagcagcagcatcctgtgggcagctgcgccctcgtgtatccgacttggactccaattccccccaaggaatcgtgtcgccagcagtcagcagaaaccatgtcgccagcagtgacgcttcagtgttaacccctcttggaattgacgtgctaccaaaagcttttagttggcaatgaataacgaaaggtgatgcatgaaagatgtcgcacgttgggttagcatctgcatgaaattggctgggcaccgaccaattaagattgtagcaccctgttgtatactttttatggagaacaagtttcttgacactgttgacagagatatgctatccaagtcccggcgagacatatgaacagaata

SEQ ID NO: 132649 - DNA, 954 bp, Zea Mays
aattagtcctgctgctaattcttttctcatttgtctgctaaccagtcaactgcatatagtagccatactgcttcctcatcaaccctcaggatcgttagccttcgccatcactcgtctcgctggtgactgtcgaagtgccccgtgcctgtgcctctttcgcagtcgcagcagctgcgcaattgcagatactgtgcgcgtgcagtccgtgcgcgagtttaaggcgcgcacagaggctgcgcatgtccggttcgctcgcacagtgcagtgcagtgcagtgcagtgcgagcgagcgagagcttgtccctgtgcggcgacgctggttgcttattccttgccgttgtcgcgttcgatgcgggcgggccgcggcgcctccgtgccccgccggagccagagacaaaaggaatagacagaagtgctcggatttggatttttcactgctcgccttcgtttcaggcgtcgtcttctgttcacctgcatcatctgagccactgctgtacctgtacgtatgtatatgcttgcaatgcaatgcccactacggcagcccagcgttgtttcatttgcatcgctccattccatatggccataatcttgtatcaggatacagatgaaattcagatggacgagagctacctggaaggctggaagcagattttgacgatcaattaaggctatccgtagcaaatcagaggatttacgctatagatcagtaaagttctgaatagggatgaaataaaataagatagctgccgaagatattgggatcctctgcagtcgagacagtctaagcagcgggcgcccggcagagctttcagagagggatcgagtagtcccattatattgccatgtgtgtgtactgctgctgctagtgccaccctgttatagatcttgtgatgatatacgcgtatttgtactgttcatggaagtattgaaatagcaacgacttgtcagagactc

SEQ ID NO: 132650 - DNA, 981 bp, Zea Mays
gctgctactgctcttgctctgctacaccaccacccacaaggccagcaccgcacagccgtcagccacaacgaccgctgcatctccggggcggggcgcctcatgcccgagaagcctccaccgctccgccgtcgcccgacggcggcggggagctgggtccggtcgctccactgcaagtccatggcggccgacgacgtggccgccagagtagcggcggcgcccaagaagctcctcccgcgcgctggctgcggtgggagctccggcgacaccctcaaccacgtcgtcgtctcgtccaagcccagcaggcccaagcccaagcccaagcctaagccaagccccgaaccgaagacgaccaacaagcccaagccggtgcctgtgccgccgtcgccgcctccgggccctctcggcccggtccctgcgctcacagagctccctgccgggcactcgtcgcggcaggtggtggagatcatcttcctgtcctcgtggtcctctccgccaccgggagcgcccaccagcagcagcagcacgttcccgggcgcggtggtggagatgctgttccgcgtgcacaacccggcgcgcgccgtggcgcgcttcgaggactaccgcgccgcggtgcgcgcccgggccggcggcgcctcgcgcagcgcggccgacggcaacgagatgatgcgcttcaccccggcgccgccgtacggctcctcggccgctgccgcggcggcggccggcgaggacggcccgcgcgtccggacgttcgacggcagcggcggcgcgcacgccagcgcgcgcgggcccgcgaccggccgccgcgccatgttcctgtgcagggtcatcgccggccgcgtggcggagggggccggcgcccacgccgccgcagcggccggaaaggagcacttcgactccgtacgggttggcaggggcggcgagctggtggtgttcgaccgccgcgccgtgctcccctgcttcctcatcatctacaagctgtaa

SEQ ID NO: 132651 - DNA, 1395 bp, Zea Mays
cacacaaacacatctagagtcatcgttgccaaactcaaacacaagagacgagcagctccgacttcccaagacgagccgcacactgccaaagcaactcgacgacgcttacattcagacaccgacgcaaggaataagaccgcggcgcgccatcgttgccaagcctcaacacacccacacgaggcagctccgattcttcaccacgagcaaagatccacaacgtcgaactccgggagcgagcagacgcctaaagcgacaaaggcccggacaccatcgagccaagcggagtgacgaagagcctccacaacacggacaccattgagccaagcggagcgacgaagagcctccacaacacgaacgaacacacaaactgcaggtcttctgggccgcacctagcagagcagtgtagatcgccagcaccaagaagaaagctgaaaggtcagccacgccgatgtcaccccgccaagccatcgcgtgttgtcaccttctgccgtccaccgacgcaccaacccaccagccccaaccctcagagccccaacgccggtcgagcaccagcgagagacctaagaaggccaaggcgagggttcccgcatggggcgagaggtccaaagacggcaccctcgatagggtaggggtggcgcccgcgggcgtcaccgctgtccgcctgcaagcgagcatggctttcgtcgcaggacctcccaccacacgccgcaacgcacggagccagccggccctgcccacaccacaggccgaaacgagaggcggagagataaatctagccggagaggctcaagatccggcccccagccccacgaccatgacccaccacctgcagaaggcaccgctggcagccgcagatccaccaacgcccccgatccaagcaccacgctacaagcacaagcgagccacgccgccgccgcagcgggccggccgcgtgcgtgggcgccaacgtcgccggccagccacggccatggccacgcgagcgcgggcactaccgccacgggctagccgcacgagccaccatggttgcggccacaaggccacctgcccatgccagcagggaggagcggcggacggcgaccagcccctagatccggccagtcagcccgccgatccggccttcccagcggcggatcaggtcgccggccacctccaggaagagggaggagtggagtgggtggaagaagggagggaaatgagtgagagagcagtcccgccgccgccctcctcgctgctcgtcgaacttccggcgagctgctccggcgacggcgggggtgaagaccggcggcggtgggtgcggtcgatggggagccgcccgtgtcgcccagaggaggatgacgtcagagcaggaaagaaattaggctactactgcgaatttttagagcacagtatttccat

SEQ ID NO: 132652 - DNA, 741 bp, Zea Mays
atcgcaaacaagctagctaatcacttgtcaagaacaagagctctctacttgcattggctagcgtgatccgcgaggtagctggctgcttgttgtgatcgagcaatggcgtccaaggcattcgcgctgttcctggccgtgaacctggtggtgctgggcgtagccaacgcctgcacgcccaactgctcgaccccctcgacgccgacgccgacgcccacgccgtcgtcgttcggcaggtgcccccgcgacgcgctcaagttgggcgtgtgcgccaacgtgctgggcctcatcaaggctaaggtgggcgcgccgcccgcggagccatgctgcccgctgctggaggggctcgtcgacctggaggccgccgcctgcctctgcactgctatcaagggcaacatcctcggcatcaacctcaacctgccggtcgatctcagcctcatcctcaactactgcggcaggaccgtgcccaccggcttcaagtgctgagcgcctctccgtctcatcatcgccttgcgctgcctcccttccattccatgcatggttccgtttcagtgatgcatggttccgtttgattgctttcccacgtacgagaggtactgcatgcatgcaacgcatggccgtacgtgctctcgatttgtaatttcccagcctcttccgtccttgtgtgcatttgttgtaaagggctggcgatcacttctacgccggtgctaataagttccaatcaagtttcagtgttttgcatgc

SEQ ID NO: 132653 - DNA, 1064 bp, Zea Mays
agacatcctgattgcaagctagttgttagccatgatgactatagcttaacttccaagctgccaagggagagaacttctgttgtaacggtactaagaaacccagttgattgtgtatttagcacatatgagttcttagttgaagttgtagctagattccttgtgcacccaaacttaacttctgtgaagttaatgagtacccgtgtgttaacaaattgttgtgttgtccttgtccgaactttagatatctggccttggaattacttggttccatgtatcagggaagacctgtttgccagggtatgcctgttactttcagtttagcctttggtttcaatttgcactttatagaattatactgacagaaaataatagttctctttttcatagcaatttcccagtacatattgtcttgtcaaactgaccaatttatatgttcattgttcagtgattttgttgcaaatctgtaccagtactgtgttatgtctcatgtgtatttatacgttataatgttatacattctcgcacaagcaaaactatagcaaacatctgcctgccgctgatttccttagccagctttaaaaaacctggtttactattttttatgtgtactcatgttaccttgacagattactgagttaacgaacaactcatactttgatgtagcacatgaggttcgacattatgtgaggaagcagccggatcttggtcgtattgtgcttgtagttgctaagaaattaaatcatgtgacattctatgcagaagatactaatagtaccaccactaccatgttctacttcaacaacaaacttcagaaaagattaagaggtcaacgttttaaaatgaatggagctttttatagactgtttgcaaatgaagcttcccatggttcagaaaacaataactatattgaccaaaagttgagccacttcccacatggtatgcggtcttacagtccaaacatcaagctacgtcttgttgactgtgatgttaatgccatgaaccgagtagcagtttatgcccatgagaatgcttcaatgccccatttgggtcttgtgggcaaatga

SEQ ID NO: 132654 - DNA, 1219 bp, Zea Mays
atgcacgcggacgtgaaacctcgcttcccagttgcaacggacgtgaaatttctagccatgatctcccacgcggccacgccacatgttcacaccctctctcctcatacttctctctcccacgccgtccctcccggcctcctgagtcccgagcgctgtcgccgcgagtcactcgctcgtctccctctccccctctggccccgcctcatccagatgctctacttcctacccgcactcggtgtgctcgacctgcaccgccgcgccgacctattgcccttctccgcggagggcaagctgctgtcgtggatcgagttcctcaagtcgctgggcttgccgacacgaccttctcctccctcccgtcgtgcccttcttgtcttccccggctcaggtgacctccagttgcagtggtggcgatggggtgaagaagctctgggatgtcctcgactcctacaagaagaacctctcactccaacaccttcagtctttactacgactgcaactttggagtttggtattcatatgatcaatagactcaacagtatgtcccttgtaaatgttcttgtttcttacaagtggtggtggtggtagtggtctggtctctgtgtgagcagtggtctagaggatcgtgaagctatgcgactcttctttcatgttcaagatgaagttcacaaagctttgatcgaatccggatacctttaaggatgatggcaatgaagtcagagtttataatcactcctgagcacaatgaagaaggggtttacacggtcagattctacattcaggtatttattgtttaaaccatttgaccgataagtttgaggttgcttctgatgaaacatttcctataagcttgatgaaacatctgttgataaagctttgtttcttaacatgtccagcgaagctttctttcttaacatgttgctattgtgtccagtgaagatgcaggctatctgctgctaatgttgctgccgaagaaatgaacttcgtacttttatgtagaggcaacacttattaatatgctgtcgaatttgcgatgactgatgtgtgtttgtgtgtgtgctatttttggaccactggtatttaaaactgaaaccatgaagttttggtacacatgaatcccaagcactttgtgtaacatatggctaaacaaaacattgatgcctgatttgtgatccagctgattttgatgtcaatttattatacatgtatatatctttgcaat

SEQ ID NO: 132655 - DNA, 230 bp, Zea Mays
atggtcttctctgaaatctgaatcaaatgattggactgttctctcactggcaatggcaaccaaatcaaaaaaatgtcatacaaatccgcacaagcacaacacgatgcaaacactagcacggcaacaaacgcagagagcgggaacacaatcgctctgttcgatcaatcagttctggcgagcacgtacaagacaacaatgtccattgcattgaggtcctccatgagcacggc

SEQ ID NO: 132656 - DNA, 111 bp, Zea Mays
gtaaggtttaaactacactgcaaattgtggagtattttgttagaaagtgcacactgcaaaaacattcagtctggattgaatgttcagactaaaacaaaaacgttcatcagg

SEQ ID NO: 132657 - DNA, 2549 bp, Zea Mays
gtcctgtgtttccatttgcttcactggtaatacttgataatttcctttgcagccaattggtgcactaaatcctgcacgtttgaagaaattccaagaccattactccagtttcaaggatccaatcatcccaaaatttcactatggttcacattactccaatcctggcacggtattgtattatcttgctaggatagaaccttttagcatcctctatgctcagctgcaaggtgccaagttcgatcatgatgattgtgcattctctgatgtcgccagaacatggaacagtgttcttgagggcatgaatgatgtaaaagagctagttccagagatgttttaccttcctgaggtatttactaatataaggcagtgaaactggaacccttaatgtttgagtattattgcaggttctgtagcactgcctccttgggctaaaaatgctgttgattttatacatatgcatcggaaagctctcgagagtgatcatgtctccacacgtttgcatgaatggatcgatctaatatttggatataaacaaagaggtaaaggagcagaggtagccaacaatatcttccctcatgttacatatgatgggatggtggacattgataaaatcactgatccagtgcaacggcgaagtgtacaaaatcaaatatgttattttggacagacaccatctcaattgctgacagttccacacataagaaggcggtcgttgacacaaatattacaattgcagacaatattccggaacccaagtgaggttagatcttatgtgcttccaagtccagagcactgcaatgttcctgctagcacgatgcttgtatccaatgattgtcttgtagtcatagattctaatgttcccacagcacatgtggcattgcaccattggcagccaaataccccagatggcctaggggcgcctttcctctttcatcacgggaaaaatgccataaattcaagtggtggtgcaatatttcgcatatttaaaggatcttcaggttctgcagaagactatcagtttccacgagctgtagcatttgcagcctctgcagtacaaagttcatcagctgttgttgttacatgtgacaaagaagttataactggcaggcatgcagataactctgtgaagatgatctctccggatggagcaaggactatcgaaactgcatttgggcatcttgcacctgtgacctgcctcgcactgtctgcagacagtagctatcttgttacagggtctcgtgacacaacagttatactttggaggatacgtcaggtgggttctgcacataagaaaaatgctccagaacctccaccatctacaccgacaacacctactagtcctctagccactggtagtagcagcgacagtagtccaagcaaaactctagaaacctacaggaggcgacgaattgaaggccctatgcatgtactaagaggacatctcggagaagtaacctgctgttctgttagttctgatttggggcttgttggttcatcttcgagtgtgtctggtgtcctattacattccttgagaacaggtcggctaataaagaagctcgatgtgccagaagcccattccatatgcttttcttctcaaggcattgtattggtttggaatgaagttgagaacagactgtccaccttcactgttaacggaatccctattgctaccgcagttgtgtcacctttctctgcacgagtcagttgcattgagatttctacagatgggcaatttgctgcaatgggaacttgttcatctagcaatgacaatcatgactgcagcactgctctggaagataattctgagcttgacaagcccggtagtgatgaggatgtacaaggatcaaatgagaccaggctatctgttgacgctccctctatctgcttccttgatctatacaaacttgaggtaatccataagctgaagctggaagaaggacaggacgtcacagcactcgctctagaccaagaaaacaccacccttctggtttcgacagctgataagcagctaatagtctacacgggtccggctccaagtaccccgtaggtcaatccattagctccccggtgcttggttggaaaaaatgtaatggagatcagcgctagctaccttgacggcccaactgacagtgagctcggagacgacagtacagataatgcacgttaggcgacgggcttctcttgccgtgagcatggcgctgctgtacgtagaggctccaatggattgtgctgtaatacaagactgagactggaacctgaaatgggcgacatgtgcaccaaaaggtgaagagccgttgcgctgctggaaaactctcctgtacagggacctcgttgacattttccatgtagtcgtagtgaaacctgccacgctgcggccaaaataattgttagaagcagcaatccgaatgtaattattgccagtgcctcgtacaagtcgcgttagcttcttgttagccgtgtgcaacggcgagccggcacgcaaagatttgttagcttgttgtcattgcatctgtgtacaaagtctcgtccaagaaattgattcactttcg

SEQ ID NO: 132658 - DNA, 85 bp, Zea Mays
ctgcctttttaggcattgtactcaggtccattttggactcttttcttctcttaatttaatgatgcgcagctctcgtgcgtgttca

SEQ ID NO: 132659 - DNA, 1032 bp, Zea Mays
actccccctccccctctttcagggcctcgaaatctcgcccctcgttgcagttgtccatatcccttcctctcttcctcgccaggccaaccgctgattgttgttcagacagaggaaggaaggaaggaaggaggagatcagaagcatcagccatgtcgaactcggcgtcgggaatggccgtttgtgacgaatgcaaactcaagttcctggaactcaaggcgaagaggagcttccgtttcatcgtgttcaagatcaacgagaacgtgcagcaggtggtggtggacaggcttgggggaccaggtgaaagctacgatgcgttcagggcctgctttcccgccaacgagtgccgctacgcggtgtttgattttgactttgtcactgatgagaactgccagaagagcaagatcttcttcatctcttgggccccagatgcatcgagggtgagaagcaagatgctgtacgcaagctccaaggaccggttcaagagggagctcgacggcattcaggtggagctacaagcaactgagccgagcgaaatgagcatggacatcatcaagtcgcgagccctctgaaacagcccggcatcagctcctgcatgcccgtcgattccttcgatgttggtaacggtcatccgttttcgtgtccttgtttttcctggaagcaaaagccttgcgttctgtatgagacttctgtataccatttcccctctctctttttccccaatctctgccgtagtcctgcactcctgctactgctgtaaactagaacttatttgctgttttgtctcgtggcattgtcgagtcgcttatgtgtctatgcaatgctagttgtgagaagcctaatgtaccttagcttaatcaccgaattgctcaagtttgatgtcttcctagtcagatcattcctacaattttctatatataatatgtacggtttctttgtataacataaatcaacatgaactgtagtagttagagacaagtgctctcttcctagagatatcagtgcttccatacccccatttaaaaaaaatcaaaa

SEQ ID NO: 132660 - DNA, 2211 bp, Zea Mays
ttcagaatgacatccagaaccagcactcttgtccggcaatgcctcgcgctcctcctccgatccaaaagctcctcaaccccgctcgttcccaccaccaccgcccagctccacgcactcctcctcacgtccggtcacctccactacgacagccctcatctcctcttatattcttactgcgcatgtggctgtccctttgacgcccagaacctgctcgctcaaatgccccaaccggcctcggtttccgtctctaacaccctccttcgctcctactccggtctcggcttccaccgacaggccctcgctctctactcacagatgcgccacttcgaccacctcaccttcacctttgccgccaaagcatgtgccggcctccgcctcaggcgccatgggcgcgccgtgcacggccgcgccctcgccgcgggcttcggcagcgacgcctacgtgcagaacgcgatcgtttccatgtatatgcgatgcagagacgtggccgcagcggaggcagtgttcgtcgcgctgccgagccgaacaaccgtgtcgtggaataccgtcattaccgggtgtgtcaaggacggccgcgcggagagggcgttggaggtgttcgagacgatggttgatcgtggcgtgtgcattgaccgtgcctctgttgtttcagtgctgccagcttgtgcacaagccagggacttgcacacggggagagctgtgcaccggttggctgtggtgagaggcttggggaagtatgtcgcggtgaagaacgctctgatcgacatgtatggcaagtgcgggagcctggaggatgcaagaagggtgttcgatgaagacagctacgataaggatgttgtttcttggacggtgatgattggtgcatacgtgttgaatgaccatgcgagcaaggccttcgcgcttggttctgagatgctggtgagcagtgaagcacagcctaatgctgtgaccatggcgcatctgctctcagcttgcgccagcttgctctcagggaagcatgccaagtgcacacatgcattgtgcattagacttgggcttggatcagatattgttgttgaaactgcacttgttgactgttacgcaaaatgtggatatatgggagtgatagacatggtggtcgagaaaggatcacgacggactgaaacatggaatgcagcaatctctggttatactcaaagagatcagggaaagaaagccctagctctgtttaaacgaatgcttgcagaatcagtgcgtccagattctgcaacgatggcaagcgtcatcccagcttatgcagagtccgcggacctggtacaggcgaataacatccactgctgcctactggttcgtggatgtcttgtgagtacagatattgccacgggtctaatcgatctgtatgccaaggctggtgacttgggtgtcgcatgggagctcttccagtgcttacctgaaaaggatgttgttgcctggacaactgtcatcgccggatacggcatgcacgggcatgcccaaactgccatgctgctatattccaggatggtggagctgggggtgatgccgaacaccgtcaccatcgcctcattgctgcactcttgtagccacgctggcatggtagatgaagggcttcggctgttcaacgacatgcacggcgtccatggcctgatgccaaacgcagagcactacttgtgcctggttgacatgcttgggcgtgctgggaggatagaggaggcttaccgccgcatcgaagacatgccatttgagccgactgtgtcggtgtggagctctctgctgggtgcctgtgttctccacgagaatgttgagttcggcgaggtcgctgctaaacatctgtttgagcttgaaccggataacgttgggaattatgtgctccttgggaaggtatatgctgcagctgagagatggagcgatgttcaacatctgaggagagtgatggaaggaatggatcttcacaaagatccaggatattgtgtagtcgatgcaaagtctgaagtgtgctgaacacaggataagcgagtcgtgtgtctgatagaagcgcaatgattctttgatgtgttagttcacaaaggaaaaggttcgcatttgaaatcttgagttaacaaatatgtgtattagttgctctacaggctacactgctacaggcctacagctacacctaacaagtactcttggaacacaggagaagcgagtatcgttctctcttggagtattttt

SEQ ID NO: 132661 - DNA, 768 bp, Zea Mays
atgaaggtgaatgaatcacgtttagctgaagacctggagcaaacttgggaggtccttgctgagccaatacagacagtgatgcgtatatatgggatacctgaaccttatgagaagctgaaggaactgacgagaggccaagctgtcaccaaggacaacatgcagcaaatcattaatggtctagacataccggaggaggtccgatcgaagctttcgaagctaaccccgcattcctacactgggccggcggaggatttggccagagacatcatgaagtgggttgatcttgaatctggatttcagatcaaacacatgtttataagtttttgtgcggaacatcttgtgtattcttacctgaccattgctgtcaccccaaatagcaggcttttttggtcaaatgcgcggtgcatgaagacaaggaccccacatgcaagaccaggggtgtgggacccacctatcagacgttgtacgacagggtgtgggaccccatatgtcagacggccaaaaatgtgggacccgctatacgacagagttgtgggcagaacggggatgggaatgggaatgggaatggagaacaagccagtggtgtggggaccccacatgtcagacgttgtacggctagggcttgaggctgattaccttcttgttgttggagtttgcttgagtctaagcattgcaaacattgttggattcaccaagtgcaacaaagggataatttgtttcctaatatgccgccaatatttacaactgacaatggcgccctctgcatag

SEQ ID NO: 132662 - DNA, 561 bp, Zea Mays
atgaaggtgaatgaatcacgtttagctgaagacctggagcaaacttgggaggtccttgctgagccaatacagacagtgatgcgtatatatgggatacctgaaccttatgagaagctgaaggaactgacgagaggccaagctgtcaccaaggacaacatgcagcaaatcattaatggtctagacataccggaggaggtccgatcgaagctttcgaagctaaccccgcattcctacactgggccggcggaggatttggccagagacatcatgaagtgggttgatcttgaatctggatttcagatcaagtgagctcccatttaaaaatggatgatgctctccacagtttttctttttgacaacaatggagaaaataaataacagacgagaaccataggaaacgagaatccaatgcgccgtggcctctgacctgtctaccgagataatctacatgctaaccatttatataattctggcacatgtaaaatgcgcctcaaggaattatgcaagctgtattttgactggaaaattgtcgagctgaaaaagttgactgctcgatttctt

SEQ ID NO: 132663 - DNA, 1088 bp, Zea Mays
acaaaacgtgcctttcctcatagcccaagcccaccgtcagcacgcttacactcgctcgtttcccaacgcgcacccaacatggccgctccgaccgccgccgtcgacactgccgccccgcctcctcctccctcggcagaggccgcggctgcacctgtactggatcaaaaggtctctcctgctgctgcccctcagcccgatgcgcccgcgcccgcgcccgcgccgaagaagcggaagctcgaggaagcggggttccacacctccgaatactacaagatccgtgccgtcgtcgccgatctgcgtgttcgcttcgtccaggttcacgaagctactgatttccgcaacacggatgctgcacgtgagattatgagagaaataaatgtggtaatggatctatccaagaaaatgaggctcaagcttggtgctacttctgaacctgtgaaaccattggagaagccttcagttggacttgtgaaggatgagcttgtgaaaccatcagagaagccttcatctggacctgtgacgggggaacctgtaaagccaccggagaagccttcagctggacctgtgaaggacgagcctatgaaaccatcggagaagccttctgctgaacctgtgaagaacgaacccagtgagccagctctagctggagaaaacaatcgagctcccagggtaagccagactacaagttctccaaataatgcaggtattgatgcaccagtagtcaagcatgataactcagaggcacggaagtgaagacgatagaggaagcccaaagtaccgatccatcgagatagcatatcacgcaaatctgctggacaaaaatgcagagtgaccggttgattccataggggctcagatttttcttgcccctatcgggggtaaaattattcgctttgggctaatggacgaagagtcgtggacacatcgagatccaaactagattgtcttcagttgttcatatccattcattcagtactatgttgctaatttcccatgaacaattttatcttcaaatagctactctctaactgcatcattctatacatcacattggcctgcagcctgctgtatgaagttaattgccagtc

SEQ ID NO: 132664 - DNA, 2967 bp, Zea Mays
atgccaccatggtggggaaaatcttcatccaaagaagtgaaaaagtctgccaaagaaaacctcatcgacacatttcagcgtctcataagttcaaatgagcaaaagggaagcagaaaatcacgaagtagtcgtagacatggtaaagacacagctggtgacaaaggttgctggtccactgcccaatcccgctcaacatccccttcaaaagaggtctctcgatgtcagagctttgcagcagatagaccacatgcacagccacttcctcttcccaaatcacgtgctaaggtgacacgtacttcttctgatattaccaactcaaagtccactttggaaaagcatggcaaaggacaactgcttccactccctccaattcagcctaaaaaaagacctgaagctactgaacctgttactgaagtagctactgcttcggtctccagcaactgttctattgacagtgatgatcctggtgattctcagcttcagagtcctgtgggaaatgaggctgaaaatgcgactagaattactgcaacaagtagttcaagtgttgtgcgcaaagaatgttctagtgctattaccagaaagaacacaaaggaagttgcaaagccaaacagtgcttttctcagtaaccaaatcctgtcaacatctccaagaggtacctttgctgatggttatcaatccaatttacaaagcccccgacagattgccctggagagtgctccgaatagtttgatgtcaagtccttctcgaagcccaagaaatatatgtcctgttcagattccaacttcagctttttgggcaataaaacctcatactgatgtaactttccttgggtctggtcagtgctccagtccaggttctggtcagacatctgggcataattcagtgggaggtgatatgctaggcccaatcttttggcagcctagccgaggtagtccagagtgttcaccaattccaagcccaagaatgacgagtcctggtccaagttctcgggtgcatagtggaagtgtctctcctttgcatccaagagctggtggggtcactcctgaatccccaacaaatcgacatgctgaagggaacaagaagcaaacccacagattgccgcttccgccattaagcattgctaatagttctacctttttgccaaacagctctaacccaactagtcctatatctcgtagtcctggtagaacagagaatccaccgagtcctggttcacggtggaagaagggaaaattgattggccgtgggacatttggccatgtatatgctggttttaacagtgacagaggtgaaatgtgtgcgatgaaggaggttacccttttctcagatgatcctaaatcaaaagaaagtgcaaaacagctctgccaggaaatatcacttctgagccgactgcagcacccaaacattgtgcgatactatggatctgaaactgttgatgataagctttacatatacctggagtatgtttctggtggatctatacataagcttctccaagagtatggacagtttggtgaacaagccatttgcagttatactaagcaaatacttttgggcctagcttatttgcatgcaaagaatacagtacacagagacatcaaaggcgcaaacatattggtagaccctaatggccgcgtgaagctcgctgactttgggatggcaaaacatatcaatgggcagcagtgccctttctcatttaagggtagcccgtactggatggctcctgaggttataaaaaatgctagcggatgtaaccttgcagttgatatatggagtttaggatgcacagtcctagagatggctacttcaaaaccaccatggagccaatatgaagggattgccgcaatgtttaagataggaaacagtaaggagcttccaccaataccggatcacctctcagaagaagggaaagacttcataagacagtgcttgcaacgtgatccatccagccgtccaacagcagtggatcttctgcagcatccattcgtacaaaatgcaccgccacttgaaaaatcatctgcctctcatccactggaacagttgacggctatatcatgcagaacaaattcgaaggtggttgagcatgccagaaatatgtcctcgcttggtttggaaggccaatcaattttgcagagaagagctgccaaattttctttgccaaatagccccaggactacttcgggtgcttcaactcctctgactggtggtagtggagctgttcctttaaaccatgtgaggcaaccagcttacagaaatgagggcttcacggtcacatcaagaggttttgatgaccacatgcctagccggcctgttgatccagtacatggacgttttattcgagtgcagcaattttccgtgggtcggcaggagagggtagtctctgaagttgacattctgagctctcaatatggaaagatgagacatgcaaatgtgtgggatccgcatgataggccattaccttctgagcgttcctctcaacagtgctttgggaatcatgcgaagctaaaaccttcactggacttgagatctgatgctgacagttggcagtggataaagattctcaaatgtcaatctcatattcccattactctaaagaagttttcgttttcttctatgggtttggaggccattgtacagaagggaactctcaacaagaaatccagattacatggcacaggcgaaagcaatggtccggtggtgagggagcctataccttatcgttttgcgcccttcaccttcgaaaacgccttggcggcttgcgagttgcgagccaaaacaatcaagggaacaacccatgtgccatggcgtagagtacgcaggcagcaagccagcaatgcattagccattagctcccagggtcccccatccagcagtcttttacacctgtcatccatcatgttcgtcctcactccaatcatggcgctgccagaaggccacccacacacaccaggtccaccatcgctgtag

SEQ ID NO: 132665 - DNA, 306 bp, Zea Mays
cgcttgcaggcggccgactgcagtagggcaggtctgcttccacagacgtcttcgccgtttgagaggtggcgcccacctccaccgtctcgtctgctgcctgctctagtggtgccggacctggggtggagcggagatccacaagggcttggattgctttcgttgtcttgctggctttgaggtggagatgacactaagttgaaatttttatcacacgaggaagcaagaacaggaaaaaaaatcacatttcagtgttgcactctgtggagggttcattgttggtccaccaaactactgcagtgctggagg

SEQ ID NO: 132666 - DNA, 1962 bp, Zea Mays
gtcacctcccatcgtcattgcttgctccatgtggagtcactttattactgcattacactagctagctagctagccacagccagcttcatcttcacgtcgattcgatccatcggtgctgtgtgtaccgtacgccagcttgctgatccatcgccggccgacgatggaggtgagcacgtgggtgatgctggtggcggccgccgccgcgtacatggcgtggttctggcggctgtcgcgggggctcagcgggccgcgggtgtggccggtgctcggcagcctgccggggctggtgcagcacgccgaggacatgcacgagtggatcgtgggcaacctgcgccgcacgggaggcacctaccagacctgcatcttcgcggtgcccggggtggcgcgccgcggcgggctggtcacggtcacgtgcgaccctcgcaacctggagcacgtcctcaaggcgcgcttcgacaactaccccaagggccccttctggcacgccgtcttccgggacctgctcggcgacggcatcttcaactccgacggcgacacgtgggtggcgcagcgcaagacggccgcgctcgagttcaccacgcgcacgctccgcacggccatgtcccgctgggtgtcgcgctccatccacctcaggctgctgcccatcctggacgaggcggccaccgagaagacgcacgtcgacctccaggacctcctcctccgcctcaccttcgacaacatctgcggcctcgcgttcggcaaggaccccgagacgctcgcgccgggcctgccggagaacgcattcgccacggcgttcgaccgcgccacggaggcgacgctcaaccggttcatattccccgagtgcctgtggcggtgcaagaagtggctgggcctcggcatggagagcacgctggcccgcagcgtcgcgcacgtggaccagtacctcgccgccgtcatcaaggcgcgcaagcttgagctcgccggcaacggcaagtgcgacgcgccggcgcacgacgacctgctgtctcggttcatgcgcaagggctcctattcggacgagtcgctgcagcacgtggcgctcaacttcatcctcgccggccgcgacacctcctccgtggcgctctcctggttcttctggctcgtgtccacgcacccggacgtggagcgccagatcgtactcgagctgtgcgccgcgctcgccgcgtcccgcggctcccacgacccggcattgtggctggcgtcgccactcacgttcgaggagctggaccgcctggtctacctcaaggcggcgctctcggagaccctgcgcctgtacccgtccgttcccgaggactccaagcacgtcgtggccgacgactacctccccgacggcacgttcgtcccggcggggtcgtcggtgacctactccatctactcggccgggcgcatgaagacggtgtggggggaggactgcctcgagttccgccccgagcggtggttgtccgccgacggcacccggttcgagccgcacgactcgtaccggttcgtggcgttcaacgccgggccgaggatctgcctcggtaaggacctcgcgtacctgcagatgaagaacatcgccggcagcgtgctcctgcgccaccgcctggccgtcgcgcggggccaccgcgtggagcagaagatgtcactgacgctgttcatgaagcacgggctccggatggaggtgcacccgcgcgacctggccccggtcatcgatgagctccgtggcgcgggcgcggcaaggccggccatggcgccatgctgcgcgtagaagatcccccctccgtgctgcgggggagacgctgggaattcaatgtgtagataagcgtacaagtacaagacaggagtaaagtaaaaattaaatgggtttggtgagaccattcaagtcccttttatccggaatttaccattattctgggagcagcgagatgagaatttttttgcgatctagctggatttggatctgag

SEQ ID NO: 132667 - DNA, 444 bp, Zea Mays
atggcaagccatttgtcgacgcagtccttgtggaaggcgcggttgcatccggggagcacgcgcacggcgcggccgggctccatgggctcgaggcagatcggacagagcgccgccgcctcctcttctctgtccgtggactctagcacagtgaccccaccgaggcgcatcagctctgcctccgcgagcccattcttgccgccgttctcctcctccttctcctccgccgtctgggggcgtgggcggcggcgtccggggagcgcggccccgagcgacggcgtcgaagagatagcagagccagacgccgagcaccccgagcatgccgatggcgagcgacgccaccgccagggacaccgcccacacttgcaccatcttcctcggccgctcggtctcccttctccccttgatcgattggtgattggtgcccttgggaacaacaggcagtaa

SEQ ID NO: 132668 - DNA, 396 bp, Zea Mays
atggcgtccaggtgcttcttccccagggacgctgcggccgccgaccacccgcagtccaaggcggcggcggcccaggccctcgagcggctgcaccacggcgggcgcctcctgtccagggaggacgtcgggggcgcggtgcgcgtcaagatcgtcgtcagcaagcgcgagctcaagcagatggtcgcggcgctcggcgacggcggtctggtggccgcggccagcagcgagcgccaccggcagcgcgcggcggcagcggcagggccgggcgccgagcagaggctgcagtcgctgcggcggcgcagcgtgcggcgggcggccgaggctgccgcgcggcggatgcaggcgggcggggagtgggagcccggcctgcagagcatccccgaggaggtttgctga

SEQ ID NO: 132669 - DNA, 811 bp, Zea Mays
gcgttagagttagagacctgcaggaggagacagagcttaggtgagcaagcaagagcgagagacaacagatcatcagatcgggacatccatggagctggaggccgctgccgcgccggcgacgacgtgcagctggagggacgggcggaagctggtgaggtgcccgcggctgcagctggacaccaagacggccacggccatcgagcagtccacgggggcgagcatcgccgactccgcggccgccgccgagggcgcgatgcgcgtcaagatcgtgctcagcaagcagcagctcaagcaggtggcggcggccgtcgccgggggcggcagcgccgccttcgccgcgctgccgccggcgctggagcagctcgtgagcttgctgaggcgccagcacgccaagaagcaggctgcggccgggaggcgccgaggccggtggtcgccggcgctgcagagcatcccggaggaatgcttttagctaggccgcctgcatgcgtacgtacagtatgtctagtgctctgtactccatccaccgtctgcttgtatagctagggctgccgccagatttccggcctctcttttcttcccgggtcgcaacctgccgattggttgggccaaaatgagcgcccaatggttgcgtaccaaatttgaaatgtcacatattttaatctggcatttgccatttggatccatcgatccaaaaaaaaaaaaacttctctgtttatttccgagatggtgtacatatcttgatctggccaataaaaaggcaatgatgaactggggggaaaagggactttctttgccaaaaaaagcaatcaaa

SEQ ID NO: 132670 - DNA, 569 bp, Zea Mays
ttcctggttttggatgcttgtggagtcaatgtgaactgcacaacactgacgctttgagcgtcgatgcgtcgtcatatgcagatggcggagttctaccagccgcggaagagcgggcggacggtgacggtgtccgtggtggggaagcaggtgccgctctacggcgcgggcgccagcctgcacagcaagcccaacaacgggcgcctcggccccgcggtggtgcccgtcaggctccgcttcgtgctgcgcgcgcgcgcccacatcctcggcctcctcgtcaagtccaagttctaccgccgcgtgcgctgcggcctcgacatccgcgaggcgcacctcggcaggccggcccgcggcgtcgcctccggctgcgactaccacgacgggatgcgatgatcgttcctgccgccgttgtgtcgcctcgggcggggtttgctgcgttgtggttgcggacgaactgtgtaatcgattcctacgaaccgttctaatgtaaccggcggcgtcgacaagatcacagatcgtgggcgcagcttggctaatgccacgagtatcgcattaaatcctctgcccaaacc

SEQ ID NO: 132671 - DNA, 1322 bp, Zea Mays
ttcaaaccttcatcaaacacccgttgcgcttgcgccagcgggcagcccctctcccgcagccgcagtcccagtcccacgcgcattccgccccgcggctcccgagagagagagatggccaggcacgccaagacggactccgacgtgacgagcctggcggcgtccacgccgccgcggtccccgcgcggccgcccggcctactacgtgctcagccccgccgcctcccacccggacgtccacctgggcgcctccggcggcgtggcggggaccaccccggcggagtcgccgctccactaccacttccaccaccaccgccaccactcgagcggcggcgccggtgtcggcgtgggcggcatgcaccactcccgggagtcctcgacggggcggctcctcttctccgaccagctccgctccggcggcgacgtcgccgcggtggtgagcgtcccctggcgccggctcgggaacggcagcggcgcgggcagcgtcggggacgaggacgacgacggcgcgtccctgcgcggcgggtcgttcgcggagtcgccgtggcggtgctacgcgctcggcgcggtcgcgttcgtcgccgtgttcgccttcttcctgatcgtgctgtggggcgccagcaggtcgtacaagccccacgtcgtcgtcaagagcgtggtgttcgagtcgtaccacatccagggcggcacggaccggacgggcgtccctacgaagatgatgtcggtcaacgcgacggtgcggctgcgcttccgcaaccgcggcaccttcttcagcctgcacgtcacggccacgccgttcctcctcttctacggcgacctcaccgtcgccaccggagagatggcggagttctaccagccgcggaagagcgggcggacggtgacggtgtccgtggtggggaagcaggtgccgctctacggcgcgggcgccagcctgcacagcaagcccaacaacgggcgcctcggccccgcggtggtgcccgtcaggctccgcttcgtgctgcgcgcgcgcgcccacatcctcggcctcctcgtcaagtccaagttctaccgccgcgtgcgctgcggcctcgacatccgcgaggcgcacctcggcaggccggcccgcggcgtcgcctccggctgcgactaccacgacgggatgcgatgatcgttcctgccgccgttgtgtcgcctcgggcggggtttgctgcgttgtggttgcggacgaactgtgtaatcgattcctacgaaccgttctaatgtaaccggcggcgtcgacaagatcacagatcgtgggcgcagcttggctaatgccacgagtatcgcattaaatcctctgcccaaacc

SEQ ID NO: 132672 - DNA, 1432 bp, Zea Mays
atcagacccactccactatggctagtccgctagtaccagcccatttggccgtcaccgcgcacccaagttcagcaaaccacatccgaaacccttcgatcctcccaaattctccactgccatggctctctcctccctcttcatcaccctccccatccccaatgtcccttcccccaaaccccgccgcatgctcacctcccgggcatcctccgatgctcccgccgcctctgcttcctttgacctgcgccgctactggacctctctgatcgccgatgtggagtccgaactcgacgcggcgatgcccatgcaacctccggaaagcatccactacgccatgcgctacgcggtgctcccgggcgccggcaaggagggagccgccaagcgggcgccccccgtgctctgcgtcgccgcgtgcgagctcctcggcgccccgcgagcggccgcactcccggccgccgcggcgctggagatgctccacgcggcgtcgctcgtgctcgtgcacgacgacctgccctgcttcgacgcagcacccacgcgacgcggacgcccatccacgcacgcggcgtacggcaccgacatggccgtcctcgcgggcgacgctctcttcccgctggcctacacccacgtcatctcccacaccccgtccccggacccggtcccccacgccgtcctcctgcgcgtcctcgcggagctcgcgcgcgctgtcggatccaccggcatggcggccggtcagttcctcgatctggccggtgctaccgcccttggcgaggccgaggtcatgcaggtcctgacgaagaagttcggggagatggccgaatgttccgcggcctgtggcgccatgctcggtggggccgggccagacgaggaggccgagctgcgacgctacggccgcaccatcggcgtcctgtacgagcttgtcgacgacatccggagcgcatcgggaaacggcaagatgaggagcaacgctagcgtcctgcgctccctggggatggaccgcgcgcttggcattgtggaggagctcaaggctcaggccaagacaacggctgacaggttcgcggaaaaatacggcgatcgggtgctgcccttgtacagcttcgtggactacgcggtggagagggggtttgagctacaggatgcagcggcaactccatagtccgtagagtgggagatggcagatgctactgaacattggagttggaggcttcgaactaatgagatagtgtatggtccaggaatttggtgagagctttgtctggcataggtctaatccctcttttatctaggtgttctgaagctcgaattagggaggagattcatatggagaatttttatcccggcaatagatgtttagaacttcgaaattgggttggcgtttgcagcaagttaataaaacaaaatgggactagatggacggaaaaggtctcacttcaagctt

SEQ ID NO: 132673 - DNA, 1419 bp, Zea Mays
aaaacacgcgaatcgtaccggtacgaacactgagcacgcacgcacgcacgcaaactcaaaggagtgtgaccacggaactgaagccatggcggttacagttgagaagggctctatgggcgagccggcgctgctgctggagcgcagccgggcgatcaccctgcacggccgtgaccggaagggccgtgccgtcgtcaggatcgtcggcaactactttccagcgcgcgcgctgggcggccgggcggaggaggcgctgcggtcgtacctgcgggagcgcatcctcccggagatcggggaccgcgagttcgtggtcgtgtacatgcactcccgcgtggatcgcggccacaacttccccggcgtcggtgcgatccgcggcgcgtacgagacgctgccggccgcggccaaggagaggctgcgcgccgtctacttcgtgcacccggccctccagtccaggatcttcttcgccaccttcgggcgcttcctcttcagctcagggttgtatgagaagctgcgatacatgagccggcttgagtacgtttgggcccacatagacaaggagcagctggaggtccccgactgcgtgcgcgagcacgacgacgagctggagcgccgcccgctgatggactacggcatcgaggcgacggagacccgctgcatgtatgacgccgcgtccatggacacctcggcgtccctgcactcgctccgctgcgtctcctagtcgcctggacagtggcatcccgattcccgccggtacggcgtgctttctgtgttctggttggtaggaggtagctgcatggcttcatagcgcttcggtactgtagtttagctgtgtatttataatggataaaatttggagtaccgagatggcttctgcaagtgtgcaagagtagcatggaaaagctgatcaaagaacgcgaacataggtagcagaacaagtgaacaccaatagaatcgctaatccaccaaacaggaaccatagtgtgatcactgatcggtctttgcctcctatcgaagacgttacttgacatcaaagaggttacttggaacaaaggtgacacaaaaatatatagagaagatacttggttggcaggctaagccctatttttttcatttcgggctcgtttggtgagagaactggaggggtccatgggagaggaacccctcgattgtcctgttcaccaaactagcatgattatataatccatcttataatagatataagcatctaatgatctacttatagattattataatctaaattatataacccacctaataatctgtgctgtttatttgcatggattatataatctcaaaggtaaacaaacatagcctaagctatcatatcacatccctgtaaacacatatctcctattcagagttcacaatttcgtttggaagattcgaatttcgtttttttac

SEQ ID NO: 132674 - DNA, 685 bp, Zea Mays
aaaacacgcgaatcgtaccggtacgaacactgagcacgcacgcacgcacgcaaactcaaaggagtgtgaccacggaactgaagccatggcggttacagttgagaagggctctatgggcgagccggcgctgctgctggagcgcagccgggcgatcaccctgcacggccgtgaccggaagggccgtgccgtcgtcaggatcgtcggcaactactttccaggtagtacaccttaccagcgattcagaatttgcccagatcgcaggcgggcttcgccgtgccgtggtggaactgacggacgttgcctccgcctcgtttgcagcgcgcgcgctgggcggccgggcggaggaggcgctgcggtcgtacctgcgggagcgcatcctcccggagatcggggaccgcgagttcgtggtcgtgtacatgcactcccgcgtggatcgcggccacaacttccccggcgtcggtgcgatccgcggcgcgtacgagacgctgccggccgcggccaaggagaggctgcgcgccgtctacttcgtgcacccggccctccagtccaggatcttcttcgccaccttcgggcgcttcctcttcagctcagggtacggtagcgaatccctgatccgctcggctgctgtttgcattcggcatgcccgcggagcagaatttttacggggtgcgggatctactcttgc

SEQ ID NO: 132675 - DNA, 1404 bp, Zea Mays
ccatccctaattaagccaaaaggcactgaagaagccagtcaatagcgagttctactactagtagctagcctgctgatctgttctgttgtttagttcgcaaagccttctgtttcggcgaccatggaggatgagaggaacacccagcagcaccagggcggtgaggcccagcaggacgccgccgatcaggtggacgtgaaggatagggggctcctggacagccttctcggcaggaagaagcacgacgacgaccaggagaagaagaagcagacggatgagctggcgaccggcatggagaaggtcacggtgtccgagcccgagaagcacgggcacaaggaggaggagcacgaggtcgtcggcgagaagaaggagggccttctcgccaagctgcaccgcaccagttccagctccagctcgtcgagcgacgaggaagaggaggcgatcgatgagaacggcgagattatcaagaggaagaagaagaagatgggcctcaaggagaagctcaaggagaagctgccgggccacaaggacggccaccacacggccgcaccgtccccggcgcccgcgcccgtggagacgcatgcccaccaccaggaggaagcgcacaggccgcacgtcgtcccgaccccggccccgccgcctccaccgcacgtccaccagcacgaccacggcgtcgtcgtccaggacgacgtgaagaccgggaccccgccgcatgcaccggaggaggagaagaaaggcctgctggacaagatcaaggagaagctccccggtggccacaacaagaagcctgaagccgctgccgctgccgcaccggctccgcccgtccacgcgccggcgccggcgccgcaggcggagaacgtgagcagcccggatggcaaggagaagaagggcttgctgggcaagatcatggacaagatacccggctaccacaagagctcagctgaggaagcagaccacaaggcggacgccgccggcgagcacaggaccagctcctaaggtcgcagtcgcagcgcgtgtcctggccgtggccgggccttgggcgatcagaaggtagctagcgttggcatgtgggttcggttctggtttgcttttaccaaaagtttgtttcaaggtggatcgcctggtcaaggtccgtgtgctttttaaggtggatcgcgtgactggcagtgagtgttgctgcttgtgtaggacgtggtacgtacgggttttattttggttccaagtcaaaagtcacggtcggtctggatgttgtgtactgggtttgttgaattatgagcagctgcgcgttgtaattcggctgggctacctggatgcgttaataattgctttggtttctgcccagcgcgcgaacgtgttagcgtgtaatctctattttgcactatccagcgactaataaaaagaaacggg

SEQ ID NO: 132676 - DNA, 467 bp, Zea Mays
gtacccccttttttttttttttttttttttttttttttaaaaaaaataaccaaaaccaaatattatttttttttttttttgcttttttttatttattttttttttttttttttttgtttattaacacctctctttcccctcttttcctcccttccttctgtgttgtctttctttaccttgttcttctttcttttttttttctctcttctttcttattatactatatattatcctaagtattattttttttttaattcctaataaataactataacatctaaaaataaaaaaaatacatataaaaaaaataaaaaataaatatttattttttatttttttttatttttttttttatatttttattttttttttttttttttttcaccccaaaaaaaaaaaattataatatattttttttttttttttttttcttctttctcttttcttttattttttttttttttgta

SEQ ID NO: 132677 - DNA, 2108 bp, Zea Mays
acgaatcagctctggtccacggccccatcgcatatgcacccttcgaccccggccgtagacacatgcgatgcacctgcaggcaggcggcgccgcgcacctccacctccagtatttcatgccccagcaccaaccgcaggaaccagccaccgacctagaggcgcaggagtcgtcggccgtgtgcaggcgcagctcgtccacttcgccgccgccgccgcctactaccatgtgggagtatcaccaggcggcgcatgcggcggccttgcagacgacctcgtcgccggcgtcttctttcccttcctggagcccctacgccgggactacggcggcgctcctcggcgccagctcggcctttatttccaccgacgccgccggcgccgactcgtcgtcgcccggcatgcgccttctgccagcgggggagcacggcggcggccatgcatacggcgaacaaagcaacatcacatgctacaaggagaacttcctcgacctgctcgcgtcgaagaacgtgacacaggagatgttcgacgacgtccccgccggtcactacaccgcgcaggcgctgctgtcaggaaggttcgcggcaggctctgatgttgcaccgccggtcaagtacgaggtcaccggcggctcgccgctgttcttcgggagtgctgcagcaactggtggtatgcaccagcaggggatggacatggccgcgggttgcacgacgccgcggtacacctacggcgccgaccaccatcagatgaaggaaggcggtgaccagcagcaagagcttgcgtccccggccatggcttcctttcttcagcagctgagttcaaacgctgctgctggtggtggtgttggcatgcatgctgctagcatggactactcaggcacaggaggaggactcgacaggatttgccatgagagtcgggcattggaagctagccctttcggcatgaggagcttgccggatctcagctcttttggtggctacagaagatcaacgaccgcagaatcgacatcgtcggcgcagccatacctgcagagatccagcagtctcgctgaaagcagtaggcaacaagagccggatattgtgtcggcaaggagcagcagcagtggcagtggagcagcgagcgagcgaaagaagcgggcgtccgaggaaaggacgagcaccgtgaagaagtccaagcaagagggctctaaaccatctcctcccaagcagcaacaagtgcctaaagtgaagatcggagagaagatcacagcattgcaacagatcgtttcgccatttgggaagactgatacagcgtcagtgctgtttgaaacgatcaagtacatcaagttcctgcatgaacaagtacagctactcagcgagccgtacacgaactcgagcaggagcaagggtaataaccacttcccatggggagatcatcgtgctgctgcagagacgagcaagcagggagatgaggcagagcacgacctgagtgacagaggactctgcctggtccctgtctcgtggaccccgcaagtctaccgggacgggactgccatggactactggacgccggcgtacaggggctgcctgtaccgatgagatgacaactccctcgtctgactagttgctcaaacattccttactgtcagtgtctggtctgcctctgcctccaagttgcacaggacggcagcgcagttgatctgcttaactatgttgcatgtggtccctagctagtttgtagtgctggtttgtattattgtttcatttgcagtgtcgtgtttgctgatttgtgctagctaatgagtactgaaggaattatcttgataaaaccacctttagcctctcatatctgtaacgtacgagatgctgcaccacagcataagaatgtgtttgcctgtttaaatgagctgctagtgattattacagaacttatatggtgtcggtcatctggactaatatatacgtttgtgcatgaatctggtagtattttgtggctgagggcatgtcgttgcttctttatcgcctaccacaggtttggcggttcctaaccgacgtacgctagaagaattctctctttgtattgtaattttcttttctattgatgaaacatgtgccaaggcatgcaacaaaaaaaaga

SEQ ID NO: 132678 - DNA, 438 bp, Zea Mays
atggatgggatgagaccgcgtgggggagctggatcccgccggtccgagcaggcggcggtggaggcgcggctcgttggcggatgtgaagccagtgggagagaagctcaactgcccagctatagagaggagaggcagaacacgcctaacagggaaggaaaaaggtggtggcatgggaaggaagacgacgacggtgtggtgaggagcaagcgaggccgggccgagggatctggcgcggtgggggaggcttggattgcggcgaccgccatggatggaagggtgcggtggggaggcgtggattgcggctctagcgcggtggggggagcaattgagagcggctgtggcgtggtgggagcacatccgtgcgatgaggagtggagggagaggattgtgcggcagaacatggtgcacgattgtgaagtctacactaaagccttatag

SEQ ID NO: 132679 - DNA, 1512 bp, Zea Mays
ctcagtccctcaccatacctccgaggctccgaccaaaacaccagggtcccagtgctcttggctctaagatggcggcgccggaaccggaggccaagctggaagccgtaaccccatctcggtcctacgagctgccaccggagtccgaatccgacgcccctgcctccaccggcacccaggagctaaagccgtgggagcagcacgccgcggtgatcaacctcccgcgctacgactaccgcgcatcagggtccctcctcctccgttcgcattccggcttcctcatcacgtgccccatcaagcgtgaaaaaagtgcaaccaaggaagccattcccatccttgaagagtaccatgcaaattgctgtgtttctgaacatgcagaaccatgtgatgtgaaaaatgcaattaagaaaagaaaactgtgctcggaggcatcaggaagtttagaagaggcagtaacgaatgggaatagtagcagtgtttcagaatcaattggaagcaccggaaacacaagctcaccccagtccaaggtgaatgacaatgttgacagggcttcaaatctctcactggttaagctatcaagaagtggcttgctcttctttaaatttcctagtggaggcgttcatgtagttgagatgcttactgaaatacttcattcactcagatccgggaaactcaaatctccacaatggtgccaccgcatattcccaattcaagaaacttgcattctatcagaagaagacctgcatgccactgtgtcaaagttattccttgacttctcgaggagcaagacaaacgaagacaagcctataaagtttgcggttgcctataatagaaggggcattgatgagacagagaagaacagtaatgaaggttcaaaccagcagactttgatggatagggagcaatgtttcaaagtggtagctgctgctgtcaaatccgttgctgagaactcagtggttgatcttagatcgcctgaggttgcggtactcgttgagatgctcccggtttccggggtacctcttggatcttcggtggctggggtgtctgttctcccagccgaactcatctcgaccaaacctcgcctttgtgtcaggtctttggtgcctgatgcaaaagcaggaaaaaagaagtgaaatacggtggcgcctcgtcaaccagagtatctgtaatgggaaactgccgatgcagtttttcacatgcctatttgtaccagagtaccatcgccttaattaagccttgtttttatgaggacatgaaaccatgatcagggcttgtccttttttacattaatcaaggcgagtttttaataatcatagaagacactggtatgccttcgacaatgtatcatcctttgcccccgcacaaatagtcgtctgtctgcctttggggatgtcaaattgtgttttgtggcagcatagaagggagttcattcagttcttgccttcttgtacttgtcgtccttttttttagcagcgtgccgaaatgtcaaaactggccggccatgatggtctctcc

SEQ ID NO: 132680 - DNA, 883 bp, Zea Mays
gttgacagggcttcaaatctctcactgatccgggaaactcaaatctccacagtaaggatccaacttcattatggtgccaccgcatattcccaattcaagaaacttgcattctatcagaagaagacctgcatgccactgtgtcaaagttattccttgacttctcgaggagcaagacaaacgaagacaagcctataaagtttgcggttgcctataatagaaggggcattgatgagacagagaagaacagtaatgaaggttcaaaccagcagactttgatggatagggagcaatgtttcaaagtggtagctgctgctgtcaaatccgttgctgagaactcagtggttgatcttagatcgcctgaggttgcggtactcgttgagatgctcccggtttccggggtacctcttggatcttcggtggctggggtgtctgttctcccagccgaactcatctcgaccaaacctcgcctttgtgtcaggtctttggtgcctgatgcaaaagcaggaaaaaagaagtgaaatacggtggcgcctcgtcaaccagagtatctgtaatgggaaactgccgatgcagtttttcacatgcctatttgtaccagagtaccatcgccttaattaagccttgtttttatgaggacatgaaaccatgatcagggcttgtccttttttacattaatcaaggcgagtttttaataatcatagaagacactggtatgccttcgacaatgtatcatcctttgcccccgcacaaatagtcgtctgtctgcctttggggatgtcaaattgtgttttgtggcagcatagaagggagttcattcagttcttgccttcttgtacttgtcgtccttttttttagcagcgtgccgaaatgtcaaaactggccg

SEQ ID NO: 132681 - DNA, 1888 bp, Zea Mays
ctcagtccctcaccatacctccgaggctccgaccaaaacaccagggtcccagtgctcttggctctaagatggcggcgccggaaccggaggccaagctggaagccgtaaccccatctcggtcctacgagctgccaccggagtccgaatccgacgcccctgcctccaccggcacccaggagctaaagccgtgggagcagcacgccgcggtgatcaacctcccgcgctacgactaccgcgcatcagggtccctcctcctccgttcgcattccggcttcctcatcacgtgccccatcaagcgtgaaaaaagtgcaaccaaggaagccattcccatccttgaagaggtcattgctcattatgttgctccatagtatttaattgtgttcccagttgataattctagtccatgaattttatcttagagaacgtcgctatttcaatctgcgttttattttagcaatataccaaattatgttgcatttcattcactatttgatgcacaccctcaaactcaatgaagttttatattttattattttcccacctaatagtaattactggattaccggttccaccttctgttcatatggctttctcatgctatatgcttgagtgtgtaggttttttttacttcttttgagttgcactgtttgcaacttcattatgtagtcttttctccaacgattgaatagctcaggtatgactatgagcattagcagtttcagggacatttacaaattcagttttacatcttttgttcgaaattcttttcaactctagcttccacacagtacatgttaaaatatgctgatgtgaaagcttcattttgtcttttgttcagtaccatgcaaattgctgtgtttctgaacatgcagaaccatgtgatgtgaaaaatgcaattaagaaaagaaaactgtgctcggaggcatcaggaagtttagaagaggcagtaacgaatgggaatagtagcagtgtttcagaatcaattggaagcaccggaaacacaagctcaccccagtccaaggtgaatgacaatgttgacagggcttcaaatctctcactggttaagctatcaagaagtggcttgctcttctttaaatttcctagtggaggcgttcatgtagttgagatgcttactgaaatacttcattcactcagatccgggaaactcaaatctccacaatggtgccaccgcatattcccaattcaagaaacttgcattctatcagaagaagacctgcatgccactgtgtcaaagttattccttgacttctcgaggagcaagacaaacgaagacaagcctataaagtttgcggttgcctataatagaaggggcattgatgagacagagaagaacagtaatgaaggttcaaaccagcagactttgatggatagggagcaatgtttcaaagtggtagctgctgctgtcaaatccgttgctgagaactcagtggttgatcttagatcgcctgaggttgcggtactcgttgagatgctcccggtttccggggtacctcttggatcttcggtggctggggtgtctgttctcccagccgaactcatctcgaccaaacctcgcctttgtgtcaggtctttggtgcctgatgcaaaagcaggaaaaaagaagtgaaatacggtggcgcctcgtcaaccagagtatctgtaatgggaaactgccgatgcagtttttcacatgcctatttgtaccagagtaccatcgccttaattaagccttgtttttatgaggacatgaaaccatgatcagggcttgtccttttttacattaatcaaggcgagtttttaataatcatagaagacactggtatgccttcgacaatgtatcatcctttgcccccgcacaaatagtcgtctgtctgcctttggggatgtc

SEQ ID NO: 132682 - DNA, 1295 bp, Zea Mays
accatacctccgaggctccgaccaaaacaccagggtcccagtgctcttggctctaagatggcggcgccggaaccggaggccaagctggaagccgtaaccccatctcggtcctacgagctgccaccggagtccgaatccgacgcccctgcctccaccggcacccaggagctaaagccgtgggagcagcacgccgcggtgatcaacctcccgcgctacgactaccgcgcatcagggtccctcctcctccgttcgcattccggcttcctcatcacgtgccccatcaaaccatgtgatgtgaaaaatgcaattaagaaaagaaaactgtgctcggaggcatcaggaagtttagaagaggcagtaacgaatgggaatagtagcagtgtttcagaatcaattggaagcaccggaaacacaagctcaccccagtccaaggtgaatgacaatgttgacagggcttcaaatctctcactggttaagctatcaagaagtggcttgctcttctttaaatttcctagtggaggcgttcatgtagttgagatgcttactgaaatacttcattcactcagatccgggaaactcaaatctccacaatggtgccaccgcatattcccaattcaagaaacttgcattctatcagaagaagacctgcatgccactgtgtcaaagttattccttgacttctcgaggagcaagacaaacgaagacaagcctataaagtttgcggttgcctataatagaaggggcattgatgagacagagaagaacagtaatgaaggttcaaaccagcagactttgatggatagggagcaatgtttcaaagtggtagctgctgctgtcaaatccgttgctgagaactcagtggttgatcttagatcgcctgaggttgcggtactcgttgagatgctcccggtttccggggtacctcttggatcttcggtggctggggtgtctgttctcccagccgaactcatctcgaccaaacctcgcctttgtgtcaggtctttggtgcctgatgcaaaagcaggaaaaaagaagtgaaatacggtggcgcctcgtcaaccagagtatctgtaatgggaaactgccgatgcagtttttcacatgcctatttgtaccagagtaccatcgccttaattaagccttgtttttatgaggacatgaaaccatgatcagggcttgtccttttttacattaatcaaggcgagtttttaataatcatagaagacactggtatgccttcgacaatgtatcatcctttgcccccgcacaaatagtcgtctgtctgcctttgggga

SEQ ID NO: 132683 - DNA, 1066 bp, Zea Mays
accatacctccgaggctccgaccaaaacaccagggtcccagtgctcttggctctaagatggcggcgccggaaccggaggccaagctggaagccgtaaccccatctcggtcctacgagctgccaccggagtccgaatccgacgcccctgcctccaccggcacccaggagctaaagccgtgggagcagcacgccgcggtgatcaacctcccgcgctacgactaccgcgcatcagggtccctcctcctccgttcgcattccggcttcctcatcacgtgccccatcaagcgtgaaaaaagtgcaaccaaggaagccattcccatccttgaagagtaccatgcaaattgctgtgtttctgaacatgcagaaccatgtgatgtgaaaaatgcaattaagaaaagaaaactgtgctcggaggcatcaggaagtttagaagaggcagtaacgaatgggaatagtagcagtgtttcagaatcaattggaagcaccggaaacacaagctcaccccagtccaaggtgaatgacaatgttgacagggcttcaaatctctcactggttaagctatcaagaagtggcttgctcttctttaaatttcctagtggaggcgttcatgtagttgagatgcttactgaaatacttcattcactcagatccgggaaactcaaatctccacaatggtgccaccgcatattcccaattcaagaaacttgcattctatcagaagaagacctgcatgccactgtgtcaaagttattccttgacttctcgaggagcaagacaaacgaagacaagcctataaagtttgcggttgcctataatagaaggggcattgatgagacagagaagaacagtaatgaaggttcaaaccagcagactttgatggatagggagcaatgtttcaaagtggtagctgctgctgtcaaatccgttgctgagaactcagtggttgatcttagatcgcctgaggtaaccttacccgacaattgtcaacagcttgcatagttactcgctactggttggatgacaaacaacatcgtacttgttaagatccaaattggaaaacaacaaa

SEQ ID NO: 132684 - DNA, 996 bp, Zea Mays
ctcagtccctcaccatacctccgaggctccgaccaaaacaccagggtcccagtgctcttggctctaagatggcggcgccggaaccggaggccaagctggaagccgtaaccccatctcggtcctacgagctgccaccggagtccgaatccgacgcccctgcctccaccggcacccaggagctaaagccgtgggagcagcacgccgcggtgatcaacctcccgcgctacgactaccgcgcatcagggtccctcctcctccgttcgcattccggcttcctcatcacgtgccccatcaaaccatgtgatgtgaaaaatgcaattaagaaaagaaaactgtgctcggaggcatcaggaagtttagaagaggcagtaacgaatgggaatagtagcagtgtttcagaatcaattggaagcaccggaaacacaagctcaccccagtccaaggtgaatgacaatgttgacagggcttcaaatctctcactggttaagctatcaagaagtggcttgctcttctttaaatttcctagtggaggcgttcatgtagttgagatgcttactgaaatacttcattcactcagatccgggaaactcaaatctccacaatggtgccaccgcatattcccaattcaagaaacttgcattctatcagaagaagacctgcatgccactgtgtcaaagttattccttgacttctcgaggagcaagacaaacgaagacaagcctataaagtttgcggttgcctataatagaaggggcattgatgagacagagaagaacagtaatgaaggttcaaaccagcagactttgatggatagggagcaatgtttcaaagtggtagctgctgctgtcaaatccgttgctgagaactcagtggttgatcttagatcgcctgaggtaaccttacccgacaattgtcaacagcttgcatagttactcgctactggttggatgacaaacaacatcgtacttgttaagatccaaattggaaaacaacaaa

SEQ ID NO: 132685 - DNA, 575 bp, Zea Mays
ctcagtccctcaccatacctccgaggctccgaccaaaacaccagggtcccagtgctcttggctctaagatggcggcgccggaaccggaggccaagctggaagccgtaaccccatctcggtcctacgagctgccaccggagtccgaatccgacgcccctgcctccaccggcacccaggagctaaagccgtgggagcagcacgccgcggtgatcaacctcccgcgctacgactaccgcgcatcagggtccctcctcctccgttcgcattccggcttcctcatcacgtgccccatcagtgcgttccctttccaactatacggattatttcccgatcgaaacttgtgttgttggattgattcgtggattcatgtattgtgaggtcttattcttgctacagctgtaattagtggaatttagttccggacaatggatgcctcaaactagcttctgtcttatcttagcgtctgtgtgcgagttcctttgatagggatacatgttgtaaagacttaggctttggtctatcatacaaaagcgttgaactacgatattagacgaattttgacatgttcgcatgaa

SEQ ID NO: 132686 - DNA, 536 bp, Zea Mays
atggaggcagggaagctggataaggtttaccggttgatgtggagaatgattgatcaggggattgttctggatacaatttcttgtaactgcatctttgaggcgctttgcaaagctgggaggacagctgatgccaaccagctaagggtgttcgctaaggagaagggttttgaggctgatggtgaaacttattgtatgctggtgcaaggatttgggaggcaagggaaaagaaaggaagggaaggctgtgttggatgaaatgcttgatttaggatttataccaaatattgcctcttataataggcttcttggtggcttgcataagtgaagatctttgtggctacaagagcacttctcagggcatatgagagcactggactgagtattccgctggatgaggctggatggagatgcctgatgagccagtggtgtacataactgcacagatataagatggaatgtttgaaatgaggattgcagaaagaggaactcaactgctacggtgggagtgggactgcttccaatgtagtcttgcagccg

SEQ ID NO: 132687 - DNA, 498 bp, Zea Mays
atgaagctgcttttggttgataataaaatcaccaatgcaagggatcttatcaacgttttggaagaagccatcagaggtgcatacccaatcctgataattgcagaggatattgagcaggaggctcttgctacccttgtcgtcaacaagctcagaggatcactgaagatcgctgccatcaaagcccctggttttggagagcgcaagactcagtacttggatgatattgccatccttactggagcaactgtaatcagagatgaagttgggctgtcacttgacaaggccgacaaatcagttcttggaacagctgcaaaggttgtccttacgaaagggtcgacaacaattgttggtgatggcagcacccaggaagaagttactaagagggttgcacagattaaaaatctcattgaggctgcagaacaagaatacaaaaaggaaaagctcaatgagaggatagcgaagcttgctggtggtgttgctgtcattcagctaatgtga

SEQ ID NO: 132688 - DNA, 2528 bp, Zea Mays
ccgaacgcccaactactagtatctcttctgtcttctccggttctccctatcccacctttccctccccaccacctacctaccgcttattcaccgtcgcctaccacctccccctcctccacgtgccgacttccgctccgcaccgccaatccgtcgtaaccctagcctagcccagcctggcctcacctgattccgatccgtccatgttcgccgcgaggaattttcctcccatgggttccgcatacgccgccgagaggacgccgatcgatggagaatgaggtgctgcgtctgccgcgtatcctccgccgggtgccgggccatgggcgtcgcgggacgggccaatccgacgtcgtcgctgcgcagccgacgctgcctccgcatgcggccgtcttacgccccgttctccgagcccttcactgaacccccggcacccgccgcaccatcataccctgctgccgcgcacagtgcgtaggagccgcgggcggaccaccgacatcttcggcgatctccattcctctttgcttcctctctctctctctctctctctctccccctccccccctctcgctcgtagagtcatttgcttgtcggggccgatccggaatggaggtgtttggttgtgggacccacaacgatgtggtcgatgctgaatacgcggaagtagatccaaccgggcgatacatgcgctataatttgattctggggagaggagctttcaagactgtttataaggcatttgatgaggtcgaaggcattgaggtcgcctggaatcaaatcaacatagatgaggtgatgcagtgtccagataatcttgataggctctacacagaagttcatcttctgaagtcactcaagcatgaaaatgttatgaagttttattattcatggattgatgaccagagtaagaaaattaatgtcatcacagagttgttcacgtctggaagcctcaggcattaccgtcagaaacatccacgtgttaacttgaaggcaataaagaattgggcaaggcagattcttcatggattggattacctgcatagccaccaacctccgattatccatagagacttgaagtgtgataatatttttgttaatggaaaccatggagaagttaagattggagatcttggactagctacagtaatgcaaacacctagggtgaggagtgttattggtaccccagaattcatggcacctgaactttatgatgaaaattatgatgagcgtgttgatatttactcatttggaatgtgtttgttggagatctttactcttgaatatccatacagtgaatgtacgaatccagctcagatttttaagaaagtatccacaggtgttaaacctgctgcattggctagaatttctgatcttcaagtaaagcagtttattgagaaatgtttagttcctgcttctgagaggtcgtctgccaaagaacttctgcaagacacatttctttgtcctgacaatacacatgaacctgctgtcactaagtttatatctccagcacctaaaaaaacagtagatatctctctggcgtctttgcatatggatgttgacactttggaatctagccatactgattcaggcaaggaaaatggatctgttgctccacatacaccagttttggagttcacaagaaccaacaaaaatacagagctaaagctaaagggcgagaaacttgataacaactccgtgtcactggttttgcgaattgctgatttctctggtcatgcaagaaatatccatttcctcttttacttggactctgatacagctatgtctgtagctgctgaaatggttgaacaattggagttagcggactgcgacgttacgttcattgctgattttattgaccttttgatagtgaatcttattccaggttggagacctgtaaatgatgcagcagcgaactcgtataggcgatctgaaagtgaacttgcagtcaattcccatcagaacatctcaaagttggtacctgattatgcattaattgatggtgtgatgcgcccaaaagatgtgaatgcatcaactagttgccttgactctgtctcaagtgcaaccaacctaggaggatcacaaggttctgaaggttcagtcatttctgtacagcttgctgagagttccaaaagtgtgagtgactatggggccgaggattatggcactatggactgtggtgggtacaaagacggaatcagcacattagattgcagccatgttttagataatggatcgaggtcgattttccatatagatcaagcatcacctttcttggagttggccagctgtggttcatcaacttcaactgataaccaggatgtgatgaacggggagcttgtttttattgaagctcagtacaagcacttggttgatgagttgacaaggatgcgagaagaggctagggaaggagctcgaaaaaactggttgccagatacatgatgtttttgttcaaatttggcatttcctctaaacatcataaactatgttcgatttcatgtttgaagtgtgagaaatgttaataatctgttttagtt

SEQ ID NO: 132689 - DNA, 1719 bp, Zea Mays
ttccacgacgaggaggagatcgtctgttgagaaatcctagcattttgttcctctcactcctctgttggaaggagcaagtgagacagacagagaagcgacgagagcttccaacagagaggctgaggtcaacctcgcaagagtcagacacagtaccaaatactacgctgcagggtcacattctgttgccgcgcgcgttacaatagggacccagcaggtgttggcagccacgctcttgtaccggtcagcatggacgccgccgcgagggaagcgcagcagagtagtggtctggaatggcgggtgacggtgccggagggcgcgtcggtgaccgtggagcacgaggccgggcctgccgcgagggcgttggcgtggctgctggcttgcttcgccaaggcgtggagcagggtcgccgggttcgcgaggaaggtgtggaggatcggggcggatgatccccggaaggcggtgcacgggctcaaggtcggcctggcgctcgcgctggtctccgtcttctactacacgaggcccctgtacgacggcgttggcggggctgccatgtgggccatcatgacggtcgtcgttgtcttcgaatacactgtcggtggcagcgtgtacaagtgtttcaaccgagtggttgctacggcgagcgccggcgttctcgcgctcggcgtgcactgggcggctgacaagtctggcgagctcgagccttacatcctcagtggctcgctctttctgctggctgcggcggccactttctcgcggttcatcccgacggtgaaagcgcggttcgactacggcgtgaccatcttcatcctgacgtacagcctggtggccgtgtcggggtaccgcgtcgacgagctagcggcgctggcgcagcagcgggtctccaccatcgctatcggcatcttcctgtgcctcgccgtcagcatgctcatctgccccgtgtgggccggcaaggagctgcacctcctcaccacgcggaacatggacaagctcgcggccgccgtggtggcctgcgtcgagagctacttcgcggaagggccggccagcggggcgggggcgggggcggacgggtacaagtgcgtgctcaactccaaggcgtccgaggacgcgcaggccaacctggcgaggtgggagcccgcgcacggccccttcggcttccgccacccctacgggcagtacgccagggtgggcgcggcgatgcgcgcgtgcgcctactgcgtggaggccctgagcagctgcgcgggcgccgaggtgcaggcgcccccgcacgtgaagcggctccttcgcgacgcgtgctccgcggtggccgcacggtgcgcgcgggtgctccgggaggcgtcgcgctccgtcgccaccatgtcgacgtcctcctcccgggccctggacttcgcggtggcggacatgaacacggcggtgcaggagcttcaggccgacttgcgggcgctcccgtccatgctggccgtgaagctgggagagacgtccctcatggacaccatgcccgtcttcaccgtggcgtcgctgctggtggagatatccgcgagggtcgagggcgtcgtggatgccgttgacgcgctggcaacgcttgccaacttcaagcagaccgaggacgatgatgatgacgacaagaagggagaagccgagatgacgatcaaagtgcacccgctgaacgaaccggacaccgccgaggagtcacgggaaaaccagacaagcaaggcttgatcg

SEQ ID NO: 132690 - DNA, 330 bp, Zea Mays
cccctagccgcacctggtgtttgcccaggttcttcgcacggcgattccctgtgtttgatgaccacgccatccagttctccgcctcatcgtggccaacacaactcgaggtgtttctcgtccgttgtgtttgtgttctttgatcatctagtggtagtgatgctcactgaccttttcctttttactctaccgttctggatttattggaacggcggctcgtagctggtgaatgtcgtctggagcagcctcactatcgcgatctgattcccgagtcagctccgcttacgtttgggtgtttggtggtgaagaaatgaaagtcttggggctgcgtag

SEQ ID NO: 132691 - DNA, 399 bp, Zea Mays
atgaaatcactccgggtcaaaatttcaacagcaaatgggaaccccgcacgaatttacgaggccggaggggaggcttgggacttgagagaaatcgaaagaggcagttaccgcgaagtggaagaggttgacgacggtccacgcggtgccaggggtgcagccaaagacggagaggacgaggagccaggagaagaagacgatgatgatgtaggtcgtccagacgcccgggtacataaaccactcggtgttcttgttcagatccgcgggcgggaacgcttgcacgtacagcttcgccatcacggggctcccgagcaatccccaaccgcccgccgaactcttccgcccccggcgacgggagaacgacaggacacggggagacggcagcagcagcgagctgtgtga

SEQ ID NO: 132692 - DNA, 2834 bp, Zea Mays
ctccagcgagcgagcctagctagacgcataaaaatattgcgagaaaaagaatcgcactatctcgtctcatgacatatgaaggagaagactagagaagggggccggggagcaattccactacacaggacattcctcctccctcgcccgtcccatccagctccagtacgctcctcctcctccttcctcctgcgcctcgtcctcgtcctcgtcgtcgtagtcgtcctcagctcgtacgtcttcttcctcgcccctcggaggcaacaaccaccacacgggagaaccgctggcgaggagcggaattgggatccttgcatgcatggatgcggcgcagtggcatcaggtaagctataatctgcacagcacagccgtctcgatcgaaccaggcgctatatagctgcaaccgtgcacatcgggggctatgcgtacgagatctctcacctgccggcttggatcttggtggtcttgttctccgcctctccctggcctgcgccttggtcctggagctcttgctttcttataggagtatgtatgtgggtgtgagcacgatgatctatctgcctcgccgcggcaggctttcttgttcttggataccgccatggcgaaccttttattctttgcgtagatctaggcgagtatcgtcacctcctctctgtgtgcgtgccgtctcttctccattggctttgagctggggggactccggggcctttaattcccccttgtctcctccttttaatccttgaaaggagcacacggccgcctttatcttcctttgtgttcctgcctttctttctatcttatcccccctttccaagctctcatctcctttatccctccttttctttctcgtatggagaggagctttaccctccctctcccacaccttgcatcaaaagagcagccatgtcttgggtgatggagtgagtagaagtgctacgccacagatgcaaccctacaagagcacaagcaaagttgagtttatgtggtgcgctgcgatgtttctctctcatcttttccttgttttttttcacctttttatttgccttttcccattctctttaatctcgcctttgtatccatgtgcttggttctttgttgcactgcactgcagttgttgcaccataagaatccaaagtcctccacgctcataccccctctgatatgtgcttgctatatccatctcttcaatctcccatacatactacatgttcttgcttcgtagtagttgtcagttaccttaacaatcatcattcaggtttgcagtggtatcatctaacgatgagcaatatgtgtccatcaccaggggctagggctagggaagcccatggaggagatgctcatggctggaaacgcaaatctaaaccagaatccaaacccaccgccggctgcgccctcggctcccggcgcccagagggcaggcgctcccgccgcggttgcggcagcgccgcctagcgctggcgcgaccggaggagcggggccggagcggcgggcgcggccgcagaaggagaaggcgctcaactgcccgcggtgcaactccaccaataccaagttctgctattacaacaactatagcctccagcagccgcgctacttctgcaagacgtgccgtcgctactggaccgagggcggctcgctccgcaacgttccggtgggcggcggctccaggaagaacaagcgctcgtcctcggccgtgtcgtcggcggctgcggccgccgccgcctccacctccgcggctatgtctggcacggtccccgtggggctcgcggccaagaaccccaagttgatgcacgagggcgcgcacgacctcaacctggcgttccctcaccacaacggccgcgctctgcagccaccggagttcccggcgttcccgagcctggagagcagcagcgtgtgcaaccccggagctgccatgctgggcaacggcgccgccggcaggggcatgggcgcgctctcgggtttggagctgctgaggagcacgggctgctacgtcccactgcagcactttcagctagggatgcccgcggagtacgcagccgcgggattctcgctgggcgagttccgcgttccgccgccgccgcagtctcagagtgtgttcgggttctccctggacacgcacggcacggggggagttggcggcgccgggggttacagtgccgggctgcaggagagcgcggctggcaggatgctcttccccttcgaggacttgaagccggcagtgagcgctgctggcggcggcgcgagcaacggagctgatcatcatcactacgagcacagcaaagatcaagcagcaggcgacggcggcggagccagcggcgtcaccggcggccacgaggctccagcaggattctggagcaatagcatgatcgggaatggcagcagcaatggtggcggaggctcttggtaaatggtaaggcggcgcgccatgcatggctcatgcacgcgccgttgtcagcatgcggagataggggggtagagacaaggatcggagttaataagagggtggaggtgattagtgttcacatatggcgtttgatctctctggttgtttgccttctctttttattttcggttcttggtgttcgtgtgtgtcaatcgacttgggggctaacacagcaggatatacagattgttaaggcggtgaaccgattatttacagcttctcttagccaatccatctctcgttttctgattctgtaatccaaggaacaagctgtcaatcacgttgtgcattgcatgcgcattatgtagagtatgtattaattgagcagctctagctatgttagtgttacaagttaaatcacaccgtacgtatcatgcttcacttacgtacttttgtg

SEQ ID NO: 132693 - DNA, 880 bp, Zea Mays
atggcgaggaccacgcggtcggcggcgacggagcgcgcgtacctccacttcgcgccggcgccgcacggaggaggcgtcgtcgtggtgccgacgagccccctagcgggcacgggcgaggacttcgacgagtcggacatctggggcgcgttcgccccgagcgccgctgctgcgcctgctgccgaggcgccgccgccgcgggcgcgcccgtttgtgctggccgcggccgggaaggcgacgacgaagccggcggctcctgcgcacgggtccctgccggtgaagatcccggactggtccaagatcctgggcgacgagtaccggcccgcgggataccaccacggctgggactgggaggtggacgacgccgacgacgacggctccgtggacgcgctggtgcccccgcacgagctcgcgtgccggcgccgcgccgcgtcgctgtcggtgaacggggtcgtcggtaggaccctcaaggtccgggacgcggtgtggaagcggaccaccgggttccaggactgactgaccggcggcagcggcgacgacaacggcggcgacttggtcggggccgcggacgccattttgcactcctatagccggcgtgtgcttcgctatagctttggcagaggaatttaggtttcgatgaaatttaattgagtcgggaatagttgatcgttgcttcaggtagtggtgcaggaagttgatgggtgttgtcttttagtgagtgagttttttgttttgttttgcaagagctagcgttttagctagtccaccccttttgctgtgcgctaatttaatttagcggtgtttgttttgtttctcgccttggtaaagccttggcatatcgatgagatgaggttcgtctctaggtctaggttgtttgtgtctg

SEQ ID NO: 132694 - DNA, 408 bp, Zea Mays
gacttgagtgacttagaaacccccttttctgaggatgaaataaacaaagttattcgggcaataccttcccaaaaagctccaggacctgatggctacattggattgttctataaaaaatgctggagtattgttaagacagatttggtcaatgctctcattggattctataatcaccgcacttctaagctccatcttgcaaatgaagcaaacattgttctccttccaaaaaaagagggggcactctgccttgctgatttcaggccgattagtttgataaacagcttagcgaaggttctaacaaagctactagcagaaagattagcacctaggcttgagcagctggtgtccagatcgcagaatgccttcatcaaagggaggagtatacatgacaactttctatatgtacag

SEQ ID NO: 132695 - DNA, 406 bp, Zea Mays
cgccgtcttcttcaggaaaccactgaatgggaattccatacactttgaatccgcggtgggtgcttacacaacttctcacgatttacgaaagtaatgcggtatgagcgtgcgtgtagaagggaaagtgatttacgaacccagtccactcacaaactgctggcggcgttctctcaggcttccatgatccacgttaaaggtgacgtaaacgaagaaacctttaaacgaagcgtacatgatgcacaccaccacttctccgcactacggtatcgtggcgtccactgaaaccgctgcggcgatgatgaaaggcaatgcaggtaagcgtctgatcaacggttctattgaacgtgcgatcaaattccgtaaagagatcaaacgtctgagaacggaatctgatggctggttcttt

SEQ ID NO: 132696 - DNA, 264 bp, Zea Mays
tttcttttagatgccatgtctgatgtatgcagccacgccacttcgcaactacaactgacagagcttacaccattctactacggtttagtttaatcacctgtatcatcatcacaacagtgagagatccatccatgccacaaacgagcatagaagagagctggagtgtgccttttcatcaccttcttgacgctgacagcagctactaataaacgactactaattaactactactactactactatttatgcctactattcactcac

SEQ ID NO: 132697 - DNA, 1140 bp, Zea Mays
aaagcagcagcggcagtgaagcagatcgcttcagaatgggccggtgctgcgcgagagcgagatctcgtggacagatttttttttaacccatccgttaccactttataccatcgcgcgcagcgcaggcatgaccaccgccataaataggacatccattcggcggcaaacaaatcacaagcccatcgacttgaaggttgaagctagctttcgagcccaaatccacgacgcctagaaaaagctctgttgaagggtagggaagtggcatgcaggcgatgatgggggcaattgctgagcaacggagagagcgggcgctggtgcttgctctcgccctcgtcgcgttcgcgctgtgcgcggcgggcgtcgacggggaggaggagggcggcgggccagcggaggcagagcccgcggcggggcagtcgtcgctgccgcccgggtggagcggcgactcggggtccgcgcatgggtccagccctggcggcggttcgtgggagtacggctggagctgggctgcggggcctgacgggaaaggtggcgggttcgggtttggttacggaggaagcggaggtgaaggcggcggcggaggtggaggtggcggcggcgggggaggagggagtggaaaggcatttggttttggcatcggcgggtataaaggccaccatggcggcttcagcggtggtggcggttctggcggtggtggtggcttcggcgctggcggctacggtggtggcttcggcggcgccttagggaacggaggcgccgctggtggttttgatggagaagctggcaacggcggcggtggaggaggatacggtggcggtgacggcgctggtggtggttacggcagctccggtgctggcgatgagcttcatggcgtatctggtagtggcgacggaggcgaggctgggtataagggcaagggaccctccagcgctggactctggagcaagcgtggccatttccgcggctggaggtcggcgcacagagacggtggcggcaacaactaactgaagctatttgcgatgttaatatagtgcatccatggcttggtgttaacaagcgcgcgacttgtcgatcgacatggctcacaagtgtccagtttgagctgtatgatggccctggtatacacgtatagtatagcaa

SEQ ID NO: 132698 - DNA, 1803 bp, Zea Mays
cacacccacacacacacgccgctcggaatcggagcttgcatccgaccgcgagcaagcggaccaaatcctcctccatattctatcgcgtgcacgcatctggccgcctcgaccctcggcggcggcggcggcgacggcgacgacgacgatggggctggagatggaggcgatggcggggtcgatcggcgtgtcggtgcccgtgctccggttcctgctctgtttcgcggccaccatcccgacgggcctcctgtggcgcgcggtgcccggcgccatggggcgccacctctacgcggggctcactggtgccacgctctcctacctctccttcggggccacctccaacctcctcttcgtcgtgcccatgacgctcggttaccttgccatgctcctgttccgccgccacgccgggctcatcaccttcctcggcgccttcggcttcctcatcgcatgtcatgtgtactacatgagcggggatgcgtggaaggagggaggcattgatgcaactggagctttaatggttttaacgctgaaagtcatttcgtgctcaataaactacagtgatggtatcttgaaggaagagggtttacgcgatgctcagaaaaaaaaccgattgactaagcttccttctctaattgaatattttgggtattgtctctgttgtgggagccactttgctggaccggtatatgagatgaaagattatcttgaatggactgaaaggaaaggaatatgggctagcccaactccttcgccattgttacctactttgcgtgctctagttcaggctggtatatgcatggggttatatttatacctgtcacctaaatttccactctcacggtttagtgagcccctatattatgaatggggtttttggcaccgactcttctatcagtacatgtcaggctttaccgctcgttggaaatattactttatatggtcaatttcagaagcctcaattatcatatctggtctaggctttactggttggtcggaatcttctcccccaaaagccaaatgggatcgtgcaaaaaatgttgatgtattaggtgttgaattagctggaagttcagttcaattgccccttgtgtggaatattcaagtgagcacatggctacgatactatgtctatgagaggttaattcagaaaggaaagaaaccaggtttccttcaattgttgggtacacagacagtcagtgccatctggcatggactatatcctggatatatcatattctttgttcaatcagcattgatgataaatggttcacgagttatatacagatggcagcaagcagcgagcagttcattactaagcggtatcctggcctttctaaattttgcttatacattgctggtgcttaactactcctgcatcgggttccaggtactgagcttcaaagaaaccttggcatcctaccggagcgtatattatgttggcacaattgttcccattgtgtgtcttctgctgggcaatgttatcaagccagcaaggaaggcgaaggctcggaagaccgagtgaggaaatactcactcaagtgacctttacatagaagaaagatggtgaagcttcaacgaagataaggacattctagttttcaatttatttattctgtctttttgtacggtatcaaatttagcataaggataatgtggtgaccccggttctcctacctcggaactcgattgcgattgatcaatcattaaaacgtgacataaccactggattttcctttacttaatgactactcatacgtgtgtgcgaatgattttttgtcctgacgggcctttttctattgtgttccc

SEQ ID NO: 132699 - DNA, 1373 bp, Zea Mays
cacacccacacacacacgccgctcggaatcggagcttgcatccgaccgcgagcaagcggaccaaatcctcctccatattctatcgcgtgcacgcatctggccgcctcgaccctcggcggcggcggcggcgacggcgacgacgacgatggggctggagatggaggcgatggcggggtcgatcggcgtgtcggtgcccgtgctccggttcctgctctgtttcgcggccaccatcccgacgggcctcctgtggcgcgcggtgcccggcgccatggggcgccacctctacgcggggctcactggtgccacgctctcctacctctccttcggggccacctccaacctcctcttcgtcgtgcccatgacgctcggttaccttgccatgctcctgttccgccgccacgccgggctcatcaccttcctcggcgccttcggcttcctcatcgcatggtgaaactctcccttccatcctctgtctacaatctctagcggattgataccggggcctagtttctggcgattaagaacagcggtcccgtactcgtgcgttgaaatctgagtacaaccgaacacgaagattacattgactgcactttattcggatgagaacatagtaattgtggactaaacaagggagcgtggtggcgccagcagtggttctcgagttgtttgatgagtgttttggacatttgttctagagtcttatggtcctgcacgaagtaagattttgaagggggcaaactgtagtcttgcattaactccacaccaatttgcctctatgcctgcaaagtttacgatagggaaactcttattgttcccaatgaataggttcgaatagtttagtcattttcccttgtgctctagttaactacaaaatgtggcagtggcttagaatagaagttcataatgtatggattgcatgttccaattcaatcatatccccgtagaccctgagttatttttttggcagtgacatacacttggagttcataactgctgcatggatctacattcaaaattcgattgctcattcagcatctaaacctgctatcatttgaccagtaacccgtcatatattgttttgttttatacacagccaaatattagacttctaggtcctgttaacatttgaccagtaacccgtcatatgttgttatgtttcatatgtatcactggtattactgtattgatgttaacactaaggtgacagttttgagactttgagttgaaattagtgtcctactcctaccagaaagttgtggagctcctttattcatttttctctgtttttcttttacagttgcgtgtgatttacactgtatatgactgcaagccgttcttgagctatccaaccaaacaattgtcttttcatgtct

SEQ ID NO: 132700 - DNA, 1444 bp, Zea Mays
gaaattgtgacaaggtgctcatgcgtactctgctctctgctctgcttacttgtggttgtggcgaaaatctgtgcaggtggcgagctggggcgcgtacctgctgtcgcgggacatcctggccatgtcgttcgcgccgcgggactctcacgaggcgcaagtgcagttcgcgctggagcgcggcgtgccggccatgatcggcgtgctcgcgtccaaccgcctcacctacccggcccgcgccttcgacatggcgcactgctcccgctgcctcatcccctggcaactctacgatggactgtacctgatcgaggttgatcgcgtgctgcgtcccggagggtactggatcctgtccgggccgccgatcaattggaagaagtactggaaggggtgggagcgaaccaaggaggacctcaacgccgagcagcaggccatcgaggccgtcgccaggagcctctgctggaccaaggtcaaggaagccggcgacatcgccgtctggcagaagccctacaatcacgccggctgcaaggcttccaagtcgccgcccttctgctcgcgcaagaatccagacgcggcatggtacgacaagatggaggcctgcataacgccgctgccggaggtctctagcgccagagacgtcgccggcggcgcggtgaagaaatggccgcagcggctcacggccgtgccgcccagggtctcccgcggcaccatcaagggcgtcacggccaggtcgttcgcgcaggacaccgcgttgtggcggaagagggtccgtcactacaagtcggtgatcagccagttcgagcagaaggggcggtaccgcaacgtgctggatatgaacgcgcgcctgggcgggttcgccgcggcgctggcgtcggcgggcgaccccctgtgggtcatgaacatggtcccgaccgtggggaacacgaccacgctcggggccatctacgagcgcggcctcatcggaagctaccaggactggtgcgagggcatgtctacctacccgaggacctacgatctcatccatgcggactcggtgttcaccctgtacaggaacaggtgtcagatggaccgcatccttctggagatggacaggatcctgaggcccaggggcacggtgatcatcagggaagacgtggacttgctggtgaaggtcaagagcctggcggacgggatgaggtgggagagccagatcgtcgaccacgaagacggcccgctcgtcagggagaagatcctcctggttgtcaagacgtactggactgcccatgaggccatgaccaagatcagtagcaggactgtgaagtaaaattctcaatgttgataagcatttttcatgtttggatttataccgtcgtttctagctccttgagctagtgatctctggacggtttctgcttgctgttctttctggacagtacttgctcggataggatacaaaggcatgccatggacc

SEQ ID NO: 132701 - DNA, 109 bp, Zea Mays
ctctgaacaacacatctagctagtagatgaaacagtttccacgggttcaagagccaaaggctatcatttctttacagaatatcaatggtaacacgtcaaaaaaaaaaac

SEQ ID NO: 132702 - DNA, 837 bp, Zea Mays
ctacgggtcacggtagctccagaggctctccccggcctcggacgggtcgggcgactcgtcggaggtgtcggggctgagcctcggcgggctcatcatcatccccgccgccatgttccgcaggagctgcggcatctcgaagatggcctcttcgtccatgaactcgtcagtgccggcctcctgctgcggcgtgtagctcgccgccgcgtcgtgctgttgatgccagtcctgtgcagcagcagcagcaggagaaggaggagaagcaggaggaggaggaggattggcggtacgaccctgatgcgagtactcgagctgcgcggcggccgcggccgcggccgccgcggcgcgtatgtcctcgggggacgcggacgctggggccgcgcgcgaggcgatcgcgccggggaagttgagcacggcgtcggcgccgcggagcgcgcgggccgccacgtcgtaggcggccgcggccatctccgccatcgggtacgtgccgagccatatgcgccgcgccttgcggggctcccggatctccgacacccacttgccgctccggcaccgtatgcctcggtagaatgcgtgcttcccggacgaccgcggcgacggctcccccgagctcgtcgcggtcgtcgtcgccatcggcggagccgtgatggcagctgcccgcgccgacgacgtcccgtcgccctgctgcaccaccggagaaggggaatgaggcgaggctgggcccgaagccgaagcagaagccgcctggtggtggctgtggccgccggctgccggcccggccggttgcacctgcaccgccggggaaggagaatggggtgccggcggctgcttctcagccat

SEQ ID NO: 132703 - DNA, 516 bp, Zea Mays
ttaaaaagaaaggaaagtggagcatgcatatgtgcacgcctatatatttttcttatccgaaccatgggcccatacaatcacagatataattttcttgtctacagacacaatatggcaccctactacgatccacttggcacatcaaaaaacatgtgcgcttgctattaaagaaaactagagcagctagctgcgacaacaattggactcgctcaatcatgccgaataatcacatcaaagtaaaaaaatgtaaaataaatacggaatgcagctggagcggaataagaagaagactctggtggtaactatactattactagcgagcatgtcacactatgcatgctagcttataggcagcatacactcgtgtatcagcagatatacagagaggacgtacgctgcggtgcaccggccggggtccatgcatgtacccgtccatccatatccatgtactcctgttgtcgccataataatcaacttctctggtttgctacctgccggtggtgtactagtagttca

SEQ ID NO: 132704 - DNA, 396 bp, Zea Mays
atggataatatctgcggttatttacccatacccgtatccattgccatccctattcaagaggtagcagtgcaaacccggtgggaggtcgagaatatggatgactgccaagttgacgaaattctgacattagaggagccagtagacgagcttctaatacaagatggttcagaagacgagcttctgatacaagaagattcaccaattaactatgacgaaatagtcggctacaacgatggtcgtgactactcaaccgacgacacctatccctactattgtgtttcagtcctaagccggcatgaggagcaaactgttgggagtgaacattttgtacttccagtggatggccacgccgagggatcaacaccaccagctattgctaagaagcctaatcaatga

SEQ ID NO: 132705 - DNA, 294 bp, Zea Mays
atggagccatggcaccagagtagagcacccttctgcactgcatgtcttctgtggtgtgcctccgtgatctctgtgtcgctgatccgcgagtgtgcttcttgtggaagaagcaagtggcaccacccacggcatatccgccagcatcagtgcctcaaaggccactgccgaagccatgtccccatcccctgcaccaccgctcagtgctccatgtgcaagtgcagggccacagctgtgtccaggaagtgggagatcttgggacttaatcggatggagctagtgcctaatgtcctttag

SEQ ID NO: 132706 - DNA, 108 bp, Zea Mays
gtcatcttttacttcaaggaatggtatgtatcatttaacacttgcagtaaataggtacgtaatatgtttattttgggcagcaggttcgcggtgtattgatttcctttc

SEQ ID NO: 132707 - DNA, 1788 bp, Zea Mays
ctctattcccgtcaccgaaattcctcgagctacttcaaaacacacacaacaccgatgccgccgccgccgccaccaccaatcaccgctgcacccatgatcccggcatccccaaaaaagccgatcccgtccccgcgccaaatcgcagcgctagtgctgagccatccgtcctccacgctcaccgccgcgtcggcgcgctccctctcggcgtccctcctggccgccggccccgcgtccgcgttcccgatcccgacccccgtggccaacgccgtcatcaaactcctgtggcaccacgccccacgcgcgctcctcttcttccacgctctcctccgcctcccagagcgctcgcgcgacctctccccgtgcacggtcgacctcgcgctcgacctcgccgcgcgcctgcgccacccacgtcagctcacgagctccatcctcgcgctcttcccgcgccacggcctcgccttcaccccgcgcacgttccccatcctgttcgagcggtttgcgatgtcccaccgccgccccgacctcgccatccggctcttcctctctctccaccgctcccacggcatcgcgcaggacctcccgttgttcaattccctcctcgacgcgctcgtcaagtcgcggcgcgcgagcaaggcggcctccctcgtccgtgccctcgagcagcggttccctcctgacgcggtcacgtacaacaccctggctgacggatggtgccgcgtcaaggacacctcccgtgcgctcgacatcttgcggcagatggtcgagtcagggattgccccaacgaaagcaacctataacatcatcctcaaaggtttcttccgttctggacagttgcagcacgcatgggacttcttcctccagatgaagaggagaggcagcaatgacgagaactgtaagcctgacgtcgtatcgtacaccaccgtactgcacgggctcggtgttgccgggcagctggacaaagcccgcaaagtgtttgacgaaatgtctatagaaggatgcaagccatcgactgcgacttataacgcattaattcaggtaacctgtaagaagggcaacttggaggatgccgtggcagtgtttgatgatatggtcagaaagggttacattccaaatgtggttacctatactgtcttgatccgaggcctctgccatgctgggaaggttgttcgagctatgaagcttttggataggatgaagagtgaaggttgtgagcctaatgttcagacatacaacgttcttatcaggtattcacttgaggaaggggagattgagaaaggcttggatttgttcgagacaatgagcaagggagaggaatgcttgcccaaccaagatacatataatattataataagtgcaatgtttgtgcgtaagagggcagaggacatggcggtggctgccagaatggtggtggaaatggtggataggggctacttgccaagaaagtttatgttcaatcgtgtactgaatggattaatgttgactggaaatcaagagctttctagagagctcttgagaatgcaggagaaatatacgcgcttgcgacgagaaataagattgtgattggcattggattttttggatgatatatacattcaacatcttttgccctgggtacagcctacagaagatcaaaatctagatgcagcaccaggataacctagtcagttagcactcctagcctcctactgtccagtgattactgatctgtctgatatggagctgaaacatcattgtaagtatatattctgagacttgtgtatcttaatagtttaaccggatgtttgaggc

SEQ ID NO: 132708 - DNA, 678 bp, Zea Mays
atggccaccgcgccctacgcctcctccctcttcctggcttcctcccccatctccaccgcgccacgaatccgcgccgggccctgccctccgtccgcccagccatccctgcggctccggccgaggccgtccccggcagccgcggccgccgtccaggcggagcaccagcccgcgttgaccgcggcgccgaagccacccgcgctaccgttccgcgtgggccacggcttcgacctccaccgcctggagcccgacctcccgctcatcatcggcggcatcaacatcccccacgaccgcggctgcgaggctcactctgacggcgacgtgctgctgcactgcgtggtggacgcgattctcggcgcgctggggctgccagacatcggccagattttcccggactccgacccccgttggaagggcgccgattcttcggtgttcatgagggaagctgtgaaattgatgcatgaagcaggctacgagctgggcaaccttgatgctacgctgatcttgcaaaaaccaaaaattagcccattcaaggagacaatccgatcgaatttgtgcgacctacttggggcagatccatctgtggtcaatctcaaggccaagacgcacgagaaagttgacagtctaggggagaacaggagcatagctgctcatactgtagttctcctgatgcgaaagtag

SEQ ID NO: 132709 - DNA, 1489 bp, Zea Mays
agatacggaggggcaaggtacgtggtgccttaccttggctaaggcactgaatctggatccctcctccacctccacgcgagcggacgacacgaagcggccatagccgcacgttgggatcccctccgctacgcctctcgatggtctccgccagcgcgccgccgccgcaggcccagtccgacgcggccgggtcgggggaggaagtgagcaagaaggtgcggaagccgtacacaatcaccaagtcccgggagagctggacggagcaggagcacgacaagttcctcgaggccctgcagctctttgatcgtgactggaagaagatagaggcttttgttggctccaagactgtcatccagattaggagccatgcacagaagtaccttttgaaggttcagaaaaatggaaccagcgaacatgtcccacctccacgaccaaagcgaaaagctgcccatccatatcctcagaaggcttccaagaatgattcatcttccatccataggaactctggcatgaacgtgcctgtttcttcatgggctcatagttccatcccacaagctgttgcttcatcaatggtgaaagaagatttaggtgctggaacaccaggttcaaacaatttttgctcaagtagtactgaaggccttccaagaacttggcaacctggtgaaacaaatgatccaataaatcaaattccgtcactccgccttatgccagattttgcgggagtgtacagcttcttaggtagtgttttcgatccaagtacaagtggtcatctgcagaaacttaaggagatgaatccaattgacgttgagacggcactgttgttgatgaggaatctctccatcaatttaaccagtcctgattttgaagatcaagtgtctggtactctggttcatgtttcagtgttttgctgtttgcatcatttctctatgaggaagttgttgtccttatacagcgcttctgatggacctgggctagggagctcaagaagttcagctctagcgacgagcgcgcctttcatgtaaggaagcgtgcacccttcctggcctttcctatccccaaaagctcggccatctaggctcgtgaaatgctgcttcagatcaaggctgtccttggaaatgggaagatgaaaggagaatctgggtaatgccggttgctccctttcccattctttgttgagttcagctttctgattggtttctggtggccctcttgatacggaacttgtgcgctccgtctgagaaagcatgtgtgcaaagtttcatttgaggagttgaggcgatcatggcgctgtaaaatgcggcttatcttcccccttcagggctggtttggtggaccaaccctcaaacatttgcaattcctatgtacgtctgtagtgcatcaggtgttgttgcccacgtgtaaaaggaaaataaattcacaatgtaaaggagacttgtgcgttagcactaccatttgaatttatgaaatgtcaaagcagcccagcgagtttgta

SEQ ID NO: 132710 - DNA, 1432 bp, Zea Mays
agatacggaggggcaaggtacgtggtgccttaccttggctaaggcactgaatctggatccctcctccacctccacgcgagcggacgacacgaagcggccatagccgcacgttgggatcccctccgctacgcctctcgatggtctccgccagcgcgccgccgccgcaggcccagtccgacgcggccgggtcgggggaggaagtgagcaagaaggtgcggaagccgtacacaatcaccaagtcccgggagagctggacggagcaggagcacgacaagttcctcgaggccctgcagctctttgatcgtgactggaagaagatagaggcttttgttggctccaagactgtcatccagattaggagccatgcacagaagtaccttttgaaggttcagaaaaatggaaccagcgaacatgtcccacctccacgaccaaagcgaaaagctgcccatccatatcctcagaaggcttccaagaatgattcatcttccatccataggaactctggcatgaacgtgcctgtttcttcatgggctcatagttccatcccacaagctgttgcttcatcaatggtgaaagaagatttaggtgctggaacaccaggttcaaacaatttttgctcaagtagtactgaaggccttccaagaacttggcaacctggtgaaacaaatgatccaataaatcaaattccgtcactccgccttatgccagattttgcgggagtgtacagcttcttaggtagtgttttcgatccaagtacaagtggtcatctgcagaaacttaaggagatgaatccaattgacgttgagacggcactgttgttgatgaggaatctctccatcaatttaaccagtcctgattttgaagatcaaaggaagttgttgtccttatacagcgcttctgatggacctgggctagggagctcaagaagttcagctctagcgacgagcgcgcctttcatgtaaggaagcgtgcacccttcctggcctttcctatccccaaaagctcggccatctaggctcgtgaaatgctgcttcagatcaaggctgtccttggaaatgggaagatgaaaggagaatctgggtaatgccggttgctccctttcccattctttgttgagttcagctttctgattggtttctggtggccctcttgatacggaacttgtgcgctccgtctgagaaagcatgtgtgcaaagtttcatttgaggagttgaggcgatcatggcgctgtaaaatgcggcttatcttcccccttcagggctggtttggtggaccaaccctcaaacatttgcaattcctatgtacgtctgtagtgcatcaggtgttgttgcccacgtgtaaaaggaaaataaattcacaatgtaaaggagacttgtgcgttagcactaccatttgaatttatgaaatgtcaaagcagcccagcgagtttgta

SEQ ID NO: 132711 - DNA, 2058 bp, Zea Mays
agatacggaggggcaaggtacgtggtgccttaccttggctaaggcactgaatctggatccctcctccacctccacgcgagcggacgacacgaagcggccatagccgcacgttgggatcccctccgctacgcctctcgatggtctccgccagcgcgccgccgccgcaggcccagtccgacgcggccgggtcgggggaggaagtgagcaagaaggtgcggaagccgtacacaatcaccaagtcccgggagagctggacggagcaggagcacgacaagttcctcgaggccctgcagctctttgatcgtgactggaagaagatagaggcttttgttggctccaagactgtcatccagattaggagccatgcacagaagtaccttttgaaggttcagaaaaatggaaccagcgaacatgtcccacctccacgaccaaagcgaaaagctgcccatccatatcctcagaaggcttccaagaatgattcatcttccatccataggaactctggcatgaacgtgcctgtttcttcatgggctcatagttccatcccacaagctgttgcttcatcaatggtgaaagatttaggtgctggaacaccaggttcaaacaatttttgctcaagtagtactgaaggccttccaagaacttggcaacctggtgaaacaaatgatccaataaatcaaattccgtcactccgccgtcagtacctcatgatatttctgataatcatcttgtagtgcaaaatacttactccgattctgtccatctctactatttctaagaattatgtcttaaccatcctcctgtgcatcttttcttgtgaatttgtaagcttcaatctcaaatccgctggccccttcttttagaatgaaccgaacctccaatattctcttgatgatgcttaacatacagagaaacggtgtaacacaaaacagcacaatccatttctttgtactgtttctttttcaaatattttactgttttcaatattgaatctatgtcttgaatgaattgctagcttatctaattcatatttacattcttgacatttcaattatgtctttccaatgtttgatatagttatgccagattttgcgggagtgtacagcttcttaggtagtgttttcgatccaagtacaagtggtcatctgcagaaacttaaggagatgaatccaattgacgttgagacggcactgttgttgatgaggaatctctccatcaatttaaccagtcctgattttgaagatcaagtcttgccaattcgtgatgccagtactcagcagagcaggcctgaagtccgaaccactatcttatagcatagactcttatctcctgacacccacaaagggatgaaagtgaggaagttgttgtccttatacagcgcttctgatggacctgggctagggagctcaagaagttcagctctagcgacgagcgcgcctttcatgtaaggtctctcggcatataatttcagttcgacagacctcaggaggatagtgcctgccctggcgtagtagcaccgatgagtgatgaaggaggcgtttgcaccttttgtgcttctcgctagctccatgccttcggctgacgattgtgaagcgtgcacccttcctggcctttcctatccccaaaagctcggccatctaggctcgtgaaatgctgcttcagatcaaggctgtccttggaaatgggaagatgaaaggagaatctgggtaatgccggttgctccctttcccattctttgttgagttcagctttctgattggtttctggtggccctcttgatacggaacttgtgcgctccgtctgagaaagcatgtgtgcaaagtttcatttgaggagttgaggcgatcatggcgctgtaaaatgcggcttatcttcccccttcagggctggtttggtggaccaaccctcaaacatttgcaattcctatgtacgtctgtagtgcatcaggtgttgttgcccacgtgtaaaaggaaaataaattcacaatgtaaaggagacttgtgcgttagcactaccatttgaatttatgaaatgtcaaagcagcccagcgagtttgta

SEQ ID NO: 132712 - DNA, 1211 bp, Zea Mays
agatacggaggggcaaggtacgtggtgccttaccttggctaaggcactgaatctggatccctcctccacctccacgcgagcggacgacacgaagcggccatagccgcacgttgggatcccctccgctacgcctctcgatggtctccgccagcgcgccgccgccgcaggcccagtccgacgcggccgggtcgggggaggaagtgagcaagaaggtgcggaagccgtacacaatcaccaagtcccgggagagctggacggagcaggagcacgacaagttcctcgaggccctgcagctctttgatcgtgactggaagaagatagaggcttttgttggctccaagactgtcatccagattaggagccatgcacagaagtaccttttgaaggttcagaaaaatggaaccagcgaacatgtcccacctccacgaccaaagcgaaaagctgcccatccatatcctcagaaggcttccaagaatgattcatcttccatccataggaactctggcatgaacgtgcctgtttcttcatgggctcatagttccatcccacaagctgttgcttcatcaatggtgaaagaagatttaggtgctggaacaccaggttcaaacaatttttgctcaagtagtactgaaggccttccaagaacttggcaacctggtgaaacaaatgatccaataaatcaaattccgtcactccgccttatgccagattttgcgggagtgtacagcttcttaggtagtgttttcgatccaagtacaagtggtcatctgcagaaacttaaggagatgaatccaattgacgttgagacggcactgttgttgatgaggaatctctccatcaatttaaccagtcctgattttgaagatcaaaggaagttgttgtccttatacagcgcttctgatggacctgggctagggagctcaagaagttcagctctagcgacgagcgcgcctttcatgtaaggtctctcggcatataatttcagttcgacagacctcaggaggatagtgcctgccctggcgtagtagcaccgatgagtgatgaaggaggcgtttgcaccttttgtgcttctcgctagctccatgccttcggctgacgattgtgtaaggctatccgcactcattttaccttatttctctactctaaaaggaatattctgtcctggtcagcgagattctttaccctatactaaaatcatctgcagccatatt

SEQ ID NO: 132713 - DNA, 1770 bp, Zea Mays
cgcgaggagaatgcgcgacatgccgatcttccccacgccaccattgcacctcctccgccgaaatctcgctcttttctctttcttcccgcacgaatctgctcgctgccaccggcaactttttccctccggccacgaagaaaccgacgagcaggaggtagtaataccgcgggagcataacgacggccggagacggcgcgggcaatgaaggcggccgccggaggaggcggcaaggagagcccggcggcctccctcctccgcttcgccctcctgctccttctccctgtcaccgtgctctacatcttctacaccctccacgtcattctcctctcaacccactcctgcccgccggcggaccccgtcacagccaagggcacgccaagcgcattggccgtctctcatcttaccaacaattataaccttacatcattaacgcctccgccccccgatgtgctcacggcgacgacgctgcagcacgtagtgttcggcatcgcggcgtcggcgcgcctgtgggagaagcggaaggagtacatcaagatctggtggcgccctggcgggggcatgcgcggcttcgtgtggatggaccgccccgtgcggccctccagcgtgccggaggggctgccgcccatcaaggtctcctcggacacctcccgcttcccctacacgcaccggcgcggccaccggtccgccatccgcatctcccgtatcgtctcggagaccttccgcctcggcctccccgacgtgcggtggttcgtcatgggcgacgacgacaccgtcttcctccccgacaacctcctcgcggtgctgagcaggctggaccaccggcagccctactacattggctccccctccgagagccacctgcagaacatctacttctcgtacgggatggcgttcgggggcgggggcttcgccatcagccagccgctggcggcgaggctggagcggatgcaggacgcgtgcatccggcggtacccgtctctgtacggcagcgacgaccgcatccaggcgtgcatggcggagctgggcgtgccgctgacgaggcacccggggttccaccagtacgacgtgtacggggacctcctgggcctcctcgcagcgcaccccgtcgcgccgctcgtgtcgctgcaccacctcgacgtggtgcgcccgctgttcccgaacgcgcggtcccgccccgccgcggtgcggaggctgttcgaagggcccgtcatgctggactcggcgggggtgatgcagcagtccatatgctacgacgaggcgaggcggtggacggtgtcggtggcgtgggggttcgtggtgatggtggcgaggggcgtgatctcgccgcgggagatggagacccccgcgcggacgttcctcaactggtaccgacgcgccgactacaagtcgcacgccttcaacacgcggcccctggcgcgcaacccgtgcgagcggcccgcgctgtattacctggccgccgcgcgccgtgcggtggcgcgcggcggcgagaccactgtgacgaggtaccagcggtggcggcggcggggcgaggcacgcccggtttgccggtggaagatcccggaccccgactccctgctggacagcgtgctcgtggttaagaagcccgatcccgcattgtgggacaagtctccgagacggaattgctgcagggtgctgtcgtctcccgggacagggaaggacggcaacaagacgatgaccatagacgttagtgtatgtgaggactgggagatcaaccaactgtaacatgtaattatcacacagacaagtagt

SEQ ID NO: 132714 - DNA, 1063 bp, Zea Mays
agtcctccacgcacgcacgcacgcacgaccagttgccacggcagaccaccccgcccagcggccagcttgctcgccacgaccacgatgggcttccccgtggggtactcggagtcggagatgctgctcccgcgcgtgctgctgcaggtgctcctcctcctcggccacttccaccgcttcctcctctgggccttccacgccgtggggctcggcgacctgatcgacctcggctgcaactacccgccgccctccgcgtccacggcgcaggagatgatggagcaccagcaccaggggcgcgacgacgtggcctccccgctgcagcaccagcgcccggagttcaggcccgtcgcggcggcgctcatcgaggaggcgctccccgtggtgcggttcgacgagctgtgcggcgcggcgtgcgggggcggcgactgcgcggtgtgcctgggcggcatcggcggcggcgacgaggtgcggcggctcggcaactgccgccacgccttccaccgggcctgcctggaccgctggatggcgcacgaccagcgcacctgcccgctctgccgcgcgccgctcatcccatgggccgccgacgccgactacgacatgtcctatccgtctcccctgccgcccacgccactgcggcggcctcacgagctgctgctgctgcttaccggcctgggcggcttccagtgatgcgcctgcgcgtgggcagcgtggctggcacttgggcaggccggccacgcgaatccgatccgtggcgaggcaaaccgcgtgctcatgtgcggcccagcacgcccggtcggtcaggcgggtgaccgccgccaaacctgctcagttgccagccgtacacgcttggcctcgtcttcggtcgtgtctccgactccgttggttttttacagaggctcccagtcccaggtcaaacaaaaaaagaggcgaaacagacaaagcactcggaaattaggcaggtactgtactaggttgatctgtaggccgattgggcgactccaaatctgtggagctgtgaatcctttggcagattaaactaaaaattgtctctatagatcagaccatc

SEQ ID NO: 132715 - DNA, 1391 bp, Zea Mays
ctgacctgtccacagtccaccatacatatcactctccgctccgccattgttgctccttattagtagttcgtcccgcgtcccttgacagttctatctatccccaccacaaataagagaccacctctctgccttcttctcggaggtcggagaagagctctctgcttcattcggccggtccaactccaccgaccgatccaatccaacccactgaccatggggttcccgccggtgtgctgctgcgcccccatccccaagccggtcgtcgccttctgcaacctgctcggcgccatcaaggacgccgtcctgctgacgctcgccgccgtgggcttcccgcacgacgccgcgcgcggctcggcggacgcccaccagcccgaggaggtgaagacccggctccccgccgtggagtacgcccagctcctggccgagcagcagccgtcgcccgccacccacgcggcctgcatcgtttgcctggacacgctggaggcggcggacgaggtgcggcggctgggcaactgcgcgcacgccttccaccgggcctgcatcgaccgttggatcgacctaggccggacgacgtgcccgctgtgccgctccgacctcctgccaagcccccggggccgggccgggctgctcgggctgggccggctcgccagccgtctcacgcgcgttcgcgtttggtgaggaccgtctcggaggccacttttaccttttcggtggccaggccgcggtcgcagcccatcccggtggtgccggaacggcgcggacacgttagcgacggcgaccgggccgccggatggtcttaaatctgctctgccacttgccaaccgctaatcaaccagcgggcttaattagcagcggattggcttggtgtctgacagtcgatattatgacagctaaataagcagttaaatgtttctataggattgagtatacacggcagctaaatgtttcgtatacagtggcggacgcaggacgaaaattcaggaggggccaaaaagatcatatgagagtcatgattttctagttcgccaagtccattgaccgcaggggataagtcaaatcgttgcgaagagcgagatctaatttgtcgagcggatcgatgtcacgagaaaaacaggacaagggacggaggcgctaggaaggggcgaagtcgggtggcgtcgcatcgggaatgggtcgacgacggaaacagggcagcgagcagactgatttaggtggtgtcgggaagattagagtcagactggtagatgcaagtactgaaacgagaggatccggcgagcagactcataacatggttgttttaggccatgttctaaacatttagagctaactgttaactggttttagctaggttggggcatctaacaattaatacttatttaaggggtataact

SEQ ID NO: 132716 - DNA, 2008 bp, Zea Mays
ttgaagaatataaaccggtcgaaaaatttagaaactgacgaaaaccgggttttaactatttactgatttgttgatttacagattttcgaaagttttttaatttaaaatttaaatcgttcagttttagcaaaaaccgtcggtttcctagaggtaaaccgttttcgttgactactggtttttggtaaactctacccacgtcatcccacgttccagttccacttctaccacaacggcacaacctcagtcctcagcccggcgagccgccgcccgcatcgttcaacccccgtgcccggccgccgtttacctaccgctcgcacgcgcgcgtcgctccttttatcacctctcaagtcccagcaggatcggcccccgcgcagcttcgcccccacatctatcgacccgaattctccactcaatggacccacccaagccgccgtcctcggtcgcctcgtcgtcggggccggagacgccgaacccgcacgccttcacctgcgagctcccgcactcgatctacgcgctcgccttctcccccgtcgcgcccgtcctcgcctccggcagcttcctcgaggacctccacaaccgcgtctccctgctctccttcgaccccgtccgcccctccgccgcctccttccgcgccctcccggcgctctccttcgaccacccttacccacccaccaagctccagttcaacccccgcgccgccgcgccgtccctcctcgcctcctccgccgacacgctccgcatctggcacaccccgctcgacgacctctccgacaccgcccccgcgcccgagctccgctccgttctcgacaaccgcaaggcctcctccgagttctgcgcacccctcacctccttcgattggaacgaggtcgagccccgccgtatcgggaccgcctccatcgacaccacctgcaccgtctgggacatcgatcgcggggtcgtggagacgcagctcatcgcgcacgacaaggccgtgcacgacatcgcctggggggaggccggggtcttcgcctccgtatcggccgacggctccgtccgcgtcttcgaccttcgggacaaggagcactccaccatcgtctacgagagcccccgccccgacacgccgctactaaggctggcgtggaaccgctctgacctccgctatatggccgcgctgctcatggacagcagcgccgtcgtcgtgctcgacatacgtgcgcccggggtgccggtggccgagctgcaccggcaccgggcgtgcgccaacgcagtcgcgtgggcgccgcaagccactaggcacctctgttcggctggggacgacgggcaagcattgatctgggaactgcctgagacggcggcggctgtacccgccgaggggattgatcctgtgctagtgtacgatgcaggcgccgaaataaaccaacttcagtgggcggccgcgcacccggactggatggccatcgcctttgagaacaaggtccagcttcttagggtctgacaagaaattttctgaagaaagctcgattgtgtggagccctgggactttggaaaccatctgcttgtaatcttgtgttggcaaacctcttgacttaagctccggcaagcaaggaatcatatctgttccaggttgctacctctttgtctagcgaatgaagtcttaaatctcagcaaatgctacatgtgctagcagatttatctctgaacttcctgtgaatgtagaaatatatagaggtactaactttgactcacttccgaactggcctaatattataacatcatctggccattcctgttgtttcggccttgttctgctctccagtagtccagtttgctccgttactttgtttctgaacttcaacttcctgtgaatggaactcgtcaaggtttaggccaagtgcactggttctcatgtaatgccatgtaatcttgatttaatagattattatcccttcgaaacgaactgtcatgtaccataggtttgatcttgtgacgatttaatgccaatgcatcataggcgatcttgaagctgttt

SEQ ID NO: 132717 - DNA, 717 bp, Zea Mays
ggttttgctccgctgctcccccgccgcccctgacaagtataaccagccgcgtctcggcaaaaagtcctccgcgacagagagcgtgcagccagccaccgaccacccgcgcagcgcaggacttggggagcaagcaaggcgaagcggcctgccatggattccttctcgtcctcgccgtcgtcgtcaggtcccggcgctaacccggacgttgttatggaacagatcaagacgcagctcgcacaggcttacgcgcaggagtttctcgagaccgtcgggaacaagtgctttgaaaagtgcgtgaccaagccaggatcaagcttgagtggaagcgagagcagctgcatatcacgttgtgttgaccgctacattgaggccactggtattgtcagccgcgcattgttcacttcccagcgctaagatcacatgaataaggagatggtttcgaagatcgctcgtgagagtaatgtcgccatgagttttttgacttgtcggaatacaatgacatttgatgcttggttattcaaaaaaaaagtctgcctatagactcaggtttcttgtacacctatctgctttagtaatagagaaacgtgctctatttaagtggctctgatgttaatttatgctcatcatgtggtttgtttcgcttaatgttgtatgcttcttatgcctgtttgttgcccaagccttatcgaatatcgtgaaggatgtgttgttgttatt

SEQ ID NO: 132718 - DNA, 2024 bp, Zea Mays
ggcaggcacccagcaactaacgagcaccaccgtctaatccgcgtctccgtctccgtccccatccccaattccccatccccatccatctggccacatcccaaacccaaagacgtcgtccgccgcgctgtgcgcctagccgtcaatgtggacgcctgcgggcggcctaattcttcttcccgtccttcgttcttccccctcgcccttcaggcagcaggcctcacactccagagtagtagcaagcaacagcaacgccgagcctgcatactacacgcatacataggtagatccgatcccgctctactgacctatagtggcggcggtggcgtttgcgctgggcaacagtgcatgcctctcttctctgggccagctcccagctatctccagcggctgtcatcgcagcagaacctagctagctagtcagataggtagcgcagccagtgcccagtggaggagggagggaagaagcaggtggcgcgcgggaccaagggaggagcgagagcgagcgagcaagaaataccagaggaagcaagtggtaggtaggtaggtagtgcctatatggaccagttcgccgcgagcgggaggttctctagagaggaggaggcggacgaggagcaggaggatgcgtccaattccatgcgcgagatctccttcatgccgccggctgcggcctcgtcatcttcggcggctgcttccgcgtccgcgtccgcctccaccagcgcatccgcgtgtgcatcgggaagcagcagcgcccccttccgctccgcctccgcgtcgggggatgccgccggagcgtcggggagcggcggcccagcggacgcggacgcggaggcggaggcggtggagaaggagcacatgttcgacaaggtggtcacgccgagcgacgtggggaagctcaaccggctggtgatcccgaagcagtacgcggagaagtacttcccgctggacgcggcggccaacgagaagggcctcctcctcagcttcgaggacagcgccggcaagcactggcgcttccgctactcctactggaacagcagccagagctacgtcatgaccaagggctggagccgcttcgtcaaggagaagcgcctcgtcgccggggacaccgtctccttctcccgcgccgccgccgaggacgcgcgccaccgcctcttcatcgactggaagcgccgggtcgacacccgcggcccgcttcgtttctccggcctcgcgctgccgatgccgctgccgtcgtcgcactacggcgggccccaccactacagcccgtggggcttcggcggcggcggcggcggcggcggcggattcttcatgccgccctcgccgcccgccacgctctacgagcaccgcctcagacagggcctcgacttccgcagcatgacgacgacctaccccgcgccgaccgtggggaggcagctcctgtttttcggctcggccaggatgcctcctcatcacgcgccgccgccccagccgcgcccgttctcgctgccgctgcatcactacacggtgcaaccgagcgccgccggcgtcaccgccgcgtcacggccggtccttcttgactcggtgccggtcatcgagagcccgacgaccgccgcgaagcgcgtgcggctgttcggcgtcaacctggacaacaacccagatggcggcggcgaggctagccatcagggcgatgcattgtcattgcagatgcccgggtggcagcaaaggactccaactctaaggctactagaattgcctcgccatggcggggagtcctccgcggcgtcgtctccgtcgtcgtcgtcttcctccaagagggaggcgcgttcagctttggatctcgatctgtgacctaaaggcaaaaatcaaaggaaagttcaacgattctttctttctgcttgtttcggttcttctcatattttaccttcttctcttttttttcttattaatacattataacctttgattatagaagctaggacttgatgttttgatttccttgtttttggctgctcttcgcttttttgatgagttggtttgagaagatacac

SEQ ID NO: 132719 - DNA, 959 bp, Zea Mays
atctccacccctcgcgcgtgtccgctgactctcgcctcccgtcgcgttcttatccatccaccccgtccggcacccatttatatcctgtcgtccctccctccctccttcggccacaccgtgtcacaccgctgcttgcttgcttgcgatcgggtttggatttggggagcatcatggaggcctacttcttgttccacagcgggagggcgcacgagttcgcgtacgcggagcaggaggaggacatcggctcgccgtcggattccgaacccccgtccacgtccacgtcgagggagtccgcgggctcgtcggcggagctcgacgacgacgccacctcctccggctccggctccggctcggaccgcttcgagatgtccgccctcatgacgcagctccctcccttcaagcggggcctgtccaggttcttcgacggcaagtcgcagtccttcgcctcgctcgccgccgtggggtcgctagaggacctgcccaagccggcccggaagcgcctcaagccgtcgcggagctgcggcggcgccctcgacgcgcaccgcggacgcctcctctcgccgcgcaggcattattgcaccaagcccaccgctaggactaggaaggcagccgcgaggagcggcacgttgtcggttctcgcggccggcgcgccgaggatgccgccggcggtggcgagggccgagggcgtggccgccaaggttctgatcgtcagttgagccgcggatcggcctgcctgagctcaacatcgacgcacacactcgcaggcacagctagtacggaccgccgcatccacccctctgcctgaagctgttcggttttctttttgtttcccaatgcgtctgtggtctgatctctttgtaatgaaaacgcgcagctcaattagaatgaacttcagttggaaactcacatgccttgcgcgtacatttcagcatcaatcgctttccctagggtaattgcag

SEQ ID NO: 132720 - DNA, 1001 bp, Zea Mays
actgggtgcaagaccgcttggatacaacatgccgtttgccttagtagcatcgagacaaggttaggaaagaaaacaaacccacagcctgggcggtcactggacctgaaaacaataggtggactacctctccacaggacgaaaggcaattggagttgcaatggcaagcacacaaaaaagtgcctgcacaagaaaagcttatatcatggcagatgttcttcggacttctgtttatcatatactttcagcattcattgatgactgcaagctaatgcaaaaccatccagcttagagaactggatcagtgaagggagaaagcctgtatatggttcacaagccgtgttggttcagaagttgattctgtttattgagtaccgagctgtatgaacttggttccatgtctctcagatcctttgcctgcacatcagatcatacttggatggaagtgtttagttctcgaacttggttgaagaacctttgctttccaccagagcctataaagatgcatcgtaaactaacagtttcaccagagcctataaagatgcatcgtaaactaacagtttctcaatatggacttctggcttctgtattcctgtgggctggtgcactgcggaaggcaccgccgctcaggccttgtttctagtctggttatccactcaggccttctattctgacttgtactttgaaagttgaatagagttacctgtgttgtagcatggagatggtatgtgaaagatttgcgatttttgatatccacgtaccaaatagatttatgacacagactgttagtactgtctaactacaccttggaacgaggggcatattcaggccctgtttgggaacatagtttttaaaaaccacattattatgatatcatggtgtttcaattgtcatgctgtaaccatgaattgtaatttcaattgaacacctgtttgtagacagtattttggttagcatggtttccgctcaattcatagctctgaatgcaaaaaaaaactgataaa

SEQ ID NO: 132721 - DNA, 105 bp, Zea Mays
gcatattactaattggcactccctcaacttcttaagtgctccctgtcgaggccctacaaggaaccataacaaggcaatacaattaaattacatatctagcctgca

SEQ ID NO: 132722 - DNA, 585 bp, Zea Mays
ggagaggagcgatcacgccaccttaacaaagttaagcttcccatcatccagaggagcttgagggtgcgcgactgtggcagtttgtgagcgcaacgcgcaggggcggctgccaccttacatccatggataccgggtcatgcaacaaagcggcagcgccaccaccaccacgcaatatcgagaagaaccagcaggtcgagaaggaaccgatcgaggagaagccgaacgcggcggcgcaggtcgagaagaagctcaacaccattattcgctgcggcacaagagattaatatctcctcaatcctcattcgtctctcggcgtaatattgatgcatccattgttccatcgatatataatagatcatataagatacggtcgactttatacgcgtcctatagctataatcggtggtttgtatgcgtgaaacatatcttattttacgacattagtgtcctagctatactcggtggtttgtattgtatacgtgcagcatatcttattcggtcttattttactagtacttgtggtttatatgggtagaccatatatcttactattactaaatattgtaataatgttactgttagtaa

SEQ ID NO: 132723 - DNA, 357 bp, Zea Mays
tacacactcttcgacggattcattgactcgtcgtcggtgagatctcagaggacgggtttgtcttcccgtagctcgtgctctcgtcgaccgaacgagcatgagttggagattatgaggatgcatgaggagatgagacaacaacgagaatttatggaggcttgcaatgcacataaccaagtgacgtatcaattaatgcagcaacagggcatgacaccaaatattccactgccaccacaatggagccagtttgcatccacaccagctccgccaccacagttcaacacccctccgacacatatacctgcacctggagatagggttacgcccaaagctggtgtagtgggtctgatcccatag

SEQ ID NO: 132724 - DNA, 195 bp, Zea Mays
atggatcatccaaacaagatcccccacggcaacgacgagaagaagaaggagcacgagaagcaggtcgagcaaagcaagacccacaggacgcgcgagaagaacccaatcaaggagccggagcccaagccgaagaacgaattcgaagtcccaaaacccatcccgagaatgagccgccaaggcacgtcgagggggtag

SEQ ID NO: 132725 - DNA, 111 bp, Zea Mays
gggattgcatgcgcgttattttatggaatcgtggcaaatgaccttatttttgggagcggttatcttttttgtgaatttctattttgttgcgtaaatgtgtgtgtcgtaaat

SEQ ID NO: 132726 - DNA, 345 bp, Zea Mays
atggaaccacccagcctccgcccccgtccaccttggcattggcaccctaggcggatctgcgcctctcctcgcccgcgtccacccccatcgcctcctcctacaccttctccgccatcggcatcatcgtctccatcagcgcctccgtcctcggccctccctgcacactgcaaccgcctcctgacgatgctcgcgtgggatggtgacggcgacgcggcgctccgtagcttgtgccccctccgccgcctccagcaccttctctgccatcggcatctccgtccttggcgcggcatggtgagacagcgcacgcctccacaccatgtctcactagatctgccgctttgctag

SEQ ID NO: 132727 - DNA, 120 bp, Zea Mays
catggtgtgccttatactacctttgttcacaaatatatgacaccgttgattttttcgaaaactttgaccactcgccttattcaaaatatttattcaaaaatgtaaaaatttaagtcaagc

SEQ ID NO: 132728 - DNA, 1077 bp, Zea Mays
acggcactagcagcgacacaataattaatcagggctcatcatctcgcaatctctatctaggtcaaccatgacgaacggcttcctgtttcgggagtacatcggcgcgcagttcaccggcgtccagttcagcgacgtgcccatcaactccaagctcgccttcaacttcatcctcgccttcgccatcgactacacgccggtgaaccagcatcccacgccggcgcccaccaacggcgtgttcagcccgttctgggacacggggaacctgtccccggccgccgtggccgccatcaaggccgcgcacccgaacgtggccgtcatggcggggctcggcggcgacagcgtgcaggacatcgtcaaggccgtcttcaccccgacctccatcgactcgtgggtggccaacgccgtgacgtcgctcacgggcatcatcaacacgtacgggctcgacggcgtcgacgtcgattacgagcacttctcccgcggcgctgacgtgaacaccttcgtcgagtgcatcggccgcctcctgacgcagctcaagaaaaacatgccgtggatcaccacctccatcgcgccgttcgaggaccccgtggtccagaagtactaccagccgctgtggggcaagtactccggcgtcatcgactacgtcaacttccagttctacggctacggcgacaacaccgacgtcgccacgtacgtccagttctacgaccagcagtcggcgaactaccccggcggcaaggtcctcgccagcttcatgactggcaacaccaccggcctgatctcgccggacctcggcatcagcgccgccaaggagctgcagcggcagaacaagctgccgggcctcttcatctggtcagccgacagctccaagaggagcagctatggcttcaagtacgagatcgaggggcagcagatcattgccaaccattgatctcggatccgaatatcgtatggggcctcgccacgctgtgatggatgaaattataaaatgaatttatcaaggaataggcacgctgctacgtgtactatttctatgaatgatgaataaataaagagattgcatggatcaatttgtatgct

SEQ ID NO: 132729 - DNA, 89 bp, Zea Mays
ccaatcccttccattacccttcttccaaacattccctcaatgcctgccattaaccgagccacacatatctaggtattgagtttccaaat

SEQ ID NO: 132730 - DNA, 1539 bp, Zea Mays
tgcagggtatttattggctccccctggggaaggagatgtgcaggtaaggaagaaagaacaaatcctgtgatatggatggcatgcagcgataaactacaagaagctccagaagaaggccagcaggaggatgaaaactgcggcgcatatgttatgcgtagatctgctcgaggtaccacaattctctggagggaatgcgcaagaagagctgcatacctgctccactcctctggtcgtggatgcagaggtcctccactcgaagcccccggccattgcaggtaggtagctacaaaggactaagcggacggaaaggcggcagcaccttgaggcttgagcgaagcccaagcccgaacctcctttgatcaacagcgggatggagctaaagatggcagtgaagtgacggaaagagcgctgcaaggaaagaatggaagagagcaggaggtaaagagagagagagagagagggtagcttgaggacggttgagctgaggcgagctgcgcggttcaagggagccggaacgggaaatcgcagcgatctctttccacattccagtttgaagtctggtctgtggcggctaccgttgtgctttggcgttccttttgcgacagtttttgccctggtgcaggctggtgcttggtgcccttttggttaataaactgcgctgcaacgaaatgtggtatattacttcagttgaagaccggggcttatatgtcccttgaactctaccgagagagagagagatgcagtcacgcagagggttgacatgcacgcagcacacacaggcagaggacatctccgtgcgcggcagaagcacaggtgcacaactgtggttcccaccctctcctttattaatactagactagtagtttttttttctggcatggcattggccattgcagcatccatgccatgtagtgggtacggtacgagtacgaccgaccccctcactgctgtacgaggcgtttctgaaacgttggatttcatctcagtatatgtcgaagttgcaaacaaagccccgagaaaatcggcccttcttggcgagcatctgacagtactctgcctaccttaattagcggaagatgaggcacaaatggtatcccgattcatggtaccctcgacatgactctgggcatttggcaagctacggagcagtaacaggatagcaggtgttgcaaccagacgcttagctaggattctcttctgggacagctaatgatgggtgaacagtactgtggtacgaggtactctccatttacttcccgttcatggtccatcaatgtgtaccaatagcgatcgacgcgtgagcgtgaccgtggccgtgtgcgtcgccaaaaaaaaggactgacggcgaccaaactgagcagtagccactggattctggtaaagcacacatgttttactggagcaattaattgtgctgccgtatcgaattgtaagatgctccgatcgacacctgctaacatcagtgtcctgaatcttcgctactgttttggtgaaggaagaaaaagaaaaagaaaagatgatgcatgatgtgatttaccc

SEQ ID NO: 132731 - DNA, 1146 bp, Zea Mays
gatatctctggaccatttaaattaattttgcaattgtattacaccccagtgctgtctgattcagcagaattaccaaatgggatttcctgacatattgcttcaacgtgaatttcaggtgctcgttgaagcaaacgaagtgtcggatctaggaccggaagctccagtcttgaagctgttcggaaagaaagttgtggtgaaagacctgaaaacggactattcacctgcggctgcgagcgttgccaaggcaagcagagaccggaatcctatcggtgccgcaggagcgagctcatggagtccgtggccgggcagcgtgcaggtgcagcagctcatgtacttcgttccccagcacgacggcctcgcggcgcagcccgtcgcgccgtggttcggctacagcgggagcgtgccgtgcgcggtgttctacccgcaggcggtggcttcagctcaggagcaccagcaagcttcagagcctctggatcacaaacgcgcgcagacggaaaggtccctgacaggttcgaacatggcctccagcgccgcgtcggcggcgcagaactcggacaccgcgcagtcccaccacggtcccggacaagaaaacaccggcgacggctgcgcggcgcttcgggctgccatcccgcggctggccaagtgcgcgagttcggcttcctgcagcgggagagggttcgtgccgtacaagcggtgcgcggccgagagcgaggcgccgcgcccggtggcgcccggagaggaggatgacggcgagctgacgaggctgtgcttgtgacaactgacaagagctgaaacctcggtgtaaagaactcacgacgcactttttggatgttgggctgctgctgacatgcatggctgcctgcacatgctctgcagaagcagctagcctgggaacaggttttccaggagagacggatgagcaactctggttcttacccctcggtatatacgcgtatatataggcaaaatctgtactcatattccgcttttgtttcaccacttgtgtaattttttccccaacatgagatagagagggttgtgtgtgtgtcaatagtctgagcacatgtaaattttaggcttgtaccatctggacgaaatgtaatagggagcaggcggaatgagccactttgcactttggtgttcttc

SEQ ID NO: 132732 - DNA, 1884 bp, Zea Mays
ctccctcctcttgtctattcttcttctccagtgcaaaccggcgcttctcgcgccgtccttccccttctccttgcgcaggttcaggcctgaccgcctgagaaactggaaggtggcggcgacctcgggggttgatcggcgacttgggtcggattagtttccggaagagcactggaggagaaggcctgtttggagcaaattccgatggcaaccggcgagaccgccgtggatcgttgcaaggaccctctcggcccccgcgacatggatttgtcaggggaggagcacgtccccaaggcgcggaagccgtacacgatcacgaagcagcgggagaagtggacggaggacgagcaccggcggttcctggaggccctacagatgcacggtcgcgcctggcgccacatacaagagcacatcggcaccaagactgccgtgcaaatccggagccacgcgcagaagttcttcaccaaggtggtccgagagtcatcgtcaggaagtaacgcctccgcgggcgcggcgccggcaatccaggtcccgccgccgcgccccaagaggaagccggcgcacccttacccgcgcaaggtggacggcgcggccaagaagcccgcgccggagctcaagctgatggagaagctgcccccgcgtgaccgggatgaagggtcgccgacatcggtgcttgcctcggcgcgcacggcgtcgcgagcggaggtgttattaggcagcgcgttcgcgaacagctcgagcgccagcaggtcgcggggcctgtcagcttccggttcggatgagcgtggtgacggtggcggctcgctggtctcgtcggtggccggggagcacggctgcgcatcgccaagaacgagagcgccatataccaaggtgctcgttgaagcaaacgaagtgtcggatctaggaccggaagctccagtcttgaagctgttcggaaagaaagttgtggtgaaagacctgaaaacggactattcacctgcggctgcgagcgttgccaaggcaagcagagaccggaatcctatcggtgccgcaggagcgagctcatggagtccgtggccgggcagcgtgcaggtgcagcagctcatgtacttcgttccccagcacgacggcctcgcggcgcagcccgtcgcgccgtggttcggctacagcgggagcgtgccgtgcgcggtgttctacccgcaggcggtggcttcagctcaggagcaccagcaagcttcagagcctctggatcacaaacgcgcgcagacggaaaggtccctgacaggttcgaacatggcctccagcgccgcgtcggcggcgcagaactcggacaccgcgcagtcccaccacggtcccggacaagaaaacaccggcgacggctgcgcggcgcttcgggctgccatcccgcggctggccaagtgcgcgagttcggcttcctgcagcgggagagggttcgtgccgtacaagcggtgcgcggccgagagcgaggcgccgcgcccggtggcgcccggagaggaggatgacggcgagctgacgaggctgtgcttgtgacaactgacaagagctgaaacctcggtgtaaagaactcacgacgcactttttggatgttgggctgctgctgacatgcatggctgcctgcacatgctctgcagaagcagctagcctgggaacaggttttccaggagagacggatgagcaactctggttcttacccctcggtatatacgcgtatatataggcaaaatctgtactcatattccgcttttgtttcaccacttgtgtaattttttccccaacatgagatagagagggttgtgtgtgtgtcaatagtctgagcacatgtaaattttaggcttgtaccatctggacgaaatgtaatagggagcaggcggaatgagccactttgca

SEQ ID NO: 132733 - DNA, 107 bp, Zea Mays
agacacatctccaagtgtaaatccaccgtgtaaatttatagagttcctacctagcccaatttacttcctatgtttaggaacctagagctactcccaaaatattgtcg

SEQ ID NO: 132734 - DNA, 1629 bp, Zea Mays
aaaattcacgctgagccgccgcctgttccacggttccacctctccaaaccaaaaactcctaggttttctaaacgtgaattccaatcactgcacacgcggttgtttcggtgtgatttgccaggaagacggggcgaattcgtggtgctacctaaaagagaccccatctggtgcggttctggggttcgaggagcggcgaggcaggtgggaaatgagggatgtggtcgtggttgacgaagattgcgtccgcgtgcttgggcccggtccggaggtgcgcgcgtacgaggaaggatgaggacgacagcgataatggccgcggcgtcgccgacgacctgctgtggtcgcgggacctcgggcgccacgcggcgggtcagttctcgtttgccgtcgtgcaggccaacgaggcgttggaggaccacagccaagtggagacaggctctgccgcaactttcgtaggcgtctacgacggtcatggcggcgctgaggctgcccgcttcatatctgaccacctcttcgcacacctcattcgacttgctcaggaaaatggaacaatatctgaggatgttgttcggagtgcgttttctgccaccgaggaaggcttcttgacactcgtgcggagaacacgttttataaagcctttgattgctgcggttggatcctgctgtctagttggtgtcatatggagagggacactatatgtggctaatctaggcgattccagggctgttattggcgttctaggtagatcaaacaagatcgtggctgagccactcacaagagatcataatgcaagtagggaggaggtcaggcaggagcttatatcccgtcatccagatgattctcaaattgtcgttctcaagcatggtgtttggcgcatcaagggcataattcaggtttcaagaacaattggagatgcttacttgaagaggcgggaatttgctcttgatccatctatcactcgtttccgcctttcggagcctctccgccagcctattctcacagcagagccatctatctatacaagggtgcttaacccacaagataaatttattatttttgcatctgatggtctttgggagcacttgacaaatcaacaggccgttgaaattgtccacagcaatccacgatcaggaattgcaaagaggctggtaagggcagcgttgaaacaagctgcacggaagagggaaatgaggtatgatgacctcaggaaagttgagaagggaattcgccgcttcttccacgatgacattacagtagttgttgtttacatagatcacggattactgcaagagagggatacttccgtgccagagctctcagtccgtggctttgttgactccgttggcccctcaagtttctcagggataaccgccatatcatgactcactactaatcgatcagcacaattttggtgtacggcattcaagtagcatgtgactatctgagtgttatgctttaccaggcgtttgcttttagtattgcctttatattgagtactactacaatacttcatgtcgctttgttttcaaaaatactttgtcaattttgcaagtctgatttgctcgaaataagaggctcatgctgttgtgcggtgcttaataatatgagtattgatggtgcaggaaatgcttt

SEQ ID NO: 132735 - DNA, 900 bp, Zea Mays
aaccaaaccaaccccttcaacacacttctcacgccgcctgcccagagcctctgcatcagccaacaacagcgccaccacgggactcgcgcatcttcaggcagcgcaaacacatggcgaggatactcgtcgaagcgcccgcaggctcgggctcgccggaggactccatcaactcggacatgatcctcatcctcgccggcctgctctgcgcgctggtctgcgtcctcggcctgggcctcgtcgcccgctgcgcgtgctcgtggcgctgggccaccgagtccggccgggcgcagccgggcgccgccaaagccgcgaacaggggcgtcaagaaggaggtgctgcgctcgctcccgaccgtcacgtacgtctccgacagcggcaaggcggagggaggggccgacgagtgcgccatctgcctcgccgagttcgagggaggccaggccgtgcgcgtgctgccgcagtgcggccacgcgttccacgccgcctgcgtcgacacgtggctgcgcgcgcactcctcctgcccgtcctgccgccgggtgctggccgtcgacctgccccccgccgagcggtgccgccgctgcggcgcgcgccccggtgccggtgccggcatcagcgcgctctggaaggcgcccacgcgctgcagcgccgaggggccgacgttcttggcgtagtgccgtgcgcactcgatacaggaattgaaccgacgcgcagtctcagtgatgaacttgtgtttttttttagcctggtaggtttcaccttttttaggtgtgtgtagtgattagctcaacggtgttctggacaagcatcaagatgtgtgtacctgattggtgtatacaaattgtccctgtaatttatctgtacatatgcaaatgcaatgatcgaaagcttggagttggttgcaat

SEQ ID NO: 132736 - DNA, 547 bp, Zea Mays
gcgaaagggatcggagcacggcgatttgcggccgcagcctactcacacacaggcgagagaaggaagagaagccccccgatcgtctccatcagctcgccggcagtgcactgcagcgcgggccgcgcgcgtgtggagccggatccggattgctcgctcgcaagccggtggcggtggtcggggcctcggggggaagatccgatccatgggagcagcggggccggccggcgtgcatttcttggacgcgtgcttcctctgccggaagccgctcgccgggaaccgcgacatcttcatgtacaggggcgacacggcgttctgcagcgacgagtgcaggagcgcgcagatggcggcggacgaggcggcggagaagaggaggaaggccagggcggtgacacgtggggccatgttcgcaagggaagcggaaggcccacaggagagcggcaaggtccgggccgggtcgtccatcctggccctgtaaccgtcgggactcgggagtctgtctttttctgtaccaggctacctgacgagacgcgccagccaccggacatca

SEQ ID NO: 132737 - DNA, 937 bp, Zea Mays
ccagctgccgtcctgagcctccgtttgcggtgcgacagctcctccaggaccggcccccgcgcgcgtgccgtacgtgccagggacgacgccgggcggccgatggagttcacgtcgtcctacttccacgccttcggcaaccccgacctcgcggcggtggtctccggcgacggcggcagcgcgcaggcccaccggccgcgccgctccaccgacggcgcgaaggcggaggacggcaggagccccaccaccacaacggcgaggcgcgcgccgtccatgttctgcgtccccgacacggaggcggaggagcccaacggcttcctggacgagtgcaccctctgccgcaaggcgctctgcggcgacatcttcatgtacagaggggacacgccattctgcagcgacgattgcaggagggagcagatcgacatggaccgcataaggcaccggaggaagaagcagcaggccctcatagcgcagcagcagcagcagcagcaggcggcggcagcggcggcgatggcgcagagggaccgacgtacccagcggcagcttcagccacagcactagacggagctcacggaagcttcatatacaccggttccgggctcgtcccaagtcccaacgtacccagcagggatggcggatggattcttgcacgttcctagtactaggcaaggattctcctcgcaaggaccaagtagccacgacctttctttgcgtttgtatcgtccgacgcgaaacaacgtagtgagcggaggttttccgaggctattgcaatgactaaatgagcaatgcaagccttactcgttttttgttttgattattcctgattaaaactggggccgtcggagacgctatgggccagtttggcaacccagtttctctaagtgatttttatttttcaaaaaaataatagttcattttttcttgagaaaatggaaaccgt

SEQ ID NO: 132738 - DNA, 756 bp, Zea Mays
ggccatcgctggcaacgaagcttcagtgcttcagtgctgttcggttcatctgtgcttcagcgtagtgctactggcactggcagtgccctaactaaggtctcctcggtctcatctcatctccatgatggcttcttcctcctccttctcttccttcttcggcatcgagcctctcgacggaggcgacggcgacgcctaccgccgcgccatggacgcctgctccctctgcgggaagcgcctcgccggggaccgcgacatcttcatgtacagaggggacacgccgttctgcagcgaggagtgcaggcaccaccagatggccagggacgatttcggcgcggcgttgaagacggagccgcgtccggcaaggagaggggagcgacgccgccgcaggcacgaggctcctgccgccgccgccgccgagccggcccgtgtcccgctagcgccaaatgtgcccgccgttgtgatctagtggtgcagtggttatagctgccacagagcggcatccgaccggcttctctcaaggaaccaaccagcgaactgtccggtcgagatgagtagcggcggcagagaatacgtttgtgtgcaagcaacaaggaaccaaccacgctgttcagtatctctgtgttctttcggtttcttctgctgttgtttgccttgttggtcacttttctttctgcacgtgctgagcaaccagttgtgagagaaatggatgtacataacggcatgttcatgcaagactgtgcattttggtgctgccct

SEQ ID NO: 132739 - DNA, 192 bp, Zea Mays
atggcgcgcgtgatcggggatgacgaatggtttcgtggtcacaggaataataaaagatgggctctggctgtggcctgtggggaaatccgtcaggcgtgccctaccggccgattcgcggggagaaggaaccattccacaggaaagttgtgctcctgtggatacgcgaatggagtggaaatccggccgaaataa

SEQ ID NO: 132740 - DNA, 1648 bp, Zea Mays
ttggactcggctattaaaaccacgagtgggaagttttcttcttcgtgacctcccgctcgctgcgccagccaacccaccacccatccgtttctcgttctccggcccctgcctgactcccctcctcccccccttaacaatggcagtacaggcgcagtacccatccaatctcctcttccacgacaggtgcgcctcctcctactccgtcccctcgctcctccttccgcccctgcccctgccccttgggagcggtatctgctcttgagagaggtctttggttgccggggagtggtctcacggcttcctctgctccgtgctgtttatcgcagaggtgagccggacaggaagaaggcgatggacatgcccaagccgccgcagctcgccggagtctcgccggcggcggtctacttctccggcggtggagcgagtgggaataatcggaggaagcgagccagggaggccatggcgccgccgccggcggtcaaggaggattacgtcaatctgttcgcactccagcagcagcagcagcagcagcagcagcagtcgatgccgttcgccaacatggcgctcttccagaaccagaacagagtctcgtcgtcgccgtccccggccgcgacggcgctcgtgtccaccggcctccgcctggcattcgacgagcagcagcaacatctgctacagcagcaggagagcaagcagacgaatgccttgcgctattcgtcgccgccgtcgctgttcgcctctgtctccgacgagctcgccgcgcaggcgaagcagcatgaagaggaggtcgaccggttcgtccgcgagcagggcgagcagctcaggcgggcggtggccgatcggctgcggcgccacaaccgggcgattctggtcaaggccgaccagtccgcggcgcgcaggctccgcgagaaggcggcggaggcggagcgcgaggcgcggcgcggcgccgagctggaggagcgtctggcgcgcctccgcggcgaggcggcggcgtggcaggccaaggcgctctccgagcaggccgccgcggtcgccctgcacgcgcagctgcagcaggccgcggccgcggcgcgggcgtcggtcgaggagctcaccgccgccgccgccgcgggcgacgccggcccggcggagtcgtcggcgtcggcgttcgtggaccctcgccgcgccgggccgccgccagaccacgcgtgcctcgcctgccgcctcaggccggcctccgtggtgctcctcccctgcaggcacctgtccctctgcggcgagtgcttcgccgccggcgacgccgacgccgccatgccgtgccccgtgtgcctgtgcgtgcggacggggagcgtggaggccatcctctgctgagctttccccgcctctcatcatcgatcatccggccgtccacctcgtgagccggtgagtgcatgatgtgcaggaacccatcaatgccttcccaagaaattgaggagaaaaaaaaaaacgtaggaaagctagaactttctcttttttaatttcttttttctaagtttttgttcatattaatttcgactcctctgccctaccttctatgggttttaggagaattcaattgataagttcattgttaatagtaagcagcaagtgcatcggatgaacgggggtggctcggcacaccttgattgatttc

SEQ ID NO: 132741 - DNA, 1505 bp, Zea Mays
ttggactcggctattaaaaccacgagtgggaagttttcttcttcgtgacctcccgctcgctgcgccagccaacccaccacccatccgtttctcgttctccggcccctgcctgactcccctcctcccccccttaacaatggcagtacaggcgcagtacccatccaatctcctcttccacgacagaggtgagccggacaggaagaaggcgatggacatgcccaagccgccgcagctcgccggagtctcgccggcggcggtctacttctccggcggtggagcgagtgggaataatcggaggaagcgagccagggaggccatggcgccgccgccggcggtcaaggaggattacgtcaatctgttcgcactccagcagcagcagcagcagcagcagcagcagtcgatgccgttcgccaacatggcgctcttccagaaccagaacagagtctcgtcgtcgccgtccccggccgcgacggcgctcgtgtccaccggcctccgcctggcattcgacgagcagcagcaacatctgctacagcagcaggagagcaagcagacgaatgccttgcgctattcgtcgccgccgtcgctgttcgcctctgtctccgacgagctcgccgcgcaggcgaagcagcatgaagaggaggtcgaccggttcgtccgcgagcagggcgagcagctcaggcgggcggtggccgatcggctgcggcgccacaaccgggcgattctggtcaaggccgaccagtccgcggcgcgcaggctccgcgagaaggcggcggaggcggagcgcgaggcgcggcgcggcgccgagctggaggagcgtctggcgcgcctccgcggcgaggcggcggcgtggcaggccaaggcgctctccgagcaggccgccgcggtcgccctgcacgcgcagctgcagcaggccgcggccgcggcgcgggcgtcggtcgaggagctcaccgccgccgccgccgcgggcgacgccggcccggcggagtcgtcggcgtcggcgttcgtggaccctcgccgcgccgggccgccgccagaccacgcgtgcctcgcctgccgcctcaggccggcctccgtggtgctcctcccctgcaggcacctgtccctctgcggcgagtgcttcgccgccggcgacgccgacgccgccatgccgtgccccgtgtgcctgtgcgtgcggacggggagcgtggaggccatcctctgctgagctttccccgcctctcatcatcgatcatccggccgtccacctcgtgagccggtgagtgcatgatgtgcaggaacccatcaatgccttcccaagaaattgaggagaaaaaaaaaaacgtaggaaagctagaactttctcttttttaatttcttttttctaagtttttgttcatattaatttcgactcctctgccctaccttctatgggttttaggagaattcaattgataagttcattgttaatagtaagcagcaagtgcatcggatgaacgggggtggctcggcacaccttgattgatttc

SEQ ID NO: 132742 - DNA, 1153 bp, Zea Mays
ttggactcggctattaaaaccacgagtgggaagttttcttcttcgtgacctcccgctcgctgcgccagccaacccaccacccatccgtttctcgttctccggcccctgcctgactcccctcctcccccccttaacaatggcagtacaggcgcagtacccatccaatctcctcttccacgacaggtgcgcctcctcctactccgtcccctcgctcctccttccgcccctgcccctgccccttgggagcggtatctgctcttgagagaggtctttggttgccggggagtggtctcacggcttcctctgctccgtgctgtttatcgcagaggtgagccggacaggaagaaggcgatggacatgcccaagccgccgcagctcgccggagtctcgccggcggcggtctacttctccggcggtggagcgagtgggaataatcggaggaagcgagccagggaggccatggcgccgccgccggcggtcaaggaggattacgtcaatctgttcgcactccagcagcagcagcagcagcagcagcagcagtcgatgccgttcgccaacatggcgctcttccagaaccagaacagagtctcgtcgtcgccgtccccggccgcgacggcgctcgtgtccaccggcctccgcctggcattcgacgagcagcagcaacatctgctacagcagcaggagagcaagcagacgaatgccttgcgctattcgtcgccgccgtcgctgttcgcctctgtctccgacgagctcgccgcgcaggcgaagcagcatgaagaggaggtcgaccggttcgtccgcgagcaggtatcttgggcccccgcgacccgcctgttcccatcgccgagtccgtttctttggtcccaatcctgacgatgtcccgcgccggtccgtctttggtcagggcgagcagctcaggcgggcggtggccgatcggctgcggcgccacaaccgggcgattctggtcaaggccgaccagtccgcggcgcgcaggctccgcgagaaggcggcggaggcggagcgcgaggcgcggcgcggcgccgagctggaggagcgtctggcgcgcctccgcggcgaggcggcggcgtggcaggccaaggcgctctccgagcaggccgccgcggtcgccctgcacgcgcagctgcagcaggcc

SEQ ID NO: 132743 - DNA, 159 bp, Zea Mays
atggcgaccgccctttctatctttcttccctctttcctctccagtagcctagtgtccctattcgtgtttttggacgggaatcagtcgctgtggcggtatggaatcatggagcttggagaggagggcagggcagctgtgctgtgtgacaaacccagctag

SEQ ID NO: 132744 - DNA, 546 bp, Zea Mays
gcagaagccagatgttattgagatggggaaaagagcggcacgcatgaagcgcgggttgatacaagcagattttctgttacttatataaactgacattaattacatcataacacggtcacacatctctaaaaatttcttgcacacagacaatgacttcgacagctaaaaagaaaatgctgtgcccagacatgactgtgttggccgctgcatcggtccaggcagcattgtcatcgcgattagcctcaacccaagaaaggcaagagaatgcttccactgatgaccggtaatcaaatcatgtgtgtcggactatatgtacaagctgccacacccaggagtacatcattccaaggccacaatagaatgacaccattataagaggtaggaaggggagcctatcgccgaatacatgatggtgaaatacttgagaccataattctatgcctgcaattcccaaaagatagcttaaaccaatccatccaatgatgccattcttcttcactgtgctgcctgaccgacttattttctttccttccaggtcagactttg

SEQ ID NO: 132745 - DNA, 114 bp, Zea Mays
gcaacccaaaaggagcaaagacgatccctcgttcttttccgttattatgggctagaagaaaggcgctaccttgcaatagatggcaagtggattcttatacccaacaacaacaac

SEQ ID NO: 132746 - DNA, 1840 bp, Zea Mays
gatcggtccaaattgaaaaaacagactccggccacagccgagacgagactagcagcagccgcttgctcagatcggcagcttcggcggcggcggagatggcgattcggtactggccgatggccggagcagccgttgggttccgcctcgtcctggttctcttcggcggggatctccaccttgcctctcgccctgaggtctccacccccctcacctcccttcgccgcctggcggaaggctactggctgaagcaagcgtccgtgtcaccgtactccggttctatgtatcacggttccccattgctcctgtctgttcttggtccattaactagtagcaggcctgacggacatcatgctcatatttactgcagtttgatttttgtggctgtagattttctagcagccatgctcatccgagcgactgggcatgaactcgaaatggcacggaacagaagtttgaagtcacttgacctcacaaaggcagtaaaggatacagttaatgtaagcgctggagatgttgcttctctcatatatttgtggaacccttgggcaatagtcacttgtgtgggatcatgtacatcaccaatcgagaatctaatggttgtaataatgatctacggatcctgttcacgtctggctcctcttgctgcttttggatatgttatggccacacacctctctctttatcctgcaattctcatagtaccggtcattctgttgctgggttatggtctagatgctcctcctccaaaagtatttgttataaaagggtcaattgccagaaaaagtgatgtgtcagacaatgataaaacaagcagacagagagttgttcagcagttttcatggaaaccagtacttcactttatattttggctgttcatctggtcgtgccatgtgttgttattgagcagcgtgattttgaagaaagttggtggcctccacgagatgtttgaaaagacgtatggttttatacttacagtgaaagacctatcaccaaatattggtgttttgtggtacttctttgctgaagttttcgacttctttagaaatttctttcttatggtattcaatatgaacatcatttttatggtcttaccattggccatccgattgaaacatcgtccgtgctttcttgcatttgtttacacggcaattgtggcaatattgaaatcttatccatcggctggagattcagccctgtatcttggtcttctgggcttatttgtcaacgaattagcagaaatgcagttcacattcttcttgttttttggatatattggagtctccctacttagccctgtcatgcataatctgtggatctggaggggcactggtaatgcaaatttctacttcgccactggtttggcttatacttgccttcagactgtgttgctggtagagagtgtaagttcaatgataaagcacgacagaaagttaaggctacttgttacaagctaatttggtcctcataatcagaagctcaagtggtggacagctccgatgcttgcaattccctacatggtgctcttgattcttgaacacaaacagctcctcatcttggagttcgtagatgtaggtcatattcgatgtagcatgttgtactgtagaccccacacttgtacaatactaggaccgcaactctttcaacaaagacaaggaacacggtagggctcgtccttggtgactagtacgtagttgtgttcgctaccgagaattgttgtggatcctggctgtgatgttcagtgatccagcttggttgaactgccctcacgtacatttaattccgtcagtctgatggatcaacaaggaaaccaacatttgaacgtttaaccaaactgatatct

SEQ ID NO: 132747 - DNA, 1425 bp, Zea Mays
aagactaaaacaagacacaatcctagagccaacggggtatataatcgaaagtaagggaggcaggtgcatctgcctagtcgctattttgcttggctccgcacccgcgcccggctcgtcgtcaatccacccatccatctactgcgccgaaggaacgccccgccgctccggcggcgtacgcggggagaggagaggagatgagacgaagtgcgacggggtgggcatgaggtgcaagaagcacccgtaccaggtcggcggcggtggcgtctgtgccacgtgcctccgcgaccgcctgatcgcgctggaggccgcgcagaacggcgacgcgtcgtcgtcgccgccgccgcccgccgcggcgcccgcgttcccgaggtcggtgtccccgtacgtgtcccgcaggaagtcggacacgtcgggcgggggcggcgcgctcaggcaccacccgagcctgctcttcttccggacgccgcaggtagggcccgcctacggcggcggcgcgttggaggaaggcgacataggctacgagtacaagaggcggcgcgccggcaagttctccgtgctcgccacgctcttcggccaccaccacggtcacagatcggaagagacgcaccaggaaggcgccacggagcggaagaaacattcttggttcgccgcgatcatgccgcgccgccgcaagaagcaggcggcgccggcctcgatcacctcgccacggtcagccccgccgaggcgctcctgccgcgtggtcagcaaccgggggctgtcgccggagcgggacagccacggcagcggcgacgagagcagctcgcccgccgcggatcccccgtggcggccgtccccgtcccccatgcggaggacccgctgccggcgccgccagacgaacagcatgccgtcgggtttcgccgtctgcctcagcccgctcgtgcggcccagcccggggcgccgccgccacgtccagccgccggacccgggctccttctcctccgagttccggccgtcgccgctccacagtctctcgtctgctgcctccgttacgcgctgtcgctccaggaagctcgccgacgtcggccgcttccggtgatgattgcttccaccttcaccattttcgtccttccattccatgcaccaaatccagattagtccacgttttaaaatttctttttgtttttttttttttttggatttattacattttgtctatccgtgaagaagaagagtatgcaagactggcacacacaccccaaaccaagtccaaaacacccccgttgacatatatactactgcgtagtttagtactgcttgtcggcccaacattttgtggcgatgtaacgagctgcttgtactgcttccaagtaactacatattcatgtttgtacagctacttgtgtaatttcgatttcatcttctgcaaagtttgaactactctgaccc

SEQ ID NO: 132748 - DNA, 751 bp, Zea Mays
ccccgtcccgttcgcccacatcccccacctcccccatccccaacgctgccatggcctcgctccaccccacgacagcaatgctggcccagcgccattcccctgccccctctctcagcgcatcgtcgctctcatggtccgcctccatcgccgtctcccgcatcccgccagcccctggcctcgcgctccacccactagtgaatcctcccgcctccggcaaccgccagagcccggtggtgtgtgcggcgtggacgcggcggtcgcgcggggaggcggagcagcggcccaaccgcaagtcgtggaagcagcgcacggacatgtacatgcgccccttcctgctcaatgtttttttctccaagcgcttcgtgcacgcaaaggtcatgcacaggggcaccagcaaggtcattgccgtcgccaccaccaactccaaggacctccggctcaccctcccatctcttgtcgacgacaacgcctgccggaccatagggaggctcatcgccgagaggtccatggacgccgacgtctttgctatggcctatgagcccaagaagaacgagaggatcgagggcaagctcgggatcgtgattgacaccattaaggagcacggcatcatcttcgtataggcaggtttcagggtaggagtagggctgttatgttttagtttcgactcctgtagcctggaaactgttaccttattgagataaaaacaaatacaaaaagtatcaatctagaggtcttagaccaatgttgctga

SEQ ID NO: 132749 - DNA, 551 bp, Zea Mays
acgattcgattcgttaccgcgatgatgtctttgcgcagtagcgctaatctaacccatcgccaacccgccgccgcagagcccggtggtgtgtgcggcgtggacgcggcggtcgcgcggggaggcggagcagcggcccaaccgcaagtcgtggaagcagcgcacggacatgtacatgcgccccttcctgctcaatgtttttttctccaagcgcttcgtgcacgcaaaggtcatgcacaggggcaccagcaaggtcattgccgtcgccaccaccaactccaaggacctccggctcaccctcccatctcttgtcgacgacaacgcctgccggaccatagggaggctcatcgccgagaggtccatggacgccgacgtctttgctatggcctatgagcccaagaagaacgagaggatcgagggcaagctcgggatcgtgattgacaccattaaggagcacggcatcatcttcgtataggcaggtttcagggtaggagtagggctgttatgttttagtttcgactcctgtagcctggaaactgttaccttattgagat

SEQ ID NO: 132750 - DNA, 6254 bp, Zea Mays
attaagttactgcagaaggagagcgagataccactagaagaacttcttgcgaggtaccgagaggtacagttagattttccatttatttcttcgaacaacttactgtggtccatttgtaatacctttttttatatttaggatggctgtgcagatcatgaaacagctgagttggagaattcaccccattttgttgaagaggtcaataccgacaagtctttgaatgatcaatctgtgaacattttggaagcgaaaagtgatatttttgtggatcaccaatccagggatgtgctggaaactgagcacacgactctacaatcagaaattgcatcagagccttgtgctcaacaaaattttgtggaagagaataatctcactgatgttaagacagtcaatgaagataagagtgatgatgtaattgctgatgctgcagctgctgcaagatcagcacaaccaactggcaacaccttcttgactacaaaagtgcgcacaaaattcccattccttcttaagcattctcttcgtgaataccagcatatagggctggattggttagttgctatgtatgagaagaggcttaatggaattctagcagatgaaatgggtttaggcaagacaatcatgactatctccttgcttgcgcaccttgcgtgtgagaaggggatatggggtcctcatcttattgtcgtgccgactagtgttatgctaaattgggagactgaatttcttaagtggtgtcctgcttttaaaatactgacttatttcggaagtgcaaaggaaagaaagcagaagcgtcagggctggatgaaaccaaattacttccatgtttgcatcacaacatataggcttgtcattcaggattctaaagtgtttaagcgaaaaaagtggaagtatcttattcttgatgaggctcatctgataaagaactggaaatcacagcgttggcagacattgctcaacttcaattcaaagagacgtattcttctgactggaactccactgcaaaatgaccttatggaactttggtccctcatgcattttttgatgcctcatgtatttcagtctcatcaagagttcaaggattggttctgcaatccaatttccgggatggtggaaggtcaagataaagtaaacaaagaagttatagatcgattgcacaatgtccttcggccatttatactgcgtcgactgaaaagagatgttgagaaacagttaccaaagaagcatgagcatgtcatatattgccgactttctagaaggcaaaggaacttgtatgaagaatttgtcgctagctcagagacacaagcaaccctggcgagtgggaattattttggcatgataagcatcatcatgcaacttagaaaggtctgtaaccatccagatctttttgaaggtcggccaataataagctcatttgacatggctggtattaacatgcagctcagctattcagtctgcatgctccttgataagagtccattttctcaggtggacctgtctgatatgaattttgtgtttactcaaaatgaatttagcatgagttcctgggaagctgacgaggtcatctccgcctttccttcaagtatcacctccagggactgtgacctggatattttttgctctaataaggatcatcagggaagtaatttgacaaacatttttgaagatattcagaaagccctacaggaggagagaataaaggaatccagagaaagggcagcttctgttgcatggtggaatagagttagatgccaaaagagacctgtctatggcacaaacatgagacatgttttgactgtaaagcatcctgtatcaaatattcttaataagaggaacaatccattgtgccacatggactattcatcacgccttgcagatcttgttcttccatctgtggaacgctttcagaaaatgctttattttgttgaatcatttacattcgcaattccagctgctcgagctcctccccctgtttgctggtgcagcaaaggaaagtctcctgtttttattgatccagcatatagagaaaaatgcatgtacaagttttctcccattctgtctcctataaggtctgctatcgttcgtcgtcaagtctactttcctgataggcgtttgatccagtttgactgtgggaagttgcaggaacttgctattctgttaaggcgtttgaaatcagaaggccacagggccttgatatttactcagatgactaagatgcttgacgtcttggaagagttcataaatttatatgggtatacatatttgcgattagatggttctactcccccagaagagaggcagactctaatgcagaggttcaacacaaatccaaagtttttccttttcattttgtccacacgtagtggtggtgtgggaatcaaccttgtaggtgcagacactgttatcttctatgacagtgactggaaccctgcaatggaccaacaagcacaggacagatgccacaggattggtcagactcgtgaagttcacatatatagactcatcagtgaaagcactatagaggagaacattctcaagaaagcaaatcagaaacgagctcttgatgatttagtgatacaacgtggtagctacaatacggaattcttcaagaaacttgatcctatggagttcttttccgggcacacatctcttcgtgtggaaggtcaggagaagaattgctctacatccgtgggagcttcaaatgatgtggatctggctctgtcaattgcagatgttgaagcagctattagacaggcagaagatgaagctgactatatggctctcaagaagttggaggaggaagaagctgtggacaatcaagaattcagtgaggaggttgcgggcagaccagaggaggatgaattggttaatgaggaggatggaaaacctgatgagcacattaatgaagatcacaaatactactcttctgatgtagagaaggagaagcacattactttgtctaccaatcgattaaacaatgaaaaggctcttacattggctgttggtgatgaagatactgacatgcttgctgatgtgaaacagatggcagcagcagctgctgcagcagggcaagcatgttcatcttttgagaaccagctccggccaattgatagatatgcaatgcgctttatggaactctgggatccagtaattgacaaagctgctgtcaatcatcaagtaaatgttgaggaggaagaatgggagcttgatcgcattgaaaaactcaaagaggatttagaagcggaaattgatgaagaccaagaaccactatcgtatcaatcatgggatgttgattttgctacgacagcctatcggcaacatgttgaggctttaactcaaaagcagttgttggaagaacaggaaagacaggctcaggaagcagcaaaagagttggaagagaataatgataatatgagtcaccgcagaaagtcaaacaagaataaaaagaagactggcaaattcaagtcccagaaaagaccgcgtttgtcttctgaatcagaagtcattctggaggaaacctctgtagatacaatgagcattgatgacaatgcaccctcacctgagcttataagtgatgaatcgccacaccattattctaacaagcgtaagaagattatgtctgctactgaggaagatagtaacagcagaagtttaaaaaagtttaagaaaactaaatcaagttttatttctgagttgtcacctaggccgaaggaggaccttaatgattcagatccaaaatcagtggctagaactaaaagtgatggcagactttccatcccttgcatgccagtaaagcgtgttattgtgataaagcctgagagattgaaaaagaagggaatatggtctcgagattgtgcttcagactcatggacatctgaggaagatgcagttctttgtggaactgtgcatgagtatggtcctctttgggaactggcaagtgattttcttcactccttgccaggcgggtcctcctataggggaagatatcatcatcctttgcattgctgtgagagatacagagaacttttctgcaaatatgcaatatcagcaacagataattctaacagtgaaaaggctccttctgggactggaaaggctgtacttagagtatctgaggatcaagctcagatgttggtgaatgtgaccagtgaacttcccaacaatgaattgcttctccagaaacacttcatggctgtaatttcatctgtatggagatcaaaatgttgccgtcatccctgctgttttaggaataagcctggtggatcaagtgagaactggcccatggtaaactttagaccaagcgtcaatctagttagggaagcccttgcagctggtcaggctaagtttacgctaactgtgattccaccaccgtcaagaaaccaggaatactcacggaattatttagaattagagttagatttcttgaaagatcaacatgcctatgaggaagacttcccgtctgtactaaatgtatccatactggaaccagaatcatccaaacaggctccagagccagtggaacaatcattgttatctgaactttcatgtagacaggctgagaaccgactcaggtcagtgttgatgcaagtcttcattgctgttatgatggtggcggcggttgccgttatattagtttaaataaaacagtcattctttggatttcatgattttcctaatatttagctcacctctgctacacaaaatactgctaagcatcattttcacttttctttgcaggatagcgtcagaagcttgttatgatggtgaaagttttcattgggcatcatcatctttccacataaatgatgctgcccgccacaaatctggtttgaagtctatagggaagcacaaagcagcatcggaatctggtagacctcccaaatccaaagtccagaagattactgaattgcatcaggaagggccaattgccatgagtaattttctctgtatgcctgctcaactattgccaagtacagctgacttccacattagtgactccctatctgactttggtatcaacgattatgaattcaactactctgaggatctcttgcaagagtttgacgccctcgagttcttcccagatcagggtgactctggtctccttggtattgaagagttagaacctctttcggatttcacagatatcggatgaacatagatgagcaaattatggttgatgggatgctgtcctataccaagaggagacaagatcgcctctggcaggagcccaaggatataggttgagttgctcaaccatgcacagatgtgctgcaagctttatcatggctggctggagcaaagctgctggcttggtgaggtcacattgatctgacaagcttgaggatgggtttgcactaatggcggcattgggtaccaacagagaaggtaaaagaggaggccctcagcaccacccatttgttgctgtatatcgtgttcattctctgtttaatccaatgttgtttggctattttgccactgaaaacatctcacatgtcaagttggtggatgccatctctatcagaaatttaggatgtggcgccaatgtccaaagaatgatcagtcaagtgcagcttatcggcgcattatatttggtcaggaatcaatgcatgacatcaatatgatcagaactgctgttccagtttcatttgaggaatgcaatttctggtgattcgggatgcaagtttttcataggaggtaaagagcgtgggcatagttgtacatgtaataaaatgaataaggttctgtgaactctcggtctcggttatgccaattaatagccataatttgttgttagaggccagggggctttttgatcagcgggctgctgctgtgagccggtaacaatgtagctgattgtgcgcctccatattgttttcttggtaagtggactttgcatcactgccaagcaacgatgagatagagtaattggtctgtttcgcgcaaaaatactacgagcttgtattcagtcttgacctccagtaacctgaacgctgagaatgtttggccaaccacataatacgtaggctgactagctgagaatatctagctaatcccgtaatctgtaagctgagaatgtatggtgaatcccataatctgtaagctgagattgtttggccaatcaaggtcacaatgctgcctacaagctgagaatgtttggccaattaaggtctagctgatgtccttagcagaaaacaaaattttctaaacgcaaactgttttaataatagtaagaaaacagggctccacttatttgt

SEQ ID NO: 132751 - DNA, 5496 bp, Zea Mays
attaagttactgcagaaggagagcgagataccactagaagaacttcttgcgaggtaccgagaggtacagttagattttccatttatttcttcgaacaacttactgtggtccatttgtaatacctttttttatatttaggatggctgtgcagatcatgaaacagctgagttggagaattcaccccattttgttgaagaggtcaataccgacaagtctttgaatgatcaatctgtgaacattttggaagcgaaaagtgatatttttgtggatcaccaatccagggatgtgctggaaactgagcacacgactctacaatcagaaattgcatcagagccttgtgctcaacaaaattttgtggaagagaataatctcactgatgttaagacagtcaatgaagataagagtgatgatgtaattgctgatgctgcagctgctgcaagatcagcacaaccaactggcaacaccttcttgactacaaaagtgcgcacaaaattcccattccttcttaagcattctcttcgtgaataccagcatatagggctggattggttagttgctatgtatgagaagaggcttaatggaattctagcagatgaaatgggtttaggcaagacaatcatgactatctccttgcttgcgcaccttgcgtgtgagaaggggatatggggtcctcatcttattgtcgtgccgactagtgttatgctaaattgggagactgaatttcttaagtggtgtcctgcttttaaaatactgacttatttcggaagtgcaaaggaaagaaagcagaagcgtcagggctggatgaaaccaaattacttccatgtttgcatcacaacatataggcttgtcattcaggattctaaagtgtttaagcgaaaaaagtggaagtatcttattcttgatgaggctcatctgataaagaactggaaatcacagcgttggcagacattgctcaacttcaattcaaagagacgtattcttctgactggaactccactgcaaaatgaccttatggaactttggtccctcatgcattttttgatgcctcatgtatttcagtctcatcaagagttcaaggattggttctgcaatccaatttccgggatggtggaaggtcaagataaagtaaacaaagaagttatagatcgattgcacaatgtccttcggccatttatactgcgtcgactgaaaagagatgttgagaaacagttaccaaagaagcatgagcatgtcatatattgccgactttctagaaggcaaaggaacttgtatgaagaatttgtcgctagctcagagacacaagcaaccctggcgagtgggaattattttggcatgataagcatcatcatgcaacttagaaaggtctgtaaccatccagatctttttgaaggtcggccaataataagctcatttgacatggctggtattaacatgcagctcagctattcagtctgcatgctccttgataagagtccattttctcaggtggacctgtctgatatgaattttgtgtttactcaaaatgaatttagcatgagttcctgggaagctgacgaggtcatctccgcctttccttcaagtatcacctccagggactgtgacctggatattttttgctctaataaggatcatcagggaagtaatttgacaaacatttttgaagatattcagaaagccctacaggaggagagaataaaggaatccagagaaagggcagcttctgttgcatggtggaatagagttagatgccaaaagagacctgtctatggcacaaacatgagacatgttttgactgtaaagcatcctgtatcaaatattcttaataagaggaacaatccattgtgccacatggactattcatcacgccttgcagatcttgttcttccatctgtggaacgctttcagaaaatgctttattttgttgaatcatttacattcgcaattccagctgctcgagctcctccccctgtttgctggtgcagcaaaggaaagtctcctgtttttattgatccagcatatagagaaaaatgcatgtacaagttttctcccattctgtctcctataaggtctgctatcgttcgtcgtcaagtctactttcctgataggcgtttgatccagtttgactgtgggaagttgcaggaacttgctattctgttaaggcgtttgaaatcagaaggccacagggccttgatatttactcagatgactaagatgcttgacgtcttggaagagttcataaatttatatgggtatacatatttgcgattagatggttctactcccccagaagagaggcagactctaatgcagaggttcaacacaaatccaaagtttttccttttcattttgtccacacgtagtggtggtgtgggaatcaaccttgtaggtgcagacactgttatcttctatgacagtgactggaaccctgcaatggaccaacaagcacaggacagatgccacaggattggtcagactcgtgaagttcacatatatagactcatcagtgaaagcactatagaggagaacattctcaagaaagcaaatcagaaacgagctcttgatgatttagtgatacaacgtggtagctacaatacggaattcttcaagaaacttgatcctatggagttcttttccgggcacacatctcttcgtgtggaaggtcaggagaagaattgctctacatccgtgggagcttcaaatgatgtggatctggctctgtcaattgcagatgttgaagcagctattagacaggcagaagatgaagctgactatatggctctcaagaagttggaggaggaagaagctgtggacaatcaagaattcagtgaggaggttgcgggcagaccagaggaggatgaattggttaatgaggaggatggaaaacctgatgagcacattaatgaagatcacaaatactactcttctgatgtagagaaggagaagcacattactttgtctaccaatcgattaaacaatgaaaaggctcttacattggctgttggtgatgaagatactgacatgcttgctgatgtgaaacagatggcagcagcagctgctgcagcagggcaagcatgttcatcttttgagaaccagctccggccaattgatagatatgcaatgcgctttatggaactctgggatccagtaattgacaaagctgctgtcaatcatcaagtaaatgttgaggaggaagaatgggagcttgatcgcattgaaaaactcaaagaggatttagaagcggaaattgatgaagaccaagaaccactatcgtatcaatcatgggatgttgattttgctacgacagcctatcggcaacatgttgaggctttaactcaaaagcagttgttggaagaacaggaaagacaggctcaggaagcagcaaaagagttggaagagaataatgataatatgagtcaccgcagaaagtcaaacaagaataaaaagaagactggcaaattcaagtcccagaaaagaccgcgtttgtcttctgaatcagaagtcattctggaggaaacctctgtagatacaatgagcattgatgacaatgcaccctcacctgagcttataagtgatgaatcgccacaccattattctaacaagcgtaagaagattatgtctgctactgaggaagatagtaacagcagaagtttaaaaaagtttaagaaaactaaatcaagttttatttctgagttgtcacctaggccgaaggaggaccttaatgattcagatccaaaatcagtggctagaactaaaagtgatggcagactttccatcccttgcatgccagtaaagcgtgttattgtgataaagcctgagagattgaaaaagaagggaatatggtctcgagattgtgcttcagactcatggacatctgaggaagatgcagttctttgtggaactgtgcatgagtatggtcctctttgggaactggcaagtgattttcttcactccttgccaggcgggtcctcctataggggaagatatcatcatcctttgcattgctgtgagagatacagagaacttttctgcaaatatgcaatatcagcaacagataattctaacagtgaaaaggctccttctgggactggaaaggctgtacttagagtatctgaggatcaagctcagatgttggtgaatgtgaccagtgaacttcccaacaatgaattgcttctccagaaacacttcatggctgtaatttcatctgtatggagatcaaaatgttgccgtcatccctgctgttttaggaataagcctggtggatcaagtgagaactggcccatggtaaactttagaccaagcgtcaatctagttagggaagcccttgcagctggtcaggctaagtttacgctaactgtgattccaccaccgtcaagaaaccaggaatactcacggaattatttagaattagagttagatttcttgaaagatcaacatgcctatgaggaagacttcccgtctgtactaaatgtatccatactggaaccagaatcatccaaacaggctccagagccagtggaacaatcattgttatctgaactttcatgtagacaggctgagaaccgactcaggatagcgtcagaagcttgttatgatggtgaaagttttcattgggcatcatcatctttccacataaatgatgctgcccgccacaaatctggtttgaagtctatagggaagcacaaagcagcatcggaatctggtagacctcccaaatccaaagtccagaagattactgaattgcatcaggaagggccaattgccatgagtaattttctctgtatgcctgctcaactattgccaagtacagctgacttccacattagtgactccctatctgactttggtatcaacgattatgaattcaactactctgaggatctcttgcaagagtttgacgccctcgagttcttcccagatcagggtgactctggtctccttggtattgaagagttagaacctctttcggatttcacagatatcggatgaacatagatgagcaaattatggttgatgggatgctgtcctataccaagaggagacaagatcgcctctggcaggagcccaaggatataggttgagttgctcaaccatgcacagatgtgctgcaagctttatcatggctggctggagcaaagctgctggcttggtgaggtcacattgatctgacaagcttgaggatgggtttgcactaatggcggcattgggtaccaacagagaaggtaaaagaggaggccctcagcaccacccatttgttgctgtatatcgtgttcattctctgtttaatccaatgttgtttggctattttgccactgaaaacatctcacatgtcaagttggtggatgccatctctatcagaaatttaggatgtggcgccaatgtccaaagaatgatcagtcaagtgcagcttatcggcgcattatatttggtcaggaatcaatgcatgacatcaatatgatcagaactgctgttccagtttcatttgaggaatgcaatttc

SEQ ID NO: 132752 - DNA, 5261 bp, Zea Mays
attaagttactgcagaaggagagcgagataccactagaagaacttcttgcgaggtaccgagaggtacagttagattttccatttatttcttcgaacaacttactgtggtccatttgtaatacctttttttatatttaggatggctgtgcagatcatgaaacagctgagttggagaattcaccccattttgttgaagaggtcaataccgacaagtctttgaatgatcaatctgtgaacattttggaagcgaaaagtgatatttttgtggatcaccaatccagggatgtgctggaaactgagcacacgactctacaatcagaaattgcatcagagccttgtgctcaacaaaattttgtggaagagaataatctcactgatgttaagacagtcaatgaagataagagtgatgatgtaattgctgatgctgcagctgctgcaagatcagcacaaccaactggcaacaccttcttgactacaaaagtgcgcacaaaattcccattccttcttaagcattctcttcgtgaataccagcatatagggctggattggttagttgctatgtatgagaagaggcttaatggaattctagcagatgaaatgggtttaggcaagacaatcatgactatctccttgcttgcgcaccttgcgtgtgagaaggggatatggggtcctcatcttattgtcgtgccgactagtgttatgctaaattgggagactgaatttcttaagtggtgtcctgcttttaaaatactgacttatttcggaagtgcaaaggaaagaaagcagaagcgtcagggctggatgaaaccaaattacttccatgtttgcatcacaacatataggcttgtcattcaggattctaaagtgtttaagcgaaaaaagtggaagtatcttattcttgatgaggctcatctgataaagaactggaaatcacagcgttggcagacattgctcaacttcaattcaaagagacgtattcttctgactggaactccactgcaaaatgaccttatggaactttggtccctcatgcattttttgatgcctcatgtatttcagtctcatcaagagttcaaggattggttctgcaatccaatttccgggatggtggaaggtcaagataaagtaaacaaagaagttatagatcgattgcacaatgtccttcggccatttatactgcgtcgactgaaaagagatgttgagaaacagttaccaaagaagcatgagcatgtcatatattgccgactttctagaaggcaaaggaacttgtatgaagaatttgtcgctagctcagagacacaagcaaccctggcgagtgggaattattttggcatgataagcatcatcatgcaacttagaaaggtctgtaaccatccagatctttttgaaggtcggccaataataagctcatttgacatggctggtattaacatgcagctcagctattcagtctgcatgctccttgataagagtccattttctcaggtggacctgtctgatatgaattttgtgtttactcaaaatgaatttagcatgagttcctgggaagctgacgaggtcatctccgcctttccttcaagtatcacctccagggactgtgacctggatattttttgctctaataaggatcatcagggaagtaatttgacaaacatttttgaagatattcagaaagccctacaggaggagagaataaaggaatccagagaaagggcagcttctgttgcatggtggaatagagttagatgccaaaagagacctgtctatggcacaaacatgagacatgttttgactgtaaagcatcctgtatcaaatattcttaataagaggaacaatccattgtgccacatggactattcatcacgccttgcagatcttgttcttccatctgtggaacgctttcagaaaatgctttattttgttgaatcatttacattcgcaattccagctgctcgagctcctccccctgtttgctggtgcagcaaaggaaagtctcctgtttttattgatccagcatatagagaaaaatgcatgtacaagttttctcccattctgtctcctataaggtctgctatcgttcgtcgtcaagtctactttcctgataggcgtttgatccagtttgactgtgggaagttgcaggaacttgctattctgttaaggcgtttgaaatcagaaggccacagggccttgatatttactcagatgactaagatgcttgacgtcttggaagagttcataaatttatatgggtatacatatttgcgattagatggttctactcccccagaagagaggcagactctaatgcagaggttcaacacaaatccaaagtttttccttttcattttgtccacacgtagtggtggtgtgggaatcaaccttgtaggtgcagacactgttatcttctatgacagtgactggaaccctgcaatggaccaacaagcacaggacagatgccacaggattggtcagactcgtgaagttcacatatatagactcatcagtgaaagcactatagaggagaacattctcaagaaagcaaatcagaaacgagctcttgatgatttagtgatacaacgtggtagctacaatacggaattcttcaagaaacttgatcctatggagttcttttccgggcacacatctcttcgtgtggaaggtcaggagaagaattgctctacatccgtgggagcttcaaatgatgtggatctggctctgtcaattgcagatgttgaagcagctattagacaggcagaagatgaagctgactatatggctctcaagaagttggaggaggaagaagctgtggacaatcaagaattcagtgaggaggttgcgggcagaccagaggaggatgaattggttaatgaggaggatggaaaacctgatgagcacattaatgaagatcacaaatactactcttctgatgtagagaaggagaagcacattactttgtctaccaatcgattaaacaatgaaaaggctcttacattggctgttggtgatgaagatactgacatgcttgctgatgtgaaacagatggcagcagcagctgctgcagcagggcaagcatgttcatcttttgagaaccagctccggccaattgatagatatgcaatgcgctttatggaactctgggatccagtaattgacaaagctgctgtcaatcatcaagtaaatgttgaggaggaagaatgggagcttgatcgcattgaaaaactcaaagaggatttagaagcggaaattgatgaagaccaagaaccactatcgtatcaatcatgggatgttgattttgctacgacagcctatcggcaacatgttgaggctttaactcaaaagcagttgttggaagaacaggaaagacaggctcaggaagcagcaaaagagttggaagagaataatgataatatgagtcaccgcagaaagtcaaacaagaataaaaagaagactggcaaattcaagtcccagaaaagaccgcgtttgtcttctgaatcagaagtcattctggaggaaacctctgtagatacaatgagcattgatgacaatgcaccctcacctgagcttataagtgatgaatcgccacaccattattctaacaagcgtaagaagattatgtctgctactgaggaagatagtaacagcagaagtttaaaaaagtttaagaaaactaaatcaagttttatttctgagttgtcacctaggccgaaggaggaccttaatgattcagatccaaaatcagtggctagaactaaaagtgatggcagactttccatcccttgcatgccagtaaagcgtgttattgtgataaagcctgagagattgaaaaagaagggaatatggtctcgagattgtgcttcagactcatggacatctgaggaagatgcagttctttgtggaactgtgcatgagtatggtcctctttgggaactggcaagtgattttcttcactccttgccaggcgggtcctcctataggggaagatatcatcatcctttgcattgctgtgagagatacagagaacttttctgcaaatatgcaatatcagcaacagataattctaacagtgaaaaggctccttctgggactggaaaggctgtacttagagtatctgaggatcaagctcagatgttggtgaatgtgaccagtgaacttcccaacaatgaattgcttctccagaaacacttcatggctgtaatttcatctgtatggagatcaaaatgttgccgtcatccctgctgttttaggaataagcctggtggatcaagtgagaactggcccatggtaaactttagaccaagcgtcaatctagttagggaagcccttgcagctggtcaggctaagtttacgctaactgtgattccaccaccgtcaagaaaccaggaatactcacggaattatttagaattagagttagatttcttgaaagatcaacatgcctatgaggaagacttcccgtctgtactaaatgtatccatactggaaccagaatcatccaaacaggctccagagccagtggaacaatcattgttatctgaactttcatgtagacaggctgagaaccgactcaggatagcgtcagaagcttgttatgatggtgaaagttttcattgggcatcatcatctttccacataaatgatgctgcccgccacaaatctggtttgaagtctatagggaagcacaaagcagcatcggaatctggtagacctcccaaatccaaagtccagaagattactgaattgcatcaggaagggccaattgccatgagtaattttctctgtatgcctgctcaactattgccaagtacagctgacttccacattagtgactccctatctgactttggtatcaacgattatgaattcaactactctgaggatctcttgcaagagtttgacgccctcgagttcttcccagatcagggtgactctggtctccttggtattgaagagttagaacctctttcggatttcacagatatcggatgaacatagatgagcaaattatggttgatgggatgctgtcctataccaagaggagacaagatcgcctctggcaggagcccaaggatataggttgagttgctcaaccatgcacagatgtgctgcaagctttatcatggctggctggagcaaagctgctggcttggtgaggtcacattgatctgacaagcttgaggatgggtttgcactaatggcggcattgggtaatttccatacatgtatgtatattggtagtctagaattgtaggatgtagaaatgc

SEQ ID NO: 132753 - DNA, 337 bp, Zea Mays
ccttatgttgtactctagtgcaatcatgttaatccaagtagataatatatggaatactatgctgaagcaaaagaaaagaaacaataataataataataatagcttctcatttacagctctaagtctcagattcgatacagtgccaatcataaccaccacaactaccttccgcaaatgtacactgatattttgagaaactcaagtttctaagctaaagattttagcattttcctcaacaaagaaacagacaatcccactataagttgtcagaacagttgtgcgatggatctcctagcaaataaataaataaacatctacagtagcaagcacaaacttc

SEQ ID NO: 132754 - DNA, 608 bp, Zea Mays
agctcggcattagctcccttggtgctcactttgcagcacctcgccagctccctggtaacgttctgcacctgccaccgaactctctcaggttcggtcatccgtgctcccttccaaatcagcgcccctccactcggctctgctactgtgtcgtgcgcatgcttcctccagcttccgtcattgggtgcatgctcatcttccgtcacgtgccacctgctcgatagaatgagcagtttggtcgtccccatctcgctgtggttcgtcctagccatgttttcaggtgtgtttgtgcagagatgccattcgaagtcgatgatctgttggtcgccaccgggcgcaagcaccagttttgttgaacgtgagaacgtcttaatcagttgatatgagttgaaaattcatgtgttgaactgtggtttgacctagtgttctcagcatgtctatgttctggtcaaggccctagatacgtgattgaagatcctttatggtgatgaatgttaaatcagtgtggcactcaccaagcgcacgacagaaggtctggactagagaaccatattgtttcacatttgttgagttgggttggattaaggtgagctgattcattgctctggcta

SEQ ID NO: 132755 - DNA, 2464 bp, Zea Mays
tctgagctctataaatcgccccaaccccctccctcgttctgccaccattgccatatcctcgatcacaagagcagctactagctgcctctagctcgatcggttagtttgtcgtgttgcttacgtacgtcagcagaggccatcgtcgagtgtatcccgtggtcgagaagagggaagaaatgtctgcgaacgacggcgccggcgacacgaagatgagggcgatcgtcgtcgtagaggaaggggagatgagcgcgccggcggcgacgccgaagcagggcaagtgctgcgagtacacgctggacggctccgtcgacatgaagggccggccggcggtcaaggggaaatcaggagggtggcttgccggtgctctaatcctcgtgaaccagggcctggcgacgctggctttcttcggcgtgaacgtgaacctggtgctgttcctgacccgggtgctggggcagagcaatggcgacgccgccaacaacgtcagcaagtggacgggcaccgtgtacatgttctccctcatcggcgccttcctcagcgactcctactggggacgctacaagacctgcgccatcttccaggccatctttgtcctcggcctcgcgctgctgtcggtgtcgtcgcacctctacctaatcaggccggacgggtgcggcatggagcacgcgccctgcggcccgcactccggcaaggagctggggatcttctacatcgcgctgtacatgatcgccttcggcaacggcgggtaccagcccaacatcgccaccctgggcgccgaccagttcgacgaggaggaccccgccgaggcgcactccaaggtctccttcttcagctacttctacctcgccctcaacctcggctcgctcttctccaacaccttcctcagctacctcgaggacaagggcagctgggcgctcggcttctgggcctccaccgccgccgccgccacagcgctcctgcttttcctcagcggcacgctccggtaccgctatttccagcccggagggaacccgatcggaaggattggccaggtcgccatcgccgcgtgcaggaactggaaggcgggcgtgtcgaccgaagtggtaagcctgtacgagggcgacgagaaggcggatgccggtggcaggaagcttctgcacacgcaagggttcagtttcttggaccgcgcggcgcacgcggacactgactccaagctcggcgcgcgcgatccctggaagctgtgctcggtgacgcaggtggaggaggtcaagagcatcctgaggctcctccccatctggctctgcaccatcctctactccgttgtcttcacccagatggcctcgctctttgtcgtgcagggcgccgcgatgcgccgcaccaccccgttctccggcttctccgtcccgccctccagcatgtcggccttcgacattctcacagtcgccgccacgattttcctgtaccgccgcactatctgcccgttcctagcgcggctcagcggccgcccggctggccccaccgagctgcagaggatgggcctcggcctggtcgtgggtgccctggccatgaccacggccgggacggtcgagcacttccggaaggccagggccaccgcagcgatgagcagcgacctgcatatcatgtggcaggtgccgcagtatgcgctgatcggcgtgtcggaggtgatgatgtacgtcgggcagctcgagttcttcaacggccagatgcccgacgggctcaaaagcttcgggagcgcgctgtgcatgatgtccatgtcgctcggcaactacttcagtgacatcatcgtgagcgcggtgaccaggctcaccacgacgcgagggcggtccgggtggatcccggctgacctcaacgaggggcacctcgacaagttctacttcctgctcgccgtgctggccgtcgcggacttcgcggtgtacctcgtatgcgcgagccgctacgggagcggcaaagtggacgggaggagcagcgacgacgaggaggagggagcggccggtcaggtgacatccccggcttacgcatgaccatcaccggccgcccggccggcgggcatcgtacgtatgttgttcttgtcttcttgaggtggaggctggcaggctgcaaatctcgagggccattggttatttggttgacggagttcttccattgacgacgatagcacaagcatggggcgagcatggacatagtgatatgactaattaaagaataagcacttaagcaggactagctaaacactacatgctgcagcatcatgctcgcggtttttggccagtgtaacaacagacgacgattgttactgaccacgactgttctttgcgtggtctacagagttcgcttctgcaaaattcaataatgggcgagtgctgtatcatataaagtcgcaggttgcgccacgtagctacgatgtgactaacaaacaaatatgtattcaagttatgtattaaacggttaaccgtgtctttttaccgtt

SEQ ID NO: 132756 - DNA, 2371 bp, Zea Mays
tctgagctctataaatcgccccaaccccctccctcgttctgccaccattgccatatcctcgatcacaagagcagctactagctgcctctagctcgatcggttagtttgtcgtgttgcttacgtacgtcagcagaggccatcgtcgagtgtatcccgtggtcgagaagagggaagaaatgtctgcgaacgacggcgccggcgacacgaagatgagggcgatcgtcgtcgtagaggaaggggagatgagcgcgccggcggcgacgccgaagcagggcaagtgctgcgagtacacgctggacggctccgtcgacatgaagggccggccggcggtcaaggggaaatcaggagggtggcttgccggtgctctaatcctcgtgaaccagggcctggcgacgctggctttcttcggcgtgaacgtgaacctggtgctgttcctgacccgggtgctggggcagagcaatggcgacgccgccaacaacgtcagcaagtggacgggcaccgtgtacatgttctccctcatcggcgccttcctcagcgactcctactggggacgctacaagacctgcgccatcttccaggccatctttgtcctcggcctcgcgctgctgtcggtgtcgtcgcacctctacctaatcaggccggacgggtgcggcatggagcacgcgccctgcggcccgcactccggcaaggagctggggatcttctacatcgcgctgtacatgatcgccttcggcaacggcgggtaccagcccaacatcgccaccctgggcgccgaccagttcgacgaggaggaccccgccgaggcgcactccaaggtctccttcttcagctacttctacctcgccctcaacctcggctcgctcttctccaacaccttcctcagctacctcgaggacaagggcagctgggcgctcggcttctgggcctccaccgccgccgccgccacagcgctcctgcttttcctcagcggcacgctccggtaccgctatttccagcccggagggaacccgatcggaaggattggccaggtcgccatcgccgcgtgcaggaactggaaggcgggcgtgtcgaccgaagtggtaagcctgtacgagggcgacgagaaggcggatgccggtggcaggaagcttctgcacacgcaagggttcagtttcttggaccgcgcggcgcacgcggacactgactccaagctcggcgcgcgcgatccctggaagctgtgctcggtgacgcaggtggaggagggcgccgcgatgcgccgcaccaccccgttctccggcttctccgtcccgccctccagcatgtcggccttcgacattctcacagtcgccgccacgattttcctgtaccgccgcactatctgcccgttcctagcgcggctcagcggccgcccggctggccccaccgagctgcagaggatgggcctcggcctggtcgtgggtgccctggccatgaccacggccgggacggtcgagcacttccggaaggccagggccaccgcagcgatgagcagcgacctgcatatcatgtggcaggtgccgcagtatgcgctgatcggcgtgtcggaggtgatgatgtacgtcgggcagctcgagttcttcaacggccagatgcccgacgggctcaaaagcttcgggagcgcgctgtgcatgatgtccatgtcgctcggcaactacttcagtgacatcatcgtgagcgcggtgaccaggctcaccacgacgcgagggcggtccgggtggatcccggctgacctcaacgaggggcacctcgacaagttctacttcctgctcgccgtgctggccgtcgcggacttcgcggtgtacctcgtatgcgcgagccgctacgggagcggcaaagtggacgggaggagcagcgacgacgaggaggagggagcggccggtcaggtgacatccccggcttacgcatgaccatcaccggccgcccggccggcgggcatcgtacgtatgttgttcttgtcttcttgaggtggaggctggcaggctgcaaatctcgagggccattggttatttggttgacggagttcttccattgacgacgatagcacaagcatggggcgagcatggacatagtgatatgactaattaaagaataagcacttaagcaggactagctaaacactacatgctgcagcatcatgctcgcggtttttggccagtgtaacaacagacgacgattgttactgaccacgactgttctttgcgtggtctacagagttcgcttctgcaaaattcaataatgggcgagtgctgtatcatataaagtcgcaggttgcgccacgtagctacgatgtgactaacaaacaaatatgtattcaagttatgtattaaacggttaaccgtgtctttttaccgtt

SEQ ID NO: 132757 - DNA, 487 bp, Zea Mays
aacaaagaggttttccgggcatgagtgtatgactggatgttcagattaagtggttccttatcaacggtaaggaaacttgcacaatatatttccaccggtttccctgaatattttaacaaagaaaaacgactagtaacacaaggacttcagtttaatgcacgacagttaaatgcccagagcatcagcaagcactgatacattatgtccgcaagtcgagcaggaaaatcacacgatcaagcagcaatatcctcgggagggcactgcgcaggttgggcatcagaagacaggtctgtgatggacatcagctttgatctgaacttatccgccccatcgcccagcttcccgttttctgcaatggagatcggtgccttcacagtctcgggtgaaggtgtctccggaatggtctgggagattgcgatgagagactgacgagctgcttccctactgaactcggttggtgaaggtgaggccatcaatcgtaggctgc

SEQ ID NO: 132758 - DNA, 270 bp, Zea Mays
atggggagcagcgacgacttgccatgtacgacgctgcagagaaacaaagaccgagctagggagagacctaggcggggatgctcctccgatccagaagctgtgattcagccatcgacggagagggcgcatagcagagaagcagggacgcacggctaccagagctggaggaagcagaggcgtttgcaagaagatgagcaacccagcgcaggggagataaatacacagaatagcgacaggattttatcgcaggctaaagcggcgcagggataa

SEQ ID NO: 132759 - DNA, 2439 bp, Zea Mays
gtagtagtagtaataactcctgctggctccatggtccaattcctgacaaaactaacggttccggaaacattcgcagggcgaccaagcttccatcgtcggaggggcaatcgagttcgtgaaggagctggagcagcaggtccagtgcctcgaggcgcagaagcggaagctgctggttcaccagcgcgtggcggcggcgaagcctgcagacgcgacgccaatgcgcgccagcagcagcggcgccagggcctgctgcgcggattcggcggcggcggcggcgacgacgagcaactgcagcagcggcttgacgacggaggacgcggcggcggaccacgcgctgccgccgcccccgttcgcgcagttcttcacgtacccgcagtacgtgtggtgccactcggcggcgcgcgaccccgcggaggaggaggacgggcggcggtcaggggtggccgacgtcgaggtgaccctggtggagacgcacgccagcgtccgagtgatgacggcgcggcggcccgggcagctgctcagcctggtcaccgggctgcaggcgctccgcctcgccgtgctccacctcagcgtcgtcaccgcgctggacgccctggtcctctacaccaccagtgtcaaggtacataactgtactaaaaaagtaagttttgattcattcctgcgctttttttttgttgttgatggagtaggacaaggattttgcattgaacacaaaccgatgcacaagcacaagtttcctccctataaactgcagggatcttgcacgacgaatcaagcgattcttttctagcagcaaagtttgcgcgcgtctctttctctccacgaacatcatttagggaccatgaggtctctctctgcacgaactaaaaatcaatagaaaatcgataggctgggctgagctctgaggtctccatgtctatttgattaggcggcaatggcatccatctttaccagcagtaggactggaactaaagcgtgtcagatattctcctgctgctggatgtgtagacaaaacatccaggggtcatgactcatcacatcgctgcggtccagcgggcaggagaggtcgtttcctgcaacaagctcgaaccgctgcatgtattattgttgcctttgccttgttggagtcgaatcggtcatttatttttttgcccccggaatctactacgcagtagctctgatgacaattcgatggacgacctgacacgaacgctggacgcctgggtcttttctacgcagcggcgttggtggtgcttgcttttgaccggagagcagcgcccagggaggcagggatgcgccggggcctgcctgccgtgctagagagcccacagagccaccgccatgccatgcgttggtgagctctgagctcgcattgcattgcattgcacgcagggctacgtacgctatgctctggattgtcaatagatagagttattgccatgcatgtgctcatgtcggctcctgtccacgtctgtgcgccgcgccgcaccgcactcgtgcagtagtaggctccgtagagcctcgtagttgttgtgaggggtggcaaggcgagcttcgttcatggacatggatgtacagtagtcagtagtacaaagagaaagaaagacactttcagccttcagggcgaatcttttggctgaactggtgctcgttcctgctcgagctatagagttggcatcgagaaatgggcggaaaaaggctgggcgcctaggcggcagggagacagcgtacgtgttgctgccgtcctcgccttgtgttatttttggccacggcagtacgacactgtgctgtgccgtagtttatgaccacgggcagtggttgtggttggtggtctcgtctcttcaggtacccgcagattcccacccctccttgttcctgatgcatgcagcagccatccgggctccggccatggcccatgggccattgcgcatgtgcaccgttccctcgcctcgtccgtgcagctgcagcctgcaggcgctttaaccacggcgtgcttgctgttgctgtgctgctgcaggtggaggaagggtgcggcctggcgacggcggacgacatcgccgccgctgtgcaccacgtgctctgcatcatcgacgccgaggccaccgagcagcagctgctcgcggcagcggggccgcaaccgcaatagggcccgcccgcgcccgcgagccgacctaccggcgatcgagaggaggccagcgtagaagcgacgtacgtgactccaagtcatgtgtacaagcataggcgttttgcagggtccggtgaaacgccttgtgtagtttgatctttgtatttttggctgctttttttttcatatcttttcagtagatgtgtaagcgtgcgtgtgttcagcatgttgtcacgatgtttgattcagcgttcgatctgtgacgattagctcaccagcagtccatttccacattgttcttcaaggatgtgcag

SEQ ID NO: 132760 - DNA, 1508 bp, Zea Mays
cgaaccccgcacgcagacgcaggcgcagctagcttcgcaacaagtaaacgatacctcgcgtcgccaagagcttaccgacaccgagaagcagccacgcgctcgcggagctagagctagagcctagagctagagcgcgagagcgaccgtcggccactcgccatgtcggcgctagtggacgcgctgtgcgcgccgcccagcgacaccgcgctcgtctacgacaccttcaacgcggccaacttcctcttcgacgccgccgcgttctgtgacggcgccggcattgtcgccgccccggcgtccgcgcaccaggcgcccgtggaggcgcaggcagcgacgacgtcggcggcgccgacgacgacggctagggccaggaagcggcggcggcggccgaggagctgcaagtccagggaggagaccgagacccagcggatgacgcacatcgccgtcgagcgcaaccgccgccgccagatgaacgagtacctcgccgcgctccgctccatcatgccggaggcctacgtccagaggggcgaccaagcttccatcgtcggaggggcaatcgagttcgtgaaggagctggagcagcaggtccagtgcctcgaggcgcagaagcggaagctgctggttcaccagcgcgtggcggcggcgaagcctgcagacgcgacgccaatgcgcgccagcagcagcggcgccagggcctgctgcgcggattcggcggcggcggcggcgacgacgagcaactgcagcagcggcttgacgacggaggacgcggcggcggaccacgcgctgccgccgcccccgttcgcgcagttcttcacgtacccgcagtacgtgtggtgccactcggcggcgcgcgaccccgcggaggaggaggacgggcggcggtcaggggtggccgacgtcgaggtgaccctggtggagacgcacgccagcgtccgagtgatgacggcgcggcggcccgggcagctgctcagcctggtcaccgggctgcaggcgctccgcctcgccgtgctccacctcagcgtcgtcaccgcgctggacgccctggtcctctacaccaccagtgtcaaggtacataactgtactaaaaaagtggaggaagggtgcggcctggcgacggcggacgacatcgccgccgctgtgcaccacgtgctctgcatcatcgacgccgaggccaccgagcagcagctgctcgcggcagcggggccgcaaccgcaatagggcccgcccgcgcccgcgagccgacctaccggcgatcgagaggaggccagcgtagaagcgacgtacgtgactccaagtcatgtgtacaagcataggcgttttgcagggtccggtgaaacgccttgtgtagtttgatctttgtatttttggctgctttttttttcatatcttttcagtagatgtgtaagcgtgcgtgtgttcagcatgttgtcacgatgtttgattcagcgttcgatctgtgacgattagctcaccagcagtccatttccacattgttcttcaaggatgtgcag

SEQ ID NO: 132761 - DNA, 1763 bp, Zea Mays
gtcactgttggcgctgccgatttgccgaagccacggctagtagctcctccacctacatgcatccactgttcgtcttcgtcgcctcaaaccttatccttccccccggcccgtatactcagcccaccactagggagagaaagaaacatacgcatgccaccaacgcaaggacctcagatcctcagatacgcatcagttggcaccagcggcaaagctgcggcggcgaagagcgataagtagtagaccggggggcggtgcggcgtgcagcgcgctaataggcgaaccccgcacgcagacgcaggcgcagctagcttcgcaacaagtaaacgatacctcgcgtcgccaagagcttaccgacaccgagaagcagccacgcgctcgcggagctagagctagagcctagagctagagcgcgagagcgaccgtcggccactcgccatgtcggcgctagtggacgcgctgtgcgcgccgcccagcgacaccgcgctcgtctacgacaccttcaacgcggccaacttcctcttcgacgccgccgcgttctgtgacggcgccggcattgtcgccgccccggcgtccgcgcaccaggcgcccgtggaggcgcaggcagcgacgacgtcggcggcgccgacgacgacggctagggccaggaagcggcggcggcggccgaggagctgcaagtccagggaggagaccgagacccagcggatgacgcacatcgccgtcgagcgcaaccgccgccgccagatgaacgagtacctcgccgcgctccgctccatcatgccggaggcctacgtccagaggggcgaccaagcttccatcgtcggaggggcaatcgagttcgtgaaggagctggagcagcaggtccagtgcctcgaggcgcagaagcggaagctgctggttcaccagcgcgtggcggcggcgaagcctgcagacgcgacgccaatgcgcgccagcagcagcggcgccagggcctgctgcgcggattcggcggcggcggcggcgacgacgagcaactgcagcagcggcttgacgacggaggacgcggcggcggaccacgcgctgccgccgcccccgttcgcgcagttcttcacgtacccgcagtacgtgtggtgccactcggcggcgcgcgaccccgcggaggaggaggacgggcggcggtcaggggtggccgacgtcgaggtgaccctggtggagacgcacgccagcgtccgagtgatgacggcgcggcggcccgggcagctgctcagcctggtcaccgggctgcaggcgctccgcctcgccgtgctccacctcagcgtcgtcaccgcgctggacgccctggtcctctacaccaccagtgtcaaggtggaggaagggtgcggcctggcgacggcggacgacatcgccgccgctgtgcaccacgtgctctgcatcatcgacgccgaggccaccgagcagcagctgctcgcggcagcggggccgcaaccgcaatagggcccgcccgcgcccgcgagccgacctaccggcgatcgagaggaggccagcgtagaagcgacgtacgtgactccaagtcatgtgtacaagcataggcgttttgcagggtccggtgaaacgccttgtgtagtttgatctttgtatttttggctgctttttttttcatatcttttcagtagatgtgtaagcgtgcgtgtgttcagcatgttgtcacgatgtttgattcagcgttcgatctgtgacgattagctcaccagcagtccatttccacattgttcttcaaggatgtgcag

SEQ ID NO: 132762 - DNA, 2234 bp, Zea Mays
gcagagaggaaaagaaaacgaaagcagagcggcagcgtcggcccagcacccaaccaccaccaccatctcctcctcccccactccctgtccgcctctaccgctcgcgaaatacttccccctccctgtcagtctctacccagtcgccgagtcgcgtatggtttggtctcactgatgtgtactccgtagcatcaattcctcggaggccggctcatggctcacgctggcagcatctcgtgatctgtgtcccccttctccgctcaacatttcccagctcctggaaagctcagctgcgtagatacgagcacaggcacctaatccgtagctacctctcttgcttccatcatatcatatgggcacaattatttggattttggagcagaaactcacgataatgccgttctccagtgagctgctagagcctggcagtctcaggagggattgtctcaatatttgagatagaggtagctgagatttataagcactggggctctgtttctttatcctttccttccctttcagcccaccggccggggttggttgttgtcaccgtgtgcttccgtcgtctcccatggcggcagtggcgtcttctcctcctgcgacaattgctgggccgcagccgacgtggttgccctatgagccaaccagggactgctcccagggcctgtgcagcatgtactgcccgcagtggtgctacttcgtcttcccgcccccgcccccggccttcgacatcgccggccccggcggcggcggcggcgacgacgactcctccggccccaccttctcgcccctcgtcatcgccatcatcggcctgctcgccagcgccttcctcctcgtcagctactacaccgtcatctccaagtactgtggcaccttcagctccctgcggaacatggtcttcggttcccgcaggggccgcggccgcggccgtggcggcggcggcggcggcggcggcggcggcgattcaggggctcaggtgccgtggggcgccatgccgccggacgggctggacgagaccctgatcaacaagatcacgatctgcaagtacaagcgcggcgacgggttcgtggacagcaccgactgctccgtctgcctcggcgagttccgagacggcgagagcctccggctgctgcccaagtgcagccacgcgttccacctgccgtgcatcgacacgtggctcaagtcgcactccagctgcccgctctgccgctgcaacatcgccttcgtcaccgtcggcgtcggggcggtgtcgccggagccggagccggagcgccgcgccccgcgggaggaccgcgactggaggagagacaaccccgagctggtcctgacggtgggcggcccctcctcggacccagtgcgtggcgcaccgcagagccagagccagaatgcggtcagcggcagcggcggtgacgacggccaggatgcactggcgcggaaggattgcccggagagatcggaggagggcagcggcaatgcggagataaaggaagactgcgcgctgccggcggtgagggcggcgtcgtcgctgtccgacacgcaccgcgagggccgcatgtccatcgccgacgtgctgcaggcgagcctggaggacgagctgacgatggcccgggagagcggcctcctggcgggttcgtcgggacggtgcccgtgccacggggagcacagcaaggacggcggccgcagcggccgtgcaatgccggacgcggcgagcaagcggttgccggccgttggaagatcgtgcttcagcagcaggagcggcaggggaaaggattcgattcttccaatgtgaggcaattgatcctcggtggttcttcgtctgattacatggatactttttttgtgtgtgtgcttccggtgaagaccaaggtgccagtaccaaaatctacagatctcatcccgtttccatcggttgatgtgaattgtgggtagcacaggaggctgcagaaacccatcctcagcaactgccactgctcggtgtttctacttggatgaagttgtatagggcttgaaacactcttttttttaacctctttcttccatttgccactcattttcccacacggttgggttccagttcagagaattctcccagcattagtgagccaagtcttatacaatagggtttttttttccctccggctgagaagtgagtcagtctcagcacttgcttctactagctgtcaacttagaacaatcatctgctgatgtgtgcgttttaacttgagaaagggtagtgt

SEQ ID NO: 132763 - DNA, 100 bp, Zea Mays
ggtttagaagatcaaaaggatgcacgccaaatttgaaggcatgcttctagatgaaccctctcaagaagctcagcaccttacaccagaagtgtatgttaag

SEQ ID NO: 132764 - DNA, 1378 bp, Zea Mays
cacccctcctccccccgagtatattagtttactcgctgcctgtgttccaaaacctttcgtcttttcccccgtctacaaaggcttgacaggcactcgcagccccaggcagagagactccttccctgcgaaggcttctcctctcccctatcccccccccccccccccccccccaactcgtcgcattctcctcggttcagcagcgacgggatggcgatagaccacgcggcgcgtctcggactgacgagcagaggtgccacgggaggcggcgggtgcggagacgacgtcgacgccgagaaccggcggtggccgccgtggctgaagccgctgctgtgcacgagcttcttcgtccaatgcaggatccacgccgacgcgcacaagagcgagtgcaacatgtactgcctcgactgcatggacggcgcgctctgctccctctgcctcgcgcgccaccgcgaccaccactccatccagatacggaggtcgtcgtaccacgacgtgatccgggtgtcggagatacacaaggtgctggacatcgccggcgtgcagacgtacatcatcaacagcgcgcgcgtggtgttcctcaacgagcgcccgcagcctcgcccgggcaagggcgtcaccaacacctgcgaggtctgcgagcgcagcctcctcgactgcttccgcttctgctccctcgggtgcaagatagtgggcacggcgcgtggttaccgtcccaagaagaagcacggcggcggaggcggcggcggtaacaagaggaagagagcggcgcttaaggacgtgcgctctgactcggaggagtcgtgcaccagcaccagcggcgccagcagcgacaagagcagcgtcgtgcagagcttctcgccgtcgaccccgccgccggcctccgctagctaccgccgcccagggaacaagcgccggaagggcgtcccgcaccggtcgcccttcggtagcctcatcgtcgagttctaggactccttcgtcagcgcctaggcaatgcgctctctactgtacaggacatgacaaagcccggaagggaagggaataacaggacgcgcttctggacgtggaggccggccggcggcgcaaatgccagcgacgggcgagagcggtaagcacacaccagcggtgcagcccgtgctgctatagttttgcttctttttcgcgctttgttacttcagttggtactaagttttgcagccttgtacattgtaatatactagtactactctccaatgctagatgtacatatacatacacagtgttggcagtatcataatgtgggggtagcagtaggcagcgaggtgtgttcgtatgcgcatcatcagctgtgtaataaaaataaagaaatgcttgctccaaatcatgccggaatggcaccgtt

SEQ ID NO: 132765 - DNA, 1409 bp, Zea Mays
gcaaaatgaataaaaaattaaaacaaaggaaaacagaaaagctgcggaagttgtcaagaactccgacgatcccacatatccgtcaatcgatcgactcccgttcccctcggaatcgaaatggccccgagaattccaacgcacaagaaggggaacaagggaaccaggcatcgcgaagagagcccggggtgatgaattgttacggttcatggacggagcaagcaaggagcctctccgcaaggactactacaaagttctggaggttgactatgacgcatctgatgacaccatcaaattgagttatagaagattagctttgatgtggcatccggacaagcataagggcaatagcaatgccacaactaaatttcaggagattaatgaagcatacaaagttttgagtgacccagctaagcgactagaatacgatgtttccggttgctacgagatcgaccaatatactttgcgtgagtaccttacaaaatttaagggtatgatacttacctgtaatggccttggcatagaccattcttctaagtgggcccgacatttgagggaactgaaaccccattgatcaacggataaactacgcctctgctcatgacaatgaaacactatttgatattattagtgtaaaggtatggaacttatcaggatatctaggaaatttactgcaatttatgtattttggtatcaattatcaatctgccaatcaatcattttcttttgctttcttcaataaacatttattggcaagacagattagcatgaatgttttgttacacttttttttactgcttgcagtattttctaccttttgaaattatgctttatagttataaactaaacatgtatttatgtaacaatttagttttccagaaacagttttccaatctatttcagaacatgatctggtactttgtgaagttttttgtttgtttgcttgtgcagactctgatgaacctctcaattgacgagcgatgcaggaaaaataatttgtccacaagcatgattgcattatcccaggtttgaacttagaagatggccctgcacactctgcctcgacgtcatcttcaccagagcagactactgatgttgatggaagtaccaccggtgatgtcaccttctaagtataacttgggtaaccttattacctcttctcttactccaaatgctggttcggtgttatccatgttctcatcattaacctcttaaagttctgaaaagacaaggatgaatgcacactgcacttcctactgcacttcttttgaacctatcatgcaatgtccttctgcttgggtgtgagcttcaaaaacacactgaaatctactaagctagtagttcatctaaaagaaaaggtgtgtgctctgttctttctatccagcataattggcttctaattagagataaac

SEQ ID NO: 132766 - DNA, 920 bp, Zea Mays
aaggaaaacagaaaagctgcggaagttgtcaagaactccgacgatcccacatatccgtcaatcgatcgactcccgttcccctcggaatcgaaatggccccgagaattccaacgcacaagaaggggaacaagggaaccaggcatcgcgaagagagcccggggtgatgaattgttacggttcatggacggagcaagcaaggagcctctccgcaaggactactacaaagttctggaggttgactatgacgcatctgatgacaccatcaaattgagttatagaagattagctttgatgtggcatccggacaagcataagggcaatagcaatgccacaactaaatttcaggagattaatgaagcatacaaagttttgagtgacccagctaagcgactagaatacgatgtttccggttgctacgagatcgaccaatatactttgcgtgagtaccttacaaaatttaagggtatgatacttacctgtaatggccttggcatagaccattcttctaagtgggcccgacatttgagggaactgaaaccccattgatcaacggataaactacgcctctgctcatgacaatgaaacactatttgatattattagtgtaaagactctgatgaacctctcaattgacgagcgatgcaggaaaaataatttgtccacaagcatgattgcattatcccaggtttgaacttagaagatggccctgcacactctgcctcgacgtcatcttcaccagagcagactactgatgttgatggaagtaccaccggtgatgtcaccttctaagtataacttgggtaaccttattacctcttctcttactccaaatgctggttcggtgttatccatgttctcatcattaacctcttaaagttctgaaaagacaaggatgaatgcacactgcacttcctactgca

SEQ ID NO: 132767 - DNA, 839 bp, Zea Mays
gttccggccacgaaaggacagatgttccgctcggttccacgtcatcacctatctccgtttgcatatccatcacgcaaaatgaataaaaaattaaaacaaaggaaaacagaaaagctgcggaagttgtcaagaactccgacgatcccacatatccgtcaatcgatcgactcccgttcccctcggaatcgaaatggccccgagaattccaacgcacaagaaggggaacaagggaaccaggcatcgcgaagagagcccggggtgatgaattgttacggttcatggacggagcaagcaaggagcctctccgcaaggactactacaaagttctggaggttgactatgacgcatctgatgacaccatcaaattgagttatagaagattagctttgatgtggcatccggacaagcataagggcaatagcaatgccacaactaaatttcaggagattaatgaagcatacaaagttttgagtgacccagctaagcgactagaatacgatgtttccggttgctacgagatcgaccaatatactttgcgtgagtaccttacaaaatttaagggtatgatacttacctgtaatggccttggcatagaccattcttctaagtgggcccgacatttgagggaactgaaaccccattgatcaacgggtatggatttactactctatgtaagacacaatgtgctgtatcacaattcacaaacaatggccccctactccccttagccactttctgccaaaaagatgcatgtatgtttactaattccagatggaggatggtctgggctccattctcaatgtttagtgagttgtgctggaaattaggtcgggtcgggc

SEQ ID NO: 132768 - DNA, 1007 bp, Zea Mays
atctatacctcctccgttcttcggtcgttcttcctgcccgcgtcaaggtcgccgccgctcgtcagtcaccacctcccctgatcccctcatttccatcccacccttgcgatcccggcagctgatccttcttccctttctctctatcccacttgccgatcgggcgccgtcgccgtcgccttcttcttccctctcgcgctttcctcgcggcggtggagccaccaccaagccggctgcaattcgccgtggcgcgcctgactcgtggcgcgggaacgcggttgcacgcctcgaagaggggagacccctctcccgcgcgcgacggttcccgaacatcccggcgaaggacctgctcggtcatcgctgctgccggagctgctcatgttgaatccgagatctgaaatctaccccaccatagagtatcgccctatccagccctccgacctcgaagctcttgaaaagattcatcttgctctctttccaataaggtacgagagggagttcttcttgaacgttgtcagtggcaatggtattgtctcctggggcgccgtggacaccagcagatcagatgatcgcagggatgagataataggttttgtaaccacgaggatgattgcggcaaaagatagcgagattgaggacctgttcaggtataacagttcacgcaaagatctaacacttgtgtatatattgacgttgggtgtggtggatggctacagaaaccttgggatagcttcatcactggttcgagaagtggttaaatatgcagcaagcatatcaaattgcagaggtgtttatttacatgtcatttcatacaaccagcctgctatcagcttctataagaagatgctatttaagctagtcagaaggcttccgatgttttactacataagaggacaacattatgactcatacttgtttgtatactatgtgaacggtggtcgttcaccttgctcaccactgtaagtgtttccttttgcttcatttgaggaccatacagttccatattcagt

SEQ ID NO: 132769 - DNA, 1779 bp, Zea Mays
atggatcttcatattattgaaccaggccctgccgttcttgagaagagatgtctatcttataaaatctcgatcggagtttgcccggtggatcttcagtctgtgagcctggatacaccgtcttcttctccaccgtcgtctgggaataatcacgatatgggaggtgatcgtggcggtcacgttcctcctgctcgtcgtcaaggctcttctgcggttcctcgacgacctgtccaacttcgcttgggcccgcggaccccatcgggctccggtcatgtcgggcatggatcaggaagtgtggaaacgtcgcagcctcttggctctggaatcaaggggtcgcactgggttcagcggccgccgcagttatgtttgatagaagccgaagaggctgtgaatgcaggaattattgtggagacattacaaccgcgtgtctctggaatcgaggagacttctcggactctgcagtcagcgcattcaagccttatggataccgttaagattgtggctgctggggttaatgtgtcgcgcggttccaaggggtgggaccatcctttggcggctgctgtgcatgggaacgagtttttggaattggccgaggagactgtgaatgcaggagttactgtggagatgttacaaccgtgtgtctcgggaatcgaggagtcttctcggattttgcagacaccgcatttaagccttatggattccgttcagagtgtggctgctggagttaatgtgtcgcgcggttccaagtgttgggaccatcatttggcggcagttgtacatgggaccgagattttgccaaggacgcagccccgtttctctggattcaaggggacatcttgggttctgcaaccactgaagttatgctcgaaggacgccaatctgtctgtggatgcgggcgatattgagctgcacgtttccagggattgggaccacctgctggcaacccatttgtctgatcctatgcagcattttgaagggttgatgggcttatctgtaacactttcgccccaaccatcgggtggtgatgggccgctggaagtgatgagctcgcctcttcaattgattatccaacatttttctgatgagctgctgggcctaaacaaaacactttcgccccagctaaatgtaaccactgggacgctggaggatggatgggtcgcagggcttgaacagggatacttcgcccagcaacctgggacgctggagttgtcttgtccaagctcgtccctccagccttacctaggaaatagctttaccccacagttgctgaaggtttatcacagaagacaattgaaaagacagtgccagcaaggcctttctcagccacagaaggatgatcgctgcggtgatattgcagagattgatgctgaagggatgctggatcatgctccactgatgaatgccccgaaccccaccgtccagatctcccctccggaattaggctcaggcctggaatctaaaatggatgccttctttaacagcatctgcaggaagccttctggtatcttgccagccccaaaactcataaggaaatctcgtttgtcttcccccacaccaccagttgtatctgcacctagaagaagtcgtcgggtggcaggcatcggggtcgagttcaacatgcaagagctgggaggcaggtccatcaagaaggttatgaaatccttgaagatcatctctaactttaacgattttagcaatgaggcttttgaagaatatgtcaatctgttcaagcacccccttcctcagtgccatgtggaggccctctcagccttgtttggctag

SEQ ID NO: 132770 - DNA, 1934 bp, Zea Mays
gcaaatagggggaacaccatggtttccgggaatgcaactcttcagtgtatcactcacactgtaccactttttctcaagctttgctcaaatgatcatttcactccatgctcatataatgaggatgggttctgttctttctgtgcccttaaagaacatgttgacgaatcaattcgaaggtccggatctgttatagcgccaacaaagttcagagatagtttaagaaagttatctttggattttacaccaggacagcaagaagatgcacatgaattcctacgttgcttgctcgataacttgcatgagtgtactcttgatcccaagtcaaagagcaagggctcatcctttgaagaagaaagtatagtcaaggagatttttggaggccaactgaaaagccatttatcttgttgcgagtgcggtcacagctcagagacatttgagcccttcctggatctaagtttggagattgatcaggttgatcacctggtagatgctttgcaatcttttaccaaggtagagcaggttggggactctgaaaacaagctcacctgtgaaagttgcaatgctcgagtttgtaagaataagcagcttacactttatagagcaccagatgttattgcatttcatctcaagcgttttacaacccttgacaattctgttaagaagattgacaaatatgtggcataccctcttgaggttgatttgaagccatttcacagcaacccagagactgtgggggaactgaaatatgatctttatggtgttgttgagcattctggattacccaactatggccattatgtctgcaccattcgttcttcaccaagtacatggtacttgatgaatgactccaacgttgattctattactgattcaagtgcattaaaccaggaagcatatattctgttctatgttaggcagggcaaatttccatggttctcgagtttgttagaaggcaaggttgtcctacaagctgagaatacctgtggaacatctcctgtgtcagttttggaaaatatagatgtaaactgttcaacttcttcaggaggaggcagtagcagtagttctggtgataagttagagaaaaatgaagccagccaattagaagagacaaagaaagatgaaacgagtcagtacaaaacgtcattccttcccgacgagccatctaagagttcttttggtgcttctaacagcaataatgcaatggatgaagataatccacccagggtttctttccaaaattctgtggctagttgttcccgcagtgtagaaaccaccaatctcgagaagccttctactccacggtgctcccagcgactggcctctcatgatgagtttagtgtgtttgagtttgaggactttgatgaggaaaaggagactttacttccaaaattgaaatttccatcgaaggtgaagaaagctaactctgcatctagagctatgaagggtcgttgcattgatcagaatgcagtccgtttgatgaggagcatgacatccacacgaagaaaaggtttaatagactgcatagcacagcaaactgcaaagcatgagtctaatagatgccctgcaagtgatcctctggacaaaaagaaaaggaagctggttcttcagtactaggtattactaagtttgggtgccgaaatcttgtattgctgtatatcctttccttttttgctactctttctctgtatatcttggttcagcaactctgctgttgtcaacttcccccctaatctaattttgtagtcataggctttagggtggctagattggtttcagccttgcggggtatatgtgaacttaagaattagttactctcttttaatatttctgcctcctgatgttttatcacatgccaatgtggctatgctatggtattgacacctgtaacaactgcccattttatcacatgcctaccctgtttgtttaccctttag

SEQ ID NO: 132771 - DNA, 2194 bp, Zea Mays
gcaaatagggggaacaccatggtttccgggaatgcaactcttcagtgtatcactcacactgtaccactttttctcaagctttgctcaaatgatcatttcactccatgctcatataatgaggatgggttctgttctttctgtgcccttaaagaacatgttgacgaatcaattcgaaggtccggatctgttatagcgccaacaaagttcagagatagtttaagaaagttatctttggattttacaccaggacagcaagaagatgcacatgaattcctacgttgcttgctcgataacttgcatgagtgtactcttgatcccaagtcaaagagcaagggctcatcctttgaagaagaaagtatagtcaaggagatttttggaggccaactgaaaagccatttatcttgttgcgagtgcggtcacagctcagagacatttgagcccttcctggatctaagtttggagattgatcaggttgatcacctggtagatgctttgcaatcttttaccaaggtagagcaggttggggactctgaaaacaagctcacctgtgaaagttgcaatgctcgagtttgtaagaataagcagcttacactttatagagcaccagatgttattgcatttcatctcaagcgttttacaacccttgacaattctgttaagaagattgacaaatatgtggcataccctcttgaggttgatttgaagccatttcacagcaacccagagactgtgggggaactgaaatatgatctttatggtgttgttgagcattctggattacccaactatggccattatgtctgcaccattcgttcttcaccaagtacatggtacttgatgaatgactccaacgttgattctattactgattcaagtgcattaaaccaggaagcatatattctgttctatgttaggcagggcaaatttccatggttctcgagtttgttagaaggcaaggttgtcctacaagctgagaatacctgtggaacatctcctgtgtcagttttggaaaatatagatgtaaactgttcaacttcttcaggaggaggcagtagcagtagttctggtgataagttagagaaaaatgaagccagccaattagaagagacaaagaaagatgaaacgagtcagtacaaaacgtcattccttcccgacgagccatctaagagttcttttggtgcttctaacagcaataatgcaatggatgaagataatccacccagggtttctttccaaaattctgtggctagttgttcccgcagtgtagaaaccaccaatctcgagaagccttctactccacggtgctcccagcgactggcctctcatgatgagtttagtgtgtttgagtttgaggactttggtaaggatgcattttcaactatttatgagcttcttgttttattttcataacacatctatcttatttcccttggtataacttcccactcaatttatttgttatcaactcactcaatttattgtgcagttgacaacactactactttatgattactagcctaatccttcgatgtgattctaatcacctcactttcagatctagacatcagactttgcactgctgtgctaattattttggatctgtttaattgtttctcaactcagttgaatgtcacatgttgtaaaacactgctcattcacctttttaagggttcatgtttctccttgtcttatttatagatgaggaaaaggagactttacttccaaaattgaaatttccatcgaaggtgaagaaagctaactctgcatctagagctatgaagggtcgttgcattgatcagaatgcagtccgtttgatgaggagcatgacatccacacgaagaaaaggtttaatagactgcatagcacagcaaactgcaaagcatgagtctaatagatgccctgcaagtgatcctctggacaaaaagaaaaggaagctggttcttcagtactaggtattactaagtttgggtgccgaaatcttgtattgctgtatatcctttccttttttgctactctttctctgtatatcttggttcagcaactctgctgttgtcaacttcccccctaatctaattttgtagtcataggctttagggtggctagattggtttcagccttgcggggtatatgtgaacttaagaattagttactctcttttaatatttctgcctcctgatgttttatcacatgccaa

SEQ ID NO: 132772 - DNA, 303 bp, Zea Mays
atggcggagcaggatggcgacgcggggcagatgccacccgactccgttccggtcccgctggaggcggaagcttgcgaggtaggagtacgcttgggcttggaggcctggagcctcagggtttaccaattaagggtggttggtgtaggggatcaaaatactaatcagcatcaaccatttttttcgatgtgccaaccacttcgcactgttagctactcgaattcgtgggatgggacttgtgttgctgctgccaatgaaaatgaccacactcttgtaatcgttgggcatacctgttctcagatatag

SEQ ID NO: 132773 - DNA, 1369 bp, Zea Mays
gacccatcaccactcctcgctcgatcgttctcctgtttcatctcagctccgagccttattagatagctgacaagctcatcatctgcgaagttaattgctgccgtcgggaaccgggatcaatcgagagtgatcatcggtcgatagcaaccgtgagttcgtgtcgtgaccgagagagagcatgacgaagcagtggctagtgttcgcatgggccttgctggcggcggcctcctcggtggcgcgcgcgtccccaccaccgctgcaggtcgggttctacgagcactcgtgcccgcaggccgaggacatcgtgcgcaacgccgtccgccgggccgtcgccagggaccccggcctcgccgcgggcctcatcaggatgcacttccacgactgcttcgtcagggggtgcgacgcctcgatcctgctggactcggcgccggggcagcagcacgacacggagaagtactcgccggccaacttccagagcctacgcggcttcgaggtcatcgacgaggccaaggccgtcgtggaggagcactgcccgcgcacggtctcctgcgccgacatcgtcgccttcgcggcgcgcgacggggcctacctcgccggcggcatcgactaccgcgtccccgccggccgccgcgacggccgcgtctccgtcaaggacgaggtgctcgaggacggcaacctgccgttcccggagttcaccgtggcggagctcatcgagaacttccggcgcaaggggctctcggcggacgacatggtcacgctctcgggcgcgcactccatcggccgctcgcactgctcgtcgatcacggaccgcctgtacagctttcagggcgagcccgggcggacggacccggccctccacccggcgtacgcggccgacctcaagcggcgctgcccgccatccacggacggcgacatggaggaccgcacgacggtgccgctcgacacggtgacgccgaatgccttcgacaaccagtacttcaagaacgtgctggagcacaaggtgcccttcacctccgaccagacgctgctcgacagcccctggaccgcggggctcgtcgcgttccatgccgccgtcggccaggcgtgggaggccaagttcgctaaggccatggttaagatgggcgccatcgaggtgcttaccggatatgagggcgagatcaggcaaaagtgctccatggtgaactactactagtcgactcggctacttgatcaatcaaaatcaaaacaagaaacaaatcaaagagagatttgtcgccggttcctttagcctattttcgacaatttgtacattcgtcctgagtcccaacgacaaagtgggatgagatgttgttctgttgttaattataatatgtttattcgtgggcttgct

SEQ ID NO: 132774 - DNA, 325 bp, Zea Mays
atgcatacgtcgtttagacttgcggcaactcacatcatgagttccatgacctgcattccgttttattttactgacgattgcaagcagaacggaaacgaaagaaagattgaaataaaaaggtctgccatgctccacttgaggtctaaacgcacacctcagcaccgcgcaccccatcgaccatatcaaaagccctcgttacgcgaatggttcacgtcaggtgaatggcgacatgtcatcatgttcagcgtatgttgtcctccccccctctcttaccagttcgtcgattcagaacaaagccagctgggcgggggcgctggtggagtgg

SEQ ID NO: 132775 - DNA, 270 bp, Zea Mays
atggaatttttttagtttgtcaggaaaatagattgatatcccaatatatctactgcgtatctgatattaattacaatactagtaactattgcatcagctaaaatgagcttctcaaggctaaaatcaatgaagaattatttaaagtctacaatgtctcaagaatggttaaacgggctagcaactttatattttggggaaagaattattagatactattatgttggagccatcattgatgattttgtatctagaaatgttataagacatttt

SEQ ID NO: 132776 - DNA, 3243 bp, Zea Mays
agacctcagagtgcgcctctctttacaaattacaaccaaaggaaagcacgcgcaggcgccgcgagtacaggttggcattattgaatccgcccacgaacaatgggtgagataggcacggaccagctgggtctggccgaggccgaggccgccgccgccgctgtgaaggaggagggcatcctcgacgacgacgaggagacgtcgccgatagagcaggtgcggctgacggtgccgacgacggacgactcgtcgctgccggtgtggacgttccggatgtggagcatcgggctgctgtcgtgcgcgctcatgagcttcctcaaccagttcttctcgtaccggacggagccgctggtggtgacgcagatcacggtgcaggtggcgtcgctgcccgtgggccacttcatggcccgggcgctgccgcgcaccaggttccgggcgcccgcgctgctgggcggcggggcgtggagcctcaacccggggcccttcaacatcaaggagcacgtgctcatctgcatcttcgccaacgccggcttcgccttcggtgggggcagcgcctacgccgtcggcatcatcaacatcatccgcgccttctacggccgccacatctccttcctcaccgcctggctcctcgtcgtcaccacgcaggtgctcgggtacgggtgggcagggctgatgcgcaagtacgtggtgcagccggcgcacatgtggtggccgggcacgctcgtgcaggtctccctcttccaggcattgcacgagaagaaggacgaatccgcgaaagcctcacgccagatctcccgctccaagttcttcgtggtggtgctcgcgtgcagcttcgcatggtacgccgtgccaggctacctgttcccgacgctgacgtccatctcatggctgtgctgggtcttctccaagtccgtgacggcgcagcagctggggtcaggcatgaagggccttggtcttttcgccttcacgctcgactggtccaccgtctcctccttcctcttcagccccctcatctcgcccttcttcgccaccgccaacatcttcgtcggctacgtcgtctttgtctacgtgatcatgcctatggcgtactgggggttcgacctgtacagcgccaagacattccccatcttctcctcgcacctgttcatgtcgaatggcaccgaatacgacgtcaaatcgattgtgaacaaccaattcgagcttgaccggcaagcttatgacaggaatggcaaagtgaacctcagcgtgttctttgcactcacttatgggttcagcttcgccaccattgcgtcgaccatcactcatgtcgggctcttctatgggaaggaaatctaccaccgtttcaaatcgtcgcagagggagaagcctgacatccacacgaggctgatgagcaagtacagcgagatcccagcatggtggttttactctttgatggcgctgtcaattgcagtgtccctgatcctctgcactgtactcaagcgtgaggtacaactcccatggtggggcctcattttcgcatgtggcatggcattcctcttcacacttcccatcagcatcatcaccgcgaccaccaaccagtcgcctggcctgaatgtgatcaccgagtatgccatgggtctgattatgccgggctctcctatcgccgtcgtctgcttcaaagtctatggctacatgagcatgtcgcaggctgttgccttcctctcggacttcaaacttggccactatatgaagatccctcccaagtccatgttccttgttcagtttgttggtaccattgtggctggcacgatcaacatcgggacagcgtggtggctgcttggctccatccacggcatctgctcggattcactcccgccagacagcccctggacatgccctaacgaccgtgtgttcttcgacgcgtcagtcatctggggcctcgtcggtccaatgcgcatctttgggccaggtgggaactacggcgccgtcaactggttcttcctcatcggcgcggcaggcccggtcatcgtatacgctctccacagggtgttccccagccagagctggataccgctgatcaaccttccggtgctctttggtgcaacggctagcatgcccccagcgacggcggtcaactacaactcgtggctgcttgtcggcaccatctttaacttcttcgtgttccggtaccgcaagaggtggtggactcggtacaactacatcctctccgccgggcttgacgccggagttgcgttcatgggggtgctgctgtacttctcgctgaccatgcagaacaagagcatcgattggtggggtactgcaggagagcactgccctcttgccaagtgtcctactgccaaaggggtggacttgggtgatggcgtctgcccagtcttctaagcctggagtttgatgccacaacatgctgctgtcagttccaagttatgttcataccatagatttgtggtatatacgtcgagtataatgcgacttctcttatgtgtaaatgatcatattctcatgtactacttggtagtcgattgtgcgtccataccgacaaaaatacttcatttggtttgcagatcgcaattagaatacatatgtttcagtagtttacatggagaaacaatgggaaattgtacggattagtttatttcctaacagttacaatataataatagcatatcggttctgccgtatgcatagagaaacaattcagacacagagtactagaacagacgacaccaattcagtcattgtcaacatgcagcaggcctaaatattacaatcgggcatagcaaggaagctgaggtatgaaacagagacaccaatgaagattcggtagcagctaggctcgggagactctgcgtacctctgtcttctcactacgggaggcggccgcggttgaggaggccaagcgtgtggcgcgcagcctcgacgaggtcccggatgttgtggagcgacctctcctcggcaccgaagacgaagatggctcggcattccgccttctttgccagccgcgccgcgtgccccagcggcagcgccggcgagtttagcgcccgaaggacctgccgatacagggacagaaccaccggccggcgccgcgcaagatcctccgccgtcgcccagatcatcccgctgccagcaccgcccttcgccatcattccgccgccgtgctcgcctcgcccactgccacgagcgggtttcgaagccgccggggaccggggtccaaagcgaaaggatgagaggggaggccactgggcttct

SEQ ID NO: 132777 - DNA, 2104 bp, Zea Mays
caagccaacaagctagcctcgcctcgcccccgctctctccgcctcagcccctcccttccctcaactcctgctagctctctctctctcacacacacactagctggagtagcaagctagctaggctcctcgcttccaagcgagaattgcggcggccctcctcgatttccatactcgttcccccaaccgaaccacaggcacacacctacgacgcggccacaccctcctccgccgatcccttctatatacgacgacgacgacgacgagaagatagacaccaagcagccggctttctcgtcatacagaccgagagaatggagctgttccctgcgcacccagacttgcagctgcagatcagccctcctcccccagccaccaagccaatggagctagggttttggaagagggctctagtcgacaccaccacctcgcctgcgactgcaacagccgtggcggcagccacgacggccaccacggccacctcccacgccttcgcctcctcggcgccgacatccgccgtgggataccaccacgcggcggtcggcgcgcaccaccatcaggtgccggtgccggtgccggcgggctcccactcccactcccacctgggcctcccgctcttgcaccacacccatcccatcctcccggcggcggagtctggcggcgtcctccgccggccggacctgggctccacgaggcccatccggggcatccccgtgtacagcacctcgcagcagccgctcccgttcctgcagagccacccgcattattgctgcgacgcgatcgccggcgcgggccacccgaggtcccccaaggccgcgctccgcctcgcgggggcgccggccaagcggggcgcgcgcgccccccggatgcggtggaccacgtcgctgcacgcgcgcttcgtccacgccgtcgagctgctcgggggccacgagagagctacacccaagtcggttcttgagctaatggacgtgaaggatctgacgttggcccatgtcaagtcgcacttgcagatgtatcggaccatcaagactactgaccacaggccagcctctgcttcatcctacgggcaagcgggtggtgcgaagacgatcatcgacatccccgacgacgacagcagcctgttcgacctcaccaataccaccaccaccaccagcgggtccgagtcgtccgcccagcactccaatccgcctgacggcagcgagcataatggcgccagcacgtgtgctctctggtgcaacgcctcgataagcggcagaggggccgcctgctggttcgtccgtgacaaatcaagagatgccactccgggcgacatcaaatccttcgaggacgtgcaatcacagagccttgatgacgatgtctctgacctgaacttgtcggcgccgttccaagtagctgctgcgacgatgtttggcggaggcaacaaaccgaacctcgacttcaccctaggacggatataataatccgccgcgcgcgcgccatctacatatggatgagttgatcgatgaagctggaccatgcatgcggataagagatcgacaggctagatcgagctagctagctgcatatatagattgatttgcttgcattgtaacgaccagccatatttaattatgatctgatggtgcatatatatacgcatgcatgtatatatggtcgtagggacggagagggagttgagcaaatgaaaagagagaggctagaagtaaagaataataagagataagactagcgtcgatccaggaacaaagctagcgcaaaaggagacgggcgggagagacattggggcgtgcgtgcgtgtgctcgctgttgtgcagtgtagtagacacgatagatagctcgataggctttatcaaaggcagcaagcaagggcaagagggtagcttgcttgcttgcctctctgcctgcctctgctgcccatcaaagggcatatgcatgtatgcatatatgctcattgctggcttctggttctggatgtggtgtacacatgcgcgagagggagagaggtgcatgtgcagcatgtgtgtgtgtaccagcagacgcatcaggtactacctagtttgtagctaggggccggttggctggacaaggtttaacaaaaggttgcttc

SEQ ID NO: 132778 - DNA, 1603 bp, Zea Mays
caagccaacaagctagcctcgcctcgcccccgctctctccgcctcagcccctcccttccctcaactcctgctagctctctctctctcacacacacactagctggagtagcaagctagctaggctcctcgcttccaagcgagaattgcggcggccctcctcgatttccatactcgttcccccaaccgaaccacaggcacacacctacgacgcggccacaccctcctccgccgatcccttctatatacgacgacgacgacgacgagaagatagacaccaagcagccggctttctcgtcatacagaccgagagaatggagctgttccctgcgcacccagacttgcagctgcagatcagccctcctcccccagccaccaagccaatggagctagggttttggaagagggctctagtcgacaccaccacctcgcctgcgactgcaacagccgtggcggcagccacgacggccaccacggccacctcccacgccttcgcctcctcggcgccgacatccgccgtgggataccaccacgcggcggtcggcgcgcaccaccatcaggtgccggtgccggtgccggcgggctcccactcccactcccacctgggcctcccgctcttgcaccacacccatcccatcctcccggcggcggagtctggcggcgtcctccgccggccggacctgggctccacgaggcccatccggggcatccccgtgtacagcacctcgcagcagccgctcccgttcctgcagagccacccgcattattgctgcgacgcgatcgccggcgcgggccacccgaggtcccccaaggccgcgctccgcctcgcgggggcgccggccaagcggggcgcgcgcgccccccggatgcggtggaccacgtcgctgcacgcgcgcttcgtccacgccgtcgagctgctcgggggccacgagagagctacacccaagtcggttcttgagctaatggacgtgaaggatctgacgttggcccatgtcaagtcgcacttgcagatgtatcggaccatcaagactactgaccacaggccagcctctgcttcatcctacgggcaagcgggtggtgcgaagacgatcatcgacatccccgacgacgacagcagcctgttcgacctcaccaataccaccaccaccaccagcgggtccgagtcgtccgcccagcactccaatccgcctgacggcagcgagcataatggcgccagcacgtgtgctctctggtgcaacgcctcgataagaggggccgcctgctggttcgtccgtgacaaatcaagagatgccactccgggcgacatcaaatccttcgagagccttgatgacgatgtctctgacctgaacttgtcggcgccgttccaagtagctgctgcgacgatgtttggcggaggcaacaaaccgaacctcgacttcaccctaggacggatataataatccgccgcgcgcgcgccatctacatatggatgagttgatcgatgaagctggaccatgcatgcggataagagatcgacaggctagatcgagctagctagctgcatatatagattgatttgcttgcattgtaacgaccagccatatttaattatgatctgatggtgcat

SEQ ID NO: 132779 - DNA, 279 bp, Zea Mays
atggagtcattgagccaaataactgaagaaaagaagaaaattgaagaacagactgcagaatacgaagctaaacttgaagagagcttgaaggaaaagcaatctcttgaagagaacttgaaggaaaagcaatctcttgaagagagtctgcaacaagagctggtgaaattaagagaagaaaacaaacaccatcaaaacaacattgctgatctgaaccttcagctctccactaataatgacatgcacagtcaactggagacccagctaaaggagatcaattaa

SEQ ID NO: 132780 - DNA, 280 bp, Zea Mays
tatggagtcattgagccaaataactgaagaaaagaagaaaattgaagaacagactgcagaatacgaagctaaacttgaagagagcttgaaggaaaagcaatctcttgaagagaacttgaaggaaaagcaatctcttgaagagagtctgcaacaagagctggtgaaattaagagaagaaaacaaacaccatcaaaacaacattgctgatctgaaccttcagctctccactaataatgacatgcacagtcaactggagacccagctaaaggagatcaattaa

SEQ ID NO: 132781 - DNA, 2278 bp, Zea Mays
cctggatggcattcaacagctcaagaaaatcccagcgctcctccccagccacaaatcgcttgcacgtggggcccaataacgcggtgtccactgcaaccgccaacgctgcacacagtgggggcgagcaaggcgaccacggtggcgatagagacgcgcgatttttactcttcgcggtaaccgattcttgtaaacgcaagagctccatgcggccaccggccacggttcggcaatggtagtttcgtcacacttcctctgacctctgctccaccgctcgcccatggtgctagcatggtaggaggtctagttctgtcccaggcgcagacgcaccaggccgccacgccaagaaccgccgcaccggcgccggcgccggctcaggcgttggagaagaggccgagggaccaggcgcagccatgcggcacagtggcggcggctgcggccgtctcggtctcggcgccgagtttggacgaggtcaggaaggtgcacgcgcggcacatcaagctgggcctcgaccggtgcccgcggtatgcgcggccgctgctcgcggcgtgcgcggtctcgggctggccgggcggcatggagctcgcggcgtccatcttcgagtcgctcgtcgagccggaggccttcgattacaacaccctgatgcgcggccacgtcagcggcggcggtggcgaccgcgatccggcggccgcgctgcgcctgtacattgacgggctggaggcgggcgtcagccctgacagctacacgttcccgttcgtgctcaaggcgtgcgcgcagttggcggcattgcaagaagggaggcagttgcaggcgcacatcgtgaagctcgggttccagcacgacgagcacgtgcagaacagcctgatcagcttctacggcaagtgcggcgcgccggcgatggctcgtctggcgtttgaccgggtggaggccgaggagcgaacgacggtttcctggagcgcactcctcgcggcgtacacgaaggcagggctgtggggcgaatgtctcgcgtcgttcggctcgatgatgctcgatgggtggaggcccgacgagagctccatggtcagcgcgctctcggcgtgcgcgcacctaggatccttcgacgccgggcggagcgtccactgcgcgctgctgaggaacaccgcgaggctgaacaccatcatgctgacgtccctgctggacatgtacgccaagtgcggcagcatcgagaaggccgcggcggcgttcgacgcgatggatgacaagagcgcgtgggcgtacagcgccatgctatccggcctggcgctgcacggggacgggcggaaggcgctgcaggtgttcgacgcgatggtccgggagggccacgcgcccgacgcggccgcgtacgtcggcgtgctgaacgcctgcagccgcgccgggctgctcgaggacggcctgaggtgcttcgaccgcatgcggctggagcacaaggtcgcgcccaacgcgctgcactacggctgcatggtggacctgatggcccgcgccgggaggctggacgacgcgcgcgcgctcatcgggaccatgcccacggggccgacggacacggcctggcgaagcctgctgaacgcgtgccggatccacggcgacctggatctcgcctggcacgcccttcaggagctcaggcgcctcggcgccgccaacgccggcgactacgttatcgtcgcggacatgcacgccagggccaagaattggaccgctgccgccgcgctccggacagaggcggtggactcgggcctcgcgcagtccctcgggttcagcgccgtggaggtgcgcggggagctgcaccggttcgtgtcgcaggacatggcgcacccgcggacgcgcgacatctacgagatgctccaccagatggagtggcagctgcggttcgatggctacaaacctgacacgtcggaggtggcgctggacgcgggcgaagaggagaaggggcgcgtggtcgcggcgcacagccagaagctggccatggcgttcggcctgctcagcacgccggagggggcgccggtgagggtcgtgaccaacctccggatgagcaaggaatgccacgcgtacagcgccctgatctcggagatcttcgggcgggacatcgtcatcagggacaggaaccggctccaccggttcaggtgcggtacctgcagttgcagagactactggtaacagtttcgttagtgtgaatctgtgatcgatggtgtaaatatcaacggccttttatgtctttgttctcgcgattgagtgtatgtatgattcctttgcggccaaatacagtagg

SEQ ID NO: 132782 - DNA, 198 bp, Zea Mays
attatgtacttgtccagatatagcttcaggagcttgaatcgctcatcttccccaggcaggggaaattccaggacctcatcaatacggtcagcaacagcagagtcaagatcaccgggtctgttggtggcaagtgcaaggacaatgtccttggattggtcacctgtgcggaagaggagagcattcagggcactcctttga

SEQ ID NO: 132783 - DNA, 1011 bp, Zea Mays
aaacgactttagccgaagctgcttcttcgtgtgagaccttcggcgtaccgaagcacgaccccaacaactaattaataatcagcttactaaaaaagcagaaaaaagagagatctaataaaaccattcggagagccggacaggtcaatcactgctactcctacatcgatcagtgctgtgtagacaagaaaagcgggcagcttcgttcaaccccgagaaagcttggagccagagcagggggggcgaagagacgatggtcgggatcttctccaggttctccgccggcgcccaccgccgctccaagagcgtggccgaggctgtcgagacgctggcccccaacataagtacaggagaatctgacccagcggcagctgttcctgcggagagcccccatggcatcgaggttggtgttgagttcaagccagtggagcgccccgtggaacctatcaatcttgatgagccagtgaaatgcccgcttcctgagccgtctatactgcacgacgggaggatatggaaggagaaaatgtcttcagtcagcacgagggtgagaacagacttgccggtcgtgaaggaagggtcgcagctggagcctgacggtagcagcgctaggtcacgatctgcagttccaaggcgcgccatactgccctccgtaagcgcgcccgagcacaacatcctagcgctgcttgacgagtgcgacgtctccgggagccgtggctctgctgaatgagctcgagttgggcgtcgccagcacattgtaactaaactgcgtttgccacgagctgatctgagcacagcaaaccttacagtatgtctgaaaagaattggaactacgcaacagatcttttgtctggattgtatctataaatacgagtgaaagcgttttggggaaattgtctcgcacttgtcggaggcagttatggttactgaaactgaaacacttggttttgtgttgtaacttttgcactgttgagtgcgagcatgcagctctgaatgtgacgccaagttgtcaagtgc

SEQ ID NO: 132784 - DNA, 1463 bp, Zea Mays
aaacgactttagccgaagctgcttcttcgtgtgagaccttcggcgtaccgaagcacgaccccaacaactaattaataatcagcttactaaaaaagcagaaaaaagagagatctaataaaaccattcggagagccggacaggtcaatcactgctactcctacatcgatcagtgctgtgtagacaagaaaagcgggcagcttcgttcaaccccgagaaagcttggagccagagcagggggggcgaagagacgatggtcgggatcttctccaggttctccgccggcgcccaccgccgctccaagagcgtggccgaggctgtcgagacgctggcccccaacataagtacaggagaatctgacccagcggcagctgttcctgcggagagcccccatggcatcgaggttggtgttgagttcaagccagtggagcgccccgtggaacctatcaatcttgatgagccagtgaaatgcccgcttcctgagccgtctatactgcacgtaagccatcctctcagttccagtggtttatagaaaaatggctctagaatatcaatttattgacaaggcgattaactttcttttcttgcatcgttcagtattaaacggtatcaggaaactttcttgtgctgcagaatgtgatgttaaaccattctagtaaacttccttgtgttgtgttacagaattagttactcgatgcttgaacttattgttgcgtaaactgatcgatggatgatgctaggataggaggatatgtggtgttttcagtatcaaatgcagaccatattagaaatctttcttgtgctgcagacttaactgctaggtctcatcttgacagtctggtcttgtatatgcttcaagttcgacgtttccttagcagtaaagcatcagctattccagtctttacttgttcccttatcggtttgatcggttgatggtccgatggatgctaggacgggaggatatggaaggagaaaatgtcttcagtcagcacgagggtgagaacagacttgccggtcgtgaaggaagggtcgcagctggagcctgacggtagcagcgctaggtcacgatctgcagttccaaggcgcgccatactgccctccgtaagcgcgcccgagcacaacatcctagcgctgcttgacgagtgcgacgtctccgggagccgtggctctgctgaatgagctcgagttgggcgtcgccagcacattgtaactaaactgcgtttgccacgagctgatctgagcacagcaaaccttacagtatgtctgaaaagaattggaactacgcaacagatcttttgtctggattgtatctataaatacgagtgaaagcgttttggggaaattgtctcgcacttgtcggaggcagttatggttactgaaactgaaacacttggttttgtgttgtaacttttgcactgttgagtgcgagcatgcagctctgaatgtgacgccaagttgtcaagtgc

SEQ ID NO: 132785 - DNA, 1066 bp, Zea Mays
tgggtagcagagatacattttaacaaaaatctagctagagaaaattacttcaacagacaaatctagctagagagaattacttcagtagacagacaaccctcctagactccaatcctgcaagaatacaaaaggaaccgtgtcaagctactgcatatgatccataactgaaacagcattcggcgagagttgaagcataattcattcagtacactgataaacactaaatccttcgattttgaagattgaacagcaactaacacaaggaaccacacttattagctatgctggtcccattctagcaattcatgaaaaaaaaagaatcaccggagcatcgcttaaatggaggaaacgtgatcgcgaacaaagtacatccattaactgtatcggctacagcagctccaaacgacaaagcgaaatggttcatcaatattacaaccgaacaacagaaatttgctcatgataccctcttcttaagcggacgggatctccacctcgccgtcgtcaatctcctgctggaggtccttggggtccttgccgtcgacggtgcagccgacgctgacgcaggtgccgagaatctccttgacgcagccggacatttccttggccatggacctgggcctcatggtcctggcaatctcgatgacgtcgtcgagactgatgttgccgctgtgcttgatgttcttgaccttcttgcggtccctctcgggctccttgagcgccttgatgacgagcgccgcggcagagggaacgacggagaccttggcctgtcggttctggacagtgagcttaacggtgacgcggaggcccttccagtccttggccgtctccttggcaatgtcctctccgatcttcttgggagaaagaccgagcggaccgatcttgggggccaacgaagacgccgcgcctacctcgccgccggtcacacggacgaacacctccaccacctgcgacgggtcgagcttgggcggcatggctgcaggcgtggggtggcggcgggagctagggttcaaggcgcgattgcttcgatcgaatggatatattacgacggctgtgccgacaagtctgc

SEQ ID NO: 132786 - DNA, 4534 bp, Zea Mays
cttgaaagttgaaaccctagtgcaggcacacgacctccgtgtgcaacgcgtcgccgccatggcggcccccctgcactccagctccggccacaacgccgccgcaggcggcggggccaagaccatcgaggagatgtaccagaagaaaacgcagctggagcacatcctgctgcgccctgacacctacatcggctccgtggagaagcacacccaggcgctttggatatacgaggacggtgccatggtgaaccgctcggtcacctacgtccctggactctacaagatcttcgacgagatcctcgtcaacgccgccgacaacaagcagcgggatcccaagatggacgcgctccgcgtcgagattgacgtcgacagctgctgcatctccgtatacaacaacggcgacgggatccccgtcgaggtccaccaggaggagggcgtctacgtgccagagatgatattgggccacctcctcaccagtagcaactacaacgacaacgagaagaagaccaccggcgggaggaacggatacggcgccaaactcactaacatcttctccactgagttcgtcatcgagaccgccgatgggcgtcgccagaagaagtacaagcaggttttctatgagaacatggggaagaagtcagagccccagattaccaagtgcaagcagggcgagaactggaccagggtcactttcaagcctgatcttgccaagttcaacatgacccatctcgaagatgatgttgtagccctcatgaggaagagagttgttgatatggcaggcactctcggcaaaacggtgaaggtcgagttggatggccagagggtgcccataaagagcttctgtgactatgtcgacctgtatatgaagagtgctaactgcgacagacctgataatttcaaaaggatttatgagcaagtaaatgatcggtgggaagtgtgtgttagtcaaagtgaagggcaatttcagcaggtcagctttgtcaacagaattgcaaccatacgaggtggaagtcatgttgattatgttaccaaccaaattgccaaccatgtggtggccattgtgaataagaaaaacaagaatgcaaacatgaagctgcacaacgtgaagagccatctatgggtctttgttaatgcgctcattgacaatccggcttttgattcacaaaccaaggagaccttgaccactcgtcagggaagctttgggtcaaagtgtgagctttctagtgatttcctcaagaaagttgagaaatctggtgtaattgagaatgtcctctcttgggctgatttcaaacttagcaaagaattaaagaagactgatggaagcaaaaagtcaagaatttctggcatccctaagcttgaggatgcaaatgaagctggtgggaaggactctgacaagtgcactttgatcctgactgaaggcgactccgcaaaagcacttgctatgtctggcatagctgtcgtagggagagattactatggcgtatttcctctcaggggaaaactgttgaatgtcagagaggcaaaccacaagcaaataatggacaacgctgaaattcagcacataaagcaaatacttggtttgcagcatggaaagcagtatgagagcaccaaaggtttgagatatggtcatctcatgataatgacagatcaggatcatgatggctcccacattaaagggttgctgatcaacttcatccactcattctggccgtctcttcttaaagttccatcttttttggttgagttcattactccaatcatcaaggcaaccagaggtcaaactacgaaatcattttacacaatgccagagtatgaagaatggagaaagaatttaggagcaagtgcaagttcgtggactataaaatactacaaggggttggggacaagcacagccaaagaaggccggaagtactttgaagatattattgatcacaaaaaggattttgtctgggtagatgaccaagatggcaaccatattgagttagcattcagcaagaaacggattgctgataggaaacagtggcttacaaattttcagcctggaacatacatagaccaacgtgagaaacaagtcaagtatagtgatttcatcaacaaagagctgatactcttctcaatggcggacctgcagcgatcaataccttcaatggttgatggccttaaaccaggccagaggaagattctgttttgttcattcaagaggaattttgtcaaggaagctaaggtggctcagttctctggttatgtgtcagaacactccgcataccaccatggtgagcagagtttagcaagtacaattattggcatggcccagaattttgttggcagcaataacatcaaccttatgtcccctaatggtcagtttggcacaagagctcagggaggcaaggacgctgcaagtcctcggtatatcttcaccaagctgtctaatattacacgttcaattttcccgaaggatgacgatattcttcttaattatctgaatgaggatgggcagtcaattgaacccacctggtatatgccaatccttcccatggtattggtcaatggaagtgaaggaattggaactggatggagcacatatattccaaactacaatccaagagacattgttgctaacgtcaggcggttgttgaatgaagagtctactgtaccaatgcatccttggtataggggattcaaggggtctatagagaagacagtcaatacgaaggtagctggttccacgtataccgtcaccggaatcattgaggttgttgacaacactacactgaggatcactgagctgccaatccgccgatggactcaggattacaaagattttctcgaaagtttagctccagatcctaagaacaaggacaaagtaacattcatagaggatgtcacatcacaaggtgataatgaagacgtctacattcaactcaaattaagtgaggcaaatgtgaatgtagctaaggaagaaggactagtgaagaagtttaagttgacaacaacaattggtacaacaaacatgcacttgtttgattcagatggtaaaattcggaaatatgacactcctgagcaaatacttgaggaattctttcaattaaggcttgaattctattgtaagagaaaggaagcattgttgaagaatatcaagctggacttaaagaagcttgaaaacaaagttaggtttatccgctgtgttgttgataatgaaattatagttaacaacaggaaaagggcagatctatttttggagctccggcacaagaattttgaccctttcccaaagaaaaaaaagaaggctgaaccaactgctgtaggtgctatagaagaggaggaaaatgaagagtctcctgaaactgcagcaggagtggatcctagtgactatgagtatctcctctccatgtcaattggtaccttgactttggagaagatacaagagctcaatgctgagaaacaaaagttggtggacgatgttgtggaactgatgaacacatcgccaaaatcactttggttgaaagatcttgatgcttttgagaaagaactggatgtgcttgatcaaatggatctagcagaggaggtgcaaagggaaaagaggataaaggaaggcaaaaaaggcggatcaaaagctgcacccaagaaacaacctaaaaaggctgcacctataaagctggaaagcagtacagaagacaatgctgctgaaccagtagtcgcaaagcgtggagctcaacagaagaaagcacccaaaaaggctcccgtggacgaagaggaagttgatatgccttcactgaaagaccgtcttgctgcctttaatataaatgactcatctcctcctgatcactctgctatggaaactgaaacaacagaacagccggctcagaagaaagggagaggaaagaagcctgccgccgccgctgtgaagccgaaggctcctgccgccaggaaaagggcgccgactcaagggggcaaggcaacgcagaagaaaatagatgagatgctcaaggtcactgaggataacaccagcagtgctttgtcccctgagaagaaggtccggaagatgaggccctctcccttcaacaagaagagtggctcaatcttacagagaggctcgactgccgcttctgcaagctctgaaactatcgctgaagcttcaccaccctctggtagctctgaagagccagttgctgcagcaaaacctagaaggacagccagggctacgaagaaacatgtctatattagtgaaagcgatcctgaggatgaagtggtggagttgagtgatgattcggactttgatttggatgctgactctgactagtgagggtaactgtcatccgtagcatgtgctacctttattgatgatgcatttcttgtgcatgtgctactttaattgacgagtgcgggtaactgtcaatctgtcatccgtgttgttctgttgactgttgtatgtgtgttttctgttgactgttgtcgggaacccaagacattgtctggttaactgatttgtctgtctataattttggcattcaagtgtgcttgtggtatgctctgcagc

SEQ ID NO: 132787 - DNA, 2170 bp, Zea Mays
gtaactatgtacatgctcagggttaggggtgatgaagaactaaattgctaataattaatctctacatgtgattttggtcatttgttcaaaccatggagaaggcttgttggaaggtgttgagggttatgttaagaagaaagaacagttgtagatgcaagtgtgattctacctatagaatcacatgctcctgatccgtattctgttccaatatatgagaagttcaagcatgtggattatggtgacaatgaggtggcctattctaattatatgccccagttgaatgaatctgaggaagaggatggttcttctgagctgggtgtctctcagtggcacatgaaaggtaaacgtaacaatcgtaatgccacaaagagatcagtggacatgagagatggaaatacatggttaaaaaactacaatgggtcattaaaagggtctttgcataacacaaatgatgggaatcccagaaaagaaggtatgcacacatctggtgaaaagttttttgaggaaagcatttaccaaattaaagaggaacccagttatgatgattctgatgaaactaatgtatttgaggacacgagccattcagaggctaacttgtactatggtaaaagatgcacttcattcttgagaaccacaagagatcttagtcgaagatacagttactttaatgactatgagaatgactcttcaaatgtttctcccctaaataaggacactgaacagatgtaccatgttgatcggaatgcgtattgggatggaccttcattttaccaaacgaagttgacttcacgttttggtggcatgaggccaatgttgttcaatgttaacctcaaagttcaggctagctaccaaggagagcatgtccctcttgtctctttaatgagcagacttaatggcaaagcaattgttggacaccctatccaaattgaaatagttgaagatggttccacagatcatctgatattatgtggtgacagtggtatgcaagagagctcagctgctccacctgcttggccaacaggtagaaggactgccatgcaaagagttccccgttcaaatccatcaggagcactgttggatggcgataatgaaggtggtcttgtgtattctgattatgagatgaaaccaaccaagttgtacacttcttccaatcatcaggttaaggtgaataagaaaagcagttcaaatactaggaggtcagtagctaagtcccaaaagaagtcatccaagaaaacaaacctctcaagccagaaacgtagagttctctcttccatttccactgcaaaaaaacatcatggagaaggtggccgagcaaaggcacattggcgtaatgacatattgggtggtttaatcagatcagaaggagttcctctagtgacatgtgtcccaacgaaggttgtgttcactaggatattggaagcagttggcaggccacctctatctgtcgttcaccgtgttagaatgactagtccttcagtgcgagatcctccgtaggcttcaactgtagtgctatatatggttatatgttgccagccattgacatgcaagtttgatgtacattctgttaattgaagaggcagaccattcaatcatccggtagcacctgtgaagagtcagattgatatggttgctctaaaataacttggaacagctgagctcttattagcagtggtaacctgtaaaaatcaataacgcttgtgtatttctgactggagactgatcatgaatgcttcagagcagcttgtgtatttctgactggagacagatcatgaatgattcagagcagctgagccgttgataccatgaaggggtactctttgatgtagctaggagtctaggactggtggctgtcttttggtttcgtcacaactgtttactgtaaagtactaacttaagcattttaggtgtcaatttagttaaaacatttgtgtcatcatatatagcaataggtcataggttttctaatgacatgtataatcccccaattatatcctgatgtatctgttatttgttgtcgagatgtagttgattcagctgtatgtttagaagcatgtgtatctagtcgatgtaatatatcagagcaagtactccaacatccaaatggtgtaacaacctagtcatccatgtgaagattcctccatagacattgtgaacaaaaagatcattccat

SEQ ID NO: 132788 - DNA, 3559 bp, Zea Mays
atttcacctttttcctcaaaaaagagagggaaatcatattccagggccgcccgcgccggaaccgaccacttcgccggcagcgagccggagactacgcggagcccctatccccgcgccggcgtgggcggagggaggagaaggagcagcagcagcagcagaaggataaaggggggctttgggagcctctgagaagaagattctagaagctacctgaggcgaggcgagcgcgccgcggcacgagtgatctcggtggaataagtcgcgcggggccggcgccgtgggggatgcgcctctggatgccgacacgctccgggatttgaatggtagccagatctcgagggggaggggagcttctcgaagcggggtaaggcgcgcggtctggttggccggcggttagggtttggcgggagcgggatggtggggagctcggtggagggaggagcagacggagatgggggctgctgcggcgtcggggacacctcgcccgggaccatcgtgtgggtgcggcggaggaacgggtcctggtggcccggcaggatcctgggccctgaggaactcccaccgtcgcagatcatgtcgccgaggtccggtacgccggtcaagctcctcggccgggaagacgcaagcgtggattggtacaaccttgagaaatcaaaacgtgttaaagcattcaggtgtggagagtttgatgcctgtattgagaaggcagaggctacgcaagggactcttgtgaagaaaagagagaaatatgcacggagagaagatgctgttcttcatgcacttgaattggagaggaaacagtttgcatcgaagtatcagattcaaggtttcagacctggaccatctggtaatatttctgcttgcacaaaacaccgcaaagaccttggaagtactcgatacaagagtaaaaagagcaagaattgcaaagatgtatctgttcctcctgacgtaaaaaaagaagtgggacaatgtttcctacatgctggttcaaagagaaacttttcagaatctcttactcaaggaaatgttgtcagtaatcacatgggtaatttctctcatttgagccattctcatggaggtgacactttagagaacaaggagagtacaattgtgaagaaaaatagatcggatggaagtgattttgaagactctcttgtttcaaaatcagatagacgcagaccgatttctcaagtattgcagagtagtgaaaacttgcttcctcacttaaagcaaaacaatgattttggggctttgttaatcaaggagaataataatccttcacttgccacctcccggtccagaagaaataaatatacatacatggctagtgattctggtgaaactcagagtcatagtgatttaccttctataaagatgactgctactggagctgattttgagaatgaaagctatcttcggcatactggttatttttctgaggagcagacttcttctgacttcgttgagaagcaagtaactgagtcttcagagagggaatgctcagaaagtgagactgaagaggatgctgaacttctgcaaaatgcaagtgtgattctacctatagaatcacatgctcctgatccgtattctgttccaatatatgagaagttcaagcatgtggattatggtgacaatgaggtggcctattctaattatatgccccagttgaatgaatctgaggaagaggatggttcttctgagctgggtgtctctcagtggcacatgaaaggtaaacgtaacaatcgtaatgccacaaagagatcagtggacatgagagatggaaatacatggttaaaaaactacaatgggtcattaaaagggtctttgcataacacaaatgatgggaatcccagaaaagaaggtatgcacacatctggtgaaaagttttttgaggaaagcatttaccaaattaaagaggaacccagttatgatgattctgatgaaactaatgtatttgaggacacgagccattcagaggctaacttgtactatggtaaaagatgcacttcattcttgagaaccacaagagatcttagtcgaagatacagttactttaatgactatgagaatgactcttcaaatgtttctcccctaaataaggacactgaacagatgtaccatgttgatcggaatgcgtattgggatggaccttcattttaccaaacgaagttgacttcacgttttggtggcatgaggccaatgttgttcaatgttaacctcaaagttcaggctagctaccaaggagagcatgtccctcttgtctctttaatgagcagacttaatggcaaagcaattgttggacaccctatccaaattgaaatagttgaagatggttccacagatcatctgatattatgtggtgacagtggtatgcaagagagctcagctgctccacctgcttggccaacaggtagaaggactgccatgcaaagagttccccgttcaaatccatcaggagcactgttggatggcgataatgaaggtggtcttgtgtattctgattatgagatgaaaccaaccaagttgtacacttcttccaatcatcaggttaaggtgaataagaaaagcagttcaaatactaggaggtcagtagctaagtcccaaaagaagtcatccaagaaaacaaacctctcaagccagaaacgtagagttctctcttccatttccactgcaaaaaaacatcatggagaaggtggccgagcaaaggcacattggcgtaatgacatattgggtggtttaatcagatcagaaggagttcctctagtgacatgtgtcccaacgaaggttgtgttcactaggatattggaagcagttggcaggccacctctatctgtcgttcaccgtgttagaatgactagtccttcagtgcgagatcctccgtaggcttcaactgtagtgctatatatggttatatgttgccagccattgacatgcaagtttgatgtacattctgttaattgaagaggcagaccattcaatcatccggtagcacctgtgaagagtcagattgatatggttgctctaaaataacttggaacagctgagctcttattagcagtggtaacctgtaaaaatcaataacgcttgtgtatttctgactggagactgatcatgaatgcttcagagcagcttgtgtatttctgactggagacagatcatgaatgattcagagcagctgagccgttgataccatgaaggggtactctttgatgtagctaggagtctaggactggtggctgtcttttggtttcgtcacaactgtttactgtaaagtactaacttaagcattttaggtgtcaatttagttaaaacatttgtgtcatcatatatagcaataggtcataggttttctaatgacatgtataatcccccaattatatcctgatgtatctgttatttgttgtcgagatgtagttgattcagctgtatgtttagaagcatgtgtatctagtcgatgtaatatatcagagcaagtactccaacatccaaatggtgtaacaacctagtcatccatgtgaagattcctccatagacattgtgaacaaaaagatcattccat

SEQ ID NO: 132789 - DNA, 890 bp, Zea Mays
gattagttacccttattcggagcctctcaccaaattttacataagcaatacgctgaccatcaccataaagaagcatcgttaggaatcaagatggccgaaagaatttctcacaaacacaagggcacctcttctcttagattgatgggttacccaagattaaactactgtcctcgcctttctttctactgaacttttcaccgcatgtgttgattcatcttcagatccgtcgaaatccgatgaccgtacccgcctctgatgttcaggtccagaagtagcaacccttcgtccgtagcgcacttgacatcgtccccgtcatgaactccatggtacggctgaaagtctagattgttcgctctgagaccgtcctcggacatggctttcaccagctcgccgttgttctgctcgcacgcctgggtcacgttgtccatgaagcctgagagcgcgaggttgaagtccgtcagctgcgacctggttgcttctaggtttgcggctccagtcgcgtggtacgagaggttgctctgggccttctcgagtatcgtctgcaagtatttgccttgcgcctcgatccgcatctgcagcttcttctgaacctgcacttggaaaacgaagagcgcatctgcaagtggcgtttctctgatccacgttcagaaacgataaggcgaacggaaatgggagaaccgtgacagagatgaagaatgatgtaaatttacacaaatggaaaccatttgtaaacaattcctttttttttctctctaaaaacaagtagttcaaacatcacagtgagtgatctgtatattgtatgcagcctagcagacatggttgctccagttgggtgacagaaatactgaaacagtccgattctgaaatcctaacccagcatttaacttata

SEQ ID NO: 132790 - DNA, 1598 bp, Zea Mays
cgaccaaacaggcaaacactgaaacactagtaccacagtagcagcgaggagcaaacagcaaagcacgctctggagaaatccctcgtctaccttcaccagttgaccgcactagtggccgtcgtccgaccacgatgagcacccgcgcggcaggatccgccctcctccgccacctgggtccgcgcgtcttcggcccagttttttctccggcggtcgcgccgccgaggccactgctggccttggccggcggcggggaacggggcggggcgctcgtgtgggtgcgggtgcggctactgtccacctccgccgccgaggcgaaggaggaggtggcggcgtccaaggggaactcaggaagcaccgcggcggcgaaggcggaggcggtggaggccgctaaggagggtgacggaaagagagacaaagtggtgagcagctactggggcgtcgcgccgtcgaagctgatgaacaaggacggcgccgagtggaggtggtcttgcttcaggccatgggaggcgtacaagccggacaccacgatcgatctcaacagacaccacgaacccaaggtgctgctcgacaagatcgcctattggaccgtcaaattactgcgcgtgcccaccgacatattcttccagaggaggtacggctgccgtgctatgatgctggaaacagtggcggcggtgccggggatggtgggcggcatgctgcttcacctgcgctcgctccgccgcttcgagcacagcggcggctggatccgggcgctgctggaggaggcggagaatgaacgcatgcacctcatgaccttcatggaggtggccaagcccaagtggtacgagcgcgcgcttgtcctcgccgtgcagggcgtcttcttcaacgcctacttcctcggctacctcatctcccccaagttcgcgcaccgtgtcgttgggtacctcgaggaggaggccatccactcatataccgaatacctcaaggacctcgaggccggcaagatcgagaacgtccccgcgccggccattgccatcgactactggcagctcccagctgatgcgacgctcaaggatgtggttgtcgtggtgcgctccgacgaggcgcaccaccgcgacgtcaatcactttgcgtcggacatacatttccagggtatgcagctcaaggagacacctgcaccgattgagtaccattgaacaatcggggtcctgtgacgcttgagagttccagttcattttggctagctgtaggtagctaaagatgcttgagaaataaaaagaaaatgcctggctgctatgagtagcaaagatctcgtgggttgatcctaaaatcttttacgtgagtgtttgtaagtagagatacagacattgatacgtgcactgaatcttgtccagaacataccatcgacttggttggttccacagagaaaactttatatccgattgtaacagagtttttttttcctgaaaaggagcaacgaaggagccgcgcgtcgtcgattatctatgccactttgtaacccacccatttagaacttgttcggttaggagtgaattgatgaagatttctctttctatttaattttctcatccggtttgggtaaaaccgaacatgtcttt

SEQ ID NO: 132791 - DNA, 1090 bp, Zea Mays
cgtccaaccgttggcacacacaaccataaattcaggcctaccctctcattcatcgtagcatagtaccattcactaatccaagacaaaacatggctgtgaatgtgagaaccatgtggtcgtcgatgcgggcacatgttgcgatggctgtggcgttggtgttcttggtgagcggcgcatggtgcggtcctcccaaagtccccccaggcaagaacatcacggccacctatggcaaggactggttggacgctaaagcgacatggtatggcaagccgacgggtgccggtcccgacgacaacggtggcggctgcgggtacaaggacgtgaacaagccccccttcaatagcatgggcgcatgcggcaacatccccatcttcaaggatggtctgggttgtgggtcctgcttcgagatcaagtgcgataagcctgtggagtgctccggcaagcccgtggtggtgcacatcacggacatgaactatgagcctatcgcggcgtaccacttcgatttagcaggcacggcgttcggcgccatggccaagaagggcgaggaggagaagctacgcaaggcgggcatcatcgacatgcagttccgaagggttaagtgcaagtacgactccaaggtcaccttccaccttgaaaaggggtgcggccccaactacctggcactgctggtcaagtacgtcgacggcgacggtgacattgtggcagtggacgtcaaggagaagggctccgacacatacgagcccctgaagcactcctggggcgccatctggaggaaggacagcgacaaaccgcttaagggacccctcaccgtccgcctcactaccgagggaggcaccaagtccgtctacgacgatgtcatccctgccaactggaaggccaacaccgcctacaccgccaaataattaactttagtgctgacaatactttaagccgacctatgctagctatactagattgggttggatcccaagcaatgcattacacatgcatgcattggaccgtgatatctatttgctaccactaccctattacgacagtgatgctggcgcggaacaatgatggtgtcatcctccttctccatcttctcatc

SEQ ID NO: 132792 - DNA, 1247 bp, Zea Mays
tctgatgaatcagcttgattcgttagaaccatgtggtcgtcgatgcgggcacaggttgcgatggaggaggcgttggtgttcttggtgagcggcgcatggtgcggtcctcccaaagtccccccaggcaagaacatcacggccacctatggcaaggactggctggacgctaaagcgacatggtatggcaagccgacgggtgccggtcccgatgacaacggtggcggctgcgggtacaaggacgtgaacaagccccccttcaatagcatgggcgcatgcggcaacatccccatcttcaaggatggtctgggttgtgggtcctgcttcgagatcaagtgcgataagcctgtggagtgctccggcaagcccgtggtggtgcacataacggacatgaactatgagcctatcgcggcgtaccacttcgatttagcaggcacggcgttcggcgccatggccaagaagggcgaggaggagaagctgcgcaaggcgggcatcatcgacatgcagttccgaagggttaagtgcaagtacgactccaaggtcaccttccaccttgaaaaggggtgcggccccaactacctggcactgttggtcaagtacgtcgacggcgacggtgacattgtggcagtggacgtcaaggagaagggctccgacacgtacgagcccctgaagcactcctggggcgccatctggaggaaggacagcgacaaaccgcttaagggacccctcaccgtccgcctcactaccgagggaggcaccaagtccgtctacgacgatgtcatccctgccaactggaaggcccaacaccgcctacaccgccaaataattaactttagtgctgacaatactttaagctgacctatgctagctatactagattgggttggatcccaagcaatgcattacacatgcatgcattggaccgtgatatctatttgctaccactaccctattacgacagtgatgctggcgccaacaatgatggtgtcatcctccttctccatcttcttcatctccatatatagctagagtgagacttcgctgttgtttaaaagagaagagttaagaaatggattgacacgttatataataagtgcctaatgaaatatttgataggccttcattttttataaaaggatccatgaatgttgtgttgtccatgtatctcctacgtaatcctaactttatcatgcatggctacattttaatagaatacatattttttatgactaattgaaatatatgatagt

SEQ ID NO: 132793 - DNA, 3214 bp, Zea Mays
catgcaaaaataccatgtgccatgtcataaatttctgcaccttcgaccatctgacaaaaggaagcatttccgcaaatgtgctttctagctcaaggacatggtgctcaagttctccggctccggcaggcagtacaaggccgcggcggcgagcccgtcgttccggggcaaccgcttccaccgcaacagccgcctggccgcgtacacgggcgtcattgacgactcgggcttcacgtcggacggggccaccgagggctacggctacatgaggacgacgacgcacgcgaccggcgccaccgcgggaaccaaggtcggccgtggcttcccgcagcacgtcaggagcccgagcgcgagctggataccgagcatcggggaggaggacgatgaggaggatgaagaggttgtcgtcgttgaagaggaccgcgtgccgcgggagtggacggcccaggtggagcccggcgtccagatcaccttcgtctccaccgccggcggcgctggcaacgacataaagcgaatccgcttcaggtgcttattatctatcgccaacagctagctttgcgcgcgactgctgcatcaagtgcgcgcgtgctcagctaacgtaacggagcatcgaacgtgtctggcgtgcagccgcgacatgttcaacaagtgggaggcgcagcggtggtggggagagaactacgaccgcgtggtggagctctacaacgtgcagacgttcagccggcagcagggcgtctcgacgccgacgtcctccatcgacgatgccacgcagagagactcgtcgttctactcccgcgccggctcgacgagggacagcccggtgatcctgccgccgacagccgtgggcagggagcagccgatcgcccgcgccacctcgtgcagggccacggccgcggcggcttccacggcccgagccgcgtgcaacccatcgtccagtgcggtgccggacccgtcggaccacgtgtgggcgcaccacttcaacctgctcaactccgcgccggcgccggcaccggccgctccgcacctcgacccgtcgcgcgctaccacgtcgtccctggacgaggcgtccgtgtccgtgagcaacgcgagcgacctggaggccacggagtgggtggagcaggacgagcccggcgtgtccatcaccatccgcgagttcggcgatggcacccgcgagctccgccgcgtccgcttcagccgggagaggttcggcgaggagagggccaaggtgtggtgggaccagaacaggaaccgaatacacgcgcagtacctgtgacgtcggactcggagctagctgttgggtgtgcagtacacgcgttggatggaagccaagccaccaatccatggacaatagtagcgtagggctgagtcagtgatactattgcgactactgtctactagtgctagtttttacagggtgaacagaggtgaaagaggtccacggaatggagcctgtgtaaaacatgtttgctactactactgatctgggtttgtgtgttgatgaccaatgtattttttttcttgatgaactaatactgttttgtgttgatcgcctcagatgaacagtgctcacattttctaatcgcgggcacaaacaaatcacccacaagacaccaagcaagctaactttgaccatattggataacattcactttccaattacaaaagaaagcaagacaaaattcttcagtgttgcgttttttactagtgatgaggaaacgtttgccatcgttacaagacgtgcgccaaattggcacctcactgcgttaaatgtgcattcaaaccaaatgtgaaatgtccatcccttgttgggctcaaggatttacaagctgttaaatgtgcatacagtttgtgacagcgatattggtgcaagataacattgcaaggcaaaccaaaccaaattaatagcacaatcatgtttattaaaacatgggggcaagcttttcgcaggaaaaaagcagatcaaccgcccggaagtggggaaggcttgatgcaggctctagcacttcacaaaggaatttgcaaacccattctaatatgtctcgacgcagcgaaactgtggtgatggcaaatccgcacaaccatcgatgggcaaacgctcaggctgactatcctcttcgggcacactggtttctgcacactatacacaacacccctcctgcagctgatcgaattttcactccacataccctcatttagctgaccaattttcttgtcagcctctttgctggagggatatcgtcagacttcccaagaaagtccgacttgccatgtccggccttcatcatgggggcagcaggcttcacagcgctccgtgttctagaggtcacagacatttgggatagtttctctgtaattgatgagaccttctgtattgctcctcggccagtttcaggcaagctccgtgaatgcctaagtacaggattccctacaattccaaaggaaaaaaagttctaaaaaatcaaaacccatttcgtgcaaggagttgggcaatgcaaccctatataggaaacttgcctgggctattccgagctggtacccgattcgtagttagtttattgctagtctcggttggcttcatacccttttgggatggctgacgatccaaattaagttttctttgtacacctgtaatgttggtagcaaaatagacaatcaaactaaaccctataaatcttgcttgctccagcccaattaaaacagataagacacgcaccagtcttagataaaccatttaattttgcggatgcattgctatgagatttcattgtagatagagttccagttgagaatcttctagccacactgttctctgaatttccttttgatccaactaaaacaaatgaaccaagcacatgtaaaacaacaatatcctaaatgaattaggtacaaagcagaatactagtctgttaactaaccacatggaggtgttctaggaagtgatgaagcttttggacggacagggagtggaacacatgtacaaccctaaaagttggcaaccagaaaactgattatagttccaaggagacaataactgaaccttgccaataaaaatagagtagaaagaatatactattacctgaaaaaaggtatgctggaggacttctgcggcctttggtctcttgctaggatcccatgagcataaacttactgagatgaggtcaattgcatcgctactggctgttgtcatcacctcggccagttgactgcctttgatctg

SEQ ID NO: 132794 - DNA, 1736 bp, Zea Mays
acaggattgcttgttaatctggcgcgcctcacatgtgttcgccggcttgctcatatgatcggcctctctctcttttgcaggtgttcatcacttgagctcatatcatcgtcagaggcaggcagcagtaagcagattccgctgttgctgagcattgtcgtcgtgggcgtggcaggccagttcgcgtggagacggggagggaacatctggtgtgcgtttgctaaccggggggcggccggcgggtggaggcgaccaggcgaggactgctctgcggcggcaaagggtttcaaaatgctggcgtgcatcgcctgctcggccaaggacggcggggatcaggacggctcccgcgccgccacgccccacggaagggacgccggcaagtccctcacctcccagctcaaggacatggtgctcaagttctccggctccggcaggcagtacaaggccgcggcggcgagcccgtcgttccggggcaaccgcttccaccgcaacagccgcctggccgcgtacacgggcgtcattgacgactcgggcttcacgtcggacggggccaccgagggctacggctacatgaggacgacgacgcacgcgaccggcgccaccgcgggaaccaaggtcggccgtggcttcccgcagcacgtcaggagcccgagcgcgagctggataccgagcatcggggaggaggacgatgaggaggatgaagaggttgtcgtcgttgaagaggaccgcgtgccgcgggagtggacggcccaggtggagcccggcgtccagatcaccttcgtctccaccgccggcggcgctggcaacgacataaagcgaatccgcttcagccgcgacatgttcaacaagtgggaggcgcagcggtggtggggagagaactacgaccgcgtggtggagctctacaacgtgcagacgttcagccggcagcagggcgtctcgacgccgacgtcctccatcgacgatgccacgcagagagactcgtcgttctactcccgcgccggctcgacgagggacagcccggtgatcctgccgccgacagccgtgggcagggagcagccgatcgcccgcgccacctcgtgcagggccacggccgcggcggcttccacggcccgagccgcgtgcaacccatcgtccagtgcggtgccggacccgtcggaccacgtgtgggcgcaccacttcaacctgctcaactccgcgccggcgccggcaccggccgctccgcacctcgacccgtcgcgcgctaccacgtcgtccctggacgaggcgtccgtgtccgtgagcaacgcgagcgacctggaggccacggagtgggtggagcaggacgagcccggcgtgtccatcaccatccgcgagttcggcgatggcacccgcgagctccgccgcgtccgcttcagccgggagaggttcggcgaggagagggccaaggtgtggtgggaccagaacaggaaccgaatacacgcgcagtacctgtgacgtcggactcggagctagctgttgggtgtgcagtacacgcgttggatggaagccaagccaccaatccatggacaatagtagcgtagggctgagtcagtgatactattgcgactactgtctactagtgctagtttttacagggtgaacagaggtgaaagaggtccacggaatggagcctgtgtaaaacatgtttgctactactactgatctgggtttgtgtgttgatgaccaatgtattttttttcttgatgaactaatactgtttt

SEQ ID NO: 132795 - DNA, 1213 bp, Zea Mays
catggctgtgaatgtgagcaacatgtggtcgtcgatgtaggcacatgtggcgatggctaaggcgttggtgttcttggtgagcggcgcctcgtgcggtcctcccaaggtccccctggtaagatcatcacgaccacctatggcaaggactggctggacgctaaagcgacatggtatggcaagccgacgggcgccggtctcgacgacaacggcggcggctatgggtacaaggacgtgaacaagccccccttcaatagcatgggtgcatgcggcaacatccccatcttcaaggatggtctgggttgtaggccctgcttcaagatcaagtgcaataagcctgcagagtgctccagcaagcccatggtggtgcacatcacggacatgaactatgagcctatcgcggtgtaccacttcgatttggcaggcacggcgttcagcgccattgccaagaaggacgaggaggagaagccgtgcaaggcgggcatcgtcgacatgcagttccgaagggtcaagtgcaagtacggctccaagatcaccttccaccttgaaaaggggtgcaaccccaattacctggcgttgctggtcaagtacgtcgacggcgacggtgacattgtggtggtggacgtcaaggagaagggctccgacacgtgcgagcccctgaagcactcctggggcgccatctggaggaaggacagcgacaaactgcttaagggacccctcaccgttcgcctcattgccgagggaggcaccaataccatctacgacgatgtcatccctgccaactagaaggccaacaccgcctacaccgccaaataattacctttagtgctaacaatactttaagtcgtcttctactagctatactggattgggttggatcccaagtaatgcattacacatgcatgcatcggaccgtgatatctatttgctaccactaccctattacgacagtgatgatggcgccaataataatggtgtcatcctccttctccatcttctccatctccatatatagctagagtcaaacttcgatgttgtttaaaagagaagagttaagaaagggattgaccagttatataataagtgcctaataaaatatttgataggccttcattttttaaaaaaggatccatgaatgttgtgttgtccatgtatctcctacgtaatcctaactttatcatgcatggctacattttaatataatacatattttcga

SEQ ID NO: 132796 - DNA, 1297 bp, Zea Mays
gcctaccctctcattcattgtagcatagtaccattcactaatccaagacaaaacatggctgtgaatgtgagaaccatgtggtcgtcgatgcgggcacaggttgcgatggttgtggcgttggtgttcttggtgagcggcgcatggtgcggtcctcccaaagtccccccaggcaagaacatcacggccacctatggcaaggactggctggacgctaaagcgacatggtatggcaagccgacgggtgccggtcccgatgacaacggtggcggctgcgggtacaaggacgtgaacaagccccccttcaatagcatgggcgcatgcggcaacatccccatcttcaaggatggtctgggttgtgggtcctgcttcgagatcagtgcgataagcctgtggagtgctccggcaagcccgtggtggtgcacataacggacatgaactatgagcctatcgcgggcgtaccacttcgatttagcaggcacgggcgttcggcgccatggcctaagaagggcgaggaggagaagctgcgcaaggcggggcatcatcgacatgcagttccgaagggttaagtgcaaagtacgactcccaaggtcaccttccacccttgaaaaggggtgcggcccccaactacctggcactgttggtcaagtacgtcgacggcgacggtgacatgtgcagtggacgtcaaggagaagggctccgacacgtacgagcccctgaagcactcctggggcgccatctggaggaaggacagcgacaaaccgcttaagggacccctcaccgtccgcctcactaccgagggaggcaccaagtccgtctacgacgatgtcatccctgccaactggaaggcccaacaccgcctacaccgccaaataattaactttagtgctgacaatactttaagctgacctatgctagctatactagattgggttggatcccaagcaatgcattacacatgcatgcattggaccgtgatatctatttgctaccactaccctattatgacagtgatgctggcgccaacaatgatggtgtcatcctccttctccatcttcttcatctccatatatagctagagtgagacttcgctgttgtttaaaagatcagagttaagaaatggattgacacgttatataataagtgcctaatgaaatatttgataggccttcattttttataaaaggatccatgaatgttgtgttgtccatgtatctcctacgtaatcctaactttatcatgcatggctacattttaatagaatacatattttttatgactaattgaaatatatgatagt

SEQ ID NO: 132797 - DNA, 1127 bp, Zea Mays
agcatagtaccattcactaatccaagacaaaacatggctgtgaatgtgagaaccatgtggtcgtcgatgcgggcacaggttgcgatggttgtggcgttggtgttcttggtgagaggcgcatggtgcggtcctcccaaagtccccccaggcaagaacatcacggccacctatggcaaggactggctggacgctaaagcgacatggtatggcaagccgacgggtgccggtcccgacgataacggtggcggctgcgggtacaaggacgtgaacaagccccccttcaatagcatgggcgcatgcggcaacatccccatcttcaaggatggtctgggttgtgggtcctgcttcgagatcaagtgcgataagcctgtggagtgctccggcaagcccgtggtggtgcacatcacggacatgaactatgagcctatcgcggcgtaccacttcgatttagcaggcacggcgttcggcgccatggccaagaagggcgaggaggagaagctgcgcaaggcgggcatcatcgacatgcagttccgaagggttaagtgcaagtacgactccaaggtcaccttccaccttgaaaaggggtgcggccccaactacctggcgctgctggtcaagtacgtcgatggcgacggtgacattgtggcagtggacgtcaaggagaagggctctgacacgtacgagcccctgaagcactcctggggcgccatctggaggaaggacagcgacaaaccgcttaagggacccctcaccgtccgcctcactaccgagggaggcaccaagtccgtctacgacgatgtcatccctgccaactggaaggccaacaccgcctacaccgccaaataattaactttagtgctgacaatactttaagctgacctatgctagctatactagattgggttggatcccaagcaatgcattacacatgcatgcattggaccgtgatatctatttgctaccactaccctattatgacagtgatgctggcgccaacaatgatggtgtcatcctccttctccatcttcttcatctccatatatagctagagtgagacttcgctgttgtttaaaagatcagagttaagaaatggattgacacgttatataataagtgcctaatgaaat

SEQ ID NO: 132798 - DNA, 1280 bp, Zea Mays
attcatcgtagcatagtaccattcactaatccaagacaaaacatggctgtgaatgtgagaaccatgtggtcgtcgatgcgggcacaggttgcgatggttgtggcgttggtgttcttggtgagaggcgcatggtgcggtcctcccaaagtccccccaggcaagaacatcacggccacctatggcaaggactggctggacgctaaagcgacatggtatggcaagccgacgggtgccggtcccgacgataacggtggcggctgcgggtacaaggacgtgaacaagccccccttcaatagcatgggcgcatgcggcaacatccccatcttcaaggatggtctgggttgtgggtcctgcttcgagatcaagtgcgataagcctgtggagtgctccggcaagcccgtggtggtgcacatcacggacatgaactatgagcctatcgcggcgtaccacttcgatttagcaggcacggcgttcggcgccatggccaagaagggcgaggaggagaagctgcgcaaggcgggcatcatcgacatgcagttccgaagggttaagtgcaagtacgactccaaggtcaccttccaccttgaaaaggggtgcggccccaactacctggcgctgctggtcaagtacgtcgatggcgacggtgacattgtggcagtggacgtcaaggagaagggctctgacacgtacgagcccctgaagcactcctggggcgccatctggaggaaggacagcgacaaaccgcttaagggacccctcaccgtccgcctcactaccgagggaggcaccaagtccgtctacgacgatgtcatccctgccaactggaaggccaacaccgcctacaccgccaaataattaactttagtgctgacaatactttaagccggcctatgctagctatactagaattggttggatcccaagcaatgcattacacatgcatgcattggaccgtgatatctatttgctaccactaccctattacgacagtgatgctggcgccaacaatgatggtgtcatcctccttctccatcttcttcatctccatatatagctagagtgagacttctctgttgtttaaaagagaaaagttaagaaatggattgacaagttatataataagtgcctaatgaaatatttgataggccttcattttttatcaaaggatccatgaatgttgtgttgtccatgtatctcctacgtaatcctaactttatcatgcatggttacattttaatagaatacatatttttttatgactaattgaaatatatgatagt

SEQ ID NO: 132799 - DNA, 1839 bp, Zea Mays
gcgcgaggcagacagcgacgcagagagagacaaagcgggcaataaaggcagccgcgcgcgagcgagggaagggagcgaagcaaagcacatcacgagcccagcctgcgcctgcggagggagggggctcattaaagagggggcgcgagcgcgaccggccgcggggagcaagcagcgcgcgagagagacaggttgagatggcgatgccgtatgcctctctttccccggcaggcgccgccgaccaccgctcctccacagccacggcgtccctcgtccccttctgccgctccactccgctctccgcgggcggcgggctgggcgaggaggacgcccaggcgagcgcgaggtggccggccgcgaggccggtggtgccgttcacgccggcgcagtaccaggagctggagcagcaggcgctcatatacaagtacctggtggcgggcgtgcccgttccgccggatctcgtggttccaatccgccgcggcctcgactccctcgcaacccgcttctacggccaacccacactcgggtacggaccgtacctggggaggaaactggatccggagcccggccggtgccggcgaacggacggcaagaagtggcggtgctccaaggaggccgccccggactccaagtactgcgagcgccacatgcaccgcggccgcaaccgttcaagaaagcctgtggaaacgcagctcgcgccccagtcccaaccgcccgccgccgcagccgtctccgccgctccgcccctggcagccgccgccgccgccaccaccaacggcagcggcttccagaaccactctctctacccggccatcgccggcagcactggtggtggaggaggagttggcgggtccggcaatatctcctccccgttctcctcgtcgatggggggatcgtctcagctgcacatggacagtgctgccagctactcctacgcagctcttggtggtggaactgcaaaggatctcaggtacaacgcttacggaataagatctctggcggacgagcacaaccagctgatcgcagaagccatcgactcgtcgatagagagccagtggcgcctccccagctcgtcgttcccgctctcgagctacccacatctcggggcgctgggcgacctgggcggccagaacagcacggtgagctcgctgccgaagatggagaagcagcagccgccctcgtccttcctagggaacgacaccggggccggcatggccatgggctccgcctccgcgaagcaggagggccagacgctgcggcacttcttcgacgagtggcccaaggcgcgggactcctggccgggcctctccgacgagaccgccagcctcgcctcgttccccccggcgacccagctgtcgatgtccatacccatggcgtcctccgacttctccgtggccagctcccagtcgcccaacggtgagtcgcgtacgttcctgctggccacggaccgaaggtgaaaggttgttgctggtttactgataggagacaaccatgtctggtctctgcagatgactaatggtgcgtggatcgtcgcgttctggccctttgtctgtcttccctccagtcctccacccaccgcgcagtagtagctgcggaaacagcccatgctcctgtatatttgtcggtcattttccgtgtcagatctgtgtaccaaaccaagcggcggcggccgtcgtctctccccgcctccgcctcgcctcatgtgggtgggtgaacatgagaccgttttgcttaggctcaaagctttgtgtgaccccactgatcggttgtctgcgtactacctgaaagcctgctgcttttgtagcattactgtgacacatcgaccgaagaaaggcaggaacg

SEQ ID NO: 132800 - DNA, 1663 bp, Zea Mays
gcgcgaggcagacagcgacgcagagagagacaaagcgggcaataaaggcagccgcgcgcgagcgagggaagggagcgaagcaaagcacatcacgagcccagcctgcgcctgcggagggagggggctcattaaagagggggcgcgagcgcgaccggccgcggggagcaagcagcgcgcgagagagacaggttgagatggcgatgccgtatgcctctctttccccggcaggcgccgccgaccaccgctcctccacagccacggcgtccctcgtccccttctgccgctccactccgctctccgcgggcggcgggctgggcgaggaggacgcccaggcgagcgcgaggtggccggccgcgaggccggtggtgccgttcacgccggcgcagtaccaggagctggagcagcaggcgctcatatacaagtacctggtggcgggcgtgcccgttccgccggatctcgtggttccaatccgccgcggcctcgactccctcgcaacccgcttctacggccaacccacactcgggtacggaccgtacctggggaggaaactggatccggagcccggccggtgccggcgaacggacggcaagaagtggcggtgctccaaggaggccgccccggactccaagtactgcgagcgccacatgcaccgcggccgcaaccgttcaagaaagcctgtggaaacgcagctcgcgccccagtcccaaccgcccgccgccgcagccgtctccgccgctccgcccctggcagccgccgccgccgccaccaccaacggcagcggcttccagaaccactctctctacccggccatcgccggcagcactggtggtggaggaggagttggcgggtccggcaatatctcctccccgttctcctcgtcgatggggggatcgtctcagctgcacatggacagtgctgccagctactcctacgcagctcttggtggtggaactgcaaaggatctcaggtacaacgcttacggaataagatctctggcggacgagcacaaccagctgatcgcagaagccatcgactcgtcgatagagagccagtggcgcctccccagctcgtcgttcccgctctcgagctacccacatctcggggcgctgggcgacctgggcggccagaacagcacggtgagctcgctgccgaagatggagaagcagcagccgccctcgtccttcctagggaacgacaccggggccggcatggccatgggctccgcctccgcgaagcaggagggccagacgctgcggcacttcttcgacgagtggcccaaggcgcgggactcctggccgggcctctccgacgagaccgccagcctcgcctcgttccccccggcgacccagctgtcgatgtccatacccatggcgtcctccgacttctccgtggccagctcccagtcgcccaacgatgactaatggtgcgtggatcgtcgcgttctggccctttgtctgtcttccctccagtcctccacccaccgcgcagtagtagctgcggaaacagcccatgctcctgtatatttgtcggtcattttccgtgtcagatctgtgtaccaaaccaagcggcggcggccgtcgtctctccccgcctccgcctcgcctcatgtgggtgggtgaacatgagaccgttttgcttaggctcaaagctttgtgtgacccca

SEQ ID NO: 132801 - DNA, 1377 bp, Zea Mays
gcgcgaggcagacagcgacgcagagagagacaaagcgggcaataaaggcagccgcgcgcgagcgagggaagggagcgaagcaaagcacatcacgagcccagcctgcgcctgcggagggagggggctcattaaagagggggcgcgagcgcgaccggccgcggggagcaagcagcgcgcgagagagacaggttgagatggcgatgccgtatgcctctctttccccggcaggcgccgccgaccaccgctcctccacagccacggcgtccctcgtccccttctgccgctccactccgctctccgcgggcggcgggctgggcgaggaggacgcccaggcgagcgcgaggtggccggccgcgaggccggtggtgccgttcacgccggcgcagtaccaggagctggagcagcaggcgctcatatacaagtacctggtggcgggcgtgcccgttccgccggatctcgtggttccaatccgccgcggcctcgactccctcgcaacccgcttctacggccaacccacactcgggtacggaccgtacctggggaggaaactggatccggagcccggccggtgccggcgaacggacggcaagaagtggcggtgctccaaggaggccgccccggactccaagtactgcgagcgccacatgcaccgcggccgcaaccgttcaagaaagcctgtggaaacgcagctcgcgccccagtcccaaccgcccgccgccgcagccgtctccgccgctccgcccctggcagccgccgccgccgccaccaccaacggcagcggcttccagaaccactctctctacccggccatcgccggcagcactggtggtggaggaggagttggcgggtccggcaatatctcctccccgttctcctcgtcgatggggggatcgtctcagcagccgccctcgtccttcctagggaacgacaccggggccggcatggccatgggctccgcctccgcgaagcaggagggccagacgctgcggcacttcttcgacgagtggcccaaggcgcgggactcctggccgggcctctccgacgagaccgccagcctcgcctcgttccccccggcgacccagctgtcgatgtccatacccatggcgtcctccgacttctccgtggccagctcccagtcgcccaacgatgactaatggtgcgtggatcgtcgcgttctggccctttgtctgtcttccctccagtcctccacccaccgcgcagtagtagctgcggaaacagcccatgctcctgtatatttgtcggtcattttccgtgtcagatctgtgtaccaaaccaagcggcggcggccgtcgtctctccccgcctccgcctcgcctcatgtgggtgggtgaacatgagaccgttttgcttaggctc

SEQ ID NO: 132802 - DNA, 1413 bp, Zea Mays
ctctgaaagagtccaagcgagtgtcctcagtcctctcctcgactgctcccctccttccagagtcacggtgcctcgccgtccttccctgatctgacaacccgtttatcttgcccgggcggtccactccgacggctggcccgcccttctttaaccccgccaccccgatccagcccagccgcactccaacacggtagcagcagtcaacagactcccaccgcaatggccgcggcgctcctcttgctgctcgttccgcccgtcggcctactcgccgcgctcgcattcctcacgcggccccacgcccggatcgcgctcaaagacagccacgtcttcatcacgggcgggtccagcggcatcgggctcgccatggccacggccgctgcgcgggagggcgcgcgggtctccatcctggcccgcaaccttgcccgcctcgaggaggcgcgcgccgccatccagcgcgactcgggccgcgacgacgtcggcgtccacgcggccgacgtgcgggacgccgacgccgtggcccgtgctctccaggaggccggccccgtcgacgtcctggtctgcaaccacggcgtgttcgtgccgcaggagctcgagaggcaggacatggatgagatcaagtggatggtggacatcaacctcatgggcaccttccacctcattaaggccgcgcttcccgccatgaaggcacgcacccgcgagacgcggctccctgggtccatcgcgatcatgtcctcccaggccggccaggttggtatttatggttacactgcctactcagcgagcaagtttgctcttcgtggattgggtgaggcgttgcagcatgaggtcgtcggggacaacattcatgtctcgttgatattccctcctgacactgaaactccaggattggaagaggagcataagaggaggccagaattgacaaacatcatagcaggattgtctggtggaatgaaggccgacgatgttgccaagaaggctctggatggtatcaaatctgcaaaattcattgtcccatgcaatttcgagggcacaatgttagctgtagccactgctggtttatccccacagagctccgcattaatggcattcatagaggtgattggcacaggactcatgcggtttgcggcactttgtttccaatggaattggttctctaccatagagagctattatgccaagaacaagaagagccagtgataacacaaaccatacctggaccttagcggtccgtcatggtcgaagaagagtcccgttgtgtgtcacttcaggtcatatgaatgacagaagtttgatatcgtcatctcaactcttgtatcttccatgtttctgtaccatggtcaggttttcttttactttgtggtactcatgtaatgaacacataataacaatagctagaatgttaatgacaacttt

SEQ ID NO: 132803 - DNA, 1349 bp, Zea Mays
agtccaagcgagtgtcctcagtcctctcctcgactgctcccctccttccagagtcacggtgcctcgccgtccttccctgatctgacaacccgtttatcttgcccgggcggtccactccgacggctggcccgcccttctttaaccccgccaccccgatccagcccagccgcactccaacacggtagcagcagtcaacagactcccaccgcaatggccgcggcgctcctcttgctgctcgttccgcccgtcggcctactcgccgcgctcgcattcctcacgcggccccacgcccggatcgcgctcaaagacagccacgtcttcatcacgggcgggtccagcggcatcgggctcgccatggccacggccgctgcgcgggagggcgcgcgggtctccatcctggcccgcaaccttgcccgcctcgaggaggcgcgcgccgccatccagcgcgactcgggccgcgacgacgtcggcgtccacgcggccgacgtgcgggacgccgacgccgtggcccgtgctctccaggaggccggccccgtcgacgtcctggtctgcaaccacggcgtgttcgtgccgcaggagctcgagaggcaggacatggatgagatcaagtggatggtggacatcaacctcatgggcaccttccacctcattaaggccgcgcttcccgccatgaaggcacgcacccgcgagacgcggctccctgggtccatcgcgatcatgtcctcccaggccggccaggttggtatttatggttacactgcctactcagcgagcaagtttgctcttcgtggattgggtgaggcgttgcagcatgaggtcgtcggggacaacattcatgtctcgttgatattccctcctgacactgaaactccaggattggaagaggagcataagaggaggccagaattgacaaacatcatagcaggattgtctggtggaatgaaggccgacgatgttgccaagaaggctctggatggtatcaaatctgcaaaattcattgtcccatgcaatttcgagggcacaatgttagctgtagccactgctggtttatccccacagagctccgcattaatggcattcatagaggtgattggcacaggactcatgcggtttgcggcactttgtttccaatggaattggttctctaccatagagagctattatgccaagaacaagaagagccagtgataacacaaaccatacctggaccttaggtcagtcactcagttgcatgtaaataaagtttattatagtcgaccttactatgttgaccacctacaatttgatgtataagattcaaatgaaatttgaataaaattttagttttcctgccaaaacaaatcatacaa

SEQ ID NO: 132804 - DNA, 815 bp, Zea Mays
aaaatctgacggcgcgcggggagccaggaccaggagaccgagcgagtgctcatcgcagctcgggggcacgcgcagcagcagccagatcagcagcgctgcatccccgaccccgagtactcaaggagcgctagcgaggacgaagagcctcatcggacgccacaacaagggattcgcgcaacatctggaacagacggcagccgtttcacttcccttcctcagaggaggagtcgcagcagagacatgcagagccagcagcagctccaagggtccgaagcggtccaggctcccggtagaaagaagctgaaaaggccggccggtccgtcgggacgcgaggaacctgacgacggcggcggcggcgacgacgacgagccgccccgacgaagcaggaacacgaaggacgcgcagacgtcgacgtccgccgttcgtggcctgctgcgcgatttcttcgagcagcagctgcgcttggacgcgcagcgccaggagacgatggagaggagggcgcgggagcggctgttcttcgaagaccaatggcggcagtcgatgcagaggatagagcaggagaggctgatgctggagcaggcgtgggcggagcgcgaggagcagaggaggatgagggaggaggacagggcggagagaagggacgcgcttctcactaccttgctcaccaggctcctgcagggagacctctagtccatcgcagatccggcgagagattaggatagaaaatcaggatagattgtagttgactaggattgcttcgttcatatacttctttacatggaaataatgttagctgactgcaggtcaattgttaa

SEQ ID NO: 132805 - DNA, 2183 bp, Zea Mays
acatacccctggaagaatttgagcgagggaaacttgccagagacagaaaaggctgattgcttggcattagttgatttcttgagaggacttgttgagtttgatcctaataagaggtggtcaccgctgcaggtatttgccaatggcaccggtacattttcgtttttgagtataatactgtctttgtaaactggaatatatttcaatcctaatgactctaaactttatattattttgtttctatgggactaatttgtatcttgaagaatcattatatgttcttcacaaatgtgaaaacctattttaggcctcgtatcatccattcatcactggtgaagccttcactggtccttacgagcctgttcaggagaccccacgaattcctgttggacgtgctgcagtagttgaccacaatccaggaggaggtcacttgctgggtgctggtctttctcctcaggttggaagcattaacagatgcttacgatttaacaacgctttgcaaccaaatatgcctttttcatatggaagcagttgtggcagttttgggagccatggtagctttaacgataatgctggctttagctatggaagctatgattttaacagtgtcgacatatataattcaccaatggatccttctgggtttaatttacgttcacaacttggaggatcgtttctcggatctagcccacatattcgacgaagacctcatctctcacatggtggtggcattcggttaagccctggtggtccagggcatatgtctcttggggccagtccatcacaatttacaccgccaaattcccagatgcaaatcccaacaggtcctaatggaaggtatggtgcctctccttcaagaggtggacatggctcttcgttgggaaaggttgctgttgtaggccaatacaataggaggaggaatcagggttatccacctatgccaatgccaccacatgaacacacatctcaactgatccaggggcaccaaggagatggtgtcagtactgctcgctttggtgcatatgcccaaggaaattctacctacctacataatgcactccctaattctagtcattatagttggagatcgcaaaggggatctggcagtggtttacctttggacccttcttctagccgtggttcttttccacccaccaattactatggctttcctttacactccgatgcgtcagcagatacattgccctccacctcatcagtatcagatccagccgattgggatctcaactctagtgacaagtcactcctgcaagaggaccgaacactgtcagctgggttaagtgatcttcgcttgatagacgcaagtggccaaacaaacagatctagcagattggctcctttccaaagtcatgatattttaagttcaaacccttcgactatgaatcaaagaaatggacacctatttcatgcatcatctctgggagagagtacacatactccaggtcatgtcacattggatggatacgaacacacaacttattctcagcgaagtttcccaatctatcgtgggcaaccatttcagcagtacaacaacatgacttccagttacatccgaccgatgagggctcatcacaatggtcagcctgtctggtctaattataggctgacagaacctccaccaactacaatgggtgacggaatgctctggggagggaggggtggccattcgtttgcagcgagcggactgccacctacacttaggaaagattttgggagaatcttttagtcctgaatccggaggaatgccgaatgccaccaaattgatggcatcagttgtttgcatctgcaattccgggttggattatttgctgggggtgcctactggtattgcaatttgttgtgttcctccgatgtctcccaggatgttcggttcaaatgattatatggtacgggatatgattacagtgctcgttctttgctatacctgcacgatctagtagaaaaatgtcagttgtgctacttgatgcgaatcttgctagttcgaggtttgggagagtttttctgtctcggttattgtcttcctttctctattctatttttgacagagggttaagttcctgaaccttaacatggctaagactgaagtgaaggccacgtggtcgtggtgacatgatttcgttttcgtgatacttgaggagccgactatctgtttttaagcatctttc

SEQ ID NO: 132806 - DNA, 1394 bp, Zea Mays
ggggaagagaggggacgaagagggagaaggaactgggacttgccgcccccgcctccgaattccccactcctccaccaccgccaccactcaccccttgctccgctcggcctcctgaatccggcgtcgtcaagcaaccccactccttctgccgttatcagaaccctaaccgatcaatccgtccgattcccagctgccggtttcgcgttgggagcgccggagcaggggaggggcggagggtcggatcggcagccgcaggagcattgagcgatggctgccgtgtaggatgcagctggactccgccggccgccgcctagctgctgctgttgttgctgaagttccgatgcttcagcaaccgcgatcttaataggagcggagggtggagtaccggtggagtgggccggacggctggttgatctccgtgagctccagcgcctacgcactgggaggtggggaggtgattgccggaggcgtatggaggaacctgggagggagggggattcccccgggccgccgtgggcgccaagtgagtcctcagctttccgggcgttcgttacggcggtgggggagcgggcggtggcgtcgccttcaggctcggacaatggggattccgtctgctcaagcaacctccgcgccgtcaggaagagaccttttgttgcaagattaaccacatatatcatccaaacttttgaaaaatgcaatcctgagtttaagtactcagagtcactaaaccccaagcgctttctcaccaatcccgcagttcctgttcacaaccatggtcttgacaatgcaaactctgatctcatattgtatgtcaacctggaactgcttaataaaaagtcaagccggaggtatgttgtccaagaaatgcttggccaaggtacctttggacaggttgcgaaatgctgggatgcagaaactaacagttatgttgcagtgaaggttataaagaatcagcctgccttttaccagcaggctatcatggaggtctctttattaagattgttaaatgagaaatttgatcctgatgatgaacatcacattgtccggatgctggattttttcctctaccaaaaccatttgtgtatagcctttgaaatgcttggtaacaacctgtatgagctgttgaaaaggaatagtttaagaggtttgcaaatgaaatatgttcgaactttctcaagacagatactggatgccctgattatcatgaaagatgctggcattattcattgtgatctaaaaccagaaaacatccttatagctccaactgtaaaaacagcagttggagtgaaagtaattgattttggatcagtgtgcatggagggtaaaaccatttattcatatattcagagccgttattacaggtctccagaagtacttcttggttatccgtatcc

SEQ ID NO: 132807 - DNA, 120 bp, Zea Mays
cttactcaattttatgggctagtttgagaattctaatttttcaagagatttctatttttctaagagaaaatgaacaaatttttattagtaaaatgaaaatctcttgaaaaataaagtttc

SEQ ID NO: 132808 - DNA, 2334 bp, Zea Mays
cacgtcctgctccgtccgaatcgctactccgccgcgcttctcatcaccgtcaagagatagtcagacagttccagccccctttccacacgcacactcctctcccttcctctcctccgcttccatccctgggctgtgcgctactactccccctgctggccgctgctctgctctcacgcatgttttcacatccaagcgcctgcccctcgccctcgccgccacagtggtaacccgatccatgccgggcggcggccgctgacttgctgctgttggcttcaacggccgcaggcaaagttactgctggtagcgctagcgcggcgcggcggcggcggcgtaggaggaggggtcggcggcggagatgaggatgaagacgctggcgtgctgccggcggcggcctcaagacttcagcatcgatatggaccaagagcccgacagggtggtgacatataatggcctcgagacctgcattatcaacagttccacctatgacgatgacagtggcatcagtgcaacaacaggcggagatggctgtatcaccactgattcccttgatgatgaagtctctagttgctctagtaaagatgcttctggttcttccttcacttcacacagtcttagcaagcaggaggagcattcactagatgagttgggtacacccatggcaattcatctactccctttcaaagggaagaaaacaatcacatataccttgagtgcttcagatattgaaaacatgaaggaaaaatttgcaaaactattgcttggtgatgatacttcaggaggagctaggggcgtttgtgtggctctggccttgtctaatggcataatcaatctctctgcaactgtctttggagaactctggaagctggaaccactgtgcgaagataaaaagatcaggtggagaaaagaaatggactggttgctgtctcctacaacttatatggttgagctggttccaacaaagcaaagcggagcagatggatgtacatttgagattatgactccaaaggcccgctcagatgtccatgtgaaccttcctgcccttcagaagcttgacatgatgctcattgaagtaatggactcaatgatagatacagaattctggtatgaggagagtggcagcagagctgatggtcgggggaaaattacaggtccaaggaagagtaaaaagtggtggctcccgtctcctcgtgtccctgagcaagggctatctcaattccagcggaaaaggcttgtttttcaggctaagcttgttcaccagatcctcaaagccgcaaaatccatcaacgaacaagtcctgtcccatatgcctattccggccgctgtcatggatgcccttccgaagtctgggagggctagcttgggtgaagatttgtatcaggctataaccacagattatattcctgtagaggaaatatttgtttcgctcagtttgaaaaccgagcatagtgtgctcgagactattaaccggttggagggcgccgtgtttgcatggaaccaaagaattctggaggaaagaagcaagaggtccccaggacgccattcctggagcttcatgaaggatagctcgtcggaagttgacaagatgtccgcatgcatcgaaagggttgacgctctcgtgcagcttctgaaatccagatatcccaacctgcccccgacttttatagatgttttaaaggtccaatacaacgtggacgtgggccatgcaatcgtggaggcctacgctagggttcttgttggggtagcgttcagcatattgtcgcgcgtggcggagatactgctggaggatgacctgatcaagaagccgaacacccccatgaccacgctgaagttcgacctctcctctgacgtgtacttggccggcatcaccgagacgccaccgggacacatccggcggtccctgatggaccagatcagcatggtggacgggcgctacgatgccgttgttggcaagaagaaagaagtgaagcagctgaggtggtgagggcagtcagcagctgttgtgtgaatcttttgccgatgtacagggtgatgcggggcccagtgtccgctccacaaggttacctttagcaaatagcgcgatgtaatgtatttttgcgacgagtttatagcgtactgtactgtaagatcagcattaggcgagtcctgcctgtcgaagtctccgggtgttgctgttgcgtctgaacgatctgacgatgctcttggtcagcctctgctgcttttcttgctggcaccttgatgatgatagcatgtcgatgacgagaccttgcttgagtgcttgacgggttcatgctgacgcgtcttccgttctcgaagcgcggtccgtgtttctggggc

SEQ ID NO: 132809 - DNA, 2273 bp, Zea Mays
cacgtcctgctccgtccgaatcgctactccgccgcgcttctcatcaccgtcaagagatagtcagacagttccagccccctttccacacgcacactcctctcccttcctctcctccgcttccatccctgggctgtgcgctactactccccctgctggccgctgctctgctctcacgcatgttttcacatccaagcgcctgcccctcgccctcgccgccacagtggtaacccgatccatgccgggcggcggccgctgacttgctgctgttggcttcaacggccgcaggcaaagttactgctggtagcgctagcgcggcgcggcggcggcggcgtaggaggaggggtcggcggcggagatgaggatgaagacgctggcgtgctgccggcggcggcctcaagacttcagcatcgatatggaccaagagcccgacagggtggtgacatataatggcctcgagacctgcattatcaacagttccacctatgacgatgacagtggcatcagtgcaacaacaggcggagatggctgtatcaccactgattcccttgatgatgaagtctctagttgctctagtaaagatgcttctggttcttccttcacttcacacagtcttagcaagcaggaggagcattcactagatgagttgggtacacccatggcaattcatctactccctttcaaagggaagaaaacaatcacatataccttgagtgcttcagatattgaaaacatgaaggaaaaatttgcaaaactattgcttggtgatgatacttcaggaggagctaggggcgtttgtgtggctctggccttgtctaatggcataatcaatctctctgcaactgtctttggagaactctggaagctggaaccactgtgcgaagataaaaagatcaggtggagaaaagaaatggactggttgctgtctcctacaacttatatggttgagctggttccaacaaagcaaagcggagcagatggatgtacatttgagattatgactccaaaggcccgctcagatgtccatgtgaaccttcctgcccttcagaagcttgacatgatgctcattgaagtaatggactcaatgatagatacagaattctggtatgaggagagtggcagcagagctgatggtcgggggaaaattacaggtccaaggaagagtaaaaagtggtggctcccgtctcctcgtgtccctgagcaagggctatctcaattccagcggaaaaggcttgtttttcaggctaagcttgttcaccagatcctcaaagccgcaaaatccatcaacgaacaagtcctgtcccatatgcctattccggccgctgtcatggatgcccttccgaagtctgggagggctagcttgggtgaagatttgtatcaggctataaccacagattatattcctgtagaggaaatatttgtttcgctcagtttgaaaaccgagcatagtgtgctcgagactattaaccggttggagggcgccgtgtttgcatggaaccaaagaattctggaggaaagaagcaagaggtccccaggacgccattcctggagcttcatgaaggatagctcgtcggaagttgacaagatgtccgcatgcatcgaaagggttgacgctctcgtgcagcttctgaaatccagatatcccaacctgcccccgacttttatagatgttttaaaggtccaatacaacgtgaatggcaactggatgcaggacgtgggccatgcaatcgtggaggcctacgctagggttcttgttggggtagcgttcagcatattgtcgcgcgtggcggagatactgctggaggatgacctgatcaagaagccgaacacccccatgaccacgctgaagttcgacctctcctctgacgtgtacttggccggcatcaccgagacgccaccgggacacatccggcggtccctgatggaccagatcagcatggtggacgggcgctacgatgccgttgttggcaagaagaaagaagtgaagcagctgaggtggtgagggcagtcagcagctgttgtgtgaatcttttgccgatgtacagggtgatgcggggcccagtgtccgctccacaaggttacctttagcaaatagcgcgatgtaatgtatttttgcgacgagtttatagcgtactgtactgtaagatcagcattaggcgagtcctgcctgtcgaagtctccgggtgttgctgttgcgtctgaacgatctgacgatgctcttggtcagcctctgctgcttttcttgctggcaccttgatgatgatagcatgtcgatg

SEQ ID NO: 132810 - DNA, 2115 bp, Zea Mays
cacgtcctgctccgtccgaatcgctactccgccgcgcttctcatcaccgtcaagagatagtcagacagttccagccccctttccacacgcacactcctctcccttcctctcctccgcttccatccctgggctgtgcgctactactccccctgctggccgctgctctgctctcacgcatgttttcacatccaagcgcctgcccctcgccctcgccgccacagtggtaacccgatccatgccgggcggcggccgctgacttgctgctgttggcttcaacggccgcaggcaaaggggtggtgacatataatggcctcgagacctgcattatcaacagttccacctatgacgatgacagtggcatcagtgcaacaacaggcggagatggctgtatcaccactgattcccttgatgatgaagtctctagttgctctagtaaagatgcttctggttcttccttcacttcacacagtcttagcaagcaggaggagcattcactagatgagttgggtacacccatggcaattcatctactccctttcaaagggaagaaaacaatcacatataccttgagtgcttcagatattgaaaacatgaaggaaaaatttgcaaaactattgcttggtgatgatacttcaggaggagctaggggcgtttgtgtggctctggccttgtctaatggcataatcaatctctctgcaactgtctttggagaactctggaagctggaaccactgtgcgaagataaaaagatcaggtggagaaaagaaatggactggttgctgtctcctacaacttatatggttgagctggttccaacaaagcaaagcggagcagatggatgtacatttgagattatgactccaaaggcccgctcagatgtccatgtgaaccttcctgcccttcagaagcttgacatgatgctcattgaagtaatggactcaatgatagatacagaattctggtatgaggagagtggcagcagagctgatggtcgggggaaaattacaggtccaaggaagagtaaaaagtggtggctcccgtctcctcgtgtccctgagcaagggctatctcaattccagcggaaaaggcttgtttttcaggctaagcttgttcaccagatcctcaaagccgcaaaatccatcaacgaacaagtcctgtcccatatgcctattccggccgctgtcatggatgcccttccgaagtctgggagggctagcttgggtgaagatttgtatcaggctataaccacagattatattcctgtagaggaaatatttgtttcgctcagtttgaaaaccgagcatagtgtgctcgagactattaaccggttggagggcgccgtgtttgcatggaaccaaagaattctggaggaaagaagcaagaggtccccaggacgccattcctggagcttcatgaaggatagctcgtcggaagttgacaagatgtccgcatgcatcgaaagggttgacgctctcgtgcagcttctgaaatccagatatcccaacctgcccccgacttttatagatgttttaaaggtccaatacaacgtggacgtgggccatgcaatcgtggaggcctacgctagggttcttgttggggtagcgttcagcatattgtcgcgcgtggcggagatactgctggaggatgacctgatcaagaagccgaacacccccatgaccacgctgaagttcgacctctcctctgacgtgtacttggccggcatcaccgagacgccaccgggacacatccggcggtccctgatggaccagatcagcatggtggacgggcgctacgatgccgttgttggcaagaagaaagaagtgaagcagctgaggtggtgagggcagtcagcagctgttgtgtgaatcttttgccgatgtacagggtgatgcggggcccagtgtccgctccacaaggttacctttagcaaatagcgcgatgtaatgtatttttgcgacgagtttatagcgtactgtactgtaagatcagcattaggcgagtcctgcctgtcgaagtctccgggtgttgctgttgcgtctgaacgatctgacgatgctcttggtcagcctctgctgcttttcttgctggcaccttgatgatgatagcatgtcgatg

SEQ ID NO: 132811 - DNA, 1976 bp, Zea Mays
gcacgctgccccgtgattattgcgcttgggagtaccggtagacagtgagcgttactgctggtagcgctagcgcggcgcggcggcggcggcgtaggaggaggggtcggcggcggagatgaggatgaagacgctggcgtgctgccggcggcggcctcaagacttcagcatcgatatggaccaagagcccgacagggtggtgacatataatggcctcgagacctgcattatcaacagttccacctatgacgatgacagtggcatcagtgcaacaacaggcggagatggctgtatcaccactgattcccttgatgatgaagtctctagttgctctagtaaagatgcttctggttcttccttcacttcacacagtcttagcaagcaggaggagcattcactagatgagttgggtacacccatggcaattcatctactccctttcaaagggaagaaaacaatcacatataccttgagtgcttcagatattgaaaacatgaaggaaaaatttgcaaaactattgcttggtgatgatacttcaggaggagctaggggcgtttgtgtggctctggccttgtctaatggcataatcaatctctctgcaactgtctttggagaactctggaagctggaaccactgtgcgaagataaaaagatcaggtggagaaaagaaatggactggttgctgtctcctacaacttatatggttgagctggttccaacaaagcaaagcggagcagatggatgtacatttgagattatgactccaaaggcccgctcagatgtccatgtgaaccttcctgcccttcagaagcttgacatgatgctcattgaagtaatggactcaatgatagatacagaattctggtatgaggagagtggcagcagagctgatggtcgggggaaaattacaggtccaaggaagagtaaaaagtggtggctcccgtctcctcgtgtccctgagcaagggctatctcaattccagcggaaaaggcttgtttttcaggctaagcttgttcaccagatcctcaaagccgcaaaatccatcaacgaacaagtcctgtcccatatgcctattccggccgctgtcatggatgcccttccgaagtctgggagggctagcttgggtgaagatttgtatcaggctataaccacagattatattcctgtagaggaaatatttgtttcgctcagtttgaaaaccgagcatagtgtgctcgagactattaaccggttggagggcgccgtgtttgcatggaaccaaagaattctggaggaaagaagcaagaggtccccaggacgccattcctggagcttcatgaaggatagctcgtcggaagttgacaagatgtccgcatgcatcgaaagggttgacgctctcgtgcagcttctgaaatccagatatcccaacctgcccccgacttttatagatgttttaaaggtccaatacaacgtggacgtgggccatgcaatcgtggaggcctacgctagggttcttgttggggtagcgttcagcatattgtcgcgcgtggcggagatactgctggaggatgacctgatcaagaagccgaacacccccatgaccacgctgaagttcgacctctcctctgacgtgtacttggccggcatcaccgagacgccaccgggacacatccggcggtccctgatggaccagatcagcatggtggacgggcgctacgatgccgttgttggcaagaagaaagaagtgaagcagctgaggtggtgagggcagtcagcagctgttgtgtgaatcttttgccgatgtacagggtgatgcggggcccagtgtccgctccacaaggttacctttagcaaatagcgcgatgtaatgtatttttgcgacgagtttatagcgtactgtactgtaagatcagcattaggcgagtcctgcctgtcgaagtctccgggtgttgctgttgcgtctgaacgatctgacgatgctcttggtcagcctctgctgc

SEQ ID NO: 132812 - DNA, 430 bp, Zea Mays
cacgtcctgctccgtccgaatcgctactccgccgcgcttctcatcaccgtcaagagatagtcagacagttccagccccctttccacacgcacactcctctcccttcctctcctccgcttccatccctgggctgtgcgctactactccccctgctggccgctgctctgctctcacgcatgttttcacatccaagcgcctgcccctcgccctcgccgccacagtggtaacccgatccatgccgggcggcggccgctgacttgctgctgttggcttcaacggccgcaggcaaaggtcgtcatcgctttccggcagcccgtttcattgggaaagcgacgacgaggcgaggcgaggcgacggccgcgccctgccccagccgtgccgcactaaccgagtaaccgaccgacgcttgccgttgcagccccaccacgcg

SEQ ID NO: 132813 - DNA, 1190 bp, Zea Mays
tcggcctattccaccggtcgtcgcctttttgctgctgcgcgacgccgacgcggccgtgcgagtgcggcgcagcgacggtcgagccaagctcactactccaaattcgtgtcgtagtcgtaggaggaatgtgggagagaatacaggggagaagccgagagccgaacgaagagaccgagcccccgccgcccgcggcgtctgttcctttcgtgccgcttcgtggtggcgccgtggcgcccaccaccacctcacctctcagtctctcaccacctatagcaataccacgagtccacgatccatggaatagactagactacaccgctcggccggtgacgacgacggcgacagccgacagtctatccccaactacgctctgcaccagcgccttatccgccgcctggggtttgttctggcgcggtggcagttgataaaggcgggagggattagagcaaggagagggatcggcgatgagcttcgcggatctggaggcgggggctctcagggcgcccctcgggaggaaagcgagaggggggccaaacgacgcgagagcgctcgtcttccagataaccaccgcggtggcctcgtaccgccgcctcctcaactcgctcggcacgcccaaggacaccatcacgcttcgtgataacctgcataagactagtcagaacatccttcaattagcaaaggatgcgaaagataagctccaaaaggctgctgaagcagacaagagcactgatacaagtgcagacaagaggatagctgatatgaagcttgccaaagattttgctgccacaatggaggagttcaggaaacttcagagtcttgcgattcagagggagacggcatataagccagttgttccacagaatacgcagtcaaactattctacagatgagcgaagttccgaatctggtaatatgcctgagcagcgtgcattactcgctgaatcaatgagacaagaggtgctgcaattggacaatgaaattgtttacaatgaagctataattgaggaaagggagcaagccattcaagatatccaacagcagattggtgaagtacatgaagtgttcaaagatcttgctacccttgtgcattcccaaggaatcataatcgaggaaatcgacatgaacattgaaaaataagcagcagtgaccaaagaggcaaagacacacctagctttaaaaaggcacgactca

SEQ ID NO: 132814 - DNA, 409 bp, Zea Mays
ttccaacaaacaaattcaatatacgcgtaaccatctctttgctttatttgatcggggtacttacagggttacaaaaatcacaccaagcgaacttccgaaatccaaagaagcaaaagaacatcagtgttcactcaaggcaagccatgaaaaaaaggactcacacatgacatgacatggcaaagagaaccgctcactcacaagccatgaaatgtaaaggggggggggggggcttctaaaatccgttggtgacattttttttggcacacgatatgatggttagataagaaccacgaacaatcttcaattctgaactccgcggaatagctctgtaagagaaaaggttgcatgtctcaagctgccaaaactataatcacaacgagcagcacgaccccaaatatgaccataagca

SEQ ID NO: 132815 - DNA, 1607 bp, Zea Mays
atctttgcaatttttttttttgcaatgatcgcttagcgtcatttacatgttagacgatcgtgtcagtaagaggacagtaaacggtaatgtatgtaccctctgtcgcggctgctaaatatccaaccaaccagcggtatatccataatccatccgcccccccgcggtcccacccgtcgggtccggcggcgagcgcctgccactttccgttgtccacgcgggcgtggccttttgcagccggaacgagcgttgccgctcacccgccgcctccggttggcccgccccgcgccgcgcccctgccactgccagcctgcctgcctgcttgcctcattgcctggatcgcccgcccggttgttccgcgtccgccgacgccgcgtcgacacgtatcctcgcgcgcgtcgccggtgacgacgcgggcgttgtcgccatggcccccgcggccgattcggtcgcgaaggtgaggccgagggtgatgagcgccgtgacgacgaccagggccgccgcgccgccgaacacgccgctcctggcgacgtagcagtcgccgtccagccacccgcgcccgtaccgctgcccgtggttcatgctcgcggccgtcgccagcaggaccacggccaccgcgaagctcagcctgcagcaagcacccgcgcaacaacaacaccggacgacggaattgagttcactcctagtcctagctcatgtgcgctggaaagaatcgcgcccgcccggggtcctgtcgccacgatcatttgtttttgtatacgtaccatgagagggccaggagggcgacgaacgcgacgcgccctcgggcggcggagctctgcctcttcttgggctcggcggcgcacgcggtgctcaccgccgccgtggtgcccacgagctgcgccacgaagaggaaggcgatggcggcgacgcccagctcgaacgcggagctcctgggcagcgagcagaggctgccgtccagcttcatgtccttctcctgcgacacgaacgaacccctcagatccgggaacgcgagacgaagagcgcggagcaggggagggcaaccgtaccttgaccttgcggaattccgcggcgagggagcaggagaaggcgacggcgcagaggagcacgacgatgccacagatggcggcgcggcaggacggcccgctgctccccttctccatcgcgcgctcaactccgtggttgcccacctaatccgactagtaattcaattccgcgcgcgggctgtctgctctgctgcctatctcgacgtcttagcgaaaaataattgctcgtgtcatctgaacctatctctacgtataaatgaaggaatttccacgaacaggtcaccgtgagacggcggcgaatactaggagcggagcggagcggagcgttgaatcaaccacggttggtgggttgcggaagatgattgaagaggaaagagagagagagagagagagagagagagagagagagagagagagagatgcaggggagataagtcctgacctggacgctgaacaatcacatggacacgcccactcgcatgctagtagtttagctattttatcgtggcgtaatcgaaggcggggagaggggtgcggggactggaggaagaagaagagggaatc

SEQ ID NO: 132816 - DNA, 2315 bp, Zea Mays
ccaccccaacaccccatctcatctcttgctcctcgtccgtagttgcagttgcagtgtcctcggccgcctctagtcctagccgtttactccttcctttcaccgcatcaagcagagagcaagcgaggcaagagccatgggcgcctttctgctcttcgtctgtctcctggcgccggtcgtcgtgctcgcctgcgccgtccgcggcaggaagcggcgggcgtcctccgcggcggcgggcggcaaggcgctgccgctgccgcccgggtcgatggggtggccgtacgtgggcgagacgttccagctctactcgtccaagaaccccaacgtgttcttcgcccggaagcagaaccggtacgggccaatcttcaagacgcacatcctgggctgcccctgcgtgatggtgtccagcccggaggcggcgcgcttcgtgctcgtcacgcaggcccacctcttcaagcccaccttcccggcgagcaaggagcgcatgctggggccgcaggccatcttcttccagcagggcgactaccacgcccacctccgccgcctcgtctcccgggctttctcccccgaggccatccgcggctccgtgccggccatcgaggccatcgcgctgcgctcgctcgagtcctgggacggccgcctcgtcaacaccttccaagagatgaagctgtacgcgctgaatgtggcattgctgtccatcttcggcgaggaagagatgcggtacatagaggagctgaagcagtgctacctgaccctggagaaggggtacaactcgatgcccgtgaacctgccgggcaccctgttccacaaggccatgaaggcccgcaagcgcctgggcgccgtcgtggcccacatcatcgaggcccggcgcgagggcgagcggcagcgcgggagcgacctcctggcctccttcctggacgaccgcgaggcgctcaccgacgcccagatcgccgacaacgtgatcggcgtcatcttcgccgcccgcgacaccaccgccagcgtgctcacctggatggtcaagttcctcggcgaccaccccgccgtcctcaaggccgtcatcgaggagcagcaggagatcgcgcggtccaaaggctcctccggcgagcccctgacgtgggcggacaccaggcggatgcgcacgacgagccgtgtgatccaggagacgatgcgggtggcgtccatcctgtccttcaccttccgggaggccgtggaggacgtggagtaccaagggtacctgatccccaagggctggaaggtgatgcccctgttccggaacatccaccacagccccgaccacttcccctgcccggagaagttcgacccctcccgattcgaggttgctcccaagcccaacacgttcctgccgttcggcaacgggacccactcgtgcccgggcaacgagctcgccaagctggagatgctcgtgctcttccaccacctcgccaccaagtacaggtggtccacctccaagtccgagagcggcgtgcagttcggccccttcgcgctgccgctcaacggcctgcccatgaccttcgtccgcaaggactgatgagccgccgacagatgtgtggatcgtggacggagccacaccaaaaccacggcaggccgacggaaccaaaccaaagccaacaacaaacaggcggatggatatggtatggcggtatatgctagctagtactactataggagccgcgaaaaccgcttccgggatttggcgttgcggcggtcgccatcggacgggacggggacaggcatcaggcaagcatgggatgatcacagaggaaagaaaaaaaaagataacggtgtacagattcttcttcagctagtaggaccggatcccaagaagccggaagaggagaccaaacacaaaattaggcctagccacgttggtgtcactcggtgtaagctactccagtaggcatcagatggcccagcgccacaaagaagtggcgcttagttgtaaaaccaaaccccccttttttctccatcgtcttctttttcttccccccttttcagattttttataagctataagctagccagacaacacctgtaggagaagaataagggaaaccataaaagaaagagagggaggccctgattgggattgtaagctagctaggttgtccgcctgaaagcaggctggcagctaggcacaataatccatggacggatggatggattggatgggtcgccggagtcaaaaggaggccacgtcgtcttccccgcaggcgcagccaaggactacggcccgggacggcgaccccgccttgtatttgtttcgtgatttcgtccaatgcaaaaaagacagtgactgc

SEQ ID NO: 132817 - DNA, 997 bp, Zea Mays
ccaccccaacaccccatctcatctcttgctcctcgtccgtagttgcagttgcagtgtcctcggccgcctctagtcctagccgtttactccttcctttcaccgcatcaagcagagagcaagcgaggcaagagccatgggcgcctttctgctcttcgtctgtctcctggcgccggtcgtcgtgctcgcctgcgccgtccgcggcaggaagcggcgggcgtcctccgcggcggcgggcggcaaggcgctgccgctgccgcccgggtcgatggggtggccgtacgtgggcgagacgttccagctctactcgtccaagaaccccaacgtgttcttcgcccggaagcagaaccggtacgggccaatcttcaagacgcacatcctgggctgcccctgcgtgatggtgtccagcccggaggcggcgcgcttcgtgctcgtcacgcaggcccacctcttcaagcccaccttcccggcgagcaaggagcgcatgctggggccgcaggccatcttcttccagcagggcgactaccacgcccacctccgccgcctcgtctcccgggctttctcccccgaggccatccgcggctccgtgccggccatcgaggccatcgcgctgcgctcgctcgagtcctgggacggccgcctcgtcaacaccttccaagagatgaagctggtgggttggcttggcttggctatgcggctatactctgttatgctctgttctttcctccatcctcagttgctcatcctgttcatcttccgcgccgcgccgcctgcagtacgcgctgaatgtggcattgctgtccatcttcggcgaggaagagatgcggtacatagaggagctgaagcagtgctacctgaccctggagaaggggtacaactcgatgcccgtgaacctgccgggcaccctgttccacaaggccatgaaggcccgcaagcgcctgggcgccgtcgtggcccacatcatcgaggcccggcgcgagggcgagcggcagcgcgggag

SEQ ID NO: 132818 - DNA, 2404 bp, Zea Mays
gatttgtttgctttaatttttttttcctttacacatgcctttttcaacatataaaatgtagcactccaaaatgtctccgagtcccaaaatatatatgcgctttctgcagcgtattttcacgacaaggatgaaccacaatatctatctatctatgaatagtatcttccacttcctagatcctcaggtgctaaggctatatatagtcacatatatatgccacatcagaagcgcttctttctatcacacaaatttggtgagcagattcatccaagtctatacacatcgatctacaacaagttgcagaatggaaagaacactgatcacttctaacctctccatgagtgcacatgcttcaagatcgtcccggagggttcactacatctctcctgcggcctctgctgctgcacacaactccagctacaggaagaagaagaagaacgccccgtctccgccgccgtcggccgccgcaactgacaccgttgtcatctcccctcctgccactgacaatgttcagtccactgctccgaagcaggccggccgacaggagcttgaagagctcgtggccgccaagactaacacttcaagaattgctactgcaagaacaagtgcgtcgagccagtctcgggctaagcttcgccgccggcctgccccggcaatcacgtccctgccgatggcgttctgcagcgcgttggaggaggcgatcaacacgttcgtcgacccgccggtgctgcgaccgtccgtggacccgcggaacgtgctgtcgaccaacttcgcgccagtggacgagctgccgccgacgccctgccccgtcgtgcgcggcgcaatcccgcgctgcctcgccggaggggcctacatccggaacgggcccaacccccagcacctcccgcgtgggccgcaccacctcttcgacggcgacggcatgctgcactcgctcctcctcccgacggcggagtcgccgtcgtcggaccccgtcctgtgctcgcgctacgtgcagacgtacaagtacctcgtggagcgcgacgcaggagcgccggtcatgccgaacgtcttctccggattccacggcgtggctgggctggcgcgcggcgccgtcgtggcggccagagtactcactgggcagatgaacccagccgagggcgtggggctcgctaacaccagcctcgtcttcttcggcggccgcctctacgcgcttggcgagtcggatctcccgtacaccgtgcgtgtcgacccggccaccggcgaggtgaccacgcacggccggtgcgacttcggcggccgtctcttcatgggcatgaccgctcacccgaagaaagaccccgtcactggcgaggtcttcgcgttccggtacggccccgtgccgccgttcgtcacctacttccggttcgaccgggccgggaacaagggccctgacgtgcccatattctcagtgcggcagccgtcgttcctgcatgacttcgccgtcacggagaggtacgctatcttcccggagatacagatcgtcatgcagcccatgggcatggtgacgggcggcgcgcccgttgggtctgacgccggcaaggtaccccggctcggcgtgctccccaagtacgccacggacgagtcggagatgcggtggttcgaggtgccggggttcaacataatgcactcgctgaacgcgtgggaggaggccgacggcgaggagctagtgctggtggcgcccaacgtcctgtccctggagcacgcgctggagcgcatggagctcgtgcactcctgtgtcgagaaggtgcgcatcaacctgcgcacgggtgccgtgtcgcgcacccctctctcggcagagaacctcgacttcggcgtaatccatccgggataccttggccggcgcaaccggtacgggtacctcggcatcggcgaccccatgccgaagatcgccggggtggccaagctggacttggaccgcgccggcacgggcgactgcacggtggcgcggcgcgtcttcgggcccgggtgcttcgcgggggagccgttcttcgtccccgacgacgtggaggggaatagcaacgaggacgacggctacttggtgtgctacgtccacaacgagcggaccggcgagaaccagttcgtggtgatggacgccaggtcggcgcagctggacatcgtcgccgaggtgcagctgcccgcgcgcgtcccctacggcttccacggcatctttatcacgcaggccgagctccaggcgcagcagcaatgatcaaagcacaggaatccaatccaagagaaacacgccgctggatactgaatagattgtagcaagaacaactctaggccacatagcattcacgaatacgaactatcttatattgcaaatgtagcagaacccaaagaaagggttcatgagtaaaaagtatatgaaatcacaaagattttatgg

SEQ ID NO: 132819 - DNA, 2052 bp, Zea Mays
aaaaatcgcgcaccttcccctcccctacccctcgtctgcccctgttacctcgcgcggttggctgcgccagcgaggctcgtatcgccctcctcctcggctcctcgcgccgcttacttctattctattttgcccggtcccataaattcgaatccaaacgcgcgaccatcgccgctgcggccgtgggaaaggaaacacagaaaaaggacaacgccgtcgtctcttcctcgcaccagcctcccgctagggtttcccctcttctcggtggaggcgccgcgcctccgggacctggatcctatcaggtccacgctgatgccagcgaggtgcagccgtctttgattcccctcctgtagctgcatcctcatgccgaccatcacgcactacgtgctggatcccttcctcgagacagggtcgcctgcgcaggccgagaaagccacgcccaagccgccgccctcgcctccagacaaggccacacctgtaccggtggctcctattagggcacagacgtcgccggcatcactctatgccacgcctgagagcaccaccttgcccgactcaccttcctcgttccccgggacctggtcgccgtacattatcaaccataagaggcggggggcctcccttgccaagaccgttcctcagggtgacgttggaagtgagggcagccagccaaagctcccagtgatactgcctgctctgcctaaagggggtgaacccactgcagtggaggagcctgagtttgcgtttcagcaatcagggaatgatcaagctgaaggtgacagtggtgtggacgaggcccccatcaatgggaaaaatgaaatgctgctgaagggcaagggacctgtgacagccaaaaatgagcacgagcagcctgagtttgagtttcaccgtggaaatcttgaagcactagtgaggcctgttaatgttggaaggcctttgattggcggagcacccaaaaatgatgagagtgacaccttccttgaacttcaggattccatgagtgtggctagcaatactgaaactgatgatgctggcacccaagagtggtggtggaaaccgagttcccctcttgggatctctgttggcacaccctgtgctgaattctatgatgcatttgaagaaatatcaagtgatggtggaactcgatcttcacgggccatggatgatgacctccgtgaaatgaggttaagcctgttgaccgaaattgagaggaggaagcaagcagaagaaacacttgagatatggcagaaggaatggaagaagctgagtcaccacctatcacatgttgccttatcacttccatctccaagtatagctgaggatactgatgattcaagcgtcgatcctggtgctgagttgtgccagcaaataactgtttcacaacttgtagctgctgctatttcccaggattttgctcgtgctgaagttgcttcagagatggaagccgtgattgccacaaagaacttcgagattgcaaggctgtcggatagggtccagtactatgaagctgcaaacagggaaatgtcccaaagaaaccaagaagctatcgagacgtcaaggcaacaacgcaaggagcgtaagaagcgacagaagtggttctggggttcagttgggcttgcagtcacccttggtgccacggccattgcctggtcttatctaccttcatcgcagccccgagctagtgcagattcaaatagtaccgtcagtgactagagctaggatgaagatactccctccgtttctttttatttgtcgctggatagtgtaaaattgcactatccagcgacaaataaaaagaaacggagggagtatctcatttcagaagcctaacaaacctctaactatactcctagaggagaaaaaaaaaacgttgtataagttctcttttggtgatcgtccatgatcgctacaatcttcatttgctgctttgtatgtaaaaatgttgggtgggccatctccgtcaggattggctccattccaatcaccgtaaatctctgcatagatgattcatggttgagcaaataatacaaagggatgtggatatggttagtaatc

SEQ ID NO: 132820 - DNA, 1316 bp, Zea Mays
aaaaatcgcgcaccttcccctcccctacccctcgtctgcccctgttacctcgcgcggttggctgcgccagcgaggctcgtatcgccctcctcctcggctcctcgcgccgcttacttctattctattttgcccggtcccataaattcgaatccaaacgcgcgaccatcgccgctgcggccgtgggaaaggaaacacagaaaaaggacaacgccgtcgtctcttcctcgcaccagcctcccgctagggtttcccctcttctcggtggaggcgccgcgcctccgggacctggatcctatcaggtccacgctgatgccagcgaggtgcagccgtctttgattcccctcctgtagctgcatcctcatgccgaccatcacgcactacgtgctggatcccttcctcgagacagggtcgcctgcgcaggccgagaaagccacgcccaagccgccgccctcgcctccagacaaggccacacctgtaccggtggctcctattagggcacagacgtcgccggcatcactctatgccacgcctgagagcaccaccttgcccgactcaccttcctcgttccccgggacctggtcgccgtacattatcaaccataagaggcggggggcctcccttgccaagaccgttcctcagggtgacgttggaagtgagggcagccagccaaagctcccagtgatactgcctgctctgcctaaagggggtgaacccactgcagtggaggagcctgagtttgcgtttcagcaatcagggaatgatcaagctgaaggtgacagtggtgtggacgaggcccccatcaatgggaaaaatgaaatgctgctgaagggcaagggacctgtgacagccaaaaatgagcacgagcagcctgagtttgagtttcaccgtggaaatcttgaagcactagtgaggcctgttaatgttggaaggcctttgattggcggagcacccaaaaatgatgagagtgacaccttccttgaacttcaggattccatgagtgtggctagcaatactgaaactgatgatgctggcacccaagagtggtggtggaaaccgagttcccctcttgggatctctgttggcacaccctgtgctgaattctatgatgcatttgaagaaatatcaagtgatggtggaactcgatcttcacgggccatggatgatgacctccgtgaaatgaggttaagcctgttgaccgaaattgagaggaggaagcaagcagaagaaacacttgagatatggcagaaggaatggaagaagctgagtcaccacctatcacatgttgccttatcacttccatctccaagtatagctga

SEQ ID NO: 132821 - DNA, 989 bp, Zea Mays
actcaccaataaatgcttttgtattaaaccagctatacacatactagtcggctagtagatacttgatattatttcttgcagcctggactcctgtatttacctgtctttagctgtgctgctgaaataaagcatatctcaaacctatcatgcacattttgtttcaattgtcaggtggttgagattcctagaggcagcaaggttaagtacgagttggacaaggcatctggtctgatcaaggtggaccgtgttctttattcctctgttgtttacccacataactatggcttcattccacgcacactctgtgaggataacgaccccctggatgtcctcatactgatgcaggaacaagttgtccctgggtgtttcctgcgagctcgtgctattgggctcatgcctatgatcgatcagggcgagaaagatgataagattatagcagtctgtgctgatgaccctgaattccgtcactacacggacatcacggacctcccaccgcatcgccttcaagagatccgccgcttttttgaagattataaaaagaatgaaaacaaagaggtcgcagtgaatgagttcctgccagcgaaagatgccatcaacgcaatcaagtactcgatggacctgtatggctcatacgtcatcgaaagcctgaggaagtgatctccagctgcttgattgtggttgtggatgctacaccattttctcaacagctcatccagagtaccgtagtacagacttaacacgaacgaactgtaatcgtgaccaagggatgctattaccttctgctcatgttgaaacaatcagcagtgcctttctttccattatatgccatgtcgaatcaaggcaacttggccctgaaatctttgtggtcaagttaaaccagcactttgacagaacaaggattgctggatgcctggattactgttacataaatgaccattactgaacttcatttcttgctcttatcttttggtgagatgcccagttctcat

SEQ ID NO: 132822 - DNA, 1023 bp, Zea Mays
gtcgttggctctctctccatcctctgttcgtggcaacagttgctttgctttccccacctggttctactccatgtttgtaaaagccatggctggacctgctgttctcaatgagcgtatcctttcttccatgtcccagaaacatgttgctgctcacccatggcatgatttggagataggaccaggggctcctgaattcttcaattgtgtggttgagattcctagaggcagcaaggttaagtacgagttggacaaggcatctggtctgatcaaggtggaccgtgttctttattcctctgttgtttacccacataactatggcttcattccacgcacactctgtgaggataacgaccccctggatgtcctcatactgatgcaggaacaagttgtccctgggtgtttcctgcgagctcgtgctattgggctcatgcctatgatcgatcagggcgagaaagatgataagattatagcagtctgtgctgatgaccctgaattccgtcactacacggacatcacggacctcccaccgcatcgccttcaagagatccgccgcttttttgaagattataaaaagaatgaaaacaaagaggtcgcagtgaatgagttcctgccagcgaaagatgccatcaacgcaatcaagtactcgatggacctgtatggctcatacgtcatcgaaagcctgaggaagtgatctccagctgcttgattgtggttgtggatgctacaccattttctcaacagctcatccagagtaccgtagtacagacttaacacgaacgaactgtaatcgtgaccaagggatgctattaccttctgctcatgttgaaacaatcagcagtgcctttctttccattatatgccatgtcgaatcaaggcaacttggccctgaaatctttgtggtcaagttaaaccagcactttgacagaacaaggattgctggatgcctggattactgttacataaatgaccattactgaacttcatttcttgctcttatcttttggtgagatgcccagttctcat

SEQ ID NO: 132823 - DNA, 1073 bp, Zea Mays
cggaattcggaaatatcacactgatccggcctggagcgctggacagcagcagcagcatcgagctcgaggccgctccgccaccccgcactcgcctgtcgcctcttctcgctttcgccaccggggcagcgctccgccatggctggacctgctgttctcaatgagcgtatcctttcttccatgtcccagaaacatgttgctgctcacccatggcatgatttggagataggaccaggggctcctgaattcttcaattgtgtggttgagattcctagaggcagcaaggttaagtacgagttggacaaggcatctggtctgatcaaggtggaccgtgttctttattcctctgttgtttacccacataactatggcttcattccacgcacactctgtgaggataacgaccccctggatgtcctcatactgatgcaggaacaagttgtccctgggtgtttcctgcgagctcgtgctattgggctcatgcctatgatcgatcagggcgagaaagatgataagattatagcagtctgtgctgatgaccctgaattccgtcactacacggacatcacggacctcccaccgcatcgccttcaagagatccgccgcttttttgaagattataaaaagaatgaaaacaaagaggtcgcagtgaatgagttcctgccagcgaaagatgccatcaacgcaatcaagtactcgatggacctgtatggctcatacgtcatcgaaagcctgaggaagtgatctccagctgcttgattgtggttgtggatgctacaccattttctcaacagctcatccagagtaccgtagtacagacttaacacgaacgaactgtaatcgtgaccaagggatgctattaccttctgctcatgttgaaacaatcagcagtgcctttctttccattatatgccatgtcgaatcaaggcaacttggccctgaaatctttgtggtcaagttaaaccagcactttgacagaacaaggattgctggatgcctggattactgttacataaatgaccattactgaacttcatttcttgctcttatcttttggtgagatgcccagttctcat

SEQ ID NO: 132824 - DNA, 1145 bp, Zea Mays
gaaaaaggttttatttctagtcatccgaaaaggctgtcagctaaattcttcggaacccccgttgccagccggcgatcgcgccgtgggatctcatcgaggcgacgacggcgatgtcaagggaggcggcgaggacgaggagccgggtcctggtggttggcgccaccggccgcctcggtggaagcatcgctcgggccagcctcgccgcgggtcaccccaccttcgcgctcgttcggccccaccacttcgcacgccccgattcccccgtgcttgggccgctcgtagccgccggcgccactctgctccaggggtcactggaagattactcgagcctgctcgaggcggtgtgtcaggtggacgttgtcatctgcgcggtgtccacgaagcaggtgctcgagcagaagcctctgattcgggctataaaggaagctggatgcgtgaagagatttattccggcagaatttggagcagatccaacaaaggttcaaatttgtggcatggattatggcttctatgagaagaaaattgaaatccgtcattcaatagagagtgaaggcattcctcatacttacatatgctgcaacttctttatgcgctatttgcttccttcactggtgcaacctgggctagatgctcctcctagagatgaaatcaaaatatttggtgaaggaaatactaaaggtgtttttgttaaagagaatgatgttgctaaatttacaatatgcaccatagaggatcccagaacattgaacaagacgttgtatctgagacctccaggaaatgtcttctcaatgaatgaattggctgacctctgggagtcaaaactcaagaaatccctgaaaaggttatatgtaacagaagagcaacttcttaaagaaatccatgatgctccatttcccttgaagatggatttaatctttatatattcagcgtttgttaagggtgaccacacgtattttgaaattgacttgtcaatggaaggaactcaactgtatccccatgtaaattatacaacagtgaacgagtacttggatactctagtttaggatatttgttcggtttatatcttccttgtaataagtcaaaaataatgttttttttttgtttctgatattttgatgaatgaattgtactgctatttggacgaa

SEQ ID NO: 132825 - DNA, 1193 bp, Zea Mays
aaaaggttttatttctagtcatccgaaaaggctgtcagctaaattcttcggaacccccgttgccagccggcgatcgcgccgtgggatctcatcgaggcgacgacggcgatgtcaagggaggcggcgaggacgaggagccgggtcctggtggttggcgccaccggccgcctcggtggaagcatcgctcgggccagcctcgccgcgggtcaccccaccttcgcgctcgttcggccccaccacttcgcacgccccgattcccccgtgcttgggccgctcgtagccgccggcgccactctgctccaggggtcactggaagattactcgagcctgctcgaggcggtgtgtcaggtggacgttgtcatctgcgcggtgtccacgaagcaggtgctcgagcagaagcctctgattcgggctataaaggaagctggatgcgtgaagagatttattccggcagaatttggagcagatccaacaaaggttcaaatttgtggcatggattatggcttctatgagaagaaaattgaaatccgtcattcaatagagagtgaaggcattcctcatacttacatatgctgcaacttctttatgcgctatttgcttccttcactggtgcaacctgggctagatgctcctcctagagatgaaatcaaaatatttggtgaaggaaatactaaaggtgtttttgttaaagagaatgatgttgctaaatttacaatatgcaccatagaggatcccagaacattgaacaagacgttgtatctgagacctccaggaaatgtcttctcaatgaatgaattggctgacctctgggagtcaaaactcaagaaatccctgaaaaggttatatgtaacagaagagcaacttcttaaagaaatccatgatgctccatttcccttgaagatggatttaatctttatatattcagcgtttgttaagggtgaccacacgtattttgaaattgacttgtcaatggaaggaactcaactgtatccccatgtaaattatacaacagtgaacgagtacttggatactctagtttaggatatttgttcggtttatatcttccttgtaataagtcaaaaataatgttttttttttgtttcgaatggagcattaaaagaaggggactgatggacacctatccatgtttgttctgacaagcgaatgtggtgatgatctgacaaattttttta

SEQ ID NO: 132826 - DNA, 1487 bp, Zea Mays
ttcttcggaacccccgttgccagccggcgatcgcgccgtgggatctcatcgaggcgacgacggcgatgtcaagggaggcggcgaggacgaggagccgggtcctggtggttggcgccaccggccgcctcggtggaagcatcgctcgggccagcctcgccgcgggtcaccccaccttcgcgctcgttcggccccaccacttcgcacgccccgattcccccgtgcttgggccgctcgtagccgccggcgccactctgctccaggggtcactggaagattactcgagcctgctcgaggcggtgtgtcaggtggacgttgtcatctgcgcggtgtccacgaagcaggtgctcgagcagaagcctctgattcgggctataaaggaagctggatgcgtgaagagatttattccggcagaatttggagcagatccaacaaaggttcaaatttgtggcatggattatggcttctatgagaagaaaattgaaatccgtcattcaatagagagtgaaggcattcctcatacttacatatgctgcaacttctttatgcgctatttgcttccttcactggtgcaacctgggctagatgctcctcctagagatgaaatcaaaatatttggtgaaggaaatactaaaggtgtttttgttaaagagaatgatgttgctaaatttacaatatgcaccatagaggatcccagaacattgaacaagacgttgtatctgagacctccaggaaatgtcttctcaatgaatgaattggctgacctctgggagtcaaaactcaagaaatccctgaaaaggttatatgtaacagaagagcaacttcttaaagaaatccatggtaaattgaaactgctaaaggttaagtggtagttatatttgggttgcttttgttatagctctggtgtccattgcattttcttgaagttcaatcagttcctttttcaatttaagctttaagctactgtcgtcagatataatgtagttcaagattgatgaagttaccgatgcagttttctgatttgcgatttactgatacttcataatttagtcaacccatttcagtttttcatacgttcacctaaatagctgcaagtatatttgatcatggagcagaagtttgttgttatgtctacgaaaaagagttgaaaaaacatgaagaaagtgtgaaacctctctttcctagttgcaaactgcaagtcattttctgaaagacttctgtttcatgcataaatcatctactctcattcttcctttctcctcattgcagatgctccatttcccttgaagatggatttaatctttatatattcagcgtttgttaagggtgaccacacgtattttgaaattgacttgtcaatggaaggaactcaactgtatccccatgtaaattatacaacagtgaacgagtacttggatactctagtttaggatatttgttcggtttatatcttccttgtaataagtcaaaaataatgttttttttttgtt

SEQ ID NO: 132827 - DNA, 1919 bp, Zea Mays
gcgaaagggacgcgcaagctccttcacccaccctcccccacgccacacgctcctcctacataaccacgctgcttcgattcactcctcatcggtggctcacgaccgagctgctgaggcaaagcttgtcccgcagtccttcccttagccttaacactcggagttgatcccgtctccgggggaagcagctggtaataatggcgcggtgccaggggaccgttgagagcctctgccaggggctgctcgacctcgacgacgacaagttcggtgcaatgtgcagcgccttcggctacctccaggagtggccggacctgggtgccgccatgtgcggcgccaatctcgccgtgccgcctgccgtggcgacgccgagcgccggcgacggcaacgattcctcctcttgcagcgtcagcggcgggttgaggaagaggaggccggacgcgtacctcgatgccaagggtggtgcgaacggcatgaacaagagacccagagggaagcagcagccgtctggcctctctgagatcgcggcggcgcccgggaaagggaagcaggagaggccaaaggctggcaccaagaagaaggccgaggctgcggcggcggcggcggctgccggccagaagaccgactacatccacgtccgggcccgccgcggccaggccacggacagccacagcctcgccgagcgggtgaggagggagaggatcagcgagcggatgcggtacctgcaggagctggtgcccgggtgcagcaaggtcacgggcaaggccggcatgctcgacgagatcatcaactacgtccagtccctgcagaagcaagtcgagttcttgtccatgaagatcgccgcttccaacccggtggtgagcttcgacatcgtcgaggacctcttcggccgccagctgaagcaggcgtgcggcccggcggccggccagctggagccgtcctgccttcagatgagcatgagccccatgcagcaggtagtgcacccgtctgcagcggcgggctccactggctttgggccgctggacatggtcctcagcaacctgtacgcgcccgccgccgcaagctgccctgtgtcggctgccccgtcggtctcggtggccgccggaccgtcgaccatcgagccgtgcctcaacgtgaatggaactgctgctgcctgggatattggctcccagaatttgttcagcggatttgatgcacaatttcagtcggtagaaagtggctgcttgctagacaacctcaaaatggaaatgtgagaagaattaatcctcattgctggagttttaaccacgggaaaaaaaacttgtggctgaagattctttattcatatcaactgtactaatgaagtattctgtcagcaatggcaatacaagtacatttcttgtgttatatgtttgtctgctactctcccggtttctaagcattccttcataaccaagccagacagagggttcagagcttcagattacaagcaaagcaaagcacttaaggacatgttcccacaacaaaccagcaccaatatacaacactttatcacctaaactgacagtacaacgaacaggaacaactctcctactcatcttccttcaaagcacagactgttcaccagcttctgtaaagacatgattcaaccttgtaacagaagtaaaggataattcgcttgcacaatatataatgacagtgaccaccacaaaggatttgagtgcattgagatatcagatgaatcttatttcaatatttacatgtatctacactgacatggcacatgatttgagtgcgttaggttacttgatacccagtctattttcgtgaaatgcttgagacgaagtaaagaacctgaactaacctttcccaggcacaatgataattggggctgctttacagttgtggaagcaatactcactgacacttccctgcaacacactaca

SEQ ID NO: 132828 - DNA, 1770 bp, Zea Mays
gatcgcaccgcacctaaagggagggccaaatccaatctcaatctcccacggccaagtaccatcacccccaccccaacgaaagggagccgggctcccctatctatatccacccgtccttctccctatatatatggattgggaaatttttcaggagggcagagaagcgaaagggacgcgcaagctccttcacccaccctcccccacgccacacgctcctcctacataaccacgctgcttcgattcactcctcatcggtggctcacgaccgagctgctgaggcaaagcttgtcccgcagtccttcccttagccttaacactcggagttgatcccgtctccgggggaagcagctggtaataatggcgcggtgccaggggaccgttgagagcctctgccaggggctgctcgacctcgacgacgacaagttcggtgcaatgtgcagcgccttcggctacctccaggagtggccggacctgggtgccgccatgtgcggcgccaatctcgccgtgccgcctgccgtggcgacgccgagcgccggcgacggcaacgattcctcctcttgcagcgtcagcggcgggttgaggaagaggaggccggacgcgtacctcgatgccaagggtggtgcgaacggcatgaacaagagacccagagggaagcagcagccgtctggcctctctgagatcgcggcggcgcccgggaaagggaagcaggagaggccaaaggctggcaccaagaagaaggccgaggctgcggcggcggcggcggctgccggccagaagaccgactacatccacgtccgggcccgccgcggccaggccacggacagccacagcctcgccgagcgggtgaggagggagaggatcagcgagcggatgcggtacctgcaggagctggtgcccgggtgcagcaaggtcacgggcaaggccggcatgctcgacgagatcatcaactacgtccagtccctgcagaagcaagtcgaggtgaatggaactgctgctgcctgggatattggctcccagaatttgttcagcggatttgatgcacaatttcagtcggtagaaagtggctgcttgctagacaacctcaaaatggaaatgtgagaagaattaatcctcattgctggagttttaaccacgggaaaaaaaacttgtggctgaagattctttattcatatcaactgtactaatgaagtattctgtcagcaatggcaatacaagtacatttcttgtgttatatgtttgtctgctactctcccggtttctaagcattccttcataaccaagccagacagagggttcagagcttcagattacaagcaaagcaaagcacttaaggacatgttcccacaacaaaccagcaccaatatacaacactttatcacctaaactgacagtacaacgaacaggaacaactctcctactcatcttccttcaaagcacagactgttcaccagcttctgtaaagacatgattcaaccttgtaacagaagtaaaggataattcgcttgcacaatatataatgacagtgaccaccacaaaggatttgagtgcattgagatatcagatgaatcttatttcaatatttacatgtatctacactgacatggcacatgatttgagtgcgttaggttacttgatacccagtctattttcgtgaaatgcttgagacgaagtaaagaacctgaactaacctttcccaggcacaatgataattggggctgctttacagttgtggaagcaatactcactgacacttccctgcaacacactaca

SEQ ID NO: 132829 - DNA, 2000 bp, Zea Mays
cgcgcaagctccttcacccaccctcccccacgccacacgctcctcctacataaccacgctgcttcgattcactcctcatcggtggctcacgaccgagctgctgaggcaaagcttgtcccgcagtccttcccttagccttaacactcggagttgatcccgtctccgggggaagcagctggtaataatggcgcggtgccaggggaccgttgagagcctctgccaggggctgctcgacctcgacgacgacaagttcggtgcaatgtgcagcgccttcggctacctccaggagtggccggacctgggtgccgccatgtgcggcgccaatctcgccgtgccgcctgccgtggcgacgccgagcgccggcgacggcaacgattcctcctcttgcagcgtcagcggcgggttgaggaagaggaggccggacgcgtacctcgatgccaagggtggtgcgaacggcatgaacaagagacccagagggaagcagcagccgtctggcctctctgagatcgcggcggcgcccgggaaagggaagcaggagaggccaaaggctggcaccaagaagaaggccgaggctgcggcggcggcggcggctgccggccagaagaccgactacatccacgtccgggcccgccgcggccaggccacggacagccacagcctcgccgagcgggtgaggagggagaggatcagcgagcggatgcggtacctgcaggagctggtgcccgggtgcagcaaggtcacgggcaaggccggcatgctcgacgagatcatcaactacgtccagtccctgcagaagcaagtcgagttcttgtccatgaagatcgccgcttccaacccggtggtgagcttcgacatcgtcgaggacctcttcggccgccagctgaagcaggcgtgcggcccggcggccggccagctggagccgtcctgccttcagatgagcatgagccccatgcagcaggtagtgcacccgtctgcagcggcgggctccactggctttgggccgctggacatggtcctcagcaacctgtacgcgcccgccgccgcaagctgccctgtgtcggctgccccgtcggtctcggtggccgccggaccgtcgaccatcgagccgtgcctcaacgtgaatggaactgctgctgcctgggatattggctcccagaatttgttcagcggatttgatgcacaatttcagtcggtagaaagtgagtagctgcttcctcaagaacaagccagaagttactttgccgcctcttgtgaaatgaaagaacacaatagtggttagatcagggtaaaaatgaaccccccaacgccaacctgaacatgtttaaagctcagagttcataatggccgtaacgtgccatcacagaaaactcaaactggctgccgatcaaataactccaccaaaaatgagcacatcaaataaaattttgacttgtatgaactgtgcatatgtccctgtacatttaactgcaacagaagtgactgaatccagctactgctttccctgcaggtggctgcttgctagacaacctcaaaatggaaatgtgagaagaattaatcctcattgctggagttttaaccacgggaaaaaaaacttgtggctgaagattctttattcatatcaactgtactaatgaagtattctgtcagcaatggcaatacaagtacatttcttgtgttatatgtttgtctgctactctcccggtttctaagcattccttcataaccaagccagacagagggttcagagcttcagattacaagcaaagcaaagcacttaaggacatgttcccacaacaaaccagcaccaatatacaacactttatcacctaaactgacagtacaacgaacaggaacaactctcctactcatcttccttcaaagcacagactgttcaccagcttctgtaaagacatgattcaaccttgtaacagaagtaaaggataattcgcttgcacaatatataatgacagtgaccaccacaaaggatttgagtgcattga

SEQ ID NO: 132830 - DNA, 1043 bp, Zea Mays
atggcgatgcggaccgcgctgacctccctccctgcgcgcctgcacgcccctgcgccccccgcggcgatgggcggccggcgcctcctcagtgatgggaaggggcgcgtgctcagcgaggaggagcgcgccaaggagagcgtctacatccagaagatggagagggagcgacaggagaagctcaagaagaggctcgagcaggagaaggccgactccgaaaaggtgaagtccgccgacgccgacaaggacgttaggctacaggttgttaggctgtgtgcaaaatctagagaagctatttcgtctcctgttcagcatctcacacttcattatcaggttaggcaccttgatacctctgaaaagagtgaattgtccagtagtgatgagaagaagtacaaggcactaaagcgtgccactgaaagagagatactgcagagtgctgatgtcatttgttgcacctatgtcggtgctggagatcctcgtctttcaaacttccgtttccgacaagttcttattgatgagtccacacaggcaatagagcctgaatgtcttattcctttggtgcttggtgtcaagcaggttgtccttgccggagatcattgccaattgggtcctatcatcatgtgcaaaaaagcagcccatgcaggattagcacaatctctctttgagtgccttgttatcctcggagtgaagccattcaggctacagataatacctgcatatgatgtcgctagtgtagactcatttcagggtagagagaaagactacattattctatcttgtgttagaagcaatgagcaccagcctgcattagaacttatgcagcagaacccaaaccaaacttgtgcgatgtcttggtgtttggttggcacaggagggaggccctagaggtagtaagtcacttgtttactccatgatgacaatagcaagcagatcgtggtggtgcctatggatgctacaacaagaaagatcaaaagttcttttggatggatgcagcttgatattttgttttgtattttctccaaaagagaaatttgcaagtgaactta

SEQ ID NO: 132831 - DNA, 3113 bp, Zea Mays
actgcctgcccgcacccctttctcatcatttcttccacgatcccgttccatcctctctctctctcctcggcgcgggcgctatctttatccgtctcagccagggcgggtcagcactcagcaggcgcgagagatacaggagagaaaccgcagggccgccgccgccttccctgatcgaccgctcccgcgtgcggattcaggcgccgggctttccagccatggttcagtgagccgggaggaatccttgcgctgccggagaaggattatattcgtcggtggacaggaggtccctgcgtgcatcgatcgtctcccgggtttccgagagcaccctccgcccccggattcactgcttcgattgattcgtcaagcaagcacagggatatcttcacgagaagtgtcatcatcaagattgacagccttcttcgtggatggcgaatggtaacaatgaagtgatgggtatatctcagcgcaaatcttgccccaaggttcacagctcaatgtgtagtgagctgacaatgatgttggataaggtctcttctattcttccatcaatagaggctgcacgaccaggttgtaaagcaggcatacaggaattatgcaatctatacaatgttgtcgagaaagggaggctcataatcatacactgcattgactgtagtaagctctatttggctattaccggagagacgattgtagcaagatgtgaaagaataagagactcactgaggcggagtttgttccttattcagaatatggttccaccagcactagctaatcagattgctgaagtccacaatgatctccgggatgtcaaatttcttcttgatccaatggaagaagaggctggcaaagccatgttacagatgctccggcagtctgacgcaagtgaagaattagaacttgagacattcctgcaggctgcttcaaagttggagctgacatctcctaaagaagtcttaattgaaagacgagcaatcaagaaactgcttggaaaagttagtggtaatgatgcaaaaaaggagggggtccttaagtttttcatgtacctcattaagaagtatggaaagatcatcagacaggactctggcgaacagaatgagaatttgcaatctgaaagtcaatctttaactctgagcacaccttcctgtgatgccagtgctcctggaaaatgttacacaccaacagactttcagatttatgaggatcacagtaatatgtctggtgcagctactccacctccagagttctgctgcccaatatcaacaaagataatgcatgatcctgttataataacatctggacagacttatgaaagagaatatattgagaggtggtttaatgaaggatatgatacttgtcctaggacacagatgaagctagagaacttctccatgatcccaaatacctgcatgagagatctcatttgcaattggtgcaaagagcatggttttacagtttccgattttattcctccaaatgaaaatgcttacagttacttaccagagcaattgcatggttactctatgtcaagtttgcacaatgtttcggtacctctcattgctggaaaggccaacagttatgtgattgatcacagcaatacgtctgttgcattatctgatgccagttttgtctctaatgcatcccacgctagggacatggaggattcaaaagatatttctcagttctcttggaacgccgactatcaaaagtacctgtcgttccacaacttcaaccaggagatgttcctgaagttctttcatgagctgtccatgctcccattcgaactgcaagacaagtcaattaaagatttgaagaacgttctcgattatggaagtgagatttcatatgatatgatgtcaaatgggtttgttgaagcattccttgaattcttgagaaacgatactggcagctacagtgtgcaagatcaggaagctggatttcggttttttcttgcttttatttccaatagcagggctaaagttcaatctctgcacgaagaatcatttcacctgatcacatccttccttgactccgagttgaaagtcgaagctttgctgacgctgcttgagttgattaagcactcgagttgtccgaaatctcatgtgatggcctctgttgttactcctccactgttcaaaatactggcatctgaagataccgaaggcctcgaattgtctctgaagatcatctgcgagctttcatccgacgccgatataagatcttcgttagtttcaatgggaataatctcgaagcttgttcccattttaaccgaaggaaacttcgtcgagcgctgtttggagatcctgcggaacttaagcgacatggaagaagctgtagcgcggatcacaagaaccgaccggtgccttgcttcggtagcagaatatctggacacaggaagccccacggagcgacagcacgcggtggttatacttttagcggtatgttcgtgcagcgccgaggactgtctgcttgtaatgaaggaaggcgtgatccccgccctagtggacctgtcggtgaacggaaccgaagaagcgaagggctgttcgacgaagctgcttcatcttctccgggacatgaggcgaagcgaccagttcaccaactcgtgctcacaagaagtggctgccacaggcatggtagtagaggatgctcccaagaactcggttcacaagcagcctgcgtcgaagtcgtccaggtttttccagaggaaactgaacatcttctcgaagcctcggtcgctcacgctgttctgaaacccggtttgtgtttgtcggagctggtagtccttttttagtggaaagggaaagcggagtagtccttgactccttccttgtacatgcatgctgcaaaactaaccaccttctgtgtagatggtagcgcttgtgtttgccccggtgagatgcttgatgagatgatagtttttcatcctcatgtgtttcagtagagcttgttagttgctacagaactgtcctgtgtgcccaaaaaaaaaagaaagaaagaaaaaagtcagtagatggcatctcttttctcttttggcggaaagcctgccgttttgtatcccgctgttcctggctaagattacctttgaagcctgaatagaagcttgttttgccaaggtc

SEQ ID NO: 132832 - DNA, 2963 bp, Zea Mays
actgcctgcccgcacccctttctcatcatttcttccacgatcccgttccatcctctctctctctcctcggcgcgggcgctatctttatccgtctcagccagggcgggtcagcactcagcaggcgcgagagatacaggagagaaaccgcagggccgccgccgccttccctgatcgaccgctcccgcgtgcggattcaggcgccgggctttccagccatggttcagtgagccgggaggaatccttgcgctgccggagaaggattatattcgtcggtggaggtccctgcgtgcatcgatcgtctcccgggtttccgagagcaccctccgcccccggattcactgcttcgattgattcgtcaagcaagcacagggatatcttcacgagaagtgtcatcatcaagattgacagccttcttcgtggatggcgaatggtaacaatgaagtgatgggtatatctcagcgcaaatcttgccccaaggttcacagctcaatgtgtagtgagctgacaatgatgttggataaggtctcttctattcttccatcaatagaggctgcacgaccaggttgtaaagcaggcatacaggaattatgcaatctatacaatgttgtcgagaaagggaggctcataatcatacactgcattgactgtagtaagctctatttggctattaccggagagacgattgtagcaagatgtgaaagaataagagactcactgaggcggagtttgttccttattcagaatatggttccaccagcactagctaatcagattgctgaagtccacaatgatctccgggatgtcaaatttcttcttgatccaatggaagaagaggctggcaaagccatgttacagatgctccggcagtctgacgcaagtgaagaattagaacttgagacattcctgcaggctgcttcaaagttggagctgacatctcctaaagaagtcttaattgaaagacgagcaatcaagaaactgcttggaaaagttagtggtaatgatgcaaaaaaggagggggtccttaagtttttcatgtacctcattaagaagtatggaaagatcatcagacaggactctggcgaacagaatgagaatttgcaatctgaaagtcaatctttaactctgagcacaccttcctgtgatgccagtgctcctggaaaatgttacacaccaacagactttcagatttatgaggatcacagtaatatgtctggtgcagctactccacctccagagttctgctgcccaatatcaacaaagataatgcatgatcctgttataataacatctggacagacttatgaaagagaatatattgagaggtggtttaatgaaggatatgatacttgtcctaggacacagatgaagctagagaacttctccatgatcccaaatacctgcatgagagatctcatttgcaattggtgcaaagagcatggttttacagtttccgattttattcctccaaatgaaaatgcttacagttacttaccagagcaattgcatggttactctatgtcaagtttgcacaatgtttcggtacctctcattgctggaaaggccaacagttatgtgattgatcacagcaatacgtctgttgcattatctgatgccagttttgtctctaatgcatcccacgctagggacatggaggattcaaaagatatttctcagttctcttggaacgccgactatcaaaagtacctgtcgttccacaacttcaaccaggagatgttcctgaagttctttcatgagctgtccatgctcccattcgaactgcaagacaagtcaattaaagatttgaagaacgttctcgattatggaagtgagatttcatatgatatgatgtcaaatgggtttgttgaagcattccttgaattcttgagaaacgatactggcagctacagtgtgcaagatcaggaagctggatttcggttttttcttgcttttatttccaatagcagggctaaagttcaatctctgcacgaagaatcatttcacctgatcacatccttccttgactccgagttgaaagtcgaagctttgctgacgctgcttgagttgattaagcactcgagttgtccgaaatctcatgtgatggcctctgttgttactcctccactgttcaaaatactggcatctgaagataccgaaggcctcgaattgtctctgaagatcatctgcgagctttcatccgacgccgatataagatcttcgttagtttcaatgggaataatctcgaagcttgttcccattttaaccgaaggaaacttcgtcgagcgctgtttggagatcctgcggaacttaagcgacatggaagaagctgtagcgcggatcacaagaaccgaccggtgccttgcttcggtagcagaatatctggacacaggaagccccacggagcgacagcacgcggtggttatacttttagcggtatgttcgtgcagcgccgaggactgtctgcttgtaatgaaggaaggcgtgatccccgccctagtggacctgtcggtgaacggaaccgaagaagcgaagggctgttcgacgaagctgcttcatcttctccgggacatgaggcgaagcgaccagttcaccaactcgtgctcacaagaagtggctgccacaggcatggtagtagaggatgctcccaagaactcggttcacaagcagcctgcgtcgaagtcgtccaggtttttccagaggaaactgaacatcttctcgaagcctcggtcgctcacgctgttctgaaacccggtttgtgtttgtcggagctggtagtccttttttagtggaaagggaaagcggagtagtccttgactccttccttgtacatgcatgctgcaaaactaaccaccttctgtgtagatggtagcgcttgtgtttgccccggtgagatgcttgatgagatgatagtttttcatcctcatgtgtttcagtagagcttgttagttgctacagaactgtcctgt

SEQ ID NO: 132833 - DNA, 327 bp, Zea Mays
cctcttgtcaccgttgtccctgccccaagaactgctgctgctgcttccactgccaccagcaccagcaccagcagggctgctggactgggatcctcggccgccttcttcggtttcgatgtgcttcacgtccgtcttcaggtacttgtagtgcctcttcacgtcctcggctgtcttgccgcagccgactgcccgcgcaacgttgtgccagcggtctggtgtgtccttgtcatatactgccagcgcacgctcgaagagattgttttgactctcggtccaggacgaacccattgttttatcttcactcagcaagagaagacacctagctag

SEQ ID NO: 132834 - DNA, 296 bp, Zea Mays
atcacatatatatcagagttcacagaatcgtcacatacatcatagagaccacatatctcacaaagacctcaaacctcacaagcttttcacaaatataagtattacgaactcacaaacataaggtttttgtaccatatcgttgtaatgcacgggtattatactatataatagatgcaatgtgtgtctctttggatgctccaatgtatttcttattttttttccctgtctttaaggactgtaccaagtggatatgcacaacacatcacaactcgcgtattgccttttgcgaccttagc

SEQ ID NO: 132835 - DNA, 1626 bp, Zea Mays
ttcttccccaaaacctacatgtagagcgcacagcgacagcaacacagcctcgcaagagaaagcaaagcaaagtcaggagggaaagaaagaaatccttttcctacacctaaagagaccaccaaaccctgcgagccaaaaaaaaaaaagccatggagtacaagagatcatcgcatgcgcaagaggaagaagaggacgaggaggaggaggaagaagaagacgacgagaacgaggaagaagaggaggatgaggaggaggccagaggccttcgctacaccacggcggcggtggcacccgtaggcgctccacagcagcagcagccaccgctgcctccaccaggcttcccgccggctcaccgccaacaaccgccgcatgcgcagctccatccgaggaaagcggagagggagagggacagagccgcgggagcgcagccccatgtccggcgccaccaccaagaaccagccaagaatggcgttctcggcggtggcgccgcgccaacgtcggcaccctctacgctcggcctcgtgcccgtggtggaagcggcccagctgtggaggtaccgggagtgcctgcggaaccacgcggcgcggcttggcgcgcacgtgctcgacggctgctgcgagttcatgccgtccgggggcgacggggccgccgcgctggcctgcgccgcctgcggctgccaccgcagcttccacagacgcgaggcggtccccggcggcggcgtggcggtatcgccctcggcggcggtaactcccacccccaccgccggcgccaactcctcccgcgccattccgctgctgctgggccccgccgcacatgcacacgcgcccgcagcaccacgtgccggcgtccccgggtgtccgcgcccgccgcgctggccgagtcgtccagcgaggagctgcgcggccccgcgcccgcgcccgcgccgccgacgcacgcgcaggtggccgtagtaggagggtcggcctccgctccccccgcgccgagcaagaagcgtttccggaccaagttcacggcggagcagaaggacctcatgcgcgagttcgcgcaccgcgtcgggtggcgcgtccacaagcccgacgccgacgccgtggacgccttctgcgcccaggtcggcgtctcccggcgcgtcctcaaggtgtggatgcacaacaacaagcacctcgccaaggtcccgccctcgcccccatcctcctcctacccacagccactgcctcgccaccacccgcctccacctccgctccacatccaccatcatccgccgccgcagcagcagcagcagcagcagcatgatgcatgagtatcgagtagccgcagagcagcgcgagaggatcagacgatgccattagcttattagctcctttatttatccttcttcttcttcttcttcttcccttgtaatttcagtgacatcccagttgttaaggagttgactcatcatgcagcagttaggagggattaatatgattgtgtgacctaatctcatctcagccatactcctactacaagtcttcccctcgtcctcgttgctttcttggacgacctacctccattattaggttattagcgcttgcattggtatcttgcttatggtaatgacctaataatgatcactgtgttttagggctt

SEQ ID NO: 132836 - DNA, 2025 bp, Zea Mays
acaccggtcaccacccgcaagtcactctcaccactgccttgtgtgggggagcggtagactggctagactcattcaaaatacacacccaaaacaagccaggcctaggcctgcctagccgggttcccctcttcactcttcaactctccctttgtcgttgttcccttcttcctcctccttgctctcggtaagggtgcaagcatagatggatgatggatggaaaagatggatatgttttttcctctataactagctagtagctctctatctctctcaaggaaacattccccactttatttgggccaaaactgttattgcgattgctatggttagtgtatttttatcggttcttcgtaacgtagctcaactttaccgagaaatataatccacatcaccatctccttctcccttcacccttgaggccaacacaacacccctatttcttccccaaaacctacatgtagagcgcacagcgacagcaacacagcctcgcaagagaaagcaaagcaaagtcaggagggaaagaaagaaatccttttcctacacctaaagagaccaccaaaccctgcgagccaaaaaaaaaaaagccatggagtacaagagatcatcgcatgcgcaagaggaagaagaggacgaggaggaggaggaagaagaagacgacgagaacgaggaagaagaggaggatgaggaggaggccagaggccttcgctacaccacggcggcggtggcacccgtaggcgctccacagcagcagcaggtgcacgcccaagctcttggcctcggctgctcacacccctcccagctgatggattctgccgccttctcgaggccgctcttgcctcccaactcatctctggtgatgcagccaccgctgcctccaccaggcttcccgccggctcaccgccaacaaccgccgcatgcgcagctccatccgaggaaagcggagagggagagggacagagccgcgggagcgcagccccatgtccggcgccaccaccaagaaccagccaagaatggcgttctcggcggtggcgccgcgccaacgtcggcaccctctacgctcggcctcgtgcccgtggtggaagcggcccagctgtggaggtaccgggagtgcctgcggaaccacgcggcgcggcttggcgcgcacgtgctcgacggctgctgcgagttcatgccgtccgggggcgacggggccgccgcgctggcctgcgccgcctgcggctgccaccgcagcttccacagacgcgaggcggtccccggcggcggcgtggcggtatcgccctcggcggcggtaactcccacccccaccgccggcgccaactcctcccgcgccattccgctgctgctgggccccgccgcacatgcacacgcgcccgcagcaccacgtgccggcgtccccgggtgtccgcgcccgccgcgctggccgagtcgtccagcgaggagctgcgcggccccgcgcccgcgcccgcgccgccgacgcacgcgcaggtggccgtagtaggagggtcggcctccgctccccccgcgccgagcaagaagcgtttccggaccaagttcacggcggagcagaaggacctcatgcgcgagttcgcgcaccgcgtcgggtggcgcgtccacaagcccgacgccgacgccgtggacgccttctgcgcccaggtcggcgtctcccggcgcgtcctcaaggtgtggatgcacaacaacaagcacctcgccaaggtcccgccctcgcccccatcctcctcctacccacagccactgcctcgccaccacccgcctccacctccgctccacatccaccatcatccgccgccgcagcagcagcagcagcagcagcatgatgcatgagtatcgagtagccgcagagcagcgcgagaggatcagacgatgccattagcttattagctcctttatttatccttcttcttcttcttcttcttcccttgtaatttcagtgacatcccagttgttaaggagttgactcatcatgcagcagttaggagggattaatatgattgtgtgacctaatct

SEQ ID NO: 132837 - DNA, 1459 bp, Zea Mays
aacagcgagctgcagccacgcgcgccggcgaccaaacaaagccagctaggcaccggcaagggagcggacggagcaagcgcgcggccgatcgatcgagcttcagcttcagctccagcaagatggtgaacttcatcgaggcgcagaagccggtgctgtcacggttgatgaagatggccgggctccgccccattgagatggagctggagccgggcacgaccatgcacgtgtgggcgcccaagcaccacgtgggcaagaagggcaccaccatcagcccgctcgagcctaccgccgccaagaagaagaagaagaataggaagagccccgagtcgaggcccaacgtggtgctcatccacggcttcgccgccgagggcaacgtgacgtggcagttcaacttcggcgtgctggtgtcgcgctacaacctgtacatcccggacctgatgttcttcggcaagtcgtcgacgtcgagcgcggaccggtccccggacttccaggccgagtgcgtggccggggcgctggcgcggctgggcgtggcgcggtgcgacgtggtcgggttcagctacgggggcatggtggcgttcaagctggccgaggcgcggccggggctggtgcggtcgctgtgcgtgtccgggtccgtggtggccatgacggacgcggtgaacagggagaccatggagcggctgggggccgggtcgtccgccgagctgctcatgcccgacacgctcaaggggctcaaggcgctcctctccgtctccatgtacaggaagatgtggttccccgacaggttctacaaggactacctcaaggtgatgttcaccaacaggaaggagaggatggagctgttgcaggggctgataaccagcaacacggacgccaagatccctgtattccaacagaaaataatgctgctgtggggcgaggaggacaagatcttcgacatcgagctcgccaggaagatgaaagagcagctgggcgacaactgcttcctgtacggcatccgcaaggccggccacctgctccacgtcgagcggccgtgcgcctacaaccgccagctccagaggtggttcgcctacgtcaactccacagaagaccacgtccaggccagatgatcgacgcgcccgccccgctcctgctgccgctgatgcatgctgctacacggagatcacatgcatacatatatacacgtcccgtctcagttgatattaattacctgtgcattgttgttgttcgttattgatgttgttattagctgttgctcccaagaaagaagacgctggcagggcagccaacacactgtatgtatgtagtgtgttgcgctggccacggtttcagtacgtgtactctcgatcaagtgtagaccgacctcggtcgtacgtgtcgcctcattcgttttggatcaattctttgtgattcttataagtcagcaatacaatacacgcagtataatgaatgagtgtaatgt

SEQ ID NO: 132838 - DNA, 3415 bp, Zea Mays
atggggcgcgcgttcgtgtacgtgatcctgggcggcggcgtggccgcgggctacgccgcgctcgagttcgcccgccgcggtgggtactcccgcggagagctctgcatcatctccgaagaggccgttgctccttatgaacgtcctgcactaagcaaaggctatttactcccagaaggtgctgctcgtcttccaggatttcatacttgtgttggtgctaatgatgagttactgacaccgaaatggtacaaagaacaaggcattgaacttgttcttggaacaaaagtgatttctgctgatgtgaggcgcaagacattgcttacaggcactggtgaaactatcagctacaaaactctaattattgcgacaggtgctcgggctttgaagctgcaagaatttggaatacaaggttcagatgcttcaaacatatgttatttgcgcaacatcgatgacgcggataagttggtgagtgtgatgaaatcatgtcctggtggaaatgctgttgtcattggtggtggctacattggaatggagtgtgcagcggcattggttactaacaagattagggtcaccatggtcttccctgagaaacactgcatgggtcgtctatttacaccaaaaattgcagaattttatgaaaactactacacctcgaaaggggtcacctttgttaaaggaactgtgcttacatcctttgaaaaagatacgacggggaaggtgactgcagtaatactcaaagatggtaggcaccttcctgctgatatggtagtagttggtattggcatccgtgcaaacactagcctttttgaaggtcaactgatgatgtcaacagagaatggtgggataaaggtaaatggacagctgcagacaagcgacagctctgtgtatgccgttggcgatgtggccgcgttccccatcaagctttttgacgatgatatccgacggctcgagcatgtggactcagctcgtagaactggtagacatgctgttgcctccatcttggatccttcaaagacgagggacatcgattacctgccgttcttctactccagagtgttcacgttgtcctggcaattctatggggataatgtcggggaagtggtccactttggagacttcacaagcagcagtccgaggttcggtgcatattgggtcaacaaagggcggatcgcgggtgcgtttcttgaaggcggaagtcgggaagagtacgaggccatatcgatcgctgttcggcgggaagctgtggtcacagacatgggtgaactcgagaaacaaggcctggcactcgccattcaggagagccagaaggaggtgcctgacagtgggcttgctgttgtcggaaaacctacttatgcgtggcatgccacagccggtgtcattgcagctgtgtcgattgctgcaattgggtattggtatggcaggaagcgccgcaggtgcccgatccgctggtccatagaatggcatcgaactgtggcagcaaagaagcgaagaaggatgaagattattgtcttcgccaagaagaatacccacatttcccttgtcggcgacggaaagaacggcaggcacccaccgatcgggtcccgcagaaggtggaatacgagggaaggcattgtttcctgtccacctctctcgtccttggaagccaagaaccgcgccggcgcggccagtctcctacttaaaggagtagtcaaggtcacccatggccattcagggagagaaacaacaagacgtagggacagcgccaaggaaccagatgggccgcgcgttctgttacgtgatactaggcggaggcgtggccgcgggctacgcggcgctccagttcatccgcctcggctgcgaaaccgccgcccaagccggagagttctgcatcatctccgacgaggccgttccaccttatgaacgtcctacgctgagcaaaggctatttgttcccagaaggtggtgctcgcctcccagcgtttcatacttgtgttggtgccaacgatcagttacttgatgcagattggtacagggaatatggtatcgagcttattctcggaacgaaggtgatttccgtcgatgtgcgccggaaaacactggatacttccgccggggaaaccatcagctatgaaaggcttattgttgcgacgggtgctcgggccgtgaagctggaagagatcggagtgaacggcggctcagatgccgagaacgtctgttatctgcgcgacatcgcggacgcggataagttagtccgtgtgatgagatcatgtcctgctggcgccgacgccgtggtcgtcggcggcggatacataggaatggaatgtgcagccgctctggttgccaacaggatgaaagtcactgtcgtcttccccggaaaacacttgatggcaaatctgttcacaccgaagatcgctgagttttacgagaactactacgaatcgaaaggagtcacttttataaaaggaactgcggtttcatctctgcagatctcgtctgggaaggtgacggcagcaatcctgcgagacggcaggcgcctacctgcggacatggtcgtggtcggcatcggcgcgcgcgccaacacggagctcttcgaaggccagctggccatggagaagggcggcatcaaggttgacggacagatgcggacgagcgacgcatccgtgtacgccgtgggcgacgtggccgcgttccccgtcaagctgctgggcggcgaggtccgccggctggagcacgtggactgcgcgcgcatgaccgcgaggcacgccgtcgcgggggctctggagcccttgggcccgatcaccggggaaatcaactacgtgcccttcttctactccagggtcttcgcgctgtcctggaggttctacggcgacaacgccggggaggccgtgcactttggggacctggacttctccgcttcgccttctcctccgtccgcgcccaagttcggcgcgctctgggtccgcgcgggccgcgtcaccggcgcgttcctggaaggtgggagccctgaggagtacgaggcgctcgcgcgcgccgtgcggcgcaggacgaccgtcccggacgtggccgtgctcctcgcgcggtggggcctcgcgttcattgtccaggaccaggagggccggagcggagccacgcggtcgggtaggctttgtggcagcggcaacacgtccaactacgcatgggcatggcacgccacggtcggcgtggccgcggccgtgtccattgcggcgttcgcgtactggtatggatggaaggcgccgtacctggcgaaacgccacttctgaacaaaggcagcatgctgctctccgtctccgtcgaccaagaacacaacttgtcacacaacaactggacatcactcagcagagtaaatttactatctttgtatttggtaataaagtgaaaaaataaattaaaagataaatatggattccatcatgccaatt

SEQ ID NO: 132839 - DNA, 2018 bp, Zea Mays
gtaccgatgagcttgcctggattcatcaatccctgttaatctttttcttactgtatcaagcatatttagtcaatcaagcatattttgctctcctattttaaagcctagcacttacaatctggccaaagaatcttcaagcagtgtcagaaatagttaaattgataatcctaaacagttcaactctctccctccatcctaaaatattatttggatagcccctaaactaattctgtgttcaattactcccaaagatacttcagttggttcaatccacccttaggtaagatttttttttgtttctacacattcaatttgagtattaagttcaaattttatggggcaatagttgacatcataacttatgttagaaaaataggaccaggtcaattcatcgttattatttttgcataaatttgtatatgtagggctaatttataacttcctaacctatcaaaataattacgaaaatttgtgatgtatttttccaacactagaaaatgtgcccatgtgttgcaagaaaacacaatacatatatgaatcggctctatcaccattatgtgtgggttctaaattgtatgagtgctgatccatatgcgagatacggatggtgtgatccaatacatactggaattagatcatgtatcaatcatcactagacgtgagtttttctaactcatatgagttgtaagttcggatcgaatcaagaaaaaagtgggatgaaagaaactatgtatagttattgggggggggggagggggatacaaaaagtgggatgaaattttggctctttaatattaggtatagataagttacgatgtcacctatcaccctagaaatgaacttaaaactcgtatgtggagaaacagaaaaaagaaaaatcttgtggacgcgttagattactagattgaaccttttgttccttaaaaaaactggacttcttccataataatatttccaggcatgcacaggtgactgcagtaatactcaaagatggtaggcaccttcctgctgatatggtagtagttggtattggcatccgtgcaaacactagcctttttgaaggtcaactgatgatgtcaacagagaatggtgggataaaggtaaatggacagctgcagacaagcgacagctctgtgtatgccgttggcgatgtggccgcgttccccatcaagctttttgacgatgatatccgacggctcgagcatgtggactcagctcgtagaactggtagacatgctgttgcctccatcttggatccttcaaagacgagggacatcgattacctgccgttcttctactccagagtgttcacgttgtcctggcaattctatggggataatgtcggggaagtggtccactttggagacttcacaagcagcagtccgaggttcggtgcatattgggtcaacaaagggcggatcgcgggtgcgtttcttgaaggcggaagtcgggaagagtacgaggccatatcgatcgctgttcggcgggaagctgtggtcacagacatgggtgaactcgagaaacaaggcctggcactcgccattcaggagagccagaaggaggtgcctgacagtgggcttgctgttgtcggaaaacctacttatgcgtggcatgccacagccggtgtcattgcagctgtgtcgattgctgcaattgggtattggtatggcaggaagcgccgcaggtggtgaggatttgcattggggtgattccctttggtctgccgggccgaactgctgctggtggaatatctgggacgagtgctattggctgttaatccaatcatagttgtatagcttgtatgagagtatagtctgtcgcaaacgtatactgaaacacagatgcctcgtgtattatctagtgaagaaaccagtggctgcctctaactcctcaggggttctcttgttgtaaaattgcaactcttttcttaatgagatccgcaattttgtggcactgctggtcactgttcttaactatctctgtttgccaaaagcttttgcaaatccatatattcagcg

SEQ ID NO: 132840 - DNA, 1918 bp, Zea Mays
catcaatcacgactctgcatcgtgaggcgaaaacgataacggggtgggacccgcatggccgcagcaagatgaggaggagaggcagcaaggcaaggcaaggcaaggcaaggcaacgcgccgtcatctcattctccctcgcaccgacgaggtcaggtcagagaccttcgagtactactagtcatggcccgcatctagaaggcagcaagaaagggggcggatggggcgcgcgttcgtgtacgtgatcctgggcggcggcgtggccgcgggctacgccgcgctcgagttcgcccgccgcggtgggtactcccgcggagagctctgcatcatctccgaagaggccgttgctccttatgaacgtcctgcactaagcaaaggctatttactcccagaaggtgctgctcgtcttccaggatttcatacttgtgttggtgctaatgatgagttactgacaccgaaatggtacaaagaacaaggcattgaacttgttcttggaacaaaagtgatttctgctgatgtgaggcgcaagacattgcttacaggcactggtgaaactatcagctacaaaactctaattattgcgacaggtgctcgggctttgaagctgcaagaatttggaatacaaggttcagatgcttcaaacatatgttatttgcgcaacatcgatgacgcggataagttggtgagtgtgatgaaatcatgtcctggtggaaatgctgttgtcattggtggtggctacattggaatggagtgtgcagcggcattggttactaacaagattagggtcaccatggtcttccctgagaaacactgcatgggtcgtctatttacaccaaaaattgcagaattttatgaaaactactacacctcgaaaggggtcacctttgttaaaggaactgtgcttacatcctttgaaaaagatacgacggggaaggtgactgcagtaatactcaaagatggtaggcaccttcctgctgatatggtagtagttggtattggcatccgtgcaaacactagcctttttgaaggtcaactgatgatgtcaacagagaatggtgggataaaggtaaatggacagctgcagacaagcgacagctctgtgtatgccgttggcgatgtggccgcgttccccatcaagctttttgacgatgatatccgacggctcgagcatgtggactcagctcgtagaactggtagacatgctgttgcctccatcttggatccttcaaagacgagggacatcgattacctgccgttcttctactccagagtgttcacgttgtcctggcaattctatggggataatgtcggggaagtggtccactttggagacttcacaagcagcagtccgaggttcggtgcatattgggtcaacaaagggcggatcgcgggtgcgtttcttgaaggcggaagtcgggaagagtacgaggccatatcgatcgctgttcggcgggaagctgtggtcacagacatgggtgaactcgagaaacaaggcctggcactcgccattcaggagagccagaaggaggtgcctgacagtgggcttgctgttgtcggaaaacctacttatgcgtggcatgccacagccggtgtcattgcagctgtgtcgattgctgcaattgggtattggtatggcaggaagcgccgcaggtggtgaggatttgcattggggtgattccctttggtctgccgggccgaactgctgctggtggaatatctgggacgagtgctattggctgttaatccaatcatagttgtatagcttgtatgagagtatagtctgtcgcaaacgtatactgaaacacagatgcctcgtgtattatctagtgaagaaaccagtggctgcctctaactcctcaggggttctcttgttgtaaaattgcaactcttttcttaatgagatccgcaattttgtggcact

SEQ ID NO: 132841 - DNA, 1806 bp, Zea Mays
cccggctccccgctcccacccaggtcctaggctcccctcccggtcccggacgcgtctcctccgttcaccacgctgccggagtgccgggcgcttctggccccgacaccgtgggccaccccggcccttgtgcgcgctctctctctctctctctctctctctctctctctctctctcgtagcgaatagcgatctatctatcactcggggttggggtcgggcgcgcaacttttccttccttcttattgacatctcccagagctctctcgctcgcatctctccaccaaccggcggcaccaccagattcctctcttcctctgctctagcttcttctagctagccccctccttcgcaccacgcactattatctcatccgttctttccttcagtctatgtttatttgctctgcacatcatcgctcggtggccctgtcctcgctaccttccaattagtcggcaaggcaaaggcaccggcagagaggaagaaggccagttctatagtatatatgacgatcagggtaatgaactagctaccggctgcacagttttgtgggggtgtgtccgcgtggtgtgttgtgtgtgtctagctagctaggttttgcgtgtggctcgtcgatctgcttggcagaacagaccacggcgatcgtcacgtttggctagggtactcggctagtgaccgacgtattctgatgatggccggggcaccgccgatgcacatctgcctggactcggactggctcaagggcatcgttcccgaggagcctgggatgggatcgtcgtcaccgtcagcggagctgatcgcgtgccctaggccaatgcacgccacggctgccgcggcggaccggcgtctgcgcccgcagcacgaccagccactcaagtgcccgcgatgcgagtccacgcacaccaagttctgctactacaacaactacagtctctcccagccgcgctacttctgcaagacgtgccgccgctactggaccaaaggcggatcgctccgcaacgtcccggttggtgggggatgccgcaagaacaagcgcgccagcgccaagaaaccacccgcgccaccgatgcagccgccgcacatgtcggagacgggcctccacctgtccttctccggcgtgcagcagctgccgccggccgatccgctttgcagcctcggccttttggactggaagtatgacccgatcctcacaggttccggtggcgtcgctggctcgttggatggcgccagctccgagacgcacttcgcagggacgggcatgctgggcatcccaggtggcagcgggggcggcgagtgccacgcgctgagcgcgctccggtacgcggccggcctgggcgagaacctgcaggtgcagggtctcccgtttggggcgcgcgctgagcacgacgcgatggagatgaagcctgcggcgacggacaggctgctctcgctggactggtacagcgagacaagccgcgcgccagagagcgccatcagctcgttgggcgcgctgggcctgtggagcggcatgctcggcggtgcgcaccagcaccatggctcgtcggcggccatctaagaccctagcaaaacgtgcctccatgcttgcgttgcattgcaccagtttgctaatggcgttaacaagtatgagtgactacgtagaaatgcttgtttttttacctgtttttatcttctgtttcgtttcgtcgtttgttttttggacgatccatgtttgccgctcgtcatttcagatgatgtctctgttgttgtaccgcttcaaagttcaaacacttgctgtggttcaaattacagtttgctggtgattgatgagccc

SEQ ID NO: 132842 - DNA, 2904 bp, Zea Mays
gtctgctcccgtgccctccgcggctccgccgcactcatcttctagtcttcttccctcccctccgtcaccactcaccacctcccctatggcatgggagcttctcccggcctcttcctccccttcctgccagaccatcttcctaccgcaacgcacctgacggtttccatccacctggcttccctgttgcgctagctgatcgacccacgcaacgcaagtgcaatgccgtgccgaggctagatcgagctgccgagcgctgatcacggtgaggccacccagatccacccgattgccacgcggacttcaccccttgccttttctcctcccgtccacccatcgggcgctttccctccatccctctctctcgtgcggcatctgggcgacccgccgacgcccctacgccaggtgcccaggccttcgtcgggtcctttaccggcgacgagcacacaccagggcactggagggctaccatctgcttcgctttctgaaaaaaaaacagtttcggcataattatcaccctaagatgcctggaattacaatggatggatttgttgcagaggaggtgccgaacagggtgaattcctctccacagaatgaaaatctgcccgccccaaattcgacggcagcttcaacaatggcgccaagcatgcaaagtgaggcacttgagatgcatgtcgagagctccggtactggggagccctcaattgagcagctctacaacaatgtgtgcgagatgaagagctcaagtgagggtggctccctgtcacatgagagctttggctcagatggggaggagtctaggattgattcagagcttcgccatcttgttgctggggagatggaggccatgaaggtgattgaggaggaagaggagaatggtagtgttgccaacgttgtgccaccggttcccgctgagaatggaaccccagtaaaggagcagccttccaaatcgtccaacaagtcgaagaaggactcaaaatcacagcttgagtctgatgcctctgttggtcccaataggaaggcgtccactgaggaaggtgagagggaggtcagcaaacaggcaacccgagttggccgtcggcggaaatcaaatgccaatccacagaatggaacagaagatgctgggcttgataacccagaccttggtccatttcttctcaaacatgcaagagacttgcttgcctcagaaaactcacgtcgggcactgaaatatgctctccgtgccactaagacatttgagaaatgtgctggtggaaaaccaagcttgaacttagtcatgagtttgcatgttgttgcagcaatctactgcaacttgggaaaatatgaagaggctttacctgtgctgcatcgatctcttgagatccctgtaattgaggaaggtcaggaacatgctcttgcaaagttttctggttgcatgcagttaggggacacctatggcatgctaggtcaaactgcactctcactgcaatggtatgcttctgggcttgaaatacaaaagcaaacattgggagagcaagacccaagggttggagagacttgtcggtacttagctgaggcccatgtgcaggcattacaactcgatgaagcacaaagattgtgtcagatagcccttgacatccacagggagcatggcgggacagcctcactagaagaaacagctgataggaggctgatgggtctaatctatgacaccaagggtgatcatgaagctgccttggagcatctagtgatggccggcacggccatgatagccaatggtcaggagacagaggtggcctcagtggattgcagcattggtgatatctacctctccttgggccggtatgatgaggctgtgtttgcttaccagaaagctcttactgtattcaagaccagcaaaggggagaatcatgcaactgtggcttctgtttttgtgcgcatagcggatctgtacaataagtcagggaagctgagggagtcaaaatcttactgtgaaaacgctctcaaaatttaccaaaaacctattccagggacttctctggaagaaattgccactggtttaactgatgtttcagccatatatgagacgatgaatgagcatgagcaagcactcaagttacttcagaaggccttaaaaatgtacaacaattctgctggccaacagagcacaattgctggaattgaggctcagatgggtgtcttgcactatattttgggcaattatggcgagtcatatgattccttcaagagtgcgattgcaaagctccgcacctgtggtgagaaaaagtctgccttcttcggaattgccctgaaccagatgggattggcatgcgttcaaagatattcgataaatgaagcagcagaactgtttgaggaagctagaacagttctggaacaagaatacgggccttatcatccagatactttaggagtgtacagtaatcttgctggaacttatgatgcaatgggcagacttgatgaggccatcgagatcttggaatatgttgttggaatgcgcgaggagaagctaggtacggcaaacccagatgtcgacgacgagaagcggaggcttggggagctattgaaggaggctggccgggtgcgaagcagaaaggcaaagtccctggagaatctgctcgagaccaacccatatatcgccaccaagagaaatgcagttgctgcatgaatcactgttctgaagatgaaaggcgaggattgttactaaggtattcaattggttcgttcagatgggggtaacgggaatattggtgcttacctattaagaaaatatgaaatgatcaaatcactgatctcaaattctttgctgtaaagttttcaaatactattaccgttacatgtacagtgctcttttataccgttcttgagaaaacgagtggtgggtactgattctctttctctagctcaggt

SEQ ID NO: 132843 - DNA, 2931 bp, Zea Mays
gtctgctcccgtgccctccgcggctccgccgcactcatcttctagtcttcttccctcccctccgtcaccactcaccacctcccctatggcatgggagcttctcccggcctcttcctccccttcctgccagaccatcttcctaccgcaacgcacctgacggtttccatccacctggcttccctgttgcgctagctgatcgacccacgcaacgcaagtgcaatgccgtgccgaggctagatcgagctgccgagcgctgatcacggtgaggccacccagatccacccgattgccacgcggacttcaccccttgccttttctcctcccgtccacccatcgggcgctttccctccatccctctctctcgtgcggcatctgggcgacccgccgacgcccctacgccaggtgcccaggccttcgtcgggtcctttaccggcgacgagcacacaccagggcactggagggctaccatctgcttcgctttctgaaaaaaaaacagtttcggcataattatcaccctaagatgcctggaattacaatggatggatttgttgcagaggaggtgccgaacagggtgaattcctctccacagaatgaaaatctgcccgccccaaattcgacggcagcttcaacaatggcgccaagcatgcaaagtgaggcacttgagatgcatgtcgagagctccggtactggggagccctcaattgagcagctctacaacaatgtgtgcgagatgaagagctcaagtgagggtggctccctgtcacatgagagctttggctcagatggggaggagtctaggattgattcagagcttcgccatcttgttgctggggagatggaggccatgaaggtgattgaggaggaagaggagaatggtagtgttgccaacgttgtgccaccggttcccgctgagaatggaaccccagtaaaggagcagccttccaaatcgtccaacaagtcgaagaaggactcaaaatcacagcttgagtctgatgcctctgttggtcccaataggaaggcgtccactgaggaaggtgagagggaggtcagcaaacaggcaacccgagttggccgtcggcggaaatcaaatgccaatccacagaatggaacagaagatgctgggcttgataacccagaccttggtccatttcttctcaaacatgcaagagacttgcttgcctcagaaaactcacgtcgggcactgaaatatgctctccgtgccactaagacatttgagaaatgtgctggtggaaaaccaagcttgaacttagtcatgagtttgcatgttgttgcagcaatctactgcaacttgggaaaatatgaagaggctttacctgtgctgcatcgatctcttgagatccctgtaattgaggaaggtcaggaacatgctcttgcaaagttttctggttgcatgcagttaggggacacctatggcatgctaggtcaaactgcactctcactgcaatggtatgcttctgggcttgaaatacaaaagcaaacattgggagagcaagacccaagggttggagagacttgtcggtacttagctgaggcccatgtgcaggcattacaactcgatgaagcacaaagattgtgtcagatagcccttgacatccacagggagcatggcgggacagcctcactagaagaaacagctgataggaggctgatgggtctaatctatgacaccaagggtgatcatgaagctgccttggagcatctagtgatggccggcacggccatgatagccaatggtcaggagacagaggtggcctcagtggattgcagcattggtgatatctacctctccttgggccggtatgatgaggctgtgtttgcttaccagaaagctcttactgtattcaagaccagcaaaggggagaatcatgcaactgtggcttctgtttttgtgcgcatagcggatctgtacaataagtcagggaagctgagggagtcaaaatcttactgtgaaaacgctctcaaaatttaccaaaaacctattccagggacttctctggaagaaattgccactggtttaactgatgtttcagccatatatgagacgatgaatgagcatgagcaagcactcaagttacttcagaaggccttaaaaatgtacaacaattctgctggccaacagagcacaattgctggaattgaggctcagatgggtgtcttgcactatattttgggcaattatggcgagtcatatgattccttcaagagtgcgattgcaaagctccgcacctgtggtgagaaaaagtctgccttcttcggaattgccctgaaccagatgggattggcatgcgttcaaagatattcgataaatgaagcagcagaactgtttgaggaagctagaacagttctggaacaagaatacgggccttatcatccagatactttaggagtgtacagtaatcttgctggaacttatgatgcaatgggcaggtaaactccctacttctgaaactcaaatcgttgtctcaactaggtgttgatgattgtctgtgtgtctgcatgcataatgatttgcattccaattacgccccgtttggatcattggaattgaattccattctaataataataatttaggaatatatcaattaagctaattcagttttatgcaaaaaatatatttatatactattattagcaagatgtcggagatatttatgtgctacatttttactatagaggagtgagacgaaaagtgtcatgtaagttatagagtataaacaaattctactaatgcataaaatcatttctcaccctccacctcattaatttgagataggcttatatctgaactttggaaagcggtggaatgtcaaattccaaactaaataagttattttattgagtgaattccaattcctctgaaatgaagggatccaaacgccccgttagtgatttgctggaaaaaggtac

SEQ ID NO: 132844 - DNA, 1330 bp, Zea Mays
atcgccagcctcgagatcgatctctctcaagggaccttgcttgccgccacccccaccgcagttacagttatagctagggatctgaggactagctgatggacagcaggagggagtcctcggagaccttgaggaacaaatgcgcagcctgcttcaggcagtacaacaggatggagcacctggtggagcacatgaaggtctcgtaccactcggtgcacgagcccaggtgcggcgtctgcgggaagcactgccgctccttggagtcgctcagggagcatctcatcgggccgttgcccaaggtggagtgcgcgcgggtcttcggcgtccgcggctgcagcatctgcctcaacgttctcgacagcagcgccgccgtcagataccaccgtgcggcctgccagtactctcgtgctgctccgatgcccaggggcggtagcatgactgggcgcgcggtcgccctggcttgcaagatggtagggggaggaagcgacggctccatggacctttgtgcgagggtgtgcctcgttggagaagatgagcacgtcatcttccagacctatgtcaaacctacactccctgtcacgaactacaggtatgaagtgactgggataaggccagagtacctgagggacgcaatgccgctcaaggttgcgcagagaagaatccaggaaatcctgtgcaacggggagtcactgtggaagttacgcccaagaagctatggtagggcaaaggtactcgttggtcatggcctcgaccatgaccttgagcgcctagggttagagtacccggcattcatgatcagggatactgcaaaatacccaccactaatgaagactagcaagctgagtaactccctcaagtaccttacacaagcatacctcgggtatgacatccatactggcattcaggacccctacgaggactgcgtcgcaacaatgaggctgtacatcaggatgagatcacaggctcaccagagagattacaactccggctctggcgaggcccagaacaactatccagcctggaggcagagggagctcgacaggatgagcccagaagaactcctggcactttcagcatcagactactactgctggtgcctggattactaaaccgatcggcttataaggaaaataaggcaggcgaacgttgtcggttgacatgttccgtctatggcgatcatctttagatgtacaagtagcttgcggctttgctatattgggggttaattaaagcgtataaacaaaggattctatataaatgtattgatgccttagatctgtataagaagcaatatcatgatttatgatgcatgtggaaagaggattttcctgct

SEQ ID NO: 132845 - DNA, 1867 bp, Zea Mays
gtagctggctttggagtacgagtggcagcctcacgctcactttaccgaccctttgcgacgccaaccggccaaagctcccggctcggcggcgccgcttcgttgatggattggtccacccggttccgcatccgaaacccgtcgccggccgcgtcccactttgccggccacaggcggagtcaagcggatagggtatttctccggaccatggcgtcggcggccccggtggaggagccgacggcggcggccgaggcgaaggggcggctgaccggtgactccttcatccggcgccacctcaggaccctcgccccgtatcagcccatcctgccctttgaggtgttatctgctcgccttgggcgtagaccagaggacataatcaagttggatgcaaatgagaatccatatggtccacccccggaggtcgctgcagcactaggtagtctcaagttcccctatgtgtaccctgatcctgaaagccgccaattgcgtgctgcccttgctgaagattctggacttgaatctgattacatacttgctggatgtggcgcagatgaactaattgatttaattatgagatgtgtgcttgaaccaggcgacaaaattgttgattgccctccaacattcacaatgtatgagttcgacgcttcagtcaatggtgcacttgttatcaaggttccaagactgcccgatttttccctagatgttgatctcattgtcgaagtggttgaacaggaaatgccaaaatgcatatttctgacatccccaaataatccagatggcagtgtaatcaatgatgaggatcttttaaagatacttgatctcccaatacttgtagtgctggatgaagcttatattgagttttcaagccttcagtcaagaatggcatgggttaagaagcatgataatttgattgttctccgaacatttagcaaacgggcaggtttagctggtcttcgtgtgggttatggtgcatttcctctgagcattatcgagtatttgtggcgggccaagcagccctataatgtttctgtggccgcagaagtttcagcatgtgcagctttacagaatccaacttatctggagaatgtgaaaaatttactggtaaaagaaagggagaggttgtttaatcttctcaagggaataccattcctgaagccatttcccagtcattctaacttcattctctgcgaggtcacgtcaggaaaggatgcaaagaaaataaaggaagaccttgcgaagatgggagtgatgatccgccactatgacaagaaggaactgaaaggctatattcgtatctcggttgggaaacccgagcacactgatgcactaatgaagggcctgaatgcacttcgattgtgagagcttttgcacacgatcaagcttttgcacactatcaagcttttgcacaccatcacatcaatgtaaacagtgtattcctttgcggatatatatccgtcaggctggatgcagtctataagaggagattgcatcactccaacgcatgtgaagcccaaacagacaagggtcatgtgggtttcactatccttttgtttagcaagttgaagtctgtttttgttattcagtggcataacagctattcacaagattatcttgttcagaacaagtgtagcagttgaattcctggtaggtggtttctgatgttgggttgagacttgagagaactgaacattgtgtaggtataaataaaggccaacatagcaatgctgttgtcttagtacttgtatcaaaggtcattcagtcgttgcaaatttcgaccaaataaagggatgaaatgaaagcttggaaacggaacagattctcatccataaccgccgtgacgacaatgtgtaaacgtcgcgacttttattta

SEQ ID NO: 132846 - DNA, 462 bp, Zea Mays
atggcccactggtcaggctcttctgacgcgcgtgctcgtatcactctcaccggctggtggggtatcgcagtcagcgcaaatgctgccactgtaacagctcaagctgacaaaaagaaaactgcgaaggcaggaaataagcatacattagaagctactgctgatggcacagaaggaacatcaaaggttgacgaggaacctgccccagagagcaagagagcctctgaatctgcagaatatggcgcatcccagttgcaccagttttcgcagtctgaagttggtgatgcccatgcccagggtgctggtgaggaagatggtgatatcgtggatggccaagttgcactgcctgatgtgctaatgatgacgccttctggaagtgaacttggagcagagcaggacgatgatgattcagagaggcgaagtcaatcaatcagcaagaagctatggtcattcttcactacatga

SEQ ID NO: 132847 - DNA, 824 bp, Zea Mays
agaggaggcccacgagcctacgctcgcgcctaggtcgcgccgaggctgtacctcgccggaggagccagccgccagggcggcgccgtggccaccattgcctcgtgatgaggctccgtgtcgtgcgccgccgagccgtttcccgcgccggggccggcgtggccgcgccgccatggacggaccgtcgcgtccacactgccagggggtcgcgcctcgcgccgtcgaggccaggggctgccactcccgcgccgagctacgaggggccgcgcccatgcacagccgcgccaggggcaagtgccgccccgagagggaggagcctcctggagggcgacgacggctcaggtggtggcggctgctgtggggtgggaggcgaccggtggctactgtgggtttcagaaaaccctaacctagtctaataacatgtagaatagtgaagtggatcattgtattgcatagagaaggggttacaatatatagactcaactctaaccctaatgaaccggcagcctaacaatggtaccagcccacacacactcacacaatcagtctaacagttattcatggtacacgcctcgctcaccagacggcatgtcaactttgccgacgctacgagcctacgaccaatagttatccacagtacacgcgtcgcccaatgctacgagcctacgagcagtactgttgacatgtcaatctccaagaatgcacaatggctgcctcatgctgagctccaccttcagccgtggatacaacgctaggtcgttgcttgcgaccagcactttctgcattgtataaccccaaagaatgttacaagacagtcagctcaatat

SEQ ID NO: 132848 - DNA, 725 bp, Zea Mays
agaggaggcccacgagcctacgctcgcgcctaggtcgcgccgaggctgtacctcgccggaggagccagccgccagggcggcgccgtggccaccattgcctcgtgatgaggctccgtgtcgtgcgccgccgagccgtttcccgcgccggggccggcgtggccgcgccgccatggacggaccgtcgcgtccacactgccagggggtcgcgcctcgcgccgtcgaggccaggggctgccactcccgcgccgagctacgaggggccgcgcccatgcacagccgcgccaggggcaagtgccgccccgagagggaggagcctcctggagggcgacgacggctcaggtggtggcggctgctgtggggtgggaggcgaccggtggctactgtgggtttcagaaaaccctaacctagtctaataacatgtagaatagtgaagtggatcattgtattgcatagagaaggggttacaatatatagactcaactctaaccctaatgaaccggcagcctaacaatggtaccagcccacacacactcacacaatcagtctaacagttattcatggtacacgcctcgctcaccagacggcatgtcaactttgccgacgctacgagcctacgaccaatagttatccacagtacacgcgtcgcccaatgctacgagcctacgagcagtactgttgacatgtcaatctccaagaatgcacaatggctgcctcatgctgagctc

SEQ ID NO: 132849 - DNA, 3312 bp, Zea Mays
gggccggcgtcgagtggagatccaatcgaaaatcgaactgacttcatcttctgttggtcaacaggagagcccgttgaaatcctggacctctcaattgtccttttctctctccccgcccaccttcccctgttctgccgcctccccagtccggcgtgcatcagcagcgacatcagagtcggcgatgggaggcgtcatcgacgttctcgtccccttatgttgatgaagtggtgtgccgtggagattccttgaccgatttcttgccggtaagacggagtctgccatctgcgtggctggtcatcgcggtgagcaaggaacgacgaagtgcgcccctccgcccttcggctcgtcgttgtgccttgcgtcgtcgggtggagttccttcccctgcttcaagctaattcggtttttccctctcatcctgtcagttttctctttgttggcattttcggttctctgctgtgaggttttttaaggtgattttgttcgcatctgtgatttgtgtctctgtgttcatcgtttgatgagggattcgatgccaaattcatttgaatcgattacaggaaatcatgcaaaaaatcaaacacatacctgtagaattgcgttggattggattccaaaaaataatgaaggaaaaaggaaaaacaaatctgatccgattttgtggcctgcatgcttactaacttcgtttttaagaggctccaggaaaatgtaattttgggtagggtttgtcaagcggtggtgcctgaatgtatcttctcctgtcacctccctcctttcacattagagttattgggtctacctttactgggtctactcctggatcctgctctatttaattatccttttttgtgccaaagcagccaaaccgccaatcaccacaaattgtagattaatgtttccagcattagcttgctgctcctggttccatacctgcaatcagttgcaaatacaccatgttttgtactaccccctcccccaattaaactttataattaaatgaaaaagtgtaggagtttgcctagtgaccacaaagcattttttggtgcattggaatcttgtgtatgcttgaatttaaaattatgaattcaaatgttgttgaattacatgcaggacccataaactttgaattattatgatgtgaaaaatgatttataatacagtatgtgcacaagtgtagatagatataagaaaatgaaatataggggaagggatcattggtagtgtcaccctaaagtgctggaaaagttttaaggtgcttcccatagaacaacttcttgggggagcactattggtatggaattgctcttattcagtttttttggggtttctgaggatcctccatgtcccctagattattgacctcactttgttctttgtatcgatttattgttgtaggcagttataatagtaggaggtatgcgtgctttgtagaatcatacagatgcttgttgaacatgtgtctttgtttctgtgtctgtgtcaacaagatgttctagcatcaacaagatcctgattagcatgtcaacttccagacaaaaagagtagagcagcaaaatggagaaccatggaaaattggatgggtgggatgaagttctggaagaagaagatgagttagcgagtgtatgcaaatatcctattagcacatcgtacctttcttatggaacaagcagaagtatgttatctcatttccagcatctctcctcttagagagaatgttgtgagcaaaggaggactttgttttgttaaactataccaggtggacaatctaatgcgtgtcctctgtttccatactgcagggggcaaaagtgtaaagaagcctagattctcattacgaggatatgattttgttccattagatgttaagactgataacttgtgcattggggagcaagatggttcttctgcagtgccatcaactaaagcttcacaaaccatggtggctgaacggttggaaaacgttgaggaacaaactgaagatttggcaccagagtttgcccttccacccaaagcaaatactttagtttctgagctgctagataatttacagcgtaggggtggttcttttgtcaggacaccatctttggtgtgtgttgtcttgcattattttttcatattggagttcttacataacacttatattacttctgaatattttaatctagttgcaccaacatgctccaagcatatcaatcagggagcaggaagtttcatccggagtgccaccaactaaagcttcacaagctttgatggatgaaccgtttgaaaatgacaatggacaaactgaagagttgccatcagagctcccctgctcgatcaagagaccaaaattttcagttgcagaacttctagaagacctacagggtagaagtggttcttatgttgagacagcatctttgtcacaccaacacaccagagctaaacattggaagccaaagttcctttcttccgagaagaaaacaatagctattctaggagacaggagtattgacagtgaggaccccttggagcatgtaattgacggaacatctagcgaggaggaagatgctactcaaaaccacttgagtttggtgaacaaagatgagaaccagcaaactatggctgacctatttcaagaagtttttaatccaacaaacatggatggtgccatgaaatcaatgagatcaacaggagctggtaactatggaagaatgcaacagattatgcacatggagaaagattggcatgtggaattctcgaggcagtatagcagagagcacagttattcaggtgatttaaagggaactactgttcagattatgtcaaggtcattggaaggaaagctaacagtctgcagctgcatgttccaggaaaagggcaatgatgccactataagtaatgcctcagcagacggcaccatggatgaaagcagaactaggaggactattatcttcagtccaaagatatgtaacaatgtagatcttctggttggaaacataattcatatcttcccaccatggaaggaagttaaaatacaagaagagcatgtgattatttgcacctacttctcgcaccaccaccggacttgatactcggagatatttctgtgctagctgcaaagctagaggcagaccgccagcataaccgttgctgacagtttaatgttgatgtactcgcagggtctattctgtttgttttgtaatcacaagtgtactggctgcaaagctataggcagaccgcaagcataaccgttcctgatagcctaatgctgatgtacttgcagtctctcttctgttttacaatcacaagttactgaggcctagttcggattctctaa

SEQ ID NO: 132850 - DNA, 1927 bp, Zea Mays
gggccggcgtcgagtggagatccaatcgaaaatcgaactgacttcatcttctgttggtcaacaggagagcccgttgaaatcctggacctctcaattgtccttttctctctccccgcccaccttcccctgttctgccgcctccccagtccggcgtgcatcagcagcgacatcagagtcggcgatgggaggcgtcatcgacgttctcgtccccttatgttgatgaagtggtgtgccgtggagattccttgaccgatttcttgccggtaagacggagtctgccatctgcgtggctggtcatcgcggtgagcaaggaacgacgaagtgcgcccctccgcccttcggctcgtcgttgtgccttgcgtcgtcgggtggagttccttcccctgcttcaagctaattcgacaaaaagagtagagcagcaaaatggagaaccatggaaaattggatgggtgggatgaagttctggaagaagaagatgagttagcgagtggggcaaaagtgtaaagaagcctagattctcattacgaggatatgattttgttccattagatgttaagactgataacttgtgcattggggagcaagatggttcttctgcagtgccatcaactaaagcttcacaaaccatggtggctgaacggttggaaaacgttgaggaacaaactgaagatttggcaccagagtttgcccttccacccaaagcaaatactttagtttctgagctgctagataatttacagcgtaggggtggttcttttgtcaggacaccatctttgttgcaccaacatgctccaagcatatcaatcagggagcaggaagtttcatccggagtgccaccaactaaagcttcacaagctttgatggatgaaccgtttgaaaatgacaatggacaaactgaagagttgccatcagagctcccctgctcgatcaagagaccaaaattttcagttgcagaacttctagaagacctacagggtagaagtggttcttatgttgagacagcatctttgtcacaccaacacaccagagctaaacattggaagccaaagttcctttcttccgagaagaaaacaatagctattctaggagacaggagtattgacagtgaggaccccttggagcatgtaattgacggaacatctagcgaggaggaagatgctactcaaaaccacttgagtttggtgaacaaagatgagaaccagcaaactatggctgacctatttcaagaagtttttaatccaacaaacatggatggtgccatgaaatcaatgagatcaacaggagctggtaactatggaagaatgcaacagattatgcacatggagaaagattggcatgtggaattctcgaggcagtatagcagagagcacagttattcaggtgatttaaagggaactactgttcagattatgtcaaggtcattggaaggaaagctaacagtctgcagctgcatgttccaggaaaagggcaatgatgccactataagtaatgcctcagcagacggcaccatggatgaaagcagaactaggaggactattatcttcagtccaaagatatgtaacaatgtagatcttctggttggaaacataattcatatcttcccaccatggaaggaagttaaaatacaagaagagcatgtgattatttgcacctacttctcgcaccaccaccggacttgatactcggagatatttctgtgctagctgcaaagctagaggcagaccgccagcataaccgttgctgacagtttaatgttgatgtactcgcagggtctattctgtttgttttgtaatcacaagtgtactggctgcaaagctataggcagaccgcaagcataaccgttcctgatagcctaatgctgatgtacttgcagtctctcttctgttttacaatcacaagttactgaggcctagttcggattctctaa

SEQ ID NO: 132851 - DNA, 1356 bp, Zea Mays
gggccggcgtcgagtggagatccaatcgaaaatcgaactgacttcatcttctgttggtcaacaggagagcccgttgaaatcctggacctctcaattgtccttttctctctccccgcccaccttcccctgttctgccgcctccccagtccggcgtgcatcagcagcgacatcagagtcggcgatgggaggcgtcatcgacgttctcgtccccttatgttgatgaagtggtgtgccgtggagattccttgaccgatttcttgccggtaagacggagtctgccatctgcgtggctggtcatcgcggtgagcaaggaacgacgaagtgcgcccctccgcccttcggctcgtcgttgtgccttgcgtcgtcgggtggagttccttcccctgcttcaagctaattcggtttttccctctcatcctacaaaaagagtagagcagcaaaatggagaaccatggaaaattggatgggtgggatgaagttctggaagaagaagatgagttagcgagtgtatgcaaatatcctattagcacatcgtacctttcttatggaacaagcagaaggggcaaaagtgtaaagaagcctagattctcattacgaggatatgattttgttccattagatgttaagactgataacttgtgcattggggagcaagatggttcttctgcagtgccatcaactaaagcttcacaaaccatggtggctgaacggttggaaaacgttgaggaacaaactgaagatttggcaccagagtttgcccttccacccaaagcaaatactttagtttctgagctgctagataatttacagcgtaggggtggttcttttgtcaggacaccatctttgttgcaccaacatgctccaagcatatcaatcagggagcaggaagtttcatccggagtgccaccaactaaagcttcacaagctttgatggatgaaccgtttgaaaatgacaatggacaaactgaagagttgccatcagagctcccctgctcgatcaagagaccaaaattttcagttgcagaacttctagaagacctacagggtagaagtggttcttatgttgagacagcatctttggatgctactcaaaaccacttgagtttggtgaacaaagatgagaaccagcaaactatggctgacctatttcaagaagtttttaatccaacaaacatggatggtgccatgaaatcaatgagatcaacaggagctggtaactatggaagaatgcaacagattatgcacatggagaaagattggcatgtggaattctcgaggcagtatagcagagagcacaattatgtcaaggtcattggaaggaaagctaacagtctgcagctgcatgttccaggaaaa

SEQ ID NO: 132852 - DNA, 2146 bp, Zea Mays
ataaagatctccactccagtatcccctccccgtccgacttgcaacctctcctgaatcccaccgatcacgcgagctccccgccgcgatgtccgatcaccgagcgaagcggccgtccgacggcgcagccactgtggcatcgccggcggcgaagcgcgcccgcgacccgcccgcgccggcgttacccacgaacaaggaagctcccgacatggcccccaagacccgcatcttctgcgacatcctggcctcccgcgccgacgacgaggaactgaatgccgagctcgacaaggccgacatccgcgtaagcatcgctgacgtcgagcaggtgctccgcttctcctacgcgcacccgcgcgccgccgccgccttctttcgctgggcgggataccggtacctcggccacgagcactccccctactcgtggaacctcctcgtcgacatcctcggtaagaatcgcctcttcgagcccatgtgggacacagtcaaatctatgcagtcgcagcagctgctctcgctcgccactttcgcctccatattctcctccctggcggcgacccccggcggttccccgctcaaggcgttcatggacatgccccgctacggcatgacccgcgacacgccggcgctcaactcgctcctctccgcgctgtgtcgtgccaaccgcctcgacgacgctcgcgccgcgatcccagtagcccgcgccgaggctggcacgcgcccggatgccgactcctacgccatcctcctcgagggcagcgaggccgccgccgacctgcgggttgcgcgcgaggtgttcgacgaaatggtgcaggccattggattttatcctgacaacgtgcctgcctatgactccttcctcactacgcttgtttcaagtgactcctccacggcgctaccggaagcaatggagtacctaaatgtcttgagcaggcacggctgttcgccaggagagaagttcttccgtgctgctcttgctgcacaccttgatgcacgacaattgcgcggagccatgaatctctgggatgactttgttgggcgtcgaggactcgtcccagatatggaaatgtacaacacaatgatcaagctgcagggcagtctcgggcatgctgagctgatagtgggttatctcgacgacatgatctccaatggagtcttccctgataccaacacatacaatgtggtcctccagcttttgttgaagggaaagaagcaccgagaggcagccgcaatatttagcgagatggtcaagaacgaatgttggccaaacgagggaaattgttcacttgcacttcgcatgtttttggatacacactattgggagactgggatcaaagtctggtgctgcatggtggagaatggcttgccacctttacaggagtgtgggaacatgcttgtagcaaagctgaaggatgacaggctacctgaggcatgcaaatatgcagaagacatgattgatcggggtatcaagttgagttcagcgacactgtccaagctgaagcagcgcctgcagaggattaagaaaggagagatccatgatcacctgcttgcaaaatggaaggcacattagtttgttgtgctccctcgtatgggtaacctggtgcgatctcagtgttgacaatgaggttgagccttttatcactctgcaacgtttcaaacaacagttggaagtccctttctagtttctacattgaaattatcatattaatcagctggagcatttgggtctcaaggagtgagctggaacatcttccaagaaattctaccgtctgtatcaaatggctaagcctttttcaagaaagagtttgcccaggttatccatagagcatagaagaaatatttccttgaagaatgactagagcgtcagttgtggtcttttttaatatcttttgtgtcctttttttgtttcatgaattttgttgcttgcagctgtctggctgcaatttaggtagctgtttcttttatgtatttgcataattatcaatgcaacattctaggcgtaaaagtgcattctgacgtaccaggtaaaaattgtttggtttcttgacattttaagctcccagcacgtcttccgtttggcatggtttcggcagttctttctttttccccttatgacgcagtttgcttattgaaaattactcgcggttgttcc

SEQ ID NO: 132853 - DNA, 2049 bp, Zea Mays
ataaagatctccactccagtatcccctccccgtccgacttgcaacctctcctgaatcccaccgatcacgcgagctccccgccgcgatgtccgatcaccgagcgaagcggccgtccgacggcgcagccactgtggcatcgccggcggcgaagcgcgcccgcgacccgcccgcgccggcgttacccacgaacaaggaagctcccgacatggcccccaagacccgcatcttctgcgacatcctggcctcccgcgccgacgacgaggaactgaatgccgagctcgacaaggccgacatccgcgtaagcatcgctgacgtcgagcaggtgctccgcttctcctacgcgcacccgcgcgccgccgccgccttctttcgctgggcgggataccggtacctcggccacgagcactccccctactcgtggaacctcctcgtcgacatcctcggtaagaatcgcctcttcgagcccatgtgggacacagtcaaatctatgcagtcgcagcagctgctctcgctcgccactttcgcctccatattctcctccctggcggcgacccccggcggttccccgctcaaggcgttcatggacatgccccgctacggcatgacccgcgacacgccggcgctcaactcgctcctctccgcgctgtgtcgtgccaaccgcctcgacgacgctcgcgccgcgatcccagtagcccgcgccgaggctggcacgcgcccggatgccgactcctacgccatcctcctcgagggcagcgaggccgccgccgacctgcgggttgcgcgcgaggtgttcgacgaaatggtgcaggccattggattttatcctgacaacgtgcctgcctatgactccttcctcactacgcttgtttcaagtgactcctccacggcgctaccggaagcaatggagtacctaaatgtcttgagcaggcacggctgttcgccaggagagaagttcttccgtgctgctcttgctgcacaccttgatgcacgacaattgcgcggagccatgaatctctgggatgactttgttgggcgtcgaggactcgtcccagatatggaaatgtacaacacaatgatcaagctgcagggcagtctcgggcatgctgagctgatagtgggttatctcgacgacatgatctccaatggagtcttccctgataccaacacatacaatgtggtcctccagcttttgttgaagggaaagaagcaccgagaggcagccgcaatatttagcgagatggtcaagaacgaatgttggccaaacgagggaaattgttcacttgcacttcgcatgtttttggatacacactattgggagactgggatcaaagtctggtgctgcatggtggagaatggcttgccacctttacaggagtgtgggaacatgcttgtagcaaagctgaaggatgacaggctacctgaggcatgcaaatatgcagaagacatgattgatcggggtatcaagttgagttcagcgacactgtccaagctgaagcagcgcctgcagaggattaagaaaggagagatccatgatcacctgcttgcaaaatggaaggcacattagtttgttgtgctccctcgtatgggtaacctggtgcgatctcagtgttgacaatgaggttgagccttttatcactctgcaacgtttcaaacaacagttggaagtccctttctagtttctacattgaaattatcatattaatcagctggagcatttgggtctcaaggagtgagctggaacatcttccaagaaattctaccgtctgtatcaaatggctaagcctttttcaagaaagagtttgcccaggttatccatagagcatagaagaaatatttccttgaagaatgactagagcgtcagttgtggtcttttttaatatcttttgtgtcctttttttgtttcatgaattttgttgcttgcagctgtctggctgcaatttaggtagctgtttcttttatgtatttgcataattatcaatgcaacattctaggcgtaaaagtgcattctgacgtaccaggtaaaaattgtttggtttcttgacattttaa

SEQ ID NO: 132854 - DNA, 753 bp, Zea Mays
cgagagcagccgcacagaaaaaagccatcaaagagcaaggcacagtgctatagaggtaaacgggggagaagacgagcgaggccgaggacaatgggaacgagccttgcgcaggcggtgacggcgctgatgggcacgtgcgcgcggcagctgtcgcgggcggctcggcggctgcaccggcgcccgcgcgcgcggcaggcgctcgcggcgtccttgtcgtcgcgcgccgtcgtgccgttcctcgagaaggccgccgggtccaagaggaggaggagacgcgaacaggatgagccgagcttcgaggcagaggaggacggggtgtggaggaaggagataatgatgggggagcgctgccagccgctggaattctccggggccatctactacgacgccgagggccgccgcctcgagcagccgccgaccccgcgctcgccgcttcgcagcccgctgccgtccatcacgctcgcggcaatcgccggcggagggcactagcgcgcagctagagagcactcgatttcgctgtaaatgtacgtacatggtttttgttctctctcaatctcttgtgttggtttctctctctctggacgtcggcgtgtgctgcgagtaccatgtaaaacgtctatggaaatctggcttgctgttctctacaagctggcgcggctctgaatatctgctacagtacgtacagttctccatcggatccatcatcgtcagcattagtacagtacattactccattatattgtgaacaggttg

SEQ ID NO: 132855 - DNA, 674 bp, Zea Mays
caactaactggtgtatggcccactttttttctccagctgaaatatggttgcagcagctcagaggaccatcagtttgttagaggcataccaatatatgcaataagccaagtacttgagaagattatcactggaactgaaggaccttttcggcttatcaacggaataaagagggcaatgccatttgtcagacttttggaggtggaactttatccaactttgctatccaaggcaagaagttacggattgagtgataactgggtgcaggcccttgcgaagaaggatcctgtgcgtagacaagtcctacgggtgaaaggttgtttggctggatcgaaagcagaaaatcttctggagcagggagatatgattcttgctatcaacaaggagccaattacatgcttccttgacattgagaagacttgccaagagttggaccaatccattgggtcagatggagtgcttaacatgacaatattccgtcagggaaaagaaattgaccttgttgtcggaactgatgtaagagatggcaatggtacaacccgtatggttaattggtgtggttgcattatccaggatcctcactcagcagtgcgtgcacttggctttttgccagaagaaggtcatggtgtttatgttgctagatggtgtcatggccaatccggcacatagaaatgacc

SEQ ID NO: 132856 - DNA, 552 bp, Zea Mays
cagctgaaatatggttgcagcagctcagaggaccatcagtttgttagagggcaatgccatttgtcagacttttggaggtggaactttatccaactttgctatccaaggcaagaagttacggattgagtgataactgggtgcaggcccttgcgaagaaggatcctgtgcgtagacaagtcctacgggtgaaaggttgtttggctggatcgaaagcagaaaatcttctggagcagggagatatgattcttgctatcaacaaggagccaattacatgcttccttgacattgagaagacttgccaagagttggaccaatccattgggtcagatggagtgcttaacatgacaatattccgtcagggaaaagaaattgaccttgttgtcggaactgatgtaagagatggcaatggtacaacccgtatggttaattggtgtggttgcattatccaggatcctcactcagcagtgcgtgcacttggctttttgccagaagaaggtcatggtgtttatgttgctagatggtgtcatggccaatccggcacatagaaatgac

SEQ ID NO: 132857 - DNA, 573 bp, Zea Mays
cagttatctctatcttttcaggtgcatgtgccgcccgtttgcatgcttgatggagttcactctcaacatttttttggaacaggggttataatatatcattctgaacacctgggtctggttgcagttgataggaatacagtggctgtatctatctctgatataatgctttcttttgctgcatatcccattgaaatacctggggaggttgttttcctccatcctgttcacaactttgtcctggtcgcttatgatccttctgcactaggagctggagcatctgttgtccgggctgctaagcttctatcagaacctgctttgcgacgaggagattctgtctatctagttgggcttagtcgaagcttacaagcaacatcaaggaaatcaatcataactaatccttgcacagctgtcaatattgggtcagctgattgtccacgataccgtgccataaatatggaggtcattgagctcgatactgattttggtagcacattttcgggcatattaactgatgagcaaggaagagttcaagcattatgggctagcttttctacccaggttagttgcgctgag

SEQ ID NO: 132858 - DNA, 192 bp, Zea Mays
tggatcatcgaaattaatgggcaaccaacaactgatctggaaacttttataaaggtggtgaagggtctcgaagatggtgaatttgttagggtgaggacggtccatttaaatggaaagcctcggaggagcatagaggtatggaagttagaggttcgtgcctttgtttggattaagcaaccctgcactttgtag

SEQ ID NO: 132859 - DNA, 2256 bp, Zea Mays
cagtccagaaccatcccttccctcccatagccccgttcagaccgcccgattcccgttcccgcatcaccttcctccaccaccgcctcccacattcttcgcatccccttacttttttgtccttctatcgtcgtcgatccgggctcctgttttgcccgcacccgcacgcaggctggttgccaagaaagacagggcgagtgcgcggcgcccagctccgaccgtgcttcatagctcatctggccggggacggggatattcgcgttgctcgcttgcccggcgggtagctgtagcctgtaggcgagaatcgggaacgggggtgtttacaggccatgaagtataacacgaggaaagacgcgagcggtggcggtggcggcgcgccgtttgccatcccatgcgtcgacatcaagtcgttcgtggcctcgctcgccttcctcacgctgttcgtcgtgttctggcagctccagccctacggctccgtgctcaccgcggctcgcacctccgcctcgcccccttgcaccctcctccccacaaccgctgccatcgacctcgcctctcctgataccaccagcagcactgccgcaaagacggaccaaccggcggcggcggcggctgtttcagctactgccgccggcgcaaatgctgccccggtgtggttggcaaaggcagcgaggccggcgcggccggaagatccgaacaagcgcgtgttccggccgtacggtagcgcggcggcgctgttcgtgcagatgggcgcgtaccggggcgggccgcggacgttcgccatcgtggggctggcgtccaagcccacccacgtgttcggcaccccctacttcaagtgcgagtggctgcccaaccccaccgccggcgacccctcgccgcgccccgtccggaccaaggcgtacaagatgctcccggactggggctacggccgcgtctacaccgtggtcgtcgtcaactgcacgttcccctccaaccccaacgccaggaacgccggcggcaagctgctcgtccacgcctactactccaccgcctcccgccggcacgagcgcttcgtcgcgctggaggaggcgccgggctcctacgacgagtcccgcttcagcccgccgttccagtacgactacctctactgcggctcgtcgctatacggcaacctcagcgccagccgagtgcgcgagtgggtggcataccacgcgcgcttcttggggcccaggtcgcacttcgtactccatgacgccggcggcatcagcccggaggtgaaggcggtgctggatccgtgggtcagggccggccgggtcaccgtgcaggacatccgggcgcaggcggagtacgacggatactactacaaccagttcttggtggtgaacgactgcttgcaccggtaccggcacgccgccaattggaccttcttcttcgacgtcgacgagtacctttacctgcccaacgggcagaagctcgccgaagtgatcggccagctctcgggttactctcagttcaccattgagcagaatcccatgtccagcaagctctgcctgcaggatccgagcaggaattactcaagagaatggggatttgagaaactcgtcttccggaactcgatcaccaaagttcgccgggatcgcaagtacgtcatccagggccggaacgtgtactcagccggtgtgcacatgtcgcagaacctctacgggaggacgacccacaagacggagggcctgatcagatactaccactaccacgactccatcaacgtcatgggagagccttgccgtgagttcgtgccaatgccagcgaacggcagcaagacgatgttcgaaggggttccctatgtatacgacgataacatgaagcgattggctggcgagatcaaacggtttgagaaggtaacccttggatcagctcggacatagtagcagcttggcaactgaaggctggtggtacagatagatttgatattctttgagtgcctggctcatgtcatgtgtaccatggagctcactcttctacagttctactgatactgattggtcggcactgcatctggctggcgatggacctcttacggtggtccaaatggaaatggtgtaaagttttggtctttattggcatgatctctctacagggtcactgctagctgttggtgcaatctgtcctcttttacctttttctcctgtatcctctatccatgtctgtttatcgatctgtgtagactgtagactcatgaagctggctttttactagtattttattagaccttttgattctagc

SEQ ID NO: 132860 - DNA, 4132 bp, Zea Mays
atggcgtccggcgctggaccaggcgagcgcgaggaatttgtaaaccccggaccggcccgaccgacccataccaggcgctgcgccggaatctcgcggcacggctcgaccgcgcgcgcgtgtcccggtggccgctcacctatactatacgaggctacgaccgcgcgtgaaggcagtagaaaaagggaccgcgtgcgggtgcggtggtggcgccacgttagccgttcgttcgttggggggggagttgttgttcgtcggaccaaagagtccacgtgttctttgggcacgtggtggtgctgtgtcattaacaaatcagacattgcacgcgtttggttgaagctgaagcagcaggtgactgccaattcaggcgtagcgctgctagagcttgcatctgtgaacgtgtctcatggcaataatctttgcgcggtggagtaccgaaatgtaacctactgcacgagaagccactgcccctggaggctgttggaggccattccatgcacagagctacagaaggcatgctgctttaggatcagaggtgctctcttccccctgcctctttatggaaaatggagagtagtagtccgtgcagtttgcaaggaaaatggaagaaggaaaaagaaaaacagtagctgtgatagactgcaaagaggaggaggaaagacagcaatcgaagcgatgcatgcgcaaagagaacaaatggcccatgggcctccggcgcccagcagcccatcacgattgagtcaaatcggttccagtccatcagtggatgtgaagcggagcccgagtccaccaattatcgtgggccaaatgcccaccaggttcacgactacaaatcctactgatcgtccgcaaagcgagccatcgccatcgagcgcgcttgtcgctcgtctgccgaaacggtggactggggagccgcggggattcaggttcggaattcggaagacggatcctcctcgtcctcccgagtcccggcaacagctacgagtgagttctgctgacgcgagccttgccgcccagccccatgagagcaacctcgcaggaaaatggtggcgctgcgcgacgaatcctccttgtgcagagaacttttcaggtaatctaccgacaatggtaaatatagacaatcagtcgaagatggatgaaacagtacagtatattgcaacaaccttttcaccccgtcatgcggcaggccagcacatgacgacggggccttggcgccgtggcggccgcgccacgaccaacctcgcgctcctcctgctgctcgcgtgcgtcaccgtcgccgtccgctccatcccggccgcgctcgcccaggccacggtatccaccagcaccgtcgccggcgtggacttcaccaccttctccttccccgggttcgacaagaaccccaccgacctgacgctgtggggcaacgccagcgtcaaccagaacgcgctgcagatcacccccgacacaggcaacaacgccaatagcttcctcgtcgaccaggcaggccgcgcattctacgccacgccgttcacgctctgggccgccaacgcgtccagctccaactccagcgcccccggcggccggcgcgtcgcgtccttctccacggtgttcaaggccaacctctaccgccagaaccaggccgtcaagggcgaggggctggcgttcgtcgtcgcgtcgggcaacggtggccagccccccggcagctacggcgggtacctcggcctgaccaacgcgtccaccgacggcctcgccgccaacgggttcgtggccgtggagctggacacggtgaagcagccctacgaccccgacgacaaccacgtcgggctcgacctcaacggcgtccgctccgtctccgccgtcccgctcgcgccctacggcatccagctcgcccccaacgacactagcagctctggcgaccagatggtctgggtcgactacaacggcaccgcgcggcacgtgcgggtgtacatgtccgcgaacggttccagcgataagccggccaccgccgtgctcaacgcgtcgctggacctctccgagtacctcctcgggaacgacgcctacttcggcttctcggcgtccaccggcgtgggctaccagctcaactgcgtgctcatgtggaacatgacggtggaggtgctccacggcgcacgcgtccccagcaagaagctgtcgggctggaagctcgggctggccatcggcgtgccgtgcgccgccggcctagcgctcgggctgctcgcgggcctctacttgatgaagaagaggaggaaggtcggggacgacccgagctcggtgctccacaacaacgccattgacctgaggagcatcccgggcgtgcccaaggagttcgactacaaggagctgaggaaagggaccgacggcttcgacgacaggacgaagctggggcagggcgggtacggcgtggtgtaccgcgccaccgtgcccggggatggcggccagagcatggaggtggccgtgaagcagttcaccggtgccaacacccaggggcaggaggacttcctcgccgagctcagcatcattaaccgcctccgccaccggaatctcgtcaagctcgttggatggtgccaccaggacggcgtgctgctgctggtgtacgactacatgccacacggcagcctggacaggcacctcttcggcggcaaggatgcgccggcgctggactggaggcagcgctacaacgtggtcgccgacgtggcgtcggcgctgaactacctccaccacgagttcgaccagacggtgatccaccgcgacatcaagccgtccaacatcatgctggactcgtcgttccacgcgcggctcggcgacttcggcctggcgcgcgcgctcgagtccgacaagacctcctacacggacaaggtcggcgtgccgggcacgctggggtacatcgcgcccgagtgcttccacacggggcgggccacgcgagagtccgacgtgttcggcttcggcgccgtcatcctggagatcgtctgcggccgccgcgtctcctgcagcaacccagccgggtgcagccagctgctggagtgggtgtggaggctccacggcgcgggccgtgtcctggaggccgtggacccgcggctcgccgccggcgagtacgacgaggacgaggccgagcggctgctgctgctggggctggcgtgcagccacccgaacccgcggcagcggcccaaggcgcaggccatcttgcagaacctgcagacgcggtccgtgccacccctcctcgtgcccgtgtccaagccggtgttcatgtggcctgtgccgctcgccgacggggaggaggaagaggacgagacgcagacgttcatgtcgcgcagcggggtcactagctccgacgtgtcctcgtcgtcgaactacccctacacgtggtcgtcggggtataccacccagaccttccagcttagcagtgaggtgcagaacgcggcggggagggacgtgtccaccgtttgactgagacgggatcgagctcaccatgcagccgccgacaggacgcgtcaacgacgacgacggtggcgcacgtgcgcaagttgagcccgggccagtcggatctcacgctttcatcaagagacaaaagccggcccatggagctcgtggtggcaacgtgacaaaatagagtcgtcaacaaagactacaaagtgcatgccaaaacgcggataaaggttttccttgtcatagaagttttccattgcagctttgacctttcagcgactagcgtaatgggggtcctttttctacagctgtcgctcggtttgcttcttggaagccatcgcaacaaaagccgcccgacacatctctgtgtttgtcacttcgtcgggcatttttacctttgggtgacctgtttctgtttatgtgcagcagcaaaattttcagagtttcatgatccagggtcctgttgatttcgcatgtctgcaatgcagtagttatggtggagatccgaacaagtataaaaaaaatatgaaccaatagttagagcaaggattagaatgctgacgaatgagcactcgtcagagcctgtatcaatccagtgagatcattcttctcaaaacaacgcagctacttgctgctctcgtctcggttctctccctggaaaactatgcattcctcctcccacgattcccaaacagtccaagattcgatagtt

SEQ ID NO: 132861 - DNA, 797 bp, Zea Mays
gcaccaacatcctctccgagaccgtcaccgccgtcgacttttcggcctgcccattccgagttagtgcagactccacaaccgtcctcgccgatgcggttatcgttgccacgggagccgtcgcgcggcgcctccacttccccgggtccgatgcatactggaaccgcggcatctccgcctgtgccgtctgtgacggtgccgcccccatcttccgtaacaagcccatcgccgtcataggcggcggcgactccgctatggaggagtccaatttcctcaccaaggtgcatggctgcattggacgctgagcactacctgcaggagatcggtgcacaggagggaaagtctgattgactatatttaggtgtagcaaccagcaatccatcgaatagtcagttgtcggtgctgaaagccgctctctgatgcgcgtttatgccatgggttgtcatgagctcacgattgagatacctgatgatttatgctgcttagtagcatgctattcttatcgttaggatccagaagtatgtctgaactctgaactatttactggatacctattcgtgattactgccttgaagtttttccttagatatctctattgctcaagtctcacattattgtgttaattgtggtgttatgctgaactcatttgcatcgatgtctagcctcccagctgcaggtcagtttctttctttctttcttttcagagtaaattgatgtctttttaatgcgatcattgatgttgtttctagatggtcacatataatgctacctaattttagaacttgtttggtttgagggac

SEQ ID NO: 132862 - DNA, 1573 bp, Zea Mays
gtaactttttggtgttccaagtgaccaagtcagtaaccagacaaccatagaccgacgaggtgtgaactgtaatttcagatttcagagcgcgcaagaaccctcttgaccaccgccgccgccgccgcgaagccaagccaaactgagtaagcagctatggagggatccgccgccgctccgctccgcacgcgcatctgcatcatcgggagcggtcccgctgcgcacacggcagccatctacgcggcccgcgcggagctcaagcctgtgctcttcgagggctggatggccaacgacatcgccgcgggcgggcagctcaccaccaccaccgacgtcgagaacttcccgggcttccccaacggcatcatgggcgccgacctcatggacaactgccgcgcgcagtccctgcgctttggcaccaacatcctctccgagaccgtcaccgccgtcgacttttcggcctgcccattccgagttagtgcagactccacaaccgtcctcgccgatgcggttatcgttgccacgggagccgtcgcgcggcgcctccacttccccgggtccgatgcatactggaaccgcggcatctccgcctgtgccgtctgtgacggtgccgcccccatcttccgtaacaagcccatcgccgtcataggcggcggcgactccgctatggaggagtccaatttcctcaccaagtacggctcccacgtctacatcatccaccgccgcaataccttccgtgcttccaagatcatgcaggccagggcgcttgagaaccccaaaattaaggtcctctgggactcggaagttgtcgaggcctatggcggcgcaaacggcggcccattggctggcgtaaaggttaagaacctactgaatggtgaggtctcggatcttcaggtgtctggcctcttcttcgccatcgggcatgagccggcgaccaaattcctgggcggacagcttgaactcgattcagatggttatgtggaaaccaagccaggttccactcacaccagtgtaaagggtgtatttgctgctggcgacgtgcaggacaagaagtaccgtcaggccattactgccgctggatcagggtgcatggctgcattggacgctgagcactacctgcaggagatcggtgcacaggagggaaagtctgattgactatatttaggtgtagcaaccagcaatccatcgaatagtcagttgtcggtgctgaaagccgctctctgatgcgcgtttatgccatgggttgtcatgagctcacgattgagatacctgatgatttatgctgcttagtagcatgctattcttatcgttaggatccagaagtatgtctgaactctgaactatttactggatacctattcgtgattactgccttgaagtttttccttagatatctctattgctcaagtctcacattattgtgttaattgtggtgttatgctgaactcatttgcatcgatgtctagcctcccagctgcaggtcagtttctttctttctttcttttcagagtaaattgatgtctttttaatgcgatcattgatgttgtttctagatggtcacatataatgctacctaatt

SEQ ID NO: 132863 - DNA, 1764 bp, Zea Mays
atggacgtgcgccggctcggaggccgcatcgcggcggcgctgagggcgctcggcgcggggggctcgctgtcgctgcccatcccggcgtggatcacaaacgcccttgcgatgatctcgctcgtgctctcctcctgcgacctgctccgcctctgcagcgacagggaccgccggctccggttctcgctcggcggccgcgagttcgtcaccgtggtctgccagctggcctccatcgtgtacctcttcagcctttgcggcaccggcatcccgtctgcggaccccgagacccccgcccgccgcgaccagggcgccggctcccccgaccaaacgcgcgccgccgacgcgccggagacattgcatggcggggacgaggagatcgttgccgccgtggtgtccggggcgctgccgtcgcaccacctcgagtcgcgcctcggagactgccgccgcgcggccagtctgcggcgggaggcgctacggcggatgacggggcggggcgtcgacgggctcccgctcgacgggatggactaccaggctatcctggggcaatgctgcgagatgcccatcgggtacgtgcagttgccggtcggggtcgccgggccgctgctcctggatgggaaacagtaccatgttcccatggctacaaccgagggatgtctcgtggctagcgtcaaccgcggctgcagagccatcgcggcgtctgggggcgccgtcagtgtgctgctccgggatgcaatgtctcgtgcgcctgtcgttaagttgccgtcgataaagagggcagcggagctcaaggcgttcgtcgagacaattaccaattttgagattctgtctgctgtcttcaataggtccagcagatttgggaagcttcagggtattcagtgtgcactagcaggtaggaacctttacatgaggttcacttgtagtactggagatgccatgggaatgaatatggtgtcaaaaggtgttgaggatgtcttgggctacttgcagaatgatttccccgacatggatctcatcagcctatctggtttggttcttcccttctgttatagcaaagaaaagctagttttgcactctttcaataaaactgttcaagaaaaaaatatcagacaactaaacacaatctaccattgccaccttttcttactcgtcattgcaactgcaaggctatccccagcaggtaactattgttcagacaagaaggctgcagctgtaaactggatagaaggtcgcgggaaatctgttgtttgtgaggccacagtcaaagggggagttgtgcagagtgttcttaagacttctgtgcaaaaacttatcgagcttaatattgtaaagaatctcgctgggtcagctgtagccggagctcttggaggtttcaatgcccatgcaagcaatatcgtaactgccctgttcattgctacggggcaggatcctgcccaaaatgttgaaagctcgcagtgcataaccatgatggaggcagtgaatgatggaagtgaccttcacgtttctgtgaccatgccttctattgaggtaggcactgttgggggcggcacttgtcttgcttcacaggctgcatgtctgaacctgcttggtgtgaggggtccgaatcgtgactcacctggggcaaatgctaagcttctggctaccattgtcgctggcagtgtgcttgctggcgagctctctctcctgtcagcccttgctgcaggccaacttgtgaagagccacatgaagtacaatcgatcaagcaaagatgtgccaggtgctgcttcttga

SEQ ID NO: 132864 - DNA, 2949 bp, Zea Mays
gagagctcatggcgtgagcgaggggttgcaggcagcgctcgcctccgcccttctggtataaaagcctctcacgccgcacccacatttctcacatcacagtgcgggcggcgggcgccactctcacacctaccaggaaaccaatcaaaacttaaaaccaatcgaaattagaccggcgacgaggattagcgctcgccggcgatggattctgactacggcgtgcctcgcgagctctcggaggtgcagaagaagcgcacgctctaccagcccgagctgcccccctgcctccagggcaccactgtcagggtggagtatggtgatgctgcaattgcagctgacccggcaggtgctcatgtgatcagccatgcattccctcatacctatgggcagcctattgctcattttctcaggaagacagctgttgtccctgatgctaaggtcatatctgaacaccaggcggtcagggttggcattgtcttctgtggcagacaatccccaggaggccacaatgttgtttgggggctctatgaggctatcaaggcccacaaccaaaacagcaaactcattggtttccttggtggatcagatggtctgctagcacagagaaccttggagatcactgataaagttattgcttcatataaaaatcaaggtggatatgacatgcttggtcgaacaaaggatcagattaggacgacagagcaggtcaatggtgctatggctagttgccaagctttgaagttggatgctctggttatcattggaggtgtcacttccaacactgatgctgctcaacttgccgagacatttgctgaggcaaagtgtgcaacaaaggttgtaggtgttcctgtaactttaaatggggaccttaagaaccagtttgttgagacaaccgttggctttgacaccatatgcaaggtgaacgcacaacttatcagcaatgtatgcactgatgctctatctgctgagaagtattactactttattcgcctgatgggacgcaaggcttctcatgtggcattggaatgtgctcttcaatcacatccaaacatggttatcctaggagaggaggtggctgcttccaaacttacaatttttgatattacgaagcagatttgtgatgcagttcaggcaagggctgaaaaagacaagaaccatggggttattcttattcctgagggccttgtggagagtattcctgaactatatgctctgcttcaggaaatccatggcctccatggcaaaggtgtttctgttgagaatatctcttctcagctttcaccttgggcatctgcactctttgagtttttgcccccttttatcaggaagcagctactactacatcctgaatctgatgattcagctcaactttcccagattgagactgaaaagctgctagcccagttagttgagactgagatgaacagacgtttgaaggagggcacttacaaaggaaagaagtttaatgcaatctgtcacttctttggctaccaagctaggggagcactgccttcaaagtttgattgcgattatgcctacgttttggggcatgtgtgctaccacatcatagctgccggattgaacagttacatggctacggtgacaaatcttaagaatccagtgaacaagtggcgatgcggcgcgactcctatttcgtctatgatgactgtgaagcgatggtcgcgtggcccttcagccacccaaattggaaagcccgctgttcacatggctagcgttgacttgaaaggaaaagcatacgatgtgttgagacagaattcttccagctttttgttggaagatgtctacagaaacccaggcccgctccagtttgaaggaccaggtgccgattcaaagcctatttcattgtgcgttgaggatcaagactatatgggcagaataaaaaagttgcaggaatacttggagaaggtgaagaggattgtgaagcctgggtgctcgcaggatgttcttaaagcggcgctgagtgccatgtcttctgtgacggaaacactgaacatcatgacttcatcttctaccggccagactccactgagtcattaggtaccatttcatggtatggatcataatccccacttttttcagtggtggcgattaacgagtttaggaacagcaaccctggtatcatacgggttattcttttgtagccttttggagagttctatcggttttggattcggtagtttatgaaggcttgttgatgagtttgagctcgaatagcttttgaaacagccggatgatgccatctttaataaaccaaattctgtgactgcattcacatttctgtcagtcacctgagtgagaaaatgtgagtctcagcaatctcttcatctgaaattgtttgcttgttgctttttgcatggaggcttcaagcgatttgatcgttggtctgagcttaatctctttcatggcgtactacatgtcatagtgtaaaattaggtatttatagtgtgcttcttttgggaaataagctagtttatcttctcacccacttttttgttttgtttgtcgaatggaatgagttggtccatcatcacctcattcctcatagttagttatagggtatttggtttgaggaataagttagtccaccattttcatacttctcacttttttgtttggttttgtggaatgaaataagttgatccagcaccacctcatttttattaggatgtttggtttgaggaatgagctagtccatcatcttctcacacatttttgtttggtttgtagaatgtgatgagttgatccatcatcacctcgtcccttatagttaattagttaatactaatatgaggaatggagcaatcccactaaatttgaggaatagattcatgatacatcacattattttggatggagtgatttctcaaaccaaacatccctatagttagttagtactaacatggggaatgaggtcattccaccaaatttgag

SEQ ID NO: 132865 - DNA, 2098 bp, Zea Mays
gagagctcatggcgtgagcgaggggttgcaggcagcgctcgcctccgcccttctggtataaaagcctctcacgccgcacccacatttctcacatcacagtgcgggcggcgggcgccactctcacacctaccaggaaaccaatcaaaacttaaaaccaatcgaaattagaccggcgacgaggattagcgctcgccggcgatggattctgactacggcgtgcctcgcgagctctcggaggtgcagaagaagcgcacgctctaccagcccgagctgcccccctgcctccagggcaccactgtcagggtggagtatggtgatgctgcaattgcagctgacccggcaggtgctcatgtgatcagccatgcattccctcatacctatgggcagcctattgctcattttctcaggaagacagctgttgtccctgatgctaaggtcatatctgaacaccaggcggtcagggttggcattgtcttctgtggcagacaatccccaggaggccacaatgttgtttgggggctctatgaggctatcaaggcccacaaccaaaacagcaaactcattggtttccttggtggatcagatggtctgctagcacagagaaccttggagatcactgataaagttattgcttcatataaaaatcaaggtggatatgacatgcttggtcgaacaaaggatcagattaggacgacagagcaggtcaatggtgctatggctagttgccaagctttgaagttggatgctctggttatcattggaggtgtcacttccaacactgatgctgctcaacttgccgagacatttgctgaggcaaagtgtgcaacaaaggttgtaggtgttcctgtaactttaaatggggaccttaagaaccagtttgttgagacaaccgttggctttgacaccatatgcaaggtgaacgcacaacttatcagcaatgtatgcactgatgctctatctgctgagaagtattactactttattcgcctgatgggacgcaaggcttctcatgtggcattggaatgtgctcttcaatcacatccaaacatggttatcctaggagaggaggtggctgcttccaaacttacaatttttgatattacgaagcagatttgtgatgcagttcaggcaagggctgaaaaagacaagaaccatggggttattcttattcctgagggccttgtggagagtattcctgaactatatgctctgcttcaggaaatccatggcctccatggcaaaggtgtttctgttgagaatatctcttctcagctttcaccttgggcatctgcactctttgagtttttgcccccttttatcaggaagcagctactactacatcctgaatctgatgattcagctcaactttcccagattgagactgaaaagctgctagcccagttagttgagactgagatgaacagacgtttgaaggagggcacttacaaaggaaagaagtttaatgcaatctgtcacttctttggctaccaagctaggggagcactgccttcaaagtttgattgcgattatgcctacgttttggggcatgtgtgctaccacatcatagctgccggattgaacagttacatggctacggtgacaaatcttaagaatccagtgaacaagtggcgatgcggcgcgactcctatttcgtctatgatgactgtgaagcgatggtcgcgtggcccttcagccacccaaattggaaagcccgctgttcacatggctagcgttgacttgaaaggaaaagcatacgatgtgttgagacagaattcttccagctttttgttggaagatgtctacagaaacccaggcccgctccagtttgaaggaccaggtgccgattcaaagcctatttcattgtgcgttgaggatcaagactatatgggcagaataaaaaagttgcaggaatacttggagaaggtgaagaggattgtgaagcctgggtgctcgcaggatgttcttaaagcggcgctgagtgccatgtcttctgtgacggaaacactgaacatcatgacttcatcttctaccggccagactccactgagtcattaggtaccatttcatgccttttggagagttctatcggttttggatt

SEQ ID NO: 132866 - DNA, 1719 bp, Zea Mays
atgagcgacccgcggggccgcgccgccggtcccgaccgctacggggacgaaccgcacgacctcccgctcgccgaggacgcaaacggcgaggaagcgtggcagacgcccgagaaagaggcggttgccgtgtcggaaggggccgctgcgcggagtggggatacgaccccggacgctgaacaggagagcgatgacggagaggaaggagtgggctccccggatcaggcggaacccaatgcgagcggggagggcgtaccgcccgtggccgcgactgtggagccggatgggattgttagcggcgcaaaggtggagacgaacagcgaggacgccatcagccatgacgccgacgaggaggagaaggacgacgacgatgactccacccaggatgcgtctccgatagccgaggtgaatgtggagggcgagagtggcgccgttcaccgcttggaggtggaaccggacccctttctcgatggagatgcctctgggacggaggaggagcaagccgcgttcatggtggagctggagcgcttccataaggagcacagtctcgagttcaagccgcccaagttctatggcaagggcctcaactgcctcaagtgtgcatctgaactgaaccactcctactctgagatattccgtaccgtcttttgttgtctaaacgcacttgccccctgtttggctgtttggtgttgctatgttggaatccaggtaacggtttgtaaactatggcgtcaagttggagagactttcaggccgccaaagacctgcacgactgtttcttggtcatttcgaattttctatgagaaggcacttcttgaatacgaaaaacacaaagtccggactggtcagcttcagataccaccgcctggtttaccacagcctagtggtgctgaccgtgaggtagttgtaaatcaatcatcttctgccagagttagaagggatgttgcagcacgtgctatgcagggttggcatgctcaccgcctccttgccaatggcacttatggggataacattttgaaggacaaagattcaatgccatcttcaagtcgtgataacctaaaaagctttggggtgctcaagagaaagaaagcatctagtccagagtatgctctcaagtcgtcctgctcaaaaataaataagtctgaggaagattctatggtcattgacgttggagaaccagccgactgggtgaagatcaatgtgcggcagactaaagattgctttgaagtctatgcactagttcctggacttctacgtgaggaggtgcatgttcaatcagatcctgctggacgtctggttatcacaggggatccagagcagcctgataatccttgggagatcactccgttcaagaaggtggtcaacttgccatcaagaatcaatcctcaccaaacatccgctgttgtcacgcttcatgggtttatgtcagttctgttgaggaaataggatttcatttgagcagatacatgatgtcaagctgacttagcagaactcttctgtagttggatgctggttgctggtgttgcgatctgttgccaccttgtttattgttacagtagtagccataaaattagttggttcatgtgtgtattccagtttcatagagaaaggacatgttggtcgtagtagggctaatttgacattatggttactaattattctttaaatacctctctggatcactccagggcgccctaaagctgcattttttatttatttatg

SEQ ID NO: 132867 - DNA, 1592 bp, Zea Mays
gaaggggaggaatcccttcctccgcgagtcgcgagccgtggagatccgtcccactccacccctccgctccgccccagacctcgctacaaacctgccgcgaaaatagcagccgcccgtttgctctctcccgtctccgcactcctcccgcgatgagcgacccgcggggccgcgccgccggtcccgaccgctacggggacgaaccgcacgacctcccgctcgccgaggacgcaaacggcgaggaagcgtggcagacgcccgagaaagaggcggttgccgtgtcggaaggggccgctgcgcggagtggggatacgaccccggacgctgaacaggagagcgatgacggagaggaaggagtgggctccccggatcaggcggaacccaatgcgagcggggagggcgtaccgcccgtggccgcgactgtggagccggatgggattgttagcggcgcaaaggtggagacgaacagcgaggacgccatcagccatgacgccgacgaggaggagaaggacgacgacgatgactccacccaggatgcgtctccgatagccgaggtgaatgtggagggcgagagtggcgccgttcaccgcttggaggtggaaccggacccctttctcgatggagatgcctctgggacggaggaggagcaagccgcgttcatggtggagctggagcgcttccataaggagcacagtctcgagttcaagccgcccaagttctatggcaagggcctcaactgcctcaagttatggaggcaggtcgcccacctgggaggccacgagcaggtaacggtttgtaaactatggcgtcaagttggagagactttcaggccgccaaagacctgcacgactgtttcttggtcatttcgaattttctatgagaaggcacttcttgaatacgaaaaacacaaagtccggactggtcagcttcagataccaccgcctggtttaccacagcctagtggtgctgaccgtgaggtagttgtaaatcaatcatcttctgccagagttagaagggatgttgcagcacgtgctatgcagggttggcatgctcaccgcctccttgccaatggcacttatggggataacattttgaaggacaaagattcaatgccatcttcaagtcgtgataacctaaaaagctttgatgaagaaatacaaaatcttgtagcaccttgtagtgcaattgaactcatctggaggaagttttgtccatatatccggatgatgtatgaaagtttctctggtgtgatgattcctgttctcatatgtaatggaatgcgcaatttcagggaagattctatggtcattgacgttggagaaccagccgactgggtgaagatcaatgtgcggcagactaaagattgctttgaagtctatgcactagttcctggacttctacgtgaggaggtgcatgttcaatcagatcctgctggacgtctggttatcacaggggatccagagcagcctgataatccttgggagatcactccgttcaagaaggtggtggtcaacttgccatcaagaatcaatcctcaccaaacatccgctgttgtcacgcttcatgggtttatgtcagttctgttgaggaaatag

SEQ ID NO: 132868 - DNA, 99 bp, Zea Mays
tctttttggaagcctaaaccctagaccccagtccccagccgcgctagagaatcaaagcggcctgcgatgtgaagatacggcgacgcgaacagtgtgggg

SEQ ID NO: 132869 - DNA, 876 bp, Zea Mays
ctgaccattggaaagtgctgtaacagcttgtggaaccgcttccacgcaccgtcatctggaaaggcaatggtgatctgcacgcaacatgccatgggtcaggactgcagtaagaatttatccctcaaaaaaaagtttgttcgcacattagtgtatgccactacgcacattttctgcgtccgggagctggcggaggcgctgcagcaggagcgggatccctgtctcgaagcatggcaggacgtcgtccccgaagtagaacctctcctggagcgcgtggatgtcgtagatgacgacgctggtaggcccgccgcgcgacttggggatcatcgagagaatgcgcgcgagggtgaacgcggtggcgacatcgccctcctcctcaacgcgctcgaatgagcccgtggggaagaaaggcagcacgagagtgaatgaggcaatgaatagcttgggcagcgcgaagatgacggagatctgctcgaatatgaccgacggcgagctgaaggaggccaggaacgccacgtgctgcccacggatgtcgtgcgccttgttgatgaacaggttcgggaacccgtcgtcgaagctcctggtgttgatggattggagctcgatggcgtcggagctggcggcgatcttgagggcgagctcctcgcattctgagcagtagaagaggtgtatgtgtttcttcgccttctgcttcgcggcgacgacgacctccatctgcgggtttcggcggcggcggggactggggagtggggaaccaaaaagaacggcgcggggaggggcagactctgctttgacggaacagttgggggtcgggcggtcggctttatcgagacgcgaagtgcgcaacactgcgaatattttctttgcttgatttttgga

SEQ ID NO: 132870 - DNA, 620 bp, Zea Mays
ttcagttacattgcactatttgttcacaacaaagcccagtacctgaagttgctaaaccgatactccgacgggtcaggaaagtaaagcactggtctcgcgcacttcaaacagaagtgaacattgacaaatacacagctgtcaacaattgagtatccaatgcctgattttattacaaaccacagggctgtttatggaaccttcaggtacttaacttactacacattatttgcttttccaggaactggaaaccaactcttacatttaggaaaagcgggagcattccacctcatagtacaagtttcaatctggtgggcatcaacaatccaagcccatgcccatctaccagtgtacgctcatatctgaagagcatctgcaattgagccagcgaggctcagaacctcaaatggaggtctttgcccaatagcttttactgtgtgtgggcatgagtccgtgatccagaagtaagcaaatctgtcacctggccccagctaactagacgccatgaaacgttcatatgactgcttaggaaacacagcatgagtcacataagcactgacttttgcagcgccatgcaaagctagaactttctgcaaaacaagacatattttttttaaaaaaaa

SEQ ID NO: 132871 - DNA, 618 bp, Zea Mays
atctaacaatggctagttacattacagctcatccaagaaagcgacctgttaaactttcaccagttcacagtatcaccacaaagtacatccgatccgaccacaggcagatgtcaggagggatacgatctggggattgctcatacgcctgacgcctcctcctcaataaaaaccaagcatgaagcttggaagttggaaccactgttacaggatccgcagtgtacgtacatgtgaaccaaacacgaattcacgctctgcctctcttgagaaggtaccggagggagaagtaccccagagcgaaggtctgccagaaccacccggcagcgttcctcgggtcaacccttctcgccaagaaccaggcgtacacggcttcgccagcatgcagtgcgatcgctaccgccaagaccagccggatcacgagcatcgagcggaaaacaaacatgtggacgtcgagcacccatttcaacgggccgactggcgggaggcaggcggcagaaaacacggccagcatcccgatcgttacggccagccaagtaaatatggtcgggccatccagctccattctcttccgctcttgccagtacgagatcgttgcggccaagccttcgtggggcctcacaa

SEQ ID NO: 132872 - DNA, 481 bp, Zea Mays
catacaagatacaaaaaacaaaatcgggtacaactacaaaaaaaaagagaaacagtaataaggagaaaacgaattatacctatatggcacattgaccgcgattatgtacaccgcagcgtcatccctttattggatatggttttcaccactaaactaatttcatggcttcatctctgtatcttggcaataaaaccttggcctggaaagctttgccaccaagcctgttctctgcagcatgcacttactaaccaatctaatggcaccttcccgtgttttcgtcccaagcttttgtactcagttctgctcagacaaataactgtaacagtatagggtgaaagaataagttcatatcttgtgtcagtgtctactgtgcttgtgctccttattttctgagaaagggcttctgacagacgagtagcttttcatcactagctatgtcaagatctaaaatacgggcatcccataaaagttgagtaacaac

SEQ ID NO: 132873 - DNA, 1062 bp, Zea Mays
atgacttcacagcaaagaattgagattacaaagcctgaactacttgggagcaatgaagaggccaatgtagatgctttccgagtagatggagcttttgatgttaactccaagaatgatatatctattcatgattatcttccagcaatgaaagccatatgtgataaacttgaagaagcaagtggaaaggtcgactgctctcacattttccctattaaagctatgctggctcttgttgtgtcagatataaaagttgatctcgactacaggatggcatatgggcacagagcatggagaaatgtggtgatacgtgaattgattccattcctcatactgagcaaagtattgcatagattaatagatgcacgacttgtggagatatttgatgccgaagatgatgataaggttgtccgttgtttgcgtctactgaaaaattttgatccaaatgagtttcagccaaaaagtatagcttcaaattttaaatttgttaaaaaaggtcaggcaactgatcaaattttggaacttccattagagaactgtatatatgatatgatcagtagccaagggacaaaaggtattacacttgttgagattggcaaacatcttggactcaacaattcaaaaaaacttcataaacgagtatcatccatgctaaaaaaattcaacctaacatgggaagcagaagttccagacaagacatcgcagtaccgaatttggacttcaaaaaacttctcactctacaaagctggtactgctctgcaaaattttgaggcactctcagaagactgtgatgattgttcggatttgtggtccctagtttcatctaaagatttggaatcacctagttcacagggcaaattactcttgcttgaagaagagaaccatgacaaaccaattggacatcatatccagaacaaccgtgatgcttctgctgcagtttcccagttagttgaagaagataaacttgcttcgaatcagaggaggcgtcggtgccgtccattatcttctgatgatcaacgccatagaaggattctacacatgttaaaggttgcttcccaagtactt

SEQ ID NO: 132874 - DNA, 1209 bp, Zea Mays
ttttttttggatttgatgcttacatgtagatggataagaagaccaaggttattagttttgtgttgctgctgcacatatattactgtcaatgatgggctatgattattcattctagaaaaagaaaacgaaatgcaagggaggactgggattacctatgcaccaatgcatgaaagggatagaactagaattgaatatctcaacacaaaagatttggagggatgacacatgtataaacatgattagaatgaaaagggcttgtttctttcaacctaactaaacattttagagagcgtggttttacttcaggacactatccatatgtgtgttgaacaacaagtggccatgtttctaaatacagttgggcataaccttagaaataggttgattggcacgaattttggtagatctggggaaacagttagtcgatgtttcaataaagttcttcgtgcaattggtgagctacgtggggaactaattaggccaccttcattggacactccaaccaaaatagcagggaactacagatgggatccgtattttaaggattgtattggagctattgatggtacacatgtaagagccactgttcctagagatatggagcatgcctttcgtggtaggaagtcctatgcgactcaaaatgtaatggcggctgtagattttgatctacgcttcacttatgtgttggctggttgggagggaacagctcatgatgctaatgtattacgagatgctttagaacgtgtggatggccttcgcgttccacaaggtaaattctacctagttgatgcgggatatggagcaaaaccaggattcttgcctcctttccgtggcgtgagataccatttaaacgaatggggcaataatcccgtacagaacgagaaagagttgtttaatctaaggcactcatctcttcgcgtcacagttgagcgtgcattcgggtcattgaagagaagattcaagattttagatgatgcatctcctttcttcccttttccaacacaagttgatattgttgttgcttgttgtatcattcataattgggtcatacaagatgggagtgatgagtttattatacaagattctaattggcctataaacagtcatgctacatctttagttggccaagcaagtgagcatgctgctatggttgctttgaggcaaggaattgcagaccagatgtggacagaccatcagaactacaacgga

SEQ ID NO: 132875 - DNA, 1961 bp, Zea Mays
gctgtaaagtctgcattttattagttctgtgtggtggtaatcagaattgctggtttgggctcgcacatgctgtgatccccaacttgctgtggcgtggtagttggatcgtgtttaggcaagaaagtaaatgcgatcatgcacggcatatttgccaccttcctgggagacgccccctcgtgccgtgatctgttttactttggttgattggtggcctttctcgtggttcacgtgacagcttttttgatgggatgagatcactgtaatgttgttcttgattcacgctcgcttgatcttactgtagcgtactacctcgtttgtgtcagtcaggagcaagatgggtgccggcggcaggatgaccgagaaggagcgggagaagcaggagcagctcgcccgagctaccggtggcgccgcgatgcagcggtcgccggtggagaagcctccgttcactctgggtcagatcaagaaggccatcccgccacactgcttcgagcgctcggtgctcaagtccttctcgtacgtggtccacgacctggtgatcgccgcggcgctcctctacttcgcgctggccatcataccggcgctcccaagcccgctccgctacgccgcctggccgctgtactggatcgcgcaggggtgcgtgtgcaccggcgtgtgggtcatcgcgcacgagtgcggccaccacgccttctcggactactcgctcctggacgacgtggtcggcctggtgctgcactcgtcgctcatggtgccctacttctcgtggaagtacagccaccggcgccaccactccaacacggggtccctggagcgcgacgaggtgttcgtgcccaagaagaaggaggcgctgccgtggtacaccccgtacgtgtacaacaaccccggtcggccgggtggtgcacatcgtggtgcagctcaccctcgggtggccgctgtacctggcgaccaacgcgtcggggcggccgtacccgcgcttcgcctgccacttcgacccctacggccccatctacaacgaccgggagcgcgcccagatcttcgtctcggacgccggcgtcgtggccgtggcgttcgggctgtacaagctggcggcggcgttcggggtctggtgggtggtgcgcgtgtacgccgtgccgctgctgatcgtgaacgcgtggctggtgctcatcacctacctgcagcacacccacccgtcgctcccccactacgactcgagcgagtgggactggctgcgcggcgcgctggccaccatggaccgcgactacggcatcctcaaccgcgtgttccacaacatcacggacacgcacgtcgcgcaccacctcttctccaccatgccgcactaccacgccatggaggccaccaaggcgatcaggcccatcctcggggactactaccacttcgacccgacccctgttgccaaggcgacctggcgcgaggccagggagtgcatctacgtcgagcccgaggaccgcaagggcgtcttctggtacaacaagaagttctagccgccgccgctcgcagagctgagaggacgctaccataggaatgggagcaggaaccaggaggaggagacggtactcgccccaaagtctccgtcaacctatctaatcgttagtcgtcagtcttttagacgggaagagagatcatttgggcacagagacgaaggcttactgcagtgccatcgctagagctgccatcaagtacaagtaggcaaattcgtcaacttagtgtgtcccatgttgtttttcttagtcgtccgctgctgtaggctttccggcggcggtcgtttgtgtggttggcatccgtggccatgcctgtgcgtgcgtggccgcgcttgtcgtgtgcgtctgtcgtcgcgttggcgtcgtctcttcgtgctccccgtgtgttgttgtaaaacaagaagatgttttctggtgtctttggcggaataacagatcgtccgaacgacaacctttttttgggta

SEQ ID NO: 132876 - DNA, 1893 bp, Zea Mays
gagcttgacatcgatctcaccggcgggcatccgcagaggccttgcgctgccgatgtggatttgcccagattagtcctggcaaagcgcgcttgtttcccatctcatcagatctgtaggattcagcgagtggtgccgatcagatattttgcccgtgcaatggatccatgatctctgccccctcctgcccactcgtttcgggaacatgacatgccacttttggccacgaacttttcgcagctcccgtcaatcttgtggtcaggagcaagatgggtgccggcggcaggatgaccgagaaggagcgggagaagcaggagcagctcgcccgagctaccggtggcgccgcgatgcagcggtcgccggtggagaagcctccgttcactctgggtcagatcaagaaggccatcccgccacactgcttcgagcgctcggtgctcaagtccttctcgtacgtggtccacgacctggtgatcgccgcggcgctcctctacttcgcgctggccatcataccggcgctcccaagcccgctccgctacgccgcctggccgctgtactggatcgcgcaggggtgcgtgtgcaccggcgtgtgggtcatcgcgcacgagtgcggccaccacgccttctcggactactcgctcctggacgacgtggtcggcctggtgctgcactcgtcgctcatggtgccctacttctcgtggaagtacagccaccggcgccaccactccaacacggggtccctggagcgcgacgaggtgttcgtgcccaagaagaaggaggcgctgccgtggtacaccccgtacgtgtacaacaaccccggtcggccgggtggtgcacatcgtggtgcagctcaccctcgggtggccgctgtacctggcgaccaacgcgtcggggcggccgtacccgcgcttcgcctgccacttcgacccctacggccccatctacaacgaccgggagcgcgcccagatcttcgtctcggacgccggcgtcgtggccgtggcgttcgggctgtacaagctggcggcggcgttcggggtctggtgggtggtgcgcgtgtacgccgtgccgctgctgatcgtgaacgcgtggctggtgctcatcacctacctgcagcacacccacccgtcgctcccccactacgactcgagcgagtgggactggctgcgcggcgcgctggccaccatggaccgcgactacggcatcctcaaccgcgtgttccacaacatcacggacacgcacgtcgcgcaccacctcttctccaccatgccgcactaccacgccatggaggccaccaaggcgatcaggcccatcctcggggactactaccacttcgacccgacccctgttgccaaggcgacctggcgcgaggccagggagtgcatctacgtcgagcccgaggaccgcaagggcgtcttctggtacaacaagaagttctagccgccgccgctcgcagagctgagaggacgctaccataggaatgggagcaggaaccaggaggaggagacggtactcgccccaaagtctccgtcaacctatctaatcgttagtcgtcagtcttttagacgggaagagagatcatttgggcacagagacgaaggcttactgcagtgccatcgctagagctgccatcaagtacaagtaggcaaattcgtcaacttagtgtgtcccatgttgtttttcttagtcgtccgctgctgtaggctttccggcggcggtcgtttgtgtggttggcatccgtggccatgcctgtgcgtgcgtggccgcgcttgtcgtgtgcgtctgtcgtcgcgttggcgtcgtctcttcgtgctccccgtgtgttgttgtaaaacaagaagatgttttctggtgtctttggcggaataacagatcgtccgaacgacaacctttttttgggta

SEQ ID NO: 132877 - DNA, 1797 bp, Zea Mays
gaatcggaggcggccaggctccctcctcctccctgcaaatcctgcagacaccaccgctcgtttttctctccgggacaggagaaaaggggagagagaggtgaggcgcggtgtccgcccgatctgctctgccccgacgcagctgttacgacctcctcagtctcaggagcaagatgggtgccggcggcaggatgaccgagaaggagcgggagaagcaggagcagctcgcccgagctaccggtggcgccgcgatgcagcggtcgccggtggagaagcctccgttcactctgggtcagatcaagaaggccatcccgccacactgcttcgagcgctcggtgctcaagtccttctcgtacgtggtccacgacctggtgatcgccgcggcgctcctctacttcgcgctggccatcataccggcgctcccaagcccgctccgctacgccgcctggccgctgtactggatcgcgcaggggtgcgtgtgcaccggcgtgtgggtcatcgcgcacgagtgcggccaccacgccttctcggactactcgctcctggacgacgtggtcggcctggtgctgcactcgtcgctcatggtgccctacttctcgtggaagtacagccaccggcgccaccactccaacacggggtccctggagcgcgacgaggtgttcgtgcccaagaagaaggaggcgctgccgtggtacaccccgtacgtgtacaacaaccccggtcggccgggtggtgcacatcgtggtgcagctcaccctcgggtggccgctgtacctggcgaccaacgcgtcggggcggccgtacccgcgcttcgcctgccacttcgacccctacggccccatctacaacgaccgggagcgcgcccagatcttcgtctcggacgccggcgtcgtggccgtggcgttcgggctgtacaagctggcggcggcgttcggggtctggtgggtggtgcgcgtgtacgccgtgccgctgctgatcgtgaacgcgtggctggtgctcatcacctacctgcagcacacccacccgtcgctcccccactacgactcgagcgagtgggactggctgcgcggcgcgctggccaccatggaccgcgactacggcatcctcaaccgcgtgttccacaacatcacggacacgcacgtcgcgcaccacctcttctccaccatgccgcactaccacgccatggaggccaccaaggcgatcaggcccatcctcggggactactaccacttcgacccgacccctgttgccaaggcgacctggcgcgaggccagggagtgcatctacgtcgagcccgaggaccgcaagggcgtcttctggtacaacaagaagttctagccgccgccgctcgcagagctgagaggacgctaccataggaatgggagcaggaaccaggaggaggagacggtactcgccccaaagtctccgtcaacctatctaatcgttagtcgtcagtcttttagacgggaagagagatcatttgggcacagagacgaaggcttactgcagtgccatcgctagagctgccatcaagtacaagtaggcaaattcgtcaacttagtgtgtcccatgttgtttttcttagtcgtccgctgctgtaggctttccggcggcggtcgtttgtgtggttggcatccgtggccatgcctgtgcgtgcgtggccgcgcttgtcgtgtgcgtctgtcgtcgcgttggcgtcgtctcttcgtgctccccgtgtgttgttgtaaaacaagaagatgttttctggtgtctttggcggaataacagatcgtccgaacgacaacctttttttgggta

SEQ ID NO: 132878 - DNA, 1801 bp, Zea Mays
gaatcggaggcggccaggctccctcctcctccctgcaaatcctgcagacaccaccgctcgtttttctctccgggacaggagaaaaggggagagagaggtgaggcgcggtgtccgcccgatctgctctgccccgacgcagctgttacgacctcctcagtctcagtcaggagcaagatgggtgccggcggcaggatgaccgagaaggagcgggagaagcaggagcagctcgcccgagctaccggtggcgccgcgatgcagcggtcgccggtggagaagcctccgttcactctgggtcagatcaagaaggccatcccgccacactgcttcgagcgctcggtgctcaagtccttctcgtacgtggtccacgacctggtgatcgccgcggcgctcctctacttcgcgctggccatcataccggcgctcccaagcccgctccgctacgccgcctggccgctgtactggatcgcgcaggggtgcgtgtgcaccggcgtgtgggtcatcgcgcacgagtgcggccaccacgccttctcggactactcgctcctggacgacgtggtcggcctggtgctgcactcgtcgctcatggtgccctacttctcgtggaagtacagccaccggcgccaccactccaacacggggtccctggagcgcgacgaggtgttcgtgcccaagaagaaggaggcgctgccgtggtacaccccgtacgtgtacaacaaccccggtcggccgggtggtgcacatcgtggtgcagctcaccctcgggtggccgctgtacctggcgaccaacgcgtcggggcggccgtacccgcgcttcgcctgccacttcgacccctacggccccatctacaacgaccgggagcgcgcccagatcttcgtctcggacgccggcgtcgtggccgtggcgttcgggctgtacaagctggcggcggcgttcggggtctggtgggtggtgcgcgtgtacgccgtgccgctgctgatcgtgaacgcgtggctggtgctcatcacctacctgcagcacacccacccgtcgctcccccactacgactcgagcgagtgggactggctgcgcggcgcgctggccaccatggaccgcgactacggcatcctcaaccgcgtgttccacaacatcacggacacgcacgtcgcgcaccacctcttctccaccatgccgcactaccacgccatggaggccaccaaggcgatcaggcccatcctcggggactactaccacttcgacccgacccctgttgccaaggcgacctggcgcgaggccagggagtgcatctacgtcgagcccgaggaccgcaagggcgtcttctggtacaacaagaagttctagccgccgccgctcgcagagctgagaggacgctaccataggaatgggagcaggaaccaggaggaggagacggtactcgccccaaagtctccgtcaacctatctaatcgttagtcgtcagtcttttagacgggaagagagatcatttgggcacagagacgaaggcttactgcagtgccatcgctagagctgccatcaagtacaagtaggcaaattcgtcaacttagtgtgtcccatgttgtttttcttagtcgtccgctgctgtaggctttccggcggcggtcgtttgtgtggttggcatccgtggccatgcctgtgcgtgcgtggccgcgcttgtcgtgtgcgtctgtcgtcgcgttggcgtcgtctcttcgtgctccccgtgtgttgttgtaaaacaagaagatgttttctggtgtctttggcggaataacagatcgtccgaacgacaacctttttttgggta

SEQ ID NO: 132879 - DNA, 1223 bp, Zea Mays
ggaaaaggccgcggtaaccgcatctgccatttgcctgtttgctttgctctcttccaggccaatccgtaagttagggatccaaatcagtagcaacttgcaaaatgcgtgccggtgccaggttgatcgagaaggagcagcaggagcagcgcgcaccggtggagaagcctccgttcaccttgggtcagatcaagaaggccatcccgccacactgcttcgagcgctcggtgctcaagtccttctcctacgtgctccgtgacctcgtcaccgccgcggcgctcctgtacttggcgctggtcaccatcccggcgctcccgagcccgctccagtacgccgcctggccgctctactggatcgcacaaggctgcgtgtgcaccggcctgtgggtcatcgggcacgagtgtggccacaacgccttctcggagtacccgctcctcgacgacatcgttggcctggtgctgcactcgtcgctgatggtcccgtacttctcgtggaagtacagccaccggcgccaccactccaacattggctccctggagcgcgacgaggtgtttgtgcccaagaagaaggaagcgctgccgtggtacacgccgtacgtgtgcaacagccccgtgggccgtctgctgcagatcgtcgtgcagctaaccctcgggtggccactgtacctggccaccaacgtgtcgggtcgcccgtacccgcgcttcgcctgccactacgacccctacggcccgatctacagcgaccgggagcgcgcccaggtcttcgtctcggacgccggcgtcgtggccgcgtggttcgggctgtacaagctggcggcgacgttcgggttctggtgggtggtgcgcgtctacgccgtgccgctggtgattgtgaacgcgtggctggtgatcgtcaccttcctccagcacacccacccggctctcccccgctacgactccagcgagtgggactggctgcgcggcgcgctagccaccatggaccgcgactacggcgccctcaaccgcgtgttccacaacatcaccgacacacacgtcgtgcaccatctcttgtccaccgtgccgcactaccacgccgtggaggctaccaaggcgatcaagcccatcctcggcgagtactatcagttcgaccccacccccatcgccaaggcgatgtggcgcgaagctagggagtgcatctacgtcgagcccgagaacggcaggggcatcttatggtacaacaagttctag

SEQ ID NO: 132880 - DNA, 189 bp, Zea Mays
acataattttcccaattgttcccactgttggagtttggaaagctgcctgcgctcgtgaaggtggaggaaatatcatagaccattgattccaagaacttcacaatgcaaaactgtatcaagttttcaggacctttggctacaacctcagtttccaccaatgcaaaatttgaaattagaagccccaagcgc

SEQ ID NO: 132881 - DNA, 87 bp, Zea Mays
gtacatattttgagcttacagagcacacatacctaattgagtttcaagtatgtggaatgtggtttcagttctgttctgccgatgcac

SEQ ID NO: 132882 - DNA, 96 bp, Zea Mays
cttttttgcaggcacaacttcttcgccgctgctacctttatcttcgtggctcctgacagtgctgccattccacggatttttacagtcatgcatcag

SEQ ID NO: 132883 - DNA, 4368 bp, Zea Mays
caagcaggagagcttcatctgtaccctgttcctgtcaggacacaatctggtgaaaagctcgagctgcagctaagcccaggagattctgttattgatgttaaacaattcctcttggatgctcctgaaacatgcttctacacatgctatgatttgatattgcatactgaagatgggtcagctcatcagttagaagactacaatgaaatatctgaaatagcagatataacttctggtggatgttcactggagatggttgctgcaatatatgatgagaggtctattaggtcacatctccgacgtgtgagggagttactatctctgtctactcttcatgtttccctatcgacatccttaactctgcagcaggagtctgcccagggaaaatctgcagattctggaaaaagccctattcaggagcttgatggtttaaattttatggaggatagtgctggtgctctcactaatttattggcatctacaccagcagagataaaatgtgttgaaagcatggttttttcttctttcaatcctccgccgacctatcggaggttacatggagatctcatctatattgatgttgctacattggaaggaaacaaatactgcattactggaagctccaaatctttttatgttaacagtagcaacaaaaatatatttgactcgaaacctacaaaacaaggactggaggccagcactctcgtaggcctactacagaagatcagtgccaaatttaagaaaggttttcgtgaagttttggatcgcagggcatcggctcatccatttgagaatgttcagtctttgcttccagtgacttcttggctaggagcgtatcctgtgcccgaacatagaagggatgcagccagggctgaagattctgttgtgttgtcatatggcactgagttaattggcatgcaaagagactggaatgaagaattgcagtcctgccgggagtttcctcatggcaatcctcaagaaaggatactgcggggcagagcgctctacaaagtaacatgtgattttgttgatgctgcagtaaaaggtgcagttggtgtcatcaatagatgcatacccccaataaatccaactgacccagaatgttttcatatgtatgttcacaacaatattttctttagttttgctgtcgactccgactatgaagacatttcaaaggaccacaagccagattgccaaaatgggtccagcagaagcaccaaggtttcctccccagatgtgataactaagccagatgcaaaccatggcaaatctgctgaggtagttgattcaaaatctgaagaggcacaactcgcagatagtgagcaggcgacatatgcttctgcaaacaatgacttaaaaggaactaaggcttatcaagaagctgatgtttctggccttcacaatcttgcgatggcaatagttgattacagaggtcacagggttgtagctcagagtataatacctggtattcttcaaggagacaagtccgattcccttctgtatggttctgttgataatggcaagaagatatcttggaacgaaacgttccattctaaggttgttgaggctgcaaagcagctccatttgaaggaacatgtggtattggatggttctggcaatcctataaaattagctgctacagtcgaatgcaagggtattgttgggagtgatgacagacattacattttggatctgatgagagtgactcctcgagattctaactacattggacaagagcaccgcttctgtgtgttgagacctgaacttatagcatcatttgttgaggttgaatccataaaacaatcgttgaagcaaaaggttccagatgctccagttgcaagtacttctgatgctaaggctacctctgttgaaggagatgacaagtctgaagaaagctctgttcatacacacgaggaaaatgacaactcaagctccgagattcttttcaatccgaatgtgtttacagagtacaagcttgctggcagtgcagaggaaatcgctgctgacgaagagttggtaaaaagggctggtacatatcttgtagatatagtgatcccaaagtttgttcaggatctttgttcccttgatatctcccctatggatggacagactttaacagatgcattgcatctccatgggataaatattaggtatctgggcaagattgcaggcatggtcaaacatttaccacacctatgggacttgttttctactgagataatagttagatctgcaaagcatgttatcaaggatatactgagacaaagtttggaccatgatattgcgccagctattgctcatttcttaaactgtttcgttgggaaagttttaggtgcttccacaaagagtagtcttagcaacgcacagtcaaaaactctgaagggtcacgaaaatagccaaactcaaaagtctactaaaggccctaaactgagccatgctgccgtttcaagaaaaagcttatcaacttattctcatctaacctctgatggaatttggtttagcattaaggaatttgcaaaatcaaaatatcagtttgaagtgccagatgaagctaggctttcagccaaaagggtagctgttctccgcaacctatgccgaaaggtaggaataacaattgctgcacgaaaatatgatatggatgcttcaagtccatttgaggcctcggatatgttaaatctccaaccagttgtcaagcattctgttccaacctgtacagatgcaaagaatcttatggaagcagggaaagtcaggatggctgagggaacattgaatgaggcatatgcattgttttctgaagccttttcactgcttcaacagattactggtcccatgcacaaggatgctgcaaattgttgccggtaccttgctatggttttgtaccatgctggtgatacagccggtgcaattgtgcagcagcatagggaactcatcataaacgagagatgtcttggtcttgatcatccggacacagcccacagttatggtaacatggccttgttctatcatgggctcaatcaaactgaattggcactgcggcacatgtcccgtacactgctgctgctaagtttggcgtcaggacctgatcatccagatgttgcagcaactctcataaatgttgcaatgatgtaccaggatgccagtaatatgaatactgctcttaggtatcttcaagaagcccttatgaagaatgaacgacttcttggccctgaccatgttcaaacagccgtatgctatcatgctcttgccattgcattcagttgtatgagcttatataagctttcaattcagcatgaaaagaagacctatgatatactggtaaaacaattaggggaaaatgactcacggactaaagattcagaaaattggttgaatacatttaagcttcgagaagaacaggtcaacgcccagaagcagaaggaccagggagctaatgcatctgataacgctgttaaattcttgaaggcaaaccctgcatttttacaagcaatgaaggctgctgcgctccaatcaggtgacaggtcagcaaatgtcaacaggtccctcaatgctgcagtagttggagaaggtgtaccacgactgagaggagtggatgagcgagctgctcgagcgaccgcagaagctcggaagaaagctgttgcaagaggcctgaatgtccgtaatggccctgcggcaaaccatgcgtctgatgaactagctcagattctcaaactcatcaatactgcttcggggtcttccacttcggcatctgcaaaaaccgaggaatctgcctctgaagggcaggcaacaaatggatctgttcaaaacggagctgcaaccgatgcgaagtctgcagatatcaacgtgccacctgcacctgccaaccaaccagttggattgggggcaacattggagttgaagaagcagaaatcaaagcaaaagtcgtagaaaacccgtgcctggaatttcttttatgactgcagttttggactttagggtgatttgtttttttacatttatagaaattccacgttcacgtggtggaagagttcatttgtttctgttggaggttcttaggagagttcaataatcattacgagaaagaagacaattgtttggaatcatcattgatagaccactgatgagataatggctaatccttaagctaataaatctgtagccggtacaacctgtttaatttttttttgtgcaagattagtatgctaatttgttgtccaacggaggtgttgcgcttatttctgttaatttttttagttcttctggtggtgcgtgactttgtgtgcagaacgattttttagtgatgcgcgtgccggcgtttgtgcagggttgtgttcgatatttcattttcagcatcgcgctgcccatgtgcaattg

SEQ ID NO: 132884 - DNA, 377 bp, Zea Mays
gatcccgtctccgctttaccaaaacagctcctcgcccaatcattctctctgcctcgtcctcgcgccgcctctcatcttccgggagtcagcggcggcggaatatggcggggaaatccaagggtgggaagaacaaagggaaggcgcaagtcgtgggtcactccgcctcagctgagccagaggtgctggcgactgatggagccgaattggttaatccagataacggggaagtaagcgaacccggggaagtaagcgacccccctgccacggaggatggcgtggcagatgtagagaaaggagacggggatgctccggaggttgtgcagtctgcaaaaaagccagctgaaggtgaggctgtgcctcatttactcgtgcactga

SEQ ID NO: 132885 - DNA, 2245 bp, Zea Mays
catcccgatcggtccatcgcgttcgagcggcgcttccatttgcaccatcctggaaagcggcttctctctcgactggccgccgtctctaaaagggccgaggaatctgcgtgagctgagctgctcttctaggctacggtgctgtgttgccttgcgttggtgttagggcggcgtgacaggacagcgccctgtacaagtcaacagcgcgagctgcccagatacttgcttgattcacagccacgcagcgcgactcgtgaggagggagggagagccgaagaggcgtagaggagcctgggggcatgcccatggagagcgggaggaggcaaggcgtggtcgcgatcgagtgcgtcgcgggcgggtcgcgggccgaggagtgggggcccgggagcagcgagacggtgcagacgggggacgtcgtggaggagctcctcatcggggtgggccgccggggcgagcccgccgcgcacgccgccgcgcccttcaagggcggccgcgccgcgctgcagaagctcctgcacgcggcctacaagcgcggggagacctccgtcgaggtccgcgtgcgccgctcctccgcctccgcgcagctgcagcgccagctcgtcgccggcgacagcggggagctgcaggtggcggacgacgcggccagcatgcaggcctgcatcgtgccgcaggagtccgtcggcgggatcggccggacccgccactacgtgctccgctccatccgcgaccccaactacgccgtcggcctcgtcgaccgcatggagagcgagtgcatcgccatcagaggctcgaggagttcgagggtggtgtgcgcgctgagcaaggcgcagctgcaggacggctacgtgtcctacccgtgggagaagaagatgcgggaggtgctaccgatccccaactccagcagcttcctctccttgctcattctgcccatggcgctcgaccgtgccggctcccgctacaactgcgtcgaggacaccctggcccgcgccaacgcctggatcctctcgtctcaggagtccggcgtgcccattgcgttcttgaacgtgcagaccgaggcccttctcaccaagatctccggcgagacggcatcttcgacagtcaactcgggctcactggccgacctcccgaacctcgccaacgccagcctctatggcttcgaggactatcacggcgtcgacatcggcgtggtgaaggcggtgcgcgtttggtacacggccgctgctggagaaatgcctgtggagatcatcctcgaggagggcgacgccaggctcggctttgccattagccgcactcaagagggtttcatctacgtctcgtccgtagtggagaacgacgtcgagcgccaggcaccgtcgacgcgttcggggctccgcgacctctatcgggaggcgaagcgcgcgtccaagctgctggtcatctcgagggtgtcaggccaaaaggtgctgccgtggatggtgtcgacttccggcgccgttcggtgcttcgacaccgtgtccctcagccagaaactgtccctgcaccgccacgctctgcggccgatcctccttcacgtgctcatgtgggacggcatgtccgacggcgcgccgactcagccaggccgcgagccctgcccgctaccgctgccgctgccgtccccggaattcgcggagttgccgcggcagaactcgtatgcgtgcgtcgaacagcgggtgcagactgaaggggaccccggggttatgcacgagagggataccgctggggatgcatccttcaggttccataatttctcgctgcccagcaactgggtctgataaatgctactagcctgcttagatgctgtacatatgtagattttaagtgagttgccttgtgctgagaaagggcagctgtgcactgtaacttatttcgtgagaagtataattttggccgatcaaaatgttctccgtttcgaaactaatgtagacaatacagatgactgaagtaggcgaataacagtttcagtattgcactaggagaataacagttttatgtgcaatctatacattttattttcacaagtaatatatggtatacatgatagaagcggatccactatcctaacaagagcaacgaacaaacatgtcttcagaacaacttaacaaccttcagtacaacaacatttggaaacgtcaattcataagatatccagatccatctgctgcatagtctatattgaaagctcctgttcgacataatcccaggcacatataggtggataggaatgagcata

SEQ ID NO: 132886 - DNA, 116 bp, Zea Mays
atgcggaggtggttggaagcgcggcggggtttgcgggaggacgtgcgggcagaggcgggggcggtctacactgctaacttaatagttagtagagataatcagtagccgtctccgac

SEQ ID NO: 132887 - DNA, 1034 bp, Zea Mays
catgtatgtgcacagggaggcccgaaacattaggtagccctagctcgcgccgctataaaagggagattctggcggcctccctcgagcccgagcaaacaagggcggacgcggagccggcggcggagcggagatggcggagaagaagcgaggcgccggcactcgcaaggatgaggtggtgacacgcgagtacactatcaacctccacaaacgcctccacggatgcacctttaagaagaaggcaccaaatgccatcaaggagatcaggaagttcgctcagaaggccatgggtactactgatgtccggattgacgtgaagctcaacaagcacatctggagcagtggtatccgcagtgtgccgaggcgtgtccgtgtcagaattgcccgcaaccggaacgatgaggaagacgccaaggaggaactctactctctggtcacagttgctgagatcccaccggagggtctcaaaggtttgggaactaaggttgttgaggatgaggattaagccctgtataccatgagataaatttgagaatgttgcttgagcttattgttatctactgccaatgactcatgtaatagaagcttcgagacttgtctcctttctagtaatccaaatatccacatggtatttcatggtcctacgcattttctgacaacgttgttattatgtcgtgccaatcgtacatctgtgcttgtatcttagtaaatatgatgtgtccgatagtgttgtctgagtattttagcaacctatgtgttgatgttttggccgtctatgtcgaaacggcactaaacgttaccgattaagccctaacttttggtgacaaatgcctcggcaggcccgaccacccgattgtcagtgacgcgaagaagagaaaagcggagaaatcggtggttgctctaagcttgagtttagtggttgcagaaaaaggcctgaagcgttacctatccataaaaacaatacccttttcttaaaatattttcttaaaaattaaactaaacaatgcccttttcttaaaaaaatcaagaaagacaat

SEQ ID NO: 132888 - DNA, 2285 bp, Zea Mays
catgtatgtgcacagggaggcccgaaacattaggtagccctagctcgcgccgctataaaagggagattctggcggcctccctcgagcccgagcaaacaagggcggacgcggagccggcggcggagcggagatggcggagaagaagcgaggcgccggcactcgcaaggatgaggtggtgacacgcgagtacactatcaacctccacaaacgcctccacggatggtattgccccaaaccgccccaacctccttccattcccaagcttcgcgtggcagcagagtagatccgcttgttggagagcatatcgttgttctatatctgcgttgggcttgcatgtgcgatgctggtgcggagggttgcggcctgtgagcactctgtgggcttgcgattggttgatatacctgattggatccagtattctttaccagctagattacagtcggggatcacctgaccgagcgggaatagcttctagttgatcttgctcttgtatctgatccaacatttatcacgcgttcagtgttattaaaactacgtttaaacgtcaaaactctaattagaggttgaaatcacgttttagcgttttggcgttctaaactgtaaaacacaatgttttatgtattttagaccattagctatttttgggcacagtctattagttacttttggggttcaatccagctcatgggtgaagttttggtaagccactaacctctcggttttggtatttaacttcatattattgtctgattttatgatatattggtatttttcctatgttgtttaaaactacgtttaaacaaagtttaaacgtttagaagtcaatttcacccatgagcgttccaacgttttatcgttttaataaccttgcacgcgtttgtcttcttgtttggctttgtgagtattggcatgtgacattttgcttttgtgggcgctgttcgattaggtgctactcgggtatagtcaggtgtctgccttatttaattagcttaacacagttacatgcccgggatatgtaatctgctcatcgttacacgtattgcttctcgtaatgctactatgtgttccatttgggcagtatattgttctccagtgataagtattgtattccttttgccgtttgactgggttgtagtattcagttgaagttgtatctataatacagtagtatgttttgtattgtccggtcattagtaggtacctgtcttacacaatcttgtggttgatacagttacatgactggtacacagatgtcactcatgttgccttcactttgtcatttgttccatttcactgctgtggccatttatcagtggcctgtattgctcttgtataaagttgttcacaaaccacaataggttacaagttccatgtgacccaataatatggttatgatgtattgtccggacatagtcaggtatctgccgaatgcaatgctgtggtcgatacagttacatgtccggtagaaagatgtcattcatcgttacacatgttgccttaacatgctgtcatgtgttccatttgggtgctacaacatcttgatgttccatttgacgtttgttggatttcttttgaacacaattttattctgttgctgtattccaaatcaggctgtagttgagctgccatttagtgatcactaatcaatctgtaactgtacacagcacctttaagaagaaggcaccaaatgccatcaaggagatcaggaagttcgctcagaaggccatgggtactactgatgtccggattgacgtgaagctcaacaagcacatctggagcagtggtatccgcagtgtgccgaggcgtgtccgtgtcagaattgcccgcaaccggaacgatgaggaagacgccaaggaggaactctactctctggtcacagttgctgagatcccaccggagggtctcaaaggtttgggaactaaggttgttgaggatgaggattaagccctgtataccatgagataaatttgagaatgttgcttgagcttattgttatctactgccaatgactcatgtaatagaagcttcgagacttgtctcctttctagtaatccaaatatccacatggtatttcatggtcctacgcattttctgacaacgttgttattatgtcgtgccaatcgtacatctgtgcttgtatcttagtaaatatgatgtgtccgatagtgttgtctgagtattttagcaacctatgtgttgatgttttggccgtctatgtcgaaacggcactaaacgttaccgattaagccctaacttttggtgacaaatgcctcggcaggcccgac

SEQ ID NO: 132889 - DNA, 718 bp, Zea Mays
ccaggcaatcgacgggagcacagagctagctagccagccagccagcagccagcttgctcgccgcgcccgtccttcttcctcgcctccgttccgttccgttccgtcccgcccgccgccgccgccgcattcagggatggagatgaagaagatcgcctgcgccgtcctcgtcgccgcctcggcggccaccgtggcgctcgccgcggaggctccggctccgggccccaccagcggctcctccgccgtcgcgcccgccgtcggcgccgccctcggggccgccgtcgcctccttcttcgcctactacattcagtgagccggccgcggccggtcgcccggaggccgaggaagagacgaagcgggagagagagtgacatggctgcgcgcattccgatgcgtgggcatgtttttgattcgacacaccttttgtcctctttttctttgttccctctttctccttaatttaacgaattgatgcatgccgctgatgttcttccccctgagagagggattaacacttgtatcatcgcttgccatttgtttgaatccattcaacaattcgatttaatcaatcatcgcgtatatatttgcccaagtgtcatgcaacactttgtgcgatatttctaagtttcacttcagacaaaactgaacgcggcaaggagtaaaatttacatgtcatttcaggcatccatgccgggtttaccagccggaaacgaacaaaaca

SEQ ID NO: 132890 - DNA, 2147 bp, Zea Mays
atgcgtaagtttggcaaagaagcgctcagccaatgttatctggacatacttgtccacgtgctccgccagcgaactcctgttcaccatttacgtccgcaacaagacgggctgaagcaaaagcaaaggcggttgcccacacaatccggcgggaacatggttccagccttccaggcctcccttcgccgcgcccaattcacgcttctgcccgaaatcccaccgctcgctatgccacgtcgctgggggccgaacagtcattccgcatccctcccgtttttaggaaaaccgattccccgcttcggtgcccaccacaaagctgacctgcggaagcgcgaggaggacgaaagggaccggacgaagctacgcgctgcaccgaccgaccaaaccctaggcgttcggcgggcgtcaccacggcggcgaagaaagggtgcctcgcgtcgccttggtgtccccgaagtcgtcgacggtgcagctcgatccgcctcgtcgagcatgtcgaggagggtcccttgcaaattcttcttgcatggagcttgcttcaaaggagattactgtgaattctcccatgactgcaatgatcaaccagataatgtttgcactttctaccagaaagggacgtgcacctttggtagccgttgcagaaatgaacatgttgaagttcattgtaactgcccccaaccagcaaccactgtagcgcgtgcatcctccaattcttctcagctagttgcttcttccagagatccccattgcagcgaatgccaaacggatttatgtgaccaaacacagcagatttgcaagtcaacagcagcactttctgcacatcaacctgcatgggttgttgattatcatgaccatgacactccagatgatactacaagctggccgttgcaccaagctgtgcaaaatcaaacatcacaatatcctgttcatctgccaatttgctcttctactgctgatggcacttgtccttatgggaaaggctgttctcagatgcatggagatctgtgtgcattctgtgaaagacagtgcatgaatccttatcaatctgatgaaaggggggtacatgtcaagctatgcaagaaaaacaatagagttcttgaggccatgagaagaagtgaagacatagaatgtggtgtgtgcttggaccgtgtgctttcaaaacctacggcagcagaaaggaggtttgggctgctatctgactgcgaccattccttctgtatctcatgcattaggaattggcgtagcacctctcctacgtctggcatggatgtcaactctacactcagggcttgtccaatttgccgcaaattgtcatactatgtagttcctagcattacttggtactcctcaaaggaagaaaagcaagaaattgttgaaggttacaaggccaagctcaggtctattgattgtaagcactttgacttcggaaagggcacttgtccatttggaagcagctgtttttacaagcatgcctacgatgatggccgtttggaagacgctttattgaatcatcatgatgccgacgatgcaagcgcagcgattgccaaacttatgaggttgtcgtacttactgactcggctgcatgtgtaaggaaactcaaacgtatctttgagcaaacattgctgagttcgattggagttcgttgaccgagcaggcaaccttggatttcgctttgtaatggatattataaaaaacatccaaaaaaaagagggcagtcatttctgaattttatcttttcgctgaatgttcaaatcatcagaaggaagcagtcccaatcgtgccacttccacttggaagctagcattttctatccgggttggtacctgattggtggttgtgaccaaacttaactatacccaatactggtgatcctcgtttgttgcagcatctctagcatttcgtttttccagccccgagaaatgctctattgctctgtaattgaagagtggagaaatgttaatctcgatctttagtgctgctcgcctgctatggcgcgtggaactaagttcagttaaacccagctatgggtattctttaccacgaaggccttattcggttattcccaatacagccttattcggttattcccaatacacatggattggatgtgattggaaaaaattaagaagaagtttaacttgtttgatatt

SEQ ID NO: 132891 - DNA, 495 bp, Zea Mays
gcatcttaccccatcgataccgtccgcagaaggatgatgatgacatctgctccagatcctcttcttcggaaagaagtacggctccggcggtgcttaaatggagaaatatgatgacgaacaagagcagtgtgtgttcccggtcctttccaatcaggatctggtgaagtttttgcctttcatatcgaagaaattaataattcatgtagagggaggattcttccaacaatttgttttggatggagacttagatctccaaacactcgtaactatcctactaggtggtgacatcggtccccaaaaacatttatggtcatagagtctgcccttcgtttgtcagtcgggcaatttttcttgcatacaatgccttcgtttaagtatcggatgagttgctgcgactaattatttgtttgtctttaccttttgcaatgcttgattgttgatagcattgtttttgtcactggatttcttgttaatgttgcatttggtttacgcgtt

SEQ ID NO: 132892 - DNA, 1556 bp, Zea Mays
tcggaccaggctaaccaacccactgtccttcataagctcggaggccagttccacctgcgctcgatcatctctgaaggtgtacgggcccgtaacatatgcccatctgtctcatcttatgaaaggagatttgccacaaggaactacatgacccagagcctttggggcccttcaatgtctgttagcggtggcatcaatgtcccagtgatgcagaccccgctctgtgctaatgctcctgctgagaaaggaggcaagaacttcatgattgatttcatgatgggcggtgtttcagctgctgtttcaaagactgctgctgctcccatcgagcgtgtgaagctgcttattcagaaccaagatgagatgattaagtctggtaggctatcagagccgtacaagggtattgttgactgcttcaaacgtaccattaaggatgaaggtttctcttccttgtggaggggtaacactgctaatgttattcgttacttccctactcaggctttgaactttgcatttaaggactacttcaagaggttgttcaacttcaagaaggatagggatggctattggaagtggtttgctggcaacctggcctctggtggtgctgctggtgcttcctctttgttttttgtgtactccctggactacgcgagaacaaggttggctaatgacgcgaaggctgccaagggaggaggtgaaaggcagttcaatgggcttgtcgatgtctaccgcaagacactcaagtctgatggtattgctgggctttaccgtggatttaacatctcctgtgttggaatcattgtttatcgtggtctgtactttgggctctatgattccatcaagccagttgtccttactggcaacctccaggacaatttctttgccagtttcgctctgggttggctgatcactaatggtgctggtcttgcatcttaccccatcgataccgtccgcagaaggatgatgatgacatctggtgaggctgtcaagtacaagagctccttggacgcgttccagcagattcttaagaaggaagggcccaagtccctgttcaagggtgctggtgctaacattcttcgtgccattgctggtgctggtgtgctttctggctatgaccagctccagatcctcttcttcggaaagaagtacggctccggcggtgcttaaatggagaaatatgatgacgaacaagagcagtgtgtgttcccggtcctttccaatcaggatctggtgaagtttttgcctttcatatcgaagaaattaataattcatgtagagggaggattcttccaacaatttgttttggatggagacttagatctccaaacactcgtaactatcctactaggtggtgacatcggtccccaaaaacatttatggtcatagagtctgcccttcgtttgtcagtcgggcaatttttcttgcatacaatgccttcgtttaagtatcggatgagttgctgcgactaattatttgtttgtctttaccttttgcaatgcttgattgttgatagcattgtttttgtcactggatttcttgttaatgttgcatttggtttacgc

SEQ ID NO: 132893 - DNA, 695 bp, Zea Mays
tcggaccaggctaaccaacccactgtccttcataagctcggaggccagttccacctgcgctcgatcatctctgaaggtgtacgggcccgtaacatatgcccatctgtctcatcttatgaaaggagatttgccacaaggaactacatgacccagagcctttggggcccttcaatgtctgttagcggtggcatcaatgtcccagtgatgcagaccccgctctgtgctaatgctcctgctgagaaaggaggcaagaacttcatgattgatttcatgatgggcggtgtttcagctgctgtttcaaagactgctgctgctcccatcgagcgtgtgaagctgcttattcagaaccaagatgagatgattaagtctggtaggctatcagagccgtacaagggtattgttgactgcttcaaacgtaccattaaggatgaaggtttctcttccttgtggaggggtaacactgctaatgttattcgttacttccctactcaggtagcccacaccttccatcatattttttactcggtaacatctgtaaatatgttgaaacaccgtgatctttcttacctaagtggttgaatgttcctggtggctttgcaaggtatacaagttaccgactacactttaacttgtacattattaatttgtcttcaaatctttgtcccaggctttgaactttgcatttaaggactact

SEQ ID NO: 132894 - DNA, 686 bp, Zea Mays
aaaggacaatgcaaaacctttttaagcatatgttatgtacaggcacggttcagagcagcaacagcattacaagctttgactagtccaataaacatatgaacgaattgaccgataagatacagaggaggtagtaaattttgcatgggtgtatgccagaaatacagaaaatacccagccagcgacacatactattatcttcccccactatagtataagcggatccaatgaacaaaaggcatctatatctatctgtgactgttgtatctatcaagctaccatgctcaggaagcagaagtattaaaaatatcgcttctggtagcgacaactttgggcatcatgaaagcactatttcctgtaacagcactgtatggggaaaaaaagaacagggtttgcataatcataaccatcaggaccctgccacaccatttccgttttcagcagatggggcgtttgaagtagcatcatccgttgtcaaattcgatatgctatcagacagcgagttcacctcttctgactcggacggtgctgtcgttgaagcaccatcctccgaggcaacttcagaggctgcgtcagaagtcatgctagatggttctgattgttctgtcaattcagactgtgactggggctgtttctgtaggctccaatacataatgctagcagtaagtgttaggatcatcttctgattc

SEQ ID NO: 132895 - DNA, 1025 bp, Zea Mays
atacatccacaacatgtacaaatgagcacggcgccgtacaacgtgctacactgtagccaccctatgaccgtacactactcactacactccaccaaaaaatcttgcccagcatgacccggcccttctcacttcctcctccacctccgcctgcggcggcggcaccggagcaggcgcctctccgactccccagatccattccaggacctgctccaggctcgccggcaccccgcacgtctgggctttgggtgccacggcaacagcgtcgaacacctcctgcaggccgaccacgcggcggctcacggcgcgccgcgcgtcccgcacggcggggtagtgccccggcacggcatccaggcggagcagcacggccatcagcgcctccgagaaccgggcccgctcgcgctcgtcgctgcggacggcgtccacggtctcctgccgccggagcagccgctcgagccgcgtcgcctcggcgtcggcagcgcgcacggccgtgacgtgccgcctgaccaggtacccacgcaaggccgcctggatcttggcggccgccaccgcgtcaggcgatcctccccgagccgcctcccgaggggatgtaatcgggatttggacggtggtcttgggtttgtggctgggcttggggttggaatcgacgaattgcgaggtgtagtggtaggatcccatggcgaccttggagagagcgcaggcagctttggatcagtggagcgaggcgcacaggcacagcgtttctgctgcacagtgcactcgtggtcacggcgccgcagtgcatgttcctttgcctgaggtcaggtctggatgtttttttctttctttcgatggctgtaacgttcgtcattgctctgcgtacaccactgccggctacacggcatgtttttccatggtgcacccgcgtgagttgtgacgtgcatagccgaaacagagtttaccgacgaatatggcatggctgtgtagactatgtgtttgaaattataatttactctggtttaattttgtcacgtatctagatatttaat

SEQ ID NO: 132896 - DNA, 360 bp, Zea Mays
atgatggcggcgctccgggcgggcgcgaaggccaggcacgtggtggcgctgtccacgtccaccagcaggttcctggcggccagcttgagcgccgcgccgcccgcgaaggccatggtgacctcgggcacgcgcagccgcgccgcctggccctggaagcacgtgtccaggatggagaacgccgacgcgcggggcgtccccttcatggcgcccgccaccgccttgctgagcgccgagtacacgcccgtaggcaggcgcgtgatcaccgtgccggagtcgatgatcgtcggcaggctggagtaggccgacgacgacacggacagcggcttgcccgcgaccttgatcccggtcatcttgatgaag

SEQ ID NO: 132897 - DNA, 1221 bp, Zea Mays
atgtacagtaactttgtatgtatctctgcactctcgtctacgtacgtgcatatactactactagtagtgatcccaagtcgccgactgttaatccatgagttagcaggagctgggtttgaagccaacggaggtgccgtcgatgcgcacctcgaacgagcgctgctgcacgttgccgaggatggccatgccaccgtcactgccgctgggtgcgaacgcgaggcacccgaacgacaggatcccgtcggcgcccagcgtgacggtcgcgccgctgccgaaggtgagcgccacgttcgggagcgtcacggtgccgtacccggcgaagttgtagcaggtgtccaggatcccgttcgacggcgctgtcgggtacccgtacgaggccatgccgctgcggaacgcggaccgcagcgccgcgtacgcggtcgggggcaagcgggtgacgaccgtgccggtgtccaccaccgtcccgcccgcgaacgccgacgcgggcacgctgagctgctgcccgccgacgctgatccccgtcagcatgacgacgtagtaggtcggcgcgttcggcgacggcagcagctgcgtcgtggagaagcccggcgcggcgcccgacggcccgcccacgcccagcgtgaggtaccccgcggtggacggcttcgtcgggaggcagtaggagaagaccccgccgtaggtgcccgccgtctgctccacgagcgacggctgctcgcggccgaggcccaggagcccgtcgacgccgttgaacagcccgctctgcgcgtgcccgcagccgaagaagaagccctgcaccgcgctgctcgccgacagggtcagcgtgtcggagctgtacacgcccgtggtgttggacccgtcgccgtagctgaccacgtacccgcactgcgccgccgagcaggcggacgcggcgtagatgcccagccccgcgcacacggggcccccgcacggcacggcggcgtaggacgacgactgggcggggtcgaagagcgggtccttctggctgtagcacgacggcgccgcggcgcacggcttgcactgcacccacgacaggtcgctgccggtgtccacctccatggtctgcgccacgcccggcgtgccgaggctcgccgtcaccacgtagttgagcgtgccgatgtcgtacccccagctcgccggcaccggcgccaccgcggcggcatgggagcagggcaagaaaccgagcgctccggcgcagaggagtga

SEQ ID NO: 132898 - DNA, 2603 bp, Zea Mays
cctccctccctcgcgtccgcgttccctcccgcctccagatctcgatgcggcagcggctcccctgacagcggaggcgacgccggcaccatgtcctcctgcgacgacgaccacgcctcgctcctcagatcccacgctggggcctcgtcgccgtcctgcccctcgccgcgcggttcggcgggacatcagcaccacgccgacgtcgaggcggacgaggccaccgtcaccgcctccccgaggctcgccagcggcggcgggggtgtgcgcggtctcctgcgcaacctcgagcgccgcatgtccgcacgcggatctgggcctgggcgtcgccagcaccagcattatcagcagctcgatcgctccgtggcgatcgagtcgccgccgtctcagcggcagcgggagagagcggcggcgggggatgacgacgagctcggggacggggcgccgcccgagtgggcgctgctgctcatcggctgcctcctcgggctcgccaccggcatctgcgtcgccgcgtttaaccgcggggttcatgtcatccatgaatgggcatgggcagggactcccaacgaaggtgcagcatggctccgcctgcagaagatagctgatacttggcacaggatactgctgatcccggtgactgggggtgtggttgtaggaatgatgcatgggttgctcgatatatttgagcagctaaaacttgtgaaatcagggcagaggcaaggaatcaactttgttggagccatcttcccaaccataaaggctgtccaagctgctgttaccctagggactggctgttccctgggacctgaaggtcctagtgtggatattggcaaatcgtgtgcaaatgcatgctcagaaatgatggagagtaaccgggaaaggcgtattgcacttgttgctgctggcgctgctgctggcattgcttcaggcttcaatgcagcagttgctgggtgcttctttgccattgaaactgtattaaggcctcttaaagcagaaaattcacctccatttacgactgcaatgataatattggcatctgttatatcatctactgtttcaaatgttttacttggagccagaccagcttttatagtgccagcatatgagctcaaatctgctgccggttggaatggctgctacactagcttcagtctgttcagtcccattgacttcagtactgcttctctttgaactgacaaaggattacaggattttgcttccgctcatgggagcagttgggttggcaatatgggttccttcagtagtaaaccagccaaacgacagtgagccttctgggtttagaacatccagacgaggttattcttcaatgtcaccagaagaaagaaatggcagcttaaggcaaggtgatgttgtggatgatcttgagctcagtattatacaaactgacatgagtaactatggaacttataatgcagaaatgcttctggatgatttgaaggtcttccaggccatgtcaaagatatatctcaaagtgttaccatctgctacagtaacagaagttcttaatctgttgcatgatagacagcaaaattgtgccctggttgtggaccctgaagattttcttgaaggaataattacattaggggatatacggcgcatgggatatgggttacatgtggaaagtttcatcaatggagatcaccccaaggctgacgataactcttcttccatttcattgtgtcttactcgaggattccagtatcgtgggagcgaacgtggattgttaacatgctttccagatactgatttgaccactgcaaagagtcttatggaggccagagggataaagcaactgcctgtagttaagcgtggtgttgcccatagaactgcaggaaagcgcaggccgattgcccttctacattatgattctattggttgctgcgtgcgggaggaaatagagaactggaagaccatatatcagagactggcttgttaataatatgaaactacttggacgatatgattattcgtttgattgccgagggagaatattgtgaactgaaggtcatgtatcagcgaaaagcaggctttcctcttgtagcaattgtgcactgaaaaactacagtgcccttatgacaccacaacagtaagcaagactacaggacatctatgcgaaatgcagctagccagctacactgatgtagagatcattcaggcagtttaacctctatactgtatcattttgatttcacggtgatctgcaggggcaagcctgataaattctgcaaagacctcccattactgcaagtttcatgtggcatccctgctcgtaccacttatttgttcttgttacgacctggacttgtactttacgcgggataggaacgaagtacagacctagtgtaagaaggcggtactttttaccctcgtactgcttgtaaattgtaatgtgtagcatatattagagcatgataacttctgctgcatatattcgtcagtgtgatcactcaaggaatttgtgcagcagaattttgtcatgtcgatgttgtaagttgaaggatcacattgcttgtaaaatttggcagcatgttgtcttatcctcggatgagtatgttgttgtagaaacttgcatttggcctttgctctgc

SEQ ID NO: 132899 - DNA, 356 bp, Zea Mays
tgcgtggatgtactttgccacagggaacaattcatactcacagtcgctacagccccaggaatggcaaagcatgctataacatattggtttggaagtccaaactatggagtgtttacgtgggatgacaaacttccaggagcttaggttcttctcagcaggttacgactcttctgaagtctagggtacccttacaaagaaatagtaaggacattccacaaccaaaccaacaacatcatgtgctcatattacttgtattcagttcattcagcttcagtatgttgtcaacacagctttccttgcttttttatacaatgactatcttgaagcggctagcacaactcggtggtactgtggac

SEQ ID NO: 132900 - DNA, 635 bp, Zea Mays
cgacgaatagccttcgtcctcgacacccttcatgacgacggagcacagcacttgcttcgagatgtgggtctccagatccctcgacacctcggcgagcctcaggtcgaagttgctcctgtatctctgcggcttaggcgacgatgaccctgagaatcgcctcctggggctcgagatcctcgctgtgggcgacaccgacagccagctcttggtgaagaccgcttctgtctgatccgctcacgtgcgcgctcagcggcagccatcgccttctctttgctcatcttgatcaatgtccatgggttgatttggatgtcatccttccttcctgaagcatccatttggtcgctctcgaccctgatcgacagcttccgcgcactctgtgtcatgttggaaacccttgaaaagaaagatggcttctccggtgagtcaaagtcgatgctctcgtcagaatcagagtcttcgaatgggtcaaatgctgctcctgcttctctcatcgcaagaatgtagtcgtaggtcctcatgccctgtagtgaatgaaaagtaggcactgaccattttatttctttgaagaaaatcgctcgatttgaaagcaaaagatacttctaagcatgaatcacaatactgaactattattcaca

SEQ ID NO: 132901 - DNA, 681 bp, Zea Mays
accaaacagataaaaaatcatgctaataactatgtaatgggaattcacatcgtcatgctaagaaagcacagcacatcattctcaagaaccaaaaaataccaatgaatattgtggactaagcatacaacaccccacctaaattacgacgaatagccttcgtcctcgacacccttcatgacgacggagcacagcacttgcttcgagatgtgggtctccagatccctcgacacctcggcgagcctcaggtcgaagttgctcctgtatctctgcggcttaggcgacgatgaccctgagaatcgcctcctggggctcgagatcctcgctgtgggcgacaccgacagccagctcttggtgaagaccggtacgatctctttcccggtcgtgatgtgttttctctctgggttcagagggcctcgctttgtctccaccggcagtggtttcatgggtgatgttggcagcttctgtctgatccgctcacgtgcgcgctcagcggcagccatcgccttctctttgctcatcttgatcaatgtccatgggttgatttggatgtcatccttccttcctgaagcatccatttggtcgctctcgaccctgatcgacagcttccgcgcactctgtgtcatgttggaagtgagctttgttattattaaacggttcagtgactggtctttccaaaaaaaa

SEQ ID NO: 132902 - DNA, 1111 bp, Zea Mays
ccctggcaacaacttatatctcagttctctgtgtgctctccatattgatcttttgttcaattgaatatcttctgttgatgtcaaatgcagcaccttgatcaggaaggtattagtttttgctgtcgaacaacttatgatgataatgctattacaaatgcggttgagatatttaatacctctagtggcgccgttcacttcatggcatcaaataacgactctggtgtgagatactatgacatggagagattccagctattcaagcattttcagtttgaatggccagtgaatcatgcttcgttgagtcctgacagaaaggtggttgttattgtgggtgatgatcctgatggtctacttattgatgcaaactctggaaagacagttcattccataaaaggacatcgggactactcatttgcatcggcttggagccctgatgggcgaacatttgctaccggcaaccaagacaagacatgccgaatctgggacgtgaggaacctttcaaaatccgtccatgtgttgaggggtaaccttggagccatccggtccatccgcttcacctcggatggccagttcatgtccatggctgaacctgctgactttgtgcacatctacgacgtgaagagtgactacaacaaaaggcaggagctggacttctttggcgagatatccggcacatcgttcagcccagacactgacacgcttttcgttggtgtgtgggataggatgtatggcagcctgctacaatttggccgcctgtacaactactcgtatcttgactccctgttttgatgtggatccaaacgggtgttgaactgttgggttttggtgtacctcagtgctctgaatgttgtcagcataaattaggtggttatccctaatcaggatattaagttgcaaagataattgaattaataaatgttgtaccgtgcccgatgtgtatatgtaaaaagaaatgtatacatgtgcctattgagagaccgagttgagatgtgacttaggggttgtttgtttgggattataatctattcagattatataatctaatttatttgttttaggggttgtttgtttgggattataaatataatctaacttatttgtttgtttgaga

SEQ ID NO: 132903 - DNA, 1704 bp, Zea Mays
gcctttttctctcctcccaatctcccattaccccagcggcccagcgtgcggagacgggagacgcgctccccagtccccacccccctctcgtgtcgtggcgacgactggggggctgtcgctgccgccctacgtcaggtggccaggtcgtattagggcacttcgccggcgacgagtaccacaagaatgataagatcccagatacttcatcagcagatgcaagaaaaggaagggacattcaaggaataccctgggagcagataaacataacccgtaaaaaatacagacagtccagattagaacagtacaaaaattatgagaatgtacctaactctggagaagaagctatgaaggattgcaaaccaacagagaaaggtgggatatactatgagtttagacgaaatactagatcggttaaatcaactattctacattttcagcttagaaatttggtatgggcaacgtccaagcacgacatctacctagtatctcattactcaattcgtcactggtcagcattgagtggtgtggatactgaacttatcaacgtccaaggacatgtggcaccaagggagaagcatgcaggaagtttattagaggggttttatcagactcaagttagtaccttgacagtcaaggacaatttactggtagctggtgggtttcaaggagagctgatctgtaaacaccttgatcaggaaggtattagtttttgctgtcgaacaacttatgatgataatgctattacaaatgcggttgagatatttaatacctctagtggcgccgttcacttcatggcatcaaataacgactctggtgtgagatactatgacatggagagattccagctattcaagcattttcagtttgaatggccagtgaatcatgcttcgttgagtcctgacagaaaggtggttgttattgtgggtgatgatcctgatggtctacttattgatgcaaactctggaaagacagttcattccataaaaggacatcgggactactcatttgcatcggcttggagccctgatgggcgaacatttgctaccggcaaccaagacaagacatgccgaatctgggacgtgaggaacctttcaaaatccgtccatgtgttgaggggtaaccttggagccatccggtccatccgcttcacctcggatggccagttcatgtccatggctgaacctgctgactttgtgcacatctacgacgtgaagagtgactacaacaaaaggcaggagctggacttctttggcgagatatccggcacatcgttcagcccagacactgacacgcttttcgttggtgtgtgggataggatgtatggcagcctgctacaatttggccgcctgtacaactactcgtatcttgactccctgttttgatgtggatccaaacgggtgttgaactgttgggttttggtgtacctcagtgctctgaatgttgtcagcataaattaggtggttatccctaatcaggatattaagttgcaaagataattgaattaataaatgttgtaccgtgcccgatgtgtatatgtaaaaagaaatgtatacatgtgcctattgagagaccgagttgagatgtgacttaggggttgtttgtttgggattataatctattcagattatataatctaatttatttgttttaggggttgtttgtttgggattataaatataatctaacttatttgtttgtttgaga

SEQ ID NO: 132904 - DNA, 950 bp, Zea Mays
gcctttttctctcctcccaatctcccattaccccagcggcccagcgtgcggagacgggagacgcgctccccagtccccacccccctctcgtgtcgtggcgacgactggggggctgtcgctgccgccctacgtcaggtggccaggtcgtattagggcacttcgccggcgacgagtaccacaaggcagtggacactttctctggtatcagaggatcaatgtccaattattatgatgactacgatgacattgacgggatggaggatgattatgatatggatgatcccattgatgacatggtagacgagcagcaagggattagggattctgatgtggaagataatgattatggacaaccaaatgataagatcccagatacttcatcagcagatgcaagaaaaggaagggacattcaaggaataccctgggagcagataaacataacccgtaaaaaatacagacagtccagattagaacagtacaaaaattatgagaatgtacctaactctggagaagaagctatgaaggattgcaaaccaacagagaaaggtgggatatactatgagtttagacgaaatactagatcggttaaatcaactattctacattttcagcttagaaatttggtatgggcaacgtccaagcacgacatctacctagtatctcattactcaattcgtcactggtcagcattgagtggtgtggatactgaacttatcaacgtccaaggacatgtggcaccaagggagaagcatgcaggaagtttattagaggggttttatcagactcaagttagtaccttgacagtcaaggacaatttactggtagctggtgggtttcaaggagagctgatctgtaaagtaagttaacaactatggatcaagttcgtttgaatccatgctgttgatgtgctagctgttggcgcagcatctttgctgtggactgtggtcaca

SEQ ID NO: 132905 - DNA, 1659 bp, Zea Mays
accaaacaaaccgcgtccgcgtcgagtctctactctctcggctgtccggtccggcgcggctctcgcgtctccaacctacccatgctgcagctcctccaactccaaggctcacaccaccccgcgacgggcgacgctaattaagtagagctgcaacacctgggttggaggctagagcttgcaaacaccaccagcgaaaacgtcgtggccagccatcccggtgtcgtcccgcgttctacagccaccgctgtcgtcgccgtcctagactcctagatccgtcagcttaacgagctccattccttcgaggccagccatcccggtgtctcagcagcggcggcggcggcgtcgagctcttgctttctgtgggaggacgcatggcgatgtctgcggggcgtgggctcttggtcctcttcttctctgccgccgtagtggctgagctcgcctctgccgcgaacggtcctttcctgtccgatagcgtcttccagtcgagcgccggatctacagggaggagcttgctgcaggccaagaatagttgccctgtgaactttgagttccaaaactacacaatcatcacaagcaagtgcaaaggaccgaagtttccagccagccaatgctgtgccgcactcaaggaattcgcgtgcccttttaacaattacctcaatgacgagagcaatgaatgtgcatcgacaatgttcagctacatcaacctctatggcaagtatccaccaggtctgttttccagcgagtgcaaagaaggcaagatggggctttcttgcgcagatgtcccccggaaggacagttccactgcaaacagtggttatcgcgcccaaagcagcttgcttgcgttgattactgtcttgagcgtggtagcagcgttgttctactgaactacagctccattcatttcccacaaagatggtgtgttacaactgttgaggcttgagttgcaccttttggtgcttatgggttggcttcctgattctttcttttgagagcaactccaatagttatataaattttagccctctaaaccacagatttaagaagttgctaaataactttgagagtaaaaaaatatgagttctcacatagttctctaaatatatgttgtagttttattttgtatttattcacataaaaaaaataagtcacaaatgtcatcaattaccttcattatctacataatgcagccaacattttttatttaacaagttgcaaatggttgtcaaatgtagaaaggaaatgaggttagatgagaagttgctaaatttaggaagttcatttagagaactgttggtgagtagtttttatgttaactgcctaaattattgatttagaaagtcttttagataactactggtttgacaaccccattttttccaatgtaattcattgcttgctgcatatttcctgagttcgatttgatctgtcagtgtcaatgttagcttgtgtctcagttaacggtgtcattctattgtgagtcccgttgtgataaatttggacaagtatatatatgtcggttataattcgtatgaatggttagcttgtttatgttgggtccgaggaatgtaatcgatggttcaccgttcctctggaaaatgttgtgtttgcaatttagagagtattgttgcaatgactattatgtttgacaacaaaatactc

SEQ ID NO: 132906 - DNA, 2498 bp, Zea Mays
gagacgaggcgccgagggaggcaagccgatcacaccaaacgcttcgtgctgctgccccgtctcttctcatcgtgatctcagggcagtggatcgatctcacgtcggaggcgaccttcttaggcgcgccaccgccatccgagccgagccgcagcgatccagatccagtgttggggctgccttgtgcaccgaatcagtgatcgggcagcgtaatacaaagagggagcgcttggtcatctgagctggttttgtacagaatgtcagagggtaatgtggatagcatccagatatctgttagtaacgatgagaggaggaatagggcagatgccgagatctcggaggacgagccaaggcacaccaggatgcggtcactgaagaagaaagccttgcatgcatcgacaagactcacacactccctgaagaagagggggaagagaaaagtggactgcagagtgccaaggatagctatagaagatgtcagggatgctgaagaagagcaagcagtgaactcgtttcgggaggttttgtttgctaggggcttgctaccagtcaagcatgataattaccacacgatgcttagatttttaaaagcaaggaagttcgattttgaaaaagcagcacagatgtgggcggacatgctgcagtggagaaaggagttcggtacagacacaatttttgaagattttgaatttcatgaactagaggaggtcctgcaatattatcctcatggttaccatggggttgacaaggaaggaaggcctgtctacattgagttgcttgggaaagttgaacccaacaagcttatacaaatcacaacagttgagcgctacattaagtatcatgtacaagagtttgagagagctttccgggagaaattccctgcatgctcaatttctgccaaaagacatatagatactacaacgacgatattggatgtccacggtgtgggctggaaaaactttagcaagattgcaagggatttggtgcgttgtatgcaaaaaatagatggtgactattatcctgagacattacatcaaatgtttattgtaaatgcgggacctggtttcaagctgatatggagcactgttaagggacttcttgaccccaaaacgtcatctaagatacatgttctaggaacaaaatatcaaagcagacttcttgaagctattgatgcaagccaattaccagagtactttggtggttcgtgcacatgttctaaccatggagggtgcctgaggtctaacaaaggcccctggagcgatccttcaatcatgaaacttgtacatagcatggagtcattgaaggaaattgggcaagtatctgatatagaagaaacagttacaggctccatgagattgcgtgctctcaagttaccagaacgaattagtgacacgtcaaatgctgaatcaggttcagatgttgatgatcttggatcccctgtggctcctgaagatgttgaatatcctagtttggccccagttcgagaggaagcgagggaatcaggatctacaacatatagtggttcaattggcatgtctcgtatggcagataaagttgtaggatccaacgggagatacaactctactggaaatgaaactaggcaggtcaatgcagaacaaggttccctgataaatgggggtttacttgcgcccgcaggtcagcgtgccccaaatgatgctgtaggcaatgatgatgggttcttgaaatatatatcaagaagagtcgttgctatatttcttgaagtactctcttttttgcggttcttcattcgtcgacgacaacactcggaaaatgttcattcacatactgcaactgcacccagtagtctggcaaatcttcagacaattaaggaagatcgtgtaaatccttgtctggagcgtcttgatcgacttgagtcaatgtttaatcagctgagcaaaaagcctccagagcttccagaggacaaggaccgggccatacaagattcttttgacaggataaagtccattgagtttgatctgcagaagacaaagaaggtattgcatgcaacagttatcaaacaaatgcagatggcagaaaccttggaagctgtaacggagccggatcttaggcggaggaaattttgtacataatacacttacctgcagtgtacagaaacaagaaaagatggcgatttactaatgtctgctgcctggcagagaattgaactacattgctttgtacatggccgccctttgctgattatctttctcagcttactatagagatgagtgcattggcatgttagcctcaatcagggggcctcaataacaacagatagttgacctgtgataaactgacgagataacagcgtcctggaaaatcaccggacactgcccaatctattgagctaaagagttctgtattatgcatcttttgtgtttcagaacagttagtttcacccataattcgatccattttttggttggtacatgtgaacatctgattgaacttggttttcttagaatttttgcaaatggccg

SEQ ID NO: 132907 - DNA, 2495 bp, Zea Mays
gagacgaggcgccgagggaggcaagccgatcacaccaaacgcttcgtgctgctgccccgtctcttctcatcgtgatctcagggcagtggatcgatctcacgtcggaggcgaccttcttaggcgcgccaccgccatccgagccgagccgcagcgatccagatccagtgttggggctgccttgtgcaccgaatcagtgatcgggcagcgtaatacaaagagggagcgcttggtcatctgagctggttttgtacagaatgtcagagggtaatgtggatagcatccagatatctgttagtaacgatgagaggaggaatagggcagatgccgagatctcggaggacgagccaaggcacaccaggatgcggtcactgaagaagaaagccttgcatgcatcgacaagactcacacactccctgaagaagagggggaagagaaaagtggactgcagagtgccaaggatagctatagaagatgtcagggatgctgaagaagagcaagcagtgaactcgtttcgggaggttttgtttgctaggggcttgctaccagtcaagcatgataattaccacacgatgcttagatttttaaaagcaaggaagttcgattttgaaaaagcagcacagatgtgggcggacatgctgcagtggagaaaggagttcggtacagacacaatttttgaagattttgaatttcatgaactagaggaggtcctgcaatattatcctcatggttaccatggggttgacaaggaaggaaggcctgtctacattgagttgcttgggaaagttgaacccaacaagcttatacaaatcacaacagttgagcgctacattaagtatcatgtacaagagtttgagagagctttccgggagaaattccctgcatgctcaatttctgccaaaagacatatagatactacaacgacgatattggatgtccacggtgtgggctggaaaaactttagcaagattgcaagggatttggtgcgttgtatgcaaaaaatagatggtgactattatcctgagacattacatcaaatgtttattgtaaatgcgggacctggtttcaagctgatatggagcactgttaagggacttcttgaccccaaaacgtcatctaagatacatgttctaggaacaaaatatcaaagcagacttcttgaagctattgatgcaagccaattaccagagtactttggtggttcgtgcacatgttctaaccatggagggtgcctgaggtctaacaaaggcccctggagcgatccttcaatcatgaaacttgtacatagcatggagtcattgaaggaaattgggcaagtatctgatatagaagaaacagttacaggctccatgagattgcgtgctctcaagttaccagaacgaattagtgacacgtcaaatgctgaatcaggttcagatgttgatgatcttggatcccctgtggctcctgaagatgttgaatatcctagtttggccccagttcgagaggaagcgagggaatcaggatctacaacatatagtggttcaattggcatgtctcgtatggcagataaagttgtaggatccaacgggagatacaactctactggaaatgaaactaggcaggtcaatgcagaacaaggttccctgataaatgggggtttacttgcgcccggtcagcgtgccccaaatgatgctgtaggcaatgatgatgggttcttgaaatatatatcaagaagagtcgttgctatatttcttgaagtactctcttttttgcggttcttcattcgtcgacgacaacactcggaaaatgttcattcacatactgcaactgcacccagtagtctggcaaatcttcagacaattaaggaagatcgtgtaaatccttgtctggagcgtcttgatcgacttgagtcaatgtttaatcagctgagcaaaaagcctccagagcttccagaggacaaggaccgggccatacaagattcttttgacaggataaagtccattgagtttgatctgcagaagacaaagaaggtattgcatgcaacagttatcaaacaaatgcagatggcagaaaccttggaagctgtaacggagccggatcttaggcggaggaaattttgtacataatacacttacctgcagtgtacagaaacaagaaaagatggcgatttactaatgtctgctgcctggcagagaattgaactacattgctttgtacatggccgccctttgctgattatctttctcagcttactatagagatgagtgcattggcatgttagcctcaatcagggggcctcaataacaacagatagttgacctgtgataaactgacgagataacagcgtcctggaaaatcaccggacactgcccaatctattgagctaaagagttctgtattatgcatcttttgtgtttcagaacagttagtttcacccataattcgatccattttttggttggtacatgtgaacatctgattgaacttggttttcttagaatttttgcaaatggccg

SEQ ID NO: 132908 - DNA, 2694 bp, Zea Mays
gagacgaggcgccgagggaggcaagccgatcacaccaaacgcttcgtgctgctgccccgtctcttctcatcgtgatctcagggcagtggatcgatctcacgtcggaggcgaccttcttaggcgcgccaccgccatccgagccgagccgcagcgatccagatccagtgttggggctgccttgtgcaccgaatcagtgatcgggcagcgtaatacaaagagggagcgcttggtcatctgagctggttttgtacagaatgtcagagggtaatgtggatagcatccagatatctgttagtaacgatgagaggaggaatagggcagatgccgagatctcggaggacgagccaaggcacaccaggatgcggtcactgaagaagaaagccttgcatgcatcgacaagactcacacactccctgaagaagagggggaagagaaaagtggactgcagagtgccaaggatagctatagaagatgtcagggatgctgaagaagagcaagcagtgaactcgtttcgggaggttttgtttgctaggggcttgctaccagtcaagcatgataattaccacacgatgcttagatttttaaaagcaaggaagttcgattttgaaaaagcagcacagatgtgggcggacatgctgcagtggagaaaggagttcggtacagacacaatttttgaagattttgaatttcatgaactagaggaggtcctgcaatattatcctcatggttaccatggggttgacaaggaaggaaggcctgtctacattgagttgcttgggaaagttgaacccaacaagcttatacaaatcacaacagttgagcgctacattaagtatcatgtacaagagtttgagagagctttccgggagaaattccctgcatgctcaatttctgccaaaagacatatagatactacaacgacgatattggatgtccacggtgtgggctggaaaaactttagcaagattgcaagggatttggtgcgttgtatgcaaaaaatagatggtgactattatcctgagacattacatcaaatgtttattgtaaatgcgggacctggtttcaagctgatatggagcactgttaagggacttcttgaccccaaaacgtcatctaagatacatgttctaggaacaaaatatcaaagcagacttcttgaagctattgatgcaagccaattaccagagtactttggtggttcgtgcacatgttctaaccatggagggtgcctgaggtctaacaaaggcccctggagcgatccttcaatcatgaaacttgtacatagcatggagtcattgaaggaaattgggcaagtatctgatatagaagaaacagttacaggctccatgagattgcgtgctctcaagttaccagaacgaattagtgacacgtcaaatgctgaatcaggttcagatgttgatgatcttggatcccctgtggctcctgaagatgttgaatatcctagtttggccccagttcgagaggaagtacagtcttactaagttctgttatgtttttttggagatattttattatttttgtcgtatgtctatcttggaactgtgaagatttgaacttgcacattcaggctttcattagaaaatgtgttctgttccttttagctgcatgacaccatgttagcatgttttataatttgtagttaattcgttctgattctttaccctgtaggcgagggaatcaggatctacaacatatagtggttcaattggcatgtctcgtatggcagataaagttgtaggatccaacgggagatacaactctactggaaatgaaactaggcaggtcaatgcagaacaaggttccctgataaatgggggtttacttgcgcccgcaggtcagcgtgccccaaatgatgctgtaggcaatgatgatgggttcttgaaatatatatcaagaagagtcgttgctatatttcttgaagtactctcttttttgcggttcttcattcgtcgacgacaacactcggaaaatgttcattcacatactgcaactgcacccagtagtctggcaaatcttcagacaattaaggaagatcgtgtaaatccttgtctggagcgtcttgatcgacttgagtcaatgtttaatcagctgagcaaaaagcctccagagcttccagaggacaaggaccgggccatacaagattcttttgacaggataaagtccattgagtttgatctgcagaagacaaagaaggtattgcatgcaacagttatcaaacaaatgcagatggcagaaaccttggaagctgtaacggagccggatcttaggcggaggaaattttgtacataatacacttacctgcagtgtacagaaacaagaaaagatggcgatttactaatgtctgctgcctggcagagaattgaactacattgctttgtacatggccgccctttgctgattatctttctcagcttactatagagatgagtgcattggcatgttagcctcaatcagggggcctcaataacaacagatagttgacctgtgataaactgacgagataacagcgtcctggaaaatcaccggacactgcccaatctattgagctaaagagttctgtattatgcatcttttgtgtttcagaacagttagtttcacccataattcgatccattttttggttggtacatgtgaacatctgattgaacttggttttcttagaatttttgcaaa

SEQ ID NO: 132909 - DNA, 1492 bp, Zea Mays
gctaaatgtacaagcgcagtatatgcacagaacatgcatgtccgaaaagtggccggcaattgcatttgcagagtttgaatcagctcgtctccgacccgaacacgccaaccgcagagccgacggaggcgaacgcgctgatgagcaggcagacgaggctgaacgcatggatggcgagccactggttggtccacggcgccaccttgttcctcgtgaggtacatctcgacggggaagtagacggcgagcggccagaaggtgaaggagccgagcagcccgatgatctggttgaagtaggggaaccagacggccagcgccgtggtcgccgccacgtacgccgtgcggaagcacagcctgaacacgttcgcgttcacgcggcgcgcgcccggcaccggcagcagcggcgcctcgacgaccgtggccccgccgccgaacttgcggtccgcgaacgcgaacaccggctgcgtgtacacctggtagccgccgaggaggtggagaacgatggcgaggttggcgaggtcgatgagccagtagggctcgtagaagccgaagccggtgaggaggttgcccggggtgccgtcgccgaacgacgcgtagccaaagcacccgcagcagaggtagaagagggtggtgatagcgatgctcgctctcgtcgcctttttcatcgtctcgctctccggcggcggcgacctcagcgtgtcctctatttccagcagcaccaacgagaaagggtaggcgaacaagatgtccccgagggcctgcgagactcgccacaccttctgcgtcgtggacaccagcgggatgcctccgatgccgcccatgatcaccccgtttgcgatgactttggcgacgccgaggccgacgccgacgaaggcgtagaagcaggacatgacggcggcgaagatggagagccccgccatctcgtggaagttgggtatctgcgacagcagcacctgcgcgaggccgaagagcagcatgtagtagccgtctcctcccaccgagcacggcgcgtcgtggccttccctgtggtagcaattggccttccggatcgccctcatgctagtggcggaagtgagcgtgtacaccacaccggtgccaaacaagctcaggttgaggaagaagccgcaaaacaaatggctcttgtcgcccaggtagatgcgcacggcgtcgacgtaggagcggttcctgacgacgcctcctcgctccgggtggtggcagatgtagcagtcggcgatgagggtggactgcaccgcggtgacgccggcgaagaacaccatcgccgcaggcccgcccacccaccccagctgcgccacgctccacgccagggacagcacgccggacccgatcaccgccgtgatgatgtgcgccatcgccgtccataccgtgccggttctcttgaccaggctctcgtcggacgagctgcacgacgacgacgactccaagggcttgccgaggaggagccggtcgccgtcgccgtccccgtcgccgcctcctga

SEQ ID NO: 132910 - DNA, 1132 bp, Zea Mays
gctaaatgtacaagcgcagtatatgcacagaacatgcatgtccgaaaagtggccggcaattgcatttgcagagtttgaatcagctcgtctccgacccgaacacgccaaccgcagagccgacggaggcgaacgcgctgatgagcaggcagacgaggctgaacgcatggatggcgagccactggttggtccacggcgccaccttgttcctcgtgaggtacatctcgacggggaagtagacggcgagcggccagaaggtgaaggagccgagcagcccgatgatctggttgaagtaggggaaccagacggccagcgccgtggtcgccgccacgtacgccgtgcggaagcacagcctgaacacgttcgcgttcacgcggcgcgcgcccggcaccggcagcagcggcgcctcgacgaccgtggccccgccgccgaacttgcggtccgcgaacgcgaacaccggctgcgtgtacacctggtagccgccgaggaggtggagaacgatggcgaggttggcgaggtcgatgagccagtagggctcgtagaagccgaagccggtgaggaggttgcccggggtgccgtcgccgaacgacgcgtagccaaagcacccgcagcagaggtagaagagggtggtgatagcgatgctcgctctcgtcgcctttttcatcgtctcgctctccggcggcggcgacctcagcgtgtcctctatttccagcagcaccaacgagaaagggtaggcgaacaagatgtccccgagggcctgcgagactcgccacaccttctgcgtcgtggacaccagcgggatgcctccgatgccgcccatgatcaccccgtttgcgatgactttggcgacgccgaggccgacgccgacgaaggcgtagaagcaggacatgacggcggcgaagatggagagccccgccatctcgtggaagttgggtatctgcgacagcagcacctgcgcgaggccgaagagcagcatgtagtagccgtctcctcccaccgagcacggcgcgtcgtggccttccctgtggtagcaattggccttccggatcgccctgcagagagaaggacggaacggaacagaccaagacatgatcacctgagacttttatcgaggccagcacaatgcggtgtctga

SEQ ID NO: 132911 - DNA, 1755 bp, Zea Mays
cacttcccgagaccgcgagcgaatccaccaccaccatgtgagcagacaaaggttggctacacaaacaggaaaagaatagtatatccgcccccatattgatcctccccacgtcgccgtgctcgttttgcgcgtccaccagcccgccccccaaccccacccagcgcgacgaagccggggggcgatcgctccagcgccgccggcgacctcgccccgggagccgccggcggtaccccgctctctgtcccgcctcaacgaaccctcaggtccaagtagttcgtttcgtgagttatccaaagttgcgccgcaaagatgagtactgctaatcgctaccaacacatcaagtcaactaagcctgttgtaggcaaagcaagaaaattgaaggatctcatgataaaaagtgacaataggatatgtgctgactgtggtgcacctgatcccaaatgggcatctgctaatattggagtgtttctttgcttaaaatgtggagatgttcatagggcacttggacctgacatctcaaaggttttatctgtaactttggatgattggtctgatagtgatatcgactccatggttgaggttggtggaaactcatatgcaaattcaatttatgaggcttttcttccaaaagatcacccaaaacccaaaccagattcaacgatggaatataggacaaaatttataagagctaagtatgagacacaagattttttgaagccaagtttgcgcatttcatcaagatcatcttttaaatctaccacttctgtgaagagtgtagatagcaatttctctagcacttcaaggaaggatgtctttgaagatacaagagaatttgttggagagttgaatatcacactggtcaaaggcaccaacttggccgttagagacatgctaacaagtgatccatatgttgttttaacgctcggagggcagaaagttcaatcaacggttaaaaaaagtgatctgaatccggtatggaatgaagtgcttaagatatctgttcctcgaaattatggacctctaaaacttgaagtgtatgaccatgatatgttctcagctgatgatatcatgggtgaagcagagatagatctccagccaatgatcacagccgccatggcctttggagatacttcacgtcttggtgacatgcaaattgggaggtggttcatgaccaaagacaacgccctgatgaaagatagcacggtgaatgttgtggcaggtaaggtaaaacaggaggtgcacttaaagctacagaacgtagaatcaggtgagttggagttggagctagaatgggttccgatcctctagactaatgataactcccctgatctttgtctaaaaatctatactcaagatgcatcgatgtttccaagctgtccacttgatggtcttggacatttttgctggatggtttgaatttgttaaaaatgtcactgtagaatatcatggtgtaactgtcggttgtactcgcgcctttcacccccctcccggtaactggttatcatgccttgtaagcactcgctgtctcttgattgttgttgcattgtcccattgaaaggacctgtgtcttgtaagagatggcaattatagccagtgaactctttgtgctgatgccatgttggcgctgtagtagctaatcgggttgttggttctcctggagctttgcttagatgagtctagcccgttcagttttttcgttggagaagctgctgcaccggttactgacaaatgacattttgctgacactttgttctt

SEQ ID NO: 132912 - DNA, 1397 bp, Zea Mays
gatttcttttatatgaagacagaatgcaatggagcgcccatgtgtacacacacagctttgctactatacccatgccattgattacaaaacaaacaaaaatgaatgcccaatatgcacagtactttattttgtttttatttcatttcattatacataagttgtaaaagctatttgttttttgtgcatttcagatctgctaatattggagtgtttctttgcttaaaatgtggagatgttcatagggcacttggacctgacatctcaaaggttttatctgtaactttggatgattggtctgatagtgatatcgactccatggttgaggttggtggaaactcatatgcaaattcaatttatgaggcttttcttccaaaagatcacccaaaacccaaaccagattcaacgatggaatataggacaaaatttataagagctaagtatgagacacaagattttttgaagccaagtttgcgcatttcatcaagatcatcttttaaatctaccacttctgtgaagagtgtagatagcaatttctctagcacttcaaggaaggatgtctttgaagatacaagagaatttgttggagagttgaatatcacactggtcaaaggcaccaacttggccgttagagacatgctaacaagtgatccatatgttgttttaacgctcggagggcagaaagttcaatcaacggttaaaaaaagtgatctgaatccggtatggaatgaagtgcttaagatatctgttcctcgaaattatggacctctaaaacttgaagtgtatgaccatgatatgttctcagctgatgatatcatgggtgaagcagagatagatctccagccaatgatcacagccgccatggcctttggagatacttcacgtcttggtgacatgcaaattgggaggtggttcatgaccaaagacaacgccctgatgaaagatagcacggtgaatgttgtggcaggtaaggtaaaacaggaggtgcacttaaagctacagaacgtagaatcaggtgagttggagttggagctagaatgggttccgatcctctagactaatgataactcccctgatctttgtctaaaaatctatactcaagatgcatcgatgtttccaagctgtccacttgatggtcttggacatttttgctggatggtttgaatttgttaaaaatgtcactgtagaatatcatggtgtaactgtcggttgtactcgcgcctttcacccccctcccggtaactggttatcatgccttgtaagcactcgctgtctcttgattgttgttgcattgtcccattgaaaggacctgtgtcttgtaagagatggcaattatagccagtgaactctttgtgctgatgccatgttggcgctgtagtagctaatcgggttgttggttc

SEQ ID NO: 132913 - DNA, 1648 bp, Zea Mays
cacttcccgagaccgcgagcgaatccaccaccaccatgtgagcagacaaaggttggctacacaaacaggaaaagaatagtatatccgcccccatattgatcctccccacgtcgccgtgctcgttttgcgcgtccaccagcccgccccccaaccccacccagcgcgacgaagccggggggcgatcgctccagcgccgccggcgacctcgccccgggagccgccggcggtaccccgctctctgtcccgcctcaacgaaccctcaggtccaagtagttcgtttcgtgagttatccaaagttgcgccgcaaagatgagtactgctaatcgctaccaacacatcaagtcaactaagcctgttgtaggcaaagcaagaaaattgaaggatctcatgataaaaagtgacaataggatatgtgctgactgtggtgcacctgatcccaaatgggcatctgctaatattggagtgtttctttgcttaaaatgtggagatgttcatagggcacttggacctgacatctcaaaggttttatctgtaactttggatgattggtctgatagtgatatcgactccatggttgaggttggtggaaactcatatgcaaattcaatttatgaggcttttcttccaaaagatcacccaaaacccaaaccagattcaacgatggaatataggacaaaatttataagagctaagtatgagacacaagattttttgaagccaagtttgcgcatttcatcaagatcatcttttaaatctaccacttctgtgaagagtgtagatagcaatttctctagcacttcaaggaaggatgtctttgaagatacaagagaatttgttggagagttgaatatcacactggtcaaaggcaccaacttggccgttagagacatgctaacaagtgatccatatgttgttttaacgctcggagggcagaaagttcaatcaacggttaaaaaaagtgatctgaatccggtatggaatgaagtgcttaagatatctgttcctcgaaattatggacctctaaaactttgtatgaccatgatatgttctcagctgatgatatcatgggtgaagcagagatagatctccagccaatgatcacagccgccatggcctttggagatacttcacgtcttggtgacatgcaaattgggaggtggttcatgaccaaagacaacgccctgatgaaagatagcacggtgaatgttgtggcaggtaaggtaaaacaggaggtgcacttaaagctacagaacgtagaatcaggtgagttggagttggagctagaatgggttccgatcctctagactaatgataactcccctgatctttgtctaaaaatctatactcaagatgcatcgatgtttccaagctgtccacttgatggtcttggacatttttgctggatggtttgaatttgttaaaaatgtcactgtagaatatcatggtgtaactgtcggttgtactcgcgcctttcacccccctcccggtaactggttatcatgccttgtaagcactcgctgtctcttgattgttgttgcattgtcccattgaaaggacctgtgtcttgtaagagatggcaattatagccagtgaactctttgtgctgatgccatgttggcgctgtagtagctaatcgggttgttggttc

SEQ ID NO: 132914 - DNA, 1000 bp, Zea Mays
aggttggctacacaaacaggaaaagaatagtatatccgcccccatattgatcctccccacgtcgccgtgctcgttttgcgcgtccaccagcccgccccccaaccccacccagcgcgacgaagccggggggcgatcgctccagcgccgccggcgacctcgccccgggagccgccggcggtaccccgctctctgtcccgcctcaacgaaccctcaggtccaagtagttcgtttcgtgagttatccaaagttgcgccgcaaagatgagtactgctaatcgctaccaacacatcaagtcaactaagcctgttgtaggcaaagcaagaaaattgaaggatctcatgataaaaagtgacaataggatatgtgctgactgtggtgcacctgatcccaaatgggcatctgctaatattggagtgtttctttgcttaaaatgtggagatgttcatagggcacttggacctgacatctcaaaggttttatctgtaactttggatgattggtctgatagtgatatcgactccatggttgaggttggtggaaactcatatgcaaattcaatttatgaggcttttcttccaaaagatcacccaaaacccaaaccagattcaacgatggaatataggacaaaatttataagagctaagtatgagacacaagattttttgaagccaagtttgcgcatttcatcaagatcatcttttaaatctaccacttctgtgaagagtgtagatagcaatttctctagcacttcaaggaaggatgtctttgaagatacaagagaatttgttggagagttgaatatcacactggtcaaaggcaccaacttggccgttagagacatgctaacaagtgatccatatgttgttttaacgctcggagggcagaaagttcaatcaacggttaaaaaaagtgatctgaatccggtatggaatgaagtgcttaagatatctgttcctcgaaattatggacctctaaaacttagatagatctccagccaatg

SEQ ID NO: 132915 - DNA, 4502 bp, Zea Mays
ctgcccttccacgcacctccacttcgtcctccactcctcccccttcccctgttccccagtccagatctactccactgccacctcctctccctttccctctcctctcccgagcctgcctctcatggcgtctccaagcggaaaccctaaccctaatcccaatacaccattcgagatcggaaagctcttcaggccaccgaatcctatgaccaccgcgacccccaaccccatcttccccggcgtcgccggaggcccgacgggctcgccgccgccgtccggtccctactcctaccctccggtgaccccgcccttccaccgcggaccctacatccactaccagcaggatccccacgccatggcccgtcccgttgtctccttccccatgccaaacccaaacctcaaccccaatcccaacccgaacgctaaccccaacgccgcctccccgggccccaaccctggcgcgcgcctcatgcagctgctcgggaactccgggccgacccagctcgaaaccgccgtctccatgcccccgcccacgtcggagttcgcgcaactgcagcagctaccagcgatgccatccgcgccgccggccaggatgctgagcagcaccagcagcaaggtgcccaggggacggttacttggcaccggggaacgtgcggtgcacgacgttgactccaggctgcctggggaagcgcagccaccgcagctggaggtaacaccgattaccaagtacacatcggatccggggctcgtgctgggcagacagatcgctgtgaaccggacgtacatcgtgtatgggctcaagctcggtaacatccgtgtgctgaacatcaacaccgcactccgcgcgctcctccgtggtcacacacagagggtgacagacatggctttctttgctgaggatgtccatcgtttggcaagtgcgagcatagatggacggatatatgtgtggagaatcgatgaaggacctgatgaggaaaataaaccacaaattactgggaagattgaaatcgccatccagattgtaggcgaggctgaagcttaccatccaaggatatgttggcactcgcataagcaagagattctatttgttggaattgggaactgtgtcttaagaatagatacaactaaagtgggtagaggaaaagacttcactgttgaagaccctgttaaatgtcatcttgaaaagcttgttgatggtgttcgcttagttggtaagcacgatggtgatgtgactgatttgtccatatctcaatggatgagcacccgcctggcctctggatccaaggatggctcggttaagatctgggatgatcgtaaacaagtgccattatccatttttaagccccatgatggtcaagctgtttattcagttgcttttcttacagcacctgaacgaccaaatcatataaatctaattacagcgggtcttctgaatcgagaagttaaaatttgggcttctactaatgaggatggctggttgttgccaagtgattctgagacttggaagtgtactcagacgttggaacttgttagttctctggaacctagagtcgaagaggcatttttcaaccaggttgcggtgctgccccaagcgagcctgattttgcttgcaaatgctaaaaagaacgctatttatgccgtgcatgttgagtatggcccagatcctgcttctactcgcttagactacatagcagatttcacagttgcaatgcctatattaagccttacaggaacacatgatagccaacctgatagtgaacaagttgttcaagtctattgtgttcaaactatggccattcagcaatatggtctagagctaccactctgtttgcctcctacagctgatagtactgggtttggaagagatcctgctatttctcgtgtttacgaggcacctctggaaatggcaggaacagagtcatctacaggaactagtttcacagattcttactctgtcagttctttgagtaaaccatcaactgttgaccagtctgcagagcttgatctgaaaccatcagctccaccgcttgcatactcagaaggtgatggttccgtgcctcttccatctgcacctcctgcaccgaagatggaggctcctggatcaggaccagcacctggaggtcgtggtatagatcaatcagcttttgactatacaacaaacagaaatgtggagcgtgatgttttgaaaagacaagatacacccatgcccattagaaaggatatcttaggtaaagatgagccaagagatggtcacagtgatgttccaatgcttcccaatccccgtttgatgtttcaggttggagggaatgctacgcatttggttactccatctgaaattatatcgggcactctctcgtcttctgaaaacaatgatgcttccaaatctgatggaggaaaaagtcaagatgtttccagcagaagctctcaggttccagaagtggaaccaaagcatattgatgagagtaaacaagatcaaaatttgggactcgaagctgtcaaagaaactcagattgtctgtgagaatatggagaaaactcggagttccttggaccaaactgttgaaatgatcagtgagcgctcagttacaactgataagtacagcgtggaagaatcacagtcatcatctgatcgaccgacatcagaccagactggtatcagtgaaaatgttctgaagaagtttgtggaaatgcctgagaaaattgattattcctctgcttctagggagcaatcatcttcatttacgaaagaggagaaagttttgcatcctcaaacatctggtcaaccgtcacctcctgtgagtgctttcaattcaactgagtcacatgagcctttgagctccacatacctaccaatcacagtcagctcctacccagaagttggtgccacacaagggatgctgcaacagctcatggggaggcaggaggacatggaaaagcagctgagtactgtggttcctgcatccatcgcaaaggagggcaaaagacttgagacatcattagggcgcactgtagagaaatcgatcaaagctaatattgatgcattttgggctcgtctccaggaggaaaacactaagcgtgaaaaggctgatagagatcgaatgcagcaatttgttactctcattacaagctcaataaataaggacttaccttctaatctggagaagtcacttaagaaagaaatttcttcacttgggcctgttgttgctcgtgcaattacgcctattattgagaagtgtctaacctctgctgtttctgattcagttcagaaagggttgggtgacaagttgttcaatcagctggaaaagtctattactggaaaacttgaagctacacttgccaggcaaatccaaatccagttccatacatctggaaaacaggctcttcaggatgctttacgtactagctttgaatcattgcttgttccagcgtttgagcaagcatgcaagacaatgtttgagcaaatagatggtgcatttcaaaagggaatgtctgagcactccaccgctattcagcatcaagtcgagtcttcacatagtccgttagcgctaactctaaaagaaatcatcaattctgcatcatccatcacccagagtttttcatcggagttacttgatggcaatcgcaagctactggcacttgttacttctgggaatgccatggcacataataccagtgctttgcagcccattaatggtcctatgggtggatcccaggaggttgaggctccgttagatcctatgaaagagctgggcagactgatatctgaacgcaagtttgacgaagcatttacaatggctcttcaaaggagtgatgtttccatagtatcgtggctatgctcccaggttgatttgcgggcattatgtgcaatggtcccagtacctcttaaccagggggtcctcctggccttattgcagcagctagcaattgacattcacaatgagacatcacgaaaggttcaatggatgacagatgttgccatggcaatcaacccagcagaccagatgatcgcggttcatgtgcggcctatctttgagcaagtctacaaccaactggcccaccagcggacactccctaccatgaccgcagcagatggcaccagcatccgtgtgatcatgcatgtaattaactcagttctgcttagctacaagtgattgtagctacgcaactgtgggaagtatggcctattctatcttgtatagagaaattttgaatggccacaacccacaacccaggagacattgtggccgagaatacttgcaagagggcggaggttactccttggtgtaaatttggcttctgtcgctcgtgaattcggactattgtagtaattgggcatcatcgaattcttcatttgacatgatcaccgggtcttgtatttccgtcataccttaatggaaatgggtcgaatatatcagttggactttgtagcacggacagtttggaaccaatagcagctgcttggtggtggttgttccacaaaattttgaagtccaatgtagacattgt

SEQ ID NO: 132916 - DNA, 709 bp, Zea Mays
gaagaatccaaacagaacgtttcaagcaacaactgctccgttcgtgggaaaagcgaatggcttccatgccatctttctccgcacaaaattcctccgagaggccgcaacagctacgacgaggagaagacgcagcgcaaggaaaggagcataaatcgtagtatctcagacgagtaaacgacaaggcacaagaaggttattctggcgcaaaaatagttacaagggttcagacgttcagtgtccagatacgtgtgattctcctgctcatcgccaacgctatatgcgacctaacaagaatacaaatttacattcacgacggctacttttttttttaccaatgttgcaaccatctacaaacatacacacggccgaagaacagtctcctggcaagcgcaaataatacgtacgtattacagaacgaaaaccgagaggtataagcataccctgttaggctgttacccagactgtacaacctggcagctcactgccgaacagccgtatatagccgacgcaggtcctagcgcacagcggtacagctggaggacgacgagcgcccatccatcactgcatctgttcgacgcgcagatggcacagtgcgatccaagccactcatccgcagagaaactgaataatggatatgagtccggcaagtctgcatctttcttttttgtatttttttttcattcatcctaacacttggtatctcttctta

SEQ ID NO: 132917 - DNA, 804 bp, Zea Mays
aaattgtgcaaatcctttttcttcgagacttttgagaatggtctgttttgttacaagcttctcttagatagctgaaagatggatttgaatatggtcgtggatagtaaaattctgtaacaacatttttgaaaattgttttaaaacttcacataaatccagtttgatcccttaaatgttaggctacacttttaacagagttgtcgctcatttctagaagaaaaaaaggatagatttagtttctagataatctcacatgatttatggagttagagttttcttctatgatgatttgagttatccatgtctcgcattgggatctcgtggcggatgatgatggagctgtgatggtctctgcgtggtttgtgttgttggagatagcaatatagcatcaagggggctacgacagagggcgtggtcatcacggaggtgctcgggtcagttgggcgcgtgctcgacgggcctcccgagctggtgctacagccgctccgccttgccgtcgagatcaaatcagagaaaggtggtctggctcctaggtacgctcatccatatgatcaaaccttctacactgtgtaggtagaggtattagatttgggatggtttgacccatttattttagaggatcttcactccaattttgagcttgatatgtcactatttgtaaaaaagccacagttgctcttctactcaagggttctacttgatctgtgggtggctagagtagcagtgcttcgagtgtgttctctaaattggttgaatcactagcagaagatttgttgtgtttttcctccgttctatttctgcaat

SEQ ID NO: 132918 - DNA, 1275 bp, Zea Mays
cgccccacgagccactgtagcacgtcgccctcctcggggctccacgggcccgtgatcctgttgagctccgcctcggctcccatctcctgtttggttcggtacctcgacggatgaagaagacaaaaacacaacgcgcaccagctgcatcccatggtggccactgcagtcatggcgtggcctccctatctccacgtcgtagctactgctaacacagccaccacatgacttccagaaggtgaaggcggatctcgaccttgctcacctgttagaaagccactcgcctagctccacttgtcccagctgctaggaccggcgacctgctaggtactccctcgagccgatggtgagggccctgctctaccccttttcccgttagatctaaattttcatggaggtgagcgcggacgaggtcaggtatgtcgcctccttctcttcctccaccggcttctacacgctctaggcccgcgctggtgttgtcggccattccttgtgctcgacctcgcgtctacgttggactccgcccctctaccaccgtctccaacgccgccattgaagcctgttgtccctgctcaccccggcgagcaggctacacgccaggtcgccgcctctggcgcactccgttggctctatcctgacgctcgccatcgccgttgagtaactcgtcaccctcaatgttcgcctcacgctcgccaggtgtttgagggaatggtggtaccaggagcagtgatcgtcttgcctattgtatttatacggaaacatttgcacggttttgtctatgtttgcatacacctattgtatttatacttctaactgttggtatggaggtgacctgcaacttctcaaccaaggcgagcacagtcacctttgggccacagcatgccctggactctaccaccaccgtgaaggcacgctacaacagcaatggaatcgtcgatgccctcatccagcacgagtggagacccaagtcaatcttcaccctttccaccggggtcgaagtcaaaatgttcaacgtgtttgctatcttgaagccccccaagattgggttgtcactgcctcactggtcctcaagccctgatgataatgtcgatcccctttagtcctagcatagtcaggttttcgtatcaatacttgaggtcgagtgaaataattctgaaccttgggtctctttctgtcatcctgaaagttcagtcttcctagctggttttagatgttgagaactgaatctacaaatgacattgtgatcaaatacatcacttcgttgacatcttgtctaaa

SEQ ID NO: 132919 - DNA, 681 bp, Zea Mays
attccgttgattggccggaaatatacatggtcgaatggacactctaatcctaccctggtcaaattggatagggttttctgcacaacagattgggaggaacaattttcagattctcttccccagagctcagccacggatgactccgaccattgccctttgctgcttgggtttcatgatttcagaggaaaagggaggtttcacttccaagcattttggcctaggatggagggatttcatgatgtggtagctcaatcttgggcgcctgttccagcagggccttgcccactcatcactttggccaagaaattaaagacaacggctaggagtctgcagagctggaatgacaaaaaagttgggaggattaagctgtagcttgagatggctagggagctcctacatcaattagaggtcgcgcaggacaatcgttcctcatctcctggtgaattgtggctccgaaacatgctcaagaagcactccattgccctgtcttctatctctcgtaccatggcaaggttgaaatcgcggattgggtggttcaaagaaggtgatgccaatacctctctttttcttgcacaaacaaggttcaggaagaaaaagaatttcattgccgcaatacactcagaggatgggcaaatctggactgcccatgaaggaaaggcagcagccttctttaacttttat

SEQ ID NO: 132920 - DNA, 1815 bp, Zea Mays
cacaaccagtctcttcctcgcagctcgcaccaacccgccgccgtctatttactgccactccgcctcctcatggcctcccctacggcaggtgatgctcccctcgcgtctccttctccgtctccagcggctgacgcgacggacgcagcccttgccgccgcggccgcggtgccggatccagacatatctttcgggttcctgcgcccggagctcgggaaggagaagctggtcgggacggtgggattccacgagcgccacgtgttcctctgttacaagggcccggaggtgtggccgtcccacgttgaggccgcacactctgaccgactccctcgcctcctcgccgccgccatcaaggcccgcaagcccaatctgaagaagaccatcaaattcaccatctgtgaaggagaagatggcactgaatcatcaaatggagatgtgttgatctttccagatatgatcagatacaaagggctgacccattttgacgtcgacaactttgttgaagaagtgtttgtgaaggatattgactggcttcctggatctcctgagcctataagtggttcctatgttttcgtttgctcccatcaaagaagggatataaggtgtggtatttgtggacctgctttgattaaaaggttcaaggaagagataaatggactgggacttgatggtcaggtggctgtcagtgcatgctcacacgtgggaggtcataagtatgcaggaaatgtcatcattttcagttctgatgccaagggagaagtggttggtcattggtatggttatgttgtccccgacgatgtgcctgttttgctgcataaacatattggacaaggagaagttgtggaccgtctatggagggggcagatgggtttatctgaggagcagcagaagcaagctctcgagcttcggagcatgacaaatggtggcaaagaatcccttgaagaaaccgaaacagacggtgcttcttgtaaccctgcagcaactggtggatgctgccaaggcaatggtggcttcactcgagctttggagcagcagaagcaagctctcgagcttcggagcatgacaaatggtggcaaagaatcccttgaagaaaccgaaacagacggtgcttcttgtaaccctgcagcaactggtggatgctgccaaggcaatggtagcttcacttgctgccatcctgacctgccaaaggaaaaacgggacaagagcatcgcaattgagcagaaccctaagagctgtgaggagaatggcaaggaggggggtggtgctggcagcaagaaggggaattcaaagacttgcccgatgcccacctggtttgagacctgggagagagctgacacctatgctgctcttgctgttgtcgcagctgccgcagctgtgtttatctctttcagaatctacaagaacctcaactgaagagcttgagagatctttgaagaggtgcccgaaacaagtctaggtgaatcagcgtactggtggtaaaacaatccgggacgagaataatctttacctgtgtatagtaatgtgaggtttagaacctcaaagtagcttatctggagatggtgataaaaaggtgttgtggctacggtgttttcgcgtgtgaacgtccactgctatcgaagtttggatgccttagctgctggtaatcgtaaggcatcaagtaagcaacattcactgtgatgatgttgtcttttgtttgggttttggatgttctggagattctaggttttgaaacaatatcaggttgattgaaaaacataaacatctggaaaaggttaacgcctttcttgtgacatttgaaaatttgaacttcctcgttta

SEQ ID NO: 132921 - DNA, 2653 bp, Zea Mays
ccaaacactcccctccggcccactgccatctggcccagcagcacatgttcgattctttcccctttgtccgtcggctacgacgctagccgccgccaatcccaacggacagcacggcggcggctggggctggggctgcggcgagcggcgcgccgccagccgccgccgctaggaccttgggcgcggctgccggctgcgctcgcgcaggcatgcgccgtgcggacggtacctgagcgcaacgacggatgggcagcgacggcggatgcagactgctagtcttccagccgcgtccgccgtcgaacgccgccgctcgtccgctccttcgctcggccagaagggaggaagacagaagggttactaggggttctactccggcggtaggtggggcagctgccccaccgtgctgcatggggagctccgcctctgctggcggatgaaatgatcctgcggccttctcttctggccgtcgcccgccctctcagcaccgtagccgtcgcggcggccgtccgccgcggggacctcgccggcgcggaggaagccttcgcgtcgacgcagctcaagaccacgaccacctacaactgccttctcgcgggatacgcgaaggcgtccggtctcatccgcctcgcggacgcacgccgcttgttcgacagtatcccgcacccggacaccgtctcctacaacacgctcctgtcctgccactttgcctgcggcgatattgatggcgcgcggagagtcttctccacgatgcccgtcaaggatgtcacgtcgtggaacactatggtctccgggctctccaagaacggggccagcgaggaggccgcagccatgtttcggatcatgccggtgaggaatgctgtttcctggaatgcaatggttgccgcgctcgcgtgctctggagacatgggtgcagcagaggacttgtttaggaatgcgccggagaagacggatgccattctctggactgcaatggtgtcagggtacatggacaccggcaatgtccagaaggccatggaattcttcggggcaatgcctgtgaggaacttggtttcatggaatgctgttgttgctggttatgtaaaaaactcacgcgcagatgatgctttgagggtgttcaagaccatggttgaggactctattgtgcagccaaatgcgtcaacgttaagtagcgtgcttcttggatgcagtaacctgtctgcacttggatttgggaggcaggtacatcagtggtgcatgaagttgcctcttagcaggaatgtgactgtgggcacatctcttctcagcatgtactgcaaatgcggcgatttgaatgatgcctgcaaggtgtttgatgagatgagtacaaaggatatagttgcatggaacgccatgatttctggctacgcccaacatgggggtggaatgcaagctatcaagttatttgaaaaaatgaaggatgaaggagtggtgccagactggattactctgttggcagtattgacagcttgtatccacactggattgtgtgattttggaatccaatgctttgaaacaatgcaggaagcatataagattgaacctcagattgatcattactcatgtatggtggatcttctctgccgagctggtctgcttgaaagagctgtcaacatgatccattcaatgccctttgagccacatccttctgcctatggcaccttgctgactgcttgtagagtttataagaatttggagtttgctgagtttgctgctagaaagctgattgaacaggatccacagaatgcaggtgcctatgtacagctggcaaatatttatgcggtggcaaataagtgggctgatgtctctagagtaaggagatggatgaaggataatgcggtagtgaaaacacctgggtatagctggatggaaataaagggtgtaaggcatgagttcagatctaatgacaggctgcatcctcagcttggtttgattcatgacaagttggaccgcttgcagatgctgatgaaagcaatgggctacgttcctgatcttgattttgcactgcatgatgtcgaggacagtctgaagtcacaaatgctgatgaggcacagcgaaaagcttgctatcgctttcggtctgattagcacttcccctgggatgaccttgaggatcttcaagaacctcaggatctgtggagattgtcataatgcagccaagcttatatccaaaatcgaggatcgggaaataatactaagggataccacacggttccaccattttagaggtgggcattgctcatgcggggattactggtgaaggaaagaatctcgataacagtttcagacacactcgcaatgtagtacttgcaacactatataatcccatcgacaggaataaaatgtgtggtaattttttgttaacttaatgagtggctaggacgatctgcagagagttagccagagaaactgatcatttgtttgatggctgtgtttttgccaaacttttttggtttcggttgtttggaaaggttaatcttcaaagtttggtaccacagctgggggtcaacaattttatggagttgcggagataggctgctgggcagatcactggtgttgttgtagaggagctgaaaacacttttagttttgggagcttggaccatttggaaacaccgtaatggttcgatttcaataaaatctttc

SEQ ID NO: 132922 - DNA, 885 bp, Zea Mays
atggcggtcatcctccacttcgccgtgttcgccgtctcctgcgccctccttgttgcatcggttctgtcacttccgccggcggtgtttaaggtcggcgacgagcgggggtggacggtgccggccaatggcaccgagactccttcccctctcatcccgggccccggggaaaattttgcccccagaaaccctagcgcgtcggatcagcaagggcaaaattttctgcgactccggctgaaggacgctgcggcacctatgtcggacgacactggccgcactatacccaagttcggcgaatgggacgtgaacaacccggcctctgccgacgggttcacggtgatcttcagcaaggccagggatgagaagaaagccccggcccaaggccacatcagggacaggtcggcgtcggccgacagcaaggactccaggtccagggacgagaagatgacctcctacagctccaggaccaacgcatcggtatgcgtccaaaccatctcgtagattcggccattcctgggctagtcataatcatgcatgcgttgtgatccctcccaacttgcagaagaaatggttctgctgtgtctcgcccagtcccacacagtcttgaggaagctaatgagccgtgcagtgctgcagtttctgtgatggttatgcgtagctcttcgaattcaatcctatactgcttgccagtgacaggggctctatgtatagccattgcaaatgagaaaattactctgatgggtgtctgcttatagcgttcttagctgtgtataccatcagttcaagctgatgtctgcttgtaattttcttttctggccccttctctatggtgtaacccttcctcaacgttatcagtgaatctgagctactcctcaatcctccccctgc

SEQ ID NO: 132923 - DNA, 789 bp, Zea Mays
atggcggtcatcctccacttcgccgtgttcgccgtctcctgcgccctccttgttgcatcggttctgtcacttccgccggcggtgtttaaggtcggcgacgagcgggggtggacggtgccggccaatggcaccgagactccttcccctctcatcccgggccccggggaaaattttgcccccagaaaccctagcgcgtcggatcagcaagggcaaaattttctgcgactccggctgaaggacgctgcggcacctatgtcggacgacactggccgcactatacccaagttcggcgaatgggacgtgaacaacccggcctctgccgacgggttcacggtgatcttcagcaaggccagggatgagaagaaagccccggcccaaggccacatcagggacaggtcggcgtcggccgacagcaaggactccaggtccagggacgagaagatgacctcctacagctccaggaccaacgcatcgaagaaatggttctgctgtgtctcgcccagtcccacacagtcttgaggaagctaatgagccgtgcagtgctgcagtttctgtgatggttatgcgtagctcttcgaattcaatcctatactgcttgccagtgacaggggctctatgtatagccattgcaaatgagaaaattactctgatgggtgtctgcttatagcgttcttagctgtgtataccatcagttcaagctgatgtctgcttgtaattttcttttctggccccttctctatggtgtaacccttcctcaacgttatcagtgaatctgagctactcctcaat

SEQ ID NO: 132924 - DNA, 960 bp, Zea Mays
agtgctcactcgcccacttcctctagatacctccacacaccattcacttggccacacgctgtggtacgatcgcgtgggggcgctgcatctgcatgccgatggcggtcatcctccacttcgccgtgttcgccgtctcctgcgccctccttgttgcatcggttctgtcacttccgccggcggtgtttaaggtcggcgacgagcgggggtggacggtgccggccaatggcaccgagacgtacaaccactgggcaaagaggaaccgcttccaagtcggcgacgtcctgaatttcaagtacgccaacgacgactcggtgctgctggtggcccacgacgactacaagcagtgcggcacggcgatcccgctgagccggttcacgggcggcgacaccaagttcacgctggaccgctacggcccgctctacttcgtcagcggcgtcgcgggccactgcgaggccgggcagcggatgatcgtgcgggtcagggccccatccgcgctgtacggcgcccccgctatggcgccggcgccggcgatgccgccagccgtcggtggtagtggcagtggcgcgcccagcccgcgcccggcctcctcacccgccgcgccgtcgatcggcggctctggttccgcttcggcttctgcagccccgagcccaagcccgctgccgcaggccagcggtggtgcgtctaggcgcgtgcttggcgtcgtgtcgtccgttgctgtggggcttgtggtcttggttgccagtgccatcaccctgtccgtgctggtggtttgaacgtacaattaattctgttttctggatccatactcgtagcgcatgccatcggtttaggaagtattgttagttttccgactacgtcttgatcggttagagttggtagggccactggccacagtcgcatgcttagtttgatgagtgaaagacttgtgtcattcaataaatggatgattaatctaatcta

SEQ ID NO: 132925 - DNA, 1178 bp, Zea Mays
acgacacacacaaaccagtagccactactccatccaccacaccacgagcgcgcgataaccctagctagcttcaggtagtagcgagagccaatggactccagcagcttcctccctgccgccggcgcggagaatggctcggcggcgggcggcgccaacaatggcggcgctgctcagcagcatgcggcgccggcgatccgcgagcaggaccggctgatgccgatcgcgaacgtgatccgcatcatgcggcgcgtgctgccggcgcacgccaagatctcggacgacgccaaggagacgatccaggagtgcgtgtcggagtacatcagcttcatcacgggggaggccaacgagcggtgccagcgggagcagcgcaagaccatcaccgccgaggacgtgctgtgggccatgagccgcctcggcttcgacgactacgtcgagccgctcggcgcctacctccaccgctaccgcgagttcgagggcgacgcgcgcggcgtcgggctcgtcccgggggccgccccatcgcgcggcggcgaccaccacccgcactccatgtcgccagcggcgatgctcaagtcccgcgggccagtctccggagccgccatgctaccgcaccaccaccaccaccacgacatgcagatgcacgccgccatgtacgggggaacggccgtgcccccgccggccgggcctcctcaccacggcgggttcctcatgccacacccacagggtagtagccactacctgccttacgcgtacgagcccacgtacggcggtgagcacgccatggctgcatactatggaggcgccgcgtacgcgcccggcaacggcgggagcggcgacggcagtggcagtggcggcggtggcgggagcgcgtcgcacacaccgcagggcagcggcggcttggagcacccgcacccgttcgcgtacaagtagctagttcgtacgtcgttcgacttgagcaagccatcgatctgctgatctgaacgtacgctgtattgtacacgcatgcacgtacgtatcggcggctagctctcctgtttaagttgtactgtgattctgtcccggccggctagcaacttagtatcttccttcagtctctagtttcttagcagtcgtagaagtgttcaatgcttgccagtgtgttgttttagggccggggtaaaccatccgatgagattatttca

SEQ ID NO: 132926 - DNA, 816 bp, Zea Mays
ataaaacaagattggattctggagtgccatgacttcgaatcttatgaatcaatcgcggaacgtttacagcaagaaaattctcgttgataaagaggacagtttggatgacataaatctcttctcaataataactgtcatggcattcttgttatctgctccactgatgctatgtgtagaaggaatcaagtttagcccatcgtatctacagaatgctggagttaatgtaaaagaattatttgtaagagcggcacttgctgggacatctttctatttttaccaacaggtttcgtacaatttattggctaagtatctcccgtgacccattcggttgctaactcttttaaacgtgtggtggtcattgtgtcatccgttctcttctttagaactctaatttcacctataaatgccttaggaaccggtgttgctctcgctggagtgttcctgtactcgtagttcaaaaagtcaaaaccaaaggctacggctgcatgaagacaactccctgatgaggtaacagactatagaatgatggagaatttggaactatcagtcgacgtggtgaagcagactggccttcacggtagcaaacacatgtagtttccccatgttgcgtcttaaaataaatgtgttctcttgtcagcttcttttgatgtgaaaagcttgtacgtaagtttcctcgacaaggtgtggtagaacacgtgaacaacgcagatatagcattcttagatttcaagagaatacaaattttggaatatatttccatgtcattgaaactgacagaatgctctcactattatatatattctttacgtcaaaata

SEQ ID NO: 132927 - DNA, 1161 bp, Zea Mays
gcgcgcacaatggcagtcggcggtctccagggagcgaagaagcgcaagcgcgagcacgcggaagggaaggcaaagcctcggaagcaagtcaagggaggcggggacggagcgaagcggaagagccactcggccgccggcggctacacggcccatggcggcgccggcgaaattgtggcgaggaagaagaccctggttacccccaaggagaaacgcctcgcggccaaggaaatgtcggaggccaggaagatgaagaggaggcagcattacagccttgagaaggaactaacgaaattgtgggaaaagatgagatgtcgcaatgtgagcaaagaggagaggtccaaggcagtaagtcaggctatccataaaatggatgggaaatatttggacattgccacatcacatgttactacacgtgttcttcaaggtgagacagagaacaaggacattgtgaaccaagatgaatcattcatggatattgacagtgcagactggttcactcgtgtaactgatgcgatacagtatgcaaagctcctgcctttggccttgatccacatgcttggaaatgttttcaccaatatgagtttgggtaaggtggctgtctccttcacccacaccatcaaggccatggagcccttcttctcggtcctcctctctatcctattcctaggagaggattttgctcctacacctattaaattatttaaggttgatgtaaaaggagagttagtgaagagattatttgatatttcctatagccatcgtctagccgttgttaatggaagctgctttggtggatcacctattcaggccgagagccatcctcgccccaaatcctcactgcagtcgacggccacctcccatctacaccaggaccaagaggctcatgctgcagaggttggacctaccactgctctttttaaggctaaagtgccctggtcatcccaaagaggaaatctctcggagaaacaaagagtcttcaaaacggtgaaagggtggttgattgactggcctgagggtggatacttgaccattgatttaccaatgcctcggggagaagttttcattgggggtccaaatgtaactaaaggctatttcaagaatgaagctaaaacaaatgatgattgtgagcccatatatggagagcattatgatcaacaataa

SEQ ID NO: 132928 - DNA, 1464 bp, Zea Mays
atgcaccgcgcccgccccgcgaaccccccacgcaagccccgagagcgccggccctacctcgtctccgagtgccgcgacctcaccgacgccgcgcgctggcgctccgagatcctccgcgagatcagcgccaaggtcgacgagatccagaacgagggtctcggtgagcaccgcctccgcgacctcaacgacgagatcaacaaactcctcccagccgtcacgtcgtaccagggggcgcaggagggcgctagccactatgcgcttctcgtcaccacgtccctcctctcggtgctcctcttcaccttcgacctcctctgcggtgtgctcgggggcgctagcttcaaccccaccgactttgccgtctcctatgccgccggactcgatagcccctccctcttctctgttgcgcttcgcttctcggtgcaggccgtcggcgttgtgggtggtgccctggccatctcggagctgatgcaggcgcagtataagcacacgctcgcgggcccctcactcaaggtggatccccacaccggtgctcttgccgaagggatgctcaccttcgtcatcaccctgaccgtgctctgggtcatcataaagggccccagcaacgtcatcctcaaggccttgctgctctcaacctccatcgtctccgtcatcctcccaggcgcagagtacaaaggaccgtctatgaacccaactaatgtaagtttcgcaaggatcccgttttcaaatagttacatcatttgctcttgtttctttattgatattgatatagggggctttaccagttattatccaaaattcataaaatctaaagagtatataccttccatatccaaatatgcccaaagattccatggggttcccgcggaggagaggctccactggcgctccttcctggtgaagctcggatccgagaacctcaaagggtccaagaacgaggagctccacgttgcctcccacaagagctacaagaacgggttcgtgtggcacgacctttcggaggacgacctcgtcctcccggcgaccgacgacgagtacgtgctcaagggctcagagcttgtggaccaatccccttcggttcatggcattagacagaggctggagaaagctaatcttgttgatgatgttgtcgatttccatcgtgtaactgctaaccaagctgaaagatacttgacttcttatcaaagaagtgcccagatggttctatttataccatgtcaggttacacctcatctggtcatgacactgaggtctgaggatcaagcattggccatttatgaaaatcatcctatgcttgctaaagaatatgaacgtgttagggctggcaaacctccttttatgctagatatgtatcgctatggtttggagccacctccaatgaacaagaggaatgatgttggcgcttggaggcaggctctacggaatgctcagagccagttgcagcatcaaattataagcgtgatgtga

SEQ ID NO: 132929 - DNA, 510 bp, Zea Mays
gggagggacgaatcccttgacaccagggatgtgcccacggccccacgcccacccggtggcttgcattgcttagcagcgacgcaacgcaacgcaacgcaaggctgcaggggcggtggtagcttagctagctctactgctaatcctcgtcatcttccaaaccttgcagggtcacctgtcacgccatctgatcactgccctgttgcggcgggtgtaattcactgcagcagctgtggactgcgcaggaccacaaggccggtcgctctgctcgaggtcgatggaggagtcatggagactagaaacgtttagcttcggggggcctccctcaccaatgggcaatggccagtgacttgccatcgtgctcgtactacctgcggatacacctgcaatgcaagaggattagagaacacatgcgcatgcagtttatgtcgtcgcatcactagcatgtacgggagacgggataaatggagaggttcacgtacattgaataaataatccagtgtgtgtgcgtgg

SEQ ID NO: 132930 - DNA, 111 bp, Zea Mays
cggcgttttttcagatttggctgtatttcgaagcgttgtccatcagttctggagaggactacgcctgtttgcaaccacaaacttcagtttgattttatagattgtttttcg

SEQ ID NO: 132931 - DNA, 996 bp, Zea Mays
atgggaatctggaattgggagggagtggaaaatctcaaggcgctcctcgaggtggagactcgggaccgctgcggcaacagcagattcacttcaatgggaaggaggccatctctggatggtttaacggtaaatcctgatgggactgttgtgaatcctcaagcttttaaacaacatgctcgaggtgattcaaaacttatggcacaactccttcagggtcttcctcttattttgccaattctcctaaaggagtatcctcctactccaatgttttatgatgtagtcattgaatgggggaagcacgaatgcgaccacgcggcgacgggagcgttgcccagggcggcttcctcgctcgaggagcgtcgcgcaggcggaggccacggtggcccaccctcggccctgccctatgtcaagacagcgctcgggtcccagggcggcgtcatggagcacaagctattcttggacatgacaccaatgagctacagaatatcccgtggtcccgccaccaatagagaacaaaaaagctttattgtatgtgatccttttgatgtcgaagctcagaagaaaattgaagctgcaatccgacaagtaggcattacttttctcaggatagcaaatgttgcttatggcaatgtttcttttctttcatatggcacaatcctgaagcatttgcttgagtgcattcatataattagtaaaggacacggttatggggctggtggtgagcgccgccatgaggagcggctggacgatggtgttgggaatggagggaccaccgatggcaagctgagtctgcgggtagacccgagcgtatgcgggcagcgtacgaccaaggccatcaatcctcatgcctacaccgatggaactatgtttgttcagttacctccaaggatccagttcccagttccagttattgtgcaactggagcggaataccacttcacagccgtatctacttcattaccaatcatacaatgctccttggctacccacacgatag

SEQ ID NO: 132932 - DNA, 656 bp, Zea Mays
tcaaacttccaccctatttctttgcataactgcggcgtcaaaatactcagcaagatactcaccaccaggttacaacgacagattgacaggatcatcgacactgaccaaatcgggttcattcgaggcagatcgatcacagagagcttcatctacacttttgaacttgttcagacctgccacaaaaggaaaacaccacaccagtcctagtgatcaaattatactttgccaaggcttcgacaccgtgaattgggaagctctctgaaggaccatggcagagagaggcttccctgaccgatggagatcctggatcgccgagatcctctccacctcaagctctggaaatctcctccacggttgcctacttgcctcgacccatggttcccatgcaagaaaggcctgaggcagagcgacccgatctcaccactcaccttaccagttcctgccagtggaagatgtccttcaggttctcatcaagaaaaacggggaagtccgccacccactgtcaaatgacaaaaccgggggccggtaatccaatatgcaaatatgatacactcattgccacatatgcttccctctctagtgtcacctagctccggatgatccttgacacttttgcccaagcaacaggtctttgcatcaactacgatgagagcacc

SEQ ID NO: 132933 - DNA, 3092 bp, Zea Mays
ataaagtttcgaaggtgctctaaatttcaaaaagataaaaaaaaacacaatcagacagtctgacagacatgcaggcttacctcttggccatcttcgatctcatcccccgtggccgtggcctgctggctccctccgcctgagagagaggctgagactataataaggtcagcggagccgatcggcagccgaactcgctgcacattccgccgggcgtgtcggtactactagctagcaggcagcaagatccgccaggcagcgcagcaggcttggcaggcaggacgcaggagcgagagatctctcggttcccctgcccgcgtgccaaaatgcagctcttccaaggagagaagccggcccacgatttcctctcgctccacaccggaggaggcccgtcgtcgcccgtgcagcagcagcatcccgcccaaggatacgaatcgggggcgcacagttcgctgaagcccatgaaactggacaggcggcggcgcggcggcggcggcggcggagcgatcgacatggcaccgtcgtcgggcttggagtcggactccgaggagcacgtcttgccgggcggcgtcgggacgttcagcatcaggcaggtggcatctgcgactcgatcgaggggagaagccgccggccatggcgtcgtcagcggcgcctttccacctgccgttcatgtgtccagaacggaggagggcccgccgcatggagcagaatcgggagccagggctcacagcggcccgctcgcgatgtggcaagattctggcgtcgaccaaagatccagaggcgcgagaggaggggaggggagaagcagcggcagcagcgccgatcaggggcccagcacaccgagatccaagcattccgctaccgagcagcggagacggacaaagataaacgacaggttggaaatacttcgggaactcctgccgcacggtgaccagaagagggacaaggcatctttccttcttgaggttattgaatacataaggttcttgcaagagaaggtccaaaagtacgagtcagcccaaccagaaaagaatcacgaggactcctccatgccatgggcaaaagtttactacagatcatgctggaaaaacacagaggtaattccacacgcgcgtgcacacacacataccaaagaaaaaaggaatgccacatggaagcatggagcccatgatatatcaatgataacaaatttctttgttctttttcatggtctcgcagaatatcatccaaggaggaggattagcaccttccacgaaagatgagaacaaagaacagtatgattccaagcaaactacggtggcatcgtctgctctctttgacacacaaagtgctagagaaactagtgcaaacgatatttcctcccaaaaggcaacaagcaaagcaaaatgcagggcagacaacagcgtacctggcaaacagccaccatggttgagcatgtcaacctctgatgcagacaacaaaacactgagcaagaacgagaaacaaactctccaagaggatactcaaagtctttctgatgcttactctcaagggcttctaaatagattgacacaagctctaaaaaggtcgggagtagacccatctcaagctagtatatctgtagagatcagtatggacagaagagcaacagaacctaataatatacatgacaatttgaaggtaataacagcacatgaaagtatatcagcacgttaatgcttgcaaagttgctagacttatgtcatggcttattcacagaatcagccatttctttaccacttctttttaaccttacctgacaggatcatgaatgtgaagatattatacatgtgaccaagaagcttcggggcgagagaagcaagatctccagctcaaactgaaattcaaactgtggcgacaagccgacaacagaccaggactttgtcgacgaaattgacaattgatggaatgctcttatttatattgaaatcacaattactgacctaagcctccattcaggtacaaaggaagctgctcaggggagggtagtcataaagctccccaattcagacattcctcctcatttgtaaatgcaattcagattgtaaaacagtgtacatgtactgctctctcaaaatttgtcaattcaacaaatatggtagtattgcaacgtttttgtatcaaccttccacagtacatgcattcaatcggcaactagacctatataaacagcaaggcaattgtaaattatactaagcttgtgatttgctgcaagcgccaacgaaccattgggatgttttctgcatatcatcagattccctttccatcaacatggtccgcaggaaacgaattgtagtcacatcacctggcgctccgctgcatctgcgacaatgggcagacgtggtgtcttcccgagcaggcaggcgccaccgccgtacaccaaggagacgagcaggaagaggaagaccgtgctctccatgctctggaagatctcgaacccaaccccaccggagggcgcgaacgactgcgcgagcaggtcgggaaagatgagcagcacgtcgagcacgacggcctgcatcgcgttgaagcggacgaagcgggagaacgcctgctggttccgcacaacggcgaagtagagcgtgaggaagaggaggaagggcgtgagcggcgatgagtggaagagccgagccgcgggggccagcgggcggagcagcgcgccgaagaaggggaactgcgtgagaaggaagcgcccgtggtgcgcgccgtcgaggaacgggtataggtaggcgaccgcggccacgaggcggtcgggcgcctccacggccccgctgttgtcgtttttgttggaggcgcgcggcgcgggggccaggagccgacgaggggtcgcgttgttgggggcggcgaggaggacccgccggtgcgggatgctgaggaggcgggatgtgccgtcgcggtggagcaggcgcgggggcgagaggagaagcgaaacggcggatgccatgtgatcctctgctcggtgcggtcgaggagtggagattttttgggtgagtggccttgtggggggcggccaaagcgaggcgtttgggtgaggggttgagggcaaggcagtggcgccgcgcggctgctggctgcttggc

SEQ ID NO: 132934 - DNA, 1986 bp, Zea Mays
ataaagtttcgaaggtgctctaaatttcaaaaagataaaaaaaaacacaatcagacagtctgacagacatgcaggcttacctcttggccatcttcgatctcatcccccgtggccgtggcctgctggctccctccgcctgagagagaggctgagactataataaggtcagcggagccgatcggcagccgaactcgctgcacattccgccgggcgtgtcggtactactagctagcaggcagcaagatccgccaggcagcgcagcaggcttggcaggcaggacgcaggagcgagagatctctcggttcccctgcccgcgtgccaaaatgcagctcttccaaggagagaagccggcccacgatttcctctcgctccacaccggaggaggcccgtcgtcgcccgtgcagcagcagcatcccgcccaaggatacgaatcgggggcgcacagttcgctgaagcccatgaaactggacaggcggcggcgcggcggcggcggcggcggagcgatcgacatggcaccgtcgtcgggcttggagtcggactccgaggagcacgtcttgccgggcggcgtcgggacgttcagcatcaggcaggtggcatctgcgactcgatcgaggggagaagccgccggccatggcgtcgtcagcggcgcctttccacctgccgttcatgtgtccagaacggaggagggcccgccgcatggagcagaatcgggagccagggctcacagcggcccgctcgcgatgtggcaagattctggcgtcgaccaaagatccagaggcgcgagaggaggggaggggagaagcagcggcagcagcgccgatcaggggcccagcacaccgagatccaagcattccgctaccgagcagcggagacggacaaagataaacgacaggttggaaatacttcgggaactcctgccgcacggtgaccagaagagggacaaggcatctttccttcttgaggttattgaatacataaggttcttgcaagagaaggtccaaaagtacgagtcagcccaaccagaaaagaatcacgaggactcctccatgccatgggcaaaagtttactacagatcatgctggaaaaacacagagaatatcatccaaggaggaggattagcaccttccacgaaagatgagaacaaagaacagtatgattccaagcaaactacggtggcatcgtctgctctctttgacacacaaagtgctagagaaactagtgcaaacgatatttcctcccaaaaggcaacaagcaaagcaaaatgcagggcagacaacagcgtacctggcaaacagccaccatggttgagcatgtcaacctctgatgcagacaacaaaacactgagcaagaacgagaaacaaactctccaagaggatactcaaagtctttctgatgcttactctcaagggcttctaaatagattgacacaagctctaaaaaggtcgggagtagacccatctcaagctagtatatctgtagagatcagtatggacagaagagcaacagaacctaataatatacatgacaatttgaaggatcatgaatgtgaagatattatacatgtgaccaagaagcttcggggcgagagaagcaagatctccagctcaaactgaaattcaaactgtggcgacaagccgacaacagaccaggactttgtcgacgaaattgacaattgatggaatgctcttatttatattgaaatcacaattactgacctaagcctccattcaggtacaaaggaagctgctcaggggagggtagtcataaagctccccaattcagacattcctcctcatttgtaaatgcaattcagattgtaaaacagtgtacatgtactgctctctcaaaatttgtcaattcaacaaatatggtagtattgcaacgtttttgtatcaaccttccacagtacatgcattcaatcggcaactagacctatataaacagcaaggcaattgtaaattatactaagcttgtgatttgctgcaa

SEQ ID NO: 132935 - DNA, 2401 bp, Zea Mays
ggttctcagagcagaggcatccggcacccctgctcctgaacttgttgccgaggaggccacactcttgcgctgccttggcaatgggggaggttgttgctgcttcctccctggccctggtgctgctcttcttctgctcttgcgggcctgcaagcggccttctctcccccaagggtgtaaactatgaagttcaagctctcatgatgatcaagaactacctcaaggatcctcatggtgtactgaagaactgggaccaagactctgtggatccttgcagctggacaatggtcacttgctctccagagaaccttgtcaccggcttagaagcaccaagccagaacctttctggaattctctccccaagtatagggaatctgaccaaccttgagacagttcttctgcagaacaacaacataaacgggttaatcccagcagagattggaaagctaagaaagctcaaaacgcttgatctgtccagcaaccacttctctggagaaatcccaagctctgtgggccaccttgaaagccttcagtatttgaggcttaacaacaacacattgtctggtgccttcccttcatcatcaactaatttgtcacaccttattttcctggatctgtcatacaataatttgagtggtccaatcccagggtccctgacaaggactttcaacattgtagggaatccactgatctgtgcagcaaccatggaacaagattgttatgggtctttacctatgccaatgtcttacggactgaataacacacagggaactgtgattcctgcaaaagctaagagccataaagttgcaattgcatttggtgctacaactgcctgcatcagccttctgttccttgccgttggttcactattctggtggaggtgtaggcgaaaccggaagactcttttcaacgttgatgatcatcagcacatagagaacggcaacctcggaaatatgaagcggtttcaattcagagagctccaggctgcaacagaaaacttcagcagcaagaacatattaggaaaaggcgggtttggtattgtttaccgggggcagcttccagatggaagtcttgtagccgtcaagaggctcaaagatggtaatgctgcaggcggggaagcacagtttcagactgaagtcgagatgatcagcttagcagtgcacaggaacctcctcagactctatgggttctgcatgactgccagtgagaggctactggtctatccgtacatgtcgaatgggagtgtcgcgttgcgcctgaaagggaagccaccactggactggatcaccagaaagaggatagcacttggggcagcacgaggtctactttatctgcacgagcagtgtgatcccaagatcatccacagagacgttaaggcagcaaacatactgctagatgactgttgtgaagcaattgtcggggactttgggcttgcaaagctcctagaccaccgtgaatcgcatgtcaccacagctgtgcgcggaactgttggccacatcgctcccgagtacctctcgactggccagtcatctgagaaaacagatgtctttggttttggaattctgctgctggagctgatcactggtcagactgcactggagtttgggaagtcatcaaatcagaagggagccatgttagactgggtgaagaagatgcaccaagagaagcagctggacatacttgtcgacaagggcctggggagcaaatatgaccgcattgagctggaggagatggtgcaagtagcactgctatgtactcagttcctccctggtcacaggcccaagatgtcagaggtggtccggatgctggaaggcgatggacttgcagagcggtgggaggcgttacaacacactgagtcacacaaattcaaggtgcctgagttctccttcagccgctgccactctgacctgacggacgactcgtcactgttggtgcaagcagtggagctttctgggccaagatgacaccaacggagacggtctgtggcaagaagtatccagcagttgtttcccagtagaaaatgtaaataatacaaagtgaagcaactggtgctgcatcctgtcagaagtcgaagcaaatctcaatcagctgaactgtacaaagattaaaaaaagagcacaacctagtctaagcatggtacattactacatctacagattatgtaactgttggtagaataaggatagagcaatgtttccattttgtttgttattttcccctttgtattctattactgtagttatagtttgtaaaatgcaaaaacggtggcaatagcgctcgatgttggtgctgaagaactcaaatagcttagtaaagaccaagtgtagacaggtgccaacgaagaatttgattgtgtgcatgaacttcctacctccgttgccaacacatactgcaaagaaagcag

SEQ ID NO: 132936 - DNA, 2755 bp, Zea Mays
atttgtccaactgcccatcctttggagaattcttttgtggcaagaatcgccaatcagttgaaagttgccgttgtcagtcgtgatctgtcatagtctttgctccactgcaacacacccacactccaataaagctggtcccaagaacgcaaaaggaaggaagggtgagaggggagagagtaaggaggaattttcttgcctcctttgctgtaatttttctattccaaacaggctcaggtggcaggttctcagagcagaggcatccggcacccctggtaggcttccactgccactgagaatttggttctgggaagagagaaaggctgcacgattcttcctcaccttggcctcactcttgcttccatgcttgacattgaacacggagcaagctcctgaacttgttgccgaggaggccacactcttgcgctgccttggcaatgggggaggttgttgctgcttcctccctggccctggtgctgctcttcttctgctcttgcgggcctgcaagcggccttctctcccccaagggtgtaaactatgaagttcaagctctcatgatgatcaagaactacctcaaggatcctcatggtgtactgaagaactgggaccaagactctgtggatccttgcagctggacaatggtcacttgctctccagagaaccttgtcaccggcttagaagcaccaagccagaacctttctggaattctctccccaagtatagggaatctgaccaaccttgagacagttcttctgcagaacaacaacataaacgggttaatcccagcagagattggaaagctaagaaagctcaaaacgcttgatctgtccagcaaccacttctctggagaaatcccaagctctgtgggccaccttgaaagccttcagtatttgaggcttaacaacaacacattgtctggtgccttcccttcatcatcaactaatttgtcacaccttattttcctggatctgtcatacaataatttgagtggtccaatcccagggtccctgacaaggactttcaacattgtagggaatccactgatctgtgcagcaaccatggaacaagattgttatgggtctttacctatgccaatgtcttacggactgaataacacacagggaactgtgattcctgcaaaagctaagagccataaagttgcaattgcatttggtgctacaactgcctgcatcagccttctgttccttgccgttggttcactattctggtggaggtgtaggcgaaaccggaagactcttttcaacgttgatgatcatcagcacatagagaacggcaacctcggaaatatgaagcggtttcaattcagagagctccaggctgcaacagaaaacttcagcagcaagaacatattaggaaaaggcgggtttggtattgtttaccgggggcagcttccagatggaagtcttgtagccgtcaagaggctcaaagatggtaatgctgcaggcggggaagcacagtttcagactgaagtcgagatgatcagcttagcagtgcacaggaacctcctcagactctatgggttctgcatgactgccagtgagaggctactggtctatccgtacatgtcgaatgggagtgtcgcgttgcgcctgaaagggaagccaccactggactggatcaccagaaagaggatagcacttggggcagcacgaggtctactttatctgcacgagcagtgtgatcccaagatcatccacagagacgttaaggcagcaaacatactgctagatgactgttgtgaagcaattgtcggggactttgggcttgcaaagctcctagaccaccgtgaatcgcatgtcaccacagctgtgcgcggaactgttggccacatcgctcccgagtacctctcgactggccagtcatctgagaaaacagatgtctttggttttggaattctgctgctggagctgatcactggtcagactgcactggagtttgggaagtcatcaaatcagaagggagccatgttagactgggtgaagaagatgcaccaagagaagcagctggacatacttgtcgacaagggcctggggagcaaatatgaccgcattgagctggaggagatggtgcaagtagcactgctatgtactcagttcctccctggtcacaggcccaagatgtcagaggtggtccggatgctggaaggcgatggacttgcagagcggtgggaggcgttacaacacactgagtcacacaaattcaaggtgcctgagttctccttcagccgctgccactctgacctgacggacgactcgtcactgttggtgcaagcagtggagctttctgggccaagatgacaccaacggagacggtctgtggcaagaagtatccagcagttgtttcccagtagaaaatgtaaataatacaaagtgaagcaactggtgctgcatcctgtcagaagtcgaagcaaatctcaatcagctgaactgtacaaagattaaaaaaagagcacaacctagtctaagcatggtacattactacatctacagattatgtaactgttggtagaataaggatagagcaatgtttccattttgtttgttattttcccctttgtattctattactgtagttatagtttgtaaaatgcaaaaacggtggcaatagcgctcgatgttggtgctgaagaactcaaatagcttagtaaagaccaagtgtagacaggtgccaacgaagaatttgattgtgtgcatgaacttcctacctccgttgccaacacatactgcaaagaaagcag

SEQ ID NO: 132937 - DNA, 2869 bp, Zea Mays
gctatttgtccaactgcccatcctttggagaattcttttgtggcaagaatcgccaatcagttgaaagttgccgttgtcagtcgtgatctgtcatagtctttgctccactgcaacacacccacactccaataaagctggtgtctttcttgagtgggatcaataataatctataaactttggactagattagactaggcaccttaagttagccgtcactgtttttcataacctggtttcgttcttcacaggtcccaagaacgcaaaaggaaggaagggtgagaggggagagagtaaggaggaattttcttgcctcctttgctgtaatttttctattccaaacaggctcaggtggcaggttctcagagcagaggcatccggcacccctggtaggcttccactgccactgagaatttggttctgggaagagagaaaggctgcacgattcttcctcaccttggcctcactcttgcttccatgcttgacattgaacacggagcaagctcctgaacttgttgccgaggaggccacactcttgcgctgccttggcaatgggggaggttgttgctgcttcctccctggccctggtgctgctcttcttctgctcttgcgggcctgcaagcggccttctctcccccaagggtgtaaactatgaagttcaagctctcatgatgatcaagaactacctcaaggatcctcatggtgtactgaagaactgggaccaagactctgtggatccttgcagctggacaatggtcacttgctctccagagaaccttgtcaccggcttagaagcaccaagccagaacctttctggaattctctccccaagtatagggaatctgaccaaccttgagacagttcttctgcagaacaacaacataaacgggttaatcccagcagagattggaaagctaagaaagctcaaaacgcttgatctgtccagcaaccacttctctggagaaatcccaagctctgtgggccaccttgaaagccttcagtatttgaggcttaacaacaacacattgtctggtgccttcccttcatcatcaactaatttgtcacaccttattttcctggatctgtcatacaataatttgagtggtccaatcccagggtccctgacaaggactttcaacattgtagggaatccactgatctgtgcagcaaccatggaacaagattgttatgggtctttacctatgccaatgtcttacggactgaataacacacagggaactgtgattcctgcaaaagctaagagccataaagttgcaattgcatttggtgctacaactgcctgcatcagccttctgttccttgccgttggttcactattctggtggaggtgtaggcgaaaccggaagactcttttcaacgttgatgatcatcagcacatagagaacggcaacctcggaaatatgaagcggtttcaattcagagagctccaggctgcaacagaaaacttcagcagcaagaacatattaggaaaaggcgggtttggtattgtttaccgggggcagcttccagatggaagtcttgtagccgtcaagaggctcaaagatggtaatgctgcaggcggggaagcacagtttcagactgaagtcgagatgatcagcttagcagtgcacaggaacctcctcagactctatgggttctgcatgactgccagtgagaggctactggtctatccgtacatgtcgaatgggagtgtcgcgttgcgcctgaaagggaagccaccactggactggatcaccagaaagaggatagcacttggggcagcacgaggtctactttatctgcacgagcagtgtgatcccaagatcatccacagagacgttaaggcagcaaacatactgctagatgactgttgtgaagcaattgtcggggactttgggcttgcaaagctcctagaccaccgtgaatcgcatgtcaccacagctgtgcgcggaactgttggccacatcgctcccgagtacctctcgactggccagtcatctgagaaaacagatgtctttggttttggaattctgctgctggagctgatcactggtcagactgcactggagtttgggaagtcatcaaatcagaagggagccatgttagactgggtgaagaagatgcaccaagagaagcagctggacatacttgtcgacaagggcctggggagcaaatatgaccgcattgagctggaggagatggtgcaagtagcactgctatgtactcagttcctccctggtcacaggcccaagatgtcagaggtggtccggatgctggaaggcgatggacttgcagagcggtgggaggcgttacaacacactgagtcacacaaattcaaggtgcctgagttctccttcagccgctgccactctgacctgacggacgactcgtcactgttggtgcaagcagtggagctttctgggccaagatgacaccaacggagacggtctgtggcaagaagtatccagcagttgtttcccagtagaaaatgtaaataatacaaagtgaagcaactggtgctgcatcctgtcagaagtcgaagcaaatctcaatcagctgaactgtacaaagattaaaaaaagagcacaacctagtctaagcatggtacattactacatctacagattatgtaactgttggtagaataaggatagagcaatgtttccattttgtttgttattttcccctttgtattctattactgtagttatagtttgtaaaatgcaaaaacggtggcaatagcgctcgatgttggtgctgaagaactcaaatagcttagtaaagaccaagtgtagacaggtgccaacgaagaatttgattgtgtgcatgaacttcctacctccgttgccaacacatactgcaaagaaagcag

SEQ ID NO: 132938 - DNA, 3009 bp, Zea Mays
ctcccacttccctagctatttgtccaactgcccatcctttggagaattcttttgtggcaagaatcgccaatcagttgaaagttgccgttgtcagtcgtgatctgtcatagtctttgctccactgcaacacacccacactccaataaagctggtgtctttcttgagtgggatcaataataatctataaactttggactagattagactaggcaccttaagttagccgtcactgtttttcataacctggtttcgttcttcacaggtcccaagaacgcaaaaggaaggaagggtgagaggggagagagtaaggaggaattttcttgcctcctttgctgtaatttttctattccaaacaggctcaggtggcaggcatgtttgtcccctccaccccctcggccccggcccttgctcctcccccctccttttgttttcctgctttgcttgcggccagagcacaggcatcttcttttggtcatttgcttgctacactgacaggttctcagagcagaggcatccggcacccctggtaggcttccactgccactgagaatttggttctgggaagagagaaaggctgcacgattcttcctcaccttggcctcactcttgcttccatgcttgacattgaacacggagcaagctcctgaacttgttgccgaggaggccacactcttgcgctgccttggcaatgggggaggttgttgctgcttcctccctggccctggtgctgctcttcttctgctcttgcgggcctgcaagcggccttctctcccccaagggtgtaaactatgaagttcaagctctcatgatgatcaagaactacctcaaggatcctcatggtgtactgaagaactgggaccaagactctgtggatccttgcagctggacaatggtcacttgctctccagagaaccttgtcaccggcttagaagcaccaagccagaacctttctggaattctctccccaagtatagggaatctgaccaaccttgagacagttcttctgcagaacaacaacataaacgggttaatcccagcagagattggaaagctaagaaagctcaaaacgcttgatctgtccagcaaccacttctctggagaaatcccaagctctgtgggccaccttgaaagccttcagtatttgaggcttaacaacaacacattgtctggtgccttcccttcatcatcaactaatttgtcacaccttattttcctggatctgtcatacaataatttgagtggtccaatcccagggtccctgacaaggactttcaacattgtagggaatccactgatctgtgcagcaaccatggaacaagattgttatgggtctttacctatgccaatgtcttacggactgaataacacacagggaactgtgattcctgcaaaagctaagagccataaagttgcaattgcatttggtgctacaactgcctgcatcagccttctgttccttgccgttggttcactattctggtggaggtgtaggcgaaaccggaagactcttttcaacgttgatgatcatcagcacatagagaacggcaacctcggaaatatgaagcggtttcaattcagagagctccaggctgcaacagaaaacttcagcagcaagaacatattaggaaaaggcgggtttggtattgtttaccgggggcagcttccagatggaagtcttgtagccgtcaagaggctcaaagatggtaatgctgcaggcggggaagcacagtttcagactgaagtcgagatgatcagcttagcagtgcacaggaacctcctcagactctatgggttctgcatgactgccagtgagaggctactggtctatccgtacatgtcgaatgggagtgtcgcgttgcgcctgaaagggaagccaccactggactggatcaccagaaagaggatagcacttggggcagcacgaggtctactttatctgcacgagcagtgtgatcccaagatcatccacagagacgttaaggcagcaaacatactgctagatgactgttgtgaagcaattgtcggggactttgggcttgcaaagctcctagaccaccgtgaatcgcatgtcaccacagctgtgcgcggaactgttggccacatcgctcccgagtacctctcgactggccagtcatctgagaaaacagatgtctttggttttggaattctgctgctggagctgatcactggtcagactgcactggagtttgggaagtcatcaaatcagaagggagccatgttagactgggtgaagaagatgcaccaagagaagcagctggacatacttgtcgacaagggcctggggagcaaatatgaccgcattgagctggaggagatggtgcaagtagcactgctatgtactcagttcctccctggtcacaggcccaagatgtcagaggtggtccggatgctggaaggcgatggacttgcagagcggtgggaggcgttacaacacactgagtcacacaaattcaaggtgcctgagttctccttcagccgctgccactctgacctgacggacgactcgtcactgttggtgcaagcagtggagctttctgggccaagatgacaccaacggagacggtctgtggcaagaagtatccagcagttgtttcccagtagaaaatgtaaataatacaaagtgaagcaactggtgctgcatcctgtcagaagtcgaagcaaatctcaatcagctgaactgtacaaagattaaaaaaagagcacaacctagtctaagcatggtacattactacatctacagattatgtaactgttggtagaataaggatagagcaatgtttccattttgtttgttattttcccctttgtattctattactgtagttatagtttgtaaaatgcaaaaacggtggcaatagcgctcgatgttggtgctgaagaactcaaatagcttagtaaagaccaagtgtagacaggtgccaacgaagaatttgattgtgtgcatgaacttcctacctccgttgccaacacatactgcaaagaaagcag

SEQ ID NO: 132939 - DNA, 1350 bp, Zea Mays
atgcgggcgttgccggccgccgcgcttgggacgcgctggggcgatgtgggcgttgtccggccgccgcgcttggacgctgccgtcgccgccgcgctgggaatcaactggggaagaggggaatcgacaccgttcgcgcagtggggaagaccagaagaggcagaggaatcgctcaaggaatcgcgcagtggggaagaggaagagcgcagtggggaagaggaatcgcgcagtggaggaggtcgcaccgtagtggaggagtcgcgacgtcgcgcagtggaggagtcgcgtagtggagccgtggaggtgtctggtgtcgcgcagtggaggagtcgcgctcgcagtggaggagaactccatccaccgatgcacaacagtacagcaccacaacccaactcaaacctcaacgtagacatggttttcggttcttcaagcaaaagaaagcgtgcggatgaaaaagaagatgatgatgtgcaagtcgtccatgaggtgcctgtagatatccaagatggtggtgcagacgcagacagtggtgacgaagatggagctgcggctactggtacgaaacatccacttctagatgaaattaatattattggtgttccgagtggaaaaaatgttggtggaacaaaggagtggcagtgtaaacattgcaagaaatcgtacaaaggaagtttaactagagttcatgttcatttgcttggtccattacctggtaaaaaagcacaaattgcacgttgtatgtcattgcaaaacgatcccaacaagagcaaagctttgcgggaaaaggtgaaagaagctgatagtaaaggatttcatatgagatcaacatcagggacgaccactccgaatccgttgacaaaatcgtttggagtagcccaaagggagtctgtcgatatggaaattaccaaatttttatgtgccaacggtattccattcaatgtgttgaggagccctcaattttcacaaatgataatggcaataaaaaatggtccaaaagattataaaggtccgtcgagtgaaaaggcaaggacaactctcctagatgcatgcaagagaagtgtggagaccgacttagcaccacttaaaagtacatggttgacacaaggtgtttcggttgtgtccgatggatggacggatataaaaaacaagcccctaatcaatgtgattgcgtcgaacagtcgaggttcatgtttcttatatgcagaagatttccctggagttgaaaaaaccggtgaagctattgcacaatatctcttgaaggctattgatgaaattggaccaggaaatgtccttcaagtggtaacggacaatgctgctaattgcaaagcagctggaaaggaaattgaaaaagta

SEQ ID NO: 132940 - DNA, 678 bp, Zea Mays
atgtctgcggcgaactctctgagctcggcgtccgtggggccgaagccggcaaagctgtccgggagctgctgcacgggcgattccgcgaccacgaccggtggtgcctttgtgttgttctccacggcgccgtcgacgtcatccctgcagcaggatgaggccgtcgggtcatcgaccggaggcggtggcgagcagagctcggccagggcgcggtcaaaggtcggcacgcagtacagcagctgcccctcctcctcttcctcctcctcctcggccttccgctcctccgacgattcgatgggggacacctcaggcacgacgacgagcttcctcgacaggagctccccgacgctcttgacgtgcggcctccgagtgcgcgccttgcgcttggaccacgccggcgcgacctgctgctggcgcttcttccacgtcgccgtcgccacgccggcctcgagcgtcgtcgagtgcgggtccgtcgggcgcaggcgcaggcgctcgtgccgcctggcgagcgggttcgccgagtgcaccgaggcgtcgcagccctggcacaggaaggcgtcgtcggcagcgcagtaccaccgcgcgcgccgcctcaggcagctgtcgcaggcgcgcgcggccttgccgcctacggcgcccgcggcgtgcttggagctgctcatgtgccgccgacaaagctag

SEQ ID NO: 132941 - DNA, 855 bp, Zea Mays
atcaatttaatgtcatcatcatgattaatgtggacttatctagactgtttttggatagagtagtagttagtgatttctgatccgactattgtcgctgcaatctttcatgttctttttatgtagtctcactttgctcctttttcattaatggtttattcgtggacattttcaacttctaccatcaaaccttctgatgttggtactttgtgttctattcaattattttacccataaaagaacttgggattattttataccttttatctctactactacttaagtgtctattgtaggcgtccacaaaggcggatggtgcacggttctgccggttccgcatcccgccagattgggacgaattcggcatcggctccaccaaaggctccacggatttggcatcagctccacagattttcgatactgggtaacagaaatgcatgtttatggtgttcgttttgaccttgcattacatctacaatgaccagaggatgcaggtggttcgaagttctatgatcataagacgcattcaggtcgatctcactcttcatgttcgtgctcgctgcgcagaacgccactgcagcaccgatggaattgtacggtgtcatcaggctcgactaaatctagatgggatggactctacttgtgttgaaggaaaggaagtatgtgcttggcttgcgaggagggggcatatttctgttcaacttttcttacgggtcatgttacttgtcatctcagattacacaactttaggtatttctgtctttgtgagaaaagtaccaaaatagtttcacatgtgtttaatttgaatattttgtgtgccgttgcaacgcacgggcacatacctagttatatttataa

SEQ ID NO: 132942 - DNA, 782 bp, Zea Mays
atcaatttaatgtcatcatcatgattaatgtggacttatctagactgtttttggatagagtagtagttagtgatttctgatccgactattgtcgctgcaatctttcatgttctttttatgtagtctcactttgctcctttttcattaatggtttattcgtggacattttcaacttctaccatcaaaccttctgatgttggtactttgtgttctattcaattattttacccataaaagaacttgggattattttataccttttatctctactactacttaagtgtctattgtaggcgtccacaaaggcggatggtgcacggttctgccggttccgcatcccgccagattgggacgaattcggcatcggctccaccaaaggctccacggatttggcatcagctccacagattttcgatactgggtaacagaaatgcatgtttatggtgttcgttttgaccttgcattacatctacaatgaccagaggatgcagaacgccactgcagcaccgatggaattgtacggtgtcatcaggctcgactaaatctagatgggatggactctacttgtgttgaaggaaaggaagtatgtgcttggcttgcgaggagggggcatatttctgttcaacttttcttacgggtcatgttacttgtcatctcagattacacaactttaggtatttctgtctttgtgagaaaagtaccaaaatagtttcacatgtgtttaatttgaatattttgtgtgccgttgcaacgcacgggcacatacctagttatatttataa

SEQ ID NO: 132943 - DNA, 1807 bp, Zea Mays
ctctgtgacccctccccgcgcggcggtcgcggtcatcccgctgtcgacgctacttcggcaagatgagcttgcttgggacggggcttcagcctcggcctcgacccgcgtcaggtgaaggctgcggcacgcgtcccctcctccgcctccagtctccgcccaactcaaaaccctagcaaccgcgcctccatccctacccgaattccaatccaggtccgatcccccggtggcgaggacacccggcgccgattcgtccccgcagatcgaccgggcaggacatatttgggttcggggtccgctcgagtcgcctcgccggggtccaccgcggcggtcagggggtatggtgggcggcgggaggcggggcggagcggcggaggaggtcaagctttacaccggcaacgtgttcgcggcgctcgagtccctcaagaagaagaagaagaagggtgacaaaggcaaggcggtcgggaggaggacggcgagggggccgctgaaccctgggcaaacaggcgagcgagtacgccgactgcgaggagtaaacttgtgtcatctcgcgcggggccaacccgaggaccacgcacatcctcgccggcgagacggtggaggtgcgcaggggagacgtaggtggtggctgcacgaaggtggttttcagcattgagccgttggcattgagcgaccggcagcagcccgcgtcttcgtcttcgtcgccggcggcacccgccagagtcgtcgtgtccggtcgttgctgctgctgcatgaagaggctgctggaggaccgggacatcttcatctacctgggcaagaaggccttctgcagcgacgagtgcaggaacgggttcactatggaccgtttggctcgaattgtcttgagcccaaggaaatctgggcctttttaatcgtcgtcacctagctcgcggatggtccgcacacagtttccaccgtcagtatcgcattggagtgaaacaacacccatccttgccaccgattaggaacttaggaatggactcgccggtgcctgctacgctcgcccgcgcgccagcgagatcgcaagcgcgggcgggcgaggaggcttgcgcggatactcggcaggatgctccggcggaagcggagccacctccccgtcggccacccgcgttctacagctccgtgtttgcgtagatcgaagagatcgggtggaagcagctggtgagcgccacaggagacggagtgtcctgtctcaccttccgcgtcgtggatgaaccaggacagatgcatttactggagatcacactgcccatgggctatcccgaaagtcctccttcaatctctgcagttagtctctatcctgatatttttattatactttgccagggatgaactaggcatgtttttgattatagcccatatgtagccgccagggatgaactaggcctgtttttattatactttgcagttgcatgaaatttcagaaccataaccatatgggctataattgaacttgtctcattaacaggacgtaccatatctcccaaaaatacattggtcaaaaaactcaagactgaaagatgttatttgccatgtctcattaacaggacgtaccatatactcacatatttcctgcattgcattgtacacattttcttatatattaacgagtgcaggaacgagttcatcgaggaggcggcggaggaggagctcatgattctagatcctgctcgaaatctttgatcaagatttgttagttgtcgtggcaaaagtagagagtgtaatatttgcccgcaatattttgcttctaccttcaacttggggactacttggctgggagagtgagtgg

SEQ ID NO: 132944 - DNA, 656 bp, Zea Mays
atgtccgcagtgatgggcgacctccagggcctgaacggtgccaccgtaggcttctcggcggccggaggcccggaggaggcgactgaagaggagaatatgtggggctgcaagggatgcgctcgctggtggctgaagtcggggctaagttggggctgtgcacggtcgagaagatggaggcgaggcgagtcactccatcacgctgcgcatgtcaccaaggcacggcctcccatctcgagcctagacttttcaacgaaggttatggatttggcagcaggggagtgctagagattgtgcctcttggaaaaggcttctttcttgccaactatcctatttcaattttggattgaccattatcgtttgcgttcctttgtcctccatcttttacctcttgtagttacacaagaacaacttgattatgctaaagaggcaatcaaatctacagttctgatgaacttggaatcaagggtacattattcttgctcctgatataacgttaagctggattgttgatttttttgatcacttagtttctagatagtagtagttctgattaaaagtgagttatgccatagtgttttgagtctaaaataacttatgtgtaacttatgtgtaataaatataaatatttagtttctttaataaacatgtgttacata

SEQ ID NO: 132945 - DNA, 159 bp, Zea Mays
atgaaacaattagcaatgagactgtttctggatcaaacaccccaatccaaacaaggaatatccatgtctttttgtcttgctgttccacggctacataacagaccgcagtgccatgcaatcccagcttccttcgtttatcttgcaccggcagtgtactga

SEQ ID NO: 132946 - DNA, 1575 bp, Zea Mays
cgagctcgcaatcacatctgcctcgttctcacttcctacccgctggccgcttgccggtaccacacacgcggcacgccgccgcgccagccatggacaccgctctaccttccgtcctcataggcggcggactctccgtgtccgtctccatttccaccgccactaaagccggcagccaatccatttcctcccacctctcgacctcctccctccgtttaaccgctcgccatcggaaccggcgccgtttgcccctccttgcatcatcttccgagtctcctcccgcgcaactagccgccgcttcgactgagagccagtcgcgttcctccaggtgggtggttgtgatggatacgccccctgccgccgcgggaggcagcggggtgtcccgcgcagaggccgtggattactacgcagccacactggcccaggttgttggaagtgagaaggaggcgcagatgcgcatatgtgaggcttcgtgggatgggacctacgagttccgctgcgagatcgacgaggatgcatcgaaggagcttgcaaagatgcctggagtgttatctgttcaactagatatgggtaacaaatcagagaaggataatcacagcttgagtctctcgacagctaaccttgtaagcattagtgatggtgcttctacatcttcaagtgggaaaaatgagttttggcttgtccggatggagaagcccggagttgaagttgtgacaaaggcccaaatggtggatcactacacccaaatccttatgaaagtgttggggaacgaacaggatgctcaggttagtatatatcacgtttcatgggatagggattatggtttctgttgtcatattgatgaagaatgcgcaaaagagttagctgatgttcctggagtgttatctgttcaacccgatacgaactttggatcagacaacaaaaattacaaagtttcaggtgatgatggcgtgaaatcatctgaagggactggagcggtcgatatcaaaactaaaaggctctttgttacagggctttcattttatacatctgagaagactctacgggcagcgtttgagcctttcggtgagctcgttgaagtgaagataattatggacaggatatcaaaaaggtcaaaaggttatgccttcgtagaatacactaccgaggaagctggaggtgctgctctaaaagcaatgaatggacagatcataaacggctggatgatagttgttgatgttgctaaaactagatcgagagaccgtctatctgggggatctaatcaagcatttcgaccacactatcaggctagatgactgttatatgtacagaacttacagctgtagagtagagataagcacgagagcgaggaattgctgggggatgccgagccgcctgatctgattgtagttcagtgcccttgtcttgtgctaattgctagaaaatgaatactcccagcaaaaaaatatgtaaatgcagctgaagtgtacgattactaacttctacttaattaaatcattctcagatacaggctttttcctgctcgtaagtttgaatatatatttaatatttatgatatgatggattttttattaacaa

SEQ ID NO: 132947 - DNA, 1569 bp, Zea Mays
cgagctcgcaatcacatctgcctcgttctcacttcctacccgctggccgcttgccggtaccacacacgcggcacgccgccgcgccagccatggacaccgctctaccttccgtcctcataggcggcggactctccgtgtccgtctccatttccaccgccactaaagccggcagccaatccatttcctcccacctctcgacctcctccctccgtttaaccgctcgccatcggaaccggcgccgtttgcccctccttgcatcatcttccgagtctcctcccgcgcaactagccgccgcttcgactgagagccagtcgcgttcctccaggtgggtggttgtgatggatacgccccctgccgccgcgggaggcagcggggtgtcccgcgcagaggccgtggattactacgcagccacactggcccaggttgttggaagtgagaaggaggcgcagatgcgcatatgtgaggcttcgtgggatgggacctacgagttccgctgcgagatcgacgaggatgcatcgaaggagcttgcaaagatgcctggagtgttatctgttcaactagatatgggtaacaaatcagagaaggataatcacagcttgagtctctcgacagctaaccttgtaagcattagtgatggtgcttctacatcttcaagtgggaaaaatgagttttggcttgtccggatggagaagcccggagttgaagttgtgacaaaggcccaaatggtggatcactacacccaaatccttatgaaagtgttggggaacgaacaggatgctcaggttagtatatatcacgtttcatgggatagggattatggtttctgttgtcatattgatgaagaatgcgcaaaagagttagctgatgttcctggagtgttatctgttcaacccgatacgaactttggatcagacaacaaaaattacaaaggtgatgatggcgtgaaatcatctgaagggactggagcggtcgatatcaaaactaaaaggctctttgttacagggctttcattttatacatctgagaagactctacgggcagcgtttgagcctttcggtgagctcgttgaagtgaagataattatggacaggatatcaaaaaggtcaaaaggttatgccttcgtagaatacactaccgaggaagctggaggtgctgctctaaaagcaatgaatggacagatcataaacggctggatgatagttgttgatgttgctaaaactagatcgagagaccgtctatctgggggatctaatcaagcatttcgaccacactatcaggctagatgactgttatatgtacagaacttacagctgtagagtagagataagcacgagagcgaggaattgctgggggatgccgagccgcctgatctgattgtagttcagtgcccttgtcttgtgctaattgctagaaaatgaatactcccagcaaaaaaatatgtaaatgcagctgaagtgtacgattactaacttctacttaattaaatcattctcagatacaggctttttcctgctcgtaagtttgaatatatatttaatatttatgatatgatggattttttattaacaa

SEQ ID NO: 132948 - DNA, 1655 bp, Zea Mays
cgagctcgcaatcacatctgcctcgttctcacttcctacccgctggccgcttgccggtaccacacacgcggcacgccgccgcgccagccatggacaccgctctaccttccgtcctcataggcggcggactctccgtgtccgtctccatttccaccgccactaaagccggcagccaatccatttcctcccacctctcgacctcctccctccgtttaaccgctcgccatcggaaccggcgccgtttgcccctccttgcatcatcttccgagtctcctcccgcgcaactagccgccgcttcgactgagagccagtcgcgttcctccaggtgggtggttgtgatggatacgccccctgccgccgcgggaggcagcggggtgtcccgcgcagaggccgtggattactacgcagccacactggcccaggttgttggaagtgagaaggaggcgcagatgcgcatatgtgaggcttcgtgggatgggacctacgagttccgctgcgagatcgacgaggatgcatcgaaggagcttgcaaagatgcctggagtgttatctgttcaactagatatgggtaacaaatcagagaaggataatcacagcttgagtctctcgacagctaaccttgtaagcattagtgatggtgcttctacatcttcaagtgggaaaaatgagttttggcttgtccggatggagaagcccggagttgaagttgtgacaaaggcccaaatggtggatcactacacccaaatccttatgaaagtgttggggaagtatgtaatctcatcaacctagctactactttactagtatctgtatgttgtgcatgataaaactgttgtcatctctcaaatttcagcgaacaggatgctcaggttagtatatatcacgtttcatgggatagggattatggtttctgttgtcatattgatgaagaatgcgcaaaagagttagctgatgttcctggagtgttatctgttcaacccgatacgaactttggatcagacaacaaaaattacaaaggtgatgatggcgtgaaatcatctgaagggactggagcggtcgatatcaaaactaaaaggctctttgttacagggctttcattttatacatctgagaagactctacgggcagcgtttgagcctttcggtgagctcgttgaagtgaagataattatggacaggatatcaaaaaggtcaaaaggttatgccttcgtagaatacactaccgaggaagctggaggtgctgctctaaaagcaatgaatggacagatcataaacggctggatgatagttgttgatgttgctaaaactagatcgagagaccgtctatctgggggatctaatcaagcatttcgaccacactatcaggctagatgactgttatatgtacagaacttacagctgtagagtagagataagcacgagagcgaggaattgctgggggatgccgagccgcctgatctgattgtagttcagtgcccttgtcttgtgctaattgctagaaaatgaatactcccagcaaaaaaatatgtaaatgcagctgaagtgtacgattactaacttctacttaattaaatcattctcagatacaggctttttcctgctcgtaagtttgaatatatatttaatatttatgatatgatggattttttattaacaa

SEQ ID NO: 132949 - DNA, 641 bp, Zea Mays
agagtgtactgttggctgaggaacgtctctggctcgatgttcgacaagaagaaacatcttcgtctctgcgttggagagattgcagccgtctcctccagatccgttgttccccgtcttggatccgtgcttaagtcatctgctccaggtctgttctcttctattcacaactcgtcttcaatctgtgctcgcgcctcttctcttcctctccctgtcttccctgcccatctactccatccgcatggtgaggtccgacgccatgagctcggacgctgctcgctccagtgctagtgactcgacaagctcgcaggccgcacgctgtccatcgcagagggagattctgctgctgggtgcacaccgtccattcgaccagggatcttcacccaccggtgaacaccgctcattcttcaacatctccggcgaccatggggtcggcggcgctggtgtgcgcagccccttcgtggccccagggcgttggtttcatatgtgtatggttaatttatgtgacctgttctgcagcaagctggggtttagtaaagtgcatgtttcagtttcaagtttcagttatagcaatcttcagttatagcagtatctgaaattttatctattctgtatctaaaattttatccagttctatatctaaa

SEQ ID NO: 132950 - DNA, 2170 bp, Zea Mays
actgtcagatggttgcagtaaactgctctccatgttcgccctactagtctcctacacactgatccaagggcagctgcacaggtatgttttgcttgctttatcatacgttggtcccgaatttcttgacagcatattgtccgttaatccgttttacaggctattatggcatcctacagctagtaaggtaactgaataggagtaacaccacacctgcaaaatctcgagatccttcttcaactcgggagtgatggtcggcgcgggcatgtcgaacctgagaaatgcagcagcaaagcgcacatgaggcctaccatgcggtcgcaatcaatcatgaaaacaagggtaaattccggaaaaaaaaaactgaccagcccttgccggcggtgtccttgacgttcttcctagccagcttattcagctgcctagggtccctcgggggcacgaacagcccgtccacgagctcgctcgtgcgcttccagagcgagccctgcgcggtgctcggatccggcgcgtggtcgatcttgctgccgccgctggtcgttgcaaaggaaggaagcttgggagcccatgacaggccgatcggcgccgccgtctccgacatcgggcgtagcgcggtgcaactttgagcaaagggttcaacaggggattgggtactcttattgcagggggccttgctctattggtcgctgagctagcggcacaaatgggaaaatatgacatgttggtcctcatcataagcacttttgtagttgcgttctgtgccaccttgacgaagctgcaccccaagatgaaaccatacgagtatggatttcgcgtgttcttgctgactttctgctacgtcacggtctctgggtacaacacgggagaattcacggctacggctataagcagatttgtgctgatcgctcttggtgccgctgtcagtctcggcatcaacatatgcatacacccaatctgggcaggagaggaccttcacctgttggtggccaggaatttttctggtgttgcaaaatctttagaaggatgtgttgatggatatctggcctgcatggaatatgagagggttccatccaagatactcacgtacgaagcatctgacgatgatcctgtctacagcgggtacagggcagctgttgaagcatcagcacaggaggaaaccttgctaggatttgctatatgggagccaccgcatggaccttacaagatggtgaaatatccgtggaagaactacaccaaagttggtggtgcgttgaggcattgctcattctcagtcatggcattgcatgggtgcatactttcagagatccaggcaccaccggagagcagaaaggttttctgtgcggagcttcacagagtgggccaagaaggtgctgaagtgcttcgcgaacttgggcagagagtcaagacgatgacgaagctgagctctccaaacattctttcagaagtgcacttggcagctgaagagctgcagaagaagatcgatgagaagtcttaccttctcgtcaatacagaaaggactcacgatggtgccagtgctcctgacaaggatgaatcgcccgagaacgccgctgccgattcagtgcacacgtcgaccagcttcgcttcaaacctgtacctcagcagatacgattcttcaaacccgtttctcggcagatacgattcgggatcaacggcgggcggtttatataaggcgcagtcatcgtggcctgctcggcaatctttccacccaagccttccatttgaaattgaggaatcaagaatttatgagagcgcaagcgccttgtcgctggccacgttcgcatcgctcctcattgagtttgttgcccggctccagaatcttgttgatgcatttgaagagttgagcgacaaggctaacttcaaggaccctgtggaggaaccttctacaatcagcagggagactcccggggttttagctagaatacataacttttttttggttcaagtgacgaggatgctctatcatgcacgctcgggacatgagatctcgctcgaagtctgtgaggtttatcaaattgattgccccatcgagaaatcaatgagcatgactgataccggtgcttcgacttcgaagctgaagttggcaatgaccgtgacaattggccctgtatggcacaattgtaagactcagtggcagaacccaagggacaactaa

SEQ ID NO: 132951 - DNA, 796 bp, Zea Mays
actgtcagatggttgcagtaaactgctctccatgttcgccctactagtctcctacacactgatccaagggcagctgcacaggtatgttttgcttgctttatcatacgttggtcccgaatttcttgacagcatattgtccgttaatccgttttacaggctattatggcatcctacagctagtaaggtaactgaataggagtaacaccacacctgcaaaatctcgagatccttcttcaactcgggagtgatggtcggcgcgggcatgtcgaacctgagaaatgcagcagcaaagcgcacatgaggcctaccatgcggtcgcaatcaatcatgaaaacaagggtaaattccggaaaaaaaaaactgaccagcccttgccggcggtgtccttgacgttcttcctagccagcttattcagctgcctagggtccctcgggggcacgaacagcccgtccacgagctcgctcgtgcgcttccagagcgagccctgcgcggtgctcggatccggcgcgtggtcgatcttgctgccgccgctggtcgttgcaaaggaaggaagcttgggagcccatgacaggccgatcggcgccgccgtctccgacatcgggcgtagcgcggtgagttcagaaactattacgtctctcgccaaggtattgtgttaatccgccgccgcggcagccggcagggttggaggttggacgggaaagggaagaagaagcgtggcggcgtggcggccgtgggacggtggggggaaagcaggggctgtgctgtgagacagagaggagactagggcaggaggttt

SEQ ID NO: 132952 - DNA, 2083 bp, Zea Mays
gcggccgcagcccgcagtgaacacagccccgcttctctttcccccaacttgttcaatcccccttctcccctcccggagcgcaagagaagctcgcattcctggtggtttctcctcccatcatccgtcctcgatctgagcgttgtctgcttccctgcctccctccctccccttgcccagatggccgccttccgtgtcttctaaatcttccgccgcatcaagcttccctcacctgtcggctgtcctgctgctgctgctgccaatggcgaccaagggaggcaacgcgaggggcgtcccggtgggggtgctgctggtggccgcgctcctcctttgctccttggctccggcttccgcgtcctcgtaccccgcaagggtggtgagcgggttcctctccaatgcggcttcggcggtggtgaagcggctgtggtcgctcaaatccaccaccaagatagcgagcgggggcaagtcgatggtgaagtacgagggcggctacaccgtggagacggtcttcgacggcagcaagctggggatcgagccctactccgtggaggtcacccagggtggcgagctactcgtaatggactccatgaacagcaacatctacaggatggcgctgccgctgtcccgatatagcaggccaaagcttgttgctggttctccagaaggatttcctggtcatgttgatgggaagctgcgagaggcgaggatgaaccatccaaagggatttacagtggacgacaggggtaacatctatgtggctgatgccatgaacatggccattagaaagatcagtgatacaggggttacaactattgctggggggaaatcaggcagaggagggcatgttgacggaccaagtgatgaggcaaaattttctactgattttgaagtccgttacattggcagtagctgctcccttctggtgattgacagaggaaaccaagcaattagagagattcagctccactttgatgactgtgtgtaccagtatgaagctggttttcctctaggagtcgcactgcttctcgctgccgctttctttggctacatgcttgcactgctccaacgccgagttttagggatgtattcaaatggagatgaacaggaccacgagagcccagtaaaagcaaaattaaccagcattccacctccataccagaagccactgaagccttatgttcaccccctgctaattccaaatgacgacgaacctgtgaaacaagaggaggaagaagggctcttcacgtcaattggcaagcttgtgggtggagcaaaatcatcaattgcagagatcattggcgccgcattctccagaaagaagcgagtgaacgttcatcatcatcagctgggtaggccaacctcctggccagcacaagaaagctatgccatcccgcgggacgagaccccaccgccgctggacacaagggcgcccacccctcgcaaaaactacgccttcatgtccaaggagccggagaagatccaccacatccggcacggccggcctcagttacatggctggaccggagaggcagcacctcagcagcagcagccgcagcaggtgcgtcaccaacagtacgtgcaacaccacaggcagtactcggccgggccgcagacctactacgagccgagctgcgatgcaacgaaggagatcgtcttcggagccgtgcaggaaggggacaccagccgccgtcccgtggagatcaaggccgtgaaccatggggacgcggcgccgtacgagcagaacgggctgcgattccgcagtagttatagcgtgcgctacaatggcaataactagtcgaggagcacttctgtagctgtaactgtaaggagaggagcgatagagagagcagtcgaggggagtacaatctcctcattgacaagtgcaacagaaaagctggaattttggtagaagagcttggtgataatggtcattggactctttactggcggtgacatatataaatatagcgtgtatttttcttgttcttcttgggtctacttctatttttaataaatcaccttgcgtataggcctatctttaataaacaaagtgtgtatttattattttatcaactgtttttcgttt

SEQ ID NO: 132953 - DNA, 2076 bp, Zea Mays
actctctctcatcagtcatcgccaccccgaccaccgtcacgcggacctctctcctcttcccctcaaaaccccacgaaatcgccgaaagcaagttgcggccgcagcccgcagtgaacacagccccgcttctctttcccccaacttgttcaatcccccttctcccctcccggagcgcaagagaagctcgcattcctggtggtttctcctcccatcatccgtcctcgatctgagcgttgtctgcttccctgcctccctccctccccttgcccagatggccgccttccgtgtcttctaaatcttccgccgcatcaagcttccctcacctgtcggctgtcctgctgctgctgctgccaatggcgaccaagggaggcaacgcgaggggcgtcccggtgggggtgctgctggtggccgcgctcctcctttgctccttggctccggcttccgcgtcctcgtaccccgcaagggtggtgagcgggttcctctccaatgcggcttcggcggtggtgaagcggctgtggtcgctcaaatccaccaccaagatagcagcgagcgggggcaagtcgatggtgaagtacgagggcggctacaccgtggagacggtcttcgacggcagcaagctggggatcgagccctactccgtggaggtcacccagggtggcgagctactcgtaatggactccatgaacagcaacatctacaggatggcgctgccgctgtcccgatatagcaggccaaagcttgttgctggttctccagaaggatttcctggtcatgttgatgggaagctgcgagaggcgaggatgaaccatccaaagggatttacagtggacgacaggggtaacatctatgtggctgatgccatgaacatggccattagaaagatcagtgatacaggggttacaactattgctggggggaaatcaggcagaggagggcatgttgacggaccaagtgatgaggcaaaattttctactgattttgaagtccgttacattggcagtagctgctcccttctggtgattgacagaggaaaccaagcaattagagagattcagctccactttgatgactgtgtgtaccagtatgaagctggttttcctctaggagtcgcactgcttctcgctgccgctttctttggctacatgcttgcactgctccaacgccgagttttagggatgtattcaaatggagatgaacaggaccacgagagcccagtaaaagcaaaattaaccagcattccacctccataccagaagccactgaagccttatgttcaccccctgctaattccaaatgacgacgaacctgtgaaacaagaggaggaagaagggctcttcacgtcaattggcaagcttgtgggtggagcaaaatcatcaattgcagagatcattggcgccgcattctccagaaagaagcgagtgaacgttcatcatcatcagctgggtaggccaacctcctggccagcacaagaaagctatgccatcccgcgggacgagaccccaccgccgctggacacaagggcgcccacccctcgcaaaaactacgccttcatgtccaaggagccggagaagatccaccacatccggcacggccggcctcagttacatggctggaccggagaggcagcacctcagcagcagcagccgcagcaggtgcgtcaccaacagtacgtgcaacaccacaggcagtactcggccgggccgcagacctactacgagccgagctgcgatgcaacgaaggagatcgtcttcggagccgtgcaggaaggggacaccagccgccgtcccgtggagatcaaggccgtgaaccatggggacgcggcgccgtacgagcagaacgggctgcgattccgcagtagttatagcgtgcgctacaatggcaataactagtcgaggagcacttctgtagctgtaactgtaaggagaggagcgatagagagagcagtcgaggggagtacaatctcctcattgacaagtgcaacagaaaagctggaattttggtagaagagcttggtgataatggtcattggactctttactggcggtgacatatataaatatagcgtgtatttttctt

SEQ ID NO: 132954 - DNA, 3535 bp, Zea Mays
cctcccgcgggccgcggctacaagaacggaagctgcgtgcttcgcttcacttcactccacttcatccagggaaataaaaaagcagggtggtttggaatccacatccgtagggcgagcggcacggcagcggaggggagcccacggcaaacggcatcccgcatccctatcttcctccctccctctctcgctcgcgtcgcgtggttgtctgcctggctggttgccctctcctccagagacctctcctgtctccacccctttggcctttgctcgtcgtggcgctctcgtacgcgcccaacgaggggagttaccgcccggtttcgcttcgtacggacggttgatacttgatagcgagttaatactctaagacttaaaggaggcgcggcgggcgtgggggcgagcgagcttgcttccgggggttggttcttgcgggaagctactagaaggaggggggacgaggaggagtgtggagtgtgtcttgctttgcctcgcctgtcctggtttgttagcctcccgctcgctcgaggccaagccgacggacaaatcttggtttgggacgcgccgccgcggtaggattcgggtgcccctattccctgtttctttccgaggattccgcgaggttcgctgccatggagccagcaggcgtggcgcattgaggcgtgcgtgcagggccggagagggacatggatctggagtccgcggacggagcggaggcggctgacgggaagcggcgtggggagtcattgcgcgcgacgctgctgctcgcgtaccagagcctcggggtggtgtacggcgacgtggccacgtccccgctctacgtctacaagagcgccttcgctggcaacgacatccagcactcggagggcaacgaggagatctacggcgtgctctcgttcgtcttctggacgctgaccctcatcaccctcatcaagtacgtgctcatcgtgctccgtgccgacgacggcggagagggcggcaccttcgcgctctactccctcatctgccgccacgtccgcgccggcctcctgcctggcggcggcaccagagatgagctcatggaggaagagaaggtcaccgggcgtcgtggtgagcggcctgtgtccagggtcagggcggtgctggagaagtacagagtgctgcagcggctgctgctgctgttcgcactgctcggaacatgtatggtcatcggggatggcgtgctcacccctgcagtctcagtgttttctgcggtatctgggcttgagttgtcgttggaaaaggaacagcacaaatatatagaacttccagtggcctgtgccatacttatatgcttgtttgcgctgcaacactacggcacacacaaagttgggtttctttttgcaccaatcgtatgcatttggcttgtctgcataagtgcgattggcctctacaatatcatccgttgggatccccatgtttatcgagccctctcgccatactacatgtatcaattcctcaggaagactcaaactggtggctggatgtcactgggtggaatccttctttgtgtaacaggctctgaagctatgtatgcagatcttggacatttttcgcaatcatcaatccagattgcatttatatccgtggtttatcctgcacttgtattggcttatatgggacaagcggcttttatttcacaacatcacagctttgagagcagttatcatattggattttatgtgtcagtaccagaaacactcagatggcctgttctggtgattgctatactagcagctgtagttgggagtcaggcaattattactggaaccttttcaatcatcaaacagtgctcttcattaagttgtttccctggagtgaagattgtgcacacatcctcaacactgcatggtcagatatacataccagaaatcaattggatgctgatgatactctgcctggctgttactattggtttcagagacacaaaacacttggcaaatgcacaagggttggcagtaataactgtcatgcttgttaccacttgcttaatgtcactcgttattgttctttgctggaacaagagtatcttccttgcccttggtttcctacttttctttggcacgatcgaagtaatctacttctcagcttcccttgtcaagtttcatgaaggtgcttgggttcctattagtctctccttcatatttatggtgatcatgagtgtctggcactatggcacaataaagaagtacgagttcgatgtgcaaaacaaggtttcagtaaactggctcttaaaccttggcccttcactgggcattgtacgagttcgaggcattggactaatacatacagaactaatgtctggaatcccagctatcttctcccactttgtcaccaatctgcctgcgtttcaccaggtactggtattcctatgtgtcaaatcagttcctgtgccacatgtgcaaccggaggaacgatttctggtgggtcgcattggtccaaaagagtataggctatacagggtcattgtcagatatggttatcgcgatgtgcagaaggatgacctggagttcgagaaggagctagtcagcaacattgcagagttcatccgcagcagtggggaatatgacaagaatggcttcgtcgaggacgcagataagcccttcgagaagctgtccaccatcagtactggaatcaatatgttggaagaggatggagaagttgatgcacatgtatcccctcataaggagatagacccacacaatgcggcacccaagcgaaagaaagccaggttcatgataccaaagagtgctcaggtggacagtgaggtgcgccgcgagctgcaggagctcatggacgctagggaggcaggcatgtccttcatcctggggcactcgtacatgaaggcgaagagcgggtcgagtttcataaagcgggttgtgataaacttcttctacgagttcttgaggaagaacagccgtggccctgcatacgccgcaaacataccccacgcctccactctggaggtaggaatggtctaccaggtctgacaacagttagcagctgtgtaaaggtagagagagatgagacgacgcctgtcagcgccacctgtatatatccacttgttgctgccgataccgttaacacaatcacaggatgacacgagtagtgagtggcccttgagcacagccaatgctgaggaagcagctgaagatgagatcatctgtggagagcccagccagaagtatgcattttttgtttgtagagccttttgttgtgccggtagttgttaagtttcgtatgtttgctgctgttgtttagtttcgtacttgtgagctgtaattgtctgtaagagtgactagcaaaatactgtagcatttttgacgttcagcagcggcctctgtagttctgtcacttgtctataattgaggactgtataggtagcagctaaacattctagtaggggctgatgtcgttgggccgcctgtattatagactgggccgtaaagcacagcttctttcgggcctaagaacgtctggaagacaaaccacaaaggaaaaaatgtctctcttgtaccttctt

SEQ ID NO: 132955 - DNA, 1366 bp, Zea Mays
cacccctttggcctttgctcgtcgtggcgctctcgtacgcgcccaacgaggggagttaccgcccggtttcgcttcgtacggacggttgatacttgatagcgagttaatactctaagacttaaaggaggcgcggcgggcgtgggggcgagcgagcttgcttccgggggttggttcttgcgggaagctactagaaggaggggggacgaggaggagtgtggagtgtgtcttgctttgcctcgcctgtcctggtttgttagcctcccgctcgctcgaggccaagccgacggacaaatcttggtttgggacgcgccgccgcggtaggattcgggtgcccctattccctgtttctttccgaggattccgcgaggttcgctgccatggagccagcaggcgtggcgcattgaggcgtgcgtgcagggccggagagggacatggatctggagtccgcggacggagcggaggcggctgacgggaagcggcgtggggagtcattgcgcgcgacgctgctgctcgcgtaccagagcctcggggtggtgtacggcgacgtggccacgtccccgctctacgtctacaagagcgccttcgctggcaacgacatccagcactcggagggcaacgaggagatctacggcgtgctctcgttcgtcttctggacgctgaccctcatcaccctcatcaagtacgtgctcatcgtgctccgtgccgacgacggcggagagggcggcaccttcgcgctctactccctcatctgccgccacgtccgcgccggcctcctgcctggcggcggcaccagagatgagctcatggaggaagagaaggtcaccgggcgtcgtggtgagcggcctgtgtccagggtcagggcggtgctggagaagtacagagtgctgcagcggctgctgctgctgttcgcactgctcggaacatgtatggtcatcggggatggcgtgctcacccctgcagtctcagtgttttctgcggtatctgggcttgagttgtcgtaggaatggtctaccaggtctgacaacagttagcagctgtgtaaaggtagagagagatgagacgacgcctgtcagcgccacctgtatatatccacttgttgctgccgataccgttaacacaatcacaggatgacacgagtagtgagtggcccttgagcacagccaatgctgaggaagcagctgaagatgagatcatctgtggagagcccagccagaagtatgcattttttgtttgtagagccttttgttgtgccggtagttgttaagtttcgtatgtttgctgctgttgtttagtttcgtacttgtgagctgtaattgtctgtaagagtgactagcaaaatactgtagcatttttgacgttcagcagc

SEQ ID NO: 132956 - DNA, 1296 bp, Zea Mays
gcagtcgcctgtcctgtgtcctccggtcccggacctctgtgccgcactgcccacagcgacagcatcgacatcgccccggtcccgtgtcgcttcgcttcgtagctcgccgccttccccgcgccccagcagcaacggattcccctcccctcgagagatccgacccttggcccggtcgctggggagagcggcatggggctctgggattcgctcctcaactggctgcggagcttgttttttaagcaagaaatggaactctccctggttgggttgcagaatgctgggaagacatcgctggtcaatgctgttgctacaggtggctacagtgaggacatgattccaactgtaggcttcaatatgcggaaaatcaccaaggggaatgtcacaattaaactttgggatcttggtgggcaacgaagattccgcactatgtgggagcgctactgccgtggagtttctgctattctatatgttgtggacgctgctgaccgagatagcatcccaatagcgaaaagtgaattgcttgatctgctgacaaaacagtctttagctgggattcccttgcttgtccttggcaacaaaattgacaagtcagaagtgctttcgaagcaggcattggttgatcaacttggactggaatcgataaaggaccgcgaagtttgttgctacatgatctcctgcccatatggcatgtgaagactgaagacaggatactacgggaacgtattttcctctcaaatcctctcaaggtaactgttctaacatcgaatcaaagtgggaattggtctaatcaatacatgtgatccatttttttccgtcgctgccatggctcccgtcgcggatcctgtcgtccttcttcctcggctggcactcgtccgcctggtgcccatccgccttgactggcacccccgtctacctccttccgccttggctcaccgtggtcgcctccttctgcatcggatgaccgttgagttcgaggtatttattatagcccccatgtctaaactagaatttgtgaacaacacataaattatgcgcagtcaccggacacgtccggtgactacacattatctagttgttggaactagttgttgtcgacagttgagctcgatgtatccggtgttaatgtccgatgagtataacctagctcggttgcatttgcaacatctctgagtaccatgtccattgtggagtccgctgcaccaccgaaaacatgtggtgcattgtaaatcttcgtgtacatgctacagatctctgtgagtgccctgtccaattggcgtctggtgcaatgtttgggtc

SEQ ID NO: 132957 - DNA, 996 bp, Zea Mays
cctccggtcccggacctctgtgccgcactgcccacagcgacagcatcgacatcgccccggtcccgtgtcgcttcgcttcgtagctcgccgccttccccgcgccccagcagcaacggattcccctcccctcgagagatccgacccttggcccggtcgctggggagagcggcatggggctctgggattcgctcctcaactggctgcggagcttgttttttaagcaagaaatggaactctccctggttgggttgcagaatgctgggaagacatcgctggtcaatgctgttgctacaggtggctacagtgaggacatgattccaactgtaggcttcaatatgcggaaaatcaccaaggggaatgtcacaattaaactttgggatcttggtgggcaacgaagattccgcactatgtgggagcgctactgccgtggagtttctgctattctatatgttgtggacgctgctgaccgagatagcatcccaatagcgaaaagtgaattgcttgatctgctgacaaaacagtctttagctgggattcccttgcttgtccttggcaacaaaattgacaagtcagaagtgctttcgaagcaggcattggttgatcaacttggactggaatcgataaaggaccgcgaagtttgttgctacatgatctcctgtaaggattctgtgaacatagacattgtcatcgactggcttatcaagcactctagaacagcaaagtaggctttatgtgtgtttgtatcacttgatgcatggtaatttgaatttacctttgtgaatcagtactcccagaatcctggtttcttgtccagatgttaaaagcgttcacctcgtaatttatgatccctttggtctcacagacgaattgtatggtatctagaagaccagaaccttgtatttcctttgcaattcccttgaatcttttattattcttactgtgaatgtcgtccagtgtttttattctgcacataccaaaccagacctatggccatgc

SEQ ID NO: 132958 - DNA, 1026 bp, Zea Mays
gcagtcgcctgtcctgtgtcctccggtcccggacctctgtgccgcactgcccacagcgacagcatcgacatcgccccggtcccgtgtcgcttcgcttcgtagctcgccgccttccccgcgccccagcagcaacggattcccctcccctcgagagatccgacccttggcccggtcgctggggagagcggcatggggctctgggattcgctcctcaactggctgcggagaatgctgggaagacatcgctggtcaatgctgttgctgtatgcatcaactcagtcaagatacattaccatgttatctggtgttttgattttaattcatggcttctgtgctttgcagacaggtggctacagtgaggacatgattccaactgtaggcttcaatatgcggaaaatcaccaaggggaatgtcacaattaaactttgggatcttggtgggcaacgaagattccgcactatgtgggagcgctactgccgtggagtttctgctattctatatgttgtggacgctgctgaccgagatagcatcccaatagcgaaaagtgaattgcttgatctgctgacaaaacagtctttagctgggattcccttgcttgtccttggcaacaaaattgacaagtcagaagtgctttcgaagcaggcattggttgatcaacttggactggaatcgataaaggaccgcgaagtttgttgctacatgatctcctgtaaggattctgtgaacatagacattgtcatcgactggcttatcaagcactctagaacagcaaagtaggctttatgtgtgtttgtatcacttgatgcatggtaatttgaatttacctttgtgaatcagtactcccagaatcctggtttcttgtccagatgttaaaagcgttcacctcgtaatttatgatccctttggtctcacagacgaattgtatggtatctagaagaccagaaccttgtatttcctttgcaattcccttgaatcttttattattcttactgtgaatgtcgtccagtgtttttattctgcacatac

SEQ ID NO: 132959 - DNA, 1736 bp, Zea Mays
gcagtcgcctgtcctgtgtcctccggtcccggacctctgtgccgcactgcccacagcgacagcatcgacatcgccccggtcccgtgtcgcttcgcttcgtagctcgccgccttccccgcgccccagcagcaacggattcccctcccctcgagagatccgacccttggcccggtcgctggggagagcggcatggggctctgggattcgctcctcaactggctgcggagaatgctgggaagacatcgctggtcaatgctgttgctgtatgcatcaactcagtcaagatacattaccatgttatctggtgttttgattttaattcatggcttctgtgctttgcagacaggtggctacagtgaggacatgattccaactgtaggcttcaatatgcggaaaatcaccaaggggaatgtcacaattaaactttgggatcttggtgggcaacgaagattccgcactatgtgggagcgctactgccgtggagtttctgctattctgtaattcctgctcttctaaaatactattcaatattgaatattttatattcagttttttgttagtgagataggattacaacattaacatacaactcagaatctccaattggaggtttggagcactttatggctggtgttcatttcttaaagataatcaaatccttagagataaacccaacattccctgtagcaaggagatattaaactatagattgctgtctaacattatattcattttcataccctgattaaacatgttttcttcccttacaagcagtatagatatatttcttctgcgttctgtttacccctgtattctgcgttctgtttaccctgtatgcagacatgcttgaaggataactgtaacttagaaactgacacatacatagagagtgcaggaggacgggactgttgggtgacgctttatcaaataaacaataaaggaactcaagtacactacagtgaatatcatcaaatatgtatattcattttcttcattctcttgaaacttaaaaatttaaaccatgatgtttgttcctgcatttatcatgttatcttgtgcgtgtatgactgttgttacccagatatttttcagttatatagctttactggatatccttgatgggtcatgatttgataattttgtgacaattgcagatatgttgtggacgctgctgaccgagatagcatcccaatagcgaaaagtgaattgcttgatctgctgacaaaacagtctttagctgggattcccttgcttgtccttggcaacaaaattgacaagtcagaagtgctttcgaagcaggcattggttgatcaactgtgagctcaatcttcatttgcctacgcatcattctactttctgcattataattcagctgaagctcttttgacttttttgttttcagtggactggaatcgataaaggaccgcgaagtttgttgctacatgatctcctgtaaggattctgtgaacatagacattgtcatcgactggcttatcaagcactctagaacagcaaagtaggctttatgtgtgtttgtatcacttgatgcatggtaatttgaatttacctttgtgaatcagtactcccagaatcctggtttcttgtccagatgttaaaagcgttcacctcgtaatttatgatccctttggtctcacagacgaattgtatggtatctagaagaccagaaccttgtatttcctttgcaattcccttgaatcttttattattcttactgt

SEQ ID NO: 132960 - DNA, 2109 bp, Zea Mays
aaagagtcaagaatttctgtaatactcgttctccagagcattggctgaaaaatcaacatccaaaaagagctgagctccagaaagctcttggcagccatctttcatggaaggaccgctatccacccttcttcgatgacattgctgcacgtctgcttcctgttattccactgattatttataggcttattgagaatgatgcaactgacattgcagacagagttcttgcattctattcttccttgcttgccttccacccgctaagatttacatttgtacgtgatattcttgcgtatttctatggtcatcttccaatcaaactaattggtaggatcctcaacctgctgggtgttagcactaagacccccttttcagaatcttttgctaaatatttagtgtcatcaaattcttcaatatgtccaccaccagaatactttgccaacctgttgctaaacctcgttaataatgttatacctcctttaagtagcaaatcgaaatcaaacccagcagacacaacacgctcgactttcaacaaacatcatgcatcttcacaacctggtggagttggtaacaccgatggccagagggcattttatcagaatcaggatcctgggtcgtatacacagcttgttttggaaacagcagctattgagattctctcacttcctgtgcctgctgctcaaatagtgtcctctttggtccaaataatagcacatgtacaagcaatacttatacagtcaaatagtggccaaggaatgtcaggtggtttggggcaaagttctgggctgccaacttctccttcaggggctgctgaatcctcaggtcccaaccaagcgaacagtgctgcaactggcatcaatgccactaactttgtttctaggagtggttactcctgccaacaattgtctgttttgatgattcaagcatgtggtcttctgctggcacaactcccaccagaattccacatgcaactatactcagaagcagctcgagtcataaaagactgctggtggcttgctgatggttccaggcctgttaaagagcttgactctgctgttggatatgcactgttggatcctacatgggcttcccaagacaatacatcaacagccattggtaacattgttgcccttctgcattccttttttagcaatcttccacaagagtggctggaatctactcatactgtcatcaaacaccttcggccagtcaattcagttgccatgttaagaatcgccttccgcatattgggtcccttgttacctcgtctagcctttgctcgacctttgttcatgaagaccttggctttactcttcaatgttttgggtgacgtgtttggtaagaaccctcaggtctcaaatccaaatcctgtggaggcgtcagaaattgcagacataattgacttcttgcatcatgcggtgatgtatgagggccaaggcggtcctgttcagagcacgagcaaacccaagctggagatactgacattatgcgggaaagtaatagagattttgaggccagacgtgcaacatcttctctcccacctcaagattgaccccacctcttcaatctatgctgcaacgcatccaaagctcgttcaaaacccatcctaataatgttatagcttacaagtgtattctaatgatgcaagatgcttcgaaccactgcagaagtctcaacatgtgatgctgttggatgagtagaattgcagtaactgtaacatgtgattcaggggcgtattctcaagtgattcgccgttgtcagttgtatcctttagttagaatgttgtaaatgctatctgcttagtgcatattaggacataactacatagtgtaagcagtaaccatggaggttatcttgccaggctaagaattttggctgccttgcctgtgagccatgcgacatatgtatcctgtcgcattaggatgagcgacaaccgacacggtcgcatgatgcaagatttgtgccggttggccgattgtcaccgtgcagatctcttcgtaacagtgctgcacgtggaaggtttgaccgagtgactgcatcaccagttaatagtgtgaactgtatcaaattcttgatcatcttgcttattatgaaatgcctacgttgtgtcaa

SEQ ID NO: 132961 - DNA, 3302 bp, Zea Mays
ctccggactcgaggattcggagtttcggacaaccgacaacatcgctcgccggcgacgagcgcggcgcggcggcggcgatggatgggggacacacgacgaggcatccgatgtctccagcgatctcggcttcgactgtgctaccgcagcagcggcagatgcagcctcaccaccacccggcgcggccggcaatcgccgatctcttcaccctatacctcggcatgaactcgaagcagcgagcggaagacccattgagagagagctcgaataagctgcagaagagagtgactgctctgaacagagacctgcctccccgtgatgagcagttcatttcagattatgagcagttgcgcatgcagtttcctgacgctgagcagttgcaggcaatcacagaatcagttctcatctcctttgtgctgcagtgcagtagccacgcaccacaatctgagttcttgctctttgctacacggtgcctatgtgctcgaggccatcttagatgggatagcctccttccatctctgcttaatactgtttcctccatagaggcacctatggtgcaaggagtttctgtgactggtggtggttctgtaaccccttcgtcagctattacaatgccaaatgctccaaactttcaccaatcaaacccagcctcacctttgtcagtaatgaacaccataggatctcctactcagtctggtattgaccaacctgtaggtgcaaatgtgtcgccaatcaaggcagctgaattctccagctctgcgcagcttggtactgcagcaagaggtgaccagtctcgcaggggagcagaagctagctatctgcatcatctatcctgcaggataattctagcagggctggagttcaatttgaagccagctacccatgctgtaattttccagcatatggtaaattggttagttaactgggaccagaggccccaaggcatggatgaaactgacacaatgcaaacatgcaggctagaaaaacctttgcatgaatggatgcatctatgcttggatgttatatggattctagttaatgaagataaatgtcgcattccattttatgagcttgttcgctgtaacttgcagtttcttgaaaacattcctgatgatgaagcactggttagtataatcatggagattcataggaggagagatatggtgtgtatgcacatgcaaatgttggatcaacatcttcattgtccgacatttggaactcatcgtttcttatcacaatcatacccaagcatagctggagaatctgttactaatctgcgttattctcccattacttaccctagtgtattgggagagccactacatggagaggaccttgcaaactccattcctaagggtggtttagactgggaacgtgctcttcgttgtttgaggcatgctctccgcacaaccccatcaccagactggtggagacgcgttcttcttgttgccccttgttacagatcacagtctcagcaatcatcaactcctggagctgttttctcacctgatatgattggtgaggcagttgcggacaggacaattgaactactgaagctcactaactcagagactcaatgctggcaagattggcttttgtttgctgacatctttttcttcctaatgaaaagtggatgcattgactttcttgattttgtggacaaacttgcttctcgagtcacaaatagtgatcaacagattctccggagtaaccatgtcacttggttgcttgcgcagattatccgcattgagattgttatgaacactctaagttcagatccaaggaaggttgataccacaagaaagataatttcattccacaaagaagacaaaagccttgacgccaataatattggccctcaaagtattcttcttgatttcatcagtagtagtcagactctgcgcatttggtctttcaacacttcgattagagaacatttgaacagtgatcagcttcaaaaaggaaaacagattgacgaatggtggaaacagatgatgaaagcttctggtgagaggatgatagactttacgaacttggacgaacgagcaacaggcatgttctgggttctctccttcaccatggcgcaaccagcttgtgaagcagtaatgaattggtttacgtcagctggaatggcagatttaattcaagggcctaatatgcagccaagtgaaagaataatgatgatgcgtgaaacttaccctctgtcaatgtcattgctttctggcttgtctatcaatctttgtctgaagcttgcttaccagcttgaagagaccatatttcttggccaggctgtccctagcattgctatggtggaaacctatgtgaggttactgcttatagcaccccattcattgtttcgtccccattttacggcattaacccaaagatctccatctattttgagcaaatctggtgtgtcattgctcctacttgagatactaaattacagattgctgcctttgtataggtatcatggtaaaagcaaggcgttgatgtatgatgtcacaaagataatatcaatgattaagggtaaacgtggagaacatcgtctttttcgattagcagaaaatttgtgcatgaatttgattctctcactgaaagacttcttttttgtgaaaaaggaattgaagggcccgactgagtttactgaaactctaaaccgcataacaataataagtcttgcaatcactatcaagacgcgtggaattgctgaagttgaacacatgatttatcttcaaccattgttagagcaaattatggcaaccagtcagcatacctggtcagaaaagacactgcgttattttcctcctctcattcgtgattttttaatggggagagtggataagaggggtctagctatccaagcatggcagcaggcagaaacgactgttattaaccaatgtaatcagctgctctcaccatctgctgagccaaactatgtcatgacttatttgagccacagtttccctcagcatcgtcaatatctttgtgctggtgcttggatgctgatgaatggacatcttgagatcaacagtgcaaatcttgctcgcgtcttaagagagttttcacctgaggaagttacagcaaatatctatacagtggttgatgtgcttctgcatcatatccaatgcgaggtgcaaagggggcatctagcacaggatttactatccaaagcaatcacaaatctttctttttttatatggacacatgaactccttccgctggatattctattgctagctcttattgacagggatgatgatccttatgctttacgccttgtgactgcactatttacagagtga

SEQ ID NO: 132962 - DNA, 950 bp, Zea Mays
ccgggcactgcgcaggcaaaaaataaaaaagagacttgcgctactccccagtccccagtccgcggccgccgtctctgtgcccttcccatcccttccgcccttcgctactccccagtccccagtcccccctcccggctcccgggcaaaaaaaaaaaaaaaaaaaaaaacacgccccatcgctgcgcagcacggcgcggcagtataggaaaacgcactggttccattccaggtcaaaacttacggcgcgctgcgaagggagtcgggcgcggtggggtgtagcatgagggagcagcagggttccggcgacgtggcggggcgccggggcggggtcatcaggtccctgctgggcgtcgagcgccggctcgcggagggcgacgccgagggggcggtcggggtctcctcaggcaagcagccggcgaccgagggcggtggcggtggcggtggcgaggaaaggaaggccgtggtgagggtggtggcggccgacatgccgcccgcgctgcagcgccgcgcgttccgctgcgcccgcgacgagctcgccgcgatgccgcacttcccgcgccggctcgagcccaagcgcctcgcgctcgcgctcaagaaggagttcgatgctgcttacgggccagcttggcactgcatcgtggggacgagtttcggttcatatgtcacgcacgcccggggtggattcttgtatttttccgtcgataaggtctacatcctgctcttcaggacagccgtggagccctagccgcattgacggccaccagcctaccagcaatggacaaatggttcataaaaatgcccagttcttgggatagctcacaccaaattcagttgttcagtcagctaggccgaggccttgtaacttgtaaattgcattgtttcttcgaaggcaaatggaaactccttgtgtttctgataaaatttctgatttgttcgggatcatctgtttc

SEQ ID NO: 132963 - DNA, 82 bp, Zea Mays
atggcgccgagctcggtaccacgtcggcgccgagctcggtaccacgtcggcgccacgacgtccgtttgtgtcaacgcagcac

SEQ ID NO: 132964 - DNA, 171 bp, Zea Mays
atggcggcgttgagagcgagagtgcgggacagtgccgagacagagtgtggagaggaagaagaacgcggtcataaaagtgacaaaataaaagtattgcaaaagtttgatggggctggtcaacgtgatgcaagggctgtggtgcaccgtgcacctattgtctgtaagcagtaa

SEQ ID NO: 132965 - DNA, 1083 bp, Zea Mays
tttttttctttcttgaattgaacagctccccgtatcgatcagtttattcaatcctgccaccaagggcaagaaacgagttgctactaatttacaattttctttttgcatttactcgaaagaatcgtgaattgtttttttttcgcgctgctgttcttgtttcgttctttttacatttcgtccaatcgcttgcccgctaaaaacaacagtttgattttatttgccaacgacgactccgcgcctcgagagggggtcaagaagaaagcagcaccgccagagcacaagccgcgcggtgcgacgtcgactctccggtgagggcgacccaaatccgagcccgcgaacgccgggccggccggcctgccgctttaccgagagagggagagcacgcgctaccgtggtggctcgcgctgccgccggtcctttcttgccggagccgccgcgcgcgacctcctctccgcccaatcgttcagagagcagactgcagcacgggcacggcgtggcgcgcgacgagccgctccagcgcctcgcgcatccaccagtgcgggcacccgtccatcacctgctgcaccgttgcctgtgcgcttgcgggacgccatctcgggccactggtggagctcgtcggcgacgcggagcgggaacatgaacccctcgtaggtctggtccacgtagcggcggctcttgtagtgccagaggccgaggaccggctcggtgtcgccgaggacgccggcctcctccagggcctcgcgccgggcggcctcgtccatggactcgtccacctcccacccgcccttggggaacatcatgccgtgccccttctgggacgtgatcgccagcacctccagctcgccgtcgcaccgcacgcggtacgggatgcagcccaccacgatgcgcccgccggtgctctggctgtaccgctgcagctcccgcccctgcctcgcgaccagcacggccatgatggagatacgcgggcggctactagctgattcgttctcgttgctctagcggctcgccggggtcggagctggagcctggagagtaaggtggaacgatgatgccgcagctgctggttttgcggccatggaggct

SEQ ID NO: 132966 - DNA, 565 bp, Zea Mays
agctacacaagctaagtaaaacagattagctacacaagctaagaacaagtgagcaactattttattataggtatgactagatatacaagagcatacacgagcaacaaatactcactagcataagtatatgaacaagtaaatacaagctagtgaggaaagttgcaaaccaatgggaagatgatgacacgtggcacaatgatttttttcccgtggtgtcgatgacttgccggtcacccctagtccacgttgaggtagattcaaagctcccaaccgctcctctatcaagtctccacttgatctcttgagccggattggtcaatgaaccctcaaacctcgattccactagagttgcttttcaccgctccggcgaggcaagcacaacgcctctcacaatcaccactgcggcctcttcacaatctcctttgaagagctcacggggaaccaccaccaagccgtctaggaggcggcaacctccaagagtaacaagccaacgacctcacttgatgatctccctagtgcctcaaagatcaacaacttgatgcaatgcactagatggctctcaatc

SEQ ID NO: 132967 - DNA, 248 bp, Zea Mays
aagttcaagatccaagtgacacaacatgtcaagttcaattagtgctgatacattttactcattttcttctatccctcttctacgtactactaacctccctcaggaacaagatggagtccaggaaatttttgcagctctgatccaaccatatactcctgatgattcggtacatttggaaagccagaaacgacaagagattcaattccaaaatcttggacagttgtgcaagttcataatgaaaatagccg

SEQ ID NO: 132968 - DNA, 1489 bp, Zea Mays
ggctggacgccaacttgtttcgtatccctcggtcgtcgccaatatatatagccgccctcctcccggccgatcccttcgtcctcaatctcaatcccacaccaccaccaccacctcctccggtccccaacccctgtcgcaccgcagccgccggccatggcctgcctcaccgacctcgtcaacctcaacctctcggacaacaccgagaagatcatcgcggaatacatatggatcggtggatctggcatggatctcaggagcaaagcaaggaccctctccggcccggtgaccgatcccagcaagctgcccaagtggaactacgacggctccagcacgggccaggcccccggcgaggacagcgaggtcatcctgtacccgcaggccatcttcaaggacccattcaggaggggcaacaacatccttgtgatgtgcgattgctacaccccagccggcgagccaatccccaccaacaagaggtacaacgccgccaagatcttcagcagccctgaggtcgccgccgaggagccgtggtatggtattgagcaggagtacaccctcctccagaaggacaccaactggccccttgggtggcccatcggtggcttccccggccctcagggtccttactactgtggaatcggcgccgaaaagtcgttcggccgcgacatcgtggacgcccactacaaggcctgcttgtatgcgggcatcaacatcagtggcatcaacggggaggtgatgccagggcagtgggagttccaagtcgggccttccgtgggtatttcttcaggcgaccaggtctgggtcgctcgctacattcttgagaggatcacggagatcgccggtgtggtggtgacgttcgacccgaagccgatcccgggcgactggaacggcgccggcgcgcacaccaactacagcacggagtcgatgaggaaggagggcgggtacgaggtgatcaaggcggccatcgagaagctgaagctgcggcacagggagcacatcgcggcctacggcgagggcaacgagcgccggctcaccggcaggcacgagaccgccgacatcaacacgttcagctggggcgtggccaaccgcggcgcgtcggtgcgcgtgggccgggagacggagcagaacggcaagggctacttcgaggaccgccgcccggcgtccaacatggacccctacgtggtcacctccatgatcgccgagaccaccatcatctggaagccctgagcgccgcggccgttgcgttgcagggtccccgaagcgattgcaaagccattgttccttccgttccgtttgcttattattgttattatctagctagatcatctgggggtcaggtcgtcgtggtgtgccaaaacagaacacagaaagaggaagaagaaaaaaaaaacaagacgtgtggcgtttatgttatatcatccaataatggccgtaccacacttgtggtacctttcagtacgtatgcttgcattgtatgaggggtcgctttcct

SEQ ID NO: 132969 - DNA, 1775 bp, Zea Mays
gtggcgtggagtggagtggagctggccgccgaagagagaccccgagaggccgagagaaagagagagaggccgtgctaggtgtggtgagtggtgacccagatggaggtggccgccacgtcgccgtggccggaggagccgctgctgcggcccccatctccgcagcccaatctccgtgccgacgccgccagctccggcgacccggcttcccctcctccatcagcggtgaggccgagtcgcctcgcggcgctcatcgggcgcgcggcggggcggcgcggtccctcgatgctggtgcgcgagacggcggcgctgcaactgcagcggaggcgcgcggactgggcgcactcccgccccgtcctcgcgctcgacatcgcctggaacgtcgccttcgccgcggccgccgccgccgtgctctcgtcctctgccgaggagagccccgtcaagccgctccgcctgtgggtcgtcgggtacgccgcccagtgcctggtccacgtcgggctcgtctgcgccgacacccgccgcgagacgcggcgcgcccggagatcggcgtctgacgtcgagtctgccggcgctgggacagacagctcggacgccgacagcgaagatgacgaaagggcggaagggaggagcagctatacaggtcgttgcgagacgatgaacacgttgatatcatttctgtggtggatcattggattctactggatattctcaggtggggaggtgctcgagcacggcgctccaaggctgtattggttaaccattgtgtttctggccttcgatgtgttttttgctgtgttttgtgttgctgtggcctgtttcattgggattgcactgtgttgctgcttgccttgtgtcattgctattctgtatgctctggctggccaggagggtgcatcagatgcagatattagtgttcttctgagatatagatattctgatccaagcgaagatggtgagaagggggtcgatgaaggactgatgatccctatcctgaataatagtggaatgtcaacaagtgagcgtattctccttcgcgaggatgctgaatgctgtatctgtctatcatcatatgaagatggagctgagttatctgctctcccctgcaatcatcacttccactggccttgtattaccaaatggctgcgcatgaatgcgacgtgtccactctgcaagtataacattctcaaaggcagtgacagtgcatgaccaacttattctgacataacttccgtacacagcttcctttcaagtggcgttctcaaagcaatgctgttttcacagctgtgttattaagtgacagtgatctgtgtttttctgtttaggatgtggtgataacctgtagatggatgaaaccttatttacaattgtccttgttaatatcgcttgtaaatacctttcgagttgttttctacgtatgatggaattggaattgctgaaatactttgtgattctggtttgactttatgctgttttaacagctgtgtttttaagtgacagtgatgtgtgttctgctgtttaggatgtggtgagtggtgacaacctgtaaatggatgaaacctaactcagtcaccctaatatcgtttgtaaatatctttggagttgttttctgcgtttgatctttgatgtaattggaattatcgaaatactttgtgataggctcactgtttgcacagttatgaataatattgagaataatgcagcgcttgcccatctaaaatctcgggtaggttctctggcctgcataacattgctgatgaattcagacaacaaaaaaaaaa

SEQ ID NO: 132970 - DNA, 1502 bp, Zea Mays
gtggcgtggagtggagtggagctggccgccgaagagagaccccgagaggccgagagaaagagagagaggccgtgctaggtgtggtgagtggtgacccagatggaggtggccgccacgtcgccgtggccggaggagccgctgctgcggcccccatctccgcagcccaatctccgtgccgacgccgccagctccggcgacccggcttcccctcctccatcagcggtgaggccgagtcgcctcgcggcgctcatcgggcgcgcggcggggcggcgcggtccctcgatgctggtgcgcgagacggcggcgctgcaactgcagcggaggcgcgcggactgggcgcactcccgccccgtcctcgcgctcgacatcgcctggaacgtcgccttcgccgcggccgccgccgccgtgctctcgtcctctgccgaggagagccccgtcaagccgctccgcctgtgggtcgtcgggtacgccgcccagtgcctggtccacgtcgggctcgtctgcgccgacacccgccgcgagacgcggcgcgcccggagatcggcgtctgacgtcgagtctgccggcgctgggacagacagctcggacgccgacagcgaagatgacgaaagggcggaagggaggagcagctatacaggtcgttgcgagacgatgaacacgttgatatcatttctgtggtggatcattggattctactggatattctcaggtggggaggtgctcgagcacggcgctccaaggctgtattggttaaccattgtgtttctggccttcgatgtgttttttgctgtgttttgtgttgctgtggcctgtttcattgggattgcactgtgttgctgcttgccttgtgtcattgctattctgtatgctctggctggccaggagggtgcatcagatgcagatattagtgttcttctgagatatagatattctgatccaagcgaagatggtgagaagggggtcgatgaaggactgatgatccctatcctgaataatagtggaatgtcaacaagtgagcgtattctccttcgcgaggatgctgaatgctgtatctgtctatcatcatatgaagatggagctgagttatctgctctcccctgcaatcatcacttccactggccttgtattaccaaatggctgcgcatgaatgcgacgtgtccactctgcaagtataacattctcaaaggcagtgacagtgcatgaccaacttattctgacataacttccgtacacagcttcctttcaagtggcgttctcaaagcaatgctgttttcacagctgtgttattaagtgacagtgatctgtgtttttctgtttaggatgtggtgataacctgtagatggatgaaaccttatttacaattgtccttgttaatatcgcttgtaaatacctttcgagttgttttctacgtatgatggaattggaattgctgaaatactttgtgattctggtttgactttatgctgttttaacagctgtgtttttaaacaacaaaaaaaaaa

SEQ ID NO: 132971 - DNA, 1452 bp, Zea Mays
ccgtgctcgcttgtgggtgtgtgttgacttttttaactgttcttcgatatttggattactctcacagctatacaggtcgttgcgagacgatgaacacgttgatatcatttctgtggtggatcattggattctactggatattctcaggtggggaggtgctcgagcacggcgctccaaggctgtattggtatgccaccttcatttttgttgcatcttgattcaccaatgacaacatgcaattagtttggtttgattataccaaggtttgaataagaatgtcatactgggttttgacgagaatatggaaagtgcaatatactatatcttatggaaggtataaaaaccgttaaatatgtatctaagcttctttgtttccatttcaagtacttttcagtcaatacatgcatctatactttcccataattaagatgtgagctgttctacttgtcatcataagttcctaactacctgctctgcaattcattctgcaggttaaccattgtgtttctggccttcgatgtgttttttgctgtgttttgtgttgctgtggcctgtttcattgggattgcactgtgttgctgcttgccttgtgtcattgctattctgtatgctctggctggccaggtactccaatgtcaagagaagtagttttacctgtactgtttccatatgttatcacagactcagagcgctcagttcctttcatattaaatatgtaggagggtgcatcagatgcagatattagtgttcttctgagatatagatattctgatccaagcgaagatggtgagaagggggtcgatgaaggactgatgatccctatcctgaataatagtggaatgtcaacaagtgagcgtattctccttcgcgaggatgctgaatgctgtatctgtctatcatcatatgaagatggagctgagttatctgctctcccctgcaatcatcacttccactggccttgtattaccaaatggctgcgcatgaatgcgacgtgtccactctgcaagtataacattctcaaaggcagtgacagtgcatgaccaacttattctgacataacttccgtacacagcttcctttcaagtggcgttctcaaagcaatgctgttttcacagctgtgttattaagtgacagtgatctgtgtttttctgtttaggatgtggtgataacctgtagatggatgaaaccttatttacaattgtccttgttaatatcgcttgtaaatacctttcgagttgttttctacgtatgatggaattggaattgctgaaatactttgtgattctggtttgactttatgctgttttaacagctgtgtttttaagtgacagtgatgtgtgttctgctgtttaggatgtggtgagtggtgacaacctgtaaatggatgaaacctaactcagtcaccctaatatcgtttgtaaatatctttggagttgttttctgcgtttgatc

SEQ ID NO: 132972 - DNA, 1026 bp, Zea Mays
attgttgttgacatcatgcctcctagaaaatatgcatcaggaagccaaaaaagaaaaagaaggaaacacactgaggattttgtcttgtcacagaaaggagccatggataaatttcttaaaagggatatgggagatccgagaaacacaaatgaattggcaatagtgcttgtggagccggtggacgaacaaattggtgggaattcagaataccaaggacctacagaccataatgtggatgacacatctagtttggggcttttcaatgttttgattgattcattggagtcatttggtcttaatattgatgacataaggggtcaaggttctacaaaaagatggaaagttttacttgatcatgtgccaagtttaactgtgaaatcattgtgcaacactcgttgggaaagtcgtatcaaaagtgtggcagcaattagatatcaagctcctcatataagggcggctttgtttgagttacatcatgcttctgatactgatccgatggcaaagagtgatgcaaagagtttgtatgacttgattggtacctttgagttcattcttggtatggttatatggcatgatattttatatgctgtaaatgttgtgagcaagaagttgcaatcatcatcaatgtgtcttcactctaccttagagcaaatagatggtataatgagttactttgacaagtatagaaatgaagggtttgcttctagtatggtggttgccaaggatattgcttctgtaatgggtgtggaggcatcatttccagtaaagcgtcgtgctctaaggaaaaagcattatgatgaaaatgattgcagcaatgaggcaaatctacaaggtgagaaagattttgaagtaaattattttttagttatgcttgatatggcaagcagttcattaaaaaatagatttgaagacctccaagtattcaatggtatatttgggcctcttcttaactcagcatcattgaaatcattggatcacattaaactcagggattattgtaccatgttggcaaaaactctctgttga

SEQ ID NO: 132973 - DNA, 1957 bp, Zea Mays
caccagcaggccggccgggcagagagctcgacgaccggctcggcaaagtcgcgcgcgacgatggccgtggcggcggccgagaaggcggtgaggtgcctgggccggggcttcgacatgacctgcgacatgaggctcaagtactgtaagcacgccggcgggtgcctcgtcgacaggggcggcgtcgagacggcgccgctcgccgtgcccggcgtcgggaccatcggcggcgtgcccgtcgacgttaagtgcggcaagggcgaccgcgtccggatcaagtccggcgtgctcgagttcaacaagatgtcggagctgttcaaccagcggagctcggtggaagggaagatcccgtcggggctgttcaacgcctgcttcgacctggacagcggcgcctgggcgcaggacgcggccgccacgaaatgcctcgccatggacggctacttcatctccctcttcgacctccgcctggaccgccgcccgctcgcgctcgccgaccgcgtcctccgcgacgccccggccgcctgggaccccgccgccatcgccaggttcatcgacaagtacgggacgcacgtggtggtggggctgagcgtgggcgggcaggacgtggtctacgtcaagcaggacggctcgtcggcgctgccgccggcggagatcaaggagcatctggacaggctcggggaccagctcttcaccggggcctgcgccatgcctcccctccgctgcaagtccaaagacaagctcaagatgccggaggccttcaacgtgttcgatgcccagctggtggcgcagcagcggctccaagcagcagggatgatcaccacgctggtctcctccaaagagggcgtgacggtgatatactccaagaggggaggcgacacgacggcgggcagccactcggagtggctcctcacggtgccggcgacgcccgacgtgatcagcatcgaggccgtgcccatcacctccctcctcaagggcgtgcctggcgccggctacctttcgcacgccatcaacctctacctcagatgtaaatacaatctaagcgacccttctgtgtcgatcgagtgccttgtggttttgtcgtgcatcacaagatgtgggcgccggcgctcggcgagctgcccctcggcccgtgctccaaccggcagcagggctccagcccggcgcttcatttcagcccgctcagtgccaagctctatgtcagcccaacacaggcgattgtccctaagttgccggtcactgggatgcggctgcacctggagggcaagaaacacaaccggttagccgtccacctgcagcacctatcgaccaccccgacgttcatcgccgccgcgcggcacgacaaaccgccggtgtggcgaggttcggacgcggcctccgacgacaggtactacgagccggttcagtggcggatgttcgcgcgcgtgtgcaccgcgccggtcaagtacgacacagggtggcgcggcgccggagaccgcgacccgagcgcggcctgtgtcgtgacgggcgcgcagctccacgtcgcggcgcacgacgccacccacgtgctgcacctcaggctcctctacgccgagctccccggctgcgccgtcgtgcagtccaggtgggcgcgcggcgtggcgaggctgtctgggaagtccagcggcttcctgtcgccctcctcctccccgggctcttccggtggtggcagtggcagtggcggatcgcagaaggagaggcacccgccggagggcgtcgtcaacatcaactccggcgtgctcgccggcggaccgcctgtgcccgtcgccgcgcagaagatgctcaggctcgtggacacctcgcaggtgaccatggggccgcaggacagccccgggtactggctcgtcaccggtgcaaggctcgacgtcgacaatgggaggatctcgctgcacgtcaagttttccctgcttgccccggcttcctgacaggccgttcatgcatacag

SEQ ID NO: 132974 - DNA, 1940 bp, Zea Mays
caatttgagtttttcttttacagttaccgtaagctctagtcaatgaaaatcccaaacacactttataagaatgggtctgcctttcttcctcatccgtgatactccctcagattcttaccaaaacagaggagcccgtcggccgtcgcaaaaaaaaaaaaaaaacaaaacaagaccaccgcaccatggaatcgctgacgcttcgcgcttcgacggccgcctcgccgctgcagcgacgccggctgctccccggacggcagcgcgcgacgtacgtccgcgccacggcctccgccggcgagccggacctctccgtgcgcgtgaacgggctgcagatgcccaacccgttcgtgatcgggtcggggccaccgggcaccaactacaccgtcatgaagcgcgccttcgacgagggctggggcgccgtcatcgccaagactgtgtcattggatgctgaaaaagttatcaacgttactcctcgttatgcaaagcttcgggcagaaccaaatggggctgccatggggcgcatcattggctggcagaacattgaactcatcagtgacaggcctctggagaccatgctgaatgagttcaagcagttgaagaaagagtatcctgacaggatacttatcggttcaattatggaggagtacaacaaagctgcatggcatgagcttattgaacgtgttgaagagtctggagtggatgctcttgaaattaatttctcatgtccacatggcatgccagagagaaaaatgggtgccgctgtggggcaagattgtgatttgctagaggaagtttgtggttggattaatgagaaggccactgttcctgtttgggcaaagatgactcctaacattacagacattacacagcctgcaagaatatctcttaagtctggatgtgaaggagtttctgcaattaacacaattatgagtgtaatggggattaatctcaaaacactgcgtccggaaccttgtgttgaagggtattctacacctgggggttattctgcaagagctgtgcaccctatagcacttgctaaagtcatgcagatagcaaggatgatgaaagaagagtttgctgatggacagtctctctctgccattggtggtgtggagactggcaatgatgctgctgagtttattcttcttggtgctgatacagtacaggtatgtaccggtgtgatgattcatggttatccccttgtgaagaagctttgcgcagagttacaggatttcatgagagagcacaacttttcatcaattgaagagtttcgaggggcctcgcttccgtatttcacgacgcacacagatctggttcaccggcaacaagaggcggtcaggcagaggaaggccatcaagaagggccttcaatcagacaaggaatggacgggtgatgggttcgtcaaggagaccgaaagcatggtatccaactgatgcatctctgccaccccccaccgggccattccttacaccatgctccaacttcatctttttaataaacgcgcaccagaaatgccacacaccaagcatctagtcctcatctgtacatggttctgaaccttgggccttcagtctatagaacaggccatgaatccacacaaagtcgtgacaacgggtgacattgagcgatatatttgtcatgtgaacattaatttgtagcactgagctgagggcttgaccttgtaaaatcttggagacttcaatctcgcacaggttttctcaggagtttataattatacgtgagtgatgtgtgaggacatgctggcctcagcttcaagtcaggtccgacttcaagtcttctccaaagcccaaaagctcgtcccagcactgatgggcgatcgcgtagctgacgaacatgctgcagttgcgagcgatccacggcgttgctctgttggacgggtactcagatccagtcttctctaacaagtcaagttcacatcaaac

SEQ ID NO: 132975 - DNA, 1413 bp, Zea Mays
gtatcagccagtatcttcagatcatcaccattcaccacttcaccgcccagcccagccagactctcatcaggcgaacccgtccgtccaccacccgtcggccgtcgccatcgcgcgccacttccgctgcagttctcgcccttttctccctcctttcgcccgctgccggctcggcctcgatgtgcaccctcggcgcgcacgccactacgccagggcgggagccagcagcagcggtagggtagcgcagtgcttatcttctgtctataaaatgggcacgcacgcgcacggcagcagccgcggcctcactttccctgcgcgctccccacctcagctcagcttcagcccgccgctctccaaggtcgccagcgccatgacccctaaaggtgggcgcgtgggggacgtcggcagcaagaagccgactccgcgagcacatccgcgctacgtccccaggagagggtcggtgctgaaggggatcgttcgaggcgtgctgggcctcgtcttcactctgatcagcgcgccggcgaactccggcggccaccgcgtgcgcccggcgccgccgcccgcgcccggagaagggggtgaaagtgatgatggcgcggagcaggggaagtaggtgggtgctggtggggtttatctgcgcactcactctgcggtggcgatcggctctcgacgacccaaacttttatctgggccgtccgttcactgcttgtttgatgtttgtgtcgtcgtagcaactttgcagtacgttttgttcttgcacatgtacctacgcgtcgtgtctccttgtgtttacatcgagtctccaaccactgctagtgcttgtgctgtggttttttttgtttgtttctgcagatggtttttgagcagctgagcagatatatctcaggtgctagtcactccaatttccttctgttaagagtttcttgtttttctcagatgtttttttttttggacaagaagcttgcaggactacttaacgtaaaaacgaatgaaaaaagcaaaatctacatgttgaagatgatatccaggaagaagtcatgcgacatacatgcattttcacggacacgatttttaggtccagacgaccagatcatggattcactttttttccttcttttcttttcttctttggaagacttgggtccagataatctcttccggagctcgtaattctcaagtttaacataagatgtcacagcttgtatgtggagttagtttgtccaatgctaattgcatcggcaacgaaaattaaatcactccaacttgtcccaccatgactcaacaattgctagtgtcgcagtaacttgtaaaggtttagcccgttgagacaatctaatcttactggaattcaattttacatgcagaccaaagttcatgcaagcatgccagaggggtaatttgttttcttgaactgag

SEQ ID NO: 132976 - DNA, 519 bp, Zea Mays
cgagctcgcagatcgcaaccagctcaggcctcaggctcagcactcagcaagcaacgaccccaacaagatcacacacgcactagcgcatacatacacgcagccgcaggcaggcaggcagaggaagctgccgagaatgccgggctcgggcacatgtatcggcgggaagaaggttggcggcggcgccgccgcgcctggcgtgcacccgcggtacgtgccggagagggggcgggtgctcagggacgccctgggctcgctattcggctgcttccgccgccccaccaagacccgccctctgccgcggtgagcggcgaaccgccgctgtggagttcttttcgacggaccgcgccgtccgccggccggtgaaagcagggccgcggcatgcaatggactatggacatcccggagggcaacaaactctcatgtacttacttagtttgatgaggaactccctcgtctttttcgattgtggttgtgcatataaactttacgtattaaaaacgggggttatcatttgcgcca

SEQ ID NO: 132977 - DNA, 101 bp, Zea Mays
ttcgagaatggagataatatatatatggaggagctccaattacaagaaaatccatactaatttactttattcaagcaactacaatatatatacttcatcga

SEQ ID NO: 132978 - DNA, 1973 bp, Zea Mays
gccagtccacagtccacactcgcgggttttttccccttccccgtccgcgccctaagaaactgcacaggccgtcaggcccacaacgcacgctcacatgcagcagtctacttctattttccattcaacgccggcgaacgcaaggccaaaagcccaaaacctatatattccatgtactactgattcacaacgccggcgacgcccacccagccccgcagccgcagtcgcagtccaggccagcaccacccgtcagcttgcggactccacgcaccgtacatgcagcacaacagttcagccgcacaacaaaccgaggtccgagggacatcgtcaatattagcgcgcggcgcggggatggttacgccggcggtgtcccgctaccggcttcgcccgcggttggtgcgtgtggcggtgtcagagatcccgctcgccacgaggcggacgaggcagcagcccgtggccgcgacggagccggcgattccgagcaacttcctgtgcccgatctcgctggagatgatgaaggaccccgtgacggcgctgacgggaatcacgtacgaccgggacagcgtggaggggtggctgcagcgcggccactccacgtgccccgtcaccgcgcgcccgctgcgcgcggaggacctgatcccaaaccacgccacgcggcggatgatccaggactggtgcgtcgccaaccgcgccctcggggtggagcgcgtgccgacgccccgcgtcccgctctccgccgccgacgcggccgagctcctggcggcggtgtccgccgccgcgcggcgaggggacgcgatggtgtgccgccagctggcggccaaggccagggcgctagggaaggagagcgaccgcaaccgccggtgcctcgcggcggggggagccgcccgcgcgctctcctcggcgttccttcggctcgttgaccagccggcgtcgttcggcggcgcgctgggcgagatcctggccacgctggtcgtgttcttcccgctcgacgaggagtgcaggagccacattgcctccccggcgtcgctggacgccatcgtctcgatcctgtcccacgacggcgaggcgacctcgaagtccagcgccgccgtcgtgctccgcgagatcgcgtcgtcgtccgactccgaccccgagtgcctcgacgccctgtccgagaccaacggagtacacgacgcgctcatcaagctcctgcagaagcccgtgtcggcgcaggccaccaaggccgcgctggtcaccgcctactacctcgtcaggggcagcgacctagcggccaggcgcctggtcgacctcggcatggtcgagctcctggtcgagatgctagtcgacgccgacaagggcacgacggagaaggcgctcgcggtgctcgacagcctgttgctcacggaggaagggcgcgggaaggcgtgcgcgcacgcgttggccgtgccggtgctggtcaagaagatgcagcacgtgtccgagatggcaaccgagttcgccgtgtcggcgctgtggcggctgtgcaagagcttctcgggcgagggtccgtgcaaggccgaggcgctgcagctgggcgcgttccaaaagctcctcctcctgctgcaggtcggctgcatgggcgtgaccaaggagagggccagcgagctgctcaggctcctgaatgggtcgagagacggcgttgagtgcattgagacggtagatttcaaggggctcaagagacccttctcatgagtcatgaacattgtgcgtagattaggtcatgaattaagctgtggataaaagctacacggacgcgattagattaatttaggaactcctcttttttttcgtggtggcggggaacatccttttgcttccccccttgccccttccttggtctgttggtcataggctgatggccatttttgcagtgctgctctgaatgaagtctgtagaagtgtatgaaccaaatcatacagcaggaaagaataaagcgttgctgcaagtttctgacgatt

SEQ ID NO: 132979 - DNA, 1276 bp, Zea Mays
aggattcgaagaaggcaaatggacaagagaaaggcccaagtcttgtttttaagattactaacagggtttcctacaaaactgtcttaaaagctcacagtgccgttatattgaaggctgagagtatggctgacaaaattgaatggatcaagaagataaaaggtgttattcaaagcagagggggctctgttaagggtcccactgaagatggtcctatgagacaaagccgttcagatggatcccttgatacaatggctcggaggcctgctgatcctgaagaagaacttcgatggatgtctcaagaagtccgtggttatgttgaagctgttttgaacagtttggctgcaaatgttccaaaggctattgtactttgccaagtggagaaatcaaaagaagatatgctaaacaaactgtacaactcaataagtgcacaaagcaatgcaaagatcgaagagctactccaagaggaccacaatgctaaacgtaggcgggaaaaataccaaaaacaatcatccctcttgtcaaagctcactcgccaactcagcattcatgacaatagagcagcttcatatgggaacgatagttctggagctgagggtagcccccggtctcctggccactctggtgaggattggaagtctgccttcgactcagcaacaaatggctctgttgaccggtccagttcacagcatgagacaaggtcaaaaagtgctgacagtcgaggccggcgccatgaaaacggggatgccaactctggcagccgacgcacacctaaccggttgccaccggcaccaccaaatggggggagatactaagtatgttgattgatcattacctgtgaccaatcatcatcatatgctcttgccaggttctcatcctctactgatactggttattggtggaagaaaacatatgggaccggagaacggaaagcttactggaagatttggatggacggtgtgtatcaagagaaccaaagttgtttatagaaaattagaatcatataggtcattgatgattgtcatttcccgatcgttttggtgtatttgatcttttggatcctcattgccagtgggattttgttgccacggatcagttaattttggttttgtacgcttcttctgtaagtctccccatcaaactggcaaatgtattctttacacacagtcatgtatcgttgttcttcccattcttttagactgaaccacatgttcagtggttgtgccatactgctgtatgattatattgtacaattcattattgggctggagtacacaca

SEQ ID NO: 132980 - DNA, 650 bp, Zea Mays
acttccattggacaggcattttgatttgaacaacgtgaagaggattgtgttggaagcggatggctatcaaccctatttgatatctccagagaagggtttacgttccttaataaaaggagttcttgaaatggccaaggagccatcacgactctgtgttgaagaggtacaccgagttttgttagacatagtaaatgctgctgcaaatgctacaccaggactaggaagataccctccattcaagcgggaggtcattgcaattgcatctaatgcattagatgctttcaaaagtgatgcaaaaaagatggtggttgcacttgttgatatggagcgagcttttgttcctccacaacacttcatccgattagtacagaggagaatggaaagacagcgccgtgaggatgagttgaaaaataacagatcatctaagaaaggacaagatgcagagctatccaagatgaaccgggcttcaagccctcaaactggatccgatgaagctggtggtaacctgaaatcaatgaaggataaatccaataagcaagataatgatacaaaagagggaccaaatttgcaggttgctgggcctggcggcgaaataactgcaggttaccttttgaagaaaagtgcaaaaaataatgaatggagtaaaaggt

SEQ ID NO: 132981 - DNA, 631 bp, Zea Mays
ctttgttctgttttttctgaggtattgcattcacattgtggtatcttttttgtctgcttgtccagctcctccgttgaaattgattgatttacctggcatagaccaacgagttatggatgattcaacaatcagtgaatatgctgggcacaatgatgcactattgattgttgtgataccagcaatgcaagcggctgatgttgcatcttctcgagctcttagactagcaaaggacattgatccagatggaactagaacaataggtgtcttaagcaaaatcgatcaggcagctgcagatgcaaaaaccgtttcttgtgttcagtccattttgtccaataagggtgccccacgagcagcagctgatattgagtgggttgctctaattgggcagtctgtctcaattgcatctgctcaatcaggatcagttgggtctgataattcactggaaacagcttggcgagctgaggctgagacccttaaatctatcctaactggtgcacctcagagtaagctgggaagaattgctctcgtggataccatcgctaagcagatacgtaaacggatgaaagttcgtctgccaaatttgttgaccgggtatgcatacaatgctgatcatcctgtgctttacttttaa

SEQ ID NO: 132982 - DNA, 1170 bp, Zea Mays
gtctcggctctcaaaacaaaccccggctcgcctcgcggaatccacgagtccgccacgccagtgcgcctccaatttctccgcagtccgcagttccgcacccgtacctccccaaccccccagctcaccaccccgagatctcccccgaccggcctcgagatccctgcggccatgtcgtcgtcggcagccatggaagcaatcgacgagctcgtccagctctccgagtccatgcggcaggccgcctcgctccttgcggacgatgacccgtccgacgagaccgcctcgcgccgcccctccacctttctcaacgccgtcgcgctcggcaacgtcggagctggcaagtcggctgtgctgaacagcctcatcggccaccctgtgctgcccacgggggaaaacggcgcgacgcgggcgccgatagtcgtcgacctggcgagggatccagggctcagcagcaagtccatcgtcctacagatcgacagcaagtcccagcaggtgtcggcaagtgcactccggcattcactgcaggataggcttagcaaaggggcatccagtggatctgggagaagccgaagcgatgagatttaccttaagttgcggacaagtacagctcctccgttgaaattgattgatttacctggcatagaccaacgagttatggatgattcaacaatcagtgaatatgctgggcacaatgatgcactattgattgttgtgataccagcaatgcaagcggctgatgttgcatcttctcgagctcttagactagcaaaggacattgatccagatggaactagaacaataggtgtcttaagcaaaatcgatcaggcagctgcagatgcaaaaaccgtttcttgtgttcagtccattttgtccaataagggtgccccacgagcagcagctgatattgagtgggttgctctaattgggcagtctgtctcaattgcatctgctcaatcaggatcagttgggtctgataattcactggaaacagcttggcgagctgaggctgagacccttaaatctatcctaactggtgcacctcagagtaagctgggaagaattgctctcgtggataccatcgctaagcagatacgtaaacggatgaaagttcgtctgccaaatttgttgaccgggtatgcatacaatgctgatcatcctgtgctttacttttaa

SEQ ID NO: 132983 - DNA, 738 bp, Zea Mays
ggttattgatgattcgtgtattcgcctcataggaattttatttttcaaaagtagcatgactgcatcattgtgatttgattctttctgcctaagactgaccttatggtacaaagcattttccttacatcatcgtttcagaattttatggcagctttagacacaacgaatatgcttgttataaattaaattttcctttggacctttatcgtagttacttgcttccggagcatgtaacatcctgctgcctgtgaatttctttttctgcacataaggatttgaacatcaagtttcagtcgaaccgcagcagttctcgatgtgatgccatgccataacatgacagagtgggaagaattggattagatgtcagaagctggtggagatatcaattctcaaatacttcatctgaaggatattgagaatcaagatctcttgatgagcgagaccaacagtgtctgtgaggcacatgaggatacagaggaccagccttcagagaaggatgcacctgttgcatgggaagaggatgagaataatgtaggttggatgcctctgttagccgcagcacacacagaaaatatttcacgtatatgagatccaacaatcctatcatcgaaatatgaaaagcttcatgattatgtcagtacctgcaggaacagagtaatagttgacatttcacttatataggagtcatacaggaatgaactgttaatttcacatatatatacaactactttaacttct

SEQ ID NO: 132984 - DNA, 2844 bp, Zea Mays
atggcgccgcgtccgtgcccgctctccctcctcctgctcgccgtcgccgtcgccgtggccctctccccgctcgcggccgcgcagccgcagcgaaacatcctcacgacgttcccctccacccgcacgccggccttcgccaccccgccgccgccgaccgtatccccgccgccgtcccccgtcaccgtcccgccctcctcgccgccgccgccgccgtcgtccgtgaagcgcagcgacatcgcggtggcggtggtgagcacggcgctcagcagcttcgcggtctcgggcctcgccttctttctcttcctccgccacgggaggaggaaggagctgacggccggggacggcaatgggtatcctggccgtcctctggatggcgccttcgcggggaagcggtcggagagggagccgacgcggccgtctcggggcgggggcggcttcggcatggtggacgagaacggcctcgacgcgatatactggagggagttcgaaaaggacggcgaagccggcggcagaggccgagagaagaagccgcctacgacggggactgggagcaggcgcccgccgcagccgcctccgcttcggcagcagcagcagcgcgcggagatgtggccggagccccagccgtcgtcgtcgccgccgccgtccccgccgcgacggtccaggaggaacaggatagatcaggagccgctcatcccggcgggctccctcgactccgcgtccgctgtgttcgacgactcgctgcacccgcccagcgccggctccagctcgtccttctccgtgtccgcgcgtccgccgccgccgaccccggcagtcgctgtcagctccgtgccccgcccgactccgcggcctgcgcctgccgcctcgccgggtctgccgctgccgcctgggagagcaagcccgccacctgcgccacccatggttgctgcctctgtcgcgtcgcctccaccgccacctccaaaaccagccgccgcgtcgccgccgccgccgccaccactggccaagggcccacctccaccgccacctccgaagggcggcccacctccgccgccaccgcccagaggtggcccgcctccaccgccaccgcccaaaggcccgtcccctccgccgccgccaccaccaggaggaaagaaaggaggtccgcctccgcctcctccaaaaggtggggcatcgacgtcctcttctaggccgccgacagcgccgggcatgccatccggtgccggcgagcagcaggcgaagcttaagccgttgcattgggacaaggtcaatgtgcaggccaccgaccactccatggtgtgggacaagatcaccggcggttcattcaacagcgtgagagagaaatcacgcaggttcactagagttggcatgaaaaaaagaatcccccagaatctgcaaagacaaagcttggacgaaggcatcatcgaggctctcttcggcactgcagcagcaaaccgcaagccgaaaccttcagacaaggaatcgggcgaatcgtcggccagcctcgggcgctcaaacacaccggagcaaatattcctgctcgagccgcgcaagtcacacaatatttccatcatcctcaagtccctcacggtggggcgggatgaaataatcgacgctctccgtgacgggcaaacagaactcggcactgacgtcctggagaagctttcgcggctccacatctccaaggaagaagagtccaccatcttgaggttctccggggaccccgacaggctcgcccccacggaggccttcctcctccgcctcctcctcgacgtgcccaatccgatcgcgcgcgtcaatgcgctgcttttcaaggtgaactatggtgcggaggtcgcgcagctcaagcactcgcttcggacgttggaattggcgagccaggagctgaggacaaagggcctgttctttaagctgcttgaggcagtgctcaaggcgggaaacaggatgaatgccggaacggcacgtggcaacgctcaggccttcaaccttacggcgctccgcaagctctctgacgtgaagagcactgatgggagcaccacgttgctgcacttcgtcgtcgaggaagtcgtccgctccgagggtaagcggctcgccatcaatcgcaactacagcatccgccgctcgggcagtctcgcgaggtctggccacgagggaggcagctcggcagcaggcttcgcaagccaggggccatcgcgggaggaaaggcagagcgaatacatgaacctggggctaccaattgttggaggtctcagcacagagttcgccaacgtgaagagggccgcactggtcgactacgacgcagttgtcagcgagtgcgccattctagacggccgactcaatgagatcaagagactcttggagacctgcagtgatgatggatttgcgcgggggctgcgaggatttgtcagggctgcagaacaggagctgaaggcgctaagaggggagcaggaaagagtacttgagctggtccagaagacaacagagtactaccatgccggtgccaccaaggaacggaacgcacatccccttcagctgttcatcgtagtgagggacttcctgggtatggttgatcaggcatgtgtggacatcaagaggaaagtgcagcagaagaaaccagcgccgtcgtcatcgcagccaaacacagctgctgcccccaccgtggcggctgtggcagcggctgcggccacaacagcagcgacagcgtcagcgaccgatggtcaaacagcaccagctcagaaaccacccgaagcagatagcaaaagaaagagggtcatgccaagatttccaaacctgccagcgcacttcatgaaggatagtgcagattctgattcaagtagtgacgaggaatag

SEQ ID NO: 132985 - DNA, 1854 bp, Zea Mays
gccgaacgacccggcccaagctgccatcgaggagggacgagggagggatccagcgagcggagcggagcggacgccaccctcgcgcgcacacctacgcgcaggcgcatacaccaacgacgccgaccccttccagggagggagggagggaaccacacaaccggacccgacccgacgccccgaggcgaaggcgagggcgagcggtcagccggccggggcggggaccaggggggatcccctcggcggcggcggccatgggcgcggcctccccggcgatgtgggccgggctggtcctggtggtgttattggccgcatcgggcccggcgtcggcggggctgccgaggttcgccgaggcgcccgagtacaggaacggggacgggtgcccggccccggtgacgggcgcgggggtctgcgacccgggcctggtgcacatcgccatgacgctcgacgcgcactacctcaggggctccatggcggccatctactcgctgctcaagcacgcctcctgcccggagtccatcttcttccacttcctcgccgcggagggcggcggcgcgccggccgtcgccgagctccgggccgccgtggccgcctccttcccgtccctgcgcttcgagatctacccgttccgcgccgacgcggtcgccgggctcatctccgcgtccgtgcgcgccgcgctcgaggcgccgctcaactacgcgcgcaaccacctcgccgacctgctcccgcgctgcgtgccgcgcgcgatatacctcgactccgacgtgctcgccgtcgacgacgtgcggcgcctctgggagacgcgcctgcccgccgccgcggtcgtcgccgcgcccgagtactgccacgccaacttctcccgctacttcaccgaggccttctgggacgaccccgtcctcggcgccagggtctttgccggccgccgccgcgcgccctgctacttcaacaccggcgtcatggtcatcgacctccggaggtggcgcgttggcaactaccgccagcgcatcgagcgctggatggagatgcagaaggagaaaagaatctacgagcttggctccttgccccccttcctgctcgtcttcgccggcgagatagaggccgtcgaccaccggtggaaccagcacggcctgggcggcgacaacgtcttcggcagctgccgccctctccataacgggcccgtcagcctgatgcactggtccgggaagggcaagccatgggaccgtctcgacgccggcaagccttgccccctcgaccacacctggaagtcgtacgacctctacattggcgagaatgattcttcaccagcatcagggccgtcccggtcagccttgtcatcgttggtggcatggtagaagttcatatacacaataattctttgatctcgggtgcccgtggttcttggccggtaatggaattgccttgcgatgcattcccactgccggctgccgccacagctgctgccgcaagccagctgccgccttcggctgtacaggacagtgaggggaggggcggtatacagattgcagcaggagcagcagcagcagcaagggggtgaagacagtgaatagcgggggggagcaaattcttgttcgttttgcactatgattgagattgattcattaggctctggtttggaggctgtgactatcatgggatggaaggaattacttggttggtggtgtacaattcttggataggacaaaggtttcggttttttggtgtattagttcagaattgtttcatttacatgtctattcagtacactcgtgtaatacggattaaattgatttgaaacaaattgagtgcatcctggtcgtgtacctgtgctgaaatcctgctctctttgtgactttcgtc

SEQ ID NO: 132986 - DNA, 1771 bp, Zea Mays
aacgacccggcccaagctgccatcgaggagggacgagggagggatccagcgagcggagcggagcggacgccaccctcgcgcgcacacctacgcgcaggcgcatacaccaacgacgccgaccccttccagggagggagggagggaaccacacaaccggacccgacccgacgccccgaggcgaaggcgagggcgagcggtcagccggccggggcggggaccaggggggatcccctcggcggcggcggccatgggcgcggcctccccggcgatgtgggccgggctggtcctggtggtgttattggccgcatcgggcccggcgtcggcggggctgccgaggttcgccgaggcgcccgagtacaggaacggggacgggtgcccggccccggtgacgggcgcgggggtctgcgacccgggcctggtgcacatcgccatgacgctcgacgcgcactacctcaggggctccatggcggccatctactcgctgctcaagcacgcctcctgcccggagtccatcttcttccacttcctcgccgcctccttcccgtccctgcgcttcgagatctacccgttccgcgccgacgcggtcgccgggctcatctccgcgtccgtgcgcgccgcgctcgaggcgccgctcaactacgcgcgcaaccacctcgccgacctgctcccgcgctgcgtgccgcgcgcgatatacctcgactccgacgtgctcgccgtcgacgacgtgcggcgcctctgggagacgcgcctgcccgccgccgcggtcgtcgccgcgcccgagtactgccacgccaacttctcccgctacttcaccgaggccttctgggacgaccccgtcctcggcgccagggtctttgccggccgccgccgcgcgccctgctacttcaacaccggcgtcatggtcatcgacctccggaggtggcgcgttggcaactaccgccagcgcatcgagcgctggatggagatgcagaaggagaaaagaatctacgagcttggctccttgccccccttcctgctcgtcttcgccggcgagatagaggccgtcgaccaccggtggaaccagcacggcctgggcggcgacaacgtcttcggcagctgccgccctctccataacgggcccgtcagcctgatgcactggtccgggaagggcaagccatgggaccgtctcgacgccggcaagccttgccccctcgaccacacctggaagtcgtacgacctctacattggcgagaatgattcttcaccagcatcagggccgtcccggtcagccttgtcatcgttggtggcatggtagaagttcatatacacaataattctttgatctcgggtgcccgtggttcttggccggtaatggaattgccttgcgatgcattcccactgccggctgccgccacagctgctgccgcaagccagctgccgccttcggctgtacaggacagtgaggggaggggcggtatacagattgcagcaggagcagcagcagcagcaagggggtgaagacagtgaatagcgggggggagcaaattcttgttcgttttgcactatgattgagattgattcattaggctctggtttggaggctgtgactatcatgggatggaaggaattacttggttggtggtgtacaattcttggataggacaaaggtttcggttttttggtgtattagttcagaattgtttcatttacatgtctattcagtacactcgtgtaatacggattaaattgatttgaaacaaattgagtgcatcctggtcgtgtacctgtgctg

SEQ ID NO: 132987 - DNA, 1763 bp, Zea Mays
aacgacccggcccaagctgccatcgaggagggacgagggagggatccagcgagcggagcggagcggacgccaccctcgcgcgcacacctacgcgcaggcgcatacaccaacgacgccgaccccttccagggagggagggagggaaccacacaaccggacccgacccgacgccccgaggcgaaggcgagggcgagcggtcagccggccggggcggggaccaggggggatcccctcggcggcggcggccatgggcgcggcctccccggcgatgtgggccgggctggtcctggtggtgttattggccgcatcgggcccggcgtcggcggggctgccgaggttcgccgaggcgcccgagtacaggaacggggacgggtgcccggccccggtgacgggcgcgggggtctgcgacccgggcctggtgcacatcgccatgacgctcgacgcgcactacctcaggggctccatggcggccatctactcgctgctcaagcacgcctcctgcccggagtccatcttcttccacttcctccttcccgtccctgcgcttcgagatctacccgttccgcgccgacgcggtcgccgggctcatctccgcgtccgtgcgcgccgcgctcgaggcgccgctcaactacgcgcgcaaccacctcgccgacctgctcccgcgctgcgtgccgcgcgcgatatacctcgactccgacgtgctcgccgtcgacgacgtgcggcgcctctgggagacgcgcctgcccgccgccgcggtcgtcgccgcgcccgagtactgccacgccaacttctcccgctacttcaccgaggccttctgggacgaccccgtcctcggcgccagggtctttgccggccgccgccgcgcgccctgctacttcaacaccggcgtcatggtcatcgacctccggaggtggcgcgttggcaactaccgccagcgcatcgagcgctggatggagatgcagaaggagaaaagaatctacgagcttggctccttgccccccttcctgctcgtcttcgccggcgagatagaggccgtcgaccaccggtggaaccagcacggcctgggcggcgacaacgtcttcggcagctgccgccctctccataacgggcccgtcagcctgatgcactggtccgggaagggcaagccatgggaccgtctcgacgccggcaagccttgccccctcgaccacacctggaagtcgtacgacctctacattggcgagaatgattcttcaccagcatcagggccgtcccggtcagccttgtcatcgttggtggcatggtagaagttcatatacacaataattctttgatctcgggtgcccgtggttcttggccggtaatggaattgccttgcgatgcattcccactgccggctgccgccacagctgctgccgcaagccagctgccgccttcggctgtacaggacagtgaggggaggggcggtatacagattgcagcaggagcagcagcagcagcaagggggtgaagacagtgaatagcgggggggagcaaattcttgttcgttttgcactatgattgagattgattcattaggctctggtttggaggctgtgactatcatgggatggaaggaattacttggttggtggtgtacaattcttggataggacaaaggtttcggttttttggtgtattagttcagaattgtttcatttacatgtctattcagtacactcgtgtaatacggattaaattgatttgaaacaaattgagtgcatcctggtcgtgtacctgtgctg

SEQ ID NO: 132988 - DNA, 1822 bp, Zea Mays
ctccacggcccacgcccacgcccaccgccccatccaccccgaaaccctagcggatcgtcgccatggccgcggccgcgctccttcgccgcatccccgccgcgcgggccccggccacggccttcatggcggcgcgtccggtctccgattccacggcggcgctcaccatcgagacatctgtccctttcacctcccacctcgtcgacccgccctcgcgcgatgtcaccaccacccccgccgagctcgtcaccttcttccgcgacatgtccctcatgcgccgcatggagatcgccgccgactccctctataaggccaagctcatccgcgggttctgccacctctacgacggccaggaggccgtcgccgtcggcatggaggccgccatcacccgctccgattccatcatcaccgcctaccgcgaccactgtacctaccttgcccgaggaggtgacctcgtctccgccttctccgagctgatgggccgcgaggccggctgctcccgcgggaagggtggatccatgcatttctataagaaggatgccaatttctatggcgggcacggcatcgtcggcgcgcaggtgcccctcggatgcggcctagccttcgctcagaagtacaagaaggaggagacggccacgtttgcgctctatggtgacggtgcggctaaccagggacagctctttgaggctctcaacatttcggccctctggaagctgcccgccatattggtttgcgagaacaaccattatggtatgggaacagcggaatggagggcagcgaagagtcctgcttactacaagcgtggcgactatgtgcctggattgaaggttgatggaatggatgttcttgctgtgaagcaagcgtgcaaatttgcaaaagatcatgctgttgcaaatggcccaattgtccttgagatggatacctacaggtaccatggccactctatgtcagatccaggaagcacttaccgcaccagggatgagatttcaggtgtcaggcaggaacgggacccaattgaaagggttagaaagttgcttttggctcacgacttggcaactgctgctgagctcaaggatatggagaaagaaatcaggaaacaagtagatgacgccattgcaaaagcaaaggaaagttctatgcctgatacttctgagctcttcacaaatgtttataagaagggattcaacgtggagtcatttgggcccgacaggaaggagttgagagctactcttccgtaggttgggagaatggcagtcctcaatatgatatgatatccaggagaaataaacattgatgaagaaggcctcagacattgctggaattcttttgttggcaaatgaacctatgtagagatccgttgtcaggaggatctgcttagggcttgttcggttagccttcaatccatgtggattgagtgggattggatgggtttgaatcccacgcaagtcaaacttcttcataattttttccaaacccattcaatccatgtgtattgggaataagcgaacaaggccttatttgttttgcttcccttttccatttctacaattcagctttaactgctgctggttggcttcttattgaagctaatatcgtctgcaattgcttcggtccaaggaaatcgaagcaggagattataaatttgctcacgcctctcgtctatacctgccactcttagctttagttcggtaatggtacatgtaggactgcgtcgttacacttcgactggtcgattaattttatttaataaatgtggtgcatggatcggacagtgtgtaactcagaatatggtgcatgcaattgccgtgtttggtttctagaccct

SEQ ID NO: 132989 - DNA, 2899 bp, Zea Mays
ccaaggcaagccatcacgcggctcacgcacgccacgcatcccccaccaggccaccatgcgcctgcgagccacgccaagccgatctctcaagcgaaacggccctccagattacattcgacggcagaggcagacgcacgggagcagacagagaaaattttgaaacgcgggcaggccgccaccaccgcgccaaatcaagccctccagtcacattccattcgacggccggagcggcgcctcctacctccgacctccttctacaagtcagatccgtccacatatacaacactctcaggaattccctcctctaccaccgcaccgtccacgcgaactcaaatcctgcaaactcctcgcgaccacctcacgcggatcggcgacggcgatggtggcggcctcctctaccgtcgtcgaggtagcggtggcagcagctgcggcggcggcgtcagctttgccgcaggagcagcaggcgcagccgcggccgcggccgatgcacgcgggtggcgccaatggccgccaccacgcgtacagccgcaaggacaagtcgctcggcctcctctgctccaatttcgtggttctctacaaccgcgaggacgtggagtccgtcggcctggacgaagcggccaaacggctcggcgtggagaggcgccggatctacgacattgtcaatgtgcttgagagtgtcgggaagattctttcgaggaaagccaagaatcgctacacatggataggtttcggcggaatcccaatggcgttgctagaactcaaggaaagggcgttaagggacaagtctggtttggcttctcagcaaaccgagcagcaatctgctgccacaatttctgatgacgaggatgatgatacattgggcaaagaagttgctaatatcgagaatgagaaactgagtcagactgttaacaatccttctgacaaacctggtgcaccccgttgtcgccttagatctgatcataggaaagaaaagtcacttgggttgctcacacagaatttcgtgaagctctttctcaccatggagcaggttgacacgatctcacttgatgaagctgcaaagctgctccttggggaaggccacgaggagaccaatatgagaactaaagttcggaggttatatgacattgccaatgtcctgtcttcactgaatctaattgagaagatacagcaaggggactcaagaaagcctgcgtttcgttggttgggtagggccacaacgccggacacagaaaatggtgtcacagttgttgtacccccaccagggaagactaaatcgaacaaaagagcatttggaactgaactcactaacatcgacatgcatagaagtaatctagattcaaaagttcagaagaaagcaaaactggcaaagagtggtggcgatgtcttgataaattgcaaattggatagtggtggcgatgtcttgataaattgcaaattggatgtacggaatcggcttggacagggtaaacaaagtggcattgtttatggtcctttccaccctgctggcgcaaggaaacatgaacttgctggtggcaataaccccgggcaaagggagatggccgaggactggaagagcctttctgctccatttcgaccacagtacaagaaccaagcactcagtgatctttttgcccattatgttgatgcgtggaagacatggtattctgaatttgctcaaggcagcaacatcatgcaacaacactttggccattttggtaaccattttttgtaggcaaattatagggtcaagcattgcagttcttagtgcacgcttgtgtattttacctgtacaacctgttaaaaggggagagaacaagacatgattaggcctagggttcattgtatttactcaatgcaggacatctttaggctattttaggtggaaaactagagtggaactattagagagagatgttccccaatctctctaatagaaacatcattatcatctcacctttaagttctctattgttaattgttgtttatgtgcttacctttgtgggttctacaactgtctgtcactagccattcttatgaaacttctcataactaagtatatcttgcacttgtctatcgcaaccaaaaataaaataaaattctgttcaaattatatttcagatacaatcacaatgtcatcaattctttcctttccgctgtgatcataattcttgctacaattcagatgctacaaaatagggaaagcctcgaggcctggcctgtagatgtctgtactcagattatgcaaagccagctgatcccatcgtcttgctttaatttaaccgtaaagacaattatggtcgcgtaacgacaccaggactccaggagtacataggagtggtggtctcagcatggtgagccctactgttttggtcagtttcatttactcaaaaatcacatagttttttttttgcattgaattagtcaccatcatttgctttcaggtctacagtacaagcaagagtttcaggctgcaaaattgtgatcccaatattttggttgtatgggttgttgtcagtgtttggggaataccatatctccaaaggacatcaagacgtattcaaatatccctgtaactgtcatgcgctagatgccttgacccaccgagcgctatgcaaagcttgagaaggatggttcgtcgaaacatgtcccaagtgattgactcctcgccattgcttgggttgttctgaataaatatgtttagttggctacttgccttttggtttgtctagctaacacaatttaaatcaaatatttccccaacgtcatcgacaggaacactgtatctactgaccattcgtgattttttttcttggactatggagagcatctgagctacaaagctgttctcttggctacaacttgatatatcaaattgattttgtttgtcccttagtaaatt

SEQ ID NO: 132990 - DNA, 1353 bp, Zea Mays
atggtggcggcctcctctaccgtcgtcgaggtagcggtggcagcagctgcggcggcggcgtcagctttgccgcaggagcagcaggcgcagccgcggccgcggccgatgcacgcgggtggcgccaatggccgccaccacgcgtacagccgcaaggacaagtcgctcggcctcctctgctccaatttcgtggttctctacaaccgcgaggacgtggagtccgtcggcctggacgaagcggccaaacggctcggcgtggagaggcgccggatctacgacattgtcaatgtgcttgagagtgtcgggaagattctttcgaggaaagccaagaatcgctacacatggataggtttcggcggaatcccaatggcgttgctagaactcaaggaaagggcgttaagggacaagtctggtttggcttctcagcaaaccgagcagcaatctgctgccacaatttctgatgacgaggatgatgatacattgggcaaagaagttgctaatatcgagaatgagaaactgagtcagactgttaacaatccttctgacaaacctggtgcaccccgttgtcgccttagatctgatcataggaaagaaaagtcacttgggttgctcacacagaatttcgtgaagctctttctcaccatggagcaggttgacacgatctcacttgatgaagctgcaaagctgctccttggggaaggccacgaggagaccaatatgagaactaaagttcggaggttatatgacattgccaatgtcctgtcttcactgaatctaattgagaagatacagcaaggggactcaagaaagcctgcgtttcgttggttgggtagggccacaacgccggacacagaaaatggtgtcacagttgttgtacccccaccagggaagactaaatcgaacaaaagagcatttggaactgaactcactaacatcgacatgcatagaagtaatctagattcaaaagttcagaagaaagcaaaactggcaaagagtggtggcgatgtcttgataaattgcaaattggatagtggtggcgatgtcttgataaattgcaaattggatgtacggaatcggcttggacagggtaaacaaagtggcattgtttatggtcctttccaccctgctggcgcaaggaaacatgaacttgctggtggcaataaccccgggcaaagggagatggccgaggactggaagagcctttctgctccatttcgaccacagtacaagaaccaagcactcagtgatctttttgcccattatgttgatgcgtggaagacatggtattctgaatttgctcaaggcagcaacatcatgcaacaacactttggccattttggtaaccattttttgtag

SEQ ID NO: 132991 - DNA, 2543 bp, Zea Mays
caccagtggcctaagctaaggcagcttccatgacactccacgccgcggtgccccttcccaactctctcccacccggcccgggcgcaacacaataactagccgggcaccaacactcggaggcacagcccgtggctcccgcgccagccatgggcgccacaacgcggcgcgagccgctgaagcagcgcgtcaaccgctgcctcctcaagctttccgaccgcgacacagaggccatggcggccgccgagctggaagccatcgcgcgcgcgctcgagccggacgagctcccgaccttcgtatcggccgtttcggacgcgcgccccaccgacaagaccccactccgccgccacgcgctgcgcgccctggcactcgtcgcggcgtcccacccgcgcgacgtcgtggccccgcttatcccgcgcatcctcgccgccgcgctccgccgcgtccgggaccaggactcctccgtccgcgccgcgctcgtggacaccgcgcgcgccgcggcggcggcctcggcctcggcctccaccgcgctccggcctctcacggacgcgctcctccacgagcaggaccagtgcgcgcagctagcggccgcgctcgccacggccgcggctgtcgaggcgtccgccgtcaccgacgacctcgcttcctacctccacaagctccaaccgcgcctcctcaagttacttcgcagcaatgccttcaaggccaagcccgcgctcattaccctcatcggcgcctccgctaccgtgggcggcgatgccgaagtcactgcctccatcccgtgcctccgcgatgcagtcgctagcgatgactgggcagcgaggaaggccgcggcggaggcgcttgctgcattggccctagagcacacggatcttctcacgacctacaaatcctcttgcgttaccttcttcgaggccagaaggtttgacaaggtcaagattgtgcgagagtcgataaaccggatgattgaggcgtggaaggagatcccgggtgctgaagaggacgagtgctcctccgctccgccatcagcgtcccagtcacaacgaagatattctcttacaggaagtgcaagtgatgggcgatatccagctgcttcgctgggctcaaactcagttccatcagcaacaaggaggagcagattacctgtgagcagatcatctccacctgatgtgtcacccagtgtcaccaaaacatatagtccttcatccatcaggaacaagaagctgtcaccgccttcatatcggaaagcgcgccaagcaaataattgtaactacaaggttgagatagctgttgctccggatgctacaccaatcaaagtggtgacggaggagaagctgctggaaggaggcaatgtgagaggcagactggaggctaggagggcactcttccaaggcagccaggataggtcggccaagctggctggatacaaagcagggtcacgagttgttccatacgagggtggtggtaatttggaagagatttcagaagttgaaggtagatcggaaaggtatgcagttcagaaagacgagagcttgtcagaaataaggacgcagctccttcagattgaaaatcagcaaagcagtttactggatcttctccagaaatttatggggaagtccgagaacggtatgcgttctttggagacaagagtgcatgggctggagatggctttggatgagatctctcgtgatttggccttctcttcaggaaggatgtcaagcagagagcctgatgcaaagacgtgctgcattccgagcccaaaattctggagaaggcacaatggtggtaggtcttcctcaaggttttctgtctcagacgcagcaaacagctcagatgggagcagaacttcttacaagtgggagaggcagaggtttgggcttcagggtgggtttgtcacaaacccattagccgagccgaacatttcatctgcagggaaaacaatggttactcatgaaggcaggaagaaggataaaactttacaaaagtgaagggcgggttaggcatgatgaagacattctgttccaagcgtgaactgctcgagtttgcttattatcatggaggcggctgtagttctcttttccaccgcgacctcttttttttcctaaggaacgtacattgtcatttttggaagcttctgaaagcatggcgtgcgcgtgaactatggatgtatgagtcactccgaagctaaactgtttgagtactatgctaagctgaggagctgcattcacatcatgtggtggagcgcgagggaggcttctttatcggacagcctcacttgtcaccgacgcaatcaggcacccccccaagccgtggactacgctgggtttggctttggcatgagaacgaccgctgtgtttgtcataagtcatatcgtaactagagaaacaagtagctttataatcacaatgtatcaccatcctacagaactatggatgcgtcttgtacataggccggataaagcgcttctatgttcccgagcgtcttttctttaccatgattccaaagtgtgtttttttccccttagtattaagaagaaaaataaggag

SEQ ID NO: 132992 - DNA, 737 bp, Zea Mays
gttcgtgctgtgacttatggaccaatgtggggcaccgagtgatacattagcgcctacgtggcgcgtagcttggcgcaagaattattttaaacgactcatatgcatcattaaattaataaattaattgcatatagtatcgccaatttagcatatctcctgtttcaaaatttagcatatcaactttatttattggaaattgggaattgatgcacttttctgaattcagactgctactccaactgtttaataatcatttgagacaactggtccgtgtgcattatgcagtcgttgagttgtgactagttctgaacattgattgcaggatgtcaggaagagatatcagggatgtgtgccaacaagctgaaagacactgggcgtcaaagttaataagggggcaggttccaaaagatgagaagggggagccgagtcttcctccaattgacgaatacctttcctgtgctgaacagagacgtaagtccttgcctggtagaacgagccagacatccaggtcccctgcccttaagttagcatgaggaatgtacctaccagtttacctttacatgttcatatatcacatatagtattaccgaatgtagttcagatggaagtatgtaggcggttctaaacagtttttgttatgcgacatatgctaatacttaggaaatgtgacatctatgatctatccaaattttgacgtcagcacacctaaaatttttggagaggaaagcttaagtgac

SEQ ID NO: 132993 - DNA, 916 bp, Zea Mays
gacaaatagacctcgcgctgttctttttgagggcccacctgggacaggcaagacatcttcagctcgagttattgccaaacaagcaggaattccactactatatgtgccacttgaagttgttatgtcaaaatattatggcgaaagtgagcgtctattgggatctgttttttcacttgcaaatgatcttcctgaaggaggtattatattcctagatgaggtggattcttttgctattgctcgagacagtgaaattcatgaagctacacgaagaatcttgtcagtaattctgcgacagatcgatgggtttgagcaggatagacgggtggtagtcattgctgcaacaaatagaaaggaggaccttgatccagctctcatcagccgttttgattcaatcatctgttttggcttaccagatcagcaaactcgtgtggaaatagctgcacagtatgccaagcatttgactagatcagaattggttcaattttcattggccactcaagagatgtcaggaagagatatcagggatgtgtgccaacaagctgaaagacactgggcgtcaaagttaataagggggcaggttccaaaagatgagaagggggagccgagtcttcctccaattgacgaatacctttcctgtgctgaacagagacgtaagtccttgcctggtagaacgagccagacatccaggtcccctgcccttaagttagcatgaggaatgtacctaccagtttacctttacatgttcatatatcacatatagtattaccgaatgtagttcagatggaagtatgtaggcggttctaaacagtttttgttatgcgacatatgctaatacttaggaaatgtgacatctatgatctatccaaattttgacgtcagcacacctaaaatttttggagaggaaagcttaagtgac

SEQ ID NO: 132994 - DNA, 1848 bp, Zea Mays
gcgaccatttcggtagcgatagaactctattctctattcagagaagagtagtaggtgcaaaacagaagatcatggttctggctagctagcatctattgaacgatggaccgcttgttggacacggcgtatgcagtttttttttgaatcacacggcgtatgcagttagttgcagccttgcaggtccataccgggttcatatgcgtgcgcagcattgcttcctctgtataaaaagctaggcgcatggtcttcgccccaggagcaacagggagtttgcctcacctccattccaagcacatattcccggcccggcagctcaccaactaccttgcacttcaattcatcttatcgcggcacgcacagatatatatagattagtacctagctagatgctcatttagctgcagaggcgccatgattggggtgcgcattgtcagttataagtctctgatcatggtgctactgctggtgctcctcgtctgcgttgtctcgccggcgacggccgcggccggccgggcggaggaggcgcacctggtgcccgcgttgtacgtgttcggcgactccaccgtggacgtgggcaacaaccagtacctgccggggaactccgcgccgcagctcccctacggcatcgatttcccgcactctcggcccaccgggcgcttcagcaacggctacaacgtcgccgacttcgtcgcgaaactgttgggtttcaagaggagcccgccggcttacctgtccctgacgccaagaacgagccgtcagatcttgagaggcctccgcggcgtcaactacgcgtccggagggtccggcatcctcgacaccacggggaacacgatcacgttgacgaagcaaatcgagtacttcgcggccaccaagtccaagatggtggcgaacagcggcacgtcggccgtggacgagctgctgtccaggtccctcttcctcatcagcgacggcggcaacgacgtgttcgcgttcctgcggcggaacgggacggcgaccgaggcgccgtccctgtacgcggacatgctgtccagctacacgcggcacgtgcgggcgctccacggcctcggggcgcggcggttcgggatcgtggacgtgccgcccctcggctgcgtgccgtcggtgcgggccgcctcccccgacggcgcgtccaggtgcgtcgacggcgccaacgcgctggcgaggggcttcaacgacgcgctcagggcggcgctcgccaacctcacggcctcgggcgcgctcccgggggcgcgctactccgtcggcagctcctacagcgtggtgtcctacttcacggcgcacccgggagcggccgggttcagggatgtggccagcgcgtgctgcggcggggggcggctcaacgcgcaggccccgtgcgcgcccaacgccacctactgctccaaccgcggcgagtacctgttctgggacggggtgcacggcacgcaggccacgtccaagaagggcgccctggccatcttctccgcgccgccgcagatgggcttcgccgcgcccatcaacttcaagcagctggtgtcttcttgatgcttggaatccggagctttccaccggtgtgacacaaatcactacacctagcagcctagcactaccaaaacagcttttgattattacacaaatcagtagagaatacaaactaataaaccatgtaatgtagagccatagagggagggagcagcatgtacacagattgagtccagcgagacaaatttctcgccatgtacgctcgcgaataaactagcaggttgcactatttggacgctgtgctgactcaacgactcccgtccgctgcaattgcattgatttcaaagtggaaaaagttttcggcccattaac

SEQ ID NO: 132995 - DNA, 594 bp, Zea Mays
tgcctcgaccgcaagaaagcatcgcacggtctcttgcatcctttcctcgaggggatcgtcgtccttgttgcgtattgttggtgtttccggttcagcggatcgggaccatgcagcgcagcaactcgttcggcacgtcgtgggcggaccagtgggactacggcggcgacccgagcccccgcgcgcgcggccggcaggacggcggcgccggcggcaagaagcagcagggcggggtggagaagaccaaggcggccgcggccacggggctcaggaaggtcaaggagggcacggccaccgggttccagtggatcaaggacaagtgccagaagaagggcggcaagaagcagcagggcgcccatgacggctccgggatcgccggctactagttagctaggctcagcttccacgtacggaagctagcctactttggctgtaaattgtattttcagatttctcttcgtttgttcgtccggtccatgtgtgtatactgttggatgtagtgtcgcctccttcgtgtaggttaatgtttggatttctgctattgatgatgggttattgtttccaaatctcgtgcttttgctttgccgcacaagtttc

SEQ ID NO: 132996 - DNA, 1227 bp, Zea Mays
gccggccggctgaccacgctgcccgtgagctatcgggtagcgagccttaaagcttacgtgacagctcggtttgctgtgtgttctctgcgcggtcggcccggcgaacttcctctggttcctgatgatggatgtatcgcaagttgccgcagccgtggcgctgatggcgttcgcggtcgcgtttccggcgtcggccttcccgtccggcttcccgcctgggacgccaccagcgttcccgaatccgtgggcggcgttccagaacctgtctggctgtcacatgggggaggagcggcagggcttggccgggctcaaggactacctcagccacttcggctacctcccgccgccgccgccgtcgtcccccttcagcgacgcgttcgaccagaacctggaggcggccatcgcgacgtaccagcgcaacttcgggctcaacgccaccggcgcgctggacccgtccaccgtctcgcagatggtcgcgcctcgctgcggcgtggccgacgtcatcaacggtccaccatggcgaggagctcctccgccgacgcccacggcaggcacctgtacgcctacttccccggggggccgacgtggccgccgttcaggcgggacctcaagtacgcgatcaccgcgacctcggcggccgcgtccatcgaccggtccacgttgagcgacgtcttcgcgcgcgccttctcccggtgggccgccgccaccaacctgcggttcgcggagaccgcgtcggagtccgacgccgacatcaccatcggcttctactcgggctcgcacggcgacggcgagccgttcgacgggcccctgggcaccctcgcgcacgccttctcgcccacggacggccggttccacctggacgccgcggaggcgtgggtggccggcagcgacgtgtcacgctcgtcggcgaccggggcggtggacctagagtccgtggcggtgcacgagatcggccacctactggggctcggccactcctcggtgccggacgccatcatgtacccgacgatccggacggggacgaggaaggtggagctggaggccgacgacgtccaggggatacagagcctgtacgggagcaaccccaatttcaagggcgcgaccccgacttcgccggcgacgagcagccgcgagatggacagtagcgccggcgccggatgccgaccagatagagtcttcgtcggagtagttgcggttgcggcagttggcctgctcctcctagtcctctag

SEQ ID NO: 132997 - DNA, 1228 bp, Zea Mays
cacgccgagccgagcggagcagcaaccgccggttcgcaccaaacctacgcgcaggcaggctgcaggggtagaaagagaaagagcagtgggtgtgggttggctttggcttggctggtcgcagtcgcagcatatataccacctcggcattagagcggagcggttgctctctccacctcctctctctctttctctttcggtatcgcagtcgtcgtcgccgctccccggccgggctcgctcgcgtgcgcgacccacccagccagcacaccagccagtcggcgcagcaaagcatggggaactgccaggcggcggaggtggcgacggtgctgctccagcacccgggcgggcgggtggagcggctctactggtccaccagcgccgccgaggtcatgcgcgccaacccgggccactacgtcgcgctcgtcacgctccgcgtcgccgaggaccggcaggacgccccgggcgggcagcggcgcaccgtgcgcctcacgcgcgtcaagctgctcaagcccaaggagacgctgctcctcggtcacgtgtaccgcctcatcaccacccaggaggtgacgaaggcggtgcaggcgaggaagcaggacaagcagaggaaagcgcagcagcagctgctggagccgaggcagggccagggcgtggcgagtggcgccgcggccgaggaggaggacgacgacgacgaggcagccttggacgccagccttgatcagttggcgcggcaggacaacggcagccggagctccagtgcgcggcaccggcaatggcggccgtcgctgcagagcatcgacgaggccacgacctgagatgtcagctccatacagccgtagcgccgtaatcattgactaccggtgggcctgtactttcggcgatcacctggcctcggtcagttcatcgcaagggttgctatttggcctactgctacgattgcacactgtggagtggagtgagttgggagcttgacaccccgggatgagagggcactgcttcggatgcagcatgtagcctcggatccgtgtaaattttcaggtcttggtcaggagtttgttagtgagactgctttgcttcttcttcttcttattttctctcgatccatacggtttgcacatggaattatatcagtaacaaattagagtagcttactattagatttacagccagacatgtcatgtacttgctgctactctcttgcagatgggaatcgagcgtgtagccttttgagagt

SEQ ID NO: 132998 - DNA, 928 bp, Zea Mays
atataattgtgaatttgaggctctgagcatgtgctagaatgggcatccataatagtaaatataagaaacagtttttagtactaatttattcagtattatccaaagaagaatttagtggaactgttttgagtgtgttgtatagttatgctatttctctcatctatttgcggctcactacaacgatgtttacagtacttcattgctgaacttggttttcaatggaaattgcctagcatctgcattgtaatttttcatgctccggtcatctcagattgtgaatacttatgttttctgtaataatcatgggtcattttgactacccagggaaattcggagctgtgttcgcctcaattcctgcacccatctttgcagctatgtattgtatcttctttgcttatgccggttctgctgggatcggcttccttcagttctgtaacctcaacacctttaggaccaagttcatccttgggttctcagttttcatgggcctttctgttcctcaatacttcaatgagtacacatctattgctggttatggtcctgttcacacacattcaagatggttcaacgatatagtgaatgtgatattctcgtccaaggcgtttgttgctggcttcgtggcatatttgctggacaacactattgacaggcatgaagcttcagtcaggagagaccgaggctaccattggtgggacaaattccggtcgtacaggaccgatacaagaagcgaggagttctattccctgccattcaatctgaataagttcttcccatcggtctgagcttttgctgtggttaatgtgagatgctcttgttactctggaactgcccaccccctgttctccggcggtggcaccgtgatctggattttctcggtacatgaaaaaattactgtatattaaaacccgctcagctcgggtttcacctc

SEQ ID NO: 132999 - DNA, 1185 bp, Zea Mays
ggtcgccaaatgtgttgagattggtctacctcaactcatccttcttgtgatctttacaatgtacctgccacatgctgttcacatgctgaagtctatcttcgatcgatttgctgtcctgttcactatccccatagtgtggctctatgcatatcttctcactgttggaggagcatacaggaatgcaccaccaaagactcaatttcattgccgcactgaccgttctggattaattggtggcgcaccctggataagagtaccatatccttttcagtggggtgctccaacttttgatgcgggtgaagctttcgcgatgatggcagcatcatttgttgctctcgtggagtccactggggccttcattgctgtctctaggtatgctagtgctacaccaatcccaccctctgttcttagccgtggtattggctggcagggcatcggtattcttctggatgggctatttgggactggaaatgggtcttctgtatcagttgaaaatgctggtttgctagctttgacacgcgttggtagccgaagggtagtgcagatatcagctggtttcatgatattcttttctattctcgggaaattcggagctgtgttcgcctcaattcctgcacccatctttgcagctatgtattgtatcttctttgcttatgccggttctgctgggatcggcttccttcagttctgtaacctcaacacctttaggaccaagttcatccttgggttctcagttttcatgggcctttctgttcctcaatacttcaatgagtacacatctattgctggttatggtcctgttcacacacattcaagatggttcaacgatatagtgaatgtgatattctcgtccaaggcgtttgttgctggcttcgtggcatatttgctggacaacactattgacaggcatgaagcttcagtcaggagagaccgaggctaccattggtgggacaaattccggtcgtacaggaccgatacaagaagcgaggagttctattccctgccattcaatctgaataagttcttcccatcggtctgagcttttgctgtggttaatgtgagatgctcttgttactctggaactgcccaccccctgttctccggcggtggcaccgtgatctggattttctcggtacatgaaaaaattactgtatattaaaacccgctcagctcgggtttcacctc

SEQ ID NO: 133000 - DNA, 1047 bp, Zea Mays
ctggcgagcgcgtcgcagcgaagggcgtcgctgctgctgcaatacgtcgcacgccgagggcgctacacagggaggatccatggctgcttcacgctgtggcattctgtcgagcaggcgagagcgctgggaaaaaaaatggagctcgctacacatgaccatggagacaaggcgaaaggcctgctacagaagaggagctcggtcggcgatgggagcgaccatggccggacctgggcgaggcccttggcagcagaggaagccacagagggaatggcgagctgcacacacaaaaaagggggaggccgacctggggaggatggcggccaggtggggctgctcgaggaactccacggccaggcggggatggccggatttggagcgaaggagctctgggcgagcaggggttgggcgaattggatctggcctggagctggactgcgtggatgagagctttctacgcctgcgcctggggaagggaacgcacgtgggggagctcgcggcttgcgcgccatgggagagggaaaggatccctgctactggcgaggtgcaccagggaggcggccttcggagctccggctggagatttggggcaccatggatgggagtagagaggtgtgctcgagctctgcattttctggacagaggggacatggctcccatacgccagcacttggggaagatggctgccggcaagcttacagacgaaaaccaggggggctcgaaagagaggaaggcagggaagcctgttggagagccgacgccggagggagctgtagaggcgagcgacggctccctggaagcttctgcgtgctgggtggagagggcgccagggaggtagccatgggagctcccttgctcctgcgcgaatcagagaggaggaaaacgccaggaaggaagaacgccggctggggaagaagacagggggaggagcggctgctcggttgatttaacgaggtatcgctggaattccattggctgggattgggcggcaattcccactggccggctgcagccattggcgcagagagcacagggccgagcgctaggacc

SEQ ID NO: 133001 - DNA, 784 bp, Zea Mays
ggggggttgtaatttgtctggtcatttcttttaattgtagtagaagtttcttaagttaattttttagatagtgcgaacaatggatcttggccaaaacatccccatacttcttctgggcttcaaatggccatcttactttagttattacagtgttctgttctccttatgcaggagcctgttagtatgtaggtgttctgtattagcttattgccattctatcaacatgagaaatgtctttcatgccatttttgtcttctccgccaattcacttgtcacaccacatggatgatatgtaggcaagcagagattgaagctgagaaaattggtgttggtgtcaccccagaagctcaaaatatattcgatgcgctgtccaagacgcttccggtgcagtgggacaagactgacattgttgtaatgaaggaggttcgtgtacgcagcccgtacctgcctgaaaatgttagtggaggaacagctgcagcaaacgaacgcgttaagaaagtgattgactttgaaaggaaaagattacattcacgtgcacctggccaattctcttaacctaaaagtattgatttttttttacattagcatgtgtttctgatactgcggcccgttttattattctcatcggtggggttttccataaaatatttcagcaaaaatgtggtaataatcacatcaactagcttgtttatgaactgtttgatagatgacttgttgtaattgaattgattataagccctctgtatttaggactgttagattgataataatctcctcttttttg

SEQ ID NO: 133002 - DNA, 952 bp, Zea Mays
atcttgtctcgtgacgatcagccccgggccgtaagcccaccggatcaacagcaggccgcagattcccctgtttccagaactccgtcgaatcctccccctcctccacgcagacgcagctccctctcctctcagcccccacccatcgagccgctagcgccggcgcccggcggcggtatggaggctggtggcgaggagttcgcgatcggcgtggtgctctccgcgaagaccaccctgggggaggagttcgagggccagatcgtcgccttcgatcgaccctccaacctcctcgttatccaggagggcgtggggagggcggagagcggagagcggcggaacgtgagggtgctgaaggcgaactacatccgggagttctctgtgctcagcaagggagacgaccctctcgatcctgccggttgcatgctggaccttaactccatttatgcccgggaggatgctgcactcaggcaagcagagattgaagctgagaaaattggtgttggtgtcaccccagaagctcaaaatatattcgatgcgctgtccaagacgcttccggtgcagtgggacaagactgacattgttgtaatgaaggaggttcgtgtacgcagcccgtacctgcctgaaaatgttagtggaggaacagctgcagcaaacgaacgcgttaagaaagtgattgactttgaaaggaaaagattacattcacgtgcacctggccaattctcttaacctaaaagtattgatttttttttacattagcatgtgtttctgatactgcggcccgttttattattctcatcggtggggttttccataaaatatttcagcaaaaatgtggtaataatcacatcaactagcttgtttatgaactgtttgatagatgacttgttgtaattgaattgattataagccctctgtatttaggactgttagattgataataatctcctcttttttg

SEQ ID NO: 133003 - DNA, 1697 bp, Zea Mays
atggcgtccagcgcctctcggttcatcaagtgcgtcacggtcggcgacggtgccgtgggcaagacatgtatgctcatctgctacaccagcaacaagttccccactgactacatacctacggtgttcgacaatttcagtgcaaatgtagttgtggatggcaccactgtgaatttgggcctttgggataccgctgggcaggaagattacaaccgcctgaggcctctaagctaccgaggtgcagatgttttcgtgcttgcattctcacttgtgagccgagctagctatgagaatatcatgaagaagtggataccagagcttcaacattatgcacctggggtgcccgttgttttggcaggcacaaaattggatcttcgtgaagacaagcactacttgatggaccatcctggattggtgcctgttaccactgcacagaattttggtgaccctgctatttgcaccttccagggggaggaacttcgtagacaaattggtgctatgtattacattgaatgcagctcaaagacacagcagaatgtcaaagctgtgttcgatgctgccatcaaggtagtaatccagcctccaactaaaataagagaaaagaagaagaaaaaatcacgcaaaggatgttctatgatgcaaacatgcgtacgtgactggcgacgaatcactcctcgacttcctccatccccaagaaagaactcggccagaccgaagaaggctgacgaatcacttcttccggtgtttccctgggtactggctgccattaatctacgagatgagagtaaaatagtatccgtagtctccccatcgcacaagtccaatcacccacttccagaattgcaatcaagtccagaactccaacttgagagcatccaattccaatcgcttaaacacacaacggctgtcctagtcgtcatcatcagccccgggtgtggcgctggtcggctggtgaactgggccatcttgtctcgtgacgatcagccccgggccgtaagcccaccggatcaacagcaggccgcagattcccctgtttccagaactccgtcgaatcctccccctcctccacgcagacgcagctccctctcctctcagcccccacccatcgagccgctagcgccggcgcccggcggcggtatggaggctggtggcgaggagttcgcgatcggcgtggtgctctccgcgaagaccaccctgggggaggagttcgagggccagatcgtcgccttcgatcgaccctccaacctcctcgttatccatatccttcccaaatcgctcatgctcgtcacccgtatctccatgtcctttacatattggtctcgctgttcgtatgcccctgttgttgttctgtttccttgacgggtagatcacaggagggcgtggggagggcggagagcggagagcggcggaacgtgagggtgctgaaggcgaactacatccgggagttctctgtgctcagcaagggagacgaccctctcgatcctgccggttgcatgctggaccttaactccatttatgcccgggaggatgctgcactcaggtgggtgaatcactgtgatttaaacgtaatatatgtcgatttgggttgctcctgtgtagggtgttgtcatgagtgaatcacacatctcggggaaacaagtactaattgacatttatttaattccaacacgagcttgctagtgtaaatgtgaactcatgcc

SEQ ID NO: 133004 - DNA, 695 bp, Zea Mays
cattcagttgcatcctggacaattggcttactttggaatatttcattaacatgtagaatgtcaaagctgtgttcgatgctgccatcaaggtagtaatccagcctccaactaaaataagagaaaagaagaagaaaaaatcacgcaaaggatgttctatgatgaacatcttcggtggaagaaaaatgctatgcttcaagtcctgaatggttcaagggggtcttacatggactgataccacgagtgttaccccaagttcgcgaagcttgaaatcttgatgtgcttgttgcgcatgtgtatatttgcacctttggttattaatgactagaggtaggtaattgaaactagtctgcttaagcgttctgcactgctggtgtggttagctctatgagttaggcagttcgacagaggccaaaccgacagtgagattttgctctttcatggcaatgtcacagctttttcgtgaatctgagctcatcatactgtctgttagtttatcccccacgattccatgttagaatcgatccatagcaacattgtgttgaatggaccttttgcatttgctcttgagcctgagcatataattattccagtttttgtgtactttcaagctgattgttgacgcgttctgtgttgtattatggctagtacgcttctccactttggagacgtcttttttttgtgaaaacaacttatct

SEQ ID NO: 133005 - DNA, 1543 bp, Zea Mays
ctccgttttgcctctcaggggcccatcctagatagaggaggggttccttgaccgtaccaatagcttgaagaaaccatgcctatacaaaacaccaacaggagaactggggcctggggtgaggagggcgcttctctaggcacggcagtgccagtgtgccactggtgaggtgagacttgggagttgagaggcatgtgaccctcttcactcgcttgaccctcctcttcactcgcttctcccagaagtcacgcaccaaacaccaccaccaaagaaggcgagaacgtactccgtccctcccctcccctcccctccccttcccctcgaggctccaggaccgtctcctcgcctgctcatccgccgctgcttcccttctctgggctcggagaaccggagagaagcgcgcgcggccatggcgtccagcgcctctcggttcatcaagtgcgtcacggtcggcgacggtgccgtgggcaagacatgtatgctcatctgctacaccagcaacaagttccccactgactacatacctacggtgttcgacaatttcagtgcaaatgtagttgtggatggcaccactgtgaatttgggcctttgggataccgctgggcaggaagattacaaccgcctgaggcctctaagctaccgaggtgcagatgttttcgtgcttgcattctcacttgtgagccgagctagctatgagaatatcatgaagaagtggataccagagcttcaacattatgcacctggggtgcccgttgttttggcaggcacaaaattggatcttcgtgaagacaagcactacttgatggaccatcctggattggtgcctgttaccactgcacagggggaggaacttcgtagacaaattggtgctatgtattacattgaatgcagctcaaagacacagcagaatgtcaaagctgtgttcgatgctgccatcaaggtagtaatccagcctccaactaaaataagagaaaagaagaagaaaaaatcacgcaaaggatgttctatgatgaacatcttcggtggaagaaaaatgctatgcttcaagtcctgaatggttcaagggggtcttacatggactgataccacgagtgttaccccaagttcgcgaagcttgaaatcttgatgtgcttgttgcgcatgtgtatatttgcacctttggttattaatgactagaggtaggtaattgaaactagtctgcttaagcgttctgcactgctggtgtggttagctctatgagttaggcagttcgacagaggccaaaccgacagtgagattttgctctttcatggcaatgtcacagctttttcgtgaatctgagctcatcatactgtctgttagtttatcccccacgattccatgttagaatcgatccatagcaacattgtgttgaatggaccttttgcatttgctcttgagcctgagcatataattattccagtttttgtgtactttcaagctgattgttgacgcgttctgtgttgtattatggctagtacgcttctccactttggagacgtcttttttttgtgaaaacaacttatct

SEQ ID NO: 133006 - DNA, 1734 bp, Zea Mays
atggacgatccctcctccgcctccaacaagcacaagcgcaagcgggggcgcaagcccaaggcgtcgccgcccttccccgaccgctcctccccctctccctcggccgcccccgctccggctgggcgtcgtggccgcaagccgcgacgtcacgaggcccccgccgacgcggacgccacgcgtccgccgtccccgccccgccgcggggagccgaagccggtggcaaacggaggcgatgtggtggcagtggcggagtcaggccccgcgagctgggatgaggtggtgagggtagtgccgtgcatggacgctgtggtcaaggtgttctgcgtgcacacggagcccaacttctcgctgccgtggcagcggaagcggcagtacagctccagcagcagcggatttatcatcggcggccgccgtgtcctcaccaatgctcactccgtggagcactatacccaggttaagcttaagaagcgcggctccgacaccaagtaccttgccaccgtcctggccatcggcacagagtgcgacattgcgctcttaactgtcaatgacgatgaattctgggaaggagtttcacctgttgagtttggaacattaccagcccttcaggatgcagttactgttgttggttatccaattggaggagataccatatccgtgacaagtggagtggtctctaggatagaaatactttcatacgttcatggttctacagaacttctaggattgcagatagatgcagctattaattcaggaaattcaggtggcccagcttttaatgataggggaaaatgtgtcggtatagcttttcagtctcttaaacatgaagatgcggagaacataggttatgtgataccgactccagttattacacatttcattgaggactacaaaaaatctggagaatacacaggctttcctatacttggagttgaatggcagaaaatggagaatccagatctccgcaaagcaatgggaatgaaaccagatcaaaagggtgttcgtgttagaagggtggagcccactgctccagaatctggatgcctacgaccatctgatattattcttagtttcgacggtgttgacattgctaatgatggaacagttcctttcaggcatggtgagcgcattggcttcagttatctggtttctcagaaatatactggagagaaagctcttgttaaagttctgcgtgattcaaaagttcatgaatttaaaataaggttagcaactcacaagcggcttgttgcggctcatgtgaagggcaggccaccgtcatattacatagttgctggctttgtttttgcagctatctctgttccatatcttcgatccgagtatggaaaagattatgaatatgatgcacctgtcaagttgttggtgaaacatttacatgcgatggcggaatcacctgatgaacagctagtggtggtatcacaggtgcttgtatcagatatcaatataggttatgaagaaatagtcaatactcaggtacttgctttcaatggccagcctgttaaaaatttaaagaacttggcgaccatggtggaaaattgcaaggatgaatttttgaagtttgatctggagtatgaccagctaataaaagcatttctcatggacacaaatatctggagtttgattgttgtcctcgagacgaaaactgcaaaggctgctacccaggacattctgacgacgcactgtataccttctgcaacgtcggatgaccttaaggcctag

SEQ ID NO: 133007 - DNA, 543 bp, Zea Mays
agagtcggcagggttgctccaggaggagatgaggttgatctcgtgctcctgggcctcctggaacacccacttgtggctgtggtcggctgccactttccctatcaacccttcaccgtagttgtagatgtcgtgggacatcttgaagaagagctcaggctgcaggcccttggcggcctcctgcccggcagcagcacactccgccgtgtaggaggaggaggcggcggcggcggcaggagcagctgcgccctcgtggtcacaggcagaggctgcgaagttgcagaatccatcctcccatgccaggatcctgttcctcctgttccctcttgtccggtcgtatatgccgccctggagatcccattttgggggcgggtagtttctggggaggatccgccagaagacggcgtacacccactgcgcgtcgtcgtggccgcagaggctgcgcagcgtgtgctggagcaggtgcgtcacggccagcgggctgagctgctcctccattgcagacagcagaaacgaagaagctgcttgaggaggcctcgaaccagc

SEQ ID NO: 133008 - DNA, 1195 bp, Zea Mays
acattgatgaaaggatgttttttcgggccggcagcaccttccatcagcttgctttgctagaggctctttgtgcatgctgaactgctgctgatcccatgtccgctgctgctgggtctcccatgagcagtgaacgcagacgaatgcctgatgacaaggatgcaggagatgtccctggactaccacttcgcagtggagcaggaagtcggctcctccacctacgccttcttcggcttcaacggaaccgctggcgtgtggcgcatatccgctttgaacgaggccggagggtggaaggacaggaccacggtggaggacatggatctggcagtccgagcaagcctcaaagggtggaagtttgtatacatcggtgacctcatggtgaaaagcgagctcccgagcacactcaaagcgtacaggtaccagcagcacagatggtcgtgtgggccggcaaacttgttcaggaaaacgctggtggagatcgtcagaaacaagaaggtgacgctctggaagaaaatccacgtcatctacaacttcttcctcgtgcgcaagatcgtagcgcacgccgtgacgttcgtgttttactgcatcgtgatccccacgacggtcctggttcctgaggttcaagtgccaaagtggggttccgtctatatcccaaccgtaataacccttctcagtgctgttgccactccaaggtcagctcacttagttgtcttctggaccctcttcgagaatgtgatgtcgctgcatagaaccaaggccactttcatcggcctactggaggcaggcagggtgaacgagtgggtggtgacagaaaaactcggtgatgctctcaggaccaaagtgccaggcaagaaaccccgcatgaggataggagacaggttgcacgttctggagctcggtgtcgcagcttacctcctcttctgtggatgctatgacattgcgttcgggaacaaccgctactacatattcttgttcctccaatccatcgctttcttcatcgtcggcattggctatgtcggaacattcgtccctcactagctagctcgtagcagaatcattctgagaggctacccatcctgatgatgcatggttgtcttcaaccccttccggtttcatttcatggaaatcagttggtagataagatcgagcaaaccttctcttgtatgtaatgttgtcatgggaaaaaaaagaaaataca

SEQ ID NO: 133009 - DNA, 2917 bp, Zea Mays
atggcgtcgtctttggcagacttcgcgcaggtgttggaggcgtcgcgacttcacgagcatggtgtcacctccggcgggcttcgctcaggtgctgggggcatcgcgacttcgcgagcaaggcataatctccggcgggcgtcatgtgtgggcgggcaggcaaaggcaacacgagggcgtcgccaatccggctcgatccgccggtttaagtctggcgaaatcatgatcagggttccgatggagacctcggaggcggcggccgcgcatccgcagaaggacagtgtgaaggtggccgtcaacataaggccgctcatcacggtggagctgcaggatggctgcacggattgcgtcaccgtcacgccgggcgaacctcaggttcaaattgggccccacgtattcacctttgatcacgtctatggcagctcgggcccttcatcatcattaatatttgagcaatgcgtgcaccccttgatcgatgcattgttcagcggatacaatgccactgttctagcatatggccagaccggttctggcaagacatacacaatgggtactgactatagtggtgaagggaactgcggagggataattcctcaagttatggatacaatatttagaaaagttgacacctcaaaggatggctcagagtttttaattagagtatcttttattgagatattcaaggaagatgtttttgatttgctcgatgcaaatcaagctgctgtaagacttgatgcaggttctatggcaaaagcatcagcacctggcagagtgccgattcaaatccgagagactgcaactggaggcataacccttgctggtgtcacagaggctgaggtgaagtcaaaagaagaaatggcatcatatttgacacgtgggtcgtcgtcgcgtgcaacagcaagcacaaacatgaataggcagtcgagtcgctctcatgccatctttacaatatgcgttgaacaaaagagaacatctggtacatccgacaagtcagccaacggtgactatgatatactatcgtcaaagtttcatctagttgatcttgctggttctgaaagggctaaacgtactggagccgatggacataggcttaaagaagggatacacataaataaaggccttctagctcttggcttttttaagtgcattagcatgcatagccctgctgatataaaagcagaagaaaccataaacacactcaaaaatgccaatcgcgcacgcaacattcaaaacaaagcagtggtaatccgtgatccagctacagcagagatgcaaaaattgaggagccagctggagcagctgcaaactgaacttttgttttcccgcagtgggagtgcagcgttagaagaacttcagttgctgcagaaaaaagtctctcttcttgagctgaagaattctgagcttaacaatgaacttaaggagaaggaattgtcatatgagcagttggcagagcgggcacgcgctgctcagttggaaagggatcagttgatgctgaagattgaatctgtgaggaatggaaaatcattggatgatattgaaaatattgataacgaccaagacatggaccttttgaagggctacatatcaaaaatacagcagttggagagtgaactgatgcgtcaaaacttctccaatgcttgcagacatggcttacatgaccagcttgccatggaccaggacatttttctaaatgaattgggttctggatgtgaagagctggttcgtgctgagtgctggcggtgggcgagcaagggcgtgaacgtcaagtacgaggtccgcgacagccggcgagggtacaaggccggcgcgctccgggaaggcatgaagcgcgcctacgcccgcggctgcgacctggtggccatcttcgacgccgacttccagccggagccggacttcctgtggcgcgccgtgccgttccttctccacaacccggacctcgcgctcgtccaggcgcgctggaagttcgtgaacgcagacgaatgcctgatgacaaggatgcaggagatgtccctggactaccacttcgcagtggagcaggaagtcggctcctccacctacgccttcttcggcttcaacggaaccgctggcgtgtggcgcatatccgctttgaacgaggccggagggtggaaggacaggaccacggtggaggacatggatctggcagtccgagcaagcctcaaagggtggaagtttgtatacatcggtgacctcatgaaggtgacgctctggaagaaaatccacgtcatctacaacttcttcctcgtgcgcaagatcgtagcgcacgccgtgacgttcgtgttttactgcatcgtgatccccacgacggtcctggttcctgaggttcaagtgccaaagtggggttccgtctatatcccaaccgtaataacccttctcagtgctgttgccactccaaggtcagctcacttagttgtcttctggaccctcttcgagaatgtgatgtcgctgcatagaaccaaggccactttcatcggcctactggaggcaggcagggtgaacgagtgggtggtgacagaaaaactcggtgatgctctcaggaccaaagtgccaggcaagaaaccccgcatgaggataggagacaggttgcacgttctggagctcggtgtcgcagcttacctcctcttctgtggatgctatgacattgcgttcgggaacaaccgctactacatattcttgttcctccaatccatcgctttcttcatcgtcggcattggctatgtcggaacattcgtccctcactagctagctcgtagcagaatcattctgagaggctacccatcctgatgatgcatggttgtcttcaaccccttccggtttcatttcatggaaatcagttggtagataagatcgagcaaaccttctcttgtatgtaatgttgtcatgggaaaaaaaagaaaataca

SEQ ID NO: 133010 - DNA, 198 bp, Zea Mays
atggccgcgctcgccaccgtcgtgcagcggctcttcgaggcgtgccgcgaggtcttcaccggagctggtccaggcgcggttccaccgccggccgacgtcgagaggatcaagtccgttctagtacatagatctttgcttcagtacatatctctcacttcctatccaagtgcttgctcccagttctatagcactctgtag

SEQ ID NO: 133011 - DNA, 4261 bp, Zea Mays
cccaaaccacgtgcagctcgccgttgtatgtcgcagagcgtggctaatccggctcgatccgccggtttgagggttccgatggagaccacagaggcggcggccgcgcatccgcagaaggacagtgtgaaggtggccgttaacataaggccgctcatcacggtggagctgcaggatggctgcacggattgcgtcacagtcacgcaaggcgaacctcaggttcaaattgggccccatgtcttcacttttgatcacgtctatggcagctcgggcccttcatcatcattaatatttgagcaatgcgtgcaccccttgatcgatgcattgttcagcggatacaatgccactgttctagcatatggccagaccggttctggcaagacatacacaatgggtactaactatagcggtgaagagaactgcggtgggataattcctcaagttatggatacaatatttagaaaagttgacacctcaaaggatggctcagagtttttaattagagtatcttttattgagatattcaaggaagatgtttttgatttgctcgatgcaaatcaagctgctgtaagacttgatgcaggttctatggcaaaagcatcagcccctggcagagtgccaattcaaatccgagagactgcaactggaggcataatccttgctggtgtcacagaggctgaggtgaagtcaaaagaagaaatggcatcatatttgacacgtgggtcgtcgtcgcgtgcaacagcaagcacaaacatgaatatgcagtcgagtcgctctcatgccatctttacaatatgtgttgaacaaaagagaacatctggtacatccgacaagtcagccagcagtgactatgatatactatcatcaaagtttcacctagttgatcttgctggttctgaaagggctaaacgtactggagcagatggacataggcttaaagaagggatacacataaataaaggccttctagctcttggcaatgttataagtgcattaggtgacgaaaagaaaaggaaagaaggggcatttgtaccataccgggatagcaaattaacccgtcttctacaggattctctaggaggaaacagcaaaacagttatgattgcatgcattagccctgctgatataaatgcagaagaaaccataaacacactcaaatatgccaatcgcgcacgcaacattcaaaacaaagcagtggtaaaccgtgatccagctacagcagagatgcaaaaattgaggagccagctggagcagctgcaaactgaacttttgttttctcgcagtgggagtgcagcgttagaagaacttcagttgctgcagaaaaaggtctctcttcttgagctaaagacttctgagcttaacaatgaacttaaggagaaggaattgtcatgtgagcagttggcagagcgggcacaggctgctcagttggaaagggatcagttgatgctgaagattgaatccgtgaggaatggaaaatcgttggatgatattgaaaatattgataacgaccaagacatggaccttttgaagggctacatatcaaaaatacagcagttggagagtgcgctgatgcgtcaaaacttctccaatgcttgcagacatggcttacatgaccagcttgccatggaccaggacatttttctaaatgaattgggttctggatgtgaagtagaaacaactgatgcttcaaatgaagttgatgaagaagaaaaggagagggaacattcattcatgcaagaccaacttgataaagagctgcaggaactagataaacgacttcagcaaaaggaggcagagatgaaacaatttgccaagagtgatacttctgttctcaagcaacattatgaaaagaagttaactgacttggagcaagaaaagaaagctcttcagaaagaaatagagaatcttcgccatgcattaaccaacatatcttcttctatggatgataatgctcaaaaagttaaagaaaactatcttcagaagctgaatgcacttgagtcccaggtccatgagctcaagaaaaagcaggaagctcaacaacagcttctaaggcagaaacagaggagtgatgaggcagcaaagcgcttacaagaagatattcagcgtataaaatctcagaaggttcaacttcaacaaaagatcaagcaagagtctgaacagtttaggtcttggaaggctgcccgtgaaaaggaagtacttcagctcaagaaggaagggagacgaaatgaatatgagatgcacaagctcttggccttaaatcagaggcagaagatggtcttacagaggaaaactgaggaagcagctgctgctacaaaaagattgaaggagttgctggaagcaaagaagtcatcacgtgaaacatatggcagtgcaaatggttcggggatgcaggccttaatacgagctattgacgatgaactagaagtcactgtaagagcacacgaattacgctcatattacgagcgacaaatgcaagagagagcagcaatatccaaggaaatagcaaaactaaaggaggaatcaaagcacaagatcagtgattgtcctcaagctatgtcacctagtgctagaagttctaggatatcagcattagagaatatgttgtcctcctcatctagtgctatggtatctatggcttctcaactgtcagaagcagaggagcgggagcgtgtattcaatggtaaaggtagatggtaccatgtcaggtccctcccagaggcaaagaatataatgaattaccttttccagttagcatcatctgcaaggtctcaagtactggataaagaagtaatttgtaatgaaaaagaacacaccattactgaattgaaggaaaaggtggttgtgcttaatggtggaattaggcagttggaaacacaagtgagggatctaaggagccaaaatacacagcttttcactgcattgaacaatgcaaagaaatctgctaggtcgaatggcactggatttgctgggcgtaagatgtctgactatccctcatacatgcagagtgttcgatcttcccagcattttggttatagtaaggacaacttcaattgggtggatgatatggacatttcagacagtgagcactcggatgagttagagaatatgagtgatggatccgattcagactgggtacagtcgacgaggaaagccaaaaaacaccagagaagagtgtctagccattcaaatcctaacctggattgtcaaaatacacaaggcagtgcagaaccagagaagccctcagatgaaaagtgcattttgcccaaatacatttcatcagacggctgttcatgctcaaaatcctcctcatgcaagaccaacaaatgcgagtgcagagggtcaggtgcacaatgcggtgcaggctgtggttgtaaggattccaaatgttctaacagggattcttctactatagaaaaagccaatcagggagccatgcttcttcagaccgcgttttctgagaaggaagcccaagatgcaaagccaagaaagcctttgactaacattggtaataatgtggttaaccaaactgccgagacaaagaagcccaggaaaaaccggcgcaagtcggcaattcaactcgtcccaggacctctcctgccgtccgagccagtggccaccgaagctgcccctcgggacattgccaacattcccctcaagctaccgagagccatgtcctcggtgactcctgcggagagcaaccctcccctcacagaccgcaatgctgccaaacccgacgaatcagtgagcaccggcagcaagaatagcaccggagctgcagccacgagagcaccgtctcagctgagaaaaaacgcaaccaccgagaaggagaaccagttgcgataatccgattgctgacatgcagtatccgtgactccgtgtcgcttaagccttctgtttaacagtgggggaggctgcctcggcgtcctttggagaggcaggtagactctggaagggctggcgctctcgggttcctgtgggaaatggcgtgttctgtggaaagccttagctctgctttggctggaatgcgaccttcttgtataatggaaaagtaacatgctggattaagctatgtcagtctcgtaaatggtctccgttcattttgaacatactgaggaaatcaatctgcgcatctgtatgcttagactggtacactgcaggatgcacatttcctccacagttcgacagcataacagatgcaatcgtatatatcgttgcaaccaagtggtgttcttttgagattataatatatcttgaaaaagtcaaa

SEQ ID NO: 133012 - DNA, 1017 bp, Zea Mays
caagagccccccaaaaagatccagccgccgcgcgccgcggcccctgaccctgagcctgtgagggaacgcagaagagggtttccgtgccgcgccacacgaccccccccggcgggcgatggacaccgaccacggcggcgcgtcggccgcgggcatggacgaggcggaggcggccttcttcgcgcgcgggggccggcggtgctgctgcttcccctggcccgccgccgcctcctcctcctcctcccaccagcgggtcggcggcgccgcggcggcggcggcggcggcggcggaggagacctggtggcagcgcgcggtggacgcggtgctcaaggtgcgcgagtggtcggagctggtggccggcccgcggtggaagaccttcatccggcggttcggccgcagcggcccgcccgcgcggccgcaccaccaccacttcggcggccgcaagctcaactacgacgcgctcagctacgcgctcaacttcgacgagggccacggcgccagccccgagggcgactacaccggctaccgcgacttctccgcgcgcttcgtcggaccgcctgcctccgccaagtcgtccatggacctcggcggccgcgacgcgccgccgctcttcggcccgccgccgctgccgccccacgacggagccggccgcgcctgaccgccacatcggtcgtcggaccggagcaggggaaggaacgctgattgagtggtcaaaggaaaggtgtccaaagtatctcaggaaaaaaaatggtgaccggttcgggtggatttgaggattccgcgggcgtcccggtgagaatggtgagcgagatcgctgctacaattccttcctccccctagtccccttcgtccgttcggttgattgattggtttagccactgtaaaaatgagattgctactgctgctactactacattcgttgtcatgttacctgctgctgtaatgaatccgttcaccctgtactccgtaccaattttgtcccaacattgaaacgaggtgcacaaacctttgcgattttcc

SEQ ID NO: 133013 - DNA, 95 bp, Zea Mays
ttttagaagggcagctctggtgtagtggtgagagttgtctcactaagtcactaggtcacggatttgaatcaacctctctgtatttgtgggggaaa

SEQ ID NO: 133014 - DNA, 2677 bp, Zea Mays
ctcaaaaccttatctgtggccgttatggctacaagaagtatccaaaatgcaaaagaccgctctccaccgtatcaagtagcatggctattttgatgcgcgcagtcgtcagttcttcgtgtcaggccgtgggctgtggcagaatcggcaccagacttggcctgaagcgcattgaggcagtttctgtctgttctttacgtatcaatctaggggcaagcccacgggttcgagagagggaggcccagtttgcaacactatctatgtggtgggcttgggttcgcaccgatcactggacgatggatggaggccccgtggtctatgcgcttcgttttccacacacgcagctgcagctgctcccctccgccccgcccccgcccccgcccccgccccgccccgcgtgcggcgtgccatgtcccgcccgctcagcagccagtacgccgccctcctctctgccgccgcccggaccgagccgcacgcagccggcgcgctccactgcgtcatcctcaggaccctaccgcacccgccgcccacccacctcctcaaccacctgctcaccgcctatggcaaggctggccgccacgcgcgcgcgcgccgcgtgttcgacgcaacgccccacccgaacctcttcacatacaacgcgctcctctccactctcgcccacgccaggctcctcgacgacatggactccctcttcgcgtccatggcgcagcgcgacaccgtctcctacaacgcggtcatcgccggcttctctggcggtggcgcgcacgctcgggcggtcaggttgtaccacacgttacttcgggcgggcagtagcgtcaggcctagccggatcacgatgtcggctatggtcatggcggcatcggccttgggtgaccgcgcccttggcaggcagtttcattgtcagattctgcggcttgggtttggggtgaacgcctttgtcgggagcccactggttggtatgtatgccaagatgggtctcattggggatgctaagagagtcttcgatgaaatggatggcaagaatgtggtgatgtataacacgatgatcaccgggctgctccgatgcaagatggttgaagaagcaaggcggttgtttgaggtgatgacggacagggattgcattacttggaccacgatggtcacggggttcacacagaacggattggagtcacaggctcttaacttttttaggaggatgaggtttcagggcattgctattgatcagtacaccttcggaagcatccttaccgcctgtggtgccctttcagccttggaacaggggaaacagatccatgcctacataatcaggactcactacgatgacaatgtctttgtcgggagtgcgcttgttgacatgtactcaaagtgcaggagcatcaaaccggcagaaactgctttcaggaggatgtcgtgcaaaaacatcatctcatggactgcactgattgttggttatggacaaaatgggtgcagcgaggaggctgtcagggtgttctctgagatgcaaagagatggcattgatcctgatgatttcaccctaggaagtgttataagttcttgcgctaacctagcaagcctagaggaaggagctcagttccactgtctagcgcttgtgtcaggattgatgcattacatcacagtgtctaatgcactagttaccttgtatgggaagtgtggtagcattgaggatgcacacagattgtttgatgagatgttgtttcacgatcaggtctcctggacagcacttgtcactgggtacgctcagtttgggagggcaaaagaaactattgatttgttcgagaagatgttggctaaggacgtgaagcctgatggagtaacctttatcggtgttctttctgcttgcagtcgtgcggggtttgttgagaaaggttgcagctacttccattccatgcagaaggaccatggtattgttcccatagatgatcactatacctgtatgattgacttgtatagcagatctgggagattaaaagaagctgaggagttcataaagcagatgccaatgcaccctgatgcaattggatgggggacattgctgagtgcttgcaggttgcggggcgacatggaaattggccaatgggctgctgagaatctcttagagatcgatccccagaatccagcaagctacgtgttgctatgcagcatgcatgctactaaaggtaactggaatcaggttgcccagctaaggcgtggaatgagggacaggcaagtgaagaaggagccaggttgtagctggatcaaatataagaataaagttcacatattttctgctgatgaccagtcccaccccttctccaagggaatttatgaaaagctcgagtggctcaactccaagatgcttgaagaaggatacaaacctgatgtcagttcagtgctgcatgatgttgcagatactgataaggttcacatggtcagccatcacagtgagaagcttgcgattgccttcggattaatgtttgttccacatgaaatgccaattcgtattgtcaagaatctgcgggtttgtgtagattgtcacaatgctacaaagcttatatctaagattactgggcgtgatattcttgtgagggatgctgtcagatttcacaagttcagcaacggggtttgctcttgtggagacttctggtgatgacaatatttctgtctctggtcaatgtcattt

SEQ ID NO: 133015 - DNA, 90 bp, Zea Mays
ctcgccagcggaggtcccacagcggggcgagcgtcggaggagcgtcggaggagggtcgctgatgaagacagagagcccccgcatccccga

SEQ ID NO: 133016 - DNA, 90 bp, Zea Mays
atggccgggtggggtccctggtgggcctggcttagggtgtgccagggcccacctggacccccctatgggcagtggccgcggttcacctga

SEQ ID NO: 133017 - DNA, 3214 bp, Zea Mays
cctcctccgcctcagcgtctcagtggccatgtcggatccacccacccaccaccaacgccactagtagcagccgaggagatagctgcgacggcgactcggtttcggcggcggcggcatgaagaacttcctcaggaagctccatatcggcgagggctcgagcgacggagcctcaacgcccccgcccccgccctctcgcaaaggcggtaccggtaccggtggcggtgttggtggggttcatcatcatcaaccgcaccacgatcaaaggcatcagacctcggcggtatccagttggctcgattcggtgcctaccaggcctccgccgccgattcctgtcgaagcggaggtgccgacttcgtcgtcgtcggcgtcgtcgctcggggttggggcacaggataggaaagcgaggcagtccgggggagtcgagaggcggcggtcccagcaggaggagagggagcggaggcggtcgcaagaggaagtgacgttgagggagcggaggcggtcgcaagaggaagagacgttgagggagctgaggcggtcgcgggaggaggagatggagcaggagcggaggcggtctcaagaacaggacgaggtggaggagagggtgataagagagtcgtcagaagcggaggagaggaagcgggagagggagaaggaggaagacgacctggaggcgtaccagattcagctggtgctagagatgagcgcgcgggacaatccggaggagatggagatggaggtcgccaagcagcttagtctgggcttctgccctccacagagatcccctgcggaggtcctcgcggtccgataccggaatttcaatgcccttggctatgacgacaaaatattggatggattttatgatctgttttatgttggaaatgggccagcagcagttactatgccctcttttgctgagctacgagtccagccattttcacataaagtcgattgggaagctgtgttggtccacagaggtgaagaccctgagcttatgaaacttcagcaggaggccttaatcatgaatcatgaacttcattcgagaacttcagaatctgtgggcaatgctttggttaagggacttgcaaatctagttgctagacacatgggtggagtgtttgatcctgagcgcatgtcagcgaaataccagaatatgcttagctacttaagaagtgatattggaagtgtaattgtgccacttggccagctaaaaattggtctagctcgtcatcgtgcactgctgtttaaggttttggctgatggccttgatgtaccttgccgtctcctgaaaggaaagcgatacactggatcagatgatggagctttgaacattgtgaaatttaaagacggaagggaatttattgttgatcttgtgtctgatcctggtacacttattccttcagatgtttctgttttgtccacagaattagacaggaatttcgtctctgataatcaacactttggccaagatgataataccaatctgttgggatcttctcttagcggtgtatcgagctcagcgtatggttcttttgagtatgagttacttgaccgaagatccacttcaagcaatgttggtccttctgatactgatggacctacaactaatctgacaagcaatcaacaaaatatgtcctcaaattcattcgataaactatcagttagcacattcacaagtgaaaataggcctgtcagtaaagaatctacaaatccagattacattattgttggaaaaaacaaagaaaaatatactgcggccgttgattcttcatcatcttcaccctctacaccagatatgggcagcgctccagctgtccggagaatgaaagtgaaggacatttcagagtacatgattaatgctgccaaggaaaatccacaattagttcagaaaatccatgaggttttacttgaaaatggtgttatggcaccacctgacctgttttcagaagattcaatggaagaaccaaaggacctcatcgtgtatgacaccaccctgtttcaaagcaaggatgaaatgaaaaggaggatgaatgagcttgggtcaagggaatacacagatcgtggtcatgatccattgttgcctcatcatcctggacatgaactccaaccaaaagtggctcctcaccgagcacctctggagtcacttaagcctgttgagggtttgggcatttaccacccacatgatatcagagatatagcatctccgtttgtttctcagtacgaaccttctgcacctcctcaggaagcttcatcccaacttacaaagcaattgcctgtcacagctgctgctgttgcaactgctgcagtggtggcatcctctatggttgctgcagccgctttatctaccaatgacgtaaactttgacgtgcctgttgctgctgcagccactgtcactgcagctgcagttgttgccacaactgctgctgttagcaagcaatatgagcactcggatcctggcaatcagctgtttagcgtaccaagtacttctcaaggaaataaatcagttgagaaagctggaggtgacctttgggacaaacaccatgttgaaactgatcatggccaagataattgtctggaccaagaagttcctcaggaagccgaacgaacctctgataaatcaaataaatcaagtgggacagaggatgtgaaatctgatcttgctttggacaatgttgcagagtttgagatccaatgggaagaaatttctattggtgaacggattggccttggatcgtttggagaagtttatagaggagaatggcatggaacagaagttgctgtcaagaagtttttgcaacaggatatttcaagtgatgctctggaagagtttagagctgaggtgcgaataatgaagaggttgcgccatcctaatgttgttctcttcatgggtgccatcactcgtgtgcctaatctttctattgtcactgaatttcttccaagaggcagtttgtttcgtttgattcaccgacccaacaaccagttagatgaaaggaagcgcttaagaatggcacttgatgtggctcgtggtatgaattatctgcataattgttcaccagttatagttcatagagatctgaaatccccgaatctactggtggacaagaattgggttgtgaaggtttgcgattttggtttgtcaagaatgaagaacaataccttcctgtcatcaagatcaacagctggaacagtgtatccaaattgcttgaagtgtgtctaa

SEQ ID NO: 133018 - DNA, 343 bp, Zea Mays
atggcgacgtgcagaagcgtgccgcggaggcccacggcgaaggacgcggccgccataaccgccggaccggtcaggaagcgcaccgccatggcgaacgtcgccaccttgttcccgcacgcgatgatccgcggctgcagcgccatgaacagccctgcacgccgatggcgatacgtcccggtgattcactctactgttcgataccgaggtgtagtgtagtagggtctagctaggaaagttaggccgcagccggtacccaccgagactgaacatggccatcccgagccccgcgtccgacaggatggagatggactgcaggacgatggccggcatctggaagttccac

SEQ ID NO: 133019 - DNA, 909 bp, Zea Mays
cacggagctgggacgagttgaagcagaggcacggagcgtgccgtcgcagacgctgccgtccactgacataaagcaagctgatgtcgtcagctctgatctgatggagcaagtgagagttgatgccaaccaaactgcattccccggccggcaacacgtacgcgcgcatcacgtgctcacatcagaaccacctaatccacatgcacactccactgagctcttgtatatatacaatgcaaacacgggcgagcaacgttgtcctgtccaacatccagagcagtaaacctcatcgaggcggccacgatggaggacagcaaagccccggtgtcggagcacggcggggagacctccaaggccgcggtgctcgtgggggtggccgccggcagcgggggacgcaggggcagggcggctacccgcgttctggccgtggtcgacctcatcctccgctccgtcgcggtggtcgccaccgtcggcagcgccatcgccatgggcaccaccaaccagacgctgcccttcttcacgcagttcctccggttcaaggcgcagtacagcgatctcccgacccttacgttcttcgtggtggtgaactcgatcgtcgccgcgtacctggtgctgtccatacccctgtccatcgtgcacatcatggcgagcagcgcgaagtacagtaggctggtcttggttttctttgatgcggcaatgctgctggcgctggtgacggcggcggcgtcggcggccgcggcgatcgtgtacctggcgcacaagggcaacgccagggccaactggctcgccatctgccagcagttcgactccttctgcgagcgcatctccggctccctcatcggctcattcgcggccatggctctgctccttttgctcatactcctctccgccgccgcattggcgcggcgttag

SEQ ID NO: 133020 - DNA, 1559 bp, Zea Mays
cggagcagacagaaacaactcgcacggggcgaccctacagctactgtagtgagctcgcgagtcttgactcttgagccttgacctgccgtttgttttgtgcttggtgtcgctcgcttgggcttggcaggagctggtgaagggcgagtgcgagcggtgggccacggaggaggggatcaacgtcaagtacgagacgcgcaaggacagggccgggtacaaggccggcaacctcaaggaggggatgcgccacgcctacgtgcgcgcctgcgagttcgtcgccatgttcgacgcagacttccagccgccgccggacttcctcgtcagaaccgtcccgttcctcgtccacaaccccagcctcgcgctcgtgcagacacgctggaagttcgtgaatgccaacgactgcttgctgacgagaatgcaggagatgtccatggactaccatttcaaggtggagcaggaagctggctcttccttatgcaacttctttggatacaacggaaccgctggagtatggagaacgcaagcgatcgtcgagtccgggggctgggaggaccgaaccactgctgaggacatggacttggcgctgagagcagggctcctgggctgggagttcgtctacgttggaagcataaaggttaagagtgagctgccgagcactctcaaggcgtaccggtcccagcagcaccgctggtcatgcggacctgccctcctgttcaagaaaatgttctggcaaattctcgctgccgagagagtgtcggtctggaagaagtggtacatggtctatgacttcttcattgcccggagaatcgtaggcaccttctacacgttcttctttttcagcgtcctgattcctctgaacattctgctacccgaagcgcagattcctgtgtgggagctcatctatatccccatagctatcactcttctcaactctgttgggactccaaggtctatccatctggtcatactgtgggtcttgttcgagaacgtaatggcgttgcatcggtttaaagccatcttgatagggtttctcgaagctgacagggccaacgaatggatcgtgacgcaaaagctggggaatctgcagaagctgaaatcgatcgccagacttacaggaagctaccgtttcaaagacaggttccatttcctggaggtgttcattgggctgttccttttggcctctgcgtgctttgactacttatacagagatgactatgtttacctctttgttcttccccaatcgatcatgtatttcgcgattgggtttcagttcgttggtctcaatgtctctgaagactgaccaattgcaagacaactgaacgttttggttgcgatattatgattgctcgggtcaaggttcttgtatcgatggtctacagaagggcaggtttgtgtgcgatctagtagatacgtcatacttcaggagaggataagcacacgctggaggttgagacgaatctattataatccagtaggtgccaaaaaaatgcatctaaaacctgttgatgtgtctggaaaacacaaccagtgtatttagatataagagttgtgtaccgacgatc

SEQ ID NO: 133021 - DNA, 1779 bp, Zea Mays
tctcccgtcccgtggtctctacctccattccatgccacaaccaccaccaccactgcattctcaaacgagcagtgcctgaacccaagtgcagtgcagcagccatgggagcagcagcagcaggtggccacgcgctgcgcgccgtcggcgacgtcgtctcgttccccgcgaccgtcgccgccttcgtggaggcgctgctccagggctgggccgaggccagggccgggctgctggtgccgctgctccgcgccgcggtgctgctgtgcacggccatgtcgctgatcgtgctggccgagaaggtgttcctgggcgcggtcagctccgtggcgaagctgcggcgccggcgtccggggcgggtgtgcaggtgcgaccccgacgaggaggcggctgcggcatcccaggcctatcccatggtgctcgtccagatccccatgtacaacgagagggaggtttaccagctatcaatagaggcagcctgcaggctcacatggccggtagatcgactaatagtgcaggtgctggacgactccaccgactccgtcatcaaggagctggtgaagggcgagtgcgagcggtgggccacggaggaggggatcaacgtcaagtacgagacgcgcaaggacagggccgggtacaaggccggcaacctcaaggaggggatgcgccacgcctacgtgcgcgcctgcgagttcgtcgccatgttcgacgcagacttccagccgccgccggacttcctcgtcagaaccgtcccgttcctcgtccacaaccccagcctcgcgctcgtgcagacacgctggaagttcgtgaatgccaacgactgcttgctgacgagaatgcaggagatgtccatggactaccatttcaaggtggagcaggaagctggctcttccttatgcaacttctttggatacaacggaaccgctggagtatggagaacgcaagcgatcgtcgagtccgggggctgggaggaccgaaccactgctgaggacatggacttggcgctgagagcagggctcctgggctgggagttcgtctacgttggaagcataaaggttaagagtgagctgccgagcactctcaaggcgtaccggtcccagcagcaccgctggtcatgcggacctgccctcctgttcaagaaaatgttctggcaaattctcgctgccgagagagtgtcggtctggaagaagtggtacatggtctatgacttcttcattgcccggagaatcgtaggcaccttctacacgttcttctttttcagcgtcctgattcctctgaacattctgctacccgaagcgcagattcctgtgtgggagctcatctatatccccatagctatcactcttctcaactctgttgggactccaaggtctatccatctggtcatactgtgggtcttgttcgagaacgtaatggcgttgcatcggtttaaagccatcttgatagggtttctcgaagctgacagggccaacgaatggatcgtgacgcaaaagctggggaatctgcagaagctgaaatcgatcgccagacttacaggaagctaccgtttcaaagacaggttccatttcctggaggtgttcattgggctgttccttttggcctctgcgtgctttgactacttatacagagatgactatgtttacctctttgttcttccccaatcgatcatgtatttcgcgattgggtttcagttcgttggtctcaatgtctctgaagactgaccaattgcaagacaactgaacgttttggttgcgatattatgattgctcgggtcaaggttcttgt

SEQ ID NO: 133022 - DNA, 1744 bp, Zea Mays
tctcccgtcccgtggtctctacctccattccatgccacaaccaccaccaccactgcattctcaaacgagcagtgcctgaacccaagtgcagtgcagcagccatgggagcagcagcaggtggccacgcgctgcgcgccgtcggcgacgtcgtctcgttccccgcgaccgtcgccgccttcgtggaggcgctgctccagggctgggccgaggccagggccgggctgctggtgccgctgctccgcgccgcggtgctgctgtgcacggccatgtcgctgatcgtgctggccgagaaggtgttcctgggcgcggtcagctccgtggcgaagctgcggcgccggcgtccggggcgggtgtgcaggtgcgaccccgacgaggaggcggctgcggcatcccaggcctatcccatggtgctcgtccagatccccatgtacaacgagagggaggtttaccagctatcaatagaggcagcctgcaggctcacatggccggtagatcgactaatagtgcaggtgctggacgactccaccgactccgtcatcaaggagctggtgaagggcgagtgcgagcggtgggccacggaggaggggatcaacgtcaagtacgagacgcgcaaggacagggccgggtacaaggccggcaacctcaaggaggggatgcgccacgcctacgtgcgcgcctgcgagttcgtcgccatgttcgacgcagacttccagccgccgccggacttcctcgtcagaaccgtcccgttcctcgtccacaaccccagcctcgcgctcgtgcagacacgctggaagttcgtgaatgccaacgactgcttgctgacgagaatgcaggagatgtccatggactaccatttcaaggtggagcaggaagctggctcttccttatgcaacttctttggatacaacggaaccgctggagtatggagaacgcaagcgatcgtcgagtccgggggctgggaggaccgaaccactgctgaggacatggacttggcgctgagagcagggctcctgggctgggagttcgtctacgttggaagcataaaggttaagagtgagctgccgagcactctcaaggcgtaccggtcccagcagcaccgctggtcatgcggacctgccctcctgttcaagaaaatgttctggcaaattctcgctgccgagagagtgtcggtctggaagaagtggtacatggtctatgacttcttcattgcccggagaatcgtaggcaccttctacacgttcttctttttcagcgtcctgattcctctgaacattctgctacccgaagcgcagattcctgtgtgggagctcatctatatccccatagctatcactcttctcaactctgttgggactccaaggtctatccatctggtcatactgtgggtcttgttcgagaacgtaatggcgttgcatcggtttaaagccatcttgatagggtttctcgaagctgacagggccaacgaatggatcgtgacgcaaaagctggggaatctgcagaagctgaaatcgatcgccagacttacaggaagctaccgtttcaaagacaggttccatttcctggaggtgttcattgggctgttccttttggcctctgcgtgctttgactacttatacagagatgactatgtttacctctttgttcttccccaatcgatcatgtatttcgcgattgggtttcagttcgttggtctcaatgtctctgaagactgaccaattgcaagacaactgaacgttttggttgc

SEQ ID NO: 133023 - DNA, 3933 bp, Zea Mays
ccaaaaccaccctacgtctctcgctccctgcgctcgcttaatcgccttcgtcctcttccccacctacgtgctctcgctctccccttctccccacctagcctctcgatcggctcatttcgtggcctccagatcctccttctccccccggggcccatcatcaacccctcaacaccggcctcacaaactcgggcaggtctcccccgctgcttaattacctcgtgcgccgcgaaaacacgctctaggctctcgtttcctcgtactggtacaagcgggacgggagcagcagcagtagcgtgatccatccccatggcgggggcaacctcttcctcgtccgtgtctttgatcctcatcctcgtcgcgtcctcctcgccgcggcgcagccggggcagggtgggcattgctctgcgctcgtacggctacagcggcgccgagctgcggttgcattgggcgcgtcggggctcgtctcgggatggaccggcggtagtgcgcgccgcagcggttccggccgggggtgagggcgaggacgccgcggcggtagggaagagctcctcgtccaaggcggtcgccgtgcagggcagcgagtccaagactcaggctgtatattctacttcacctcccaaaactgcgacgtctgcgccgaagcaaaaccagagcgctgcaaagcaaaacggaacagttgggagcagcagtgcgagcaaatccccggcgcctgcggtatctgaatccaaagctgaaccatctgctcctgtcaccaagacagaaaccgatgccagtgcgaaggttgaagagctgaagccctcagtggatgatgctaaacccgtagaaagcataggcatccctgagccggtggatgctaaggtggacgccgctgcagctactgatgccgcggcgagtgctgctgatgacactgaagacaaggaacatggccctttggctgggcctaatgtgatgaatgtcgtcgtggtggcttctgaatgcgctcctttctgcaagacaggtggccttggagatgttgtgggtgctttgcccaaggctttggcgaggagaggacaccgtgttatggtcgtgataccaagatatggagagtatgcagaagcccgggatttaggtgtaaggagacgttacagggtggctggacaggattcagaagttacttattttcactcttacattgatggcgttgattttgtattcatagaagcccctcccttccggcaccggcacaatgatatttatggaggagaaagatcggatgttttgaagcgcataattttgttctgcaaggccgctgttgaggttccatggtacgctccatgtggtggtaccgtctatggtgatggcaatttagttttcattgctaatgattggcatacggcacttcttccggtctacctaaaagcctactaccgggacaatggtttgatgcagtatgctcgctcagtgcttgtgatacacaacattgctcatcagggtcgtggccctgtagacgacttcgtcaactttgacttgcctgaacactacatcgatcacttcaaactgtacgacaatatcggtggcgagcactgcaacgtttttgccgcagggctgaagatggcagaccaggtggtgaccgtcagtaatggatacctatgggagctgaggacatcggaaggtgggtggggcctccacgacatcataaaccagaacgactggaagctgcagggcatcgtgaacggcatcgacatgagcgagtggaaccccgctgtggacgtgcacctccactccgacgaatacaccaactacacgttcgagacgctggacacgggcaagcggcagtgcaaggctgccctgcagcggcagctcggcctgcaggtccgcgacgacgtgccactaatcgggttcatcgggcggctggaccaccagaagggcgtggacatcatcgccgacgcgatccactggatcgcgggacaggacgtgcagcttgtgatgctgggcacggggcgccccgacctggaggacatgctgcggcggtgcgaggcggagcacagcgacaaggtgcgcgcgtgggtggggttctcggtgcccttggcgcaccgcatcacggcgggcgcggacgtcctgctgatgccgtcgcggttcgagccgtgcgggctgaaccagctctacgcgatggcgtacgggaccgtgcccgtggtgcacgccgtgggcgggctccgggacacggtggcgccgttcgacccgttcaacgacaccgggctggggtggacgttcgaccgcgcggaggcgaatcggatgatcgacgcgctctcgcactgcctcaacacgttccggaactacaaggagagctggcgcggcctggaggcgcgcggcatggcgcaggacctcagctgggaccacgccgccgtgctgtatgaggacgtgctcgtcaaggccaagtaccagtggtaagtgagttacgccgacgcccttcatgtcgcgggacagtcctggacgccctgggcactgcgtgctcttctcacgcggctttgctgcgtgcggcgcatttgctcaattggcgcggggcgatggtggttggcctacgtcggcttcggctaggtgccttcggattttcagcttcttaccaccaaaacaccaaaagctgctgcggactattaaacgctcagtttttcagttagcttctataaaaatcgatcgtaaaaatcatctataatcaacataaacacataatggacggagtacttttaataatagaaatctatcgctttgtagatcttaccctatggacaccttcatcttgaaaattgtttggttgaaataacagtgagttgtatattctataagaaatatccatcattatggcattgtgaagagggtatacaagaaatatttgttatgacattgcgaagacggtatatatgctaattggttggattaaaaggtagctaatacaatagatatatgtaacctattttttctcataactatattatcgttcactaaccaaagcattaactttattctatagattcttggaaatctatttagccttcgtaaccttttgtttagattttagatacttttcacagtcagattctctacatagtcagattttcaaaaaaaaaaactggtaagaaaaaagctaaactaaacagacggaatttgggtgggcgcgatgataccactgggcacgggcacaggataatatgaaagcgacggagtgatgtatttgagctacggtaatggcctgcatttggttcttagtctacggctatgttttgatccactacatttaaagaaactagtttctaaacttggtttctaaaaactaacttttagagacagagaactgaatagaggtgtttgagtccactagtttttttaaatggtttatagctttttctataagtattgactgaccatcaaaaactgattttggatggagtaactggattcttggtttttaagaagccagaaaactagtttttagaaattgaataaaaaattgacctatttggaggactttaaggttttaaaactagtttctaataaactggatagatctaaacaggacctagatcacgttggacctggttcgagccttcgaggtgttctaaactattcagtattgagttggagatgaggcacatagaattcccactaataaatggggagttgtatgttacttatcgccacctctgttgtatgtttattggtgcaaccaagtttttcattccaggttccagtatataaggcataaatcacctttattttaaagcccaatgaatgtatttaattccctctatcaatactagtactaccacattgatgtatgtgtatctagaaagaacatgctttatgttatgggacaaacaaaaaatagttatatgtattggttacgtcttgtatccttcctattcacatcgaattgcttgctcgtcatcgatgtggtttttc

SEQ ID NO: 133024 - DNA, 2585 bp, Zea Mays
acgctctaggctctcgtttcctcgtactggtacaagcgggacgggagcagcagcagtagcgtgatccatccccatggcgggggcaacctcttcctcgtccgtgtctttgatcctcatcctcgtcgcgtcctcctcgccgcggcgcagccggggcagggtgggcattgctctgcgctcgtacggctacagcggcgccgagctgcggttgcattgggcgcgtcggggctcgtctcgggatggaccggcggtagtgcgcgccgcagcggttccggccgggggtgagggcgaggacgccgcggcggtagggaagagctcctcgtccaaggcggtcgccgtgcagggcagcgagtccaaggctgtatattctacttcacctcccaaaactgcgacgtctgcgccgaagcaaaaccagagcgctgcaaagcaaaacggaacagttgggagcagcagtgcgagcaaatccccggcgcctgcggtatctgaatccaaagctgaaccatctgctcctgtcaccaagacagaaaccgatgccagtgcgaaggttgaagagctgaagccctcagtggatgatgctaaacccgtagaaagcataggcatccctgagccggtggatgctaaggtggacgccgctgcagctactgatgccgcggcgagtgctgctgatgacactgaagacaaggaacatggccctttggctgggcctaatgtgatgaatgtcgtcgtggtggcttctgaatgcgctcctttctgcaagacaggtggccttggagatgttgtgggtgctttgcccaaggctttggcgaggagaggacaccgtgttatggtcgtgataccaagatatggagagtatgcagaagcccgggatttaggtgtaaggagacgttacagggtggctggacaggattcagaagttacttattttcactcttacattgatggcgttgattttgtattcatagaagcccctcccttccggcaccggcacaatgatatttatggaggagaaagatcggatgttttgaagcgcataattttgttctgcaaggccgctgttgaggttccatggtacgctccatgtggtggtaccgtctatggtgatggcaatttagttttcattgctaatgattggcatacggcacttcttccggtctacctaaaagcctactaccgggacaatggtttgatgcagtatgctcgctcagtgcttgtgatacacaacattgctcatcagggtcgtggccctgtagacgacttcgtcaactttgacttgcctgaacactacatcgatcacttcaaactgtacgacaatatcggtggcgagcactgcaacgtttttgccgcagggctgaagatggcagaccaggtggtgaccgtcagtaatggatacctatgggagctgaggacatcggaaggtgggtggggcctccacgacatcataaaccagaacgactggaagctgcagggcatcgtgaacggcatcgacatgagcgagtggaaccccgctgtggacgtgcacctccactccgacgaatacaccaactacacgttcgagacgctggacacgggcaagcggcagtgcaaggctgccctgcagcggcagctcggcctgcaggtccgcgacgacgtgccactaatcgggttcatcgggcggctggaccaccagaagggcgtggacatcatcgccgacgcgatccactggatcgcgggacaggacgtgcagcttgtgatgctgggcacggggcgccccgacctggaggacatgctgcggcggtgcgaggcggagcacagcgacaaggtgcgcgcgtgggtggggttctcggtgcccttggcgcaccgcatcacggcgggcgcggacgtcctgctgatgccgtcgcggttcgagccgtgcgggctgaaccagctctacgcgatggcgtacgggaccgtgcccgtggtgcacgccgtgggcgggctccgggacacggtggcgccgttcgacccgttcaacgacaccgggctggggtggacgttcgaccgcgcggaggcgaatcggatgatcgacgcgctctcgcactgcctcaacacgttccggaactacaaggagagctggcgcggcctggaggcgcgcggcatggcgcaggacctcagctgggaccacgccgccgtgctgtatgaggacgtgctcgtcaaggccaagtaccagtggtaagtgagttacgccgacgcccttcatgtcgcgggacagtcctggacgccctgggcactgcgtgctcttctcacgcggctttgctgcgtgcggcgcatttgctcaattggcgcggggcgatggtggttggcctacgtcggcttcggctaggtgccttcggattttcagcttcttaccaccaaaacaccaaaagctgctgcggactattaaacgctcagtttttcagttagcttctataaaaatcgatcgtaaaaatcatctataatcaacataaacacataatggacggagtacttttaataatagaaatctatcgctttgtagatcttaccctatggacaccttcatcttgaaaattgtttggttgaaataacagtgagttgtatattctataagaaat

SEQ ID NO: 133025 - DNA, 2555 bp, Zea Mays
cgccttcgtcctcttccccacctacgtgctctcgctctccccttctccccacctagcctctcgatcggctcatttcgtggcctccagatcctccttctccccccggggcccatcatcaacccctcaacaccggcctcacaaactcgggcaggtctcccccgctgcttaattacctcgtgcgccgcgaaaacacgctctaggctctcgtttcctcgtactggtacaagcgggacgggagcagcagcagtagcgtgatccatccccatggcgggggcaacctcttcctcgtccgtgtctttgatcctcatcctcgtcgcgtcctcctcgccgcggcgcagccggggcagggtgggcattgctctgcgctcgtacggctacagcggcgccgagctgcggttgcattgggcgcgtcggggctcgtctcgggatggaccggcggtagtgcgcgccgcagcggttccggccgggggtgagggcgaggacgccgcggcggtagggaagagctcctcgtccaaggcggtcgccgtgcagggcagcgagtccaagactcaggctgtatattctacttcacctcccaaaactgcgacgtctgcgccgaagcaaaaccagagcgctgcaaagcaaaacggaacagttgggagcagcagtgcgagcaaatccccggcgcctgcggtatctgaatccaaagctgaaccatctgctcctgtcaccaagacagaaaccgatgccagtgcgaaggttgaagagctgaagccctcagtggatgatgctaaacccgtagaaagcataggcatccctgagccggtggatgctaaggtggacgccgctgcagctactgatgccgcggcgagtgctgctgatgacactgaagacaaggaacatggccctttggctgggcctaatgtgatgaatgtcgtcgtggtggcttctgaatgcgctcctttctgcaagacaggtggccttggagatgttgtgggtgctttgcccaaggctttggcgaggagaggacaccgtgttatggtcgtgataccaagatatggagagtatgcagaagcccgggatttaggtgtaaggagacgttacagggtggctggacaggattcagaagttacttattttcactcttacattgatggcgttgattttgtattcatagaagcccctcccttccggcaccggcacaatgatatttatggaggagaaagatcggatgttttgaagcgcataattttgttctgcaaggccgctgttgaggttccatggtacgctccatgtggtggtaccgtctatggtgatggcaatttagttttcattgctaatgattggcatacggcacttcttccggtctacctaaaagcctactaccgggacaatggtttgatgcagtatgctcgctcagtgcttgtgatacacaacattgctcatcagggtcgtggccctgtagacgacttcgtcaactttgacttgcctgaacactacatcgatcacttcaaactgtacgacaatatcggtggcgagcactgcaacgtttttgccgcagggctgaagatggcagaccaggtggtgaccgtcagtaatggatacctatgggagctgaggacatcggaaggtgggtggggcctccacgacatcataaaccagaacgactggaagctgcagggcatcgtgaacggcatcgacatgagcgagtggaaccccgctgtggacgtgcacctccactccgacgaatacaccaactacacgttcgagacgctggacacgggcaagcggcagtgcaaggctgccctgcagcggcagctcggcctgcaggtccgcgacgacgtgccactaatcgggttcatcgggcggctggaccaccagaagggcgtggacatcatcgccgacgcgatccactggatcgcgggacaggacgtgcagcttgtgatgctgggcacggggcgccccgacctggaggacatgctgcggcggtgcgaggcggagcacagcgacaaggtgcgcgcgtgggtggggttctcggtgcccttggcgcaccgcatcacggcgggcgcggacgtcctgctgatgccgtcgcggttcgagccgtgcgggctgaaccagctctacgcgatggcgtacgggaccgtgcccgtggtgcacgccgtgggcgggctccgggacacggtggcgccgttcgacccgttcaacgacaccgggctggggtggacgttcgaccgcgcggaggcgaatcggatgatcgacgcgctctcgcactgcctcaacacgttccggaactacaaggagagctggcgcggcctggaggcgcgcggcatggcgcaggacctcagctgggaccacgccgccgtgctgtatgaggacgtgctcgtcaaggccaagtaccagtggtaagtgagttacgccgacgcccttcatgtcgcgggacagtcctggacgccctgggcactgcgtgctcttctcacgcggctttgctgcgtgcggcgcatttgctcaattggcgcggggcgatggtggttggcctacgtcggcttcggctaggtgccttcggattttcagcttct

SEQ ID NO: 133026 - DNA, 875 bp, Zea Mays
actcgtagtcgcccgcgcccatgtccttggccacgcgagagttggcgccgtccgcgcccacgatcgcgtccacctcgaacgaccgcttctcgccgccgaccttgccgttgctgccgtcgtagtggttgtagtgcaccacgtacgagccgttcggctctttgggcgcctcgtacctgagcaaaacaatcaggaagaggccgttgacgacctccgcgccgacggactgtgcccgtgagcggaggtaggcgtcgagcacctcgcgcctgaccatcccgatgtactcgtggggcgcgagcgtgcggccgatgtcgacggcgacgttggacggcgaaatcatcttcatcttcctcaccttgcggtccacaaggtcgagcggcaggtcgaactccgacaccatgcacagcgggatggcgccgccgcagggcttgcagttgtccatcttccgctcgattagcaccgtctccacgccgcccttggccagcgcctccgccgcggcgccaccggcggggccgcctcccaccacagccacccgcagccgccgcccgttcggcagcttcgggctcgacgccgccgcgcgcgtcaccaccatccgcgccctccggctgccccccgccggccgggcccggcacgaggacggcagtgccaccgcggaggagagggaagtcattgttgccggaattcctggctaacggcctcacctttgggagggaggaggatctttcgtttgagctcgacgtgctctagtgcgggtgccgtagtagtgaagtgagagagtggatggataggattaggggagattgcggaatacgctgtccgtttgatcgagaaactggacggtctggatcgtgtaaggatcaggttttgtttgtttccgc

SEQ ID NO: 133027 - DNA, 1297 bp, Zea Mays
tttgttcattctatctgctgtctctgcaacctaatttgaatctgataatgaccttgttcttcagatatcatagccaagagagaatatttcaccagacgtttattgttctggcaacttgaaatgatgatgttgtatcacgttgagctttgccttctttttgcagctgaggagtaagattgcttctgcaacatcagctattaaatcagtatttggacaagaggtccaacagcaggatgcagtaggtgttttctgcccagttcctgtgaaatactgtacatcatatgtctttcttcactacggttcaaaccttctaacttatatttctcctcctaaaggcgaacaaattagagcaactcagagaaaggatggtcaaagtaagagagcttttccgcgacacggaatcaacagagtttataatcgtgacaatcccaacggtaactattgtgttcttagctccccacccccctagaatatgtactcccttgaaggtaatattttactgctatcttttgcactggtatttttcaggtgatggcaatcagtgagtcatcaagactgcattcttcgttgcaaaaggaaagtgttcctgtaaggagactcattgtgaaccaagttctgccaccttcaacatcggactgtaaattctgttctataaaaagaaaggatcaaacgcgtgcattggatatgatacggactgacccagagttaaaaggtttgaacattatccaagcacctcttgtggacatggagattagaggtgttccggctctcaattttttgggtgatatactgtggaagtaacttcagttatgggaaacaggatcgcttataagggtgcttaattggccaatatcactgttagcctgctgcacaattgcactgctctgcaactagcaatctgtgggctcttctggttgtttccagctaacaattgcacaataagcttaagttgtttccagctacaatacagcacaacacattctccatggtgcgttaaatctgagtagaaagcaccaaattggagggttttgctgcactcctgcactagcatttgatgacctgttactcttggcagtgatgcagattggatttagccccaaattaggctaattgaagtgaaatgctgtaatatttatccttttatcaattatccccaagattaatagcaacacttgtggccttttggttcggcgactttgtaaaactcttcgtttcttatgtgccatctcaattttgtacaagaaatgtgttttctcttctccctcactggggcagttattcaggatattttaagctt

SEQ ID NO: 133028 - DNA, 1782 bp, Zea Mays
gtcctccgcggtggttctagaccgagacccgagagagtcagaagcgaagcggaacaaagagaggagaaaccaagcaatccgcctcatcccagctcgtcacgatgctcgcgaccgcctcgccgcaccttcaggcggccgcgcgccgcctcttcctggctgtacccgtgaatcagggctgcagtagcatccgcctcccgcgcagatgcttcggccggtacgcgtcggtgcgcgcggcgtcggtgaccgccccgcccgcgaaggagggggcggacgacctggggttcctggagatgtcgtccgggacgcggcgacggtactacatgcttgggggcaagggtggggtcgggaagacgagctgcgcggcgtcgttggccgtgcggttcgccaacaacggccacccgaccctcgtcgtctccaccgaccctgcgcactcgctcagcgattccttcgcacaggatttgagtggcgggacgctcgtgcaggtcgagggccctgattcacctctgtttgcgcttgagataaatcctgaaaaggcccgggaggagtttcggacagtaagtcaaaaaaatggaggaacaggagtaaaagatttcatggatagcatgggccttggggtgcttgttgagcagcttggagagttaaaattgggggaattgttggacacaccaccacctggcttggatgaagcaattgcaatttctaaggttatgcaattccttgaagcacaagaatacagcatgtttagtcgcattgtatttgacactgcccctacgggccatacactccggttattatccttgccagatttcttggatgcgtccattgggaaaatcttgaagctgaggagtaagattgcttctgcaacatcagctattaaatcagtatttggacaagaggtccaacagcaggatgcagcgaacaaattagagcaactcagagaaaggatggtcaaagtaagagagcttttccgcgacacggaatcaacagagtttataatcgtgacaatcccaacggtgatggcaatcagtgagtcatcaagactgcattcttcgttgcaaaaggaaagtgttcctgtaaggagactcattgtgaaccaagttctgccaccttcaacatcggactgtaaattctgttctataaaaagaaaggatcaaacgcgtgcattggatatgatacggactgacccagagttaaaaggtttgaacattatccaagcacctcttgtggacatggagattagaggtgttccggctctcaattttttgggtgatatactgtggaagtaacttcagttatgggaaacaggatcgcttataagggtgcttaattggccaatatcactgttagcctgctgcacaattgcactgctctgcaactagcaatctgtgggctcttctggttgtttccagctaacaattgcacaataagcttaagttgtttccagctacaatacagcacaacacattctccatggtgcgttaaatctgagtagaaagcaccaaattggagggttttgctgcactcctgcactagcatttgatgacctgttactcttggcagtgatgcagattggatttagccccaaattaggctaattgaagtgaaatgctgtaatatttatccttttatcaattatccccaagattaatagcaacacttgtggccttttggttcggcgactttgtaaaactcttcgtttcttatgtgccatctcaattttgtacaagaaatgtgttttctcttctccctcactggggcagttattcaggatattttaagctt

SEQ ID NO: 133029 - DNA, 102 bp, Zea Mays
ggcaccgaccgccaaggtaacacggctcgacggcatgaatcatggcgtcgagctcctgtctcccaccacgctagctttactagtttagtcattggctagttg

SEQ ID NO: 133030 - DNA, 963 bp, Zea Mays
atggagcatgaatcacacttggatgtggtcgagctcgtcgtcgtcgaccgcgacggactggctctgcaggcggcggagcttgaaggaggagagcttctgcgacatgtccttgtggctgggcgcctcctcgaagcggatgtaggtgtaggtccaggccccggagagcgtgccgaggacggggcccaggaagtagatccagaggccggtgtagaggttgctcgccagcgccggccccagcgtcctcgccgggttcatcgatccgcccgacactgcccttgcgaagatggacgtaatgcaaaccgcggaaccaactgccaaccccgccaactcacccaccgctctcgtgtccgtggcgacggcgagggtgacgaacatcatgttgaaggtgacgatgatctcgatgacgagcgagtgccagtgcggccccgtcggcgtggtggtgcccagcacggcgatggggtgcagcacggccttgagcacgaacgacgcgcagatgctgccggtgaactgcgccgcccagtagaacgggacctggatccaggggaaatggcggaacacggcgaacgcgagcgtgacggcggggttcatgtgcgcgcccgagatgtgtccgacggcgtagatcatgacggtgacgatgagcccgccggcgaccgactgccccagctgcgagatgcggtccttgtcgctgccgtagatccccgccgccccgcacgtgacgaacaccagcaggaacgtggacaccacctccgagaccaccttcttgaggaggtgcggagggaagatgtccgccagcgaccggtcgtagtacgtggggggcatgctggagttctgcgccgtgccgatgtcatggatctcgttgttgaagttggccctggagttggacctcgagttggtcgacatttccggccggcggtcgatcgatcgagctactacgcgcctgcgtgctgcgcgtggtcgagctag

SEQ ID NO: 133031 - DNA, 402 bp, Zea Mays
gttctggtttctcccgatctagtgaaattaaaaccacacaatgttagagcttatggattaaaaaaagatggaaaatccgtccacattaagaagtgaaacaaatggactcagaatcagtagcagtctgtgagagaaaccggactggtagacaaaatttctagtgaattcatacaagtaacatgagctcagcttccaaagtgaagccgcaatactttattcttcaaccagcggttcctttgtcgggtgaatttgtaaagggtcgtcagttgaaaaagacaggtaaagatatcttaagaaaaatgttgggaaagggttccggtggttgtgaagcgtccccaatcctctgggactcaaatgtgatacaattactagtccgaggaggctagtaaacacatttataca

SEQ ID NO: 133032 - DNA, 2528 bp, Zea Mays
tccatcccgcttccgcccgcgtccacccacccgccccgccccgcccccgaaccctaacctctggcggcgatgagcagcggcggcccgccgaggaagcgcaacttcaagatcgaggcgttcaagaaccgtgtggacctcgaccccaagtacgcggagcggacatggaaggtcctcgagcacgccatccacgagatctacaaccgtaacgccagtggtctctccttcgaggagctttacaggagtgcctacaacatggtgcttcacaagtacggtgagaagctgtatgatggccttcagagcacaatgacttggcgcttgaaggaaatatcaaaatcaatagaggctgcacagggtggtttatttttggaggagctgaatgcaaagtggatggatcacaacaaggcactacagatgatacgagatattcttatgtacatggacaggacatatgtccctacatctcataggacacctgttcatgagcttggtctgaatttgtggagggatcacataattcactcccccatgatccatagtcggctggttaacacccttttggatcttataaaaagggaaagaatgggtgaagtgattaacagaggcctgatgaggagcataacaaagatgctgatggacctgggtcctgctgtgtatcaagacgattttgagaaaccatttctggatgtttcagcccgcttctacagtgtggagtctcaagagttcattgtgtgctgtgactgtgggaactaccttaagaaggccgagagacgtctaaatgaggaaatggagcgtgtctcacactacttggatgctggcagtgaggcaaagataactagtgtagtggagaaagaaatgatagccaatcacatgcacagattggttcacatggaaaattcagggcttgttaacatgctagtagatgaccaatacaaagatttgggtcggatgtattccttgttccgaagggttcctgatgggttatcaacgattagagatgtcatgacttcttacttgagggaaacagggaagcagttagtgatagatccagaaagtttgaaagatccagtggaatttgttcaacgcttgttaaatgagaaggacaaacatgataagatcatcagtgttgccttcggcaatgacaaaaccttccagaatgctctgaattcgtctttcgagtatttcctcaacttaaacagccgatcacctgaattcatatcattatatgttgatgacaaactccgcaaaggacttaaaggagcaacggaagaagatgtggaagttatattggacaaagtcatgatgctgttccgatacctccaggagaaggatgtgtttgaaaagtactataagcagcatttggcgaaaaggctcctgtctagcaaaactgtttctgatgatgctgagagaagtatgatagttaaactcaagacagaatgtggataccagttcacttccaagctagagggcatgttcactgatatgaaaacctcccaggacaccatgcaagacttctatgccaagaagtctgaggaacttggggatggccctacgcttgatgtccacattttgacaactggttcttggcctacgcagcccagtcctccttgcaaccttccaactgaaatacttacagtatgtgagaaattccgggcatattatcttggaactcacaatggcaggagattgacatggcaaacaaacatgggtacagctgatataaaagccacatttggaaaaggccagaagcatgaactaaatgtatccacttatcagatgtgtgttctcatgctgtttaacaatgctgatggattgacctacaaagacattgaacgggatactgagatacctgcctcagacctaaagagatgtctgcagtcacttgcttgtgtcaaggggaaaaatgttctccgtaaggagcctatgagcaaggacatatctgaggatgacacattctacttcaatgataagttcacaagcaagcttgttaaagtgaagattgggacagtggtggcacagaaggaatctgaaccagagaaacaggagactcgccaacgggttgaggaggacaggaaacctcagatcgaagcagccattgtcaggatcatgaaatcacggagggtgttggatcataacagcattgtagctgaggtcaccaagcaattgcaagcccgtttcttgccaaatcctgttgtcataaagaaacgcattgaatctctgattgaacgagagttcttggaaagagacaaagtagatagaaaattatatcgttatcttgcatagaaaactgtcatgagataattcattagcagttggcatccttctgctcttgtaaaacggttttctttatgctcgagttctcttttatcagttgcattggccgctgggttcatagatgttcaaacattggttattggttgaccgcgaactgaagtggtgattgtattgaagtggttcatagatgttcaacacttactctttttgtttgatgggtctgcaactgcaagaactaagaagccatattatctgtt

SEQ ID NO: 133033 - DNA, 432 bp, Zea Mays
ctccgagaattttgttattgtccttcatgtacttctcccagtccagcgacgactcctcaaatcagcttcttcttcatgccgccatttgccacaggtcgccacgccatggccgccacatccgccacagccgcagcagctgcggcgctctcccacgtgctctataaagaaaacgggaaacaaacaaaacaattctacaataggccaaaaaatagacgaagaaatatgagaggaacacgacataccggagcaacgcgagggaccgtcgaactatgcatcagatgccgccactatgcgcaaaaaggaaaccataccggagctagaagaaccgaggagctaaacaaacctagagcgggggctctacaaccagccaaacaaagacggcgacacgatgacctagatctacacgaaagcaagaattctatctacaattga

SEQ ID NO: 133034 - DNA, 657 bp, Zea Mays
atgtgaaaagtcttaaaatactttatagtatttataaaaaactggcatcaaatttttcaaaatttacaaaatattctaaatttaaatgggtaaatcggtgatacggccttacgagccgccaccgattactgatttactggccaattagccggatcaatcgaacggtttcatgaacctgctaggccctgcctctacgtatgttgtgtcgtgccatgtgcgctcgccatgctattgtgaagtgtccaaatgcttgcctcttcatgaggaggttgaggccaagttcgcacttgcattcaccctctgcttgctctccttcaatgctcaagcctttcatgattggcctatctcgtcatgtcttgccgtagagcatctcaaacaatacctcaaattagtgtcttaaattgaaatatgaagctttacacagtgaaaaatattccaatagtacctcgttttataaaatttggtcaaaaaattatagggcattgtctgaagtgcctcaaaaacaccgtagtgggctgtcctataatctagatttaaggttttactgttggagcgaggtattttgtccgtgccctaaattctacaaaatatactcatttttaaattatagggcaattttataggtcacattgttggaaatgctcttaggtctcaatt

SEQ ID NO: 133035 - DNA, 372 bp, Zea Mays
gaaggacaaggcttcactaatgggcatgctacctggacatcagcaatgtcctctttcatgttgtcctaccttaccaatgtggtgtcaagtggcgaaaggacatcgtctggttttaagaaagttcactacaacagttgtgcaaaagctatcaatgaaaagttccgaactgccctcaatggcgagcagatcaaaaatcatctgaaaacttggtccagaaggtttgccaagataaataggataagaaaagtgagtggtacaggctgggatgaagatagttttactattactttggatgaagagcactataatggctatgttaaggtattatttcttctacctgcaatatgtgttcaatctgcaatatgtgtataa

SEQ ID NO: 133036 - DNA, 1113 bp, Zea Mays
atgacctcgggtagggaaacagcatatccggatcgagatgcgcggccttctttgcgcattgaagagataccggtttccaaggagccccaggaagacggagagactaccgtgacagttatggagggacagttctcctcggggaagataaacagtccccggattgattgcgacaggactgctggaacgtcgtctgggttaattgggccgcctgagatggcctggaatgactcggtctcgccgcttcggacaactgggccgcttgagacatggctcccaaggcctgtctcgccccagccttgcccgacgctagagatgaggcttccagcgctggtctcgccccactgcctacctgggctactgaacacgacgatgactggggatgtctcgcccctcattcgagctgggaagcttgagatcgtgtcttctgggcatgtctcgccccgacctcgagttgggccgccagagatgaccccagacgatgttttgccgtttgaagatactgggacattgaagatgaccttgcctgcgcctgtctcacctcagcatccgcctgggtcgcttgagacagctgcttccttgcagacagagccaactagtaagctgaaggtctattaccgaaaaggatcgaaagcacgtcaacgtcaatttcacgacggccaacaagatggaacaggaagggagttactggcattggagaatgggcatacaactgatccaagacctgataccctcacagccctgggtgctccgctggctgcgacaagaaaagaagagttcctcaacaaaatttgtagaagacctgatgcttgcttgctgttaccaaacaataatagcaagaaagcaactcctccctctccaacaacaactgctgctgcgccaagacgaagccggcgagtcgctggagctggagtggaattcagcatgcaagactggggtggcagggccaccaaaaaagccatgaaagccctgcagataattactgaagatgaaggcatcagtcaggaatccctcaaggcttatgcagagcttttcaagcacccactttctcagctccaggtggaggccttgtccgctcttttcgggtggcccacgccaccagcagggcctgtatga

SEQ ID NO: 133037 - DNA, 747 bp, Zea Mays
gcgattcgcgtggagttggtggtatgccctactgccagggcagttgaccgagaccaaactcgggcgaggcggagtttcctcccgagtcggaagccatcttcaggctaggtggagttctctcccgagggtgaggctgtgctttagacatttgcacgtcccattcagagttgcttgggaacagcgaccagagtgggggagcagcgtccgattttcgtgggcgtgcgtcatcttagtcggtgaaagtagatgggaccgctgtcccatcgtcctctgttgactgtggtgtcacatggagcagatatttgtatcatcgcatttaatgcgcatgtcttcatggtccccgagaactttggtcgataccgggctcgaggctgtccttcgttcgagatgagcttaggtgagacagaaattgatttctgtaaagtggggccctcggccgagtcaaggatttcacacgggcacaaccttcacacgaggatgggctcgggcaagacgtagttttgagcgaccgttgagcgggggtccgggcgaatcgtgattcaacccttagtggcctcaaggagtgcgtttttttgtttgatttcttaatactcaggtgttaggtatgcttagggacacaatccaagtacactaattatgatacccgacaccttgctactagaggccaccctcggtttatctctatttgggcccgattaattggctaacaggggaggctagttagcaaaatcgtctggtttatctccc

SEQ ID NO: 133038 - DNA, 1210 bp, Zea Mays
atgtgcattgctaactatgaagcatcaggtagccaagtgcaaattacactggagagaggcattcctgcaatgattggttcatttgcaacgaagcagcttccgtatccctatctttcctttgatatggtgcattgtgctaaatgcaatatcgaatggtacaaaaacgatggcattttcttggttgaagtgaacaggcttttgaggcctggtggatattttgtatggacatcgaatttgaatacacatagggccttgcgagacaaagaaaaccaaaagaaatggacagccattcgtgactacgctgagggcctttgttgggagatgctgtcacaacaagatgagacaattgtatggaaaaagacgaataaaagggaatgttacaaatcaagaaaatttgggcctgagctatgtggccatgatccagaatcaccatactaccaaccactaagcccctgcatatctggcacaagaagtcagcgttggatccccattgaacaccgtaccacctggccatctcaggctaggcaaaactcaacagaactggacatacatggtgtgcattcagaagtcttcgctgatgataattcaagctgggactccatggtgcgaaactactggtctttgctatccccacttatattttcagaccatccaaagagacctggtgatgaagacccacaaccaccatttaacatgctaaggaatgttttagatatgaatgctcactttggtggatttaatgctgctttactgaagtctggaaagtctgtatgggtgatgaatgttgttcctacaaatgccccaaattatctaccaataatatttgaccgtggttttattggggttcaacatgattggtgtgacgcatttgcgacttacccaagaacatatgatatggtgcatgctgatggctttctatcacttgagaagacccacaagcatagatgttctactcttgacatattcttggaagttgatcgcatcctacgaccagagggctgggtcataatccgtgacaccgcccctcttattgaagcggcaagatctgttgttactcaactcagatgggatgcccgtattttagatcttgacatagctagtgatgaaaagctactcgtctgtcagaagccctttctcagaaaataaggagcacaagcacagtagacactgacacaagatatgaacttattctttcaccctatactgttac

SEQ ID NO: 133039 - DNA, 2039 bp, Zea Mays
acgtccccagcagcagtagccccagcccccagtgccgcagttgcgctcagctatctctgctgagccgattagataaatccggcggaggaagagggaagaattatcgtgcgatatttcccccctcccactccctctctctctctctcgatttgcccgagaaatttttttggttgtttcccgcatcactctccactaggccgccgtctcccccgctggtgctcgtcgcttcctgcccaattcggcgccattcgcccggcgcactccctattaattccctgcctcggtagtcactggccgattgccacgtgaaatttcctgttccgttgcctttcgggtgcgcctgaagtacccacacgctactagggttcaatcgtcgtcagcaggcttacctctcaatcactgcggggcggcggctcgagagtttgtggacagttggcgaagagatagttaggttttttttttgtctcccgtgtccgatggaggaatcggacttgggaggtaatctgggtaagcaaacggaagaggataaggctgcgggagaatcaggggatgagggtaagatcgagaggagccaatctatcaatctgaatagagtgccagcagttgctgtagaggcgatgagcacccagggaaactgtgagacgcacggtgcagcagtgccaggaactaaggatgcaggcacaggaaaggcagggcaatccagtggcgatcgacaggaggagaagttacccaagtgtgagcaggtcgactatggaagtgaagttgaaggctgcgcagatgatgagaaccctggcaagagggctgctttagttactttggttggaaatgaatactgcggcgacgaggatgagagagttcaagtgctcaccattgtcaagaaggacgagcatgcagatgacattgtcgaccgtattaatcctggcacagttgcagggtacagtgaagtgaagggtgctgtaggtgcttctgccgccacttctgcggtgcgacctgctggctcccgatcgtcaagtttccatggtgtgactaggcatagatggagtgggaaatatgaagctcatttgtgggacagttcttgcagagtagagggacgtagaaggaaagggaaacaagtgtacctttcaggaagttatgataccgaggaaaaagcggccagggcttatgatgttgctgctattaaatactggggcgaaaataccagactgaactttccggcaagttcttttcctttggcttcagtgatatctatcagttacatgatggccttatacatgtcagaattacttcagatttcacaatacggcaaggagttggaggacataagggatttgtctcgagaggaatgtgtgacatacttgagaaggaggagcagctgcttttcaagaggagcttctatttatagaggagtgacaagaaggcagaaagacgggagatggcaagcacgcataggactggttgctggaactagagacatttacctgggaacattcaaaacagaggaagaagctgcagaggcttatgatattgctgccattgagatacgtggcaaaaacgctgtgaccaattttgaccgaagcaactatgtcgataagggtatgcactgtatagaaggcgaaggcttgaggctgcttgcatccaagccagaagaatgacttccaagttcaatgcagtgattgtcgatcgagcagatttggccagacgtatatgcagcttagttggtacatatacagataggagaaccggttgcagtttgtcaatattcctgctttacatgacttgggattacagttaaatcgacccgctagcaaaaaaaagtgtgcaaatgttagtagatttggccagacatatatgaagattttggggttgtatcataaggcctcgtaggatagatctttctgcaaatgttagcgaagccagtgtttatgttctgtttgctagattagcgttatcagtttgcacgttccccttttttttctgaataattgtccttgtatgatcttgagggaatgcgtttacctggtcgtttgccattcttttta

SEQ ID NO: 133040 - DNA, 1961 bp, Zea Mays
acgtccccagcagcagtagccccagcccccagtgccgcagttgcgctcagctatctctgctgagccgattagataaatccggcggaggaagagggaagaattatcgtgcgatatttcccccctcccactccctctctctctctctcgatttgcccgagaaatttttttggttgtttcccgcatcactctccactaggccgccgtctcccccgctggtgctcgtcgcttcctgcccaattcggcgccattcgcccggcgcactccctattaattccctgcctcggtagtcactggccgattgccacgtgaaatttcctgttccgttgcctttcgggtgcgcctgaagtacccacacgctactagggttcaatcgtcgtcagcaggcttacctctcaatcactgcggggcggcggctcgagagtttgtggacagttggcgaagagatagttaggttttttttttgtctcccgtgtccgatggaggaatcggacttgggaggtaatctgggtaagcaaacggaagaggataaggctgcgggagaatcaggggatgagggtaagatcgagaggagccaatctatcaatctgaatagagtgccagcagttgctgtagaggcgatgagcacccagggaaactgtgagacgcacggtgcagcagtgccaggaactaaggatgcaggcacaggaaaggcagggcaatccagtggcgatcgacaggaggagaagttacccaagtgtgagcaggtcgactatggaagtgaagttgaaggctgcgcagatgatgagaaccctggcaagagggctgctttagttactttggttggaaatgaatactgcggcgacgaggatgagagagttcaagtgctcaccattgtcaagaaggacgagcatgcagatgacattgtcgaccgtattaatcctggcacagttgcagggtacagtgaagtgaagggtgctgtaggtgcttctgccgccacttctgcggtgcgacctgctggctcccgatcgtcaagtttccatggtgtgactaggcatagatggagtgggaaatatgaagctcatttgtgggacagttcttgcagagtagagggacgtagaaggaaagggaaacaagtttatctaggaagttatgataccgaggaaaaagcggccagggcttatgatgttgctgctattaaatactggggcgaaaataccagactgaactttccgatttcacaatacggcaaggagttggaggacataagggatttgtctcgagaggaatgtgtgacatacttgagaaggaggagcagctgcttttcaagaggagcttctatttatagaggagtgacaagaaggcagaaagacgggagatggcaagcacgcataggactggttgctggaactagagacatttacctgggaacattcaaaacagaggaagaagctgcagaggcttatgatattgctgccattgagatacgtggcaaaaacgctgtgaccaattttgaccgaagcaactatgtcgataagggtatgcactgtatagaaggcgaaggcttgaggctgcttgcatccaagccagaagaatgacttccaagttcaatgcagtgattgtcgatcgagcagatttggccagacgtatatgcagcttagttggtacatatacagataggagaaccggttgcagtttgtcaatattcctgctttacatgacttgggattacagttaaatcgacccgctagcaaaaaaaagtgtgcaaatgttagtagatttggccagacatatatgaagattttggggttgtatcataaggcctcgtaggatagatctttctgcaaatgttagcgaagccagtgtttatgttctgtttgctagattagcgttatcagtttgcacgttccccttttttttctgaataattgtccttgtatgatcttgagggaatgcgtttacctggtcgtttgccattcttttta

SEQ ID NO: 133041 - DNA, 1958 bp, Zea Mays
acgtccccagcagcagtagccccagcccccagtgccgcagttgcgctcagctatctctgctgagccgattagataaatccggcggaggaagagggaagaattatcgtgcgatatttcccccctcccactccctctctctctctctcgatttgcccgagaaatttttttggttgtttcccgcatcactctccactaggccgccgtctcccccgctggtgctcgtcgcttcctgcccaattcggcgccattcgcccggcgcactccctattaattccctgcctcggtagtcactggccgattgccacgtgaaatttcctgttccgttgcctttcgggtgcgcctgaagtacccacacgctactagggttcaatcgtcgtcagcaggcttacctctcaatcactgcggggcggcggctcgagagtttgtggacagttggcgaagagatagttaggttttttttttgtctcccgtgtccgatggaggaatcggacttgggaggtaatctgggtaagcaaacggaagaggataaggctgcgggagaatcaggggatgagggtaagatcgagaggagccaatctatcaatctgaatagagtgccagcagttgctgtagaggcgatgagcacccagggaaactgtgagacgcacggtgcagcagtgccaggaactaaggatgcaggcacaggaaaggcagggcaatccagtggcgatcgacaggaggagaagttacccaagtgtgagcaggtcgactatggaagtgaagttgaaggctgcgcagatgatgagaaccctggcaagagggctgctttagttactttggttggaaatgaatactgcggcgacgaggatgagagagttcaagtgctcaccattgtcaagaaggacgagcatgcagatgacattgtcgaccgtattaatcctggcacagttgcagggtacagtgaagtgaagggtgctgtaggtgcttctgccgccacttctgcggtgcgacctgctggctcccgatcgtcaagtttccatggtgtgactaggcatagatggagtgggaaatatgaagctcatttgtgggacagttcttgcagagtagagggacgtagaaggaaagggaaacaagtgtacctttcaggaagttatgataccgaggaaaaagcggccagggcttatgatgttgctgctattaaatactggggcgaaaataccagactgaactttccgatttcacaatacggcaaggagttggaggacataagggatttgtctcgagaggaatgtgtgacatacttgagaaggaggagcagctgcttttcaagaggagcttctatttatagaggagtgacaagaaggcagaaagacgggagatggcaagcacgcataggactggttgctggaactagagacatttacctgggaacattcaaggaagaagctgcagaggcttatgatattgctgccattgagatacgtggcaaaaacgctgtgaccaattttgaccgaagcaactatgtcgataagggtatgcactgtatagaaggcgaaggcttgaggctgcttgcatccaagccagaagaatgacttccaagttcaatgcagtgattgtcgatcgagcagatttggccagacgtatatgcagcttagttggtacatatacagataggagaaccggttgcagtttgtcaatattcctgctttacatgacttgggattacagttaaatcgacccgctagcaaaaaaaagtgtgcaaatgttagtagatttggccagacatatatgaagattttggggttgtatcataaggcctcgtaggatagatctttctgcaaatgttagcgaagccagtgtttatgttctgtttgctagattagcgttatcagtttgcacgttccccttttttttctgaataattgtccttgtatgatcttgagggaatgcgtttacctggtcgtttgccattcttttta

SEQ ID NO: 133042 - DNA, 624 bp, Zea Mays
atgtcgctgtgtgtatgcagagaagcatttttgttaaatactcagtggcatgaacatgacaatgtcaatgattttgagcaatcacacttaaaagctccagaatttgaacttgccgttgagtctttgccatacgctcctgttaccgaagtaaggcttgaagagaaaacgaaagctccggctgacacagaagctgctcctgaggacatcaatgacgttatcgagcttcctgatgtgcctacgaaagtgccagagaggcctgaagctccagaaaaaaacaaaggtcacttcgtaattctccaggcagcatcctcgacgttcttcatgaaacaggcggcgaccctggaccggcggatcgggcgacacttccaggtgccacctgttgcgctgcatagcttcatcagcatcacaatcatggtcatcatccctatctacgaccgcgtcctcgtgccggtgtcgcgccggtactccggcaaaccatcagggatcaccatgctgcagcgcatcggcacggggatgttcctctcgttcttgtccatggtgatcgcggcgctcgtcgagaatcggagttgtgatctggaggccgccacatggaggctctacccttcctacgggagagccatttga

SEQ ID NO: 133043 - DNA, 1501 bp, Zea Mays
aatctggatccacccccgccccgagccagctcgctataaaggcacccctctccctttctgtctccctcgcagctcagttactcactccggcctccagcttttcctttgcgccccagggccggaagagcccacacaccaccaccaccactagatagccagcgacgatcgagccgcgcgccggtggacgcgcacatacacgcggtagcttccttctcaagcctagctagccccatcctgcgcgcaggcggcggcagcgagaattgacgtgcgacgacgagcttgtgcttgctagctagagagcgaggatgtcgagccggaggccgtcgtcgcgtggcaacatctccgaggacgagatcaacgagctcatctccaagctgcaggccctgctccccagctcccgccgccgcggctccggccaggcgtcgacgacgaagctgctcaaggagacctgcagctacatcaagagcctgcaccgggaggtggacgacctgagcgaccggctgtccgacctcatggccaccatggaccacaacagccccggcgcggagatcatccgcagcatcctccgctcctgatcgcccacgcgcctcctactgcggcggcgccggccggcgcgcgagagagcgaggtcggcgacgacctcgatcgccgacaacgacgaccgcgcgcgcccgcgccccccggcccatctgttctctccaccggctggccgccgggagccgagctcaattagctagggtatatctcaacctctctctctctctctctctcgctcgctctacatgtgtgtgtacctttctcttcctttcacctgcctgtctcctccctagatctgagatcatgtggctagctctcccatatcaaaatgtactagctacacgcgcacgtatggtggtctctgctaagcctaagcttcactgggtagtagggtactagtagcactaggggcttaagcaagctaagcttatcctcctcatcagaatcacattagctcgcaccgcactctctggcttctcgtcgatcgtcttcgtcgtcctcgctcctccgacccacatgatggctagctctccatgtgccgcttctcctctcgcacgtgccgcttctcctcttgtgttcgatatgttgtattgtttccatgtaaatttagtcggtggcctggatcgagttggctagctctctctacaggcaagagacaaccgaccgaccactactatcctagagcaaattgattatcgtcatgatggtgtactgttcaagcttttattaacgacttttaatttacttgctacgtacagcacgtacgtcctacgagaaatgcttttgtgttttttttttctttcactcagggtgccatggaccatggttaagagatgcaaccgctgtgtatgtactgtagtactagtatgcagcgaaaacgttgccctgcctttcatattggctgcttcgatcggtccacttatttggttccgtacggtggaacgtgaaacgacgcgtttacttc

SEQ ID NO: 133044 - DNA, 1408 bp, Zea Mays
aatctggatccacccccgccccgagccagctcgctataaaggcacccctctccctttctgtctccctcgcagctcagttactcactccggcctccagcttttcctttgcgccccagggccggaagagcccacacaccaccaccaccactagatagccagcgacgatcgagccgcgcgccggtggacgcgcacatacacgcggtagcttccttctcaagcctagctagccccatcctgcgcgcaggcggcggcagcgagaattgacgtgcgacgacgagcttgtgcttgctagctagagagcgaggatgtcgagccggaggccgtcgtcgcgtggcaacatctccgaggacgagatcaacgagctcatctccaagctgcaggccctgctccccagctcccgccgccgcggctccggccaggtgcgtcgttgcgaacacacatgaccgctcaactaattaactcccgttcgcctgctgcgcccttttttttccgttttcaaacgtctaatgcgcgcggcgcggaatgtaatgcaggcgtcgacgacgaagctgctcaaggagacctgcagctacatcaagagcctgcaccgggaggtggacgacctgagcgaccggctgtccgacctcatggccaccatggaccacaacagccccggcgcggagatcatccgcagcatcctccgctcctgatcgcccacgcgcctcctactgcggcggcgccggccggcgcgcgagagagcgaggtcggcgacgacctcgatcgccgacaacgacgaccgcgcgcgcccgcgccccccggcccatctgttctctccaccggctggccgccgggagccgagctcaattagctagggtatatctcaacctctctctctctctctctctcgctcgctctacatgtgtgtgtacctttctcttcctttcacctgcctgtctcctccctagatctgagatcatgtggctagctctcccatatcaaaatgtactagctacacgcgcacgtatggtggtctctgctaagcctaagcttcactgggtagtagggtactagtagcactaggggcttaagcaagctaagcttatcctcctcatcagaatcacattagctcgcaccgcactctctggcttctcgtcgatcgtcttcgtcgtcctcgctcctccgacccacatgatggctagctctccatgtgccgcttctcctctcgcacgtgccgcttctcctcttgtgttcgatatgttgtattgtttccatgtaaatttagtcggtggcctggatcgagttggctagctctctctacaggcaagagacaaccgaccgaccactactatcctagagcaaattgattatcgtcatgatggtgtactgttcaagcttttattaacgacttttaatttacttgctacgtaca

SEQ ID NO: 133045 - DNA, 2680 bp, Zea Mays
gattatgagctcgcacaaactgaaaaaatgcaggtcgtctccttctccggttgagctacgctgccccccctccaaaccctaacccgttgtgtgatccgttctgctatggaagcagcagctcaaccccatccgctccagcttttccaagacatggacccgggggtccgccgtttcctcgacgcccgattccgctcggcggccgatctcgccacggcctccgatgtcgaggccgagatccgcgggcactgtgcggagctagaggcatcgatttacgacctttacgtacgcctacaggaaactgccgcagcgtactcgtcttgctgcgaggtcgctggttcggccctccgtggcgtccgcggccggcttggtgccctcaaagcatccgggtcaacaggggctggagaagaggtggaggtgagaacggagcagatgcagttcgagcaactccctgctctggcctccgaggtggcgagagtagagatggtcagagagtatgcagaaatggctctcaaacttgacagtttggtgggtgatatagaagatgcagtttcttcttctgttactggaaaacttaaatctcgtgtagacaattcggaggaaacacatcatgttgctattggatatttgaaaagcatagaagatcttctagcttctgtagctgtgactagaccacaatggactcgccttctatcttccgtggatcacagagtagaccgatctttagctatactaagaccacaagccattgttgatcatcgatcacttctttcttcccttggctggcctccttcacttgccggctcaaaattttcaagtattaattcggggaaacaagcagagattgtgaacccattgtttgtgatgcggggtgacctgaaaagcaagtattccgagagctttcttgcactatgcaatttgcagggattacagaaacgtagaaaagctagacaactgaaagggcattgtgtgggtaatcaactacgtcaaccattatgggtaattgaagagctagtaaatccaatatctacagctgcacaacgccatttctcaaaatgggctgaaaagcctgaatttgtttttgctcttgcttataagataattagagattttgttgattctatggatgagattctacagccccttgtggataaggctaaccttattgggtatagttgtagggaggaatggatttcaggaatggtcattgcattgtctacatacttggcgaaagagatatttcctaagcagattgaagttcttcaggaaagtagtagctcaagtgactcaggcagcacggcctatcaggctagagtctcgtggctcagccttgttgatctgatgatatcttttgacaagcggattcaagatttaatcttgagtgctggactactacttacggtaaaggatgatgacagttggcagaggatctcagttctctgtgtcttctgtgatcgcccagattggcttcaagtatgggcggagattgagagacaagagagtcttaataagctgcgatcagcaatggatttagagaaaaattggagtacaggaattcgaggaactatgcttgaatactcagatgattacaaggctccagtaatcaccagtgtcgttcatcataccttgtctttgctaattgatcgtgcccgtcccatccctagcatcacacttagggcagaattcattagtatgtctgctgcacccatcatatcagaattccttggttacatgcttcggaggtgtcaagaagcagaggggctgactgctctggctgatgataatgctgtgctcaaggtatcacaatctatcaatgcagctcgatatttcgaatccacgttggcagaatggtgcgaggatgtttttttccttgagatggaaaatttgactgtaaatggtgagagtgggtgtatctttcagcaagagataaaccatctgaaagagttcagagtggaatggactgataagatttccactgtcattttgcgtggattcgatgctcgttctcgggattatctaaaaaacaagaggcagtggctggagaaatcagatggacctgctgtatccagaaccttcatagaatctttagactacatgcaagagcaactatccaagctgcaaggtggcctaaatacggttgattttgtgaccgtatggagaggtgtggcaagcggggtagaccagctgcttttcgccggcattttcacaagcggcacaaaggttagcagcgatggagtggagaggctacagggcgacctcagcgttttgttcgctattttttcagcatggtgtctgagacctgaaggcttcttccctcgactgtccgagggattgaggttactgaagattgacgaacagcagcttagagagggggcgtttaaagataagaattggttgagggaacatggcattaggcatctggcagctgccgacaccgagaggataataaaaaaccgggtatatgatgcatgacgaattgtacttaactaacatcagtctgtagttgggaaaagagagggattgtcgagtttgaaagaattcacactgttttactccatacaggtcttgtttcttctttatatacacctacgttcttggcgtatcggctggtgtaataaggtacattatatttatcaaatatatatatgaagagagactagctatggattgcaaatattctgtg

SEQ ID NO: 133046 - DNA, 2694 bp, Zea Mays
gattatgagctcgcacaaactgaaaaaatgcaggtcgtctccttctccggttgagctacgctgccccccctccaaaccctaacccgttgtgtgatccgttctgctatggaagcagcagctcaaccccatccgctccagcttttccaagacatggacccgggggtccgccgtttcctcgacgcccgattccgctcggcggccgatctcgccacggcctccgatgtcgaggccgagatccgcgggcactgtgcggagctagaggcatcgatttacgacctttacgtacgcctacaggaaactgccgcagcgtactcgtcttgctgcgaggtcgctggttcggccctccgtggcgtccgcggccggcttggtgccctcaaagcatccgggtcaacaggggctggagaagaggtggaggtgagaacggagcagatgcagttcgagcaactccctgctctggcctccgaggtggcgagagtagagatggtcagagagtatgcaggttgtcctatacagaaatggctctcaaacttgacagtttggtgggtgatatagaagatgcagtttcttcttctgttactggaaaacttaaatctcgtgtagacaattcggaggaaacacatcatgttgctattggatatttgaaaagcatagaagatcttctagcttctgtagctgtgactagaccacaatggactcgccttctatcttccgtggatcacagagtagaccgatctttagctatactaagaccacaagccattgttgatcatcgatcacttctttcttcccttggctggcctccttcacttgccggctcaaaattttcaagtattaattcggggaaacaagcagagattgtgaacccattgtttgtgatgcggggtgacctgaaaagcaagtattccgagagctttcttgcactatgcaatttgcagggattacagaaacgtagaaaagctagacaactgaaagggcattgtgtgggtaatcaactacgtcaaccattatgggtaattgaagagctagtaaatccaatatctacagctgcacaacgccatttctcaaaatgggctgaaaagcctgaatttgtttttgctcttgcttataagataattagagattttgttgattctatggatgagattctacagccccttgtggataaggctaaccttattgggtatagttgtagggaggaatggatttcaggaatggtcattgcattgtctacatacttggcgaaagagatatttcctaagcagattgaagttcttcaggaaagtagtagctcaagtgactcaggcagcacggcctatcaggctagagtctcgtggctcagccttgttgatctgatgatatcttttgacaagcggattcaagatttaatcttgagtgctggactactacttacggtaaaggatgatgacagttggcagaggatctcagttctctgtgtcttctgtgatcgcccagattggcttcaagtatgggcggagattgagagacaagagagtcttaataagctgcgatcagcaatggatttagagaaaaattggagtacaggaattcgaggaactatgcttgaatactcagatgattacaaggctccagtaatcaccagtgtcgttcatcataccttgtctttgctaattgatcgtgcccgtcccatccctagcatcacacttagggcagaattcattagtatgtctgctgcacccatcatatcagaattccttggttacatgcttcggaggtgtcaagaagcagaggggctgactgctctggctgatgataatgctgtgctcaaggtatcacaatctatcaatgcagctcgatatttcgaatccacgttggcagaatggtgcgaggatgtttttttccttgagatggaaaatttgactgtaaatggtgagagtgggtgtatctttcagcaagagataaaccatctgaaagagttcagagtggaatggactgataagatttccactgtcattttgcgtggattcgatgctcgttctcgggattatctaaaaaacaagaggcagtggctggagaaatcagatggacctgctgtatccagaaccttcatagaatctttagactacatgcaagagcaactatccaagctgcaaggtggcctaaatacggttgattttgtgaccgtatggagaggtgtggcaagcggggtagaccagctgcttttcgccggcattttcacaagcggcacaaaggttagcagcgatggagtggagaggctacagggcgacctcagcgttttgttcgctattttttcagcatggtgtctgagacctgaaggcttcttccctcgactgtccgagggattgaggttactgaagattgacgaacagcagcttagagagggggcgtttaaagataagaattggttgagggaacatggcattaggcatctggcagctgccgacaccgagaggataataaaaaaccgggtatatgatgcatgacgaattgtacttaactaacatcagtctgtagttgggaaaagagagggattgtcgagtttgaaagaattcacactgttttactccatacaggtcttgtttcttctttatatacacctacgttcttggcgtatcggctggtgtaataaggtacattatatttatcaaatatatatatgaagagagactagctatggattgcaaatattctgtg

SEQ ID NO: 133047 - DNA, 1953 bp, Zea Mays
gcctatcagagccaccaggagctgcttgccggcggccggcgggtaatgattccacccacctgtcagcgcgaacggggacgcgggcacgagtccacgatttcccaaccgaaacgcgcgagttattacgctttatgcgcccgtgccgtgaggccgtgaccccaaacgctccttcctcgcttgattactagagcgtttcctccctccgcgcatcgcagccaacctcaccctgtgcctcagatctcgcccacctggtagactcgccactccgtccgcctcctccccgcctcgatcgccgtcgagctcctctcccccacgcttgactaaccccacctgcgcttggattggtggccagggagaggcgcggaggcgacgcgcccagctacctaccggttccatactctgaagtctgaactggcctcagctgttccaccacctcgctgttcttggcccagctgctctgctcttgtcgagggatgatggtccagtgctcctccaacaaggctccacaccgacattgagctactgtgccttagcgctgccggtccggggtcgctctctgtgggccgtggcggctgtccgatgggctgcaccgggtccaggcacgcgctgcgcggcggcgtccggggtggcagccggtcgccgcgcgcgcggagccgctccggcggcgtccaccacaccgtcgcgctcaagtcctccacgctggggtcgctcagcctcgaccgggaccgggacgacgacggcgctctagcaggcgcggcgaagacgctgatgcggcggcagaaacaacaagtgcgaggctcgccggccaaggcgcctgctcgcgagcccgaggtgatcaacgtgtgggagctcatggacggcctcgacgacgacggcaaggacgatgaggaggggggcgacgccgacgccgacgccgaggggcggcgggagaagtcggcgacagggtcacccgccgagttcgacttcgacccggacgtcatcgccgcgttccggaaggcgctggatgagaaccccccgccgccgccgtcggacgtccccggcaacgaggggtgtgtcgacaagaagcctgacggcccgggcggcgaggtgggcgtcaaggtcaagcagcgggagcgcgagatacagaggttccctggcatcgtgcgcgcgcgggtcagcgcgttccagcagaggatcgacgcgaagctgctcgccaagctggcaccgccgccgcccccggatagcgcccggaaggtggtgctgtacctgaccagcctccgtggcgtccgcaagacgtacgaggactgctggtccaccaggtccgtcctccggagctacggcgtgcgcgtcgacgagcgcgacctgtcgatgcactcggggttcaaggacgagctccacgccgcgctgggctccagccccaacgcgggcaggctcccgcaggcgttcgcggacggcaggcacctgggcggcgccgaggaggtccgccggatgcacgaggccggcgagctggcgagggcgctcgaggcctgcgacgtagtagtagcgcccccgccgagctccggcggcaagggcgttgtcctggacgcgtgctccggctgcggcggcgtgcggttcgtgccctgcgaggactgctccggcagctgcaaggtgttcgtcgaggaggtgggcacgttcaggcggtgccccgagtgcaacgagaacgggctggtgcggtgtcctctctgctcctcgtgaacaaatctcagacacttttgaattttgatttgtacgtaagatcgttgaggagtatttgtccttctagctgagggtttgtacaggagttacacgcatgtgtaactttactaggactgatgaagcaacagatgatcgtatttatgctttgttgatgactggatttcaaagtgtacaagcacaagacgtgacaacaatcgaatgagctgatatgcattagaattgcacctcctgttgtttgct

SEQ ID NO: 133048 - DNA, 1154 bp, Zea Mays
tcctgtctgagatgctgacaggctcatggacgaggagtttgagaagggctcggggcccaagaggttcgagtacggccaactttctgtcgcgaccaagggcttctcggaggaggagaagctcggggaaggcggtttcggcgcagtttacagagggtttctgaaagagctggacctccacgtcgccatcaagagagtctcgaggggttcagagcaagggaggaaagaatacagctccgaggtgaggatcataagccggctcaggcatcggaaccttgtgcagctcattggatggtgccatcagggcaaggagctgctgctggtgtatgaactgatgcccaacggcagcctcgacacccatctctacaacccgactgttctcctaacatggccagtcaggttcaagatcgtgctcggcttgggatctgcgctcctctaccttcaccaggagtgggagcagtgcgtggtgcacagggacgtgaagccgagcaacatcatgctcgacgcgtccttcgccgcaaagctaggcgacttcggcctcgccaggcttgtcgaccacggccgtggatcgcacacgacaaacctcgcgggcaccatgggttacatggacccggagtgcctcgtcgccggccgcgcgggcccggagtcggacgtgtacagcttcggcgtcgtgctcctcgagatcgcctgcggccggccgcccgtggtgcccgagcaggaagaccagggcaggacgcgcctggtggagtgggtctggggcttgtacggacgaagagccgttcttgaagcggcggacgagcggatgggcggcgacttcgaccgcggagagatggagcgggtgatggttgtcgggctggcgtgcgctcatccggactgtagtctgaggccttccatcaggcaggctgtgagcatgctgcagtgtgaggtgacgctgccaacgctgcctgccaagatgcctactccaaagtactcgtgactcgctcgctgcctgctaccccgaggtatagtactggactagggtttatacatggcgtacgtattcatagctaattttttatgggggattaaatcctgtattctgaaatggagggttgattcgaatttgccctaccgagaggctaaatttctgtagaactccaattgaactagcaagctat

SEQ ID NO: 133049 - DNA, 2503 bp, Zea Mays
attaacgtcactaaaacaatcaggcttgattggttgctgcagcagctccaaggcattctagactggaggtctcaagttcgattcctcttaaatgcatctttttttgtgcaattactaggggcaacaacgtccaaatcccagacccacgcgcgctatgacttctttttgtgcacgctcggtcacgcgcaggatgacttcttttactgcaccggagggagtactcaaccaaccactttctacttttcaaatttagtccatctgtgaatcatttaggcgttttttatcactccagttgacaggtaataaaactattgctgatggcataataaaaaacagttgaagaaaagaaaacttgtcctcaatcctcattgattcatctaagatgatgtgttacctagctgatgctgaaccgttcgttttcgtaactaaacctcttttacatatcaatgggatgcaaattttttcttgtggttctgtattgcatgaagtacacaagtgtaaagaatactttgaggatgttgaccgaacatgggaaacctttgagaaaacattatggagccatatctctaactttttcaaactttcaaaagagagtcctcagacattggttcgagctttgagggttgttgaaatgcaagagatcttagatcaacaagttgcagaagaagcagctgaggctgagggtgctggtgctatggcgacaataacaaaccaacgtagaactgcaaacagaaaaggtgcaggggcaacagttaccccaagaaagggcactcaagaaaaatcgaaggttcagggaaagggctacaaggacaaatgctatgagtctatcaggatggctgttgaggcccgcttcaacaagttgcttactgagcttgtttttgtggaggacttgatggaagctttggaggaagccaaagctattggagatgagcttggcgatatatatgattatgttgcaccatgctttcctcctaggtatgaaattttccagctcatggtaaacctgtatactgagagattcattcagatgcttcgacttctcagtgatagagcaaacgatattcaaaatataaatatcctgaaggtgactggttgggtcgtgcaatatcaagaaaacttgattggtcttggtgtggatgaatcacttgcccaagtttgttctgaaagtggtgcattggatcccctcatgaacatgtatgttgagcgtatgcaggcaacaaccaagaaatggtacagcaacattttggaggctgacaaaacacaaccaccaaagagtacagaggatggaaaactatatacacctgcagcagtggatctattcagaatattgaccgagcaagttcagatagttagagacaacagcacagacgtcatgctatatcgaattgcacttgcggttattcaggtcatgcttgattttcaagcagctgagaggcaaaggcttgaggagccagcttctgatgttggtctggaatctctatgtgcattgattaacaataatctgcgttgctatgaactttcatcagagctaagtagcagtacattggaggcgcttccacaaaactatgctgaacaggttaattttgaagacacctgcaaaggatttcttgaggttgccaaggaggccgtcctccaaactgttagtgttatttttgaagacccaggtgtgcaggatctactcgtgaagctttaccagaaagactggctggagggaatggtcacagaatatcttgtcgcaacatttgctgattactttggtgatgttaaaatgtatattgaagaaagatcatttcgaagatttgtggaggcttgcatagaggaaacaattgtggtctatgttgaccatctcctttctcagaaaaactacataaaagaagaaacgatagagaggatgaggttagatgaagaggtgcttatggatttcttcagggaacacatcaacgtgacaaaagttgaaagcagagtgcggattctggcagatatgagggagctagcttcagctgagagtttggatagctttactctcatttacactaatatactggaacatcaacctgattgcccgcctgaggttgtcgagaagcttgtggcaatgcgggaaggcattccaaaaaaggaagcgaaggaggttgtacaagaatgcaaagagatatacgagaactcgcttgtggatggcaaccctcagaagtccggttttgtgtttggcaaattgaagtgcttgacagcaaagaaaggcatatggaggaagcttgggcagtaagtgtggacttgagcagagtggacagaagtaccacctaggcaaagactgtacgtttcacttctctatgatcattcttttgttcttttgtcgatgctactgttgggtttcacgtttagactatcagtgtgtactcagcttgaggagcaaaaatgtatattccactttgcttagctacagaggattttggtgtaagaatatgtaatttattcaataaaatggttgctatttgcaataagttggccc

SEQ ID NO: 133050 - DNA, 424 bp, Zea Mays
cgtatgcttattactagtaatctggtcatagattcttactcccaagtcgtttcttaggttgtacaagaatgcaaagagatatacgagaactcgcttgtggatggcaaccctcagaagtccggttttgtgtttggcaaattgaagtgcttgacagcaaagaaaggcatatggaggaagcttgggcagtaagtgtggacttgagcagagtggacagaagtaccacctaggcaaagactgtacgtttcacttctctatgatcattcttttgttcttttgtcgatgctactgttgggtttcacgtttagactatcagtgtgtactcagcttgaggagcaaaaatgtatattccactttgcttagctacagaggattttggtgtaagaatatgtaatttattcaataaaatggttgctatttgcaataa

SEQ ID NO: 133051 - DNA, 443 bp, Zea Mays
acccaattcttgcttcaaccaccagcaccaggacggaagcccacaccataccataccatatcacaccagccttcctcgcgatctctccgtctcccgtccccaccgcgccctcctccccaccggattcggaggcgattcacggggccggtgcgcaggttgctgctgcgcatccgcggaggttgactaccatggaggatctgggcatcgaggcgaaggaggccgcggtgcgcgaggtggcgaagctgctcccgctcccggagctcctctcttctatcgcctccattaaatctgactacctcgcgcggcagcagacaaatgatgcacaactcagtacaatggtggcagaacaggtcgagcaagcccatgctggcatcaatgctctagcattatctcaggaaacaataaacaaactacgtgaaaacttcattgatatagacaagtaa

SEQ ID NO: 133052 - DNA, 104 bp, Zea Mays
accaaattttgggctttacagaaagatatcagcagggatcaaaggaaagccaaatatagccgatgaggtacaagtctaatcgacagaagcatcaaagcacgaag

SEQ ID NO: 133053 - DNA, 2389 bp, Zea Mays
accagcagcggcatcctccactcgatccagatatcccagagcaacgacgcatacggagcacacagcattgcagtatagcaagcgccagccttggtttgcatcgtcctcgctcgctgctaactcagagcacgcatcatcatcagcatttgcgcgacgttgatcgagagagctagtcagatgcaacgtcagagagctaagatgccggcaggccagctgagctggccgttactgctaggcgcggtgttagcctttggagttgcagctagcccggcccaggcctccaggaacactcactacgacttcgttataaaggagaccaatgtcacccggctctgccacgagaagaccatcctggccgtgaacgggcagttccccgggccgaccatctacgcgcgcaaggacgacgtggtcatcgtcaatgtgtacaaccagggcagcaagaacatcaccctccactggcacggcgtggaccagccgcgcaacccgtggtccgacggcccggagtacatcacgcagtgccccatccagcccggcgccaacttcacctacaagatcatcttcaccgaggaggagggcacgctgtggtggcacgcgcacagcgacttcgaccgcgccaccgtgcacggcgccatcgtcatccaccccaagcgcggcaccgtctacccttaccccaagccgcacagggaggtgcccatcatcctcggcgagtggtggaacgcggacgtggagcagatcctcctcgagtcccagcggaccggtggcgacgtcgatgtctcggacgccaacaccatcaacggccagcccggcgacttcgccccgtgctccaaggcggacaccttcaagatgtccgtggagcacggcaagacgtacctgctccgagtcatcaacgcggggctcaccaacgagatgttcttcgccgtcgccgggcaccgcctcaccgtggtcggcaccgacggccgctacctcaagccgttcaccgtcgactacatcatgatctcccctggacagaccatgaacatgctgctcgaggccaaccgcgccaccaacggctcggccaacagccgctactacatggccgcgaggcccttcttcaccaacgcgggactcccgttcgacgacaaaaacaccacggccatcctggagtacacggacgcgccgcccgccgcggggccaccggacttccccgagctgccggccatcaacgacaccgccgcggcaacggcgtacacggcgcagctacggtccctggtcaccgaggagcacacgatcgacgtgccaatggaggttgacgagcacatgctcgtgacgatctccgtcaacacgctcccctgcggtgccaaccagacgtgcgccggccccggaggcaaccgcctcgcggcgagcctgaacaacgtcagcttcgtgagcccgacgaccgacatcctcgacgcctactaccactccaccagcggcgtgtacgacccggacttccccaacaagccgcccttcctcttcaacttcacggcacccaacccgccacaggagttctggctcacgaagcggggcaccaaggtgaaggtcctggagtacggcaccgtcgtggaggtggtgttccaggacacggccatcctcggcgccgagagccaccccatgcacctgcacggcttcagcttctacgtggtgggccgagggttcggtaacttcgacaaggacaaggacccggccacgtacaacctggtcgacccgccgtaccagaacaccgtctctgtgcccacgggcggctgggctgcgatgcgtttccgcgcggcaaatcctggtgtgtggtttatgcattgccacttcgatcgtcacacggtgtggggcatggacactgtgttcatcgtgaaaaatggcaagaccccaaacgctcaaatgatgccacgtcctcctaacatgcccaagtgctaaggaaacgaagccatgcatgactgccagagtgtatgtatgcaagagcaagacaatccagcaagataactaatctcagataattgatttatttatttattcgtggtacagattttaagtagactgtttcttctggtcagttgagacgatgtaattagtgttgtttgtattcttttctccctctcttttcacttggacggaagagaaaaataaattcgttgtatttattatttgtgtggatttactcctagttcaatcttcaagtgtaattaaacaatgtatgtcacggagctacattatgcacacatcccgtgaaaattcaatataaacatgtgcttcttatgtgcactttttttttgccatgatagtatcatgattatttagagaaaatttgtttgataataacaataccgttcaagtactactcgtattgttcttaggctatcttcagcagatccattatccc

SEQ ID NO: 133054 - DNA, 158 bp, Zea Mays
ccaaaagtaaatgtttaaaactggtaggggccgcgcgaacgcgtaccccctctagcacaaattatgacgtccactctcccacttggggagatggtagaccagcgtgtccaccaagtgcaatgtggaccactgatccaggtcatgggccttcatgatcg

SEQ ID NO: 133055 - DNA, 934 bp, Zea Mays
atggagcaatgtgttggtggtgagaatagtccacctcagttcatcaacaatgatttggatgttgtgccctgttatgagaatgatccatctcagtccattaacaatggtagcagtgcagcccctattaacctagaggagggtgctgctaccaataatggtgctgcagacacttcagaaaatgttgatggtaagaagcataaaagaatttgcacatctaaagtttggcttgatttcgagccgctctacaatactgtaaacggtaagaggataaggtatggtggtaagtgtcacgggtgcaaatctacattgactgttgtgtctactagtggtactggtcatttgcttaggcaccaacgtgattgcaaagttaagcttgctaaacaaggcaagcagtcagtccttaagtttaaccctgatggttatgttcgtaactgggattactgtcctgatcgtgctagaactcagatgtgtaggttgattgctaggcttgatcttccacttaattttgctgagtcacctgcttttgaggagtatattagactatcttataatcatgtctttaagaaagtatctcatcaaacaactgctagggactttgtcaagttctttaatgatcgtcgtaagatagttgttgagtgcttgcaatctgtttcttctattgcaattacatctgatatttggagtggtaatgctaaggaaaactatcttagtgtggttgctcattatatttctaatgactgggcattagaaaagagggtcattggccttagacttattgaaacaactcacactggtgagaacattgctgtgagggttatgactgtgcttgaagattatggtgttgttaataaagttttttctgtaaccttggataatgcctcctccaattctaaagctatggagaagcttagtccatccttagctggatatgttg

SEQ ID NO: 133056 - DNA, 1619 bp, Zea Mays
aaccctggtaatgtaccgaactgtgaatatggattatactgaattgcatatggtagtactggctatgactaacctagcttaaatcttggttctgtcactgccattgaccaagctaatctgctgtagtttcatctctttatcgtctgagttattggcaaaccatcagcgtggctaattcatatattctttggcataggtcttgcatgatactaatattttcgaggataacagcaagaagcattcataaagccatacacatttctcattcatattcttcaagctttcgaaataaagaattctctagttataagccaacgtttcagcatcttagcactaacaacccgatgaggccaaatgattcgttggaggctcaagacatggttcctgctgagggaaaccacagttgcttctcaagtgttcagtccactccagaaattgagaagaagtatgtgcatcgtgtctatgatgccatagctccccatttcagtgcaacaagatttgctaaatggcccaaggttgcaggattcttgaattccttgaggccagggtcggttgtactggatgctggctgtggtaatggcaagtatttgggtttcaaccctgattgtttattcataggatgtgatataagcccaccgcttattgagatatgtgctgggagagggcatgaggtgttggttgctgatgctgtcaacctcccatacaggaatgattttggcgatgcagcaatttcaattgctgtgttgcatcatttgagtactgatgataggcggaggagggccatagaagagctaatccgtgttgttcgaagaggtggtctggtgcttataacagtctgggctagggagcaggaagacaagtctttgctcaacaagtggactcccctctgcgagaaatatactgaagagtgggttgaacagagcagtcctccagtacgcagtaaatctggaactcttctggaaagcattgcagaaactgatgaagatgctggtttcacgaagcaaacagatgaccgattgaaaagctgtcatggtgaggtggaggacaagaccattgactgtagtaattcaaagactgatgaaaatgagaaaaaccagcaggagtactttgttccatggcatctaccatttcaccgagctgaaattggtggtgcatctgctgctctggaaaatggatttgcaaagaaagatgagaagaagggtacagtggtctacaatcgttattatcatgtttttgttgaaggagaacttcagagattggtttctggcataaagaatgctgctattgttgaccagttctatgacaaatccaactggtgcattgttctcgagaagctttgagctgcagaaaaaggaatggcacaagaagccatcagaatatgatatttgtggggattcagtggtaggcgagccaaatgtgtttatcccgaagtgtatgatgcattgtttaagggatcctgaaatttatggtgcattgttaagacttatgtcagattgcccaatattttgagggccatctggacttgaagaaatatttgctgtcaatctggtcaacaccgtgaattagcatgattgctagtactgtttttgatataagtatgagctttcattgttctacgg

SEQ ID NO: 133057 - DNA, 116 bp, Zea Mays
gttcattcctcaaatttggtggaatgactctattcctcatattagtactaactaactataagaaatggggtggtgatggatcaactcattctattccacaaaccaaacaaaaatag

SEQ ID NO: 133058 - DNA, 282 bp, Zea Mays
atgaagatcatggaagaccttttcaacatggatgagttagaatatgcatttggtggcaagaacccagctaccttcaaaataaatgattatgatgtgaggattagagaagatgacaagcgaagactgaagatgctggatctgcttctgaaaagagtgatgaatcggatactgaatctgaaaaggatcgaggaacagacacgggctgaatcgagcacagttcatcaggaaaacttgccaggagaagataatatcccagcatatcaaattgggccttcaacctga

SEQ ID NO: 133059 - DNA, 2595 bp, Zea Mays
acgattgccgagcatagctcacttggcgccgtgacacacgtacacactgcagccatcaaaagccatggaaggccgcgcgcgcctctccctcgtccacgccgccgccgcgctggtggtcctgctgcagctgcatggcggcgccgtcgtggttgcgtctgagccgccctacacctgcggcgccggagcgccgcccaacatcccgttctgcgacgcggggctgcccatcgaccggcgcgtcgacgacctcgtctcgcggatgacggtggcggagaagatctcgcagctcggggaccagtccccggccatcccgcggctcggcgtgccggcgtacaagtggtggtccgaggcgctgcacgggatctccaaccagggccgcggcatccacctcgacggcccgctccgcgccgccaccagcttcccgcaggtcatcctcaccgccgcgtccttcaacccgcacctctggtaccgcatcggccaggtgatcggcgtcgaggcgagggcggtgtacaacaacgggcaggcggaggggctcaccttctgggcgcccaacatcaacgtgttccgggacccgcggtggggccgcgggcaggagacccccggcgaggacccgacgatgaccggcaagtacgccgccgtcttcgtccgcggcgtgcagggctacggcctcgccggccccgtcaactccacgggcctcgaggcctccgcctgctgcaagcacttcaccgcctacgacctcgagaactggaagggcgtcacccgatacgtgttcgacgccaaggtgacggcgcaggatctggcggacacgtacaaccctccgttcaagagctgcgtggaggacggccatgccagcggcatcatgtgctcctacaaccgcgtcaatggcgtgccgacgtgcgccgactacaacctgctctccacgacggcgaggcaggactgggggttttacgggtatatcacctcggactgcgacgctgtggccatcatccatgatgcgcaaggctacgccaagacggcagaagatgcagttgcagatgtgctcaaagctggaatggacgtgaactgcggcagctacgtgcaggaccacggtgcctctgcgctgcagcaagggaagatcacggagcaggacatcaacagggcgctgcacaacctgttcgccgtcaggatgaggctggggctcttcaacggcgaccccaggcgcaacctgtacggcgacatcgggcccgatcaggtgtgcacgcaggagcaccaggacctcgccctggaagcggcgcaggacggcatcgtcttgctcaagaacgacggcggcgccggcgcgctcccgctgtccaagcccaacgtcgcgtccctcgccgtgatcgggttcaacgcgaacgacgccatcaggctgcgcggcaactacttcggcccgccgtgcgtgacggtgacgccgctccaggtgctgcagggctacgtgaaggacacgagcttcgtcgccggctgcaactcggccgcctgcaacgtcacgacgatccccgaggcggtccaggcggcgagctcggcggactccgtcgtcttgttcatggggctggaccaggaccaggagagggaggaggttgaccggctggacctgacgctcccgggacagcagcagaccctcatcgagagcgtcgcgaacgcggcgaagaagccggtgatcctggtgctgctctgcggtgggcccgtggatgtgagctttgcgaagaccaaccccaagattggggccatcctgtgggctggctaccccggcgaggccggcggcattgccatcgcacaggtcctcttcggagagcacaaccctggtggaaggctgcccgtgacatggtatccccaagatttcacgagagtgcctatgacggacatgcggatgcgcgccgacccggccacgggctaccccggccggacgtaccggttctaccgcggcccgacagtgttcaacttcggctacggcctcagctactccaagtactcccaccgcttcgccacgaagccgcctcccacgagcaacgtcgccggccttaaggcggtggaggcaacggcgggcggcatggcgagctacgacgtggaggcgatcgggtcggagacgtgcgaccggctcaagttcccggcggtggtgcgggtgcagaaccacgggcccatggacgggaagcactcggtgctggtgttcatgcgctggcccaacgcgacggacggcagcggccggccggccagccagctgatcgggttccagagcctgcacctgagggcgacgcagacggcgcacgtggagttcgaggtgagcccctgcaagcacttcagccgggcgacggaggatggcaggaaggtgatcgatcagggctcgcacttcgtgatggtcggcgaggatgagttcgagatgagcttcatggcgtgatcccggttgtgttggaagcctcgagtgtttcctcagaatttccgatgctctctaacttattcaaacgagaaaaaaaaaggtaaattcagcaagattatggcatcattgatgccagaagttcattgacaaacgcttccccgctccttttgttctttaacaagctaagggaagtagaaattatcttgatt

SEQ ID NO: 133060 - DNA, 940 bp, Zea Mays
gtggcgagcgatcgaccccattccgtgccgtcccgagtctcttctcttgacacgacctgcggaaagcaaaaaggcaaaacctcagtgagtcctgtccacgccgatgtactccttcgagcagcaggaccacacggcggcagcgcgtactactaccggtaccgccacgctcgacacgacgagctacctgcagccctgtgccggcgcagctgcagctgcccgctcgctccagctccccgcacatcacccaggccaccaggcgctccggacagcgcccgccgtgccgccgcggcgcggcaagagcgccaagaagcacgcgacggcggcggcggcgcggcactcgccgtcgccgtcgtcgtcgcgccgctcctcgaccaccgtggtcgcgaccgacgtggccaacttccgggccatggtgcaggagctcaccggcttcccgcccgccgccatcttccgcccgctgccgcgcagggtgcacgcggccagccccttcgtcgccgtcgccgcggggcagggatgtggacacggaggttcggaggccacgaacagtagcactgccggcgccggcagcggcagcggcagcggcagcagccccggcgacgcaccggccgtgccgcctgtggcgctggcggcgcagcagcagccgcagttcgcgccgctgggcgtgttcgacggcctgcccgacctcgggtcgccggagttcgactcctggggagacttgtccatcgattaagtactcggtggcaggctaggtctgaaggaacgattgctcaaggatggtaatcggtgggggtatttgctaatttcgttgtgatcaagcgtgttgtgtttattatctatgtgcgtgcacgtgaccatgtgttggcagtttagccacctgtggcagtagtgcttgttgctttcacaagataaaaaaaaacatgctgagctcatgtgacgcaaa

SEQ ID NO: 133061 - DNA, 1558 bp, Zea Mays
cttttctccatgatgacgcttactttttttaagcgctggcagtggctgtggcaccaactgaaagctggaggccgcctgctttttaacaaacacctagtataaacagatcatcatcactctctctctctcacacacacagcaccatgcttcacaggaggagccgcacgctgggagggagctccgatcgacctgcgcgccgagctgtcgcggtgaagagcggcagggggagcaatggcgcggccacggacctgctcgtctgcttcccgtcgcgggcgcacctcgccctcatgccgcccaaggccatctgcagcccgtcgcggccgtcggcgtccgagccggtcaagcgccggcacagcaccagccggccgcccagcgggctctacaagtcggccgcgggcgcggccaggaacccgagccgccgcggcgcggacgtccccgtggacgacgagccgacgtcgcccaaggtgacgtgcgtggggcagatcaaggcccgccaggccaagcccaagggccccgggcccggcggtggcggtggcggtggcaagaagaccaagaaggccacgtggctgcaggcgctggggatcaagaaggacgccctggcgctcttggacgccctgcacggcgctttcaggttcaacgttgccggatgcttcggcagcttccccggcgccgtgggcgtggggtacacttccggggaggacgacgaagacgaggaacacgatgcgccgcgcaccgagaaggaaacagaacacggcgcggcattggcccggtggttcatggtattggaggaaggcaagaaggtgtctgccaagaagctgcagggccaaaaaccggaacagagccaccaggaggaggacagggaggaagacgcggccccgccggcgaacgcgctgatgctgatgcggtgccggtcggcaccggcgaagggattagcgaggaggctagagacagaggaggagcgcaatgatgtgaagggcgccgccaagaagactccagatcaggaagagaaggagaacgagggcctggtgctcatgacatactcgccggacttcttcaaggtgtcccttgacattgccaaggagacttggatcgtcggcggtgatgacgcggtcctgcgctgccggagctggaagagatgatcgcagtgactgttcaacaaggaatgtatgtgccttttgtttaccttttactcctccgcttgctttttttcttctttttttccgacactcttgatgattactactactcttgcataaggctcgtgtgaagggtacgatcagcacacagcagaattggtttagccaaggccactgtatgtctgtattggcctcaccctgcaaaacattcctgctctgtaaatagtgctgtaaagtcccttgttaaatgttgcccaggtatacttgctcggtgagggctgatttggttagagaattgattcactggtcaccaaattaaaccagccatgatatgtgagtgagactgagtagtactcgcacatatgatgaacttgacagctcatcctttcgtgccagtaaagcttccatcttggcattcagat

SEQ ID NO: 133062 - DNA, 1003 bp, Zea Mays
atggcgagccctcggtttcggtggttgaccggagctgttgtggtggcaaaaccgcagttggttaccacaattggagccaaccctccaggttcagtgacatctggttctgttgatggaaaaagaataataggtgccgcaaatcctggtccagaagatgcagctgatcttctgaggatgtgtctccaatgtggtgtaccaaagacctactcacatggcaagggtatggtttgccctcaatgtggtgatagaccggcgctgacaaaagagcccgaaaagaagaagggttccactgtcaaagacaaggagaagatcaagaggatgaggggccaatcgtcgcatgcgtcctggaagagcgaaaccgagatggctcttcgacaacatttcgactgataactagttagcgtggccaatatttagatggagtaccctgtaaactgtacgttggtgaaacttttttttgccctgtgtaatgtaccatgtgatggcccttgtgcctcacacagtcacactaggttccagagagcctgatccagagttgtgtcttatgtatatgccttgaacggttttatttgctgatctgtcaaaactgaatcttagatatcagattccgtggaatggtttttgtttgctaagctagactgagcaccggggcacgaggcaatgtgaagtgtgagctggtttgtgcagtttgcggaaggcatactggtcactgcttcgtccgtgcagacttgcttgcaaccgccgaccgctcgcctgagtccctgacggtcgttcgtcgttgatttggccgctctgctgtagcgtgagtcgaattatcttcctttatatagacaagctaaaatgacttgtgtaatttaaaatagatcgatgacttatagttcggaacagaggcagtattggctgttttcaatggatcgtttaaaaaagaggacgcggtattgtatatgatactgtttgaatagtgaagtttgaaataaacaataagaatagctgatactgtttg

SEQ ID NO: 133063 - DNA, 1134 bp, Zea Mays
aagaagaatagatcaggtttactcctagggcctcctacgggagggctgagtaccgggactatcttgcgagtgcatcgcagttcacaacaaattggtatcagaggcactacgcgcgcatcgccaccatggccggcgcgcacgacgatcttgtgacctgctccgccaagatggacctcatcctcgagcaacttgccgccatcaatgcccgtttggattcccacgacgctcgtctggccaagctagagcaggcgtgggtcagcccctctgcttctaccgcgggctgcctgggcgcgagcgagggcggcctgggcgcgggcggaggcggccgagtcgaggacgatggggtcaatgggctgcaatccaacacacccagggaggtggaggcggcgttctacgttgaggtggctgtgccactgctgcagcctgcctccgtgcttgtggaggtccaggcgtggcccgactacggctacgcacggatctgctcgcccaatctgcaacaatcggccgccatggtggcccaacctgtaggggcgctgctgcaggataaccctccacgccacaactaccaatcctccgcgctgtggccatcaatcttctgcaccacggacagccatctgctgcgtcgtcgcagctgtggtcgacgtcagccaccttggccaccgccacggcgtggtcacctgagctacaacaccggagggtgccatcgaccttctccaggcgcagggagccctctgcgccaccgcagccgcgtccgtcatcggtcgatctggccgccgacgcgtcctccttcggtagatccgaccaatttttttctaggtgaataaaagactaagtcgagatgtaaaagacttagtattgagtcattaagtgctagtttagtatgggtcaattcttcttgactacagctcgcggacgagctgtttttaaggagggatgtaatgttatgggcctaaagcccattagctagggcattatggttaggttagacgcgaccactgttcacagctagggcattatggttaggttagacgcgaccactgttcacgcgaggttactgtagcgcgtgaacagtgccggccatatagggtttgttatgttgcttagcttttaagttagggttacctctctatataa

SEQ ID NO: 133064 - DNA, 1290 bp, Zea Mays
ggaagctccaagggccaagggaggctgcaggcaggttgtctccctccttcccacctgcaccacccctacccctgccccccatctcatccatcaatgggaaggtcaccttgctgcgatgagaatggcctcaagaagggcccctggacccctgaagaagaccagaagctcatggagtacatccagaagaacggccatgggagctggagggcgctgcctaggcttgccgggctcaacaggtgtggcaagagctgcaggctgagatggaccaactacttgaggccagacatcaagagagggaagttcacccaggaggaagaacagaccatcctccagcttcactccgtccttggcaacaaatggtcagctatcgcaaagcacctccctgggcggactgataacgagatcaagaatttctggaacacgcacctgaagaagaagctcatccagatgggcttcgacccgatgacgcaccggccgagaaccgacttctttgctgctctgcctcaactcattgctcttgcgaacctccgccagcttgtggagcagcggccgtgggatgaccacgctgccaggatacaggttgaggcggtccaggctgcgaagctccagtgcctccagaacctgctccagtctgcagcatccatcaccaccactcccagctccagcagcatgaacaccatccccagtgaccttggcctcctgagtcctccacagatgtcttccttgtctacgttgccttctccaagtttcctggagagtatcagtggccaagacatggtagctggtcaactgtctgacatccagatccctagctctttctttgaacagcccaccagcaacgaggccaaccagcagtcagacttcactccaaagagtagcgtcgagggggagaatggaacccctaaaatgctgctgtcagaaaattcccttccgccgctcgccgacttccccatttccaacctgggtgatgcttgcggtgcctcaagctgtgacggtagcagcattcagttcccaagttggcccgagttgtttgatgaacagttcatgtgcgagtttgtatgaattctggcctggagtgagtgtgtttgtgttactctatagtttggttttttttttcagttctagttttcttcccttcttacatctgttttttgtgccatattctggtgtgggtctcagttcagaggtgtagtttccgcatgctgttttttttccttttttgagtgaaaatgtgtggctcctatgcatacactatataccaaacacttgtaaatatacgacactataaat

SEQ ID NO: 133065 - DNA, 1636 bp, Zea Mays
ccaattcccatcccacccccgcacccaccgtggcccgagtagccgtggccgccgcggcaggccggcagcgccctcccggcggtgagcgcagcccggcgcgcgcgtcgcggccaccgccgcgctcgaagcgcccagatctagggcctagcggcccccctcctccatggcgcggcgactgccgttgtggacagcgctgctcctccccttcctcctcaccggcgttggtaccgccgccgccgcatccccgccccacgatgagtgcccggtgcctactatcgtggaatccgttcttggtactcgagacacgtgctcgacgctggatcttggcaacccggtcggcgtcgtggagggggatgagttcaccttagcaacggcagttaatcttcttcatgcaaacaaggatgactatattgctgtacttttctatgcctcgtggtgcccattctcacaagaatgcaaaccaaatttcgagacactggcctccttattcccaaccattagacattttgcatttgaggaatctgcaattaggccaagcataatttcaagatacggcatccatggtttcccaacactctttctcttgaattcaaccatgagagtacggtatcatggaccaaggactgttaaaccacttgcagctttctatactgatgtctcaggtatcaatgcctcggtcaatgtcaagtcaactgcaggggagaccatggtacatcccttgcacgatattgagcggcaaaaggatgctgaacaggaaaattgcccgttttggtgggctcggtcgccagagaaaatacttcagcaggatacttatctagcattggcgaccgcatttgttattttgaggctgctgtatcgtctttttccaaagattgattcctttgctagatgggcatggaggaggcataatctgtttgcaaacttgatgggggcacatgaatatttcctcacctaccttgagcaaggaagacagaagtttcatcggctatacccttcaagttcgaagcgaggaaatctgcaggagggggcaatgaacgctaccgcttgggcctccaaatcattagcatctgtttcgattggagaaccaagtgcgattggaaggacaaactctaccagtgagcttagatgaagtgtaaccctttttttctccacagagatatatgtacagtacagtagagcgatcttatggacacccagaatctgttgtaacggctgtatttctctttgtatcctctcctccttagaataagtatatccatggttttgcacctttttttgttgttacatcccaattcttcggaggagtaaagtttctggtgtattgagtagtgtcttgtgttctgaaatttggaatatgtaccagtatgttggagccttggagggcatcacaataggatattgtcactttctgctgtcatgccgtccttggtctgtcatagaaattagcaatttaggtgtttagggtttaggaatggtaacaggatctcttgtcggtggtaatgattactggctgtaattagattggatagtactttctccgttcttttttatttgtaacggtttagtgtaaaaatgaactagcgaatggtaaatatttaagaacggaggtagtacgaaagaattttactaaacaaaa

SEQ ID NO: 133066 - DNA, 2468 bp, Zea Mays
atgtcgcggccgctgtacaggggcgtgtcggggatcggcggcaagctggcggcggcggacgaggcgtactacgaccccaaggagcccagcgagaacggcattggcgggggcttcggccggggcggcgcgcggaagcggcacctcgcggccgcggcggtgaagatcggggtcctgctgctgctggcggcggcgctcgtgggctcggtcgcgtgggcggggacgctctacgcggggcgcggcgcggcggcgcgcgcggccgcagccgccgcgcaccgcgggtaccggcggctgcaggagcagctggtcacggacctgctcgacatcggcgagctcgcgggcggcggcgtccgcgccaaggaggcggaggtgtgcccgcccgagtacgacaactacgtgccctgctactacaacatcacggacgccgtcgacgtctcggatctgggggccggcgtcgtcataagctacgaccgccagtgcacgcgcgacggcagggtcacttgcctcgtcgcgccgccgcggagctaccgggttcccgtgcgatggcccagcggcaagggcttcatctggaaggacaacgtgcggatcagcgggcaggagttctcgtccggaagcctgttcaagaggatgatggtggaggaggaccagatctcgttcccgtcggacgcgcacatggccgacggtgtggaggattatgcccatcaaatcgctgagatgattgggttgcggaatgaattcaatttcaatgaggctggggttaggacagtccttgacatagaatgtggatttggtacctttggggcgcatctttttgagagagatctcttgaccatgtgcattgctaactatgaagcatcaggtagccaagtccaaattacactggagagaggcattcctgcaatgattggttcatttgcaacgaagcagcttccgtatccctatctttcctttgatatggtgcattgtgctaaatgcaatattgaatggtacaaaaatgatggcattttcttggttgaagtgaacaggcttttgaggcctggtggatattttgtatggacatcgaatttgaatacacatagggccttgcgagacaaagaaaaccaaaagaaatggacagccattcgtgactacgctgagggcctttgttgggagatgctgtcacaacaagatgagacaattgtatggaaaaagacgaataaaagggaatgttacaaatcaagaaaatttgggcctgagctatgtggccatgatccagaatcaccatactaccaaccactaagcccctgcatatcaggcacaagaagtcagcgttggatccccattgaacaccgtaccacctggccatctcaggctaggcaaaactcaacagaactggacatacatggtgtgcattcagaagtcttcgctgatgataattcaagctgggactccatggtgcgaaactactggtctttgctatccccacttatattttcagaccatccaaagagacctggtgatgaagacccacaaccaccatttaacatgctaaggaatgttttagatatgaatgctcattttggtggatttaatgctgctttactgaagtctggaaagtctgtatgggtgatgaatgttgttcctacaaatgccccaaattatctaccactaatatttgaccgtggttttattggggttcaacatgattggtgtgacgcatttgcaacttacccaagaacatatgatatggtgcatgctgatggctttctatcacttgagaagacccacaagcatagatgttctactcttgacatattcttggaagttgatcgcatcctacgaccagagggctgggtcataatccgtgacaccgcccctcttattgaagcggcaagatctgttgttactcaactcagatgggatgcccgtattttagatcttgacatagctagtgatgaaaagctactcgtctgtcagaagccctttctcagaaaataaggagcacaagcacagtagacactgacacaagatatgaacttattctttcaccctatactgttacagttattgtctgagcagaactgagtacaaagcttgggacgaaaacacgggaaggtgccattagattggttagtaagtgcatgctgcagagaacaggcttggtggcaaagctttccaggccaaggttttattgccaagacacagagatgaagccatgaaattactttagtggtgaaaaccatatccaataaagggatgacgctgcggtgtacataatcgcggtcaatgtgccatataggtataattcgttttctccttattacagtttctctctctctttttttttgtagttgtaccgatttgtttttgtatcttgtatgtaaattgattggtctatatactggtcatcccagactacagtctagtgaaaccaatataattattatttggagatgaatgataagcaagaacactttataactgttgcacta

SEQ ID NO: 133067 - DNA, 2260 bp, Zea Mays
atgtcgcggccgctgtacaggggcgtgtcggggatcggcggcaagctggcggcggcggacgaggcgtactacgaccccaaggagcccagcgagaacggcattggcgggggcttcggccggggcggcgcgcggaagcggcacctcgcggccgcggcggtgaagatcggggtcctgctgctgctggcggcggcgctcgtgggctcggtcgcgtgggcggggacgctctacgcggggcgcggcgcggcggcgcgcgcggccgcagccgccgcgcaccgcgggtaccggcggctgcaggagcagctggtcacggacctgctcgacatcggcgagctcgcgggcggcggcgtccgcgccaaggaggcggaggtgtgcccgcccgagtacgacaactacgtgccctgctactacaacatcacggacgccgtcgacgtctcggatctgggggccggcgtcgtcataagctacgaccgccagtgcacgcgcgacggcagggtcacttgcctcgtcgcgccgccgcggagctaccgggttcccgtgcgatggcccagcggcaagggcttcatctggaaggacaacgtgcggatcagcgggcaggagttctcgtccggaagcctgttcaagaggatgatggtggaggaggaccagatctcgttcccgtcggacgcgcacatggccgacggtgtggaggattatgcccatcaaatcgctgagatgattgggttgcggaatgaattcaatttcaatgaggctggggttaggacagtccttgacatagaatgtggatttggtacctttggggcgcatctttttgagagagatctcttgaccatgtgcattgctaactatgaagcatcaggtagccaagtccaaattacactggagagaggcattcctgcaatgattggttcatttgcaacgaagcagcttccgtatccctatctttcctttgatatggtgcattgtgctaaatgcaatattgaatggtacaaaaatgatggcattttcttggttgaagtgaacaggcttttgaggcctggtggatattttgtatggacatcgaatttgaatacacatagggccttgcgagacaaagaaaaccaaaagaaatggacagccattcgtgactacgctgagggcctttgttgggagatgctgtcacaacaagatgagacaattgtatggaaaaagacgaataaaagggaatgttacaaatcaagaaaatttgggcctgagctatgtggccatgatccagaatcaccatactaccaaccactaagcccctgcatatcaggcacaagaagtcagcgttggatccccattgaacaccgtaccacctggccatctcaggctaggcaaaactcaacagaactggacatacatggtgtgcattcagaagtcttcgctgatgataattcaagctgggactccatggtgcgaaactactggtctttgctatccccacttatattttcagaccatccaaagagacctggtgatgaagacccacaaccaccatttaacatgctaaggaatgttttagatatgaatgctcattttggtggatttaatgctgctttactgaagtctggaaagtctgtatgggtgatgaatgttgttcctacaaatgccccaaattatctaccactaatatttgaccgtggttttattggggttcaacatgattggtaagtagtagtacatgatcttttgtcctttgttgatttgaatttgttttacccttttttgtttcaggtgagtgctctggtaatgctaaatcttgaactaccttacttgacaaagttttccaaactaaacttcatatgcatagtcagtcataacttggaaatgttaatacatgcaaattttaggcatatggaaagttgttgatatagaggaattagagcatcctcaatttcacataattttattagagtacatggagattgatgcataatcaaagtatcaatttgatagacaactttcggcatatcaatctttggatcatcctccagttaaatgatcgatggatggacatgtgttaggtgtgacgcatttgcaacttacccaagaacatatgatatggtgcatgctgatggctttctatcacttgagaagacccacaagcatagatgttctactcttgacatattcttggaagttgatcgcatcctacgaccagaggtaatgaaaatttggttaatgacactgattttggaatccattattcagccgtgaatcatgtctataattcatttcaagg

SEQ ID NO: 133068 - DNA, 1628 bp, Zea Mays
ctcacagtccttgccttgccgtggcgtccgtcgtccccccacgtttgtacatatatatgcccatgtcatcgtcgtctccttcctctgctccgatcccctttgcaaccttcctcgtcataggccaggcaactgcggccctgcttgcttcgcttgtgctcctgcgccaccgtcactgctcatctcctccatagccatagcttttagactaggttttagattctggaagaagaacctatacacgagacagaagctagctagctagcttatttctgtttcttcagtaacctctcggtctagcaaccagcaagcttcccattgccctcgatcgatccgccccaaacatccatccatccatccacccttcttcattcctggctgtaagaagagatggtctcatggccgtgagctcacctcgccgagcgctcatcgcggccgtgtccctctgcttccttctcggcgctgcgagcagcgtccgcaccgcgacgttttccccttctcagcagcagaacctggcggaggacaagtcgcggctggggtcgacgccgccgagctgccgcaaccggtgcagcgcctgcaacccctgcatgcccgtccaggtgaccaccgtgcccgggctcggccgcggcgcccgcgccaccgacgtcgacgacgacacggtggcggtggcggccggcttctcgcgctactccaactacaagccgctggggtggaaatgccgctgcgacggccgcctgtacgacccctgacgcgctgctgcttttgcttcggcgccgtgccaaccccggtgcgcgcatgcactccgctccggactccggtcggcgggagagactcactactggagaccagccagccagccaggttctccgtctcgcgtctgtcgtgtgttcttcggaacccatggcggcttgcttcatcacaagcttatttattagcgctactgtctctactagttcgagcttgccgttgcagccattgcaactcgcgtagccgtaggcccgtagccatttttttggctccctgctcaaacaaattttactcgcgtgtcggtgtgtaaaaactaaagactactaaagagtggttgtgagcagtaaatcctagctagtaccactccaagtcttgcccagtggtctggtagtacgtcttaattaacagatcgaaggcaggcatgtgactcgcctgacggacggctctggtagcccgaatctaccgctggatcgcagtgccgccgacccaccggcgggctggatgcgtctgcgttggaaccttgcgtgacgtgtggcaccaccgccaccgggagagcctggtgatgatgcgatttttaagctgacactgccgctgctgcggagttattgtggccatggccgcctttgtacggctctgatgcctccccatgtgttttgtttagtgaggtgtctcccccgcgcccacccgtccgtatgggactgggaggggcgctttggaggcagctgaatgggcgtgttgctcttgtcgggctcagctctggtggggacgacgacgatgcaggtttccaactttattattatgaatgaggacgagaatgcgagaaaaaaaaaacagtacttactggtccacacctcctatacttatattcaaaaactttcattggc

SEQ ID NO: 133069 - DNA, 1029 bp, Zea Mays
ttcctctgctccgatcccctttgcaaccttcctcgtcataggccaggcaactgcggccctgcttgcttcgcttgtgctcctgcgccaccgtcactgctcatctcctccatagccatagcttttagactaggttttagattctggaagaagaacctatacacgagacagaagctagctagctagcttatttctgtttcttcagtaacctctcggtctagcaaccagcaagcttcccattgccctcgatcgatccgccccaaacatccatccatccatccacccttcttcattcctggctgtaagaagagatggtctcatggccgtgagctcacctcgccgagcgctcatcgcggccgtgtccctctgcttccttctcggcgctgcgagcagcgtccgcaccgcgacgttttccccttctcagcagaacctggcggaggacaagtcgcggctggggtcgacgccgccgagctgccgcaaccggtgcagcgcctgcaacccctgcatgcccgtccaggtgaccaccgtgcccgggctcggccgcggcgcccgcgccaccgacgtcgacgacgacacggtggcggtggcggccggcttctcgcgctactccaactacaagccgctggggtggaaatgccgctgcgacggccgcctgtacgacccctgacgcgctgctgcttttgcttcggcgccgtgccaaccccggtgcgcgcatgcactccgctccggactccggtcggcgggagagactcactactggagaccagccagccagccaggttctccgtctcgcgtctgtcgtgtgttcttcggaacccatggcggcttgcttcatcacaagcttatttattagcgctactgtctctactagttcgagcttgccgttgcagccattgcaactcgcgtagccgtaggcccgtagccatttttttggctccctgctcaaacaaattttactcgcgtgtcggtgtgtaaaaactaaagactactaaagagtggttgtgagcagtaaatcctagctagtaccactcc

SEQ ID NO: 133070 - DNA, 1026 bp, Zea Mays
ttcctctgctccgatcccctttgcaaccttcctcgtcataggccaggcaactgcggccctgcttgcttcgcttgtgctcctgcgccaccgtcactgctcatctcctccatagccatagcttttagactaggttttagattctggaagaagaacctatacacgagacagaagctagctagctagcttatttctgtttcttcagtaacctctcggtctagcaaccagcaagcttcccattgccctcgatcgatccgccccaaacatccatccatccatccacccttcttcattcctggctgtaagaagagatggtctcatggccgtgagctcacctcgccgagcgctcatcgcggccgtgtccctctgcttccttctcggcgctgcgagcagcgtccgcaccgcgacgttttccccttctcagaacctggcggaggacaagtcgcggctggggtcgacgccgccgagctgccgcaaccggtgcagcgcctgcaacccctgcatgcccgtccaggtgaccaccgtgcccgggctcggccgcggcgcccgcgccaccgacgtcgacgacgacacggtggcggtggcggccggcttctcgcgctactccaactacaagccgctggggtggaaatgccgctgcgacggccgcctgtacgacccctgacgcgctgctgcttttgcttcggcgccgtgccaaccccggtgcgcgcatgcactccgctccggactccggtcggcgggagagactcactactggagaccagccagccagccaggttctccgtctcgcgtctgtcgtgtgttcttcggaacccatggcggcttgcttcatcacaagcttatttattagcgctactgtctctactagttcgagcttgccgttgcagccattgcaactcgcgtagccgtaggcccgtagccatttttttggctccctgctcaaacaaattttactcgcgtgtcggtgtgtaaaaactaaagactactaaagagtggttgtgagcagtaaatcctagctagtaccactcc

SEQ ID NO: 133071 - DNA, 1410 bp, Zea Mays
atctcactcatcagctagcaccaccaggaagtaggaacacacctcccaccagtccactgtttcatcgctcatcactaggctgcaatggctgcaaagtcacctgtgcttgcagcactggtactgctcctgagctccgcccagctgtccacgggggcaaggaggcgcatggagctgtaccagcccgatccggcggacatgctctcctaccacaacggatccgtgctccactccgacatcttcgtgtccgtgctctggtacggcagcttcacgcaggtgcagaaggcgatcatctacgacttcctgctctcgctcaccaccacgccccaggccgcctcgccgtccgtcgcggagtggtgggacatgatcgagcagcagtacctgtccaaggcggcgcagaccaccaagcataccaccacccgggtgatgctggacaccacccaggtgtcgtccgacgacggctgctccatgggcacgtccctcaccctggcgcaggtctccgccctcgccgcgcgggccaggcccaggaagggcggcgtcgcgctggtgctcacggcgcaggacgtcgccgtggagggcttctgcacgagccagtgcggcctgcacggcgcggagtccggcgccggcgccgcctccgcgtacgtctgggtcggcaactcggccgcgcagtgccccggccagtgcgcgtggccgttccaccagcccgagtacggcccgcagaccccgcccctcgtcccgcctaacggcgacgccgccgtcgacggcatggtcgtcagcctcgccaccgcgttcgccggcgccgtcaccaacccgttccgcgacgcctactaccagggctccagcgacgcgcccctggaggccgccacggcgtgccccggacagttcggcagcggctcgtacccggggtaccccggcaacctcaagatcgaccaggccagcggtgccagctacaacgccaatggcgcgcaggggaggaaatacctcctccccgcgctctacaacccttccacttctgcctgcagcacgctggtctagcgaaaacaccgatgcagtgtattatcgtcttagcttgtttgttcagaaggttccgtttatgggtgtatgtatatatgcaagttcacatcaggtgtaattctttcgttttaaagatccaaatgttcttcgtagtaatttaaattgggggcatggcaaagttggttcaattcaatcaagaaccactgagtttttaagttttaaaccatagcaactagcaagatggttcacaaaagtattttttgtaaagaaaaaactagcaacgccaatgacgcccagatgttctctaatgtcttttctttctatctgtgttgtgtttgtgctgcagggtttccatttaatttaactatgcaagacttcgacttgcttgacagagtttcc

SEQ ID NO: 133072 - DNA, 1687 bp, Zea Mays
tcgttgcttgcttgcatgctgcatgcatgcatggtggctgcctggcgtggaagcgagccacaggccacagccgacagcgcagtcagcgtcgcgcgccctcgggtccaatccatacgcatccagctgcctcccactgagtcagtttcagagctatccgctcaaaaaaaaaaaaaaacagctaccccagggatgggcagggaaggcttcacgaaactacctggcacatgaggaattcggacctataaatacttgacctcttcactcttcggaaaccactcataaaccactcctgcactttcactctatcatcacctaccaggctactagcataacaagtcgccaatccctcccccgagagagtcagaaatggcatcacctcatagttgctttcgcggctggcagagcacgagccacgtcgcacttgcgctggtgtccgtgctgatcctgagctcggcacgtctctccgcgggcggcaggagcctgctggagctgtacaagccgccggccagcgcgatcctgacgtaccacaacggcgccgtgctgcagggccgcatcccggtgtccataatctggtacggccgcttcacgccagcgcagaaggccgtggtcaccgacttcctcgggtccctcaccaccgccgccgcctcgccgctggcaccgtccccgtccgtgtcgcagtggtggagcaccatcgaccagctgtacctctccaaggcgcggggcaggggcagcggcggcggcggcggcggcgcgcgggtggcgctcgtcggccaggccaccgacgaagggtgctcgctggggaagcgcctgacgctggcccagctcccgcagctggcggcgcgggccgggccgaggaagggcgggatcgcgctggtgctcaccgcgcaggacgtgggcgtggacgggttctgcacgagccgctgcggcctgcacggctccgacgcccgggcccccgggaccgcgtacgtctgggtcggcaactccgccacgcagtgccccgggcagtgcgcgtggccgttccaccggcctctgtacggtccccagacgccggcgctcgtgccgccgagcggcgacgtcggcgcggacggcatggtgatcaacatcgccagcatggtcgccggcgcggtgaccaacccgttccgcgacgggttctaccagggcgacaaggacgcgccgctggaggccgccactgcctgcacaggggtctacggcagcggcgcctaccccggtttcgcaggtaacctggcggtggaccccgcgacgggggcgagctacaatgccaatggcgcgaatgggaggaagtacctgcttccggctctgttcgaccctgctacctctacgtgttcgactttggtgtagtaaacaatcctgtcgggattgtgtagcaacactgtgtatatagtatagtatgaggattaaggagtgtactgtgctaagtgttgataactggatcataacacgacataaaaaatagatatgtaccgtccacttttgaagaactttttacttgttggaccgggggattgcaggcagaaatgatgtaaaaaaacaccatcctagtcaaaaagaactccggacgtggatggactcggcgtggcctccacgagcaaggtgtgtcttttgctggctacggcgtaagcctaggaggactgatatatggtatagggctgatgtatgtgtgcatata

SEQ ID NO: 133073 - DNA, 300 bp, Zea Mays
atgctgcacgcgatggcgtgcgcctcgtcgtgctggcacgccctgtccgccaggtcgatcgggtgcatcacccgccgcagccccgccagggacttgcagtgcttgccgaacgcctccaggccgcgggcccccatcttcgtgcagctgctgatgtcgaggaaagtgacgttcggcagccgcggcgccacggattccaccatggagtcgctgatctcgctcctggggatctccaaggtccggagagctcgtgcgctagccagttttcagcaaaagaggaagcaggatcaagccggtgtgtaa

SEQ ID NO: 133074 - DNA, 1284 bp, Zea Mays
aaggctcatgaaactttcgacccattggaggcccacgacctctccgtccgatccctaggcggcggatccttcctccaccaaacccgcacctgccgcaactgaatcgggtcagatcgggccatcggggaggcgagggagctcacgcggcgccatggacgaggaggagcacgaggtttacggccaggaaatcccggaggacggcgacatggacggcgctgacgttgatatggctgcctccggggatgacgcggcgaagctgcaggagctcgacgagatgaagcgcaggctgaaggagatggaggaggaagccgccgccctccgcgatatgcaggccaaggtcgccaaggagatgcaaggaggtgaccctagtgcatctacagctgaggcaaaggagcaggtggatgcccgttctgtgtatgttggaaatgtggattatgcttgcaccccagaagaagtgcaacagcatttccaagcttgtggaactgtcaacagggtgacaatcttgactgacaagtttggacagccaaaaggttttgcttatgttgaatttctggaacaggaaggtgttcaggaagctcttaacttgaatgaatctgaattgcatggtcgccagattaaggtcgccccaaagaggactaatgttcctgggatgaagcagcgtccaccacgtgggtataatccataccatggctacccttatagatcatacggggcaccgtatttccccccatatggttatgggagggctcctagattccgccgccctatgcgctacagaccttacttctgaagtacggggtagggtaatgaagttcaatgcaaaaccagcccatggtcactggtcagtcccgggaataatcaactgtatcgtttgcactgttgcggctcaatgctcctgtatcagctgccttttctgacctttgtttcaagtgccgccataagcgacggacatgttgtattggcttgtaatacaggacgtagtaagtgcacacactttctgtaagcgtgctttcccacttcccagggttactactgtttgcaatttctgtagttctttgggtcggtcggttaggacatgggagtggatcgttctatgcccatttgaggtagattagttatatgaagagaaagcttcgcatgcggggctgtcttgtttgcagattgccactacctcagtacggttccaggttcctcaaggtatccgctgagcatctgttctggtgtcggattccgagttcaggtcttgtaactaataaaaaacggaaattataatgtctctcttta

SEQ ID NO: 133075 - DNA, 534 bp, Zea Mays
aaggctcatgaaactttcgacccattggaggcccacgacctctccgtccgatccctaggcggcggatccttcctccaccaaacccgcacctgccgcaactgaatcgggtcagatcgggccatcggggaggcgagggagctcacgcggcgccatggacgaggaggagcacgaggtttacggccaggaaatcccggaggacggcgacatggacggcgctgacgttgatatggctgcctccggggatgacgcggcgaagctgcaggagctcgacgagatgaagcgcaggctgaaggagatggaggaggaagccgccgccctccgcgatatgcaggccaaggtcgccaaggagatgcaaggaggtgaccctagtgcatctacagctgaggcaaaggagcaggtggatgcccgttctgtgtatgttggaaatggctagtgtgcttgagcaagcctttcaaattgactataatggcctaatgggcactgggtgatgttttagagttagcatagagtgaaaaagaaaaaaaaagaaaaaaa

SEQ ID NO: 133076 - DNA, 705 bp, Zea Mays
aaggctcatgaaactttcgacccattggaggcccacgacctctccgtccgatccctaggcggcggatccttcctccaccaaacccgcacctgccgcaactgaatcgggtcagatcgggccatcggggaggcgagggagctcacgcggcgccatggacgaggaggagcacgaggtttacggccaggaaatcccggaggacggcgacatggacggcgctgacgttgatatggctgcctccggggatgacgcggcgaagctgcaggagctcgacgagatgaagcgcaggctgaaggagatggaggaggaagccgccgccctccgcgatatgcaggccaaggtcgccaaggagatgcaaggaggtgaccctagtgcatctacagctgaggcaaaggagcaggtggatgcccgttctgtgtatgttggaaatgtaagaatttataataatctccctctctttattgtgactctgcatattagcgggaatatgttatgttgctttgaaatttttatttaatatatatttcttgatattttacgtgtatgaagcatggagtttgaaacatccctatatcttttatgtgatacagtggtagacacatacatattgcctagtagctaatagatattttattggcactcgcttagttatgaattgtttatctcaagaagccaactaccttgttacttaccttcagaacttgtatg

SEQ ID NO: 133077 - DNA, 564 bp, Zea Mays
aaggctcatgaaactttcgacccattggaggcccacgacctctccgtccgatccctaggcggcggatccttcctccaccaaacccgcacctgccgcaactgaatcgggtcagatcgggccatcggggaggcgagggagctcacgcggcgccatggacgaggaggagcacgaggtttacggccaggaaatcccggaggacggcgacatggacggcgctgacgttgatatggctgcctccggggatgacgcggcgaagctgcaggagctcgacgagatgaagcgcaggctgaaggagatggaggaggaagccgccgccctccgcgatatgcaggccaaggtcgccaaggagatgcaaggttgtcttcctatgtgctcacccaccttgcctttttgatgcttgataccttttttgcggtgtgtttaggtttcattattatggttcgatatgctatataccttgatgatctgtgtgttactgtgtccaagaatctttaaggccggccgagcgagttaagattggtgtctgtaattatgactgcatttgttatttggtgcttggtaaaa

SEQ ID NO: 133078 - DNA, 435 bp, Zea Mays
atgcatccaccacttctaaaatctacagctggtagaagacataatgagaggttcaaaggatgttatgaggcaggcagtagcacaaaaaagaaggggtcacaccagtgccccatttgcaagtcatatggtcaccgttggtacaactgtaagaatggtaaccctgaagacatagctgctatggtagctgtgaagggtcctccaaagaaaaggaaaaagaatgttgagccatcatgtgagagtgccatcgtgatcgctgcctcaacacccaagacaatgcgttttcctcctagccaaggtgcctcaggaagctttggttcaaactctcataggtctggacatggctcaaatcaacctgaccaacttgccattgagtatcccttgttgtccttagctgaatccacaccaccacctccaaaccgacagcaaagaaggtga

SEQ ID NO: 133079 - DNA, 552 bp, Zea Mays
atggcgatgggcaaggccaaggcggcggagggcgcgcggtgccggcggcaccggcagcagggggcgggcgtctgcgcgacctgcctgcgggagcgcctgtcccacctgtccgtctcggcgccactgccctccgtcgtcgtcgtgcgcggctgcggcgaggatgcggagggacacggcggccgccggcaccaagaggcggccttgtcctcctgctccgagtcggaggcctccacggcctactcctcggagggctccagcgcggcggcgtcggagtgcgccagcccggaccacgagacgaggcggcgccgcgcgccgcgggtgtcgctgctgatgcgccacgagcgggtcgtcggggacgccgacgccgtggcggcgttcctgctggcgaggagggagcagaggacggcggcagcggcggccacgagcttctgggccaagctgctgcgcgcgacgcggggaggcgggaagaaggaccaccgagggtgctcgctggccgcgcgcggcaacacgctccaggagagggccgccgcgcccaagtgggttctcttctga

SEQ ID NO: 133080 - DNA, 1056 bp, Zea Mays
ttcccatagtggaagcacacttgatcagcacactactactgctcgagagcaatggcttcctccttggtttctcgattgcctgtcgcagtgttgctgctgctcgtggcctgctcctccacggcagccgccaccagctacaccgtcggcgacgggtccggctggacgtccggtgtcgactacacatcttgggccgcctccaaagacttcaaagtcggggacaatctcgtgttcaactacgcgaaggggctgcacacggtggtggaggtgagcgcgggagagtacatggcgtgcacggccgccaacccgctgggctccgagtccgacagcagcggcgcgaccaccgtggccctcaaggcgccaggcacccactactacgtgtgtagtatcgccgggcactgcggcgccgggatgaagctcgccgtggccgtgaccgtcggcggctccaactccaactcccctggcgccacgccggacgacccaacgaccccgcggacgtccccgacccctaccgcgccctacacgacgccgaccaccaccacaccgtacacgacgaccccgaccaccacaccaccgtacacgacgccgacgacgaccccgaccaccacaacaccgtacacgacgccgacgtgctctggcggtggtggcgccacggcaaccccgggcatgactccgttcatgtcatttcccagcgcggccggcctcggatcggcggcgttggctggctttgggctggtttggtgtgtcatcgtccagctagcgctgctgtaggtgtaggcacaagcacaaggggcgcggcggccatgcatggccgaccaggatggaggcagctgagataggtcatggttgcctgtaagctgcagcgcacttttactagctaccgatgtgtttgttctttgttccggccttccggggtcgaactggggtatattatactgtactttgattgatgaaggaagctcgctggtgtctcggctccgctttgaatcgcggtgcaagtcacttttcttggatgaaccaatcgaacgaactgccccgaaatctcaaaaaaaaaaaaaa

SEQ ID NO: 133081 - DNA, 1506 bp, Zea Mays
catgtccacggtcaccgtggcgagggcagccccgccgagcgttagtcacagttgttgcctgcctaccatgcggctctaactcgatccgtgcagcagacgccgagtcgcggcaaggagtagctaggaactaggaaggaggaggcagggaaaggccaggccatggcgctcgaagctgtggtgttcccgaaggagcacccggggtgtacggcggtcaaggcgcgcccggcgtcgctgggctgcggcttccacaccgaggagctcgaggtcgaggacaagggcggcgtggttctgcaaggagaggccgccgacgcgctgccgccgcccggtggtgccgccaccacgtgggactgggacgcggtgctctgcccgtgctccactgcaccagctgcaggcgccgtggaggagtgctgggacgtgcagcagcagcagcatcagctcctgtccgtgtccccgccgccctcgtccgccgtcgcagcgtcgtcgtctgggcgccgcaaggctgccgcgtcggaggcggcgcggcgacggcggcgacgccccaaggcggtgaggaacacggacgagatggagagccagcgccgcaaccacattgccgtggagcgcaaccggcggcggcagatgaacgagtacctctccgtgctccgctccgccatgccgccttcctacacgcagcggggtgaccaggcgtcgatcgtggctggtgccatcaacttcgtcaaggagctggagcagctgctgcagtcgctggaggcgcagaagcggtgcaccgagccaccggcgccggcgccgttcgccggcttcttcatcttccctcagtactccaccaccgccgcgacgggtggtgcggttggctctagtagcgacagcgctggctccggcggcgatcagagtggcggcggcggcggctgcgcgggagcgcggcgaggcgtggccgacatcgaggtgtccctggcggagagccacgccaacgtgaaggtgctcgcggcgcggcggccgcggcagctgctgaggatggtggtggcgctgcagtgcctcggcctcaccgtgctccacctcaacgtgaccaccaccgccgaccacctggccttgtactccctcagcctcaagatggaggacgagtgccggctgtcgccgtcggtcgacgacatcgccgccgcggtgaacgagatactcgccgatatctccgacgagtgcgcccgcggggggccaggccactgatgattagccgcttagcctaatatgttagcgagtgccatgtattgttgtgacgtacgtcgatttgatcctagtacacggataacactggcaagctagcgtggcagctcgctcgcgccactgtcaggcaggcggtaccactaccactccatatgtttgcgtgcaagtaaacatgtaccgattggaccagcttacgtactactaccactctttttgcagcgccagtaaaaaggaaaaaaactggggaaaaaaacgaagggagacgaaagcaaataaaatttaaaataagaa

SEQ ID NO: 133082 - DNA, 1600 bp, Zea Mays
aaggaaatccagcatttgttctacctgcaggtaagcaggttacattccgtttctactcctgtacaaatttacaaggtaatttacaaataggatcggtacgtctcgtgtttttcattcaatttcaaccgaatttggagcaagagcaaccagcacgaaatcggcgccctgttccccgcagaccaaaagacgccaatttcttccccgtgtgaaagaagatcactttcaagctagctagtttctacgctcaaaaatctgttgttcccattctacgtgcgaacctgttgcgtagctgacttctcctcgtccgccgctgccgccacctcgcgggagcgggacgcagcgccggacacgccgccgcctccgatgcggtcaaggcggacgctgcccttagcactagcaagagcgtcggcggcatcaacggcggccacgcgcttccctctcgccctcgtggacgacgaggacgacacctctcccagctcggccgagctgaccgttatcctggacgccgaaaagaaggacagcttcccggagaaggtccccgcgagaagcgactgccatctgctcgcccggccgaggggggcgcttcggccgcctcggctgcttccttccccggctcttcgcccgcgacgcagtcgcatgctctgctcgcccgcggcgaccatctccctgcgcacgtgctccggcagccgcagcgtgaaccgctccaggtcgcggtcgagccggacggcgagggagtgtcccgtagagtgcgaccgggcgagctgcgtcgggaccggcttgcgccccgaccgcgaccgcatggcgcgccgctgggtccctatctgctgcagctccagcgcctcctgccgccgcgcctcttcctcctcctcggtgatcacatcgatcaccacggccacaggtagcggtccatgcccagacgacaccgcggtttcgctcgagatgctgctcgccactgggatcggcgggaaactgtcgggccgctgttcatcgctgctggtatccttgttagggtcgaggttgcagcggcagacggggcaggtcacgtggctggcgagccactcgccgatgcattccgggtggaaggcgtggctgcacttgggcaagagcctgagccgctcctcgtcctcgaactcgctgaggcacactgcgcactcgagcgcgccgcccttgcccacccggagcgccttggcctcggcgtacttcatggtggggaaagcctcgaccacctcggcgtccagcccgcgcggccgccgctgcctccgcgaccgcgagatgaaggcgtcgaaattgggcacggctctggcgcggtcgtagtcgtccgacgtggccgcggagccggtgcagtggcggaggtagacggtgaatgaggcgatgaacacgaacaccgcgatgacggcgaccaggagcgcgatcatggccgtgctgacctggccctggccgccgtcatcgtagctcggctgcgcgctggctgcgccgaccgcggacacgaggagcgcggcgagcagcgcttggccgtggcgagccatgggcgtccttgcgcgcggcaggcggcagtgcagacggcagagagaggcgagggcccgggagacgagagcgggtt

SEQ ID NO: 133083 - DNA, 1619 bp, Zea Mays
atggccaccgcggggtcaatctgtcggcaactcgccatggcctccctgtgagccaacttggccgcccgacaaaacgtctctcgccgtctgcgcgtctcttccccaccgaggctgaggcggcgttccgcagcgatgctgcgccttcaacatcatttcttgtcctccatcggcgcgtcctcccatcgccactgcagcctcctctctattgctaccactgccattactcccgatcgattcgtcgctgaggaatacctggtcaccacctgcgggctcaccccagcgcaagcgggcagggcgtccaaggggctcacccacctcaagtctccggttaagcccgacgccgtcgtcgcctttctcgcgggcgtcggtctcgccaaagacgacatcatcgccggtatcgccaggtacccgcggctcctctgctccaaggtggacaaaaccctaacccctcgcttcgctcagctcatgagccttgggctatccccttcccaaatctcccgcctcattaccatcgtccccaacatcttcgtcgctcccaaaaagatctcccacctccagttctatctctccttcatgggttgcttcgatcgggttcactccgccatcaggatcaatccaatgctcctcagtcggaaccttgaggatgtggtcaagcctaacatagcattcctactgcagtgcggtctaactgtttctaatgttctagagttcccattgctgataggcatgaggcccgagagtgtcagggaaagggtggcatgcgctgagaagcttggtgtgccgcgcaatacagggatgttcaagagtgccctgtgggccgtctattgcgttggtcccaactccattggtgcaaaattggatgtcatcaaggcgactcttggatgctctgaggcggagctgacccttgtggtgcgcaagtcacctccaattctgaggatgtcagaaggcaagctgagtcgcgcattgaagttcctgaaggtggatgttgggttgaagcttcagtacatcttgcttaggccagcaatacttgcctttagcatgcagaggcggctgatgcccagacattatttcatcaagattctgaaggcgaaggggcttgtgaaggaaaatgttgacttttataatgctctttgtttaactgaaaagagatttgcccagaagtttattgatccttacaaccagagtattgcagggcttgcagatgcttatgctgctgcttgtgctgggaaaatgcctcatgaagattaggcgcattagcagcagcatgctagggatcatggtgaagcaaaggcagagatagtcggttcaggtcttctctgcatgtacttgaacagcccctcgccaaactattgtgcagttccttgatgcataccaatgcttgcaacagatgctgcctttgtgtgttgaaatgaaattagttcttccttaagaccggtgttgtgacctatcatttcaggtaagccattggctattttcagatgggtataatgatatgttactctgttctttctgtgtttcaggtctaaatattgtctgtacttgaagtcttgaattaattatgtattgaacttgtcacacagttaattatttgatttaatcaaatatttctatctgaagta

SEQ ID NO: 133084 - DNA, 279 bp, Zea Mays
atgttgttgaatcagcacggccagtttcctagaaagagcatagtaagatgtctagaaaagagaagaaaatgggagggtggggggaatctgcatggaatatacatgtatgtattcttctacgctttctggcaagatacaatcaaccacccgttcaacgtcactcttatcaagacccattctgaatgccattgttgcaacaaccactcttattttgttagagcaaaaaagcttatgtacacggttcctattcttcttaagaagtccattgtggtacctctg

SEQ ID NO: 133085 - DNA, 1098 bp, Zea Mays
gtaataaacccggtttggaatgggtggattgtattttctatctgtacatttttcgtgtgaaaatctcctatgtgaaataatacagttcctacgcggaaaaagagacggtctaatgaaagaaaagatatgagcagtaaaaacacgcggggatttcagagttcagacagctgcttgacgcggagaatcatgcatggcatattggaatgggacgggcggaggcggacaggaaccggaagagatcacttggcagagatatcttttcggtcagaaccagccatattttacctcgggactcatgaaaacccgcgacccccgaagcgctccgccgggccctgccacgagacctcgatttcagagaatttcatctgcgctcgcttgatcagaatcttgatggcatccgaggatccgaagctctcaattccagggtttcttggcatggtgcgttccaggttctcatcagttggagcaacaaagggtacacagctagtacctagtagctcacaagcccacagcctttgaacctttacaacaactcaacaaggaccggagagacgagagagacaaagccaacgctgctcatatgcgtttggcggcttcacccgatgccccgatatgtgtttgttgaaaaccagtagccgtcacctgcatgtaccaacctgaactttacttgagtttgatgaagcatagtgcgtgattccagtaccaaatcatgtgcatttaggatcactgactaaagaattaaaccaaagctaccaaataggagtagatacctagttagttacctacacggctatacatcacgaggcaagccggagtataaaacgactatccatctccatactcgctagtcgctccagtggtcgaatcttgctgtagccatgaacctattaactagtttggcatctttaatagctccacgacagtgcagctacaattttgatgcagctgcagtgcacacactaaatatacatatactacagttaggtcctcagatttggcaaccagctaaaacggccaaattgtagtaattgtcaccctctacatgtaaagcacactactaatagaacaaagatgctctctctacaaatcaaaataatc

SEQ ID NO: 133086 - DNA, 160 bp, Zea Mays
caggaattttattaattatgaactttcttcagctagtcgctcatgtatgtaatatcaggctgcaccacatatgtatgctaagcaagttgtgccatggttaggattacgacgttctgtaaaaaaaatggtgagttaaatgtgctggaggttcattaattta

SEQ ID NO: 133087 - DNA, 2396 bp, Zea Mays
gaatcaaaccctagctcgtcgtccgcatcgatttcccctatccatcggatccccaccagcaccaggcgactcgccggaaccctagctagccgcagatcctacgcgccgtgcgcgcggccgcctccatggcgactctcaaggatctcctaccggcgcccaagacgtcggcgtccaccttctacgaccatagtagcgacccctggttcaaggagcggtacggcggggagtcggcgcaggcggccgcggcagcgaggcccgcggccgccgccaggctcatgcctccgtacgggaagcgagcggggttcgtgccgagacggccggaggacttcggggatggcggcgccttcccggagatccacgtcgcgcagtacccgctcggcatgggacgccgcgacgataagggcgggtccaggatccttgcgctcaccgtcgacgcacacgggagcgtcgccttcgacgccgtcgtcaagcagggggagaacgcaggcaagatcgtctactccaagcatagcgacctcgtgccgaagatagccactgccgattctcaggcgatgtcagacgacgacgaggagcagaagcagatcgaggagaccactgaacggaccaaggccgccttggagaaggttgttaacgtccgcctctctgcagtgcagctcagcccaagaacgtgccgactcatgattctgagtccaagttcatcaagtataagccgtcccagcaatccgcggccttcaattcaggtgcaaaggagaggatcattaggatgtcagaggtggcggtggatcctcttgagccaccaaaattcaagcacaagcgtgtgccccgggcatctgggtcaccacctgtgccagtgatgcactcgcctccaaggccggttactgtgaaggatcagcaggattggaagatcccgccttgcatttcaaattggaaaaacccaaagggttacacgatcccacttgataaaaggttggcggctgatgggagggggctgcaggaggtgcagatcaacgataactttgcaaagctttctgaagcattgtatgtggcagagcagaaggcgagggaggcagtacagatgcgctccaaggttcagagggaacttatgctgaaggagaaggagaggaaggagcaagagctaagggctcttgctcagagggcacgcatggagaggactggtgccccacctgcaccatcaggtgtgcctgctggtggcggcaggggagcagttgagggcttgaggctgtcgatgaagatatggatatggagcgaccacgtgaaccgcgtgagcagcgcagggagtctagagaagagagggaagcacggattgagcgtgataaaattcgtgaggagcgcaggcgcgagagggagagggagaggaggctggaagccaaggatgctgcaatgggcaagaagagtaagatcacgagagacagggatcgtgatatcagcgagaagattgctcttggtatggcaagcactggtgctgcaaaagctggtgaggtcatgtatgaccagcggttgttcaaccaggacaagggaatggactctggctttgccacagatgatcagtacaacatctactctaagggtctcttcacagcgcagtccactatgtccacgctatacaggcctaagaaggacggggattctgatgtatacggtgatgcagatgaacagttggagaaggttatgaagacagagaggttcaagcctgacaagggatttactggtgcttcagagaggactggcaagcgagacaggcctgttgaatttgataagcaggaagaaaatgatccgttcggtctggatcagttcttgactgaggtgaagaagggtaagaaagctgtggagaagattggcggcggaggaagcatgaaggcgagtggtggatcctcaatgagggatgattatgatggtggatcagggaggtcgcgcattaattttgagagggggcgctgaggtatttgctctgcttctgcagtttttgtctgctttctcgaatattttctagcaggatgtcattagaagctgaactctgataagaaagagtgtggcacctgtactgttatagctcgtgtgcctactttcaatggttgtgctaaatagtgtgtaatatatggatcctatgatgtctaagtactatgtgtgtacctgttcattataggatctatgaactttgtttagtcatgttccatcaatttttatattacatgttattgggctgtgagatttcatcagttacccttctgggatatggatggactcagtgtggctatttgttgcctggtatgtgattccctgcacaggtgctcattctatttatgaattttttggtggtgcgtattacattctttctttctgctgttattgtgggatgctattatggttcacgcgaa

SEQ ID NO: 133088 - DNA, 1058 bp, Zea Mays
aaattgagtgaccatggtgcacctatgagcaggcgcgctctcgctcttccgaccttgtcttgagaggaaaaaggtacaatttaggacttagtccagtatgattcctgaccttattgatcggcatagaaaaattctcaatttggcagcaatcaatttctaaagcgtgacaattgggtctgcaggtgctgaattcgtggtattcagaccctcagagattgctgccagtgttgctcttgcggcgatcggggaatgcagcagttctgtaattgagagagctgctactatctgcaactatttggacaaggagagggttttaagatgtcatgaaatgattcaagagaagattgctgtgggaagcattgtcctaaagtctgctggatcatcaatttcctctgtgccacgaagccccataggcgtcctggatgccgctgcctgtctgagtcaacaaagcgatgatgctactgttggatctcctgcagtatgctaccatagttcttccacgagcaagagaagaaggatcactagacgtctactctagttgtggtatgcttcaggtgtgctcctcaccgttctaggagtttttgattggttcattcatcttaaatttagtttggcctctcaaggattatggtttcgtcaagtagttgcctgaatggaacaacaaaacatgcacactactcagtgttccatataaagagagagagaaaaataacaagcagcgtcctgcgagccagtgttgcgattccagttcatgcaattggcatccgtaaggggaatgcaagcgcaagacactagagtccagggatgctggtgtaggtagagagggggaacaaggaatttacatacggcatagagatgagagctctctcgtaccattttgtaccttcaattcgcaatgaactttaggcaaggattgccttgggcaattgaacatttgtcgggtgagaagaatccaaagatggatcggcagaggaatagaacaatttgatatatttccataaactacagatatgttttattttttcttaatggtgagctgtcacttgttgatagtaata

SEQ ID NO: 133089 - DNA, 934 bp, Zea Mays
gcttttccctaactataacatttaccttcatttgttattaaatacacttggtgcagataacttacataaggatagtggtcagccataatattttggaatatcatcttccttttagaaacaggtttacgcaaactttcagtgacaacgtttgcatatatttttttcattcacactatccatctcgtagtatgtgaatgagttcgacaaatttgtagcaactagcacaggcctaagggatacacgtcctggtgccccccaccacctcccattcattatccttggtcttcacctccacctacacctacatctccatctaccgaacatcagacccctccaactaccttgccgacacatgaacgagaagatgggttaggctttatcgaaaccctcttcgctagtggaggtatcgaccatcactcgtcactgtaacccgatggtgatcggcgaccgtgagcttccatgttattgtgttctaatacttgagacttttattatgactatgtatgagatattgtctcctattagtactagatgatgagatgtgtcttattatgactatggatgagacttctgtgatgtaatagttgatgagactatggatttaaatattgttatgtgattgtgtgtgagatgttttatatgaaaatatgttgtgatatatagctgttgatatatttgttatgttgtggaatgtggtgtaaaataaaaataaacaacatttgtaatgctggtcaaattaacttcctagaagcttattgggttgtaggaagttagctagctaacttccgaggggctacagtcagccgcaggaagttagccagataacttcctaggggctacagtcagccgtaggaagttatccagctaacttcctagggctacagtcagccgtaggaagttagtcagctgacggcgctgacggcgtgaagctact

SEQ ID NO: 133090 - DNA, 115 bp, Zea Mays
tctgcatgcatgtttttgcttgttacacgttctttctaccctttgcatatggttgttcaattcatctttttttctaaacttacatcccttagtcggggtattatcttaagaacag

SEQ ID NO: 133091 - DNA, 492 bp, Zea Mays
atgttggatagaagaggaattgcgagcaaccgaggtctccaaggcacgccaacacgcatcctgcgcagtgaggcggtcgctgatgtcgcgaaggagcttcgattgttcgtcgatcgcgagcttcagatttggctccatgaccccagattgtttggcgcggcgcgtgtaatgagcagacgccagacccgagaccggtgtctccgataccaattgttagcaatagcagtggacaagcagcgaacaatccgagaaacagagtttgggggaggagcagatagcttggagaggaagaagaacaatagtgacagcgtagattcctctctggtctcctctgttaccctctctcactctaatactcctattacaaggtcggcccatcaggcgacccagtcgcggcccacgaacttgggattgggcttgtgcggacgccggctggttcttggctctgctggagtcttctctgtggagctgttgctcgcgctgctaacataa

SEQ ID NO: 133092 - DNA, 1164 bp, Zea Mays
aacgaaagagttgcgggggtaaaagaaaaaaaatctagatccttctctcgttcaagcccacagaatccaccaagccacggcgtcaccgccagcgctactgccatctcggggaaggaaccgaaccgacccctgaaaagaattcggtgcgtcggaaggaagagcaaccctgcggtggtggagcgaggacccgggttgagggatgtggtgggagtgggagggcgacggtggtgaggcgccgcgggaggagactcctgtggacttcgatttcatcgccctcctcgccaagcccaaggattactacaagatactggaagtagattactatgcgtctgaggagacgatcaggtccagctatatccgccttgcactgaaatggcaccctgacaagaagcaggggcagggcgaagagaattcaacctccaaatttcaggaaattaacgaggcataccaagttctgagtaatccagcaaaaaggcaagagtatgacaaaaaaggcattctatacgttcaagatcagaatgtagtggattacctgaaccggcacaaggggctaatacttacgtgcaatggtcttggtataaggtactcagtatggtgaacacgctcaagggcccacagtttgcactcatctgcagtcttggagaatctgtaatgtatgccatcaaaatttattttcatcccttgtgtgccatagaatggcatatatggatttttgtgtgtatgacaggtggggccagtggggatgaaaataatttctgatgacatacagggaagcctttgatctgaaaatggtatagtgcagcagtgccatgtttgaaagccaaatattgaccacttgagttcatcctacaaggctacaacagagttgatttttatttgtcgatcagctgttgttgaatgaaagaggcagatatgttcctgctgctccttgtatgtaacatactgttcctaaccatgcaatgtaagcgtttgtttctgtcttggcgctttgtattgacgttatgtggacctgaatgtctgtggaaaaacagagtggtatcatgctccttccccggaaactagtacatctatatcctcattaacatactctctccgtttttattagatactgtgttagctttgtcattgattttaaaaaatatatagattcatgttatttggttc

SEQ ID NO: 133093 - DNA, 989 bp, Zea Mays
aacgaaagagttgcgggggtaaaagaaaaaaaatctagatccttctctcgttcaagcccacagaatccaccaagccacggcgtcaccgccagcgctactgccatctcggggaaggaaccgaaccgacccctgaaaagaattcggtgcgtcggaaggaagagcaaccctgcggtggtggagcgaggacccgggttgagggatgtggtgggagtgggagggcgacggtggtgaggcgccgcgggaggagactcctgtggacttcgatttcatcgccctcctcgccaagcccaaggattactacaagatactggaagtagattactatgcgtctgaggagacgatcaggtccagctatatccgccttgcactgaaatggcaccctgacaagaagcaggggcagggcgaagagaattcaacctccaaatttcaggaaattaacgaggcataccaagttctgagtaatccagcaaaaaggcaagagtatgacaaaaaaggcattctatacgttcaagatcagaatgtagtggattacctgaaccggcacaaggggctaatacttacgtgcaatggtcttggtataaggtactcagtatggtgaacacgctcaagggcccacagtttgcactcatctgcagtcttggagaatctgtaatgtggggccagtggggatgaaaataatttctgatgacatacagggaagcctttgatctgaaaatggtatagtgcagcagtgccatgtttgaaagccaaatattgaccacttgagttcatcctacaaggctacaacagagttgatttttatttgtcgatcagctgttgttgaatgaaagaggcagatatgttcctgctgctccttgtatgtaacatactgttcctaaccatgcaatgtaagcgtttgtttctgtcttggcgctttgtattgacgttatgtggacctgaatgtctgtggaaaaacagagtggtatcatgctccttccccggaaactagt

SEQ ID NO: 133094 - DNA, 216 bp, Zea Mays
atggtcaagcccctggcgtccaatctgacagtccattcatggccaccttatcctggcagttacttagaattcgctatcgagtgtgccagtgttcttgatgaccatgatctgctcaatattgttttgactgtcaaggtgtttctgggaaaggggaagcaggcatggcgacaacacgcgcaggcaccgcgaaggcatttgagcgaggtaaggggataa

SEQ ID NO: 133095 - DNA, 214 bp, Zea Mays
tgtaatttaccaagtcggacatgtggaatttttacctgtccttgcaaattaattttttcacatgtatgtatatacacacaattcagacctgtggaattataatttgctgctgcaaattaatctttttacatgtatgaacgacacttctgttgctttctttcttgtcaaaaggagctactatggagagtatataaatctagttgtcctacattaa

SEQ ID NO: 133096 - DNA, 107 bp, Zea Mays
gaccaatagagtcttacacgtatggagaacaggctttggtaagtgccaattacctcgttggatgaagtctctaaggatcagtgctattattccacgcgtttcaaccc

SEQ ID NO: 133097 - DNA, 105 bp, Zea Mays
gccgtattctactagtgctagtagttaagtgcacggtggtgcgaggcgagcgtagccctaacacaactgttgggggacatttggcttctgaatgtcctcaaaaac

SEQ ID NO: 133098 - DNA, 828 bp, Zea Mays
aatatcgccccactggccagtggccacgcactatccgacactaggccaccaccagcgggcgggctccagtcgcaactcgcaacacagacgccgccgccgcccaaagaaagacgtcaactccaggagacaagatagtgagaactgaagagaaggatgggcttcgagaagcagatcctgagatccggcaccggccccaagccgataaagggccagaaggtcaccgttcactgcaccggctacgggaaggatcgtgatctgtccaagaaattttggagcaccaaggaccctgggcagcagccattcagtttcagcattggtcagggttcagtgatcaaaggatgggacgagggagttatgaccatgcaagtgggtgaagttgctcgtatccagtgcacgcctgattatgcttatggagccggcgggttcccagcctggggaattcaaccaaactcagtgcttgtgttcgagattgaagtcctcagtgcccagtaattcgcatctgtcagctatggaaacgttggccatgcttctcaagtaatgaaataattccgttgtcacctcatgctacatacagcagattggtgttacgagttaaatcctgtgaaactttagcattctgtaaccgtggatgtcgagtttatggagttccttgtgtggcgcctcaagtcaagttctcgtcaaagattgtaatctgatggcttccattgtgacttgtaggcggctgcaataaacttacttgatgcaattattgcagtcgaatcctgtgaacctgtgatgttccagtggaaacggtagatggctcgatcgtaccagggtatcagtttcgcc

SEQ ID NO: 133099 - DNA, 1148 bp, Zea Mays
aatatcgccccactggccagtggccacgcactatccgacactaggccaccaccagcgggcgggctccagtcgcaactcgcaacacagacgccgccgccgcccaaagaaagacgtcaactccaggagacaagatagtgagaactgaagagaaggatgggcttcgagaagcagatcctgagatccggcaccggccccaagccgataaagggccagaaggtcaccgttcactgcaccggctacggttcgcttcttcccttcacccccataaacctctggtttacttactacgttgttcttggatctgaatcactttttagggtttagagttagatgctttcagatccattcgtgcagtagcctcgatgtataagcggcgactcctttttcgtcggctttgatgcttgggatgcgatgttcagtcgtaagattgagatcgatctgatccagagttgcaagcggaccttgtgcaatgcataattcgtttatcttccattttgtattatatgactaacaccatctgatctgcagtagtcgttcgctaacttttgcttgctgctctgggtttgttttcagggaaggatcgtgatctgtccaagaaattttggagcaccaaggaccctgggcagcagccattcagtttcagcattggtcagggttcagtgatcaaaggatgggacgagggagttatgaccatgcaagtgggtgaagttgctcgtatccagtgcacgcctgattatgcttatggagccggcgggttcccagcctggggaattcaaccaaactcagtgcttgtgttcgagattgaagtcctcagtgcccagtaattcgcatctgtcagctatggaaacgttggccatgcttctcaagtaatgaaataattccgttgtcacctcatgctacatacagcagattggtgttacgagttaaatcctgtgaaactttagcattctgtaaccgtggatgtcgagtttatggagttccttgtgtggcgcctcaagtcaagttctcgtcaaagattgtaatctgatggcttccattgtgacttgtaggcggctgcaataaacttacttgatgcaattattgcagtcgaatcctgtgaacctgtgatgttccagtggaaacggtagatggctcgatcgtaccagggt

SEQ ID NO: 133100 - DNA, 1768 bp, Zea Mays
aatatcgccccactggccagtggccacgcactatccgacactaggccaccaccagcgggcgggctccagtcgcaactcgcaacacagacgccgccgccgcccaaagaaagacgtcaactccaggagacaagatagtgagaactgaagagaaggatgggcttcgagaagcagatcctgagatccggcaccggccccaagccgataaagggccagaaggtcaccgttcactgcaccggctacggttcgcttcttcccttcacccccataaacctctggtttacttactacgttgttcttggatctgaatcactttttagggtttagagttagatgctttcagatccattcgtgcagtagcctcgatgtataagcggcgactcctttttcgtcggctttgatgcttgggatgcgatgttcagtcgtaagattgagatcgatctgatccagagttgcaagcggaccttgtgcaatgcataattcgtttatcttccattttgtattatatgactaacaccatctgatctgcagtagtcgttcgctaacttttgcttgctgctctgggtttgttttcagggaaggatcgtgatctgtccaagaaattttggagcaccaaggaccctgggcagcagccattcagtttcagcattggtcagggttcagtgatcaaaggtaatcctgccacagataatcagttcatgtcgaaacctaaaaactttgcctgttggttgtattcacgtgaattacttgctttgcgatttagcaagggtctgttgatcttatttatagatgcggcatgagctttacttatcatgatgttttgtttctggtagagctccaaatttgcattgtttgctttatattattctcttttacccatggttttaaactgccagtcatgctttccgtgacacattaacccagatgaagcctagagcattttagacttttccaaaagtgagcaaatactgttcagggtcagcccagtttcatgttgcatgccaaaactccacaggcctgcaaacaaaactatggtatattagccaaataagcagacagcagttccaattactgttgtgctaattgctctgtttcctataggatgggacgagggagttatgaccatgcaagtgggtgaagttgctcgtatccaggtatgcccctcagacgtcgaattagtctgaatgtgtttgctttactggctcttctagcattttattactactgcaactttgaaggcactctatctcttgatggaagtaacttctaaaaaaactttgctgtgactacggatttttgcctttctgcagtgcattatctttgccctgataaactgttatcacttgatattcttcagttcataattttttcatatcagctttgccctggcacctgatattagagtgttcttgcttcagtgcacgcctgattatgcttatggagccggcgggttcccagcctggggaattcaaccaaactcagtgcttgtgttcgagattgaagtcctcagtgcccagtaattcgcatctgtcagctatggaaacgttggccatgcttctcaagtaatgaaataattccgttgtcacctcatgctacatacagcagattggtgttacgagttaaatcctgtgaaactttagcattctgtaaccgtggatgtcgagtttatggagttccttgtgtggcgcctcaagtcaagttctcgtcaaagattgtaatctgatggcttccattgtgacttgtaggcggctgcaataaacttacttgatgc

SEQ ID NO: 133101 - DNA, 971 bp, Zea Mays
gcatcagatacgttccctaaatgtaaaatagacactaggtttcaggctgcacgtgcagcacgcaacttgaccgatccatcgccgcatcgcggacctcgaccccgccctcactgagctaggagcagacgaggcttgagaacgagcgacggagacctagccgaagcaggagctccccatggcgaccggcaacctggcgagcgtggtggtggctgtagacggcagcgaggagagcatgaacgcgctgcagtgggcgctcgacaacctccgcctgcgccccgacggcgagctcgtcgtgctgcacgtccagccgccgcccaacatcgccgcgggactcaacccggcgcccatccccttcggcggccccagcgggttggaggtgccggcgttcacgcaggccatcgaggcgcaccagcggcgcataacgcaggcgatcctggagcacgccctgaagatttgttccgataagaatgtggaggtgaagacggaggtggtggtcggggaccccaaggagaaaatctgcgagattgcggccaaccgcaaggccgatctgctcgtcatgggctgccgtgccattgggccgctaaagagggtgttcttgggcagtgtgagcaactactgtatcaaccatgtgggctgccctgttgttgtgatcaaggggacatgatattccatcagcccagcattctttggtgtacttccattcaaggtttttgaggcttctgctgtgacatgtgtaatcctgtacgatatattactgcacattactatgcttttgttggtgctgctgagggatgaaagttgctatgtggtccctttcgttataaaggaggaagctttgtcggtcgtgtaatcgtggtaataagttggtcctgtggcggattcttgtgtatattcttgtaatcgttcaaagacatggttctgtctgaagtcccaacagcgcaaaattaccagagtctcggtttgtttgtttg

SEQ ID NO: 133102 - DNA, 867 bp, Zea Mays
gcatcagatacgttccctaaatgtaaaatagacactaggtttcaggctgcacgtgcagcacgcaacttgaccgatccatcgccgcatcgcggacctcgaccccgccctcactgagctaggagcagacgaggcttgagaacgagcgacggagacctagccgaagcaggagctccccatggcgaccggcaacctggcgagcgtggtggtggctgtagacggcagcgaggagagcatgaacgcgctgcagtgggcgctcgacaacctccgcctgcgccccgacggcgagctcgtcgtgctgcacgtccagccgccgcccaacatcgccgcgggactcaacccggcgcccatccccttcggcggccccagtggaggtgaagacggaggtggtggtcggggaccccaaggagaaaatctgcgagattgcggccaaccgcaaggccgatctgctcgtcatgggctgccgtgccattgggccgctaaagagggtgttcttgggcagtgtgagcaactactgtatcaaccatgtgggctgccctgttgttgtgatcaaggggacatgatattccatcagcccagcattctttggtgtacttccattcaaggtttttgaggcttctgctgtgacatgtgtaatcctgtacgatatattactgcacattactatgcttttgttggtgctgctgagggatgaaagttgctatgtggtccctttcgttataaaggaggaagctttgtcggtcgtgtaatcgtggtaataagttggtcctgtggcggattcttgtgtatattcttgtaatcgttcaaagacatggttctgtctgaagtcccaacagcgcaaaattaccagagtctcggtttgtttgtttg

SEQ ID NO: 133103 - DNA, 202 bp, Zea Mays
acaagcttgggcgcgtgcttgagaagctcccgcctggcgcgttgggtcttgggcaccctgatcgatgccaccatcttcttcctccgctccgatccaagccgccgccgcggagaacaagcagaagaggtggggaggcggctacctgacgacacaacaccgggcggcctgacccctaaaccctagaaaaccccgcgccatattt

SEQ ID NO: 133104 - DNA, 1402 bp, Zea Mays
atgcctttgtctctgcgttccaccggcgacgccaaggacaacacccttcgctcctgctccgccgccacaggggaagggacagcttcggcggcgggtgccggcaccgatgggaagcccatgtcgagcatgtaccatgagcgcgatgccggtgatggtgccccaagagttgccaagcttggtagcggcgagctggaggtcggcgaggcagccggcgagcatgacagagatgagcgggatagtgtagttgagaccagcaagaagacactgatcctccatggtaccaagactagtgctgtgttgaactctgtgctgtcagatatttaccacctaaagcgtgataatgctgtgaaatataccaagaagaatgacaacattaggccttttgaaagtggtggagaatcttctctggagtttttctctcttaaggcagactgtagccttatagtgtatggttctcattcaaagaagaggcccaacaatctgattttgggtagaacgtatgaccaccacatatatgaccttgttgaagtaggagttgagaactacaagtcaatggaatcttatgtttatgataagaagctagcaccattacttggatcgaagcctttctttgctttcataggggaacactttgagagtgctgaagagctgaaacatttgaaagaagtgctgcttgatcttttcagaggagaggtcgtagagaatctgaaccttgctggtgtggatcggatctatgtgtgcactgcaatctctcccactaccgtctacatgatgcactgtgctctccgtctaaaaaggtcaggtacatctattcctaggatggaactggtcgaagttggaccttcgatggatctggttgtaaggaggcacagacttccagctgaaagtttaaagaaagaagctatgaagaccgctgaacatgctaagaagatgaaaaacgtcactaaggatccagtgcagggcaagctgggcaaggtctacatgccagaccagcaggttggaaagttgaccttatcaaacgacataaagggactaaagagggagcgccgtgaagccaagaaaaaccaggactcaaagaagcaaaaggtcaaccccgagtaaagatcactgaagtttacctttgcattggatacaggtcaggttaagaaaccctggtttgtatctgttcccatctgctgtgttatccaattagaagttgctcgttgtcagattgtgttaaatagtttagggccatcttgttaggctaaagacatgtgtacgactttcacaacaatattgcgtaccaattcatgttaagacgtaagcatggaaaaatttgggagtgttatcctatcaaatatcttttgatgtctcaagcttggataaatgaggagggttacgataggcttggcgagccaacgtt

SEQ ID NO: 133105 - DNA, 1423 bp, Zea Mays
atgcctttgtctctgcgttccaccggcgacgccaaggacaacacccttcgctcctgctccgccgccacaggggaagggacagcttcggcggcgggtgccggcaccgatgggaagcccatgtcgagcatgtaccatgagcgcgatgccggtgatggtgccccaagagttgccaagcttggtagcggcgagctggaggtcggcgaggcagccggcgagcatgacagagatgagcgggatagtgtagttgagaccagcaagaagacactgatcctccatggtaccaagactagtgctgtgttgaactctgtgctgtcagatatttaccacctaaagcgtgataatgctgtgaaatataccaagaagaatgacaacattaggccttttgaaagtggtggagaatcttctctggagtttttctctcttaaggcagactgtagccttatagtgtatggttctcattcaaagaagaggcccaacaatctgattttgggtagaacgtatgaccaccacatatatgaccttgttgaagtaggagttgagaactacaagtcaatggaatcttatgtttatgataagaagctagcaccattacttggatcgaagcctttctttgctttcataggggaacactttgagagtgctgaagagctgaaacatttgaaagaagtgctgcttgatcttttcagaggagaggtcgtagagaatctgaaccttgctggtgtggatcggatctatgtgtgcactgcaatctctcccactaccgtctacatgatgcactgtgctctccgtctaaaaaggtcaggtacatctattcctaggatggaactggtcgaagttggaccttcgatggatctggttgtaaggaggcacagacttccagctgaaagtttaaagaaagaagctatgaagaccgctgaacatgctaagaagatgaaaaacgtcactaaggatccagtgcagggcaagctgggcaaggtctacatgccagaccagcaggttggaaagttgaccttatcaaacgacataaagggactaaagagggagcgccgtgaagccaagaaaaaccaggactcaaagaagcaaaaggtcaaccccgagtaaagatcactgaagtttacctttgcattggatacaggtcaggttaagaaaccctggtttgtatctgttcccatctgctgtgttatccaattagaagttgctcgttgtcagattgtgttaaatagtttagggccatcttgttaggctaaagacatgtgtacgactttcacaacaatattgcgtaccaattcatgttaaggctgtctccagcaacaaactctatacactgagtgtacgctaaatttagcgatccaaacgttcgctgcatcctccagcaacgaacggtaaaccagtcgctaagtatcggacgatgttcgtacacgct

SEQ ID NO: 133106 - DNA, 1770 bp, Zea Mays
aagcaatgagttccatttagcagcaccggcggcacggcaccccgcagtcccgggctcccggcgtcccgcacccacgccctacaggcagaccaagcaaatggcgatctcgatctcgcaggaggccttcgactccatggtccgggagaacatggaggacctcggcatggaccccgatgaggccctcgctgacgccgttgaggcgctcaccctccagggcgccgatctctcaggtatcgttaagcgcgtgccgggagaggccaccgcggcggaggtgagcccggtggtgcgggttctggacgaactgaaggcctctctcagcgccagcggcgggtcggagcaggatctcgacggacttgtctctctgctcgatgagttgcgcaatctgtgctgctccggcgagggttcggagaatgcagcgatcgcggtacggaatggcgtcgtggaggcgctcgtcgccctgtgcgcgtccgctcgggtcgagcaggagaggctgcttgcttcggccttgaagagtctgagctccgtactccgtgatgtggcaagcactgaaaagttcagacgaagtgagggacccagaattgtcatggatctcttgcaaggaggctcagaaaattcagatttattggatgctggatttagtgttgtggcagcaggttctgctggcaatgaagttgtgaaagagtcctttatggacctgaaggtcgatgaactcattctgcgggttatgaaggataaatcaaaatctaatgtgcaaagtttgtatgatgccattcgtgttctgttgaaacctgatgacaaccgagtggtagcttctcaggtatatggatactcccggagatttgctgaaatcggggttgcagaagttcttgtcaatgcacttcgtgagcaagtcgctccttccagtttgccatctgcttgtgctgctttaaagtcgattgcagtcaatgatgaaatatgccgttccatatctgaaaatggtggaattgatgtgcttcttcaatgcatcgacggggctggtgagcagaagaacaaagctgtagcaagatcttgctgctctttgttgtccaagcttgctgcaagcgatgcaaacaagtccattatcattcagcgaggtggttttgataggttcctaaagttgacatccagattttctgaagatcctgctataattcaagaggttatgtctatggtgacggtcctcacactgaggtcaccagaaaatgcagcacgtgcaatggaagaaggctatgggacactggctatacagtcaatgcaaaggttcccctcctccgtgcagactcagaagcaagcatgccttatgattcgcaatcttgttgcccgaaaccctgagaataggatcgtcctgcttaatgatggtgcagaaaagcttattagaaaggcaatggcgctgcacagaagctgtaaagatgctgcttcgtctgccttgagggacctgggcctcgacaactacaatgcatagacaccagtgaccagtcacaccatagaaaatgtgcgtcgagttagtttggtagcggtagaatgttttggaggagaaatacattgtatgagttatcgaggtgccgcactgaaatgagtttgtagaattgcgctactgtggttgcatcaatggtttcagtttgttgggcaatcaaacttcagggctattaggttgtttccagcaaatcgtacatatgatcatacaaaacacttcttttatagagtgagctttaaaatagtagatggagatatataatgaataagttgtttgag

SEQ ID NO: 133107 - DNA, 1825 bp, Zea Mays
aatctgacaagtgggccacaatgattgtatcaacatagcctcccaacgcaacaaagggatttgcttcgtccgacgtccactacctttaccgccgcggcgccgccccagaatttcccccttcttcgttcgcggaaacgagagcgcccgaaggaatagcgaggtcggaggcgccgttcgattccagaagtttccatcgccgcgccgtgacgatcttgtgtagcctgcgcattggtctgctcgtcggacgtcggcgtcggtcgagtcctggggtgcgcggtcgtgcgagatcgaggcggggagctcgcgaatcggaggccgcggggcgcaatgccgcgtcggtagggatggcggaggcggcgccatggcgaggggcgtagcgcgggcggtgtctttcgggcgccgtgccacaacggggtggtgctcctaccggcgcgtcaccgtggccgtctgcatcggcaaccttgtcgccgtgctgctcgtgctccgctccctcaccgcccccgcttccttcgcacccaccgctcccaaccgcggggaagtggtgcagtacacggaggagcagattaggtgggtggaggagtcgatccggattcgccgcgaggctgagcccgtcgagctcgttctggcggtaaagaagctgcggaagaaactcgcccaggaggtgaagcggcgggaggagctgtcgctggtgctgaagcagaaggtttattatgatattgcgcgggggctgcacgagttgggggataacagcagcctcgcgcagcaaagagaagtggtggaatcatggcgtgttgagaagttaaaaaacattgcatccactcggaatcaatcaagtttggacttatctagtgaggaaaccagaatgttaaaacaagccctggagttcaactggcatatgctcctggaggatattggcctttggataccagatgaagtcacacatactgtacatgatgataaacctgaaaatgaaccagaagaagaagagatagtagcaggtccacccttgtccccacaatgtaatgctgagctacatacagattatgatggtgccgctgttagatggggtttaacacaccacaaagaatctgctgctgattgttgtcaagcttgccttgatcaagctaagaatgccaagccaggggaattgaagtgcaatatatgggtttactgcccatcggaatttggatgcttctcgccagacaaatatgagcataaacatcaggagtgctggttgaaacaggctgaccaccccaaactgaacttcaaagacaagtattcagagccttacagagacgctcatcccactgcacctgttgtcgtgccgtggatgtctggtgtcatcggtgcatgagctgccagttgagactcctgctgatccaacttctacagacaacaatacagcttttctttttcttttcgtgactatactctttttccttttcttctttctgccctggcatatacgatgtaacctggcagcgaaaaattttgagggttgcttattggggtacacattggatttggtgttggttaattaaatttagtgaacagggattcacctattggtgatcttttaacttcctctgtttggaccgctctagcttcaaaaaaattggtagagttagtaaagcaggtttttaagagctttagaaaatcttaaagttagttgtgaccctttagaagatatatttagataagttactttgtttcttttttagatgaaaaataattttaatttttttaagtttatattataaactacagcatgctgaagctgaagttggatatggagagaccgtattattgatgttatcagttcaag

SEQ ID NO: 133108 - DNA, 1278 bp, Zea Mays
cgccgccccagaatttcccccttcttcgttcgcggaaacgagagcgcccgaaggaatagcgaggtcggaggcgccgttcgattccagaagtttccatcgccgtgccacaacggggtggtgctcctaccggcgcgtcaccgtggccgtctgcatcggcaaccttgtcgccgtgctgctcgtgctccgctccctcaccgcccccgcttccttcgcacccaccgctcccaaccgcggggaagtggtgcagtacacggaggagcagattaggtgggtggaggagtcgatccggattcgccgcgaggctgagcccgtcgagctcgttctggcggtaaagaagctgcggaagaaactcgcccaggaggtgaagcggcgggaggagctgtcgctggtgctgaagcagaaggtttattatgatattgcgcgggggctgcacgagttgggggataacagcagcctcgcgcagcaaagagaagtggtggaatcatggcgtgttgagaagttaaaaaacattgcatccactcggaatcaatcaagtttggacttatctagtgaggaaaccagaatgttaaaacaagccctggagttcaactggcatatgctcctggaggatattggcctttggataccagatgaagtcacacatactgtacatgatgataaacctgaaaatgaaccagaagaagaagagatagtagcaggtccacccttgtccccacaatgtaatgctgagctacatacagattatgatggtgccgctgttagatggggtttaacacaccacaaagaatctgctgctgattgttgtcaagcttgccttgatcaagctaagaatgccaagccaggggaattgaagtgcaatatatgggtttactgcccatcggaatttggatgcttctcgccagacaaatatgagcataaacatcaggagtgctggttgaaacaggctgaccaccccaaactgaacttcaaagacaagtattcagagccttacagagacgctcatcccactgcacctgttgtcgtgccgtggatgtctggtgtcatcggtgcatgagctgccagttgagactcctgctgatccaacttctacagacaacaatacagcttttctttttcttttcgtgactatactctttttccttttcttctttctgccctggcatatacgatgtaacctggcagcgaaaaattttgagggttgcttattggggtacacattggatttggtgttggttaattaaatttagtgaacagggattcacctattggtgatctttt

SEQ ID NO: 133109 - DNA, 780 bp, Zea Mays
aatctgacaagtgggccacaatgattgtatcaacatagcctcccaacgcaacaaagggatttgcttcgtccgacgtccactacctttaccgccgcggcgccgccccagaatttcccccttcttcgttcgcggaaacgagagcgcccgaaggaatagcgaggtcggaggcgccgttcgattccagaagtttccatcgccgcgccgtgacgatcttgtgtagcctgcgcattggtctgctcgtcggacgtcggcgtcggtcgagtcctggggtgcgcggtcgtgcgagatcgaggcggggagctcgcgaatcggaggccgcggggcgcaatgccgcgtcggtagggatggcggaggcggcgccatggcgaggggcgtagcgcgggcggtgtctttcgggcgccgtgccacaacggggtggtgctcctaccggcgcgtcaccgtggccgtctgcatcggcaaccttgtcgccgtgctgctcgtgctccgctccctcaccgcccccgcttccttcgcacccaccgctcccaaccgcggggaagtggtgcagtacacggaggagcagattaggtgggtggaggagtcgatccggattcgccgcgaggctgagcccgtcgagctcgttctggcggtactttcaatagacaactcttttacttatttatttggtgtttattttgatagattagttcctagtacttacgatctagtccacggaaattctgaacgcaaaggtaaagaagctgcggaagaaactcgcccaggaggtgaagcggcgggagg

SEQ ID NO: 133110 - DNA, 1341 bp, Zea Mays
caccgccccaccccaaaccacacacaagccgctcgcccgcaccgccgcacccgcacgccagaaacagctctcgcgttgcttccgcacgccgcccatggcgagcctgtcgtcgccgagtctcctctcttccttcctcggcgaccgcctcgcactctccactaggcctctccttctccgctccgctgtcccaggcagcaggcggctggcgtatcaagcaacgagaacgctatgcaacttggtggatatcctatttaacaggagaaatcaggatgatgcaccagaaaacaaccctagacgcctgcgtcctgggaaagtatctccacgccttagtgttcccaatcatatacaacggcctccatatgtcaattctcgtcaacaacgacctggtatgaataatggacctgaaatacatgatgagaacgggatcgagtgcatgagagcttctggaaagcttgctgcacaggttttgaaatttgctgggactcttgtaaagccaggcataacgactgatgaaattgataaagcagtgcaccaaatgataattgataatggagcatatccttcacctcttggttattgtggatacccaaagagtgtctgcacttcagtgaatgaatgcatctgtcatgggattccggattctcgtccccttgaggatggagatatcatcaatattgatgttactgtctacctcaatggctaccatggtgatacatctgctacatttctttgcggtgatgttgatgacgaagctaagaaattagttaaggtgacaagagaatgtctcgacaaggctatatcgatttgttcacctggggtggagatcaaacaaattggtagaactatacaggatcatgcagacaagttcaagtttggtgtagttagacagtttgttggccatggggttggcaaagtttttcatgctgagcctgttgtgcttcatttcagaaacaatgaatggggacgtatgatgttgaatcaaacatttactatagagcccatgctaaccatagggagcatcaaccctgtcatgtggtccgatgactggaccgcagtgacagaagacggcagcttgtcagcacagtttgagcacacgatacttattaccgaagatggccctgaaatactgacacagtgttaatggaaggccaaataacaaagaacaatcgttagtcagctggcaagatcctgcatttctttttggggactaattggtccaacctaaactctgatgcaaaatggcaaactcacattgtaatctcggttcatcggtacaacgatatatgtatagaaattgtactattttcgaagttatatttgagagtgtgttttgttggtgct

SEQ ID NO: 133111 - DNA, 1349 bp, Zea Mays
gcacgccagaaacagctctcgcgttgcttccgcacgccgcccatggcgagcctgtcgtcgccgagtctcctctcttccttcctcggcgaccgcctcgcactctccactaggcctctccttctccgctccgctgtcccaggcagcaggcggctggcgtatcaagcaacgagaacgctatgcaacttggtggatatcctatttaacaggagaaatcaggatgatgcaccagaaaacaaccctagacgcctgcgtcctgggaaagtatctccacgccttagtgttcccaatcatatacaacggcctccatatgtcaattctcgtcaacaacgacctggtatgaataatggacctgaaatacatgatgagaacgggatcgagtgcatgagagcttctggaaagcttgctgcacaggttttgaaatttgctgggactcttgtaaagccaggcataacgactgatgaaattgataaagcagtgcaccaaatgataattgataatggagcatatccttcacctcttggttattgtggatacccaaagagtgtctgcacttcagtgaatgaatgcatctgtcatgggattccggattctcgtccccttgaggatggagatatcatcaatattgatgttactgtctacctcaatggctaccatggtgatacatctgctacatttctttgcggtgatgttgatgacgaagctaagaaattagttaaggtgacaagagaatgtctcgacaaggctatatcgatttgttcacctggggtggagatcaaacaaattggtagaactatacaggatcatgcagacaagttcaagtttggtgtagttagacagtttgttggccatggggttggcaaagtttttcatgctgagcctgttgtgcttcatttcagaaacaatgaatggggacgtatgatgttgaatcaaacatttactatagtaaacaaggtaaagcatatgaagctatctcacttcatcacccttttctatcattccatgtcatcagagcccatgctaaccatagggagcatcaaccctgtcatgtggtccgatgactggaccgcagtgacagaagacggcagcttgtcagcacagtttgagcacacgatacttattaccgaagatggccctgaaatactgacacagtgttaatggaaggccaaataacaaagaacaatcgttagtcagctggcaagatcctgcatttctttttggggactaattggtccaacctaaactctgatgcaaaatggcaaactcacattgtaatctcggttcatcggtacaacgatatatgtatagaaattgtactattttcgaagttatatttgagagtgtgttttgtt

SEQ ID NO: 133112 - DNA, 1445 bp, Zea Mays
caccgccccaccccaaaccacacacaagccgctcgcccgcaccgccgcacccgcacgccagaaacagctctcgcgttgcttccgcacgccgcccatggcgagcctgtcgtcgccgagtctcctctcttccttcctcggcgaccgcctcgcactctccactaggcctctccttctccgctccgctgtcccaggcagcaggcggctggcgtatcaagcaacgagaacgctatgcaacttggtggatatcctatttaacaggagaaatcaggatgatgcaccagaaaacaaccctagacgcctgcgtcctgggaaagtatctccacgccttagtgttcccaatcatatacaacggcctccatatgtcaattctcgtcaacaacgacctggtatgaataatggacctgaaatacatgatgagaacgggatcgagtgcatgagagcttctggaaagcttgctgcacaggttttgaaatttgctgggactcttgtaaagccaggcataacgactgatgaaattgataaagcagtgcaccaaatgataattgataatggagcatatccttcacctcttggttattgtggatacccaaagagtgtctgcacttcagtgaatgaatgcatctgtcatgggattccggattctcgtccccttgaggatggagatatcatcaatattgatgttactgtctacctcaatggctaccatggtgatacatctgctacatttctttgcggtgatgttgatgacgaagctaagaaattagttaaggtgacaagagaatgtctcgacaaggctatatcgatttgttcacctggggtggagatcaaacaaattggtagaactatacaggatcatgcagacaagttcaagtttggtgtagttagacagtttgttggccatggggttggcaaagtttttcatgctgagcctgttgtgcttcatttcagtgagttccccactttaacgaaaacatctttttattaattgctgtcttgcctcccggctatctcaaggttctggttgcactctgcaccatattaggatgtgatatctgtgccaatgacttcgaaatttgcaggaaacaatgaatggggacgtatgatgttgaatcaaacatttactatagagcccatgctaaccatagggagcatcaaccctgtcatgtggtccgatgactggaccgcagtgacagaagacggcagcttgtcagcacagtttgagcacacgatacttattaccgaagatggccctgaaatactgacacagtgttaatggaaggccaaataacaaagaacaatcgttagtcagctggcaagatcctgcatttctttttggggactaattggtccaacctaaactctgatgcaaaatggcaaactcacattgtaatctcggttcatcggtacaacgatatatgtatagaaattgtactattttcgaagtt

SEQ ID NO: 133113 - DNA, 1581 bp, Zea Mays
cgcaccgccgcacccgcacgccagaaacagctctcgcgttgcttccgcacgccgcccatggcgagcctgtcgtcgccgagtctcctctcttccttcctcggcgaccgcctcgcactctccactaggcctctccttctccgctccgctgtcccaggcagcaggcggctggcgtatcaagcaacgagaacgctatgcaacttggtggatatcctatttaacaggagaaatcaggatgatgcaccagaaaacaaccctagacgcctgcgtcctgggaaagtatctccacgccttagtgttcccaatcatatacaacggcctccatatgtcaattctcgtcaacaacgacctggtatgaataatggacctgaaatacatgatgagaacgggatcgagtgcatgagagcttctggaaagcttgctgcacaggttttgaaatttgctgggactcttgtaaaggcataacgactgatgaaattgataaagcagtgcaccaaatgataattgataatggagcatatccttcacctcttggttattgtggatacccaaagagtgtctgcacttcagtgaatgaatgcatctgtcatgggattccggattctcgtccccttgaggatggagatatcatcaatattgatgttactgtctacctcaatggctaccatggtgatacatctgctacatttctttgcggtgatgttgatgacgaagctaagaaattagttaaggtgacaagagaatgtctcgacaaggctatatcgatttgttcacctggggtggagatcaaacaaattggtagaactatacagtatgtaatttctgagtaaccaagcttttaaacagatgcacatatttttttattatctttatcttaaaaaacaacattcagtttatcgataagctgtattgtcttaatttgtatgcgtaacagatctggtaatcaaaacgaactcttgttccaactactatacttacgacatttaatctttgaagggatcatgcagacaagttcaagtttggtgtagttagacagtttgttggccatggggttggcaaagtttttcatgctgagcctgttgtgcttcatttcagtgagttccccactttaacgaaaacatctttttattaattgctgtcttgcctcccggctatctcaaggttctggttgcactctgcaccatattaggatgtgatatctgtgccaatgacttcgaaatttgcaggaaacaatgaatggggacgtatgatgttgaatcaaacatttactatagagcccatgctaaccatagggagcatcaaccctgtcatgtggtccgatgactggaccgcagtgacagaagacggcagcttgtcagcacagtttgagcacacgatacttattaccgaagatggccctgaaatactgacacagtgttaatggaaggccaaataacaaagaacaatcgttagtcagctggcaagatcctgcatttctttttggggactaattggtccaacctaaactctgatgcaaaatggcaaactcacattgtaatctcggttcatcggtacaacgatatatgtatagaaattgtactattt

SEQ ID NO: 133114 - DNA, 541 bp, Zea Mays
gcacgccagaaacagctctcgcgttgcttccgcacgccgcccatggcgagcctgtcgtcgccgagtctcctctcttccttcctcggcgaccgcctcgcactctccactaggcctctccttctccgctccgctgtcccaggcagcaggcggctggcgtatcaagcaacgagaacgctatgcaacttggtggatatcctatttaacaggagaaatcaggatgatgcaccagaaaacaaccctagacgcctgcgtcctgggaaagtatctccacgccttagtgttcccaatcatatacaacggcctccatatgtcaattctcgtcaacaacgacctggtatgaataatggacctgaaatacatgatgagaacgggatcgagtgcatgagagcttctggaaagcttgctgcacaggttttgaaatttgctgggactcttgtaaaggtaatgtcatgttgctacaaaagcttgaccttttcaatcagtaaactgtcttttccactagataaaccttattcattctacagtttttaaagtagtttac

SEQ ID NO: 133115 - DNA, 1306 bp, Zea Mays
caaaccgccgcacggatcaccccttctcactgcctgtccaggcgccgccgcttcgccgctgcccgtttcttcgaaccactccgaagctgccccgccatggacagctccgccactgacggcgcgaggctaccgccgccaagggccgggagtcgcctctgcgtcaggtgcggcgagaggaaggccgcgctgaagcggcccaaaaccctagaacagatctgtagggaatgcttctatatcatctttgaggacgaaattcatcaaactattgtccagaattctctgtttaaagctggtgagcgtgtggcaatcggagcttctggtggaaaagattcaaccgtgcttgcatatgtgttatcggagttaaaccgtcagcacaactatggtcttgatttgttccttttatctgtcgatgaaggaatcacaggatatagagatgactcactagaaactgttaaaaggaatgaaatacagtacggcctgccactgaagattgtttcctataaagatttgtatggctggacaatggatgatattgtcaaagcaattggtctaaaaaacaattgtactttctgtggagtttttcgacgtcaggcactagatcgaggtgctgctctcctgaaagctgataagattgtaactgggcataatgcagatgacattgcagaaaccgtcttgctgaacattctgcgtggtgatattgcaaggttaagtagatgtacctttataactactggtgaagatgggccaataccaagatgcaagcccttcaagtatacctatgagaaggagatcgttatgtatgcatacttcaaaaagctggattacttttccacagaatcagccttggctcagtagacgatgaatgttgcaggcctagagctatactagacatcataaaatccggtgaaaatttcagaatctccacaacaacaaggatgccagagcaaggaacgtgtgaacgatgtggctacatttctagtcagaaattatgcaaagcatgcgtcttgctggatggattgaatcgaggcttgccgaaactaggcattggaagtaccaaagcaggtgctagagctgacagtgatggtaagcaacgcaccaaacgttcagagaggaatacatcgagtctacaagggaaacatgggaacttcgatttctagatctctactgctatttttctccaaaaattgtaataaattttgatagtcattggtcatttagtggattttcttctaagccactgttgtttatctgacttcattctgcagtcgtgaaccaaaagaaattatgtggccacaattttgacgcc

SEQ ID NO: 133116 - DNA, 1339 bp, Zea Mays
caaaccgccgcacggatcaccccttctcactgcctgtccaggcgccgccgcttcgccgctgcccgtttcttcgaaccactccgaagctgccccgccatggacagctccgccactgacggcgcgaggctaccgccgccaagggccgggagtcgcctctgcgtcaggtgcggcgagaggaaggccgcgctgaagcggcccaaaaccctagaacagatctgtagggaatgcttctatatcatctttgaggacgaaattcatcaaactattgtccagaattctctgtttaaagctggtgagcgtgtggcaatcggagcttctggtggaaaagattcaaccgtgcttgcatatgtgttatcggagttaaaccgtcagcacaactatggtcttgatttgttccttttatctgtcgatgaaggaatcacaggatatagagatgactcactagaaactgttaaaaggaatgaaatacagtacggcctgccactgaagattgtttcctataaagatttgtatggctggacaatggatgatattgtcaaagcaattggtctaaaaaacaattgtactttctgtggagtttttcgacgtcaggcactagatcgaggtgctgctctcctgaaagctgataagattgtaactgggcataatgcagatgacattgcagaaaccgtcttgctgaacattctgcgtggtgatattgcaaggttaagtagatgtacctttataactactggtgaagatgggccaataccaagatgcaagcccttcaagtatacctatgagaaggagatcgttatgtatgcatacttcaaaaagctggattacttttccacagaatgcatctattcaccaaatgcataccgtggttttgctcgtgaatttattaaagatttagaaagaatgaggcctagagctatactagacatcataaaatccggtgaaaatttcagaatctccacaacaacaaggatgccagagcaaggaacgtgtgaacgatgtggctacatttctagtcagaaattatgcaaagcatgcgtcttgctggatggattgaatcgaggcttgccgaaactaggcattggaagtaccaaagcaggtgctagagctgacagtgatggtaagcaacgcaccaaacgttcagagaggaatacatcgagtctacaagggaaacatgggaacttcgatttctagatctctactgctatttttctccaaaaattgtaataaattttgatagtcattggtcatttagtggattttcttctaagccactgttgtttatctgacttcattctgcagtcgtgaaccaaaagaaattatgtggccacaattttgacgc

SEQ ID NO: 133117 - DNA, 1014 bp, Zea Mays
ccaccaccacaacatcgtgcgctgctgcacgcgaagcacagctcgccttgcctctgttcagctcacggcggaagacgagggcgacagcacacgagagggaggcaggagcggaagcgcgcaaggaggtcagtgaagcacgcgcccacggcccacatccagagcagcacagcaccgcgcgatggcgtgcatcaacatgtacaaccctgacggcgcgcccgggttcggcggcgggccgcagccgccggccgcgctgggcccgcgcgtctccttctccagcgacttcgccgtggagccgccgccggtgcagaaccgagcgatgagcctgcggtgccaggaggaggacgtcaacttcgagttctccgtgggcagccaccccatgatggcggccgaccagctcttctccaagggcaggatccttcccctcagggacaacggcggctgcttcgccgccgcgcggccaaccaccacgctgcgcgacgagctctgtggcggcggcggcggcggcggcggcgccagcgacgacgacgagagggcctccgccgccggaagcaaggggtccggccggtggaaggagatgctcggcctgcggaaggcgctctgcgtcggcgtcggcggcggcggcggcaacggcgctcccgccaagaaggttggtagcggcaagaagggcgtcgccgacgacatggcagcgtccaatcagcaggagctatgaccgtgccgatgggagagacgagacaggcatggggagtgggtgcacagcgccacacacttcacatgcatgaagcttacttttgctcggctcctccttcctgatgctgttgttcgatgaacctcttgaatagtgcttgccatcatcgacccatgggctagctagctaggttttgtagattgttgtcagcgagtctgcttattgtgtgctaggtggcctggccgctgaaaagagccacccaaaaaaatgtgtgtaattttcttgtatatatattctaagtgctatgatattctctctatccagcaaga

SEQ ID NO: 133118 - DNA, 1177 bp, Zea Mays
accaccatcccaacccatcacatcccaaggatgtaaaaaaaaccttttaaaagctcccaccaatccaccaccacaacatcgtgcgctgctgcacgcgaagcacagctcgccttgcctctgttcagctcacggcggaagacgagggcgacagcacacgagagggaggcaggagcggaagcgcgcaaggaggtcagtgaagcacgcgcccacggcccacatccagagcagcacagcaccgcgcgatggcgtgcatcaacatgtacaaccctgacggcgcgcccgggttcggcggcgggccgcagccgccggccgcgctgggcccgcgcgtctccttctccagcgacttcgccgtggagccgccgccggtgcagaaccgagcgatgagcctgcggtgccaggaggaggacgtcaacttcgagttctccgtgggcagccaccccatgatggcggccgaccagctcttctccaagggcaggatccttcccctcagggacaacggcggctgcttcgccgccgcgcggccaaccaccacgctgcgcgacgagctctgtggcggcggcggcggcggcggcggcgccagcgacgacgacgagagggcctccgccgccggaagcaaggggtccggccggtggaaggagatgctcggcctgcggaaggcgctctgcgtcggcgtcggcggcggcggcggcaacggcgctcccgccaagaaggttggtagcggcaagaagggcgtcgccgacgacatggcagcgtccaatcaggtcggcatgcatcatgcgtctgcatctgcatgcgtccacatggtggaagctaatccggtcgacaccttgtctcatcaagcatctgtttgcttcacacagcaggagctatgaccgtgccgatgggagagacgagacaggcatggggagtgggtgcacagcgccacacacttcacatgcatgaagcttacttttgctcggctcctccttcctgatgctgttgttcgatgaacctcttgaatagtgcttgccatcatcgacccatgggctagctagctaggttttgtagattgttgtcagcgagtctgcttattgtgtgctaggtggcctggccgctgaaaagagccacccaaaaaaatgtgtgtaattttcttgtatatatattctaagtgctatgatattctctctatccagcaaga

SEQ ID NO: 133119 - DNA, 1387 bp, Zea Mays
ggaatgtgggtagagctatccggaaaaatgcatgtattagcaagattactggggcatctacgtcagaaaaccgatgatcgtattgttcttgtatcaaattatactcagacattggatctatttgttcaattatgccgggaaagaagatacccatatgttagacttgacggatcaacatccatcaataaaaggcagaagctggtgaaccaattcaacgatctatctagggacgagtttgtctttctacttagtagcaaggcaggtggctgtgggcttaacctggtaggtggaaatcgtttggttctcttcgaccctgattggaaccctgccaatgataagcaggctgctgctagagtgtggagagatggacagaaaaagagagtttacatatataggttcttaagcacaggaactatcgaggagaaggtatatcagcgtcaaatgtcgaaagaaggcctgcaaaaagttattcagcaggagcaagcggacaataaaatgcaggggaattctctttcaacagaagatctgcgcgatctttttatttttcatgaacatgtcaggtctgaaatacataaaaatttgaagtgtagccgctgtgacaaggatggagatccagctttggatggtactggttttgcagccactggtcataaggcttcaatacctggagtgcaagattatgctgatattggtgggtttggtgagatatctggatgtttgcagaaaatgaatagcacacatcagcagattggaagacctactgaagaagacttaggaagttggggacatcactgtgacccatcaactgtacctgatactatactgcagtgttctgctggcgaagaggtttcttttgttttcaccaatcaggttgatggaaaacttgttccagttgaatctatggtgcgatcagcagctcatcaacaaaacggaatagcagccaccggagaaaaaggagtgcagatacccaattctcctagcaaacctggaaagcaatccttaaatggcaagaatttgaagatgggatttcatttaaagaattcgtctttgaaatgttcaaccaaatccagaccatcaccaaattgcttgcaagggttgatgaaaaccagcccctttttggatcaacctcaaattaaaaagcttcatgttgcttctgatatatctgacgatgattttgtttgagtgtcaattcagaattacttagtctcatatatgttgatgtgctatctgttgcatatataatgccatcagctttgtcggtgcctattgcatcttttattcaggtttctacaattttcttttaataaaaaataggtcctaataaggtatgtacatagaaaagcaaaaactacttacaatttggaatggagtataaacaatcatttta

SEQ ID NO: 133120 - DNA, 732 bp, Zea Mays
ggtaccctgcatacagatagtggctgggaaaccatggggaagaagttgaagaaacccgggcaagccgaggggagaaagtgggcaccatggagttccacaaatgtgacacctaacacagcaaggccagcatggggtggcagtggttcctcgcacccttctggaaccagctgggctcaagctccagatcatggtgctgctaccagaggcaatcctagaccaccatcacaaacatcgcgccctgttctgactccacctctagcaaatggttggcagtggcaatccaggcctcgcccatctggatctgaagtcaagaaggatgatgctcctccatctggttctgtccctgagttctttgaagtattgaatacattgagtttggaacaaattaatggacaaactcggcaatggcattgcccggcatgcaaaaatggacctggggcgattgactggtacaaagggctgcaacctttagtgactcatgctagaacaaagggttctacaagggttaaacttcacagggaattggctgcattgctggaagaggagctttctcgcaggggaacttcagtgttaccagcgggtgaacaatttgggaaatggaagggactgcaagaaagcactgatcgtgagatagtgtggccaccaatggttattgttatgaataccttcttggaaaaagatgaagatgataagatctatttgggctatctgggagagaccaacatccaatga

SEQ ID NO: 133121 - DNA, 1584 bp, Zea Mays
gctttttgaatgaaggaacgaacgcctctaattccatatccagaaccgagagagcttcctgccccagcacgctcaaaagacaagagcaagcacggaacacccatccccgactgtagtttgcccggcaagcaaacatctccggcagccatggcgtccactgtaacagccgccaatagcagccatggaagcgccctgcgtacccgtaccgcctccccaaggccggtcgcgggctggagctgcagacgcacgctttccacgcctgcacaccaccaccacgcgcggccgtcacccagagctcgggttgtcgccgtccgagccgccggcactcagcgggcgacctggttgcccggactggacccgcccccatacctcgacggcacgtcggttacctgacgccctgatatctgccggtgtcatcacttctgcatgtggtgatggtgttggtcagttgacagtgtggcgtctctgattgcagactaccaggtgacttcggcttcgaccctctgggcctcggcgaggagcccgaagccttgaagtggtacgttcaggccgagctcgtgcactgccggttcgccatggcaggggtcgccggcatccttttcactgacttgctccgcgtatcagggaacagcgacctccccgtgtggttcgaagcaggcgcggcgaaattcgacttcgcgaacaccacggcgctcttcttcgtccagctcttcttgatggggttcgctgaaaccaagaggtacatggacttcaaaaatccaggatcgcaagcagaggaagggacattcatagggttagaggctgcactcgcaggtcaacagccaggctaccccgggggtccactgttcaatccactaggactcgcaaaggatatagagaatgctcatgacgagaagctcaaagaaatcaagaacgggaggttggcaatggtagccatgcttggcttcatggtgcaagcatccgtaactcatgccggccccatcgacaatctcttgacacacctttcggacccgttcaacaaaaatatcattcacacattctcctcttcctaagtactcgtcccaatgcccggatgctatggcacaaaaaggtcacaatgtttttgaacacaacagaacaacatgattattgatttacgtccttctccccaccgaataggggaaggaaggttagggaagcgttcaatcaattcaatgagatagtgtaatctatagcaaactcagatacgctatgatgtgagatgaagcgtacttcgtgcaatcaataagttccatttattcatatggacaacaaagttcctctctgatcattttgaaacaacaattcatattaatgaaatatatcaaagatttgtgtcgttatacttatggaagctccgtccggagaagatgctacaagtgctaggttaccaatggtcgatccctgtagcgctggcactatttacctatttataggactatgtcaatgtaaatttttatatggagttataagaatatacatcctattatacaagtagctctatgtaagcgaagatgtttaattatgtcttttatggtagagacattccatatatgtcttttcttc

SEQ ID NO: 133122 - DNA, 1268 bp, Zea Mays
gctttttgaatgaaggaacgaacgcctctaattccatatccagaaccgagagagcttcctgccccagcacgctcaaaagacaagagcaagcacggaacacccatccccgactgtagtttgcccggcaagcaaacatctccggcagccatggcgtccactgtaacagccgccaatagcagccatggaagcgccctgcgtacccgtaccgcctccccaaggccggtcgcgggctggagctgcagacgcacgctttccacgcctgcacaccaccaccacgcgcggccgtcacccagagctcgggttgtcgccgtccgagccgccggcactcagcgggcgacctggttgcccggactggacccgcccccatacctcgacggcacactaccaggtgacttcggcttcgaccctctgggcctcggcgaggagcccgaagccttgaagtggtacgttcaggccgagctcgtgcactgccggttcgccatggcaggggtcgccggcatccttttcactgacttgctccgcgtatcagggaacagcgacctccccgtgtggttcgaagcaggcgcggcgaaattcgacttcgcgaacaccacggcgctcttcttcgtccagctcttcttgatggggttcgctgaaaccaagaggtacatggacttcaaaaatccaggatcgcaagcagaggaagggacattcatagggttagaggctgcactcgcaggtcaacagccaggctaccccgggggtccactgttcaatccactaggactcgcaaaggatatagagaatgctcatgacgagaagctcaaagaaatcaagaacgggaggttggcaatggtagccatgcttggcttcatggtgcaagcatccgtaactcatgccggccccatcgacaatctcttgacacacctttcggacccgttcaacaaaaatatcattcacacattctcctcttcctaagtactcgtcccaatgcccggatgctatggcacaaaaaggtcacaatgtttttgaacacaacagaacaacatgattattgatttacgtccttctccccaccgaataggggaaggaaggttagggaagcgttcaatcaattcaatgagatagtgtaatctatagcaaactcagatacgctatgatgtgagatgaagcgtacttcgtgcaatcaataagttccatttattcatatggacaacaaagttcctctctgatcattttgaaacaacaattcatattaatgaaatatatcaaagatttgtgtcgttata

SEQ ID NO: 133123 - DNA, 1220 bp, Zea Mays
caaaaccccgcaccgcttggactccgcgtgacgcgcgtgtgccggccggtggccatgctgtccgcctgtgacctgtcccatcccatggtataaacttcccacggcgcgacaccctgagacatcatcgtccatcgctgcgacctgcgacctcggaaccaacctttccgccactctctctcgcgacaccgaccgacctgacgacgtcgcactcgcacagccaccaccccaccatggcggcgccgaggctggagcgcggcgggttccagctcccgaacaccgagcaggagaactccctcttcctccgcgcgctcatctccgtcgtgtccggggacaccgccgcgttgctcccggaagcggcggccgtagaggctcccgcggcccccgtggcgtgcgccaggtgcggcgcggacgggtgcgcggcggccggctgctgcgagctcgtcgccgggtccagcagcgacagcgacgacgcagggtgctccgggacccgcgccaacggcggcggcctaggcctaggcctaggcgcgagcaagcggagagggagggggaggaaggtgatccagtacaggggcgtgcggcggcggccgtggggcaagtgggcggcggagatccgcgacccgcgccgcgccgcgcgcaagtggctcggcacgttcgacaccgccgaggacgccgcgcgcgcctacgacgtcgccgcggtcgagctccggggccagcgagccaagctcaacttcccggcgcgcgctgccgccgcggcgccggcggcagtgcagcctccgcaccaccgtccattgcccgatcggagcctccgcgagaactgcggatccaacgccgcgtcgccggtgcacgtggcgctggcgccgaccacgcaacagaatatctgggagggcttgaacgagatcatgatgatggaggaggaacgcagcttctggtctatgcgatgatcctgcctgcaccttcgcccatgcatccatctccgtatcttctcttgtttaatgcttttattctatcctactctatttcatgattattagagtccattgattgccttttagggaagggattccatacgatctccatctgaaaagagaacacttattagcttcacaagattgcttggcatgcagacgtacgtaaagtgagtttaggaagcaatggtgccaccagccgactgtactgtaaatcactgtttctgtaactcgttagtcaccatcgctttcata

SEQ ID NO: 133124 - DNA, 1713 bp, Zea Mays
agctccggcggcggcggccggccggccggttattaatgcactgtgcgaaagcaacgcctcgaggccaagcacatccggcgtgcatgctcgactataaatacccggccggttgcaccggccagtttcatccagccatcgattctcctccagttcataggcacagcagcagaaagcgccaggagcttaagaacatggcgaacaggggcttgcatctggctctgttcctcgtccttctcgggctgtcgtccaatttggcagccgggcagatcctgttccagggcttcaactgggagtcgtggaagcagaacgggggatggtacaacttcctgatgggcaaggtggacgacatcgccgaggccggcatcacgcacgtctggctccctccggcgtcacactctctcgccgagcaaggctacctgccggggcgcctgtacgaccttgacgcgtccaagtacggcaacgaggcgcagctcaagtccctgatcgaggcgttccacagcaagggcgtgaaggtcatcgccgacatcgtcatcaaccaccgcacggcggagcaccaggacggccgcggcatctactgcatcttcgagggcggcacgccggactcccgcctcgactggggcccccacatgatctgcagcgacgacagggcgtactccgacggcacggggaaccccgacaccggcgccgacttcggcggcgcgccggacatcgaccacctgaacccgcgcgtccagcaggagctcaccggctggctcaactggctcaagacggacgtcggcttcgacgcgtggcgcctcgacttcgccaagggctactccgccgacgtcgccaaggtctacatcgacggcacccagccctgcttcgccgtcgccgagatatggacctcgctggcctacggcggcgacggcaagcccttctacgaccagaacgcgcaccggcaggagctggtgagctggctggaccgcgtcggcggcaaggccagcccggccaccacgttcgacttcaccaccaagggcatcctcaacgtggccgtcgacggcgagctgtggcggctgcgcggcgctgacggcaaggcacccggtttgatcgggtggtggccggccaaggccgtcaccttcgtcgacaaccacgacactggctccacgcagcacatgtggccgttccccgccgacaaggtcatgcagggctacgcctacatcctcacgcaccccgggaacccatccatcttctacgatcacttcttcgactggggcctcaagaacgagatcgcgcacctggtgtccatcagggaccgccacgggatccaggcggacagtgagctgcgcatcatcgaggccgacgccgacctctacctcgctgagatcgacggcaaggtcatcgtgaagattggatcaagatacgactgcgggcacctcatcccagaaggcttccaggtcgtggcgcacggagatggctatgccgtctgggagaaaaactgagccaaatctgtgcctgatccgtccgtccggtccggcacgacgagttttagcggatttgacctgcattttccttagcttattattactccaaatacgggatatatatagcgacaacctgtattcgagatacatgcgtgcccccagggacgcggaaaaagaaagagaagcacgcgtgtcaggacagccgaaagaagaacttgtgaagattattttttccccttaagggctagtttgg

SEQ ID NO: 133125 - DNA, 2148 bp, Zea Mays
aggctgcgacccagaccgttccaggtacgtggatcgccggctgcatatctgcctgccctcttcaactccccaagagccaataaccagcgcggcgcggcccctctcgcccccataataaacaaccgcaacgctcgccacccatggctaccataccaccaccacagcacagggacagcagcagtgccaccgccaccaccaacaccaaccatggcctccacagcgtccctgcagcgcttcctgcccgcctccccgcacgcgtcgtcccggcgccgcgccggccgcgcccgagcggccgtctccatcccgtcgtcgtccccgccggcgacacgggataatgaggtccccgcggagcggctggagccgagggtcgaggcgcgggagggagggtactggtccctcaaggagaggtaccggaccgggctgaacccgcacgagaaggtgaagctggagaaggagcccatggcgctgttcatggacggcggcgtcagggacctcgccaagatccccatggaggtgatcgacgccgccaagctcaccaaggacgacgtcgacgtccgcctcaagtggctcggcctcttccaccgccgcaagcaccagtacgggcgcttcatgatgcggctgaagctgcccaacggcgtgacgacgagcgagcagacgcggtacctggcgagcgtgatcgaggcgtacggcgccgacgggtgcgcggacgtgacgacccggcagaactggcagatccgcggggtgacgctcccggacgtcccggccatcctggacggcctccgcgccgtcggcctcaccagcctgcagagcggcatggacaacgtgcgcaaccccgtcggcaacccgctcgccggcgtcgacccccacgagatcgtcgacacgcgcccctacaccaacctgctctcctcctacatcacaagcaactcccaggggaaccccgccatcaccaacctgccgaggaaatggaacgtgtgcgtgatcggctcgcacgacctgtacgagcacccgcacatcaacgacctcgcctacatgccggccgtcaaggacggcaagttcggcttcaaccttctggtgggcgggttcatcagccccaagcggtgggccgaggccctgccgctcgacgcctgggtcgccggagacgacgtcgtccccgcgtgcaaggccatcctcgaggcgtacagggacctcgggttcaggggcaaccggcagaagacgcgcatgatgtggctcatcgacgaactcgggatggaggtgttccggtcggaggtggagaagcggatgcccaacggggtgctggagcgcgccgcggcggaggacctcgtcgacaagaagtgggagcggcgggactacctcggcgtgcacccgcagaagcaggaaggcctgtcgtacgtgggcctgcacgtgcccgtgggccggctgcaggccgcggacatgttcgagctggcgcgcctcgccgacgagtacggcacgggcgagctccggctcacggtggagcagaacgtcgtgctccccaacgtgagcaaccggaggctggacgcgctgctcgcggagccgctgctgcagcggcagcgcctctcgccgcagccgtcgctgctgctccggggcctggtggcgtgcacgggcaaccagttctgcgggcaggccatcatcgagaccaaggcgcgggcgctgcaggtggcgcgggaggtggagaagcgcgtggccgtgccgcggccggtgcgcatgcactggaccggatgccccaacagctgcgcccaggtgcaggtggcggacatcggcttcatgggctgcctcaccaaggaccgcgacggcaaggtcgtcgaggccgcggacatcttcgtgggcggccgcgtcggcagcgactcgcacctggcggacgtctacaggaagtccgtgccgtgcaaggacctggtgcccatcgtggccgaccttctggtggagcggttcggggccgtgcccagggagagggaagaggaggatgaggagtaggagcagtggagcacagacttcccggtgaccatccacggtttgttgtaaagtagacgcgctgccttcttccatggcacgatttgttttggtattgtcgtagcaacaaaatgtccccttattcacgtcacagagaataagtaacacgcttcactgtcaatc

SEQ ID NO: 133126 - DNA, 6502 bp, Zea Mays
tcttacattaaagaatgaatcaaatctccccaagtaggattcgaacctacgaccagtcagttaacagccgaccgctctaccactgagctactgaggaacaaggggagattcgacctcctagagttcaactcccgctctcaacccgtgaacaatatgagtccgaagcttctttcgtaactcccggaatttcttcgtagtggctccgttccatgcctcatttcatagggaagcccaaagtggctctatttcattctatttcacttcttagcacttcctatcatttaatatccattcctttggtcttattgacataagagatgtcatttatagtctatctctttctatatatggaaagtcaagaaattctcatcgaaacatcgagaaattgtgcatatagaaaactctaaagaaagaaaaaaaggagacccatgccatgattttcaaatcttttctacttaagtagtctaaagtagtctaagtttctcgatgaggataattaattcggtcgttgtggtcggactctattatggatttctgaccacattctccataggtccctcttagatcttctttctccaatcttgggttagggaagaaggagatattcgcgactactggcggtttcattatggggcagctcatgatcttcatatcgatctattatccacctctgcatctattctttcttagctaaacgggtggaagatccatccaatttggttatatcatggactcgaaaaacggatctgaatgtgactgaaatgcacgatcttcacaggtatcacttttcacgatacctaaacctaaaaggtggaatagcgattttcgaaccatttcctataagagaatggtttccattactttgagaaatggattctatatcaaactatagctattgcattaaagaagaaaagaaactaatagaagtcgaagacgcggaatggtagtgaatagagaaaaagattcttctgattttcttgttcctgaaaatattcgatccatctcctagacgccgtagagaattgagaattttcatgtctttcaattctcgtactcgtaattggaaagttacggaaggagatccatcattttgcaatgaaaacaacataaaaaactctggacaatttcgaaatcagaccaagcgtcttaatacatatgcaaaaaaattcattattggcccaccattgattacaagatttagcttttatgaatcgctattggtttgatacgaataatggcagtcgtttcagtatgttaaggatacagatgtatccacaattcatttagagttacttaatagcctatttcttatactatatctctatcccgtgaaattctcgagcccaaagatggatgcatatgctgtgtttcattttgctaaatgatatcaattaaatggtatatcaattctataaattggatatagcaataaataaatcagcaaaattcttttattttagatagaagaaatgtttcttctatctaaaataaaagaatgtacccttctatccaaatccaatttgcatcgataaaataaatccaaattccagattccagcagtagatgaataattgcaaatttttgtgtgtacgagattagaataacttaaaaataactgacataattttttatttttcctgatcagaaaaatacatgaaaaagaaaggaggtagaaaaatttgttgatttatggttaaagaagaaaaacaagaaaacaggggttctgttgaatttcaagtattcagtttcaccaataagatacggagacttgcttcacatttagaattacacaaaaaagatttttcatcggaaagaggtctacgaagacttttgggaaaacgtcaacgtttgctggcttatttggcaaagaaaaatagagtacgttataagaaattaataagtcagttggatattcgggagaagtaatttaatcgttctcatttttttcttattttattagtagtcttatagtagtcttagattttgcattttgatgagcctcgttttgaggaattcatggaataatccattttcatggaataaagaataagaacaaggatacataacataaaaaaaagaatagataagacgatattcgccctccccctacatatttgatttcttctcctatacaaaaaccagcaagacctactccattggtaattccatcaatgacacctttatcaaaaaaatgcgttagttcggctaatcttcttatacctaggataaaaaccctagtatagaaaaaatctatataaccacgattatatgaccagctgtatatcttttttttacttcatccaaaaagctcttttttggattcttttttacaagggaattttgaaaattcaaattctgaaaaaaagaataagcagatccataaaagatatatgctatgaatagaccaaaaattgctaaacttacagaagaaattgcattagtgagaaattcatatgaatttatggaagaattagaattttcctggaacaagtttattgaaggagttagccactttgataatatggttaactccaatattctattatcttttactccattatcaaaatggattcctatggatccaatgaacaaagtaaaaagtagtaatataagaagaggaaatagcatagtatttcccgtttcatgaggatagacaaaagtatttttagccccaaagggagtactaaaggatcctatcttatttcttgtattagcaggaatttttggtatattttgtgaaaaaaaagaaactccactcttcattgttgataaaacaaaatccctattgactcctttggatatactttttccccataaggatattgaatacaacgaaccttctttagtactactgtaattttgaaaatgaacacgcaaatacccatcaaaagtaagtaaatatatccgaaacatataaaatgcagttaatcctgcagtaaaagaggctattattccaaaaaagggtgaatacaaccaactattactaaggatttcatctttggaccagaagcaagcaagaggtggaataccacaaagagaaagtgtaccacataaaaaagtagttcttgtaattggaacgtattttcttaaaccacccataagaaccatattctgacttttatctggtgaatatccaacaagaggttccattgaatgaataacggatccggatcctaagaacaataaagctttcgaataagcatgagtgatcaaatggaataaagcagcttgataataacctatacctagagctaacatcatataacccaattgagacattgtagaataggctaagcttcttttaatatctctctgagcaagagctaaagtggctcctaagaagagtgttattgtacctattaaagaaatgaaactcattatccagggtagggatatgaaaagaggaagaagtctagctagaagaaaaatccccgcagcaaccatagttgctgcgtgtataagagccgaaataggagtgggtccttccatagcatcaggtaaccatacgtgaagaggaaattgtgcagattttgcaactgcaccaaggaataataaaaaagcacacaaagtagtaagtaaggaattaatcccattattaggaatccagttattagctattttgaacaaatcccgaaactccaaactacccgttatccaaaaaaaacctaaaattcctaataacagaccaaaatcccctacacgattagttacaaaagctttttgacaagcactcgctgcaattggccgcgtaaaccaaaagcctatcaataaataggaacacattccgacaagttcccaaaaaaaataaatttgtatcaaattggaactagtaaccaatcctaacatggaagtattaaaaaaacttatataaacaaaaaatctcaaatatccttcatcgtgagacatataatcgtcactataaataagaactaagattcctacagtagtaattagtattaacataatagacgtaagggggtcgaccaagtatccaaattctaaggaaaaatcattattgatggtccaagaccatagatattgatagatagaacttccatttatttgttgaatagacaggtgaagtgagaataccatagctatacttaagagtaaaatactaggaaaagccccatatccgacgaagattttttgttgctgtaggaataagaaaaagtccaaattccccattgacataataactggaagtgggagaagaggaattacccaggcatattgatatgtatgttccataagaaaagaaatagcaatttttagtttaaatttatagttcaatttttctataaaataaaattgtttccgattcaccaaacctattcttatctctttctaaaggaattaaaaaaacaaaataagaaaaataaaaaatactggaattatgaatttttctaatttctctcattaaaatattccaaaatttagaatgggtttagttacttaaattcaaaaagtgaatcaaagaatttcggtatctagttattagtaaaaaaaatatttattaaaatacaaaaaaagattgaataattttactttctaatcatttttgtatttctttttgttaaaataaaagagctctcttgtttcgtaattgattgattgaattccaaagaaaacctatatttataggaaattctcgaatattgcttatttcatataaaaggaaatcctaatgactagaattctctaagttttagaatgtcttgtttaagagactaagtatttttttttattggaattcaattatggaatagccttctgaacttaattaactatttgaattgaattttaccttctttttatctccccctcttatatgagggcttatcccccataccatatatttatatatggagtatatttgatatagaaattgatttaaatagaaaatcttaaaaaactcttgtcttatccacattagacaaaatgaactaaagaagaatttcgaatttaagtatctttcagtatctttcagtatctaagtataaatactaagaaaaaacagaaagaaggattgatttgtggcaatagatgtctttcacatacaactagaaaaaagtaattccctttttgaatggcagttccaaaaaaacgtacttcgatgtcaaaaaagcgtattcgtaaaaatctttggaaaaaaaagacttatttttccatagtacaatcttattctttagcaaaatcaagatcattttctaggggcaacgagcatccaaaaccaaaaggtttttctgggcaacaagcaaacaaataataagattttgaaataatctgaattgaactatccaaaagaaattccaattatttaatatgaatgaataattcggattaattttggtcccaaatctttggtgttgctttttccaataaacgttggttacatttctttatgctatttgtacccgtcaccggtttatggatgagtgctattggcgtagttggtctggctctgaacctacgtgcctatgacttcgtttcccaggaaattcgtgcagcggaagatcctgaatttgagactttctacaccaaaaatattcttttaaacgagggtattcgtgcgtggatggcagctcaggatcagcctcatgaaaatcttatattccctgaggaggttctaccacgtggaaacgctctttaatggaactttcgttttagctggtcgtgaccaagaaaccaccggctttgcttggtgggctgggaatgccagacttatcaatttgtccggtaaactacttggagctcatgtagcccatgccggattaatcgtattctgggccggagcaatgaacctatttgaagtggcccatttcgtaccagaaaagcccatgtatgaacaagggttgattttacatccacacttagctactctaggttggggagtagggccggggggagaaagttctagatacttttccttactctttatccgaagtatttcacttaatttcctcggcagtattaggcttcggtggcatttatcacgcgcttttgggacccgagactcttgaagaatcttttccattctttggttatgtatggaaagatagaaataaaatgactacaattttgggtattcacctaattttgttaggtctaggtgcttttcttctagtactcaaggctctttattttggcggcgtatatgatacctgggcccccggggggggatgtaagaaaaattaccaatttgacccttagccccggtgttatatttggttatttactaaaatccccttttgggggagaaggatggattgttagtgtggatgatttagaagatataattgggggacatgtatggttgggttccatttgtgtacttggcggaatttggcatatcttaaccaaaccctttgcatgggctcgccgtgcatttgtatggtctggcgaatcttacttgtcttatagtttatgtgctttatctgtttttgtttttatcgcttgattttttgtttggttcaataatattgcttattctattgtgttt

SEQ ID NO: 133127 - DNA, 2012 bp, Zea Mays
tatatgaatgatctactaactcatctcagaagcaagtccactttcaatatatctctgtataaagcggtaaggaaaaagttttaataaaaagaagaatcaatggattcatgattaaacccctcctacttcttgtattttcatacaattttgattaagtgagggatcaaatagaaatatgtagtcaactttatttgaaggtagtttggaggattataaatatgaatattgctttccaattagctgtttttgcattaattgcaacttcctcagttttagtaattagtgtaccccttgtatttgcttctcctgatggttggtcaaataataaaaacgttgtattttccggtacatcattatggattggattagtctttctggtagctattctgaattctcttatttcttgaatttgtttagtatttagtaacccgatacaaaataaataaaaagaaaggccctttttcgaaaaaattaggatttttatacacattaaaatgctattttcgttccgaattattacctcttctctttcattattatgaaattctattgccattagaatattgattgatagacagttaataaaaagaaaacactaatagaaaatgaaacggtcgacccagacatagacggtcgacccagacatagacggtcgacccaggtggatataccctataaaatataggacgtagcaagcgtagttcaatgtagcgagcgtagttcagtggtaaaacatctccttgccaaggagaagatacgggttcgattcccgtcgctcgccagcttaatttagtaaggtgctatgataaaaaattcagtctagttgactacttaactacttaatattatagtttatatttaatattatagtttatattatagtaaattatatatatttatttttaatatagtaaattattatagtaaatgactacttaactacttctatttaaattactatttaatattaaatgaatattaaattaagtagttgttagtctagtactgtaccccttcctatcttatccttcctttgcacccgactcaaaaaaaaaagagtgcttcgagggtgcaaatccaactttctaagaaagttccctaaaccggggattcgccgagacaaacaagagacaaacggttttgaaagggggataggctatgcttttctttcatttttttttctgcctgctaaataaaaaaaagagttggatatagccctctatcatatatatacaaatagaatagtccatttatacggactgctaagtgcggagacgggaatcgaacccgtgacctcaaggttatgagcctcgtgagctaccaaactgctctactccgctctgtagggccgaaaactggtggacgaaagaaaaaggtggaatacaagtctctaccatgtctagacaaacaaatggaatagtctttttatacagaatggagcgggtagcgggaatcgaacccgcatcgttagcttggaaggctaggggttatagtcgacgttggttgattatttttgacgtctctaattcaaatccgaacatgaaattttgatttcattcgactcctttatggatattctcaccacttaacatctatgtcagcttttctgtcagaatggaaccaaagctcttcgctttctagatgatccctatagaataggagatagaaattctcctaaatatctatctaatctacttacttcgttccctaatttcattcaagagatcctgaggaaaagagttgggtttccaccgagctgaaacaatataatatactgatggttatagtaaaccaaaaccatcgttttttagctattgggcttccatttcctccaaaacaaaagaagatttagttacgattggaaataaccttttttgtatcttcatccatagatcctttactcatatttattcaatcggaatacttatcggaatacttaatccaatgcaaaattatgcttcgcgactacgtactcataatcgaatttgtattttagatgcaaattcattttg

SEQ ID NO: 133128 - DNA, 621 bp, Zea Mays
aaaaacataccacctcacttccagtttgctcaaacataacaatgttttggtggttgctgcaggtcctggagaggatgagacggcaagttgggccaacggcaaagagaatttgtctgcggaggacattgacaggtccatggtgagctgtagacccgtacggctgtaccttagcagtatatatgtggtaggtgaaggtgaacacacaatggccagagttgccgtggttgacacagccattaatccggagcttcagtctcgtaggcggatagattgcctgtgatttccacttcataggttttgcccatttgcaacaacaaaaaaagaaaagaaaaggaaaggaaagaaagaaagttcgggcgaatagaggagtttgtatgtagaaagaaagtttagattgtttgacttataatgcgagatgaagacttattttgggacggagagagtatattgcttctttaggctttctggtttggtgatatagggtataactgtatcatcagtccttgtgctttggaaaacggaaaaccaatttgtgatgtaaacttcagaactgcagatgtccgctgtgcccaaacttgtagagattgcttacgaaaggaatacgttgttgtacgcttacag

SEQ ID NO: 133129 - DNA, 585 bp, Zea Mays
gcaggttgaaatgttggagaagcaaaagaatgaggtcctggagaggatgagacggcaagttgggccaacggcaaagagaatttgtctgcggaggacattgacaggtccatggtgagctgtagacccgtacggctgtaccttagcagtatatatgtggtaggtgaaggtgaacacacaatggccagagttgccgtggttgacacagccattaatccggagcttcagtctcgtaggcggatagattgcctgtgatttccacttcataggttttgcccatttgcaacaacaaaaaaagaaaagaaaaggaaaggaaagaaagaaagttcgggcgaatagaggagtttgtatgtagaaagaaagtttagattgtttgacttataatgcgagatgaagacttattttgggacggagagagtatattgcttctttaggctttctggtttggtgatatagggtataactgtatcatcagtccttgtgctttggaaaacggaaaaccaatttgtgatgtaaacttcagaactgcagatgtccgctgtgcccaaacttgtagagattgcttacgaaaggaatacgttgttgtac

SEQ ID NO: 133130 - DNA, 2980 bp, Zea Mays
cccgcccccagatcccagcgcggccaatggcgctcgagtcaactccagggccacgaacacaacctcccccggtcgcggtcggccatgcctctgcctctgcctccgccacgcatcacgcctccccgcccgccgagccaatgccatgagcgcgccgccgacccacggccgcaccgatgccgacgcgtctccccctcgccgccgtcctgctcctcttcctcctcctcctcctcggcgccgccgccccgaccccggcgcgcggcggcagggtcgccacggagctcctcgccccgggcttcacggcgtcgtacctgctcttcatcgacacctacggcgcgttcctcgcgtcgcggagcggcgcgttccacgccgtggtctacaacccggggcagcagcaggagcggttctacctcgccgtgctccacgcgccgtccaagacctgcgtctgggtcgccaaccgcgccgcgcccatcaccgaccgcgccgccccgctgcagctcacggccagcgggatctccgccgaggaccccaacggcaccaccatctggtccacgccgccgttcggggagccagtggctgcgctccgcctcgacgaccacggcaacctctcgctgctggacgcgaggaacgccacgctgtggcagtccttcgaccggcctaccgactcgctcctgtcgtcgcagcggctccccgcgggggcgttcctcgcgtccgccgcgtcgggctccgacttctccgagggggcgtaccggctcgacgtgacggcggccgacgcggtgctcacgtggatgggctccatgtactggcggctctcgaacgacgccagctcgaccgtggaacgaagcggcaccgtcgcgtacatggccgtcaacggcaccgggctgtacctgctcgcggcggacggcggggtcgtcatccagctctcgttgcctgcagccgagctgcgagttgttaggctaggatatgacgggaagctgcagatccagagcttcgcgtcggcgaactcgtctaagtcgccgatggacggtggcttcgtggcgccgagcgatgcgtgcgctctgcccctctcctgtggcgcgctcgggctctgcacgcccaagggctgcacttgcccgcccttgttcgcggcgtcgcacgacgctggttgcacgccgtctgacggctccaccccgctgtccgtctcctcatgcggcggcggcggcggcggcagcgggaataacagctcgccggtctcgtacctcagctttggcagtggcgtcgcgtacttcgctaacaagctggcgccaccgaccgtgtccggcggcaacgtttcttcatgccaggctctctgtaccagcaactgttcctgccgcggttacttctacgacgactcgtccttgtcctgctacttggtgaagcacgagctcggctccttcatgaacgctgactccaccaaaggctccgacaagctcggctacatcaaggtgctgagctcgcagctatcgagaccatccaacagttcgtcctcaaacagcaccctcattgccatcctcctcccaacaatcgtcgtgtttgtgctcatcgtcgtcgtcagcgccaccgtgatcagggcgtggcgtaaggatgcggggcgttcgtcgcgctccagggatcagcagctccggcggcagcgctcgccgtcggattcagcgcacctggtgcgggatattgacgatcaggacgacgacatcgtcatccctggcctcccgacaaggttcacgcacgaagagatcgaggacatgaccaacagctaccgcatcaagatcggcgccggcgggttcggcgccgtgtacaagggcgaactcccgaacggctcgcaggtggccgtgaagaagatcgaaggcgtcgggatgcagggcaagcgcgagttctgcaccgagatcgccgtcattggcaacatccaccacatcaacctcgtccgcctccgcggcttctgcaccgagggccagcgccgcctcctcgtgtacgagtacatgaaccgcggctccctcgacaggtcgctgttccggccgaccggccctctgctggagtggaaggagcggatggacgtcgccgtcggggcggcgagggggctggcgtacctccacttcggctgcgaccagaggatcatccactgcgacgtcaagccggagaacatcctgctcgcggacggcggccaggtgaagatcgccgacttcgggctcgcgaaattcctcacgccggagcagtccggcctcttcacgacgatgaggggcacccgcgggtacctcgcgccggagtggctcagcaacgcggccatcaccgaccgcaccgacgtgtacagcttcggaatggtgctcctggagctggtgcgcggccgcaagaaccgcagcgagcacgtaagcgacggcggcggcgaggcctccaattcctcgaacgggacagcgggcagctcgtcgcgcggcgcgaagagcgactatttcccgctcgccgccctggaggggcacgaggccgggcagtacgcggagctggctgactctcggctacaggggcgggtggccgccgaggaagtggagagggtggtgaaggtggcgctgtgctgcctccacgaggacccacacctgcggccgagcatggcggtcgtggtcggcatgctggagggcaccatagcgctgtgggagccaaaggtgcagtcgcttgggttcctccgactgtacggccgggggttttctgggccagcggacggcggaggtagcgacatgaatctgaagcatatggcgtcccccatggaccggtcagggacgacgacgacgtcaacgacgatgagcgggtggccgtcgtacctgtcgtcatctcagctctccgggccgagatagcgaagaatggacacgggatactttctagcttagagtgtactccgacgaatccattcttgattttgttctggtggtagaacaaaggaatttatctttgtatctacgagatccaaatcaccacgattttgttg

SEQ ID NO: 133131 - DNA, 1446 bp, Zea Mays
gacacctgtccacccattcccctcgcctcgccgccgcggacttcccttcccgcacccgcatcaaattcctcttgttccgcggaatttcccttgctaatcctggtatctcctgtcgctaagccactctactccgcctaacccccgctctgagctcaccggactggcggctccgtccggctctctcagcgtgcgcgtgctcgtgaggagggctctttcgaagcgtgtgaatccggtgggcgacgtgaaccagggatggatttcccgggaggaagcgggaggcggccgcagcagcaggagccggagcacctgccgccgatgacgccgctcccgctggcgaggcaggggtcggtgtactctctcacgttcgacgagttccagagctcgctcggcggggccgccaaggacttcggctccatgaacatggacgagctcctccgcagcatctggtccgcggaggaggtacacagcgtcgcggccgccagcgcgtcggcggcggaccacgcccacgccgccgcgcgggggcccgtgtccatccagcaccagggctcgctcaccctcccccgcacgctcagccagaagaccgtcgacgaggtctggcgcgacctcacgtgcgtcggcggaggaccctcctccggctccgccgcgcccgcagcgccgcccccgccggcccagcggcacccgacgctcggggagatcacgctggaggagttcctcgtccgcgcgggcgtggtgcgggaggacatgacggcgccgccgcccgtaccgccggcgccggtgtgcccggctcctgctccgcgcccgccagtgctgtttccccatggcaatgtgttggctcccttggtgcctccactgcaattcgggaatgggttcgtgtcgggggctgtcggtcagcagcgaggtggtcccgtgccccccgcggtatcgcccaggcctgtgacggccagcgcgttcgggaagatggagggagacgacttgtcatccttgtcgccatcaccggtcccgtacattttcggtggtgggttgaggggaaggaagccaccggctatggagaaggtggttgagaggaggcagcgccggatgatcaagaaccgggagtcggccgcgaggtcgcgccaaaggaaacagaaaaatccacatggtaccggagccaggctcaacggcgatggcgtcgcggtgacgagtgtcttcggcctcgacggagaagaccaccgagaaggagatcagcgacggccgaaggaggccgccgaggcacacgagcgatcgagggaggcgagggacgtgaccaggcagaagacgggcgagtacaccgacgccagcagggaggccgcgcaggaggccagggacaggtcccgagccacagcacaggagggacgccaccgccgacaaggcgagggcggccaaggacgtggacgcgggcactcgtcggcgacaaggatctggagatag

SEQ ID NO: 133132 - DNA, 2385 bp, Zea Mays
aaaaagaaaaagggcaaaaaagccgagcgggtttgaacgaagcgaaagcggagctgctctccccgcccgcgctcgctccatcgctttactatcattttgctcttttggtcgtttctcagcggctcacggatcgcgcgcgctcccccgctcgtcgtggcgcggccgcgctccacgtttcaatccgtttttgctgccgtgcggtgacgtgacgcctctaccgttggcgctttctgcagacggtgggactgggaccacgcggcgcggccgatccagatcccgcgcactcgtccgcgctgctgcctctcaccagcggcggcagcggcagcggctttgcctcgcggggcacggttgcgccagacgaggaagaggggagagacggggcgagctcggctgaatcgcaggaagtggcagaagcagcaaacgattcgttctcctactcactaagagagtgccagaagcagcggcgtctcaagtcagagaggtctgcactggtgcggccaccggcctcgcataagctcaataatgccggaggtattgagcttctagtgctctcgccgaggtgcttgattggtggtaacccgggaggaatgagcaagagctcaacgacatcatcccggagcagatcaggcacaggcacgttcccaagccctgggactccgagctgcaaccggcattgtgcaggcagcatgcagtactccaagggttggagttcagagcgcgtgccactgggcactggtaggaatagaaggtatgggggcagtggggttgtgcttccatttaacaatgggaggaagctgccatcgaaatgggaggatgcagagaagtggatcctaagtccagtttcctgtgatgggttggggaggatgtctgcaccagctccacatcatagacggcccaagtcgaagagtgggccacttggccatccagctggcattccaggggcttatgcggctgtttcaccgcttgttccttgctttgatggtgtgctggcagcagctaatttcgcagcacattcacctttctctgctggggttctcataccagagcacgggcgcattggcgacttcagcagtggaagagacagatgtggtgatgacggtagcagcagatcctactccgctgagaaagagtcctatatattaagatctgcaagcatacatgcatggacagaaacacttatggaggcatctgcttttgctaatatctcagaagaaaccgtacaagatgataaactgcaacgccagacagaagcaacttccatgatttccagtccaatcataaagaaagacatcggcacacagatgagtcctgaggatagtatatcttctccaaaagcgagacattcctgctccagtctgccttcaggacatctgataaaggaagcaaatagtcatatacctaaacctgaaattcgggacgtgcaggttgatgaccaagtaactgtgacccggtggtccaagcgacatgtaacacgaggctctgataagaggtcaacaaatattattgaatggaggaagaagaccactgaaacccgaactccatcttttgatgaaaaagaaagagaaagatgcatgtcacagtgcaaaagggaggaagcaaagatcacagcttgggaaaatctacagaaagcaaaagcagaggcagctatccgtaagctggagatgaaacttgaaaagaaacggtcatcatcaatggacaaaattttaggcaaactccgctctgctcagaagaaagcacaagacatgcgaagtgtagtttcttctagtgaaggtcagtgtagtgtgagggcaaccaagaagacatcttcctctgtcaaaactggcaggcctttcagctgctgctttacctaccgtgcttgctagttgtgatacacagttggtgcctgtggatacagcaatggatataggtctattcgacctcttctcaggcaacagttatggacgcgaagggaagtcagttgggttttgactacaaggcctaattgttaatgagatttgcactgatgaatgagatatcgttatggagcagcagacgaagaaagccacgcgaaatccactcatgtaactgatggagtggactaatgcagtctagtatgcgacgatcaatctctgtacacccggtagaaaaagttcatgagcttcatggcagttagaatcaggattgagctgatattcatcccgcttgatgtgtagctagcattcttgtaactggaattgtgtgtgtaatgcaaatcatgggcgcattagactgtaatgaagaaaaagtcagggctgcgcctttagaatgcagcttgctcactttttgagtttagtactgagactgggcttgtttgttattggttggcagcaattggaactgtgacgacgtatattttccttttttttg

SEQ ID NO: 133133 - DNA, 1712 bp, Zea Mays
actccccgtttttctccgcaccgccctgctccccgaccccaactgccgtctccttcctcggggaatgcgaccgcgcgccagagcatgctccgcccggagcccgcgctagggttccccgccgccggccccgcccgcgcgcccgagcgccgccgtaagaagcagccgccgacgaggcggaggcgaccggccggtgccacaacggtgggactgggaccacgcggcgcggccgatccagatcccgcgcactcgtccgcgctgctgcctctcaccagcggcggcagcggcagcggctttgcctcgcggggcacggttgcgccagacgaggaagaggggagagacggggcgagctcggctgaatcgcaggaagtggcagaagcagcaaacgattcgttctcctactcactaagagagtgccagaagcagcggcgtctcaagtcagagaggtctgcactggtgcggccaccggcctcgcataagctcaataatgccggaggtattgagcttctagtgctctcgccgaggtgcttgattggtggtaacccgggaggaatgagcaagagctcaacgacatcatcccggagcagatcaggcacaggcacgttcccaagccctgggactccgagctgcaaccggcattgtgcaggcagcatgcagtactccaagggttggagttcagagcgcgtgccactgggcactggtaggaatagaaggtatgggggcagtggggttgtgcttccatttaacaatgggaggaagctgccatcgaaatgggaggatgcagagaagtggatcctaagtccagtttcctgtgatgggttggggaggatgtctgcaccagctccacatcatagacggcccaagtcgaagagtgggccacttggccatccagctggcattccaggggcttatgcggctgtttcaccgcttgttccttgctttgatggtgtgctggcagcagctaatttcgcagcacattcacctttctctgctggggttctcataccagagcacgggcgcattggcgacttcagcagtggaagagacagatgtggtgatgacggtagcagcagatcctactccgctgagaaagagtcctatatattaagatctgcaagcatacatgcatggacagaaacacttatggaggcatctgcttttgctaatatctcagaagaaaccgtacaagatgataaactgcaacgccagacagaagcaacttccatgatttccagtccaatcataaagaaagacatcggcacacagatgagtcctgaggatagtatatcttctccaaaagcgagacattcctgctccagtctgccttcaggacatctgataaaggaagcaaatagtcatatacctaaacctgaaattcgggacgtgcaggttgatgaccaagtaactgtgacccggtggtccaagcgacatgtaacacgaggctctgataagaggtcaacaaatattattgaatggaggaagaagaccactgaaacccgaactccatcttttgatgaaaaagaaagagaaagatgcatgtcacagtaagatattgcctatttctgcccatcagctaacaatcccattttgcaccactgcccagttttgaattggatttacacaaaaagaatatattgctccaattgtcatcttgtagctttcaatactccaagctgtcgttgtcgtgtatcatgtttattaagaaaggtcagctc

SEQ ID NO: 133134 - DNA, 1240 bp, Zea Mays
gtctgcgtgcagcgtgctcgcgaggtcctgcttcctgctgcgatggggggcgagacgcacctgagcgtgcaggagctggcggcgtcgctgggcgcgctaccgccggagttcgtgcggtctgagcaggaccagccgggcgcgaccacgtaccgcggggccgccgtgccggacgcgccggtgatcgacatgtcggagcccgggttcggcgcgcgcatggccgcagccgccagggagtgggggctgttccaggtggtgaaccacggcgtgccctcagcggcggtggcggagctccagcgcgtcgggcgggccttcttcgcgcttccgacggaggagaaggagcgctacgccatggacccggcgtccggcaagatcgagggctacggcaccaagctgcagagggacctcgagggcaagaagacgtggaacgacttcttcttccacgtcgtcgcgccgccggagaaggtggaccacgccgtctggccccggagcctcgccgggtacagggaggccaacgaggagtactgccgccacatgcagcgcctgacgcgcgagctgttcgagcacctctcgctggggctggggctccacgggagcgccatggcggaggcgttcggcggagacggcctggtgttcctgcagaagatcaacttctacccgccgtgcccgcagccggagctcacgctcggcgtcgcgccgcacaccgacatgagcacgctcaccgtcctcgtgcccaacgaggtgcaggggctccaggtcttcaaagatggtcaatggtacgaggccaagtacgtgcccgacgcactcatcgtccatatcggcgatcagatcgagattttcagcaacggggcatacaaggcggtgctgcaccgtacgacggtgaacaaggagaagacgcggatgtcatggccgatgttcgtggagccgccgggggagctcgtcgtcgggccgcaccccaagctggtcacggaggagagcccggccaagtacaaggccaagaagtacaaggactaccagcactgcaagatcaacaagctccccatgtaattatgtagctcgggttctactgtcgtgcagtgtgcacccgcttctgttatttcagtctaccatttaagtcacataaccgaccgtgttatttgttgttgttgttgtaagggcactaatacatgctaaagaataactagtattttgtccgtgtattactgtaatttctataattaaaatatttacgatatctattatt

SEQ ID NO: 133135 - DNA, 494 bp, Zea Mays
gttttgcttttgttgaagccctattgtccagtgtgttttcttgaaatttaatcaattcctttccaatttaagctttaagctactatcgacagatataatgtaattcaagtttgatgaagttaccgatgcagttttctgatctatccattttagttttttatgcgttcacctaaataactgcaagtatatttgatcatggagtagaagcttgctgctatgtctatggaaaacagagctggaaaaaacagtgaaaaactattaaagctctctttcctagttgcaaattgcaaatcaattggtgaaagacttatgtttcttgcacaaatcatctactctcattctttctttctcctcattgcagatgctccatttcccttgaagatggatttaatttttatatagtcaatatttgttaagggtgatcatacgtattttgaattcgacttgtcaatggaaggaactcaaccgtaaattacacaacagtgaacgagtag

SEQ ID NO: 133136 - DNA, 1653 bp, Zea Mays
cctcagcgaacccctctgcgttccgccgcagcttccgaagacatcgatgtcctagcaagttggaaacccccctccctcccctcatattcgcctccgcctccctccgtccctcgtcaaatccacgcgaccgcgattgctctcagaaggcactagcacgcaaaaaccccacgagagagacgaatcttccgaatctctcggtggcgatggcgctctccgaccgctcccgcgagtcgctcctcccgagcttcctctacgcctcctcggcgcgctctttcgctgccacaggagccgccgcgcgcctccctgtctcctccccagcgcctgccacggctggagcaggaggcggcgtgccgttctcgatccaggcgcccaaggagaagatcgagatgtactcgccggccttctatgccgcctgcactgccggaggaatcgccagctgcgggctcacccacatggccgtcacgcctctcgacctcgtcaagtgcaatatgcagattgacccagcgaaatacaagagtatctcatctggatttggtatcctgttaaaggagcaaggggccaggggtttcttcaggggatgggtgcctactttgcttggttacagtgctcagggggcttgcaagtttggcttctatgagttctttaagaagtattactcggacattgcagggcctgagtatgcccaaaagtacaagactctaatctacctcgcaggatctgcatctgctgaggtaattgctgatgtggctctctgcccttttgaagctgtgaaggtacgtgtgcagacacaacctggatttgctcgtggattgagtgatgggctccccaaatttgtccgatctgagggtgttcttgggctctacaagggaattgttcctctctggggtcgtcagattccttataccatgatgaagtttgcttcctttgagaccatcgttgagcttatctacaagcatgctgtgcctgttccgaagtctgagtgcagcaagactacccagttgggtattagctttgctggtggttacattgccggtgtcttctgtgctattgtttctcacccggctgacaaccttgtgtctttcctgaacaatgccaagggagctacagtgggagatgctgttaagaagcttggtctctggggtctcttcactagaggacttcctcttcgtatcgtcatgattggtacccttactggtgctcagtggggaatttacgatgcattcaaagtgatggttggactcccaacaacgggaggtgttacacctgccccagcagcagaggctgaattgaaagccagtgcttgattttttttttctgtgttccctgagatcatatttggtggagtggaattgtatcagccggtcgagagcttagttcccgaatcttttttaatcttaacggaaaatttgtccgtcatccttctgatgagaggaactcattaaacaggcgaaataggtcttttttgcgctgggaaaagtttacgcttgatgcataataatttgtaggacggcaacgctctagagcgcaggttttgttcacctcctgtaccgaggaatgcttaaagttacatttcacattatggtctttatgaaagagtgcacctcggttgatgttccttttgccgttgctggaactatgcgatttgctgtaatt

SEQ ID NO: 133137 - DNA, 1406 bp, Zea Mays
atggggggcgagacgcacctgagcgtgcaggagctggcggcgtcgctgggcgcgctaccgccggagttcgtgcggtctgagcaggaccagccgggcgcgaccacgtaccgcggggccgccgtgccggacgcgccggtgatcgacatatcggagcccgggttcggcgcgcgcatggccgcagccgccagggagtgggggctgttccaggtggtgaaccacggcgtgccctcagcggcggtggcggagctccagcgcgtcgggcgggccttcttcgcgcttccgacggaggagaaggagcgctacgccatggacccggcgtccggcaagatcgagggctacggcaccaagctgcagagggacctcgagggcaagaagacgtggaacgacttcttcttccacgtcgtcgcgccgccggagaaggtggaccacgccgtctggccccggagcctcgccgggtacagggaggccaacgaggagtactgccgccacatgcagcgcctgacgcgcgagctgttcgagcacctctcgctggggctggggctccacgggggcgccatggcggaggcgttcggcggagacggcctggtgttcctgcagaagatcaacttctacccgccgtgcccgcagccggagctcacgctcggcgtcgcgccgcacaccgacatgagcacgctcaccgtcctcgtgcccaacgaggtgcaggggctccaggtcttcaaagatggtcaatggtacgaggccaagtacgtgcccgacgcactcatcgtccatatcggcgatcagatcgaggcaagcgacctacgtagcatcttttttttttcattctattgtgttgtgatgatcttgctccctcaagtatttctttgatgtcggacaactactaactggtacgaaccgatcgagcagattttcagcaacggggcatacaaggcggtgctgcaccgtacgacggtgaacaaggagaagacgcggatgtcatggccgatgttcgtggagccgccgggggagctcgtcgtcgggccgcaccccaagctggtcacggaggagagcccggccaagtacaaggccaagaagtacaaggactaccagcactgcaagatcaacaagctccccatgtaattatgtagctcgggttctactgtcgtgtgcacccgcttctgtaatttcagtctaccatatttaagtcacataaccgttattccagtcgcatgcatggccacagaattggcttgtgggctctttcgtctggtttgggccattgcgggctgcttatctactctctttcccgaccgtgtttatttgttgttgttgtaagggcactaatacatgttaaagaataacgggtcttttgtccgtatattactacaatttctatagatgggattgtccacgccatttaaaatatt

SEQ ID NO: 133138 - DNA, 1365 bp, Zea Mays
acactattaattcagtgctcttcccttcgtctgcgtctgcgtgcagcgtgctcgcgaggccctgcttcctgctgcgatggggggcgagacgcacctgagcgtgcaggagctggcggcgtcgctgggcgcgctaccgccggagttcgtgcggtctgagcaggaccagccgggcgcgaccacgtaccgcggggccgccgtgccggacgcgccggtgatcgacatatcggagcccgggttcggcgcgcgcatggccgcagccgccagggagtgggggctgttccaggtggtgaaccacggcgtgccctcagcggcggtggcggagctccagcgcgtcgggcgggccttcttcgcgcttccgacggaggagaaggagcgctacgccatggacccggcgtccggcaagatcgagggctacggcaccaagctgcagagggacctcgagggcaagaagacgtggaacgacttcttcttccacgtcgtcgcgccgccggagaaggtggaccacgccgtctggccccggagcctcgccgggtacagggaggccaacgaggagtactgccgccacatgcagcgcctgacgcgcgagctgttcgagcacctctcgctggggctggggctccacgggggcgccatggcggaggcgttcggcggagacggcctggtgttcctgcagaagatcaacttctacccgccgtgcccgcagccggagctcacgctcggcgtcgcgccgcacaccgacatgagcacgctcaccgtcctcgtgcccaacgaggtgcaggggctccaggtcttcaaagatggtcaatggtacgaggccaagtacgtgcccgacgcactcatcgtccatatcggcgatcagatcgagattttcagcaacggggcatacaaggcggtgctgcaccgtacgacggtgaacaaggagaagacgcggatgtcatggccgatgttcgtggagccgccgggggagctcgtcgtcgggccgcaccccaagctggtcacggaggagagcccggccaagtacaaggccaagaagtacaaggactaccagcactgcaagatcaacaagctccccatgtaattatgtagctcgggttctactgtcgtgtgcacccgcttctgtaatttcagtctaccatatttaagtcacataaccgttattccagtcgcatgcatggccacagaattggcttgtgggctctttcgtctggtttgggccattgcgggctgcttatctactctctttcccgaccgtgtttatttgttgttgttgtaagggcactaatacatgttaaagaataacgggtcttttgtccgtatattactacaatttctatagatgggattgtccacgccatttaaaatatt

SEQ ID NO: 133139 - DNA, 2796 bp, Zea Mays
gcgcggccaatggcgctcgagtcaactccagggccacgaacacaacctcccccggtcgcggtcggccttgcctccgccacgcatcacgcctccccgcccgccgagccaatgccatgagcgcgccgccgacccacggccgcaccgatgccgacgcgtctccccctcgccgccgtcctgctcctcctcctcctcggcgccgccgccccgaccccggcgcgcggcggcagggtcgccacggagctcctcgccccgggcttcacggcgtcgtacctgctcttcatcgacacctacggcgcgttcctcgcgtcgcggagcggcgcgttccacgccgtggtgtacaacccggggcagcagcaggagcggttctacctcgccgtgctccacgcgccgtccaagacctgcgtctgggtcgccaaccgcgccgcgcccatcaccgaccgcgccgccgcgctgcagctcacggccagcgggatctccgccgaggaccccaacggcaccaccatctggtccacgccgccgttcggggagccagtggctgcgctccgcctcgacgaccacggcaacctctcgctgctggacgcgaggaacgccacgctgtggcagtccttcgaccggcctaccgactcgctcctgtcgtcgcagcggctccccgcgggggcgttcctcgcgtccgccgcgtccggctccgacttctccgagggggcgtaccggctcaacgtgacggcggccgacgccgtgctcacgtggatgggctccatgtactggcggctctcgaacgacgccagctcgaccgtggaacgaagcggcaccgtcgcgtacatggccgtcaacggcaccgggctgtacctgctcgcggcggacggcggggtcgtaatccgggtctcgttgcctgcagccgagctgcgagttgttaggctgggatatgacgggaagctgcagatccagagcttcgcgtcggcgaactcgtctaagtcgccgatggacggcggcttcgtggcgccgagcgatgcgtgcgctctgcccctctcctgtggcgcgctcgggctctgcacgcccaagggctgcacttgcccgcccttgttcgcggcgtcgcacgacgctggttgcacgccgtctgacggctccaccccgctgtccgtctcctcatgcggcggcggcgggaataacagctcgccggtctcgtacctcagccttggcagtggcgtcgcgtacttcgctaacaagctggcgccaccgaccgtgtccggcggcaacgtttcttcatgccaggctctctgtaccagcaactgttcctgccgcggttacttctacgacgactcgtccttgtcctgctacttggtgaagcacgagctcggctccttcatgaacgctgactccaccaaaggctccgacaagctcggctacatcaaggtgcagagctcgcagctatcgagaccatccaacagttcgtcctcaaacagcaccctcattgccatcctcctcccaacaatcgtcgtgtttgtgctcatcgtcgtcgtcagcgccaccgtgatcagggcgtggcgtaaggatgcggggcgctcgtcgcgctctagggatcagcagctccggcggcagcgctcgccgtcggattcagcgcacctggtgcgggatattgacgatcaggacgacgacatcgtcatccctggcctcccgacaaggttcacgcacgaagagatcgaggacatgaccaacagctaccgcatcaagatcggcgccggcgggttcggcgccgtgtacaagggcgaactcccgaacggctcgcaggtggccgtgaagaagatcgagggcgtcgggatgcagggcaagcgcgagttctgcaccgagatcgccgtcattggcaacatccaccacgtcaacctcgtccgcctccgcggcttctgcaccgagggccagcgccgcctcctcgtgtacgagtacatgaaccgcggctccctcgacaggtcgctgttcaggccgaccggccctctgctggagtggaaggagcggatggacgtcgccgtcggggcggcgagggggctggcgtacctccacttcggctgcgaccagagggtcatccactgcgacgtcaagccggagaacatcctgctcgcggacggcggccaggtgaagatcgccgacttcgggctcgcgaaattcctcacgccggagcagtccggcctcttcacgacgatgaggggcacccgcgggtacctcgcgccggagtggctcagcaacgcggccatcaccgaccgcaccgacgtgtacagcttcggaatggtgctcctggagctggtgcgcggccgcaagaaccgcagcgagcacgtaagcgacggcggcggcgaggcctccaattcctcgaacgggacagcgggcagctcgtcgcgcggcgcgaagagcgactatttcccgctcgccgccctggaggggcacgaggccgggcagtacgcggagctggctgaccctcggctacaggggcgggtggccgccgacgaagtggagagagtggtgaaggtggcgctgtgctgcctccacgaggacccacacctgcggccgagcatggcggtcgtggtcggcatgctggagggcaccatagcgctgtgggagccaaagatgcagtcgcttgggttcctccgactgtatggccgggggttttctgggccagcggacggcgacatgaatctgaagcatatggcgtcccccatggaccggtcagggacgacgacgacgacgtcaacgacgatgagcgggtggccgtcgtacctgtcgtcatctcagctctccgggccgagatagcga

SEQ ID NO: 133140 - DNA, 1686 bp, Zea Mays
acccgtgagatcgcgggacccacactcagcctcagcgaacccctctgcgttccgccgcagcttccgaagacatcgatgtcctagcaagttggaaacccccctccctcccctcatattcgcctccgcctccctctccctccgtccctcgtcaaatccacgcgaccgcgagagctctcagaaggccctagcacgcaaaaaccccacgagagagacgaatcttccgaatctctcggtggcgatggcgctctccgaccgctcccgcgagtcgctcctcccgagcttcctctacggctcctcggcgcgctctttcgctgccacaggagccgccgcgcgcctccctgtctcctccccggcgcctgccgcggctggagcaggaggcggcgtgccgttctcgatccaggcgcccaaggagaagatcgagatgtactcgccggccttctatgccgcctgcactgccggaggaatcgccagctgcgggctcacccacatggccgtcacgcctctcgacctcgtcaagtgcaatatgcagattgacccagcgaaatacaagagtatctcatctggatttggtatcctgttaaaggagcaaggggccaggggtttcttcaggggatgggtgcctactttgcttggttacagtgctcagggggcttgcaagtttggcttctatgagttctttaagaagtattactcggacatcgcagggcctgagtatgcccaaaagtacaagactctaatctacctcgcaggatctgcatctgctgaggtaattgctgatgtggctctctgcccttttgaagctgtgaaggtacgtgtgcagacacaacctggatttgctcgtggattgagtgatgggctccccaaatttgtccgatctgagggtgttcttgggctctacaagggaattgttcctctctggggtcgtcagattccttataccatgatgaagtttgcttcctttgagaccatcgttgagcttatctacaagcatgctgtgcctgttccgaagtctgagtgcagcaagactacccagttgggtattagctttgctggtggttacgttgccggtgtcttctgtgctattgtttctcacccggctgacaaccttgtgtctttcctgaacaatgccaagggagctacagtgggagatgctgttaagaagcttggtctctggggtctcttcactagaggacttcctcttcgtatcgtcatgattggtacccttactggtgctcagtggggaatttacgatgcattcaaagtgatggttggactcccaacaacgggaggtgttacacctgccccagcagcagaggctgaattgaaagccagtgcttgattttttttttctgtgttccctgagatcatatttggtagagtggaattgtatcagccagtcgagagcttagttcccgaatctttttttaatcgtaacggaaaatttgtccgtcatccttctgatgagaggaactcattaaacaggcgaaataggtcttttttgcgctgggaaaagtttgcgcttgatgcataataatttttaggacggcaacgctcttagagcgcaggttttgttcacctcctgtaccgaggaatgcttactaagtcccatttcacattatggtctttatgaaatagtgcacctcggttaatgttctttttgccgttattggaactacgcgattgctg

SEQ ID NO: 133141 - DNA, 1206 bp, Zea Mays
atgggcaaggccggcagcgttttccctagccctgcgccggcaaccaggtccagccgctgccggtgtgggtgtggcgcggtcgttgaaaaggtggtggtcaacggcaagtgcgtatccgtgctgttcctggcagtcagcgggttcctctcggccttcttcctgctgcttcgtctccggacatcaggagacgtccccgatgatcctggcatactcgccgaaatcgaggcaggcttcattttgtcagtgccacactcacaggtagcttcacagactggaatgctcgaaaaagagatatatacccaaataggtgtccccaacagcaaggtttcagtttccatgcaaccatacgtatatgcagacaccacttatgtgaagtttggtgttcttccagacccaagaaatacctccatgagcacagaatccatcgacgcactgagagcgtccttgataaaacttacgctacagcagctgaatctgtctctgacaccgtctgtttttggagacacgttttgcttggagattctagggttcccaggagggatcacggtactgcttccgcatagtgctccgcatgctgacttgagagaacctctcttcaatgtcacgtttaactcgaccattcatgaaataaggggggttcttgaggagatgaagattgagcttggatccacactagagcaaacaccagatgaggaattatatgtcgagttaacgaatatgaatggctcaacggttgcaacaccagttacagttcaagtttccatctcccccgttgaccacagcatctatctaggaaactacaggctcgaacagctagccagaatcataacaaactggagtgcaaggaaccttggcctaaatacctcaattttcggcgagattataggtttgacgttgtctccactcctacaagccttccttccatccagtgctcctagcttctctccaatatcaccgccatccatgccctggcctccaataccggaggggccaaaaatctacccttccagggaaatctcatgccctcctttggttaaaattcaaaatgcaaccactcaacatcgcagactaatgcgtgtgccatccaagacgatttctccacaattgtcgacacggtttcataggaagcacacatctgagggcaagaaaaatagtattgcagtgccagcaacaacattcgctgcaccagcacccaagcagaaatga

SEQ ID NO: 133142 - DNA, 1101 bp, Zea Mays
aactgctacccggcttcctcagccgtcgtctcatctgccgccgccatactcctgtccacctgagtacctgaccggcatccttccccctcctgcccgatccctcgaggcggagatccctaggccgtcggccgggatggcgggggcgctggccctcgcggtgttgctcgccgtcgcgtcgctccatgctgaggcggtgtggctggacgtgccacagtcggggaccaagtgcgtgtcggaggagatccagtctaacgtggtggtgctcaccgactattccatcatgtacgagtcccacccctattcgcaccccaccatcgccgtcaaggttacttcaccatatgggaacaccttgcatcacagtgagaattctacagttggtcaatttgcattcacaaccgcagaagctggaaactacgttgcatgcttctgggttgatagtgcagagaaaggatcaggagtatctgtgaatcttgactggaagattgggatcgcaacaaaagattgggatgctattgctaagaaggaaaaaattgagggtgtagaactagagcttcggaaacttgaagtggcagtgcaggccattcatcagaacttgatatacctcaaagaaagggaagcagagatgcgaactgtgagtgagacaacaaattcaagggtcgtctggttcagtactctgtcgctatgggtctgcattgcggtatcggttttgcaagtccgacaccttcaagggttcttcagaaagaagaagctcatttagagtctctctgtaagatgttgcgctgtggttcagatgttgttcaccttggaagggtacaattttgccttttacatggaacatttcacaccagtgatgactgatgggctacttgtactgtatgtaatttaagtacgattggatcgaaaatctatatttcagggaaaaaaatcttatatttaggctccagcacatacatgtaagtgtaaccaggggatagcccatctaggcatgttgtagaatgagactgaactcatcgtgacagcaaaatcgtggatacttaggcacttgttgccttccgatcggtcttatcgatgctagccctcgattattacgatccaaacgaa

SEQ ID NO: 133143 - DNA, 513 bp, Zea Mays
ttttttgtgtagcagcattgctaatagttgctttgatctgcctacgcagggaagcagagatgcgaactgtgagtgagacaacaaattcaagggtcgtctggttcagtactctgtcgctatgggtctgcattgcggtatcggttttgcaagtccgacaccttcaagggttcttcagaaagaagaagctcatttagagtctctctgtaagatgttgcgctgtggttcagatgttgttcaccttggaagggtacaattttgccttttacatggaacatttcacaccagtgatgactgatgggctacttgtactgtatgtaatttaagtacgattggatcgaaaatctatatttcagggaaaaaaatcttatatttaggctccagcacatacatgtaagtgtaaccaggggatagcccatctaggcatgttgtagaatgagactgaactcatcgtgacagcaaaatcgtggatacttaggcacttgttgccttccgatcggtcttatcgatgctagc

SEQ ID NO: 133144 - DNA, 1669 bp, Zea Mays
ctcggctgcctcctcactgccatagctagctactagctgaggacctcggtcgaggtagtatagttacttattagccattagcagctggaacttgttggaggagagagcttagctttgagagataaaatgggcgtgggaaaagttctgaacgacgtgaagccgtacctggccatggtcctgctgcaggtaggcttcgccgggatgtacatcgtggccgtggcctcgctcaagcgcgggatgagccacttcgtcctcgtcgtgtaccgtaacctctgcgccaccgccgtcatggcgccattcgcgctctggttcgagaggaacgcgaggccaaggatgaccatcaccatcttcctcaagataatggggctcgccatgctcgaaccggtgctggaccagaacctctactacatgggggcgaacctgacctcggccggcttcgcgtcggcgctcataaacatcctcccggccgtcacgttcgtcatggccctggtcctgcgcatggagaaggtgcggctgcggagcgtgcacagccaggccaagatcgcgggcacggtcctcacggtcgccggcgcggtgctcatggtcctgtaccatggccccgtggtgcagttcccgtggtccaaggggcagcaccaccacgacagcgccggcggccagggagccaacagtgccgccgccgccggcggcttcctcacggggatcatcaccatcgtaatcgcctgcgtctgctggtccgccttcttcgtgctccaggccaacacgctcaagagctaccccgcggagctgtcgctgacggcgctcatctgcctcatggggtcgctcatgagcggctccgtcgcgctcgtcgccgagcgccgcaacacccaggcctgggtcatcggcttcgacacccgcctcttcaccgccgtctacgccggcatagtgtgctccggcgtggcatactacgtgcaaggcatcgtgtccaggcaacgaggcccggtgttcgtcacggccttcaaccctctctgcatgatcatcaccgccgtcatgggctccatcatactcaaagaagagatcactctcggaagcgtgattggcgctgcgatcatcgtgttaggcctgtacgcgctcatctggggcaagagcaaggacagcgtggccgacgtctcagcatcaggcggctccaagggcgcatcagcggctgccgccgtcgagctgcccatcaccttggcgcagcccaacggcaacggcaactgcaagcacgaggtcggcagcggccgcggcgtcgtcttcgacgtcgagacgccggcggccaacaacggccattactagtagctacagctagtatatctatctatctactactcctaaacctaaatcaacctgcccggccgtcagttgtagctatagacactgacacacgcagatagaagcgtcctgccgcaggttatatatggctgatcgagtggacgtggacgcactgcacatacatatgccgtgcgattttttgtttgttttccgtttttgttaattattaatttcgccttgaaattcttgtgagagagtgcacgagagacacagacgatcctttgtatgaagaaggggataaggccatgacgttactggccggcttgcttaatcgatcagtaaacacgcatcatcagctctgctgctttcgtagagctggaat

SEQ ID NO: 133145 - DNA, 795 bp, Zea Mays
gcttgcttgcttggggcgctctagtgctcgcttgctgcacctgcaccggtcgcgcacagcctgggaagaggcgagctgaggtctgaggaagccgagaagccgggctcagcgtgcgtacagggacagagacggcaagccggagcatcgatccgttggtgcaagcaggaccggaggatcaccactcagagccatgctgcagcacggcgaggagaagaaggggaaggtgaagaaggggtggctggcggtgcgcgtcggggcggcggagggcgacggctcccagcagcgcttcgtcatccccatcgcgtacctgtaccacccgcagttccggcgcctgctggaggccgcgcgcgacgcctacggctacgactactccgcggggccgctgcgcctgccctgctccgccgacgagttcctccgcctgcgcgcgctcgtcgagcgggaggcgcaggcgccctcgtcgtcgtcctcgcaccaccaccgcgtccacgccggcggggggtcccacggcggccactactccctctcctccccgtgcacccgcgcaagggtcacctcgtgatcgaccgacgacctcggctttcctacgcgtgtgtggtggtgtctggtggtgtgtgtagagcgagggacagtatagttgttcgtagattaggtagctatctagctagccctgcaggggtgctgtgcttgtgcttcctcttcgatagatttccagttttgtctctttgttgttggcccttcccttgtactcttctctgcatgcgtttgatcctgcaggcgcatgtactatactaatga

SEQ ID NO: 133146 - DNA, 1604 bp, Zea Mays
ccgcatacttttatctgacttcatgacctaacactccgttgtttattatgtcagagagagacggttatgtgtgatcatgatatacttgccaaaacaaaggacactgttattttctcctaccttgcgtgtggagcaagctcagaatctgcaactacttcagttaataacaggtcgtacatgcaaagatctgatgatgtcacagtagatagtactatttctgggaagaagaccataagattttctctgaaaaacagagatgttgatagaaacacagctgacagctcaagaacattgatatcattcaaacgcaagttgagtgagaggggaccacgagctggtaagcaacttccacagaggccaactattgcagcagagaaactggaagatgaagacaagaagacaactgataagaagataattatgcaacagagagaaatgtttcaaaaagagctcgttatgacattagatcaagcttctacacagaatcaacgtcttcctaagggatatgcttatgttcctcgggattccttatcaaaagagaagctatggaatcgaaatacacagccacttaatccgcaggagcctggtggataggatcagttgaaatcaagtcggttcatttctctcgaggaaggtcatgagaaacttgtgcaggcatgttctttgcaactgaaaacgacaagcggcaagcaggggctggccagtgctattgccgcaagggttacagccaatccgtgatcttttttggacccaagttgcataatggtgcagactgaggtattcgtgtgaatgtatggtgtggcaccataacaagaaggctgcccccacccaggtaacgcgaatgatcagcaatatgggtgaattgacctacttgtgctataccaaagacagcgtgccaactgtatatatgagttttattagtgtgcagatttcataaaattgccctgtacattctttcctttgcaaatgctagtttagttgtgcaggagaaaaagaattataaatccgttttggttggataagaaaagaaattagtttggttctttatcatggttcagaagaaaatgcagtggtgcttgcgggcaacgttgggcagctgtttgcctgatacatgtactctgtaaggatggtgaaggtgccaaaaataaggtcatgtcactgcttttcgccaactatttgttggtgctaactgggaagtggtatcatacaggctgagaaactgtgttttagctcttgtcgccggtggtttccgagagccccctttttttaaggggaacagtggtctctttaccggtttttagatatcaagatagcaacaatgttgaagttgggctgtaagttcttaggttgagaaggtatgatagctgagctttttttttttcaatttacatgtggggtatattgtatctgagacaggtttttttcctgcttgccgtccagattataaccttggttgggcctgtttagtaatttgttcggaagcggttcatgttttcaattctattgctcgatgtctgcagagatcgcctattacatgcaaaatttatttccaaattttaggttacattagctttgttaagtcaaccatttgtaattttggcaag

SEQ ID NO: 133147 - DNA, 5628 bp, Zea Mays
ctccgcccactggatccgagacccacgcgcaaaactcgggccgggaaaaactcgccaggaaagagaacgctcggaagggaaacacaggctcgggctcgagacgaaaccctaaccctacctccgcttgcctcgacgtccctcctcgccggaggcctcccccggagacgcagcctccgctgagggctccggcggcgatgcgcccctcccagttggaggcgttatgagcggggaaatggcgcgcgccgaggccttgccagagggggaggcccccgggttcggtgtcgacctgtatgcgcaagccaccaaggctgtgtccctgcggacgccgttcgagggcgatgaggcggcgcccagggttcccacgctgcccgcgcggctcgtcagctgggcagggccaggggacgcccggaagaagcacaagaagattctgcctccccctcctgatgatgctgctccggagcctccaccacagtcacctgtagtcacccctgcgaaggttggcttgtgggaccagtttgaggcgtatttccgtcccgtaacactggctgacgtcgaaatgttaagaccaaagctcccatttggctacagcaaggttgactcatgtatgctagtaccatttctgggcagtggcaatgagtcaacaacccaagctgagacatatgacgtggctgtggctgaaacaaccttgtatttgggtgttggtggtgaagaagtggtcactaatcgggagcgcggcgtgcaaagtgtgcatctggctagtcagaaagagaggaatgatcaaagcattgaacatgacatacatgatgtggttgtgcaacagatggtcagcgacaaagagcttaataggcacagaggggtacagggcatacacgaagtttctattcagttgggagggagatcatctggagtggatcaagctgggagcagtagtggcattgttttaggacaatttgtcaatgaggaaggaacttcacttaattggctgctaggagcaacaggccggtttgttctcacttcagagcgacccaacaagaagagaaagcttctgggtgtcgatgctgggttagagcagcttgttctgcttccacgcgtaggggctgaggcatctgcaagctgtgatgtttgttgtcttggagaaagttccatggagtccaataggatagttaactgcagcaactgcaaggtgtcagtgcaccagaagtgttatggtttgcatgctgtgcctgatgggcaatggttgtgtgcttggtgtacatatctagagtctacagggtggtcattgaaggaagatgctggtaacacccagtcgatgccttgtgctttatgcccaaaggagaaaggagctcttaaacctgttaaagtggagtctactcgaaatgagggtattggccaccaaaaatttgtgcacttgtactgtagtctctgggcaccagaggtttttgttgaggacatggagtcaatggaacctgtacttagccttgaaaatgtccaagagaatcggatgaagttgacgtgcagtatctgcaagattaagcatggtgcatgtgtccgatgtagtcatgggacgtgtcggacgccctttcaccctatatgtgcaagagagtcaaagcatcaaatggagatatgggggaaatccaggcaccctaatgttgagttgagagcattttgctcaaagcattctgcagttgaatacgccagttctgtagataccagtaaccttgcatctgaacagaatcctagaaaatctggcccatacaataccaccctcaattctgggaaaattccagtaattaggttcacacgcaaaaacaaggacaaattcatcagttgtggaaccagtgcctctagttctggtaacctgatcagagtcaagacaatagagcaagatgctttagctaacacagttagaaatgcaaattctcaacctattcgaatatgggaaacaggtactggtcatccctctgttagtggtgatcatatcagaagttctggtgatattgctgtagtgcttagaaagctaattgacagtggaaaagttagtgttagtgatgtagcatctgaagtcggtatttcttcggaatccttggaagctgctcttgtgggtgaaactaccacgttttcccatggtttgacgctgaaaattatcaagtggctccaaaattctgtgcatatgcatgatgatgacaagggtgtacttgttgatgtgccggatttcgctgtaactgaacctgcacgaacaagatctaaaagcaacagcaagatactgaaagaaaataatgcaacatgcgcaacaggtgtgactattgtgcaaaatggagaaaagaacatggttaaagaagattctaatcccgagtgtgctgctaaagaatttgcaaacgaatctactcaggggttttctccaagcagcagcaaggatgttttaaaggacgaacatggaatattgatactgaacgacacctctggaaacaaagaatctggtacctccacacagataccaaatgaaaagcaaggtgcattacttggaagaaaaaataatgacttaactgaggtcgaactgggtccatgcttagagaaaggagtaccttcacatggccattgttttgttcagggtgataatggtgtagatggggtaggttcagttgaaaatagcttcaacacttcaaattgctctcatggacaaccttttttcaactttgatgattcacattcttatattcacccattcattaagaaaaaggtatctcatcattgggacattactttcaatcagaataaggaaactctgaatcactatatacaagagtcatcatatccttcacatgagaaaataccaactgattccttggtagaagtagagagtacagcagatacaaccgtgacagatcaagttttgaaagcaaggtcttcaaaaattcttgagcattcacctgatgatgaagttgaaggagagatggtgtacttacaatctaggctgcttgacaatgctgttgttctgaagcacagatatgaaaaattgatagcaaaggttgtccaaaatctttgtcgcgagctggatgctttcagtaaaagaaaatgggatcttatctttgtgaatcagtttcttcgtgatgttagagaagctaaaaaacgtgggagaaaagaaaagagacataaggaagcccaagctgtactagctgcagctgcagctgctattgcatcctcctcacggaactcaactgtgagaaaagatgcaaaggagaatgcaccagagagttctccaaaacttgttgctggatcttcaagggttggtcaacggactttttcattgccacggattaatgattcatcaaagtcatccaacaacaaagtatcatcagataacaaatttggaagttttcatatgccaatttcttcaaaagaaaatgggctatactgtgatgtatgcatgcgaactgaaactctgttgaaccgaatatttgtctgctccagatgcaaggctgctgtgcacatagattgctacagaaatctggaaaattctattgggccctggaactgcgaactttgtgaagatgaagacatttcatcagaagctacaagtacaaccgttagtgataaatcacattgtaatggcaagttaccctttgcacagtgtggcatgtgccatggcacatcaggtgcttttagaaagactgtagatgggaagtgggttcatgctttctgtgctgagtggttgttggataccaagtatgtaaggggacaagatagccctgtagaaggaatggaaaaccttgtagagggaaaagacacttgttgtctctgcctctgcaatgttggcatgtgcttaaggtgtagtagtggggattgcaacattactttccatcctacttgcgctagaagttctggtttatacatgaacacgaaagggtttggtactacatcacagcacaaagcatactgtgacaaacacagcgtagaacagaaagaggctgatgcacagcaatatggacctgaggagctcaggagcatgaaacgaatgagggttgaattggagaaactacgcctgttgtgtgagagaataattaagagagagaaggtgaagagagagacggttatgtgtgatcatgatatacttgccaaaacaaaggacactgttattttctcctaccttgcgtgtggagcaagctcagaatctgcaactacttcagttaataacaggtcgtacatgcaaagatctgatgatgtcacagtagatagtactatttctgggaagaagaccataagattttctctgaaaaacagagatgttgatagaaacacagctgacagctcaagaacattgatatcattcaaacgcaagttgagtgagaggggaccacgagctggtaagcaacttccacagaggccaactattgcagcagagaaactggaagatgaagacaagaagacaactgataagaagataattatgcaacagagagaaatgtttcaaaaagagctcgttatgacattagatcaagcttctacacagaatcaacgtcttcctaagggatatgcttatgttcctcgggattccttatcaaaagagaagctatggaatcgaaatacacagccacttaatccgcaggagcctggtggataggatcagttgaaatcaagtcggttcatttctctcgaggaaggtcatgagaaacttgtgcaggcatgttctttgcaactgaaaacgacaagcggcaagcaggggctggccagtgctattgccgcaagggttacagccaatccgtgatcttttttggacccaagttgcataatggtgcagactgaggtattcgtgtgaatgtatggtgtggcaccataacaagaaggctgcccccacccaggtaacgcgaatgatcagcaatatgggtgaattgacctacttgtgctataccaaagacagcgtgccaactgtatatatgagttttattagtgtgcagatttcataaaattgccctgtacattctttcctttgcaaatgctagtttagttgtgcaggagaaaaagaattataaatccgttttggttggataagaaaagaaattagtttggttctttatcatggttcagaagaaaatgcagtggtgcttgcgggcaacgttgggcagctgtttgcctgatacatgtactctgtaaggatggtgaaggtgccaaaaataaggtcatgtcactgcttttcgccaactatttgttggtgctaactgggaagtggtatcatacaggctgagaaactgtgttttagctcttgtcgccggtggtttccgagagccccctttttttaaggggaacagtggtctctttaccggtttttagatatcaagatagcaacaatgttgaagttgggctgtaagttcttaggttgagaaggtatgatagctgagctttttttttttcaatttacatgtggggtatattgtatctgagacaggtttttttcctgcttgccgtccagattataaccttggttgggcctgtttagtaatttgttcggaagcggttcatgttttcaattctattgctcgatgtctgcagagatcgcctattacatgcaaaatttatttccaaattttaggttacattagctttgttaagtcaaccatttgtaattttggcaag

SEQ ID NO: 133148 - DNA, 5613 bp, Zea Mays
ctccgcccactggatccgagacccacgcgcaaaactcgggccgggaaaaactcgccaggaaagagaacgctcggaagggaaacacaggctcgggctcgagacgaaaccctaaccctacctccgcttgcctcgacgtccctcctcgccggaggcctcccccggagacgcagcctccgctgagggctccggcggcgatgcgcccctcccagttggaggcgttatgagcggggaaatggcgcgcgccgaggccttgccagagggggaggcccccgggttcggtgtcgacctgtatgcgcaagccaccaaggctgtgtccctgcggacgccgttcgagggcgatgaggcggcgcccagggttcccacgctgcccgcgcggctcgtcagctgggcagggccaggggacgcccggaagaagcacaagaagattctgcctccccctcctgatgatgctgctccggagcctccaccacagtcacctgtagtcacccctgcgaaggttggcttgtgggaccagtttgaggcgtatttccgtcccgtaacactggctgacgtcgaaatgttaagaccaaagctcccatttggctacagcaaggttgactcatgtatgctagtaccatttctgggcagtggcaatgagtcaacaacccaagctgagacatatgacgtggctgtggctgaaacaaccttgtatttgggtgttggtggtgaagaagtggtcactaatcgggagcgcggcgtgcaaagtgtgcatctggctagtcagaaagagaggaatgatcaaagcattgaacatgacatacatgatgtggttgtgcaacagatggtcagcgacaaagagcttaataggcacagaggggtacagggcatacacgaagtttctattcagttgggagggagatcatctggagtggatcaagctgggagcagtagtggcattgttttaggacaatttgtcaatgaggaaggaacttcacttaattggctgctaggagcaacaggccggtttgttctcacttcagagcgacccaacaagaagagaaagcttctgggtgtcgatgctgggttagagcagcttgttctgcttccacgcgtaggggctgaggcatctgcaagctgtgatgtttgttgtcttggagaaagttccatggagtccaataggatagttaactgcagcaactgcaaggtgtcagtgcaccagaagtgttatggtttgcatgctgtgcctgatgggcaatggttgtgtgcttggtgtacatatctagagtctacagggtggtcattgaaggaagatgctggtaacacccagtcgatgccttgtgctttatgcccaaaggagaaaggagctcttaaacctgttaaagtggagtctactcgaaatgagggtattggccaccaaaaatttgtgcacttgtactgtagtctctgggcaccagaggtttttgttgaggacatggagtcaatggaacctgtacttagccttgaaaatgtccaagagaatcggatgaagttgacgtgcagtatctgcaagattaagcatggtgcatgtgtccgatgtagtcatgggacgtgtcggacgccctttcaccctatatgtgcaagagagtcaaagcatcaaatggagatatgggggaaatccaggcaccctaatgttgagttgagagcattttgctcaaagcattctgcagttgaatacgccagttctgtagataccagtaaccttgcatctgaacagaatcctagaaaatctggcccatacaataccaccctcaattctgggaaaattccagtaattaggttcacacgcaaaaacaaggacaaattcatcagttgtggaaccagtgcctctagttctggtaacctgatcagagtcaagacaatagagcaagatgctttagctaacacagttagaaatgcaaattctcaacctattcgaatatgggaaacaggtactggtcatccctctgttagtggtgatcatatcagaagttctggtgatattgctgtagtgcttagaaagctaattgacagtggaaaagttagtgttagtgatgtagcatctgaagtcggtatttcttcggaatccttggaagctgctcttgtgggtgaaactaccacgttttcccatggtttgacgctgaaaattatcaagtggctccaaaattctgtgcatatgcatgatgatgacaagggtgtacttgttgatgtgccggatttcgctgtaactgaacctgcacgaacaagatctaaaagcaacagcaagatactgaaagaaaataatgcaacatgcgcaacaggtgtgactattgtgcaaaatggagaaaagaacatggttaaagaagattctaatcccgagtgtgctgctaaagaatttgcaaacgaatctactcaggggttttctccaagcagcagcaaggatgttttaaaggacgaacatggaatattgatactgaacgacacctctggaaacaaagaatctggtacctccacacagataccaaatgaaaagcaaggtgcattacttggaagaaaaaataatgacttaactgaggtcgaactgggtccatgcttagagaaaggagtaccttcacatggccattgttttgttcagggtgataatggtgtagatggggtaggttcagttgaaaatagcttcaacacttcaaattgctctcatggacaaccttttttcaactttgatgattcacattcttatattcacccattcattaagaaaaaggtatctcatcattgggacattactttcaatcagaataaggaaactctgaatcactatatacaagagtcatcatatccttcacatgagaaaataccaactgattccttggtagaagtagagagtacagcagatacaaccgtgacagatcaagttttgaaagcaaggtcttcaaaaattcttgagcattcacctgatgatgaagttgaaggagagatggtgtacttacaatctaggctgcttgacaatgctgttgttctgaagcacagatatgaaaaattgatagcaaaggttgtccaaaatctttgtcgcgagctggatgctttcagtaaaagaaaatgggatcttatctttgtgaatcagtttcttcgtgatgttagagaagctaaaaaacgtgggagaaaagaaaagagacataaggaagcccaagctgtactagctgcagctgcagctgctattgcatcctcctcacggaactcaactgtgagaaaagatgcaaaggagaatgcaccagagagttctccaaaacttgttgctggatcttcaagggttggtcaacggactttttcattgccacggattaatgattcatcaaagtcatccaacaacaaagtatcatcagataacaaatttggaagttttcatatgccaatttcttcaaaagaaaatgggctatactgtgatgtatgcatgcgaactgaaactctgttgaaccgaatatttgtctgctccagatgcaaggctgctgtgcacatagattgctacagaaatctggaaaattctattgggccctggaactgcgaactttgtgaagatgaagacatttcatcagaagctacaagtacaaccgttagtgataaatcacattgtaatggcaagttaccctttgcacagtgtggcatgtgccatggcacatcaggtgcttttagaaagactgtagatgggaagtgggttcatgctttctgtgctgagtggttgttggataccaagtatgtaaggggacaagatagccctgtagaaggaatggaaaaccttgtagagggaaaagacacttgttgtctctgcctctgcaatgttggcatgtgcttaaggtgtagtagtggggattgcaacattactttccatcctacttgcgctagaagttctggtttatacatgaacacgaaagggtttggtactacatcacagcacaaagcatactgtgacaaacacagcgtagaacagaaagaggctgatgcacagcaatatggacctgaggagctcaggagcatgaaacgaatgagggttgaattggagaaactacgcctgttgtgtgagagaataattaagagagagaaggtgaagagagagacggttatgtgtgatcatgatatacttgccaaaacaaaggacactgttattttctcctaccttgcgtgtggagcaagctcagaatctgcaactacttcagttaataacaggtcgtacatgcaaagatctgatgatgtcacagtagatagtactatttctgggaagaagaccataagattttctctgaaaaacagagatgttgatagaaacacagctgacagctcaagaacattgatatcattcaaacgcaagttgagtgagaggggaccacgagctggtaagcaacttccacagaggccaactattgcagcagagaaactggaagatgaagacaagaagacaactgataagaagagagaaatgtttcaaaaagagctcgttatgacattagatcaagcttctacacagaatcaacgtcttcctaagggatatgcttatgttcctcgggattccttatcaaaagagaagctatggaatcgaaatacacagccacttaatccgcaggagcctggtggataggatcagttgaaatcaagtcggttcatttctctcgaggaaggtcatgagaaacttgtgcaggcatgttctttgcaactgaaaacgacaagcggcaagcaggggctggccagtgctattgccgcaagggttacagccaatccgtgatcttttttggacccaagttgcataatggtgcagactgaggtattcgtgtgaatgtatggtgtggcaccataacaagaaggctgcccccacccaggtaacgcgaatgatcagcaatatgggtgaattgacctacttgtgctataccaaagacagcgtgccaactgtatatatgagttttattagtgtgcagatttcataaaattgccctgtacattctttcctttgcaaatgctagtttagttgtgcaggagaaaaagaattataaatccgttttggttggataagaaaagaaattagtttggttctttatcatggttcagaagaaaatgcagtggtgcttgcgggcaacgttgggcagctgtttgcctgatacatgtactctgtaaggatggtgaaggtgccaaaaataaggtcatgtcactgcttttcgccaactatttgttggtgctaactgggaagtggtatcatacaggctgagaaactgtgttttagctcttgtcgccggtggtttccgagagccccctttttttaaggggaacagtggtctctttaccggtttttagatatcaagatagcaacaatgttgaagttgggctgtaagttcttaggttgagaaggtatgatagctgagctttttttttttcaatttacatgtggggtatattgtatctgagacaggtttttttcctgcttgccgtccagattataaccttggttgggcctgtttagtaatttgttcggaagcggttcatgttttcaattctattgctcgatgtctgcagagatcgcctattacatgcaaaatttatttccaaattttaggttacattagctttgttaagtcaaccatttgtaattttggcaag

SEQ ID NO: 133149 - DNA, 1611 bp, Zea Mays
ctccgcccactggatccgagacccacgcgcaaaactcgggccgggaaaaactcgccaggaaagagaacgctcggaagggaaacacaggctcgggctcgagacgaaaccctaaccctacctccgcttgcctcgacgtccctcctcgccggaggcctcccccggagacgcagcctccgctgagggctccggcggcgatgcgcccctcccagttggaggcgttatgagcggggaaatggcgcgcgccgaggccttgccagagggggaggcccccgggttcggtgtcgacctgtatgcgcaagccaccaaggctgtgtccctgcggacgccgttcgagggcgatgaggcggcgcccagggttcccacgctgcccgcgcggctcgtcagctgggcagggccaggggacgcccggaagaagcacaagaagattctgcctccccctcctgatgatgctgctccggagcctccaccacagtcacctgtagtcacccctgcgaaggttggcttgtgggaccagtttgaggcgtatttccgtcccgtaacactggctgacgtcgaaatgttaagaccaaagctcccatttggctacagcaaggttgactcatgtatgctagtaccatttctgggcagtggcaatgagtcaacaacccaagctgagacatatgacgtggctgtggctgaaacaaccttgtatttgggtgttggtggtgaagaagtggtcactaatcgggagcgcggcgtgcaaagtgtgcatctggctagtcagaaagagaggaatgatcaaagcattgaacatgacatacatgatgtggttgtgcaacagatggtcagcgacaaagagcttaataggcacagaggggtacagggcatacacgaagtttctattcagttgggagggagatcatctggagtggatcaagctgggagcagtagtggcattgttttaggacaatttgtcaatgaggaaggaacttcacttaattggctgctaggagcaacaggccggtttgttctcacttcagagcgacccaacaagaagagaaagcttctgggtgtcgatgctgggttagagcagcttgttctgcttccacgcgtaggggctgaggcatctgcaagctgtgatgtttgttgtcttggagaaagttccatggagtccaataggatagttaactgcagcaactgcaaggtgtcagtgcaccagaagtgttatggtttgcatgctgtgcctgatgggcaatggttgtgtgcttggtgtacatatctagagtctacagggtggtcattgaaggaagatgctggtaacacccagtcgatgccttgtgctttatgcccaaaggagaaaggagctcttaaacctgttaaagtggagtctactcgaaatgagggtattggccaccaaaaatttgtgcacttgtactgtagtctctgggcaccagaggtttttgttgaggacatggagtcaatggaacctgtacttagccttgaaaatgtccaagagaatcggatgaagttgacgtgcagtatctgcaagattaagcatggtgcatgtgtccgatgtagtcatggtatgtattgttcacaccatgtttccagcttctgttaaaaagaactgtc

SEQ ID NO: 133150 - DNA, 192 bp, Zea Mays
gggacactgactgccatcagagactggttcagagactacaagatacctgatggaaagcctgccaacaaatttggtctcggcaacaagcccgcaagcaaggaatacgccctgaaggtcattcaagagaccaacgaatcatgggagaaattggtaaagagaaatattcccgctggagagctctcgttggcctga

SEQ ID NO: 133151 - DNA, 668 bp, Zea Mays
aatgctagcctcgagtcgagtattcctatttcctaccacaaaagctcgggcccacctcatcagctagccactagtactatacgcgctccgtccaaatccttggcctcgtcatccgcaagtcccactactacagtgcccgccgccgctgcgtccaccaccacctcctttcccaactcctccgcgtacccccgccctctccggcggcccgcgtaaccacccgcgcagatggcgacggcggccacggcgtccgcgacggcggcgacccgcttcacgctcctagcgggcgccggcctccgcagccgcatcacccgcctccccaccgccgtgcggttccagcgccagcgggggctcaccaccaccgcgctcctgaagaccgccgacctccagcccaaggagcagggcaagcccgagacgctcgactaccgcgtgttcctcgtcgacggcgggggccggaaggtgtcgccgtggcacgacgtcccgctgcgcgccggggacggggtgttccacttcgtcgtcgagatacccaaggagagcagcgccaagatggaggtcgccaccgacgaggccttcacgcccatcaagcaggacaccaagaagggcaaccttcgatactacccgtacaacattaactggaactatgggttacttcctcaaacatgggaggaccc

SEQ ID NO: 133152 - DNA, 92 bp, Zea Mays
tcgttccatatgcttgtaccttttccactgtacattgcgaaattacaatgttattcgttcaaaaaatctatatatatggctatgcttgtgct

SEQ ID NO: 133153 - DNA, 3006 bp, Zea Mays
tgccactctgagcttccgattaacctccagctctggtcatcacaattaaaacaaaccgttcccgcagctcgtgccgacaatggcggcctccgttgagcggcacctggccccccacccgtggccggccaatgcgcctcccaagagcttcgacatgttccgctccggcggcccaggaggcaagcgccgcaccggccccgactccgactccgaggacgaggacagcattcccccggactggcggtcgctgtacagcccgcgcctggaggtggagccgcccgcccacgacccacgcgacgaggccacctccgacgcgtgggtgcggcgccacccggcgctcgtccggctcacgggcaagcaccccttcaactcggagccgccggtgccgcggctgatggcgcacggcttcatcaccccggcgccgctccactacgtgcgcaaccacggggcggtcccccgggcggactggtccacctggacagtggaggtggcggggctcgtgaggcggcccgccaggctcaccatggagcagctggtgacggagttcgaggccgtggagctccccgtcacgctggtgtgcgcgggcaaccggcgcaaggagcagaacatggtgcgccagaccgtcggcttcaactggggccccggcgccatctccacgtccgtgtggcgcggcgcgcgcctccgcgacgtgctgcgccgctgcggcgtcatgggcgccgcggacggcgccgccaacgtctgcttcgagggcgccgaggacctccccggcggcggcggcggcggcaagtacggcaccagcctgcgccgcggggtggccatggaccccgcgcgcgacgtcatcctcgcctacatgcagaacggggagccgctcgcgcccgaccacggcttcccggtgcgcgtcatcgtgcccgggttcatcggcggccgcatggtcaagtggctcaagcggatcatcgtcgcgtccagcgagtccgagagctactaccactaccgcgacaaccgggtgctgccgtcccacgtcgacgccgacctcgccaatgccgaagcgtggtggtacaagccggagtgcatgataaacgagctgaacatcaactcggtgatcaccacaccaggacacgacgaggtgctgcccatcaacgccctcacgacgcagcggccgtatacgatcaaaggatacgcatactccggtggcggccggaaagtaacccgggtggaggtgacgctggacggcggcgagacgtggcatgtgtgctcgctcgaccacccggagcgtccaaccaagtacggcaagtactggtgctggtgcttctggtccgtcgacgtcgaggtgctcgacgtgctcggggccaaggaaatcgccgtccgcgcctgggacgaggccatgaacacccagccggagaagcttgtctggaacctcatgggcatgatgaacaactgctggttccgggtgaagatcaacgcgtgccggccgcacaagggcgagatcggcatggtgttcgagcacccggcgcagccgggcaaccagccgggcggctggatggcgcggcagaagcacctcgagacatcggagagcgcgcagagcacgctgaagaagagcacgtccacgcccttcatgaacacggccaccgcgcagtacaccatgtccgaggtgcgccgccacacgtccccggactccgcctggatcatcgtgcacggccacatctacgattgcacgggcttcctcaaggaccacccgggcggtgccgacagcatcctcatcaacgccggcaccgactgcaccgaggagttcgacgccatccactccgacaaggcccgcggcctcctcgagatgtaccgcgtgggcgagctcgttgtcaccggcagcgactactccccgcagaacagccacgccgacctcaaggccatcgtcgaggcccccgctgcagccgcgccgttatcggtgacgtcgaccgtcgcgctctccaatccgcgagagaaggtcaggtgccggctcgtcgataagaagagcctgtcctacaacgtgcgcctcttccggttcgcgctgccatcgccggaccagaagctcggccttcccgtcggcaggcacgtgtacgtgtgcgcgtcgataggcggcaagctctgcatgcgcgcgtacacgcccacgagccccgtcgacgaggtcggccacgtcgatctcctcatcaagatatacttcaaggacgaggaccccaagtaccccaacggcgggctcatgtcgcagtacctggactccctgccgctgggcgcgactattgacatcaagggtcccatagggcacatcgagtacgccggccgcggcggcttcgtggtgaacggcgagcgccggctcgcgcgcaggctcgccatgatcgccggcgggacgggcatcacgccggtgtaccaggtgatccaggccgtgctgagggaccagcccgacgacgacacggagatgcacctcgtgtacgcgaaccgaacggaggacgacatgctcctgcgggaggagatcgaccgcttggctgccgcgcacccggcgcgcctcaaggtgtggtacgtggtcagcaaggtggcgcgaccggaggacgggtgggagtacggcgtggggagagtggacgagcatgtcatgagggagcacctgcctctgggagacagcgagaccattgcgctcgtgtgcgggccgccggcgatgatcgagtgcacagtgcgcccgggcctggagaagatggggtacgacctcgacaaggcttgtctcgtgttctgagctctgaatagcggctaacggatgtcgtcaaggtgcaactgtacatagaaattctgtggtgccttgaatcttgaaccctagtaacgcgtcgatctagctagaactctaccgagttctcttgtaatactagcgatttaaactggccatggaagttcatactagctggtgccatggccgtcttgtcaagatgagatgtattggtcctactatatacagcgcaataaaaaccccaaggccattgcaattgcttggtg

SEQ ID NO: 133154 - DNA, 2450 bp, Zea Mays
atcacacatcccaccgccgccgccaccaccaccacccgccctatacccgtatataattactcgtacccggacgccaccgccgcctgcgccatgggcgactcctcggtggccggcgcgctcgtgccgtccgtgcccaagccggagcccgcgccgtccggtgacacctccgcggcggccgcggcgactacagcggcgctggcgatgccggaggaggcgggtatgcgcgcggcgtcggcgtcgcctcaggggcctgcggaggagggggagggccccgccgatagggacctcctctgcccgatctgcatggccgtcatcaaggacgccttcctcaccgcatgcggccacagcttctgctacatgtgcatcgtcacgcacctcagcaacaagagcgactgcccctgctgcgggcattaccttaccaaggcccagctctaccccaactttctccttgacaaggttctgaagaaaatatcagcccaacaaatagcaaaaacagcatcgccgatcgatcaatttcgatgtgcattgcaacagggaaatgaaatgggggttaaagagttggatagccttatgactttgattgctgagaagaagcggcaaatggaacaacaagaatcagagacaaatatgcaaatattgctagtcttcttacactgccttagaaagcaaaagctagaagagttgaatgagattcaaactgatctacaatacatcaaagaggatataagttctgtggagagacatagggcagaattatatcgcacaaaagaaaggtactccatgaagctgcgcatgcttttagatgagcctactgcgcaaaaaatgtggccctctcctatagacaaagctagctgtcgctttcttcccaactctcggacaccacttagtggatcatgtccaggaactttacagaataagaagcttgatttgaaagctcaagtaagccatcaaggatttcaaaggagagatgctctaacttcttctgatcctcctaactcccctatacaatcgggtaatgttattgctaggaagaggcgagttcaagcacagttcaatgagcttcaagaatactacctgcaaagacgtcgtactggagcacaggcacgcagacaagaagaaagagatatagttgcaatgaatagagaaggctatcatgcaggtcttcaggatttccagtctgtgctaacaacgttcactcgatacagtcgtctacgtgtcattgcggaactaagacatggagacttgtttcactctgccaatattgtatccagtattgaatttgatcgtgatgatgaactatttgctaccgctggagtctcgaaacgtattaaagtcttcgaattttccactgttgttaatgaaccatcagatgtgcattgcccagttgttgaaatggctaccagatctaaacttagctgcctaagctggaacaagtactcaaaaaatattattgcaagcagtgactatgagggtatagtaactgtgtgggatgttcagacccgtcagagtgtgatggaatatgaagagcatgagaagagagcatggagtgttgatttttctcgcacagactcttcaatgctagtatctgggagtgatgattgcaaggtgaaagtgtggtgcacaaatcaagaagcaagtgtgatcaatattgatatgaaagcaaatatttgctcggttaaatataatcctggatcaagcttctacgttgcagtcggatctgctgatcaccatattcattactttgatttacgtaatccaagttcgcctgtccatatttttggggggcacaagaaagcagtatcatatgtgaaattcttatctaacaatgagcttgcgtctgcatcaacagatagcacattacgcttatgggatgtcaaggataactgcccggtacggacattcagaggacacaaaaatgaaaagaactttgttggcttgtctgtgaacaatgaatatattgcttgtggaagtgagacaaatgaggtttttgtttatcacaaggctatctcgaaaccggcagcaagccatagatttgtatcttctgacctggatgatgccgatgatgatcctggttcttatttcattagtgctgtctgctggaagagtgatagccctacgatgttaactgctaacagtcaggggaccataaaagttcttgtacttgctccttgatgttatggagggcgttcaagaggttcacagtactgtccagttgtttcctttcgtgtcattatattcccccaaaattgggaacgggggcataattgatctccggttagggaatgaagttttgcagatggtcagctgacgtagggttttgaggtatcagaatgtgcatagtcatgtttatgttgtataggtgtaattgtgtaaagcagccaagttattggttacaagtgtaacacgagaaatacacattaataaaaaaaaaacctccagctcgtttgtac

SEQ ID NO: 133155 - DNA, 582 bp, Zea Mays
atcacacatcccaccgccgccgccaccaccaccacccgccctatacccgtatataattactcgtacccggacgccaccgccgcctgcgccatgggcgactcctcggtggccggcgcgctcgtgccgtccgtgcccaagccggagcccgcgccgtccggtgacacctccgcggcggccgcggcgactacagcggcgctggcgatgccggaggaggcgggtatgcgcgcggcgtcggcgtcgcctcaggggcctgcggaggagggggagggccccgccgatagggacctcctctgcccgatctgcatggccgtcatcaaggacgccttcctcaccgcatgcggccacagcttctgctacatgtgcatcgtcacgcacctcagcaacaagagcgactgcccctgctgcgggcattaccttaccaaggcccagctctaccccaactttctccttgacaaggttctgaagaaaatatcagcccaacaaatagcaaaaacagcatcgccgatcgatcaatttcgatgtgcattgcaacaggtcagtgattccatgtgttactttgctagttgctactattttcaatga

SEQ ID NO: 133156 - DNA, 1562 bp, Zea Mays
atataaaaaaatgaacaaaaccgcgacgccgcgaaaaccctagcttggtgccgcctcaccagcttgccaaatctctaaccctaggtgcagcggcggagatggcccccaagcgctcggctccacctccgccgcctccgcccccggctgcctcctccgaggagaccgcctctggttcgggctccgaggaggaggaggaggaggaggaggaggaggaggaggatgatttggagaccgcccactcaccgcctcccgtcgctcccaagagcgttgctccgctgccgcagaaggtccaggaacccgaagcgtccgacgaggatgagtatgacgatgaagatgacgagccgcagaaggtccaggaacccgaagcgtccgatgaggatgaagacgacgaagaggaggatatcgaagaggacgagaaggccaaccacgtggtcccttcttccgccaccaagaacccgcctccgccgccgcagactggcgaggattccgaggcttccgacgaagaagaggatagggaggcggacgacgagatgccgcagacgaagcccgctccaaatcaagaggtggaggctaagggtgcaaagcggccgagcgcgccgttccagcgcacctggtcgattgacgacgacttccgcatcctggaggccctcgctgcgcaacgcctggagcacggcgcgctgcctcaaacggacgtgctggccgacgccctcgctggcaagctcgacaatagtggctgcagcctctccgatctcaagaggaaggtgaggagtttgcagagccggtacgccaaagcggtcaagaaaggcgcgccaccgagcaaggatcaggatcgccgtctcttcgacctctgcaagaacgtctggccttctgttagcaatgccaagcctgttaccaaggcggttaccaaggcgtcggctaacggtggtgctgggagggagcctgacgagatgtgtgagctgtacccataccttgcggaggaggtgagggcgcttcagagggcacacccaggcttgttcaagcgggagtttgggatgatcgaagacagcaaggcccgtacactggacgagaggatcaagaagcagaggcgtgcactgatgaacctacatcttcgtcgccacgacctgaccaaggaagtgaccaggacgctcatggacctggctgagtgatgcagtggactgagctgagtatcatctaagaattctattttatggtatttaagtgcactgatgatcgattaccagcaaatgttgtatgacctactcaagcatggtaggtgaatcttgattttgttatctatctggtgtcgagtttttagttgttcatggtgtcagacatgttgcagcgtcagtgttaagtcaggaagtgcctgagtatgcacctgttcagttattatgttttgatatggtttctcaatttcttaggataactctgtagtctaaatttgtcagtctgagctctagtaatatggaaatactccctccatcctaaattattataagtcattccttgaggagtcaaaagtaattcaaatttaaccaaatttatataataaagtagtaaca

SEQ ID NO: 133157 - DNA, 1041 bp, Zea Mays
ctataaataaccaagtctccatgcctcgtccgcatctacacacgcccttcccaagtcccaaccgaacacacagagcacagcaacagcggccacctgccgctcagtgcgtgccatgaccatgaagctggatgtcccggcgaggcagaagagccaggacgcagagcagaacggcaggacagcggccgcgggcgtcctcggcattgacgagccgtggagccagccgaaactccgtcaccccggcgacgcgcaggccgacgccgacgccctggtgccgccgctcaacttcgccatggtcgacgacggcatcttccgctcgggcctcccggacgccggcagcttccgcttcctgctctccctcaatctgcgctccgtcgtgtacctgtgcccggagccgtacccggaggagaacgcgcggttcctgcagcagaacgggatccagcttcaccagttcggcatcgaagggagcaagagtggtccggcagtgccggatgccatggtggtgcaggaaccattcgtctacatccctgaagagatcatccgagaggcgctcaaagttattcttgacgcaagaaaccagccggtgctcatccactgcaagagaggcaagcatcgcactggctgcgtcgtcgggtgcctgaggaagctgcagaagtggtgcctgtcttcggtgttcgacgagtacctgcacttcgcggcggcgaaggcgaggagcactgaccagaggttcatggagctgttcgatgcttcgagcttgacgcacctggcggcctcatagtcacagtattgagcgctgaccagagcgagtggctcccgaccggtcccgatcctgcaaccatgctgcatcaagcaagcgattttcccctgctgtttccgaagcaactcggccgagaataatgctgctggaaccatgagtgtgtccgcgagaattgataggcaatggccttaggttttgttgtgtgagtgctgtggttgcttcgtgtgcaactgatttcagattctgaattggtgatggctgtgattggtgatggctgaactctgaac

SEQ ID NO: 133158 - DNA, 172 bp, Zea Mays
cagctgttagtacctagttataccttaattggggatggggacccgttggggacccgaaacccgaatgggttttttggaagaatcaggagggggagacccctactgcgaattttattaaaaagcgaaaagaaaaggttagaatttagtccttttacaaacaataaaaagaaaa

SEQ ID NO: 133159 - DNA, 903 bp, Zea Mays
ctggaaggtggggtgctgtactctcggaaacatggcgggcaccatggcgagggtaacgtgtaccaaccaggccaacggctggaaggtggggtgctgtactctcggaaacatggcgggcaccatggcgagggtaacgtgtaccaaccaggccaatggctggacggtggagtactgtgctctcggttggcgggaacccgttctggtcttgagaaacccgtgggcgagttgacatatgcaagggttaagtgctacatatgtcgtgtggttggagatccccagctgggtattaatcgattcggatcgccgaacttctcggatatgaagactggatcttcgaccctcatcgtagataacaagtgaaactaaagctactaaaatgaagctagtgtaggacaagtgaatgctctagatcaggcaaatctagattcaggaaaaatacttaatttgtgaagtaaaagtttggcataaggatccactactagtaagcttttctgcgaaaatgtgtctttgaaattcgataagctttaccttgattcccgacaaaccagcatacccttgagagtcttttctttagtcgggtaagtcttgctgagtaattgtgtactcagggttttattccctgttgtttttcaggttgtaattttgttctgttgtggatggtgctaagtgccggtgggctcggccttcttatataagtatatcccatctttagcttctctatcgaggattgtctcttaagctagcatgtattttaaaacttataaatgttttatacattcaaattgtaatctttttgaatcaagttcttttgtaatcaactccgatgatatatattgtaatcttgttataacttgtaaatgttgtaacttgtaaccattctgtaataaagaatttccgctgcaa

SEQ ID NO: 133160 - DNA, 743 bp, Zea Mays
aatgtgtgctctaaacctattagtttgggaattaatactttgatgaatgtattggaactagtagctaattagaccttgtgtggttataatgaactcaataatgtgaagaaggtcagtagacatttatatctagtattattgagttgattcgattgtcttatgtttataagtgtgttatgagtgcctgatacttgcgttaggcctatttaagtgtaaaagatgcgcttgtggtacatagcaatatcttcacatctagtgtgctcataggagttgtgatttttttaagtggttaccctctttagtatagaatatctatctcatgctattcatgtccatgcttatatgcattatgcattccaataggtacgctagatgattatgcgagctgaaggacatggatcagagcgaaccataagagggtatcggtggattaatcttgtggatgcatcaagccagcaacataatggaagatgctcaccaagtggtcgtcaattaacaacactaacatagtgttatcccaggttgtaattttgttctgttgtggatggtgctaagtgccggtgggctcggccttcttatataagtatatcccatctttagcttctctatcgaggattgtctcttaagctagcatgtattttaaaacttataaatgttttatacattcaaattgtaatctttttgaatcaagttcttttgtaatcaactccgatgatatatattgtaatcttgttataacttgt

SEQ ID NO: 133161 - DNA, 921 bp, Zea Mays
ttcgatcgtcggtagcttacctctgcctctcacgtgctcaacgttcatcacacatccgccatcgcctccaactgcaagccaccaagcctcctgctcgcatggatgcgccctctggtcctcatcctgttctggcacaggcgccctctcccagctcgtgccggccaatctcgacgtcgggcctctgttcgctggtggtcagcgctcactgggatcggatcggcctcaacaccgtttcacctccaccaagcctcgccggcgtgctctcctagccgcggtcggatctggcctcctgctttccctccggtaccctctcgttcccagctcgtggtgcctctgctcctctcgacgcctaggtagccatggcgtctcctccccttcccttcctctgccatggacgcgagctccaagattctgctcgtccaggccccttcccaggtgctcccgctgagcccctggccgagtttctttccatggccgccgcagcacctgtttcctgcacgctggtcgcccctgcccccagccatggtgccgtcaggccacccgtctcctacctcccaacgccagccctactcccatggccgcgccctctcctcacttgaagtcagcaacaacgcctcggtagtggtcgaacagcacgtcgtcgactccgtgatttttgggcagcctggttgcagtgtcgttaaaccccgtcctctttcgaagacgcgtgacgcttgttaggtatcaaatagaaagactgaaccgaaactatcgccatgttcgcggacaccgcgtcaagtttagtcgtggtaagtcgatatgttattttcgttagtcggataaatggttggtttgtatggatgcattggtcacgatgaccatcttgtttgtagcatgtgtattttggttatgatcgattaaataaagtgtttggtagaaggc

SEQ ID NO: 133162 - DNA, 379 bp, Zea Mays
atgaagaaccggctgccattggcgttgggtccgttgttggcccctacataaaaccaaccaaccttgagagactccctgaactcgtcgacgaacttggtgcccagatggagcgccctgcattgccagagccgatggggtcaccgccttataccatgaagcccttgatgttgcggtggaacacagtgtcgacgtagtagccgctagcgcagagggccaagaagttctccaccgtgcggagcacctggttgcagaacacctcgcacttgatgtcgcccaggttcatattcagcgttaccgactaccacacaacaaccgtgaatcagggactcggcacgggatagggaatgataggatgcaagttgagcgaggggatgaatca

SEQ ID NO: 133163 - DNA, 2494 bp, Zea Mays
cttcgctttccattgccacaggacggctggatcccaatcccacgcgcaccaccagccaggcaacagcaacacccgcgcctaccgccacatgacatgcctgcctccacgtcgccccaccaccacaccaccccgcgcacgagccgagcccgccgcgacgtgccccacacccgccacttttcccttaccgccccaaacgggctagcgtgacgaggtcaccggccataaatccccaatctccgcgctttccttccgccccacactcgtccactcaccccctctttgctctgcctcgccgcgccgcagagcagagcatggcgcccccacgccctctcctcgccgccgtcttcctcgccgcggcggttctgctcctcctttctccggcagaggcggggacggtgggcgtgaactacggccgcgtggcgaacaacctgcccaacccagcggcggttgtgcagctgctcaagcagcagggcgtcgcgcaggtgaagctgtacgacgccgaccccaccgtgctgcgcgccctcgcgaacaccggcatcaaggtggtggtggcgctgcccaacgagcaggtcgcggcggcggcgtcgcgcgcgtcctacgcgctgctgtgggtgcgccggaacgtggcggcgtaccacccggccacgcagatccagggcatcgccgtgggcaacgaggtgttcgcgtcggccaagaacgtgacggcgcagctggtcccggccatggccaacgtgcacgccgcgctggccaggctgggcctcgacggggccgtcaaggtgtcgtcgcccatcgcgctcacggcgctcgcgtcgtcctacccgtcctcggcgggcgcgttccgggaggacctcgcgcaggccgtcatgaagcccatgctcgacttcctggcgcagaccgggtcgtacctcatggtgaacgcgtacccgttcttcgcttactccggcaatgcgggagacatctccctcgactacgccctgttccgccccaacgccggcgtgctcgacgccgggaacggcctcaagtactacagcctcctcgacgcgcagctggacgccgtgttcgccgcggtcagcaggctcggggagggctacaacggcgtgcgcgtcgtggtctccgagacggggtggccgtccaagggcgacgccaacgaggcgggcgcttcggcggccaacgccgcggcgtacaacggcaacctggcccgccgcgtgctctccggcaacgccggcaccccgcgccgccccgacgccgacatcgacgtgtacctcttcgcgctcttcaacgagaaccagaagcccgggccgacctccgagcgcaactacggcgtcttctacccgaaccagcagaaggtgtacgacgtcgagttcgtcctcggcggcggcggcgccagccagggcaacggcggcctcgggtggcaggagaacggcggcggggcgagcagcaccagcaccaacccgccgagcggggtgaaggtgacgaccggggaggcgtggtgcgtggcgaacgcgatggccggggagcatcggctccaggcggcgctggactacgcgtgcggccccggcggcgcggactgcaaggccatccagcccggcgcggcgtgcttcgagcccaacaccatggtcgcgcacgcatcctacgccttcaacgactactaccagcgcaagggccggtccatcggaacctgcgacttcgccggcgccgcctacgtcgtcaaccaggcaccgaagatgggcaagtgcgacctcccatcgacggtctgaactgaagcagcagcggcgaggaccgtaacgccagcggccatctcgaggaacaaaagaatcgatggcaggcaggaggcagcacagcagctcagctcatcagtcgccctagagactggactggactctgggggacgccggaatctttgcccaccctttcagactttctttaccgctgcagctttgactccagccccgcagcgacgccgtagaacgaacatcgctgtactaggctgtagctgtacgccttcctttttgcagctttggctaatggtgggtgtgtgtgtggatatgtttgtttagtcatgaccagcactactacttctactactagcatgctactattaaaatctgatgaccagtacgtatagattaattaatttaaatggtttagccttttgcgcccatgtgacccactacggtttgtctcgactcgagtgagcattttgactcttgttccgtcatcggctcaaatgtgcgtgccggaggcggaaatggtgcttagcgtggacgacaatgcacactactggcagcagcacccgcactcgagtagtgctactagtcaaatgtctgccctttggcgagcaattaaaaccttggaaatggaggatttgtgccgaattgctttggaacgtttcagatctcaaagcaaggctgttttttttcgattctgtaaataaacactgtctaaagcttcattattggacttctctactaatggggaagtcaaaaaaaaaaaa

SEQ ID NO: 133164 - DNA, 2858 bp, Zea Mays
gccgcgtggggaaaaagggaggcgggcgggcggtgtctttaccgcccgcgcgcgggcattaactccgggctgtggtacctgaccaccctggcttgcggataagcacaacgccatgggagcacagagctgacctcgaggaaggtacttgaggaggaagcctctccgattccaccatattcgcacccggatttgggggactccagcgtctgatctgccgtttgatgcaagaacttgccgtttctcagctaggctgctgcggcgagatggtgcgggccggcgagaataggcatttcttcccgctcaccagcttgcaaatcggagatttacagtcatatcttgcagaactgacaatatttttgtgccctcataccaagaagttccttatattgctcgacaatcgcccatggttgctagatcaggatacaaaacctgctcatctatggcaattgatggttactaagtcaaggttttcccctttcgccaactctagggctaggagaaggagggatgaaactgatgaaaagcttgtgtactcaacaagctcagtatctgctccccatttacagaataaatcttccagatggtattccttgatcgacgacgctatgcgggaaaagaagcttcaagtaaataagttgaaggatgcccgcatactgaacagggagcttcatcagactttatatggttttatcatttttgaggtagactgggctgatgtgcgtggcatcaattatttgaatgaacttcagacggatacatcaatggttgtggagtctaaaataatgaagagatgggagtttgatagtgtcaaacaagcttcaacattgatcgcttcttggttctctggaaatccttttgaatgtcagctcctacaggattatttgaccaacatctcttctaacggagatatattttatgatgctcaaaatgatttcttaacacctgaatgggatagtgagaatttaccaagtgatagtgatgattctagccatgttcaaatcatcagagagtcatcaggtttcacagactcatcttacactacacctccttgctctggaccttacaagagaagaaaaataacaaaatcagatgatggaagtagttcgactgaagaatcatacacagaaattgtggcctcgccaaaacattcgtcatcttcgtgttcatcatgtgacagtgataatgagaatgctaagccgctattggagcctagcacgtataaggatgtactgatctgcttccgctttgatgatcatgaccttccattcggactgaaagaagtcatactatctgacgtcagactgttgacgctacttgagtatggccttccatcgtgggttatatttcttcagtcatatccggtgttttgcaagatatatcggccatggatgtgccctcttgccagagcattgtatgtcttgatgtcattaatcactgttcttataggattttatgacctctacaagaacgtgcccatgctgaaggcaactgcctcaagattgtttggccctttatttgattggatagaaacatgggaaatgatatcaagacttaagtatcttggaactatgcttttcctgcataattttcagcaggcttttacatggtcccttaagattgtgggtgctgctaagtctgctcttagtgttttgacaaagccaattgcgggaccaattctggaggtttttgaacttacgatgccaatttggaacctttgtgctgagacagtaggatatctgagttcagttgtcatgttatctgtagaagtgtcttggagtgtagttattgatacagtggagatgattgtctggccattttggtttgtcttcagtactatggttagcattgtgaattcaattctgtaccctataatttggctcctcggagagatactagctgcacctttccgactagtcattgggctatcaagttttgtagtggacctttttgttgatattatcaattttctaagggggagctggtcaacactaagtgccttatatcaagttggatctgttcccagatcacctgtgcttacatctgataataacatctgggcctcactgtggaaagatcttttgtatcagattttccgtgcactacggagcattttgtatggttttgttgccttcttttcaacatgtaataggcaccgactcagcatttacaatcacattcaagtgttcctccggcgcatatctcatgtcccagctggtgcacgatttaccgcctaccttgatgggactaggaagtatagcagccagaatcatcataagagaaggaaagccaagacgagataacagtgcagttggcaggtcactgagcaattaacaagctaactcggcgcaaatccgagctcaaaaaaagcaaagaaacaaaacaatgtaagccgaacgaaatatggagagcgaacaatcgataacaagagtttgattggagccttcggagaacataaaaaccaaggaagagtccagtacaggagttgtacattgacgctgaaagttccgttacattagctctaaccagtgaccagcagttcccttgtgtaccaaatacctggcgagcagtggaggaaaacctgcagctgtacatacgcggatcttgtagctgctgtttgttgtaaaatgagtaatagctagctttgtatagtaggcctgtgcatatcctgatatcctcttgtagttgccctccggacagcgattttgcaatgcatgtgtatgtcaagtgttgagttttcttcgcgaagaagtgtcatccttttgtcttactgatctcatttcagcagttatttctatggtcattgtccatgtgcacgccatgtaaacactacgtagtagcttacaatacatgtttaacca

SEQ ID NO: 133165 - DNA, 558 bp, Zea Mays
ttggttccttgaactaccgtttttctagcaaggtgcagaacaaggttacaaacatatgattacaacatgaaggaaaaaatgtctaattcccctctccccaactatagcaaaaatctggatgacctaaattgtagtgccattcacggaacctctaattcacaaatatcacttcccagtgttgcctttgttggcaccacgtcagcggtcagcccatacccatccaccaaggcatcaagacaaaaaccgtagtaccttacaacgtggtggtgacctctaatttaccaacggggaagtggttccagcggctctggccgtgcttgtcagcgtcgagaggctgcaattgcatgcatggcctggcactggctggttttggagtatgggaattgcagatgtggtgtgggaagtccgtttgaggtggacggcagattgaacagagaccatgtcaaaggtagcagtagtcgtggtggttgcggtcttgatctgtctggttgctggtgggaacttcatgcagggacagtgcccgcctcgcatcaaggggagggggcacaggcatgaatg

SEQ ID NO: 133166 - DNA, 1187 bp, Zea Mays
cattacttgggggcgggggcgggggcggctataaatatacacggccagctagcagcatccaagtcagttgaggagttgagttccgctccgccacaccaaaaagaaacaaaagcctacggcgatcgatcgagaagctggtcatcgtcaggatgtcatcgccgcagtcagcagcgccgcccgtgaagctgatcacggcgttcggcagcccgttcgcccaccgcgtggaggtggcgctcgctctcaagggggtgccgtacgagctggtcgtggaggacctagccaacaagagcgagctgctgctcacgcacaacccagtccaccagtcggtccctgtcctcctccacggtgaccgcgctgtctgcgagtccctcgtcatcgtcgagtacgtcgacgagaccttccaccatggcgcggcgccggggatcctcccggccgacccctacgaccgcgccaccgcccgcttctgggctgacttcatcgacaacaagtgcttgaagccgatgtggctgtcgatgtggacggacggcgaggcgcaggcgcggttcgtcagggagacgaaggagagcctgggggtgctggacgcgcaactccaggggaagaggttcttcgccggcgacgcgctcggcttcgtcgacctcgccgcctgcacgctggctcactggctaggcgtgctggaggaagtggccggagtgcacctgatagcggcggacggcgagtaccccgctctgcgccgctgggccaaggagtacgtctccgatgaggtcgtgagccggtcgctgccggacagggacgagctcgtcgccttcttcaccgccagcaaggagaggtacaagtcgtgggtcagggcagaggtggagcgacattgatcgctaaaaatgacgctggttgttgaactctgtacgttctcttgtagtcgaataatgtgtggatcgttatgtacgtatttcatcgtgttatatacatctaataagacatgcaagctcagctgctcatgttgatcccatctccatgcgagccggcctctggtgatttgctggactcgcgtcccagtcccagccgctgctcgaatggttcctaactcgcttacgatcttcagacagcctccatcgagtttctctccgcctgattggtttgctggccacacacccatgctgccgacctggcgtgaggctgactggtcggataag

SEQ ID NO: 133167 - DNA, 255 bp, Zea Mays
atggcgcttcacagcactagtatttttgtgctggctacggctgttaggctgtcagctctgtgttgcgttcatataccagactacgggagtatatatgatgatggtgctaacgtgcggaaccagattctttgccagaaatttaggacctcaaccaagtacaataacagaatggatcgttctaatcggtctttacatcgcctttcatcaacccttagagttgcttgctatgtgtgtgacaggttaattgtaacctag

SEQ ID NO: 133168 - DNA, 677 bp, Zea Mays
atgtgttgcaatttttcttagtagacattgagctttggataaaagaggaaggagaagcatctgctgacaaactgttgtttagtggttatgttgaaatcgacacttcttgggctggatttgaaagaatgctgagaggaaggtttcagggcgattatcttggcttgaacatggagtttgctttcctgggtcacagcattgagactcttatagaggtagaggcggaagccaaacaaccaaccgatgtgagaatcagtgccttaaccagtgggtttgatgaggagatttcactatatgatggcaaattttgtggaagtgggtcaatgttcaagcattttgtggctgtgaagaagcaagaggagttgcacgttgttttaaaaatggatggctcgccatataaatggactttcaaggctggagctggagttgctgcagcacctgagcatccagttccgggctttactcagtattttgtcatgaatgtgtcctttagaacaaggggcaaaacagcatcaacttggcaatggagttgcatctccaacaacgtctgtatatcggaaatagatccgtaagctagcagggtgcgataaggtgcagaaaacgtagctttctgtgggaactttacaggtggaaataacaaagatctctaaatttcggtgaatggtcccctgctgtttcta

SEQ ID NO: 133169 - DNA, 103 bp, Zea Mays
gtcacattaataagattctctcctatattcactctttgtgcaatggttcttcctataaggctatctgcagcggttttcctaaatttttctccctatatcattt

SEQ ID NO: 133170 - DNA, 201 bp, Zea Mays
atgcaaaggaagaaggcaaacctgccttgctcagttcgatcagtttctcaggaacatcttatcggagcatctcagcttgtgtgctgtccgcccggcaccgtaccggcagccactggaagaaggatgggaggccgtaacaaggtgaagaagagcatctggcagctgctctgcggctgctcgtcaccccagacgaaggactga

SEQ ID NO: 133171 - DNA, 98 bp, Zea Mays
ttttctgtctccaagtctacttgttgaaggcagcagtcgttcgtgaggtatctatcagtgcccagccaggtctctttcctgtgggcaatcacattgaa

SEQ ID NO: 133172 - DNA, 1448 bp, Zea Mays
cttcgactctcccactcctctgtcgcttccgccgacacctgagtcttgtcgctgccgccgggatggccggagtcaccgccaccgggatggccggagttcccgccaccttctcctcagccaccgctcagatcgggggcttcctctcgaagaagccttacgcgccgccgttgtgggccacgcacctctcccccatgccttgccataccttctcgctcggccatttcccaacaccgattcacaagtggaatctgcccaatttgccggaaggaacggaagtgtggatcaagcgagacgatttatcaggcatgcagttgagtggaaacaaggtccggaagctggagttcttgatggcagatgccgtagcacaaggcgcagactgcgttattactgttgggggtatacagagtaaccactgccgtgccacagccgtggctgctaagtatctcaatcttgattgctacctgatactacgtacctccaagcttcttgtggataaggaccctggtttggttggcaatcttcttgtcgagagactagttggggcacacgttgatcttgtgtcaaaagaagaatatggaaaaattggtagtgtggctttagctgacctgctgaaaaaaaggcttctggaagaagggaggaagccgtatgtgattcctgttggtggatcaaactcattgggaacttggggatatattgaggcaataagggagattgagcagcaaattcagcaatcttctgatgttcagtttgatgatattgttgttgcatgtggcagtggtggaaccattgctggccttgctttaggatccagattgagcagcttaaatacaaaagttcatgcattctctgtttgtgatgaccctgaatacttctatgactatgtccaaggcctgattgatggacttaattctggtttcgattcacatgatatagttagcatggaaaatgctaaggggttaggctatgccatgaacacagctgaggagcttaagtttgtcaaagacatagctgcatcaacaggcattgtccttgatccagtctacagtgggaaggcggtttatggtttgctaaaagacatggctggcaatccagccaaatggaaaggtcgaaaagttctgtttatccacacaggtggtcttcttgggttgtatgataaggctgaccagttgtcatctttggctgggagctggcgcagaatggatcttgaagattctgttccacgcaaagatggcactggtaagatgttctgatcagtacggtccatgtgattccatgatggctcattcttgcaaacattgtatccattacagagttattactcttaaatttgtgcaagaaaatgcagaatagatggttcacattgtatagaacactgatgcaatttaagaataaagcacatctttctgccatttggaaataaatattttttatgtggaggtttgtgtgtc

SEQ ID NO: 133173 - DNA, 1284 bp, Zea Mays
cttcgactctcccactcctctgtcgcttccgccgacacctgagtcttgtcgctgccgccgggatggccggagtcaccgccaccgggatggccggagttcccgccaccttctcctcagccaccgctcagatcgggggcttcctctcgaagaagccttacgcgccgccgttgtgggccacgcacctctcccccatgccttgccataccttctcgctcggccatttcccaacaccgattcacaagtggaatctgcccaatttgccggaaggaacggaagtgtggatcaagcgagacgatttatcaggcatgcagttgagtggaaacaaggtccggaagctggagttcttgatggcagatgccgtagcacaaggcgcagactgcgttattactgttgggggtatacagagtaaccactgccgtgccacagccgtggctgctaagtatctcaatcttgattgctacctgatactacgtacctccaaggaccctggtttggttggcaatcttcttgtcgagagactagttggggcacacgttgatcttgtgtcaaaagaagaatatggaaaaattggtagtgtggctttagctgacctgctgaaaaaaaggcttctggaagaagggaggaagccgtatgtgattcctgttggtggatcaaactcattgggaacttggggatatattgaggcaataagggagattgagcagcaaattcagcaatcttctgatgttcagtttgatgatattgttgttgcatgtggcagtggtggaaccattgctggccttgctttaggatccagattgagcagcttaaatacaaaagttcatgcattctctgtttgtgatgaccctgaatacttctatgactatgtccaaggcctgattgatggacttaattctggtttcgattcacatgatatagttagcatggaaaatgctaaggggttaggctatgccatgaacacagctgaggagcttaagtttgtcaaagacatagctgcatcaacaggcattgtccttgatccagtctacagtgggaaggcggtttatggtttgctaaaagacatggctggcaatccagccaaatggaaagaatggatcttgaagattctgttccacgcaaagatggcactggtaagatgttctgatcagtacggtccatgtgattccatgatggctcattcttgcaaacattgtatccattacagagttattactcttaaatttgtgcaagaaaatgcagaatagatggttcacattgtatagaacactgatgcaatttaagaat

SEQ ID NO: 133174 - DNA, 941 bp, Zea Mays
tgacatccgtcttcctgacgaggtatgtgtgtcttatagtgggagtgacggcgatcttgacaacctaatagacttcattttcccaaatctcaacgaaaatatgtctgattcgacctacatcacttcaagggcaatactgtcaacacggaacaactgggtggatatgataaatgttaagatgattgatcgttttcaaggggagcatatggtgtaccatagtttcgatagcgccatggatgatccccataactactacccacctgagttcctaaacacactgacacctaatgggctgccaccacatattttgaagctcaagattggatgccctattatattgcttcggaatatagaccctgccaatggactttgcaatggtaccaggctggtcattcgtggtttccaaagaaatagcattgacgcagaaattgtactaggtcagcacgttggaaaacggatttttctgccgcgtatacctctgtgtccatccgatgaagagatgttccctttccagttcaaaagaaagcagtttcctgtacggcttagctttgcaatgacggttaacaaagcacagggtcagactatccccaatgttggtgtatacttgcccgaaccagtgttctctcatggccaactatatgttgctctatctagagcgatagcccgatcgaacataaagattcttgccatcccagccatcgatgggaacaaaaagtcgaggaagggtgtaagaaagaaccctgcaatatattatgggacatgcaccaagaacatcgtgtacaaggaagtcctaacaaactagacccacggctagcgttccggataaagaaatggaggctgagaggacgagatgccaatagtgaattaccagtcagtggagattgagggggattctctggctgctagcagctcaagcggatcaggaagtggctcatcttcat

SEQ ID NO: 133175 - DNA, 788 bp, Zea Mays
tcttctcgtcttcacatacatctaggcacgtccacccccaacccagaggccgcagcacgccggagacgagccccaccgacacgcacgctaaaggcagccagcaatggagctgctgctcgtcccatgccgcgccgcaagcgcccgcccgctacgcgcagccagccccagagcctttcgctgccccagcgccaggccggcggccgccagctccagcaacgccgaggtcatcgacaccacggcgacgacgtcgtcgccggacgccccgaagcagtggcgcgcgggcgggcttgggctggagctgtcggaggagttgcggcgcggcatgacgtggcggatgctggcgcctcccgcggcggcagtggcggcggacgccgcgttcctggggctgctcgagcgcgcacagcccggggacctgccggcatgggccgccgccgcgggctccgccgtgctcttcgcggcggggctgctcggggtccactacggcttcctgtcgtcgaggtgggacgcggaggagacggggtccgtccttggctgggacctcgccgtgcggcactggaacgtcctttccacggcgaaggaatattcttcttcggtggaggaggaggaggaggaggaggaggaggaggaggatgaagaggaatactacgaagaagacgacgacgaggattaagtagacagtgattagattattaatctcagggggtaaatgtaataacagaccttggttgatctaagaaaccattcaaactcgggacaaatgacctttgaaatgctcgccgtacggtaaa

SEQ ID NO: 133176 - DNA, 1945 bp, Zea Mays
aaccaaaccaacgcacacaaaagcctccccactccccgagaccccccctcctccttcgttttgcaccctccccaaatctgcactactcccctctccctcgtccttcctccgccccgccccgcccatgaggatcaggaggcggcctccgggccagcctctgccctactcctcctcggtaacaaatgattcggccgcggatctcggggacggccgctcctcctcctcctcgtcggcgctcatcaggcgcccggcattgtcgccgcaggacggtgcggtggagcgcagcacgggtctggtgggtgcgcaacagcagcagcaacaggggcctgcagatggccacagcaggtatgtgatgaacgcgaactgagatcgaaccgtgacagccaggagcagaaagtggtgatgctgcctgtgcctgctgttgtgtggcatccgttttgctgtcgttgggcaggcttgcgatggcatggcatggctgtggggattttttacgaatagaaatcttaaaaaaggaaaggatccaaggcccccctttttattattgttgttattatctcaagggcttggccgattgggttcactgtttcacattactctctagtgggcaatgccagtccaatcgatctcacttgcttgccagacaaagccctcagcctcatgttgtaggtcgtgtgtggagcgagccggccagccactagatgccaccgttatgtgcatgcacgcgacatctatcgatctatctatgcagtcagtgcaacctctttcattcgatccggaccttccttgcttgatcgccttgcgtcgtcgtccatggcctttctatctatcctgtacgagtgcaactgggtcattccatctgtatgagtgcaagtgcaactcgggtgctctgggaaacatgcatgtgcgtgccgcatcatatatgggaaagggaaacactactacttcgcttgcacattgcacctttttttttgtgtgtgtgtgtgtgtttctgtcatgaggcattagtgcttttggcgttgcatgcatccatgcccggccggcccgcttggagttgcatcgatgcgctcagaagatgatcaagtgtacgtacggatcggagagggggcctgctctggcctccatcgagcgtagcatccactcaaaggccaacatcttatttataggttcctctcgccattgtctccggcatgcatgtatgatcaagagaaaacccgactgtgccaaatttcacaatgccgttccatcaatctactagcatcagttatccttgtgctgtgcttactgtatggtatcacgcgcgcgcgcgcactttgcagcctagagaacggactccatcgccacgtgccggagccggtgacgatggccctgcaggccggagagcgtctctgcagcggcaacggcgtcggcgcagcagtggcaatggctacgacgacgacagcaacagcgggcgcgaaggccacgaagcagcggcatcggcagacagagacaaataagcaggacaccggcggcggcgtgaagagggcggcgcggggcccaggcgtgctgatggaggggtcgcggtgcagccggaagaacggccgcgggtggcgctgcagccagccgacgctggtgggctacgcactctgccagtaccacctcggcaagggccgcaccaagagcgggagcgccgtggacgggggcgggcgcgggcgcggccccggccagctcggccgcaccgagcacgcgaacaaaacctccgccgccgcggacgtgccgccggcccagagcgtgcagcactgctaggggacgcgagattcttggacatatcgatcgtaattcttttgttgcgtttctaaacatgttgtgtttcacttttgacttgactcctctcgattcagcggcgcatgatcgggagggagggagggacagtgcactgagcgagggagcatttgctgctgctcagatt

SEQ ID NO: 133177 - DNA, 974 bp, Zea Mays
aaccaaaccaacgcacacaaaagcctccccactccccgagaccccccctcctccttcgttttgcaccctccccaaatctgcactactcccctctccctcgtccttcctccgccccgccccgcccatgaggatcaggaggcggcctccgggccagcctctgccctactcctcctcggtaacaaatgattcggccgcggatctcggggacggccgctcctcctcctcctcgtcggcgctcatcaggcgcccggcattgtcgccgcaggacggtgcggtggagcgcagcacgggtctggtgggtgcgcaacagcagcagcaacaggggcctgcagatggccacagcagcctagagaacggactccatcgccacgtgccggagccggtgacgatggccctgcaggccggagagcgtctctgcagcggcaacggcgtcggcgcagcagtggcaatggctacgacgacgacagcaacagcgggcgcgaaggccacgaagcagcggcatcggcagacagagacaaataagcaggacaccggcggcggcgtgaagagggcggcgcggggcccaggcgtgctgatggaggggtcgcggtgcagccggaagaacggccgcgggtggcgctgcagccagccgacgctggtgggctacgcactctgccagtaccacctcggcaagggccgcaccaagagcgggagcgccgtggacgggggcgggcgcgggcgcggccccggccagctcggccgcaccgagcacgcgaacaaaacctccgccgccgcggacgtgccgccggcccagagcgtgcagcactgctaggggacgcgagattcttggacatatcgatcgtaattcttttgttgcgtttctaaacatgttgtgtttcacttttgacttgactcctctcgattcagcggcgcatgatcgggagggagggagggacagtgcactgagcgagggagcatttgctgctgctcagatt

SEQ ID NO: 133178 - DNA, 1270 bp, Zea Mays
attagcccaatccgtgctgctgccgtctgtctttccctatcctcctcccaagaaagcctcgccgcaatagtttggcatccatgggattcttccattgcatctccaccgtcaactccacgcatcccttaacgagcactgaagcccggcaagccccggatcgccgatgaccacttccggcgcgcccaagcgcccaagcttcaagcgctcctcgcccgggaagaagtcgcggctcagaacccgtcgcgtcgccgccggtggccgagagggcgaggccgaggccgaggcggcggggacctcggcgctggcgagggcattgcttcccgcatcggtggggctagacgcggtgccgcctgttgggcgcgcattgccgcgagacttcttcgaggtggatgccctcgacctggccccccgcctcctcggcaagctccttcggcgcgatgaggttgtcctccgcatcaccgaggtggaggcttataggccaaatgactccgcatgccatggccggttcggcatcacagcgaggacagctccagtgtttggaccgggaggccatgcatatgtgtatctgtgctatggacttcacatgatgctcaatgtggttgccgatatagagggggttggtgctgccgttttgatccggtcatgttctccagttagcggtcttgaaactattcagcggcgccggggtcaacaaaccgagaaaccgatcctacttacgggaccaggaaaggttggacaagctctgggcctatccactgactggtcgaaccatcctctctacgcgcctggtgggttggaggtactggacgggccagagccggagagcattttggttggtccccgcgttggcatcgagtacgcgtctcccgagcatgtcgcggcgccgtggaggttcgcgattgccggcacgccgtggatcagcgcccccaaaaacacgctacggccacgctactgaccggtgtctgaacaggaaccgttcgagtcccgttccaacccgaattgccatgtgtttgtatttgcttgacacttcggaatgctgcctataactggctcttgtaaatgtatcacagtgtgttcgacaaaaaggcctacgaactctacgagggcgggtgcccgggccgaacattctcaaatgttaaaagcgtggagtgtgtttgaagggctgagaaagatgactagagagaagtaaataagagtcaattaactatttttttcctgaaatagccgttgtcctagaaaactcaaatcaaaacatcgaactgtgtcactc

SEQ ID NO: 133179 - DNA, 1809 bp, Zea Mays
gtcgccgagccgtcctaactcagcgagagggtttcgaattggcgccaagccgccaaccattccccccaatcccgcctgccagccctagggttcctgctacgccatggcgggaaccgccgccgccgctctcatggacatcgacgcagccgcgccgcctcccccgccgcctggtgcggcggccaagggcaaggcgccgctctccgctggcggcagggcagcgccctgggtcgagaagtaccggccccagtccctcgctgacgtcgccgcccaccgcgatatcgtcgacacaattgacaggcttacaaacgagaatagacttccacacttgttgctatatgggccacctggcactgggaaaacatcgacgattctggctgttgcgaggaagctatatgggtctcagtatagcaacatgatcctggagctcaatgcgtcagatgaacgtggcattgatgttgtcaggcagcagatccaggattttgctggggcacgcagcctctcttttggagcaaggccttctgttaagctggttctcttggatgaagcagacgcaatgacaaaggatgcacaatttgcattgagaagagttatcgagaagtatacaaggagcacaaggtttgcactcatatgcaaccatgtcaacaaaatcatccctgcgctacaatcaaggtgcaccaggtttagatttgctccactagatggcagtcatgttagagagcgtcttcaacatataataaaatctgaggggctcagtgtagatgacggtggcttgacagccctagtgcggttaagcaatggtgatatgaggaaggctttgaatatattgcagtcaacgcacatggcatcccaacaaatcacagaagaagctgtctatctttgcacaggaaaccccatgccaaaagatatcgagcagatagctttttggctattaaatgaaccattttcaaccagcttcaaatatatatctgacatgaagatgagaaaagggctggccttggttgatatcatacgggaggttactatgtttgtgttcaaaatacaaatgccatctgatgttcgtgtaaagctaatcaatgacttggctgatattgagtacagactaagctttgcatgcaacgataaactgcagctgggcgcactgatctcaactttcacggacactcgcacggctatggttgctgctgccagctaattccagtaatgtgaaggatctttctgctgctccctctggaatctgaagatgaagcgcagctacattatggggtcaacgtcttgcctgtagttagcaagctgaaaggtttggtgagggttgtcttagatctgtatgtctgctggacgtgatgtggtaactgcctggaacttgggagtactcgtatgactgaacgctgccaggcgttctcatgttatgcgtgtaagattctatccagtagtataaaccctagtgccgttctttgacgaagttacatatttttgcaaatgccacggagatttatggtgttagactatggatgcgtgttttttttttcacgcacttacgaaaacactagatcatcaacaaatcccctttggtcactgagtcctctcatctgtacatcatagtaccattcagtatcatatatactgcatgcaaaaactgaaggtatataacaatcaggctacccatcgagtcaacgatcaaatgcgtggttaggatcagtaaactggaaaagttgatcctgtacctttattttacaggtgaagggaatcgttgctcgtaaccctcgaagaaaacgccgggctattagctactatctcttaacaatgtactac

SEQ ID NO: 133180 - DNA, 804 bp, Zea Mays
ttgtcagcctgctcattggcacacacgcggacacaccacaggcgcgcaagcccaaccgatcgagcagctctagcatggcgagcggcggctactactacgaccagagcgcgggctacggcggctacagctactcggcggcgccgaggacgacgccgtcccacctcctggtgttcctggccaccgtggcgctgctgggcgccacgtcgctctactcgcgctacgagtccgcggtggagagcctggtggaccaggtgcggttcgccgtggtgctgtccccgctgctgctcctgctcgcggtccagtactgggcggccacggccgggtcccggcggccccggggcggcgccctcccgtcgctgctggccggggaccagccctcctggtacgccggcggcggcggatggggccagcgggacggcgcgtcgtcgtcgccgtggggcgtggcgctcgcgctcgccctggtgctgctcctcgtctcctaccagtcgtgcttccgcgacatgtggttcccgctggtcacccgccggtgagctcacctcagtccaggccaggcccttctggcggcatgtatcaccagcttcttgcagtgccgctggacggagatggaggagaatcatcaaacaccagataggatgctgctgttagcaagtggaggcggtgtggcatcgataaacacactcgctgttcgtctacacgggctgcgatcaatatagtagtatagtgtagttattgtaataatagaatactgaatactactaattaaaaaaagggaaaatggcagacaattcttgcattgcattggtc

SEQ ID NO: 133181 - DNA, 194 bp, Zea Mays
tgcaaagtctaaagattcatctagcaaactaaaatctctccatcagctgggtgttacgccaacggctagcatgcatgcgagtaatcatttttcacacacttcaagcactctgatccttgcttccagcacctcttccctacaacatattttgataatttgtcaattactatatcaataggtctataaactcctaa

SEQ ID NO: 133182 - DNA, 3437 bp, Zea Mays
ggccggatccaatggcgggtgcctcgtgctgctagatctcgctccgtacgggcaatggcgtcgcggccaacgtcgcggcagcggaaggcgggacacgcatcggcggcggcggggccgaagggtctgcaccaccaccagcagctgccgccgcagtcgggctcgccgacgtcgaccgcgaccacgtcctcgtcgcgtctcacgccggagctctcgctcgacgggcccgcgtccccgctgttcgccgggttggacgaggacccggcgcccaaggagaatgtaaccgtcactgtccgcttccgcccgctcagcccgcgggagattcggcagggggaggaggtcgcgtggtatgcggatggtgacacggtcgttcggagtgagcagaaccccagcgtcgcctatgcttacgatcgagtttttgcaccaactactacgacccgacatgtatatgatgttgcagctcaacatgttgttagtggtgccatggagggagtaaatggtacaatatttgcatatggtgttacaagcagtgggaagacacacacgatgcatggagaccaaagatccccagggattatacctttgtctgtcaaagatgcatttagcattatacaagagacaccaaatcgcgagtttctccttcgcgtatcatacttggaaatttataatgaggttgtcaatgatctactaaatcctgctggtcagaatttgcgaattagagaggatcctcagggaacatttgttgaaggtatcaaggaggaagtagtattatctcctgcacatgccctgtctctcattgcagctggcgaagagcataggcatgttgggtctaccaacttcaatctattgagtagcagaagtcataccattttcacattgactatagagagcagcccttgtggtgagtctaatgaaggggaagctgtcactttctcacagctgaacctcatcgatctggcaggttcagagagctcaagggcggaaacaactggagtacggcggaaagaaggatcttatatcaacaaaagcttgcttactcttggaacggtgatatcaaagctgactgatggaaaggctacacatattccatatcgagattcaaaattaacacgactacttcagtcatccctcagtggtcaaggacgtgtttcactgatttgcacattgacaccagcgtcaagtaattctgaagagacccataatacactaaaatttgcccaccgtgcgaagtgcattgagatccaagcatctcaaaacaaaattatagatgagaaatctctaataaagaagtatcaaactgagattcggagattaaaggaagagctagaacagctgaaaatgggtattattactggcacacccttgaaagataccgaggaagataatattatcctttggaagcaaaagctagaggatggtaacgtcaagctgcagtctcggctggaacaagaggaggaagctaaagctgctttgcttgcaaggatccagcgtttaacaaaacttatactggtttctactaaggcgaccccggcttctagattttctccacatcctggaccaagacgaagacattcttttggggaagaggagctggcataccttccgtatagaagacgagatataatgatagacaatgaaagcaatgaattacttcttcctgtcgaagggtttggtgtatcacttgaagattcttcaaaggaagaaaaaaagaataggaagggacttcttaactggttcaaacttcggaaacgtgatggagcttctattctgacaagttcagaaggtgataagtccagtttgactaaatcaaccgctccttcaacacctattggggaaagcgtcaactttcctgctgaaccaagaatatcaaattcattagctggtgagaatgtatcatctgatctgtttagcattggtcatggggaatttccttctggcagcattcacggcgaagaaactctttcggccagtggaaaaacgatggaccatgttgatttgttgagagaacagttgaaaattttgtcaggggaggttgcgtttaatacaagtgctcttaagcgcctcacagaggaagctggaagaagcccaaagaacgagaagattcagatggaaatgaagaagaagaccgatgaaattaaggggaagcagcaacagatagcatctttggagagagagatagctcatgcaacattaggaactcaaggaaaggtcgatacgttagagcattcaccgtcttatcatgaactacttgagcagctcaatgagaaatctttagaacttgaggtgaaggctgcagataatagagtgatacaagatcagctgaatgagaagataactgaatgcatggaattgcatgctgaagttactcatctcaaagaacagctgtcccaagctcttgaagctaaggatttggtgtcaaatagcatgatacataataatagagttaaccatgaagttgaacaccttgttgatcaagatgttccaagagagatctcttctgaaccacagcaaaaacagcagtccgttgaaatcaatgagctgaagcaaaaggtgtctgaactcatggaaatcaaagctcaacttgaggatcgcaatcaaaagctactggaggaaagtacatatgcaaaaggattggcttcagctgctggtgtcgaattgaaggcattgtcagaagaagtgaccaaactgatgaaccaaaatgagaagcttgcgaccgagttgtcatcgctgagaagtccaactccagctccacgcagattcaacaatggaccaagaggtactaggagggaaagcatgagtaggcgagaaccagctagcagacgagacacgaatgcaagccatgaaagggaaaaggctctagaggcattgcttatggagaaggagcaaaaggaagcagagctccaaaggaaagtcgaggagtcaaagcagaaggaagccttcctggaaagtgagcttgccaacatgtgggttctagtagcaaaactgaagaagtcccagggttatgaccatgaggatctggaggccaaacatgatggctcgtgacctcttcagtttagatatctatcggcttggcttgcgtgtgggttttctgtatgtaaggttttggtattcgttttttctcttagcatgaattagtgtctcattctgtatattctccgcgtgttaaatatgccagtagtgccttgcctgactgtgcctagagctttcgatggatgctagagcggcattttgggttcttcaggcacataatctggatttgaagaaacagtgagcaagtgtttggaaatctgacgggtttctgatgcccactcaaatatctaacatgtattagcctgcccatcctgctcaggataacaaatgtgaatatgccctgaagtgtgagctacattgtattagaacactttcgttttcaacatcttcaatactgcttattgtatgcc

SEQ ID NO: 133183 - DNA, 3448 bp, Zea Mays
ggccggatccaatggcgggtgcctcgtgctgctagatctcgctccgtacgggcaatggcgtcgcggccaacgtcgcggcagcggaaggcgggacacgcatcggcggcggcggggccgaagggtctgcaccaccaccagcagctgccgccgcagtcgggctcgccgacgtcgaccgcgaccacgtcctcgtcgcgtctcacgccggagctctcgctcgacgggcccgcgtccccgctgttcgccgggttggacgaggacccggcgcccaaggagaatgtaaccgtcactgtccgcttccgcccgctcagcccgcgggagattcggcagggggaggaggtcgcgtggtatgcggatggtgacacggtcgttcggagtgagcagaaccccagcgtcgcctatgcttacgatcgagtttttgcaccaactactacgacccgacatgtatatgatgttgcagctcaacatgttgttagtggtgccatggagggagtaaatggtacaatatttgcatatggtgttacaagcagtgggaagacacacacgatgcatggagaccaaagatccccagggattatacctttgtctgtcaaagatgcatttagcattatacaagagacaccaaatcgcgagtttctccttcgcgtatcatacttggaaatttataatgaggttgtcaatgatctactaaatcctgctggtcagaatttgcgaattagagaggatcctcagggaacatttgttgaaggtatcaaggaggaagtagtattatctcctgcacatgccctgtctctcattgcagctggcgaagagcataggcatgttgggtctaccaacttcaatctattgagtagcagaagtcataccattttcacattgactatagagagcagcccttgtggtgagtctaatgaaggggaagctgtcactttctcacagctgaacctcatcgatctggcaggttcagagagctcaagggcggaaacaactggagtacggcggaaagaaggatcttatatcaacaaaagcttgcttactcttggaacggtgatatcaaagctgactgatggaaaggctacacatattccatatcgagattcaaaattaacacgactacttcagtcatccctcagtggtcaaggacgtgtttcactgatttgcacattgacaccagcgtcaagtaattctgaagagacccataatacactaaaatttgcccaccgtgcgaagtgcattgagatccaagcatctcaaaacaaaattatagatgagaaatctctaataaagaagtatcaaactgagattcggagattaaaggaagagctagaacagctgaaaatgggtattattactggcacacccttgaaagataccgaggaagataatattatcctttggaagcaaaagctagaggatggtaacgtcaagctgcagtctcggctggaacaagaggaggaagctaaagctgctttgcttgcaaggatccagcgtttaacaaaacttatactggtttctactaaggcgaccccggcttctagattttctccacatcctggaccaagacgaagacattcttttggggaagaggagctggcataccttccgtatagaagacgagatataatgatagacaatgaaagcaatgaattacttcttcctgtcgaagggtttggtgtatcacttgaagattcttcaaaggaagaaaaaaagaataggaagggacttcttaactggttcaaacttcggaaacgtgatggagcttctattctgacaagttcagaaggtgataagtccagtttgactaaatcaaccgctccttcaacacctattggggaaagcgtcaactttcctgctgaaccaagaatatcaaattcattagctggtgagaatgtatcatctgatctgtttagcattggtcatggggaatttccttctggcagcattcacggcgaagaaactctttcggccagtggaaaaacgatggaccatgttgatttgttgagagaacagttgaaaattttgtcaggggaggttgcgtttaatacaagtgctcttaagcgcctcacagaggaagctggaagaagcccaaagaacgagaagattcagatggaaatgaagaagaagaccgatgaaattaaggggaagcagcaacagatagcatctttggagagagagatagctcatgcaacattaggaactcaaggaaaggtcgatacgttagagcattcaccgtcttatcatgaactacttgagcagctcaatgagaaatctttagaacttgaggtgaaggctgcagataatagagtgatacaagatcagctgaatgagaagataactgaatgcatggaattgcatgctgaagttactcatctcaaagaacagctgtcccaagctcttgaagctaaggatttggtgtcaaatagcatgatacataataatagagttaaccatgaagttgaacaccttgttgatcaagatgttccaagagagatctcttctgaaccacagcaaaaacagcagcactatggtcttcagtccgttgaaatcaatgagctgaagcaaaaggtgtctgaactcatggaaatcaaagctcaacttgaggatcgcaatcaaaagctactggaggaaagtacatatgcaaaaggattggcttcagctgctggtgtcgaattgaaggcattgtcagaagaagtgaccaaactgatgaaccaaaatgagaagcttgcgaccgagttgtcatcgctgagaagtccaactccagctccacgcagattcaacaatggaccaagaggtactaggagggaaagcatgagtaggcgagaaccagctagcagacgagacacgaatgcaagccatgaaagggaaaaggctctagaggcattgcttatggagaaggagcaaaaggaagcagagctccaaaggaaagtcgaggagtcaaagcagaaggaagccttcctggaaagtgagcttgccaacatgtgggttctagtagcaaaactgaagaagtcccagggttatgaccatgaggatctggaggccaaacatgatggctcgtgacctcttcagtttagatatctatcggcttggcttgcgtgtgggttttctgtatgtaaggttttggtattcgttttttctcttagcatgaattagtgtctcattctgtatattctccgcgtgttaaatatgccagtagtgccttgcctgactgtgcctagagctttcgatggatgctagagcggcattttgggttcttcaggcacataatctggatttgaagaaacagtgagcaagtgtttggaaatctgacgggtttctgatgcccactcaaatatctaacatgtattagcctgcccatcctgctcaggataacaaatgtgaatatgccctgaagtgtgagctacattgtattagaacactttcgttttcaacatcttcaatactgcttattgta

SEQ ID NO: 133184 - DNA, 2464 bp, Zea Mays
ggccggatccaatggcgggtgcctcgtgctgctagatctcgctccgtacgggcaatggcgtcgcggccaacgtcgcggcagcggaaggcgggacacgcatcggcggcggcggggccgaagggtctgcaccaccaccagcagctgccgccgcagtcgggctcgccgacgtcgaccgcgaccacgtcctcgtcgcgtctcacgccggagctctcgctcgacgggcccgcgtccccgctgttcgccgggttggacgaggacccggcgcccaaggagaatgtaaccgtcactgtccgcttccgcccgctcagcccgcgggagattcggcagggggaggaggtcgcgtggtatgcggatggtgacacggtcgttcggagtgagcagaaccccagcgtcgcctatgcttacgatcgagtttttgcaccaactactacgacccgacatgtatatgatgttgcagctcaacatgttgttagtggtgccatggagggagtaaatggtacaatatttgcatatggtgttacaagcagtgggaagacacacacgatgcatggagaccaaagatccccagggattatacctttgtctgtcaaagatgcatttagcattatacaagagacaccaaatcgcgagtttctccttcgcgtatcatacttggaaatttataatgaggttgtcaatgatctactaaatcctgctggtcagaatttgcgaattagagaggatcctcagggaacatttgttgaaggtatcaaggaggaagtagtattatctcctgcacatgccctgtctctcattgcagctggcgaagagcataggcatgttgggtctaccaacttcaatctattgagtagcagaagtcataccattttcacattgactatagagagcagcccttgtggtgagtctaatgaaggggaagctgtcactttctcacagctgaacctcatcgatctggcaggttcagagagctcaagggcggaaacaactggagtacggcggaaagaaggatcttatatcaacaaaagcttgcttactcttggaacggtgatatcaaagctgactgatggaaaggctacacatattccatatcgagattcaaaattaacacgactacttcagtcatccctcagtggtcaaggacgtgtttcactgatttgcacattgacaccagcgtcaagtaattctgaagagacccataatacactaaaatttgcccaccgtgcgaagtgcattgagatccaagcatctcaaaacaaaattatagatgagaaatctctaataaagaagtatcaaactgagattcggagattaaaggaagagctagaacagctgaaaatgggtattattactggcacacccttgaaagataccgaggaagataatattatcctttggaagcaaaagctagaggatggtaacgtcaagctgcagtctcggctggaacaagaggaggaagctaaagctgctttgcttgcaaggatccagcgtttaacaaaacttatactggtttctactaaggcgaccccggcttctagattttctccacatcctggaccaagacgaagacattcttttggggaagaggagctggcataccttccgtatagaagacgagatataatgatagacaatgaaagcaatgaattacttcttcctgtcgaagggtttggtgtatcacttgaagattcttcaaaggaagaaaaaaagaataggaagggacttcttaactggttcaaacttcggaaacgtgatggagcttctattctgacaagttcagaaggtgataagtccagtttgactaaatcaaccgctccttcaacacctattggggaaagcgtcaactttcctgctgaaccaagaatatcaaattcattagctggtgagaatgtatcatctgatctgtttagcattggtcatggggaatttccttctggcagcattcacggcgaagaaactctttcggccagtggaaaaacgatggaccatgttgatttgttgagagaacagttgaaaattttgtcaggggaggttgcgtttaatacaagtgctcttaagcgcctcacagaggaagctggaagaagcccaaagaacgagaagattcagatggaaatgaagaagaagaccgatgaaattaaggggaagcagcaacagatagcatctttggagagagagatagctcatgcaacattaggaactcaaggaaaggtcgatacgttagagcattcaccgtcttatcatgaactacttgagcagctcaatgagaaatctttagaacttgaggtattgatataaagtctgccttgctcaactactctttggactgaaatcgatgcattaggtcacaagcaggaaaaatgcatatcaatttagattcaatagttaacacctttttgagacattgatgacatgatgcagcagcaacaacaactaagacttttatcccaagcaagttggggtatgctag

SEQ ID NO: 133185 - DNA, 1295 bp, Zea Mays
tggtggcgagagggggggagcttttaagcgagcctagtcgtgtctcctctcctctcccctcccctcctccgtgctgctccgcccctcgatcggctggctctactttgcatggtccccggccgggcctcctcttgcgtgctctccgacctcagtcacggcgcccatcacggccccttaaaaccgcatactacacagaaacatataccaccaagcttgctagcttgtcgcctcacaagctacggcgagctactaggcgaagtagaattattcctggggccgcgcggcagctagctcctagctcgcagccggccatggcgaagccgcaggaggtccgcagcgtcgactccttctcgcagctaccgttcatccggccggcgccggcgccgagggacgccaccatccgtctgtttggccgcgagttccccagcgaccacaaccagcagcagcaggacgccgcgtccgactcccccgacgctgccaacaacggcagcacggtcacgtgcgagagcaacggcgcggccaagagcggcgccgcggccgagaggaagttcgagtgccactactgctgccgcaacttcccgacgtcgcaggcgctgggcgggcaccagaacgcgcacaagcgcgagcggcagcacgccaagcgcgcccacctccaggcctccctcgccatgcaccgctacgtgcccggacacatgtacggcctcttcaactactacccccacccccaccccatcggcggcggcgcccgctttgaccaccccgcgccgccgccgccgccgctgcagcactacccgatgtggacgactagcgccagccccgcggggccctacggcggcggcccgggctccatgtcgcagccaatcaacggtagcccggtgcccgcggggctctggagggtgccgccgccccccgcggctactgccatggagaatttcggcgtgtccgcccggcacggcgctagtggtggcacggccttcccggtcgggccgcctggtggggaggcagcagcgtgcaaggacgataaggcggcggtgatgatgagcttgctgtccccctccccctcgctctcgtcgtgctcgtccacgtcgccggagacgaagctagcaggtaggtatgaactggcccgccagaaggagactgttgttagcttggacctccatttgtaatcctttcttgtttatttatttacatagtaggtctccgatctctcccgtcgttgtggattagcagtcgcaagcgcgtgtcaattctcatagttttctaaataatcgtttctacgtacaaaacaaaaacaa

SEQ ID NO: 133186 - DNA, 1391 bp, Zea Mays
tggtggcgagagggggggagcttttaagcgagcctagtcgtgtctcctctcctctcccctcccctcctccgtgctgctccgcccctcgatcggctggctctactttgcatggtccccggccgggcctcctcttgcgtgctctccgacctcagtcacggcgcccatcacggccccttaaaaccgcatactacacagaaacatataccaccaagcttgctagcttgtcgcctcacaagctacggcgagctactaggcgaagtagaattattcctggggccgcgcggcagctagctcctagctcgcagccggccatggcgaagccgcaggaggtccgcagcgtcgactccttctcgcagctaccgttcatccggccggcgccggcgccgagggacgccaccatccgtctgtttggccgcgagttccccagcgaccacaaccagcagcagcaggacgccgcgtccgactcccccgacgctgccaacaacggcagcacggtcacgtgcgagagcaacggcgcggccaagagcggcgccgcggccgagaggaagttcgagtgccactactgctgccgcaacttcccgacgtcgcaggcgctgggcgggcaccagaacgcgcacaagcgcgagcggcagcacgccaagcgcgcccacctccaggcctccctcgccatgcaccgctacgtgcccggacacatgtacggcctcttcaactactacccccacccccaccccatcggcggcggcgcccgctttgaccaccccgcgccgccgccgccgccgctgcagcactacccgatgtggacgactagcgccagccccgcggggccctacggcggcggcccgggctccatgtcgcagccaatcaacggtagcccggtgcccgcggggctctggagggtgccgccgccccccgcggctactgccatggagaatttcggcgtgtccgcccggcacggcgctagtggtggcacggccttcccggtcgggccgcctggtggggaggcagcagcgtgcaaggacgataaggcggcggtgatgatgagcttgctgtccccctccccctcgctctcgtcgtgctcgtccacgtcgccggagacgaagctagcaggtaggtatgaactggcccgccagaaggagactgttgttagcttggacctccatttgtaatcctttcttgtttatttatttacatagtaggtctccgatctctcccgtcgttgtggattagcagtcgcaagcgcgtgtcaattctcatagttttctaaataatcgtttctacgtacccccttttttatgccgtacgtctgaaattcaagttcttcatatttctcgatatcttcttgtggcccaatttctgctaaagtgatagctgacgaacttcagaaaataaaa

SEQ ID NO: 133187 - DNA, 282 bp, Zea Mays
atgaggactagacacctgctgctggttgccactcccctcctcctgctcctggcagtatcctcagatttgacggccaaggtttcagctcggtgcccggacccggagtcggtaacactgtatccaggcaagccctgcaatcgccagcagtgcaagacggactgcgccagcaagtaccacggcggcgtcggcgtctgcctcaaccccaaaggatgttactgcgagtactgcctggatcgcccctccgcccacgcggcctcgccactccgtccgcgtcatgattga

SEQ ID NO: 133188 - DNA, 573 bp, Zea Mays
ctatatataaataacactcgtgagtgatgagtctgcgattcaccagcattccattccatcgacaacacaatccatcaacaacttccattacctctgcaacagacctgcatcgcaagatgaggactactagtcgcctgatgttcctatttgccatcgctgccctcctgctagcatcttcagatctgacgacaaaggtggcggccggatgcgcgcatcccgtttcggtaatcctttacccaggcaggcgatgtgatcgcggaacctgcgagaagagctgcgccaaggaattcaacggcggcaagggcacctgcatgagtcccaatggatgcgactgcgagtactgcgcgcgagtgccgcgcctgatttcctctccgcgaaaccgcgcgtagcagtagatcgatcaaatgcagtagaacctggttgggcccgattggctggcgtttgcgagttttcgtaccaaagcaacgagagagagagatgtagtaaaccatgcactgttgtagagaattgaaacaagtgacatgcttttaacatatttaaagatattaaatgttctaattccgaataaaacaa

SEQ ID NO: 133189 - DNA, 509 bp, Zea Mays
aagcaacgccgcgccgacgcaagactaccagagatgaagaccggcctcgtgacactacagctactcaccatcaccatgtttctcgtgctatcgtcgcatgcagatagcacggtggccaggactgggccagactacttccaggacacctgctcggcgaggatatcttcgggggcacggtgccagcctagcaagtgcgccgcggactgcaccaggcaattcaggggcggcgtgggcagctgtgaccgctcggggtgtatgtgcgtctacacctgccctgcggtctcgccactggcaatgaacgaatcaatcgcgtgaccctgactatctcgatgcacaagtagtgacggacgggctagtagccgacctgtgacggctttgcgtctgatgaattcatgaaatggatctgagtataacctgctcgttttttttggtctttgactctttgtcatgctgtagcaaggtgaaaataaaaagcaatatataataaaggattcatcaggtgttaggtc

SEQ ID NO: 133190 - DNA, 1273 bp, Zea Mays
gaccagaggaagggacggcggggaggtggcaaggcgcagagagcaggttcgcttggcggacgcaccgagggaggcgtgtgggagccatgcttcttccctcttcgtcttcgtcttccgcttccgcttccaaaggtttccatctctctctcccgccatatgactagtgttcctgttggctgttgctgtgtcggtccgccatgtacgcgtccctggattgctccggtaactcctttgggaaaaccgttaacgatcatctgaggtcaactttgagttttgataacaagcaacctccatttgcgagtcaaaactttgactacggtcaaacaatagcttgcatttcatacccgtacaatcgttctagatcaggagatgtttgggcagcctatgagtcacgcaccagcactgccactgtgcagttccgttcccaaattgctggtgggggttcatccacaagaattcccttgcctttggaattagcagagaatgaacccatatatgtgaatcccaaacaatatcacgggatacttcgcagaagacagttacgtgccaagctagaggctcagaacaagctagtcagagcccgaaagccttaccttcatgagtctaggcatcttcatgcaatgaagagggcacgaggttccggtggacgattcctcaacactaagcagctccagcagtctcacacagccctcaccaggtccaccaccacaagtggcacaagctcctcaggctcaactcatctgcggcttggtggtggcgcagccgcagctggagatcgatctgtgctggcacccaaaacaatggcctcacaagacagtagcaagaaggccgtttcttcagccctcgccttcactgcgactccaatgctgcgcagagatgacggcttcttgcagcacccaagccatcttttcagtttttctggtcattttgggcaggcaagcgcgcaagctggcgtccataatggaagtcagcatagggttccagttatgagatgaccggtttgcgaaccatagctggtgatccaggcgtctagggtcaacttcgctgtggtgtcttagtctctcaggcaattcatccttggcttaatttctggctttttattagaaggtaccaaaatgtgttccataccgttgtggccacagagcccataaaccagggggtttgatggttggcactcctacccaaactattgttgcagtggtgtttgttagaataaaccttgactattattctgtacaatttgcctttatcttgtactgccaattattgtgta

SEQ ID NO: 133191 - DNA, 1180 bp, Zea Mays
gaccagaggaagggacggcggggaggtggcaaggcgcagagagcaggttcgcttggcggacgcaccgagggaggcgtgtgggagccatgcttcttccctcttcgtcttcgtcttccgcttccgcttccaaaggtaactcctttgggaaaaccgttaacgatcatctgaggtcaactttgagttttgataacaagcaacctccatttgcgagtcaaaactttgactacggtcaaacaatagcttgcatttcatacccgtacaatcgttctagatcaggagatgtttgggcagcctatgagtcacgcaccagcactgccactgtgttccgttcccaaattgctggtgggggttcatccacaagaattcccttgcctttggaattagcagagaatgaacccatatatgtgaatcccaaacaatatcacgggatacttcgcagaagacagttacgtgccaagctagaggctcagaacaagctagtcagagcccgaaagccttaccttcatgagtctaggcatcttcatgcaatgaagagggcacgaggttccggtggacgattcctcaacactaagcagctccagcagtctcacacagccctcaccaggtccaccaccacaagtggcacaagctcctcaggctcaactcatctgcggcttggtggtggcgcagccgcagctggagatcgatctgtgctggcacccaaaacaatggcctcacaagacagtagcaagaaggccgtttcttcagccctcgccttcactgcgactccaatgctgcgcagagatgacggcttcttgcagcacccaagccatcttttcagtttttctggtcattttgggcaggcaagcgcgcaagctggcgtccataatggaagtcagcatagggttccagttatgagatgaccggtttgcgaaccatagctggtgatccaggcgtctagggtcaacttcgctgtggtgtcttagtctctcaggcaattcatccttggcttaatttctggctttttattagaaggtaccaaaatgtgttccataccgttgtggccacagagcccataaaccagggggtttgatggttggcactcctacccaaactattgttgcagtggtgtttgttagaataaaccttgactattattctgtacaatttgcctttatcttgtactgccaattattgtgta

SEQ ID NO: 133192 - DNA, 975 bp, Zea Mays
atgcctccgcacgacggcgcccgagccccgccgccccggcccagccggggccaccagccgtccttctccgccgcgctcctcgacgccatctaccactccctcgaggccgacgccgaggcgcgcacgtccacagaggcgcgccggacgcgcacgccggcgtcgtccccggcgcagcttccgagccgacgtcgcccgacgcccgagctgtcgccgtcgccgtccccgtcccgctcctcggtccggtcaccgcggctgcagagggcgccgcggccgtgccgcgtccggccggacccgcagcccaactccagcggctccctcctcctgcctccgccccttccgccgcacccacacgaacacgagccgtcgtcgaccgggcaccgccgcgtcgcggacgcggagaggaagaggggccgcgggaggaagagcaagaggacggcgccgttcgcgtgcctcctcaacgccctgctctgcaacaggaggccggcgaggccggtcgaccgcacgccgcgtgcaacggcaacgccaacgccaacgcccgccaccgcggcgccggagccggcgtcggcgaggtcgatcctctcgtcgcgcgcctcgcggagccggagggagtccgcggcggcgggaggggttctggccccggcgaggcgggcggtgcggttctcgcccgtggcgacggtagtgggcgacgggcacgggcacggcgctggatcggtcgggacggcgacgacggggctgcgggccaaggagtccgcggcggaggcggagaggagggtggaggagctgctgcgcgcgctcggcgtcgcggatgagcgggagagggctaaggagagcaccgagtccagctccgacctgttcgagctcgacagcctgcccgcattccaagacagaggcaccgacctgccgcgttccagaaccgtcgccgacggcgacgatggcgccgggctgctggcacggccgcggccccgcgtgcagtga

SEQ ID NO: 133193 - DNA, 1456 bp, Zea Mays
tcaacgaattgggcaaaactgttaaaacagaagattcgtacgtagattgttaccgcaaatgaaatgaagtccttcctagggcgcccccttctcatccttgaaacgtaaggaacgtgtacactaaatcctccaaaggtatcctttctagtaggatagattgtgcccagagaaccagtctcattgaaaggtgctactcgcgggttcattaacagttcatcatgtgcaggcctttttgctggtgaagaattttttacagttgagtcatgagtctcaatgtctgatagctcctctatgtatctttttgttggctttctagttcgcttgtcagtgcattgctcgcctagcagatttccttgtggttcatcattatggatcggcaccctcttggaagaatcttcctggtcctcgctctgatagtaagagctagatggagagtccccttcgtttcctggatatataaccacagaagtagctctaagcccagtcttagctctttcatccatgtctgacatatcatttttggcatccttgccaacaattttgtagtctttaactacacaacctgaacttggaacatcgtaggaattagtcaagcccattgtaatccgtcttttgagccatatcttgtctttgacattagtctgccggccaaacgtggctctaaacgcctcctgaagttctctaatagtaagatcatccaaacagacttctcctcttaatatggaaaaatcaggcatggaactattaactcccgaaacagatggatctgtagatgtgtcgcatacagatcttgagcaggcatcagccttatatttttcagcacagcaagagtcatttaacactgtcgattttgtagtctcagttgaagcattgtcctgtcgagtgacgtttgccccttgttctgtaagcaatttatctgaatgctgactatgaattctaaagtctgagggaggactaagggaatcatccaatgactacaaacaacatacctctaagttggcacccaatttttgtgtgtgtgcttccacagtctccaatttggaagatccatctgcacaatcaggcttcttcagtaacatgcagtcattgttgaaaaactcttccacatggtctgcatcttcaataggaggaagatcaaccttctcgttgtgaaggaaatgttcaaactgcaaaacatcatcctctgtagcaggaacaagtgttccatcaccttcaacctgaacatatttaaagcatttctcaaaagactcgagtaagcatctaagtttttatattaacatgtggccgacaaatcataaaattaactaagaacttacccgaactagctgataaaccacaggatcagaagtgcctttcttttcaaagtcattctcttcacttttattaaccatggtgccatgtgagtcatccatttccatagataagtcaaacttcatccaacatttgtgacaatcaa

SEQ ID NO: 133194 - DNA, 2226 bp, Zea Mays
cagattcacatggttgaagggggcccgaacgccgcgcttcggagtccgtcttcctctcggcctgcgcagaatcgcaggagacgggtaaaatcccgctgattcgctcggtcctcgcccgtcggctcgctcgaggcaccggctccgacactgcttggcgatttcccccgtgcgacccccggcgatctgagcgcgtgactccgctgcccgccgccgggctccttctccgcgccagcggtcgtcccccctcctcccgcggcagccgtcccctccccgagggtcgacggccgtgccctcctcgagggtctaggtaaacttttcgatctattgcgatcccagagctctgccgccgttgaaaccacgggctcgtggtaacttgttgtcgtcggagggatccccgatggccgcggaggcagatcagaaagtcgtggtgcacgtgcggtcaacgggcgatgcgccgatcctgaagcaatccaaattcaagatttcaggacgagataagtttctgaaggtcatagagtttcttcgtcgacaactgcatcaggatacactggtagcaacataattgttggttctgagaatttaatctgtgacattggaattttactgagttgttgtctgtgttgccaacagtttgtctatatcaacagtgcattttcgccaaacccagatgaactggtaatagacttgtataatgtaagattctaacttatatgtacttccaagctctttacctgaggaaaggatatccatacattttttttgaaaggttatctccgtatctatctgtaccactttgttacaacttgcagcatcaaaacttgagtttctttcagtaatttgtttccatttattttcttcacttctatacacaaaatctggggataaaaaaatcggggcctttgtctgatgaagcaaggtttcatccaaaaaaaaatcatagagcatctcccgcttgcaatctgttcactcatgatttaatgattctcataggttttcatctagaaaggtgagccctgacattgtttattctaccattcctgcctgttagattgatgtctattacatctacttagggggtgtttgggaacaaagtttttctgcagtattgaagcaatactgtagtattgagcaatactgtggtattatatactttgaggtgtttggcaactcatctgaaatctctgtatactaaaatgtagtattgtaaatactgcacttgttttgcagttttggaaactttggtctcagccaaagttttttttctgtaaagagagcgccagctgggtcccgctctggctgattggtctcaaccaaagttttttccaaacatcttgatgtattggatactgttgtattcgaaaactgaagcattataaactgtagtaatgtcatgactaaagtatactttagtatttgaaaaactgcattttgaaaaaactgtgttcccaaacagggccttaatatgatttcttggtttcttatactccctccctccatcccaaaacaattgcacatctttgcttcccaagaaggcaattcttttgtttaaaaaaatctgactagatatatagaaaatagtatcaatattttcattgctgagcaattttattatggaagtatattccatgatcaatctagtgatacctaatatacgctataaatattagtacttctttgtatatatttagtcattttaaaaaaagagacttaattccttaaaatgagttgtagactatagagcaagtttcatatggaaataatggccaccctttttttaaagggtatggccacctaaagtgctggcctggattacatttgctacgtccggattcattcagtttgtatggcatacagtcaaagaaggcggctaaccatcttcttacattacactgcagaactttggaattgatgggaagctagtggtaaattatgctttatcggcagcatggggctaagtctgtcttgcagcaaaatgggaaaaaagtactaccattccgcatgacgattgtaaatcacatctagttttagtactaaatcagacactgcaaatatcctatagagcttatgcatagttcaacactcaacctactttgtggttaatattatttttttagtttgatgtgattggacattcctatttgctccaacagtgcacatgaatcaaccagtgctggagaaaacgtcgtcttttgagccaaagcaatttataaagcacaagccgaaacg

SEQ ID NO: 133195 - DNA, 673 bp, Zea Mays
cagattcacatggttgaagggggcccgaacgccgcgcttcggagtccgtcttcctctcggcctgcgcagaatcgcaggagacgggtaaaatcccgctgattcgctcggtcctcgcccgtcggctcgctcgaggcaccggctccgacactgcttggcgatttcccccgtgcgacccccggcgatctgagcgcgtgactccgctgcccgccgccgggctccttctccgcgccagcggtcgtcccccctcctcccgcggcagccgtcccctccccgagggtcgacggccgtgccctcctcgagggtctaggtaaacttttcgatctattgcgatcccagagctctgccgccgttgaaaccacgggctcgtggtaacttgttgtcgtcggagggatccccgatggccgcggaggcagatcagaaagtcgtggtgcacgtgcggtcaacgggcgatgcgccgatcctgaagcaatccaaattcaagatttcaggacgagataagtttctgaaggtcatagagtttcttcgtcgacaactgcatcaggatacactgtttgtctatatcaacagtgcattttcgccaaacccagatgaactggtaatagacttgtataataactttggaattgatgggaagctagtggtaaattatgctttatcggcagcatggggctaa

SEQ ID NO: 133196 - DNA, 997 bp, Zea Mays
cagattcacatggttgaagggggcccgaacgccgcgcttcggagtccgtcttcctctcggcctgcgcagaatcgcaggagacgggtaaaatcccgctgattcgctcggtcctcgcccgtcggctcgctcgaggcaccggctccgacactgcttggcgatttcccccgtgcgacccccggcgatctgagcgcgtgactccgctgcccgccgccgggctccttctccgcgccagcggtcgtcccccctcctcccgcggcagccgtcccctccccgagggtcgacggccgtgccctcctcgagggtctaggtaaacttttcgatctattgcgatcccagagctctgccgccgttgaaaccacgggctcgtggtaacttgttgtcgtcggagggatccccgatggccgcggaggcagatcagaaagtcgtggtgcacgtgcggtcaacgggcgatgcgccgatcctgaagcaatccaaattcaagatttcaggacgagataagtttctgaaggtcatagagtttcttcgtcgacaactgcatcaggatacactgtttgtctatatcaacagtgcattttcgccaaacccagatgaactggtaatagacttgtataatgtaagattctaacttatatgtacttccaagctctttacctgaggaaaggatatccatacattttttttgaaaggttatctccgtatctatctgtaccactttgttacaacttgcagcatcaaaacttgagtttctttcagtaatttgtttccatttattttcttcacttctatacacaaaatctggggataaaaaaatcggggcctttgtctgatgaagcaaggtttcatccaaaaaaaaatcatagagcatctcccgcttgcaatctgttcactcatgatttaatgattctcataggttttcatctagaaaggtgagccctgacattgtttattctaccattcctgcctgttagattgatgtctattacatctacttaggggg

SEQ ID NO: 133197 - DNA, 1223 bp, Zea Mays
ctcactcctgtcctctcctctcgaccagctgacctcgctgacggagcacacagccacgccgcagcgccgcgtgggtgtctgtctatagccttgtaggtcgttcgcaggtaggtaaccgtaacctagctagctcgtcgggatgatgatgatgagcggtcgagcggccaccgcggggcggtacccgttcacggcgtcgcagtggcaggagctggagcaccaggcgctcatctacaagtgcctggcgtccggcaagcccatcccgtcctacctcatgccaccgctccgccgcatcctcgactccgccctcgccacgtcgccgtcgctcgccgccttcccgccgcaaccctcgctggggtgggggggctgcttcgggatgggcttcagcaggaagcccgccgacgaggacccggagcccgggcggtgccggcgcacggacggcaagaaggcgctgctccaaggaggcgtacccggactccaagtactgcgagaagcacatgcaccggggcaagaaccgttcaagaaagcctgtggaaatgtccttggccacgccggcgccggcctcctccgccacaagcgccgccgccgccgccacctcctcgtcccaggcgccgtcctaccacagcccggcccccgccgtgccgtaccacgcgccctacggcgccgcgtaccatcacacgcagacgcaggtgacgatgagccccttccacctcctccacctcgagaccacccacccgcacccgccgccgccgccgccgccgccctactactacgcggaccagagggactacgcctacggcaaggaggtcggcgagcgcgccttcttctccgacggcgcgggcgagagggaccggcagcagcaggccgcggggcagtggcagttcaagcagctcgggacgatggaggcgacgaagcagccgtgcaccacgccgctgctcgtccccgccgccgggtacggccacggcgcggcgtcgccgtacggcgtcggtcaggccaaggaagacgaggaggaggaggaaacgcggcggcagcagcagcactgcttcgttcttggcgccgacctgcggctggcggagcggccgtcgggggcacatgacgccgccgcgcagaagccgctccggcatttcatcgacgagtggccgcacgagaaggggagcaataaggcggggtcgtggatgggggggctcgacggcgagacgacgcagctctccatgtctatcccgatg

SEQ ID NO: 133198 - DNA, 455 bp, Zea Mays
attatgtacctaagcttctaagcatgcatgtggaaccagccaaaggtttcttggcagtgcttagagaccaccttgacacactatgctcgaacttgagatctcgtacagataccaatgtacaatctaaacagtgacaaggttcccttacttttaaaacagagttttttgttggctgtttcccaagccgggctaggcctttttgacagctttttgtgaacacgcagttgttctcagtacatacagacctagttctatctttttatttatcaggaggactaagtgtctgacagacctgaatgtctgtctgtctcctcttgccattttgccaagcccttagatggtgagctaaaccgcacatatcggcttagaaacattggagctgccttcgtcactttggcagcgccgtgcttgtgctaagagctgggacgagaagcaatatatactgtcagaaaata

SEQ ID NO: 133199 - DNA, 2147 bp, Zea Mays
tgcacataaatccattcctttagttacagttcgagtttcccagcaaaaaaaaagagagagacgtgcataacggagaaaaatagctactagtgcctagtggagtcccaacgagaaggcagcagcatatttacagcgagtcacatcacagggcgccggccagacacctattgtaaactgtaacacaaaatgatcgtcgatctattggactattccgtgctccgcgagatcacctcgccaaacttcatgaagagctcggcgtcggacgcgctcgacgagttggtgcaggagagggcgctgccgccgccgccgcctcgtaggccgacgtactcgctgacatagctcggcgccgtggtggacggcttctccgacgcctgtgcctgtgcctgcgcctgcgcctgcttcgggggcgggcctgctgggcagacgaggctgtccaggacgcgcgcgacctcgtgcatggtcggtcgatccgacggctgcctcttgctgcaaaggagcgccagctggaacaccttcttgacctcgccgaggtccttgcacgtgtcggtgatgtcctggtctaccgtctccatgaccgtgttctctgcggctttggataggatctggaggttgcactcgtcgtcgacaggctttttgccggtaagcagctccagcaagacaatgccgtagctgtacacatccgatttctcgttgatccgggatgtccgtgcatactcagggtcaatgtagccaatggtgcccatcacgtacgttgatgtgtgcgtcttcgacacacacaagctcttggcaataccgaagtcagcaagatgagcctcgtagtctttgtctaggaggatattctttgacttcacatccctgtggattattcgtggactgcattcatggtgaagataagccaggccttgagcagctccgagagcaatcttgaggcgagcctcccaatcgagtttctttttcttcgatgaagcatgtaaaatgtcccagaggctgccattttccatgtaatcatagaagaggagattcccagatggtgacagggagtacccctgaaggcttacaagattccggtgtttgatgcttccaacagtctcaagttcagtctcgaattccttcaagctctgagggtagtgagcatacagctttttaatcgcaattggcttgcagttcttcaggtcgcatctgtagactgtacttgaggctccataaccaataatgtatttttcgctcaagttttcagtcatcctcattatatcatcatatacatagagggccatgttcatgtggaggatcacaagcttgggatgaatgttgtttgctggtttgtttacagagacatctttgagcactggagagttatgtggccagcaaataactactaggataacgagcataataacaagcaatacggcaccaacaccaatagctgcaaacattgaggcctttgcgctagaggctgcaaatcaaaagaggggatggtttattagtgatgtatttatgctcagagcaacttaatgaaggtaacaatgagcatacatctcttcatttgctctgcattggataattgtgtgcatgaagcagagtgaagccaatagccacaaagtccagggttacccaagaagctgaaaagttaagatataaatatggattggtaaacaaggacattatgaaggaatcatttaatcccagaggacaaagaccaccacctgtcgggtgaaaatcgtgagaagttgttgtctgtaggtacagtaccataaagatggttgtatgatacatttctgcagaagcgctcaagaataaaggcaccataagtgaaagccagacacagacggtttaaataatttttttcagctgttaacttacaagatattgagactcaagcagtaaataagtgaagagacatctccagtaatattattgctttctaattttctgaaaggacaaaaaagataaaggtcagcctgcaataattgggcataaaatacaccattaatatgcagtctgttgcttgaagtctttttactgcaccttatcaatttatcagttttgaaatgatataagaggaaacatgtacttacaacagtatcaaattttgtagcatcccaacctcttgaggaatcaggccactgaggtggttgtaagacaaatca

SEQ ID NO: 133200 - DNA, 1318 bp, Zea Mays
ccattttcccgtcggaaacaaccctggccttaggaggccaggcgattctccgccgcctcgtctcgtcttcgctatgcaccacgtccacgagcgcctccgccgctccaacgctccaacgcttgagcgcctccaacgccactccaacgccacgagcgcctccgccgctccaccgaacaactccaacgccactccagctcttgcagcagtagaactctattgcagccaggtacatttgattctggtttctgccgcacaagatccgctacctcttggacccggacatctacaccgacggcaggatctccgtgcagggcatcgacgccgtgctcttcgcgccggacgacgccaaggccacgcagaccgtcgacccgaacaggaagcctcctaccatcgtcacccacaagaagaagatcaagctccggcgaggtcagtacctacctaccttcagatctggacctgctcctttgtgtcctccgtcgacctgaacaggaagtatcccaccaccgcattgtccttttttcaataatagcaccgaaatttacagttcgtaatatctagattggggaggtcattacatcaaaaaaagattggggaggtgtgtagattaatttcacaactgatcgctagcatcaatcaatgccagttcatctattgctcaacctcagtattggccaacgtgaaaacatggaggtgaagtgaagcaagtggtagttgagcatatgctggtggttggttgtcttcatgaacatctctttgatggctgataccattcctgggactgcaagccaacactgtcctttaacccatgacccatgagcaacaatttcttcttaacaacagagcatgatgttagagaaatttggcttcaagcgcaaaattaggttgcttcgtgggagtgatgcatggcctgaacaaatgatatgagcaaatttgacaactgcagttctgttatggtgaatggtgattgtagttcagtttcagctctaacctatgaaaaattgaatggcagttgcactaatctgttggtggaatgattttcccagtaatttcctggacaagcagatcactgagaaccatctaccttatgagaaatgatgccttgtatggttcagtatagttcttgtattgctggtttaaattaattcttgtatggcagttgcactaaactgaatggcagttgcactttgagatattcttctattgttggtttaaaaccatggtgactttcttgtatgcattctgtatgcattcttgtttaaaacctggttgcttatgtatgcattcttgtatgccgtgtatgcatggtgactgttcttgt

SEQ ID NO: 133201 - DNA, 1107 bp, Zea Mays
ccattttcccgtcggaaacaaccctggccttaggaggccaggcgattctccgccgcctcgtctcgtcttcgctatgcaccacgtccacgagcgcctccgccgctccaacgctccaacgcttgagcgcctccaacgccactccaacgccacgagcgcctccgccgctccaccgaacaactccaacgccactccagctcttgcagcagtagaactctattgcagccagctacgacaccctgcgcctgccgcactaggtacatttgattctggtttctgccgcacaagatccgctacctcttggacccggacatctacaccgacggcaggatctccgtgcagggcatcgacgccgtgctcttcgcgccggacgacgccaaggccacgcagaccgtcgacccgaacaggaagcctcctaccatcgtcacccacaagaagaagatcaagctccggcgagtattggccaacgtgaaaacatggaggtgaagtgaagcaagtggtagttgagcatatgctggtggttggttgtcttcatgaacatctctttgatggctgataccattcctgggactgcaagccaacactgtcctttaacccatgacccatgagcaacaatttcttcttaacaacagagcatgatgttagagaaatttggcttcaagcgcaaaattaggttgcttcgtgggagtgatgcatggcctgaacaaatgatatgagcaaatttgacaactgcagttctgttatggtgaatggtgattgtagttcagtttcagctctaacctatgaaaaattgaatggcagttgcactaatctgttggtggaatgattttcccagtaatttcctggacaagcagatcactgagaaccatctaccttatgagaaatgatgccttgtatggttcagtatagttcttgtattgctggtttaaattaattcttgtatggcagttgcactaaactgaatggcagttgcactttgagatattcttctattgttggtttaaaaccatggtgactttcttgtatgcattctgtatgcattcttgtttaaaacctggttgcttatgtatgcattcttgtatgccgtgtatgcatggtgactgttcttgt

SEQ ID NO: 133202 - DNA, 835 bp, Zea Mays
ggcgattctccgccgcctcgtctcgtcttcgctatgcaccacgtccacgagcgcctccgccgctccaacgctccaacgcttgagcgcctccaacgccactccaacgccacgagcgcctccgccgctccaccgaacaactccaacgccactccagctcttgcagcagtagaactctattgcagccaggtacgcgtgtttctgagccgggggcgcgggggttaagccgggggcgcgggggttagcaaagatttcatcgattggtttctgccgacctgcatcttcgtttgattctggtttgcctctctgatccagctacgacaccctgcgcctgccgcactaggtacatttgattctggtttctgccgcacaagatccgctacctcttggacccggacatctacaccgacggcaggatctccgtgcagggcatcgacgccgtgctcttcgcgccggacgacgccaaggccacgcagaccgtcgacccgaacaggaagcctcctaccatcgtcacccacaagaagaagatcaagctccggcgaggtcagtacctacctaccttcagatctggacctgctcctttgtgtcctccgtcgacctgaacaggaagtatcccaccaccgcattgtccttttttcaataatagcaccgaaatttacagttcgtaatatctagattggggaggtcattacatcaaaaaaagattggggaggtgtgtagattaatttcacaactgatcgctagcatcaatcaatgccagttcatctattgctcaacctcagtattggccaacgtgaaaacatggaggtgaagtgaagcaagtggtagttgagcatat

SEQ ID NO: 133203 - DNA, 2881 bp, Zea Mays
cacattgcgcgggtccacacttgttttatatgattctccaaaaccaacccccacggccgcattgaccaatctgctccgggcaccatggagaggatcagtggcccgcgcctcgctgtcctgctcgctctcgccgtcttcaccgccgtcgccgcagcggccacggacgaggtgcgcgcgcagtccacctacatcatccacctcgccccaggccacccggcgctgtccgcagcgcgcgtcaacggcggcgacgaggcggccctccgccgcctcctcccgcgccgcctgcgcgcgccgaggccgcgcgtgctctactcctaccagcacgctgccacgggcatcgccgcgcggctcacgccccagcaggcggcgcacgccgcggccggggagggcgtcctggccgtgtaccccgaccaggcgcggcagctgcacaccacccacaccccggcgttcctccgcctaacggaggccgccgggctcctcccggctgcgacggggggcgcgtcgtcgtctgccgtcgtcggcgtgctcgacaccgggctctaccccatcggccggtcctcgttcgcggcagcagatgggctcggcccggcgcccgcgtccttctctggtggatgcgtctctgctggctccttcaacgcgtccgcctactgcaacagcaagctcatcggtgccaagttcttctaccaggggtacgaagctgctctcggccaccccatcgatgagaccaaggagtcgaagtcgccgctggacactgagggccatggcacgcacaccgcctccacggcggctggctcgccggtggccggagccgggttcttcgactacgccgaggggcaggccgtgggcatggaccccggcgcgcgcatcgcggcgtacaagatctgctggacatccggatgctacgactccgatatcctcgccgccatggacgaggccgtcgctgacggcgtcgacgtcatctcgctctccgtcggcgccaacgggtacgcccccagcttcttcaccgattccatcgccatcggcgctttccacgcggtaagcaagggcatcgtggtctcctgctccgccggcaactccggccccggcgagtacaccgccgtcaacattgcgccgtggatcctgaccgtcggcgcgtccaccatcgaccgcgagttccccgccgatgtagttctcggcgacggccgcgtctttggtggcgtctctctgtatgccggtgaccccctggactcgactcagttgcctctggtgttcgccggggactgtggttcccctctgtgcctaatgggcgagctcgactcgaagaaggtggccggcaagatggtgctctgtctgcgtggtaacaacgctcgtgtcgagaaaggagcagcggtcaagctcgccggtggggtcggaatgatcctcgccaacaccgaggagagcggcgaggagctcatcgccgactcccacctcgtgccggcgactatggtcgggcagaagttcggcgacaagatcaggtactacgtccagacggacccgtcgccaacggcgaccatcgtgttccgcggcacagtcatcggcaagtcgcggtccgcgcctcgagtggcggcgttctcgagccgaggccccaactaccgcgcaccggagatcctcaagcccgacgtcatcgccccgggcgtcaacatactcgcggcgtggaccggcgccgcctcccccaccgacctggacatcgactcgaggcgcgtggaattcaacatcatctccggcacgtccatgtcctgcccgcacgtgagcggcctcgccgcgctgctccgccaggcgcacccggagtggagccccgcggcgatcaagtcggcgctcatgaccacggcgtacaacctggacaactccggggaaaccatcaaggacctcgcgacgggcgtggagtcgacgccgttcgtccgtggcgccggtcacgtcgaccccaacgccgccctcgacccagggctggtgtacgacgccggctccgacgactatgtcgccttcctctgcacgctcgggtactctccgtcgttgatctccatcttcacgcaggacgcatcggtcgccgactgctcgacgaaattcgctcgccccggcgaccttaactaccctgccttcgccgccgtcttctcctcctaccaagactcggtcacctaccgccgggtggtgcgcaacgtcggcagcaactccagcgcggtgtaccagccgacgatcgccagcccgtacggcgtggatgtcacggtgaccccgagcaagctcgcgttcgacgggaagcagcagagcctgggatacgaaatcaccatcgcagtgtcaggcaacccggtgatcgtggattccagctactcgttcggatccatcacctggagcgacggcgcgcacgacgtcacgagccccattgccgtgacctggccgtccaacggtggagcagcagccatgtagtagactgatgctgttgctactgtctaccgctgtgggaagaaggacagggccatgagcccatgagatccgaaatctccacgcctcctgcctgccataggaataatttcctcgactgaaccacgcaataattcagctgcccctatcgtggttgtggtggaccaatggaccatgcttgcagctctctcttttcatttaggggtaggttggttggagcagcgtatgtgattggctgcttgcaaggccgtgagggtgccatccattatggctcattggcgattggacgtgtatgaacaagtttgtaatgactagaaataatcattgtaccatgttttttctatgctggcgcgtttatagcaccatgctttgtgtatgtcacttgtgtacgcatactaaagagaaaagcatggatatggaacacctgagggcttgttcggttattcccaat

SEQ ID NO: 133204 - DNA, 2746 bp, Zea Mays
tccatccggactttgttgatttcttctgttggtaatgaaacctaatctgctccgactctaagaggagtgagttccgagcaatcacaccgaaatcttccttcatcccctccattgatcccctcacaagtgctttaccttcccgagtggtggcgtcttaatctgatgcacccacgcattgtggtgttcagctcaaaatgaaaggagtgcttccgattaagggggcatcaggccgtgaaaagaaagcgcctaaggagctcgagagcgtcttgaaccgatatttcgggtattcgggatttcgaggaaaacaactcgaagctatagaagctgttctatcagggagagattgcttttgtttgatgccaactggtggtggaaagtccatgtgctatcagattccagctctggtgaaaacaggcattgttcttgtcatttcacccttgatagaatttacaggagaaccaggttgccagcttgaaaaataaaggggttccagctgaatttctctcttcaacacaggcatctcacactaaacaaaggatacatgaagaccttgatactggtaatccttctttaaagttgctatatgtgactcctgaacttgttgcaacatcaagctttatggcaaagctaaagaagctatacaacagaggtcttcttggtcttgttgcaattgatgaggctcactgtatttcaagttggggccacgatttcagacctagctaccgaaaactttcatcattgaggaagcagttcccagatatccctttgttagctttaactgcaactgctgtaccgaaggtccagaaagatgtggtatcatcattgtgcttgcaaaatccagtaattcttagagcttcatttaatcgacccaatatattctatgaagttcgttacaaggatcttcttgatgatgtttactctgatatatcaaatttgctgaaatcaagcgggaatgtttgctcaattatatattgccttgaacgggcagcttgtgatgatctaagcatgcatttgtcacagcagggtgtctcttgtgctgcttatcatgctggcctaaatagtaaagtgcgaagttctgttctcgatgactggctttcatcgagaactcaagttgttgttgcaactgtagcatttgggtagggtattgatagacaagatgtccgtattgtttgccacttcaacttgcctaagtcaatggaatccttctaccaggagtcaggtcgagctggtcgtgatcaacgaccttcaaggagtgttttgtattacggattagatgaccggaggagaatggaattcattttgagaaaccccaaaactaagaaatcacagccgtcttcctcttcaaatgagctttctgagaaggctctagctgacttcagtcagattattgactactgtgaaatttctagctgccggcggaaaaagatcattgagagctttggagagaaagtacaaccaactttatgccaacgctcatgcgatgcttgcaaacacccaaatttagtgttgtctcgtctggaggaactccgtcgtgtgcccaactgtcgctttaataagatctctccagtgtttcaaagctcagttaaagaagcacacttggacacagaattctggaatcgtgaagatgaggcgagcttatcagctgaagacatatctgattctgatgatgggaatgaggtagtgagtaatatagccatttcaaaggttccggcaaaagctggtctggatgcaaaatttaaagcactggagcgtgctgaaaatgcttattaccaaggcaaaggtcaggcgaagcagcagggtggcggccttgctgacaagaaaagcatctctgagacgctaagagatgcatgccgaaaaagattgttggatgctcttggacaagcaaagttgcgactcgggaatattccgtgcggagacgaggcttctgctacacaccttgaaacagagtgcttcaaaaaatatgtgaaggcgggcaagacgttctacaactcacagatagccgccacagttcggtggctgtcatctgcaacactcagtcagatgcgtgaccgcctcgacactctttatcgaccgaaccaaagatgatggtgcgtcaggctgccccgacattgtcccagagtcacctccagcatctcctgaaatcgtcgtcggcgcaaggtcaggagaaaccagtaacgacaaaccgcagcatatttgtgagttgaagagttcagatgagtctgcaaagggtgctgcatcatcgactgggaacatggtgctccccgccataccgacgttcagagaattcttgagccaaaaaggaagggatcgggcgaagtgctattcaaattctaatgcgacgaaccagccatctggtattcgtaggaagtttagtggtcaccttgataaggaagaagccagcaagaggatgaaatcatgaatatctgtcgggcaacttgattttttttctgccttttcgttgtcactaatcaaacattgcaaatctacgttgtagtgaaacgttcctgaatcagaatctccatgatgattttcttattatatctagtttgtacagtgaaaaggggtgttctacgcttctcgtgcaacatgaaggatctgcctcccaatccctatccaccctctataggttagtcatctcatgtggacacagccagaagggaagcggtaaacttaagcaagtatatacacatgtcggacctataacaccctatttgatcagctcttacaacggtcaactacacctgac

SEQ ID NO: 133205 - DNA, 3016 bp, Zea Mays
ctccagggtccaggctctctcccgctcacggcagcgccgtccttcgacacccccctccccgctctagttctggcctgctgaggactggaggtccatccatccggactttgttgatttcttctgttggtaatgaaacctaatctgctccgactctaagaggagtgagttccgagcaatcacaccgaaatcttccttcatcccctccattgatcccctcacaagtgctttaccttcccgagtggtggcgtcttaatctgatgcacccacgtatggttccgtctgatttcctcttagtcatttccccccctcctttcataacttattgatcagcgcgcgcaagatcgacctcggtcgatgccgtagggattgagacacaatgtgtgggttaggaagcttgttttccaagagatagggattcaactgaatctccacgccgcgctgcagcattgtggtgttcagctcaaaatgaaaggagtgcttccgattaagggggcatcaggccgtgaaaagaaagcgcctaaggagctcgagagcgtcttgaaccgatatttcgggtattcgggatttcgaggaaaacaactcgaagctatagaagctgttctatcagggagagattgcttttgtttgatgccaactggtggtggaaagtccatgtgctatcagattccagctctggtgaaaacaggcattgttcttgtcatttcacccttgatagaatttacaggagaaccaggttgccagcttgaaaaataaaggggttccagctgaatttctctcttcaacacaggcatctcacactaaacaaaggatacatgaagaccttgatactggtaatccttctttaaagttgctatatgtgactcctgaacttgttgcaacatcaagctttatggcaaagctaaagaagctatacaacagaggtcttcttggtcttgttgcaattgatgaggctcactgtatttcaagttggggccacgatttcagacctagctaccgaaaactttcatcattgaggaagcagttcccagatatccctttgttagctttaactgcaactgctgtaccgaaggtccagaaagatgtggtatcatcattgtgcttgcaaaatccagtaattcttagagcttcatttaatcgacccaatatattctatgaagttcgttacaaggatcttcttgatgatgtttactctgatatatcaaatttgctgaaatcaagcgggaatgtttgctcaattatatattgccttgaacgggcagcttgtgatgatctaagcatgcatttgtcacagcagggtgtctcttgtgctgcttatcatgctggcctaaatagtaaagtgcgaagttctgttctcgatgactggctttcatcgagaactcaagttgttgttgcaactgtagcatttgggtaggtattgatagacaagatgtccgtattgtttgccacttcaacttgcctaagtcaatggaatccttctaccaggagtcaggtcgagctggtcgtgatcaacgaccttcaaggagtgttttgtattacggattagatgaccggaggagaatggaattcattttgagaaaccccaaaactaagaaatcacagccgtcttcctcttcaaatgagctttctgagaaggctctagctgacttcagtcagattattgactactgtgaaatttctagctgccggcggaaaaagatcattgagagctttggagagaaagtacaaccaactttatgccaacgctcatgcgatgcttgcaaacacccaaatttagtgttgtctcgtctggaggaactccgtcgtgtgcccaactgtcgctttaataagatctctccagtgtttcaaagctcagttaaagaagcacacttggacacagaattctggaatcgtgaagatgaggcgagcttatcagctgaagacatatctgattctgatgatgggaatgaggtagtgagtaatatagccatttcaaaggttccggcaaaagctggtctggatgcaaaatttaaagcactggagcgtgctgaaaatgcttattaccaaggcaaaggtcaggcgaagcagcagggtggcggccttgctgacaagaaaagcatctctgagacgctaagagatgcatgccgaaaaagattgttggatgctcttggacaagcaaagttgcgactcgggaatattccgtgcggagacgaggcttctgctacacaccttgaaacagagtgcttcaaaaaatatgtgaaggcgggcaagacgttctacaactcacagatagccgccacagttcggtggctgtcatctgcaacactcagtcagatgcgtgaccgcctcgacactctttatcgaccgaaccaaagatgatggtgcgtcaggctgccccgacattgtcccagagtcacctccagcatctcctgaaatcgtcgtcggcgcaaggtcaggagaaaccagtaacgacaaaccgcagcatatttgtgagttgaagagttcagatgagtctgcaaagggtgctgcatcatcgactgggaacatggtgctccccgccataccgacgttcagagaattcttgagccaaaaaggaagggatcgggcgaagtgctattcaaattctaatgcgacgaaccagccatctggtattcgtaggaagtttagtggtcaccttgataaggaagaagccagcaagaggatgaaatcatgaatatctgtcgggcaacttgattttttttctgccttttcgttgtcactaatcaaacattgcaaatctacgttgtagtgaaacgttcctgaatcagaatctccatgatgattttcttattatatctagtttgtacagtgaaaaggggtgttctacgcttctcgtgcaacatgaaggatctgcctcccaatccctatccaccctctataggttagtcatctcatgtggacacagccagaagggaagcggtaaacttaagcaagtatatacacatgtcggacctataacaccctatttgatcagctcttacaacggtcaactacacctgac

SEQ ID NO: 133206 - DNA, 2419 bp, Zea Mays
tccatccggactttgttgatttcttctgttggtaatgaaacctaatctgctccgactctaagaggagtgagttccgagcaatcacaccgaaatcttccttcatcccctccattgatcccctcacaagtgctttaccttcccgagtggtggcgtcttaatctgatgcacccacgcattgtggtgttcagctcaaaatgaaaggagtgcttccgattaagggggcatcaggccgtgaaaagaaagcgcctaaggagctcgagagcgtcttgaaccgatatttcgggtattcgggatttcgaggaaaacaactcgaagctatagaagctgttctatcagggagagattgcttttgtttgatgccaactggtggtggaaagtccatgtgctatcagattccagctctggtgaaaacaggcattgttcttgtcatttcacccttgatagaatttacaggagaaccaggttgccagcttgaaaaataaaggggttccagctgaatttctctcttcaacacaggcatctcacactaaacaaaggatacatgaagaccttgatactggtaatccttctttaaagttgctatatgtgactcctgaacttgttgcaacatcaagctttatggcaaagctaaagaagctatacaacagaggtcttcttggtcttgttgcaattgatgaggctcactgtatttcaagttggggccacgatttcagacctagctaccgaaaactttcatcattgaggaagcagttcccagatatccctttgttagctttaactgcaactgctgtaccgaaggtccagaaagatgtggtatcatcattgtgcttgcaaaatccagtaattcttagagcttcatttaatcgacccaatatattctatgaagttcgttacaaggatcttcttgatgatgtttactctgatatatcaaatttgctgaaatcaagcgggaatgtttgctcaattatatattgccttgaacgggcagcttgtgatgatctaagcatgcatttgtcacagcagggtgtctcttgtgctgcttatcatgctggcctaaatagtaaagtgcgaagttctgttctcgatgactggctttcatcgagaactcaagttgttgttgcaactgtagcatttgggtagggtattgatagacaagatgtccgtattgtttgccacttcaacttgcctaagtcaatggaatccttctaccaggagtcaggtcgagctggtcgtgatcaacgaccttcaaggagtgttttgtattacggattagatgaccggaggagaatggaattcattttgagaaaccccaaaactaagaaatcacagccgtcttcctcttcaaatgagctttctgagaaggctctagctgacttcagtcagattattgactactgtgaaatttctagctgccggcggaaaaagatcattgagagctttggagagaaagtacaaccaactttatgccaacgctcatgcgatgcttgcaaacacccaaatttagtgttgtctcgtctggaggaactccgtcgtgtgcccaactgtcgctttaataagatctctccagtgtttcaaagctcagttaaagaagcacacttggacacagaattctggaatcgtgaagatgaggcgagcttatcagctgaagacatatctgattctgatgatgggaatgaggtagtgagtaatatagccatttcaaaggttccggcaaaagctggtctggatgcaaaatttaaagcactggagcgtgctgaaaatgcttattaccaaggcaaaggtcaggcgaagcagcagggtggcggccttgctgacaagaaaagcatctctgagacgctaagagatgcatgccgaaaaagattgttggatgctcttggacaagcaaagttgcgactcgggaatattccgtgcggagacgaggcttctgctacacaccttgaaacagagtgcttcaaaaaatatgtgaaggcgggcaagacgttctacaactcacagatagccgccacagttcggtggctgtcatctgcaacactcagtcagatgcgtgaccgcctcgacactctttatcgaccgaaccaaagatgatggtgcgtcaggctgccccgacattgtcccagagtcacctccagcatctcctgaaatcgtcgtcggcgcaaggtcaggagaaaccagtaacgacaaaccgcagcatatttgtgagttgaagagttcagatgagtctgcaaagggtgctgcatcatcgactgggaacatggtgctccccgccataccgacgttcagagaattcttgagccaaaaaggaagggatcgggcgaagtgctattcaaattctaatgcgacgaaccagccatctggtattcgtaggaagtttagtggtcaccttgataaggaagaagccagcaagaggatgaaatcatga

SEQ ID NO: 133207 - DNA, 1803 bp, Zea Mays
ctccagggtccaggctctctcccgctcacggcagcgccgtccttcgacacccccctccccgctctagttctggcctgctgaggactggaggtccatccatccggactttgttgatttcttctgttggtaatgaaacctaatctgctccgactctaagaggagtgagttccgagcaatcacaccgaaatcttccttcatcccctccattgatcccctcacaagtgctttaccttcccgagtggtggcgtcttaatctgatgcacccacgtatggttccgtctgatttcctcttagtcatttccccccctcctttcataacttattgatcagcgcgcgcaagatcgacctcggtcgatgccgtagggattgagacacaatgtgtgggttaggaagcttgttttccaagagatagggattcaactgaatctccacgccgcgctgcagcattgtggtgttcagctcaaaatgaaaggagtgcttccgattaagggggcatcaggccgtgaaaagaaagcgcctaaggagctcgagagcgtcttgaaccgatatttcgggtattcgggatttcgaggaaaacaactcgaagctatagaagctgttctatcagggagagattgcttttgtttgatgccaactggtggtggaaagtccatgtgctatcagattccagctctggtgaaaacaggcattgttcttgtcatttcacccttgatagaatttacaggagaaccaggttgccagcttgaaaaataaaggggttccagctgaatttctctcttcaacacaggcatctcacactaaacaaaggatacatgaagaccttgatactggtaatccttctttaaagttgctatatgtgactcctgaacttgttgcaacatcaagctttatggcaaagctaaagaagctatacaacagaggtcttcttggtcttgttgcaattgatgaggctcactgtatttcaagttggggccacgatttcagacctagctaccgaaaactttcatcattgaggaagcagttcccagatatccctttgttagctttaactgcaactgctgtaccgaaggtccagaaagatgtggtatcatcattgtgcttgcaaaatccagtaattcttagagcttcatttaatcgacccaatatattctatgaaggtcaaaagctaccacaaccttggaagaggctttggaaatcttgggctccccctaagtgcaagtttttcttatggttggccattcggaataaatgttggacttcagatagattggagatgagaggtctggaccacccagtgtcttgcctattctgtgatcaagagcaggaaaccatacaacatattttgtgttcatgtgtatttgcaagacagttctggcattccattctatttggattgaatgttggtaatctctctccctcaagagatgagatctcctttgctgattggtggcgaaaaacaagtaagaagatacataaaagcaagagaaagggcatgaacagcatcatcattttaggggcctggtgtttatggatccaccgcaacaaggctgtctttgatggggagaccccttcgctaagctctatcagatgcgtctttcttgatgagattgggtgttggattacggctggtgccaagcatcttcagagctttggattagtgcttgcgcgtaaccttcacagggtctagggagtggtgtgttttttttttgttttgagtaagcctgcttagggctttgtaccttggtccattttggacctttttcttctctaattaaaatgatgcgcagttctcctgcgctttct

SEQ ID NO: 133208 - DNA, 314 bp, Zea Mays
aggaagaagttcaagggcgtgcgcaagcgcaagtggggcaagtgggtgtcggagatccggctgcccaacagccgcgagcgcatctggctgggctcctacgacgcccccgacaaggccgcgcgcgccttcgacgccgccttcgtgtgcctccgcgggcggggcgccgccggcgcggacctcaacttcccggactcgccgccgccgggccgggccgggggacgcagcagcgacccgcgggaggtgcaggcggccgcgctctcccacgccaaccgcgccgccgtcacggcccagcaggcggccgcggcgctcatcat

SEQ ID NO: 133209 - DNA, 635 bp, Zea Mays
ttttacttgaaagccatgtgcggtcattttatctcagtttatgagtaagaaaatcacatcttaaacaaacagagtgagctttataccttacctatttgtaatataaccagtctagtctagttatagccatactggtactgcaagatgtagctgtcaaagcacttgtactgcctatttgacccacaaacctacacgtttacttctgttcccatctgaattatttgtatatgtgttgtggtgtcatagttcttaatacaagcaaactttgcctttttgttgggaagaaaagagaacccgcgtgctgacatgcgcatttgctactacttcaggttggagttcaagctgtatattcaaaagtacgctggaactgaggtcggcgttgaatgattccagacatctggttctcaaagaggatgtcaggatggcactatattcatcttagaaaccgatggtgtgaatgaaagacatgaagcctttgaatgatcatgttctaatcaaggtcgaggttcaactgtaggcccgccatcttgtttgtgtgggtgggaaaggggttcccttgcggcctaccaatactgtagggtcgtacgtcttgtctgactgtcctctgagaagcaacagtaggcattcaaaaattc

SEQ ID NO: 133210 - DNA, 824 bp, Zea Mays
agcagtcagcagacatcagcagaccgccggccgaccgccccacaggcgacctttccggcagagaatcaacgctcgctggtttgctaaactcattgtctgtcagagatgggacgtccggaaggggtcacgatcggatgacaacacacgtcgagaagatgacaacgacgagcagcgtcaggaacgggacatcagagtagattggttcaagtgatgttggaaagaatgggatcagatagatagatgtaagactggaatgagaagaaggatgacaattaggagaattgaactgatccaactaagagacctaggatagaactagtttgatctatctaaaacattttttttctatacttacatataagagatactaaaaattgagggggggccacggccccctttgccccccacgtggatccgccactgttgccgaggaagaagactgacgaggcgaagtcactgattagagtgttggtggcccttggctttgattgtgatcaaatagaggcaaatggttgaggtttggagatgctggtttgttaggttatggttagcttcttaaacttccaacctctggtgtatgtgtgatgtgaactgaatcacaataatgtctggttgtggtttcattaatgcttacatgtggtgaattggacctgactccatggtctgtgactctgtgttgcagtgaagtctgctatggagaacatttgtaaatgtggggtcaatcagtatgttcaaaaagtctgtaaagaaattatgtttaatctgtaactggttaccattttagttcaatacaatattataatccccatgtgtagtacttaaca

SEQ ID NO: 133211 - DNA, 1036 bp, Zea Mays
tccgcgtccggctgcgctacgagcctacggcttccgcagctcgcttccgctgtgctgtcctctgtgctatccactagggttcatctgctcgaggaatggcatcgctggttcgctgcaggtctctggcgcgggggtcggtgccgcagccttcgctgcgaaggggaaggcctccatcggtgcgcacttgcttctctcgacggtgaccgtcggcgaggtccagcctcgtcgccagggccgccaccgtcgttgcccccaaggcgacctttccggcagagaatcaacgctcgctggtttgctaaactcattgtctgtcagagatgggacgtccggaaggggtcacgatcggatgacaacacacgtcgagaagatgacaacgacgagcagcgtcaggaacgggacatcagagtagattggttcaagtgatgttggaaagaatgggatcagatagatagatgtaagactggaatgagaagaaggatgacaattaggagaattgaactgatccaactaagagacctaggatagaactagtttgatctatctaaaacattttttttctatacttacatataagagatactaaaaattgagggggggccacggccccctttgccccccacgtggatccgccactgttgccgaggaagaagactgacgaggcgaagtcactgattagagtgttggtggcccttggctttgattgtgatcaaatagaggcaaatggttgaggtttggagatgctggtttgttaggttatggttagcttcttaaacttccaacctctggtgtatgtgtgatgtgaactgaatcacaataatgtctggttgtggtttcattaatgcttacatgtggtgaattggacctgactccatggtctgtgactctgtgttgcagtgaagtctgctatggagaacatttgtaaatgtggggtcaatcagtatgttcaaaaagtctgtaaagaaattatgtttaatctgtaactggttaccattttagttcaatacaatattataatccccatgtgtagtacttaaca

SEQ ID NO: 133212 - DNA, 1447 bp, Zea Mays
ccccaccactcagtagcacgcagcgtgcgggcaacaccacaccaccacccacggccaccaggcagcagcccaccgccgtgtcctagcttcgtaacgacacaaccggccgggttatccctatcgccagcaagccgccaccaaaaacaacacgcccggacggaaaggtccgccacggacacagcgacacgcacgtctccctcccctagtcccctcttcgccgtccgggtcgggtgtttgcgaagcgagacaagccaccggtcgccgcgcgactagggtttggttgcgatggagccggcctcctcgtccgcgcttccttctcctcctccggccgaggcgaggcggacgccgccggaggagctgaagctgcggcggaggacgcttgagacggtgctggagcagtgccagcgcgcgctcgagatgatgcatgaggacggtctggggacggctgcggagggggcaagcttcaaggaggtggaggtggaggaggaggaggaggaggaggagggcagcggcgacagcggcggggtcgagagggcgccgcccccaccgccctcggaggccgactacgaggcggacgagctatgcaatcttctgaaatcaagggttcaatcgcctgaatttctcgagaagctagatactcttcagaagtcagtatatcaacatggtgcagtggatgaaacagtatcatgggatattataagtgcggcagatatatgggatgataagagtatgaacgttagtgatgattcagaggacggatatgttcttgttaagcaagaggacatagtcgatggtattgcatgcttcatggctgcatacttgctgtcgctgaaacaaactaaggacctgacacccaaccaacttcaacaagctcttagcaagacattttcagctaaaaagaggaaaagcaaactgcagaaggcatgggatggaacgaaagttgtttataatatagcatcatggagcgcgacggctattggtatctaccagaatcctgcgattgtgcaagcagcaactgcagccttctggacatcctgtcgtgtaatatccaagtttctgtgactagtcatggctggacctggacggtgcaaatatgcaaacattgtgtggctgtggcctctccgtttctaaagatcaaccgaagatgaaaaaagttgccaaactccgtggcgtgcttagattatgatgtaaataggctgcaagttcgttgattgatttaacagcgacatcagttactggtgatgagcaatatggggctgttcgacagtatctcacccatataatctaaaggtatgaatggacacaccaccatctatttgccaataccagctgtatccgacaatcaagaaccgatgtacataagccctcccgcgcaacattggtatatcagtgtgattgtaaatatttcgattcatttgaataaattcgctcgcatgtgtttcacccc

SEQ ID NO: 133213 - DNA, 1533 bp, Zea Mays
ccccaccactcagtagcacgcagcgtgcgggcaacaccacaccaccacccacggccaccaggcagcagcccaccgccgtgtcctagcttcgtaacgacacaaccggccgggttatccctatcgccagcaagccgccaccaaaaacaacacgcccggacggaaaggtccgccacggacacagcgacacgcacgtctccctcccctagtcccctcttcgccgtccgggtcgggtgtttgcgaagcgagacaagccaccggtcgccgcgcgactagggtttggttgcgatggagccggcctcctcgtccgcgcttccttctcctcctccggccgaggcgaggcggacgccgccggaggagctgaagctgcggcggaggacgcttgagacggtgctggagcagtgccagcgcgcgctcgagatgatgcatgaggacggtctggggacggctgcggagggggcaagcttcaaggaggtggaggtggaggaggaggaggaggaggaggagggcagcggcgacagcggcggggtcgagagggcgccgcccccaccgccctcggaggccgactacgaggcggacgagctatgcaatcttctgaaatcaagggttcaatcgcctgaatttctcgagaagctagatactcttcagaagtcagtatatcaacatggtgcagtggatgaaacagtatcatgggatattataagtgcggcagatatatgggatgataagagtatgaacgttagtgatgattcagaggacggatatgttcttgttaagcaagaggacatagtcgatggtattgcatgcttcatggctgcatacttgctgtcgctgaaacaaactaaggacctgacacccaaccaacttcaacaaggttaacagtgttccattatttgagatgagtttgattattacttattacatgaaatcctgatgaagactccccaattaattttgtcagctcttagcaagacattttcagctaaaaagaggaaaagcaaactgcagaaggcatgggatggaacgaaagttgtttataatatagcatcatggagcgcgacggctattggtatctaccagaatcctgcgattgtgcaagcagcaactgcagccttctggacatcctgtcgtgtaatatccaagtttctgtgactagtcatggctggacctggacggtgcaaatatgcaaacattgtgtggctgtggcctctccgtttctaaagatcaaccgaagatgaaaaaagttgccaaactccgtggcgtgcttagattatgatgtaaataggctgcaagttcgttgattgatttaacagcgacatcagttactggtgatgagcaatatggggctgttcgacagtatctcacccatataatctaaaggtatgaatggacacaccaccatctatttgccaataccagctgtatccgacaatcaagaaccgatgtacataagccctcccgcgcaacattggtatatcagtgtgattgtaaatatttcgattcatttgaataaattcgctcgcatgtgtttcaccc

SEQ ID NO: 133214 - DNA, 1414 bp, Zea Mays
ccccaccactcagtagcacgcagcgtgcgggcaacaccacaccaccacccacggccaccaggcagcagcccaccgccgtgtcctagcttcgtaacgacacaaccggccgggttatccctatcgccagcaagccgccaccaaaaacaacacgcccggacggaaaggtccgccacggacacagcgacacgcacgtctccctcccctagtcccctcttcgccgtccgggtcgggtgtttgcgaagcgagacaagccaccggtcgccgcgcgactagggtttggttgcgatggagccggcctcctcgtccgcgcttccttctcctcctccggccgaggcgaggcggacgccgccggaggagctgaagctgcggcggaggacgcttgagacggtgctggagcagtgccagcgcgcgctcgagatgatgcatgaggacggtctggggacggctgcggagggggcaagcttcaaggaggtggaggtggaggaggaggaggaggaggaggagggcagcggcgacagcggcggggtcgagagggcgccgcccccaccgccctcggaggccgactacgaggcggacgagctatgcaatcttctgaaatcaagggttcaatcgcctgaatttctcgagaagctagatactcttcagaagtcagtatatcaacatggtgcagtggatgaaacagtatcatgggatattataagtgcggcagatatatgggatgataagagtatgaacgttagtgatgattcagaggacggatatgttcttgttaagcaagaggacatagtcgatggtattgcatgcttcatggctgcatacttgctgtcgctgaaacaaactaaggacctgacacccaaccaacttcaacaagctaaaaagaggaaaagcaaactgcagaaggcatgggatggaacgaaagttgtttataatatagcatcatggagcgcgacggctattggtatctaccagaatcctgcgattgtgcaagcagcaactgcagccttctggacatcctgtcgtgtaatatccaagtttctgtgactagtcatggctggacctggacggtgcaaatatgcaaacattgtgtggctgtggcctctccgtttctaaagatcaaccgaagatgaaaaaagttgccaaactccgtggcgtgcttagattatgatgtaaataggctgcaagttcgttgattgatttaacagcgacatcagttactggtgatgagcaatatggggctgttcgacagtatctcacccatataatctaaaggtatgaatggacacaccaccatctatttgccaataccagctgtatccgacaatcaagaaccgatgtacataagccctcccgcgcaacattggtatatcagtgtgattgtaaatatttcgattcatttgaataaattcgctcgcat

SEQ ID NO: 133215 - DNA, 1059 bp, Zea Mays
ccccaccactcagtagcacgcagcgtgcgggcaacaccacaccaccacccacggccaccaggcagcagcccaccgccgtgtcctagcttcgtaacgacacaaccggccgggttatccctatcgccagcaagccgccaccaaaaacaacacgcccggacggaaaggtccgccacggacacagcgacacgcacgtctccctcccctagtcccctcttcgccgtccgggtcgggtgtttgcgaagcgagacaagccaccggtcgccgcgcgactagggtttggttgcgatggagccggcctcctcgtccgcgcttccttctcctcctccggccgaggcgaggcggacgccgccggaggagctgaagctgcggcggaggacgcttgagacggtgctggagcagtgccagcgcgcgctcgagatgatgcatgaggacggtctggggacggctgcggagggggcaagcttcaaggaggtggaggtggaggaggaggaggaggaggaggagggcagcggcgacagcggcggggtcgagagggcgccgcccccaccgccctcggaggccgactacgaggcggacgaggtgaggggaggagatctcgctgtgcatctcgtactttgttgttgcctgagggttcgtagcaatttgggttcgggtattcgtgctggtggctcgattgacgcctgacggggttagtttgcggcagttaggcgtttcctgatatgtggatgagagtagcttaagtgattaagctgaaccggaggttgctgcgcccgggactagctcagatctacatgaaattgctacaaatggagtggtcgcgcctcaatgattgtcttgctgttttgtggtattacgtgctgagtcagcagatgagtatggcgtttggatacagattggattggggatagggatacatactggtatatataaggcttggttaggaatacatgtatcagtatgatagtatgtaatacattttccatgtttgtttaccactgggttaaggattgagaaatattctttgaaaagtcaaaatacccaaagaaaaagagaataaaa

SEQ ID NO: 133216 - DNA, 2040 bp, Zea Mays
gcccctgtcgattttctgtgcttgccgtcggtaagccccctatcggccatcgttctcatcacactcttctgcagttctgcttcccacacctcccatggcgcgtcctctcccaaagccctagcgctctagcccccgaatcctgccctcccctcccgccagaagcccgcccgcctaccagccgccactgctcccacctcgcccggagagagtcagtgcgaggccatggaacaccaccacaagccaggcctgcgtgtgcgcctccgcatcaccgccgcgcggcgccgcgcgtggctctccgcctgtctgcgccccccctgccgcaagccgccgcgccgcgaccactcggactccgtccacaaggtcgcgcgccgcgagatcggcggcggccaccgacgcccgccgcggcccgcggcgccctcatcctcctcattctcgtgccctgagaaattccgcaacttccagctccaggaagaatatgacacctatgatgatgaagtccattttcttgtcaagttgccatttttgtgcaccagaacaaaaattattgaaattgttgcagcaaaggatgttatatttgcacttgcccaatcaggtctatgtgctgcatttaatcgaacaacaaacaaacgcatatgctacttgaatataagtcctgatgaagttattaggagcttgttttacaacaagaacaacgagtcccttatcaccgtttcagtttatgaatcagatcgtttcagttcattaaagtgcagaacaactcctatagagtacatcagaagaggtcaactgaaggatggatttcctttatttgaaactgaatcattaaaatatcctggctttgttgagtttgatgatgttaatggcaaagtattgaccttttcggccaagggttgtacttacaaagtttttgatctaaaaaactacaactttctctattccatatgcgacgagaacatccaggagattaaaataagtcctggaatcatgctcgtgatttacaattacaagaagacgaactgtcatgttccgctgactatactgtcaattgaggatggaactccactgaaaaccttcaatcagttgctgcatcgaaatagaaaggttgatttcatcgagcagtttaatgaaaagcttctcgtgaaacaagacaaggaaaatctccagatcattgatgttaggaactccgacctgatcgaagtgaacaaaaccgagttcatgactccctcagcgttcatctttctctacgaaaataacctattcctgacattctgcaataggacggttgcagcctggaatttccgtggagagctagttacatcgtttgaggaccacgagttgtggcatcctaactgcaatacgaataacatatacatcactgctggccacgacttgatcatctcatattgcaaggtctcaaagcagagggcagattgtgttgacagtgaggctggggaagttctgtccatgggatcaattaacatgagcgacatctttactggaaagtgcgtcgccaagatctcccccgctgaccctactctcacaattgctcctcggaggagaggcgacgatagcagatctaccatccgcagtactgtcccggaagctcttgaggacatcactgctctcttctacgacgaggaccgcaatgaaatctacaccggaaacagcaagggcctggtgcatgtctggtcaaattaaccttgacatccaccccctaccttgtacatacctcctgtacctgcactcgtatttcccctcgtaggcggctaggcggctttgtttccgtctcaatgtatgttgattgaggccaatactagagtacccaaacccctagggctgatttaataaccaaggaattggaggggattgtacgggaggaatccactcgctatttaaaattgaatagcgaggggattcttctccatggatcttctccaattcactggtaaacaaatcagaccttgtagaacagagatgtaatttcatgtctgattatagcgggagtgtaacttcctagacattatatcattggtaaaagaa

SEQ ID NO: 133217 - DNA, 1928 bp, Zea Mays
gcccctgtcgattttctgtgcttgccgtcggtaagccccctatcggccatcgttctcatcacactcttctgcagttctgcttcccacacctcccatggcgcgtcctctcccaaagccctagcgctctagcccccgaatcctgccctcccctcccgccagaagcccgcccgcctaccagccgccactgctcccacctcgcccggagagagtcagtgcgaggccatggaacaccaccacaagccaggcctgcgtgtgcgcctccgcatcaccgccgcgcggcgccgcgcgtggctctccgcctgtctgcgccccccctgccgcaagccgccgcgccgcgaccactcggactccgtccacaaggtcgcgcgccgcgagatcggcggcggccaccgacgcccgccgcggcccgcggcgccctcatcctcctcattctcgtgccctgagaaattccgcaacttccagctccaggtttgtcctcggcgccccccctcccccctcgtagctgtagcaggctgtccgagactctagtcgctacgccggctgagacaggaaactggtagttccgtaacccttacagtctgttaggcatgtcttgctcgatttgatccttgttatgaaatggcgatactcgtgaaaatgttagcataatgtttttaactgaatagctgatagttctgtgaactgaagttgcttgtggcaaggtgtgggtgttgcttgagacaaggtgttccgagagggtatagctctggctagatctgggagtcccaactgtgaggaacattgattcctaatgtcgtaccctagtactgtaatgttaggattgcatgtttttttcttctgaattctacttgcagtttttactatgtactctctccgtttttttatttgtcacgttttagtgtaaagataaactagtgaacgacaaatattcgaggcagtatgtatgcttctgggtttccttgacatggattccgcataacatacctggtatgacaaagtttgcaatgactggacgcatagttgtcaatagtaattggtagggccacaaataacttgatgcacgaattccaaatcacagtctgccattacatgctatcgtcagtttgcatggcaacactttctgaaaatgaacataccttaaaattttgaaatctacgttgctcatttttttacttttcctgttttctcggattcagaacactgggacgttcctaactttgtgtacatttatccatgcaatgtatgaagactgttgtttgtcaggaatctggaaggctattagatgttagtttaacagcaacctgccggctttcatcctggcctaggtgaatatttttctccgaaaaccaatttagtccattgttagtaatgttgaaatttttatatcgtcttaaaggggaaaaaatcatcaaagagggcatttagaaagaacaagatgatacaaacaatacgaaagagaagatagcaacctgcattcgaaaggtggtctcataggtgcgtggaggcaaagctaaaaatatttgtttgttgaatgaggaagttcaaagggctattaaggaaaataaagaatggtacatatgtttgtatcatgacaggagtgtggacaacatagagaagtacaagatagaaaagaagactacaagacgagttgtaagtgtggcaaagggtaggccgcatgagggtctttacgaacgtttgagtgcgaaggaaggaaagaatgacatatatgggatgactagggttcgtgagaggaagacaagggacttcaccaagttaagtgcactaaagatgaaataaagcacctcttggtgaaggaggatgagtgttgggggccttcgtcctccgaaggtcctcaaaaacatgatttgacaatgttttccaagtggattatgtgaacaggtaccttcggactcagaattacgaacatg

SEQ ID NO: 133218 - DNA, 753 bp, Zea Mays
agcaaggaagcgtgcttttgccggacgttttgaacgcacgaacggcaatggcagttatcccagactcttccaaaaacgagacgaaaccgttgaccaaaaaaaagaagaaaagaaacgtgcagctagctcgcggtcgcagtagcttccgcgtggcacgcgtaacggaatttaccgaccccgtcgtctccgtcctccgtcgcggtcgtcgtcgggtcaccgggtccggcgcggccggcggcgagctcgagctgcgcccagagcgccttgacctcggcctccttgcgctccatgcgcgcgcgccacccgtcgcgcagccgctcgtccctccgccgcgcgtacgcctcgtacttcctgccccgcacgtcgccgccgccgcctcccgcctcgtcatcatcacccgcctcctccgcgccgtccccggcgtcgtggcgctcgcgtgcggtggcggtggccccggtggtcgtccgctccgccaggcgctgcttgtaccccgcgaactggcgctccagctcggcggccatcgcccagaggtcagccgcgccggggcccgagccgcacggcatggtcggtcaacccgccgtcgtaccgtacgccgtatagccaggcgggctccggtttgtcccgtcccgtcgatcggccggccacctcctgcgcgtcgcgccgcgcggcgcacgcgtgggacgggaaggaagataaaatgggacgtatgtgcgcgcccggaacgtctcgcgtccgggttttttcctttttgac

SEQ ID NO: 133219 - DNA, 1466 bp, Zea Mays
atcagcgggctgccaccggccgctggcgtcgtggaccggcgagggcacgggcggcgacgtgcagtcgatgacagtgacctccctccccctgtgcttcctcccgaagctcaggaacctcttgaaccccctcaccgtcgcctgtctcggggacctcgccgcgccggaggacctgctgcccggcggcgtactcggcgccggcgcgctcttctcggcgcgcttcttccgcgcgagggcggcgtccgcctctagcagccgctcggcggactggtcccgcgagctgcacgacgcccgcgcgctcggcaccgacgacctggccgacagataggactcgtcggagctctccctcgccggcgcttcttcggcgttcgtcgtcgcgacctctgctgcggccgcggtagtagcttcggctggtggtgctagtgccgccggcgtctctccgcttgacttgacgtccggaccaaccgcagcggccgaaccggccagtgtccaaggctcagagagcgccgccacggctcgctcctcggcggcgtccttgttgttgacgtagacgtagctcggctcgggttccgactcactagtgacctccccgtcggcgtcgaccttctcttctccgccgtgttcgttggcaccagcgtcgtgcgtcgcgtcaggttcgccgtgtgacacggcttcgtccaccgctccgcgatctggctccggcgaggtagctcgtgtgttcgccgcaccgttgccgccgctgccgtcgtcgtccctgccagcgagcgacatcttcgtcggagaagccccgggggtcccgccgccagtggcagcatactcggccgaacgactcggcacaggtggcgcaaccgtctcggcgcttggctgagccaccgccagcgccacatccctgccgagatcctcgggtccgccggagctgtcatctcgtcggggcagaggccgcgggagcttccgccccgccgccgtcttcgcgggcccgtgcccttccacggaggtgctcctgcgccgcagagacgtcttgggtctgggtctcatcgtgtctgcagtcgctgccgccgcgcggccggccggccacgctcggcttttcctgtcggcttccccgcaggatgcgtccggctccgacggcggcggttcgtgcgacagcgcccgccgcctcccgacgtcggtgcggttcctgctcatggttgacgacgagaagctcctggtccgcacgtgcctcttgccggtgaccctcctcggggcaagagccgcgcccgatgagcttctcctcctgtcgtcgtcggcgtcgttccgttcagtcttcctctgcacgattgcacagtggcatgcttcccgtgtctatcgatcgaccaaacagagaaacagcagacctccaatcaaattccaaaaatggctataaaaatgccattttttctatgggcaatgacatttgagaaaaaaaaacccgatgaactgatgatgatcttgaa

SEQ ID NO: 133220 - DNA, 276 bp, Zea Mays
ggaagcatggaggaagatgtttatgagaatgttagttttgatggaatgaagaatgtgacggtgatgttcgatgaaaggccctcttttggccagattttcgctagggcttgtgaggagattagttgcaatttaaacaaacctgacatatcaattgagtgtttattgtcccatgttgcatttgggacaatatttcgacggttgatctccattggctctgaaaatgactgggtgaaatatgtcaaaagtgtgatgacatttgttcccccatgtttgtag

SEQ ID NO: 133221 - DNA, 753 bp, Zea Mays
aacctttgactgttggatttgtagaggactgccaaggcccatcagtttcaggggccagccaaaagtagaacatgctcgacctcaccttcatcatcaccgtcccctcctcctaccacagcaaaggatgcagaggtgccatcatgtaatggcttcaataagcggggttcatcagctctggactcagggaagcctccaaagcctgttgaaggtggtgcaggtcagaaccaggctggattctgttttggggtgagcgacacgaaggaaacgccgaagctgccaggtcagaacgccagccggaggaggaacggccggaaacagaagctgtcatccaagcacgatgtttcatctgaagatgaaacggcggccggttcgtagcacaccagcagtttgacccattggcttcggtgatatatcattcgttggcccttggctgtgcctaggggccctagtagctagcagcagcagcagggacggcacatcatgccagctgctgtgatctgaagaggcgtttagctcatcatatgcctcaccttaggcctgtgggggattttccattcaaactcgtcgatgatactacatctttctttctccatctgtgtcgtttgtgttgtaagacagtgacttctgaagtctgatcgtctcggttctttttattaacatctgatatacgttactgcctgtctatagtagttaaagattgtcagcgtatctcaaaagacttaatacctttcgaaggagaagatatgcatcgtt

SEQ ID NO: 133222 - DNA, 1419 bp, Zea Mays
atgagacccaaatatttaacgggcaagtggccatcatggccgtgtttctggagacttcctgcggcgcgtggagagtggaggcagggggagaaggaagcagcagcagcagcagcagcagctccatccgctcgcttccttcccccaccgccagcgtcgcctctccgtgtgcgcgccccgccgggggtggcgtcgctgcacctttgggcagcaggcacctacgtgcggggggagccacacgcctccctctcgcctcttggcatggacgccggcggagagaagtgcggcgacgcggcggcagagggcggagacctctacgcggttctcgggctaaaaaaggagtgctccgaggccgagcttaaggtcgcttaccggaagctcgccaagaaatggcacccggacaaatgctcgtcctccagcagcgtgaagcacatggaggaagccaaggagaagttccaagagatccagggcgcctattccgtactctccgacgccaataaacggctcctctacgatgtgggagtatatgacgatgaggacgacgaggaaagcatgcaggggatgggggacttcatcggtgagatggcccagatgatgagccaggcgcagccgacgaggcaagaaagctttgaggagctgcagcagctttttgtggacatgtttcagtccgatattgattcaggattctgcaataggactgccaaggcccatcagtttcaggggccagccaaaagtagaacatgctcgacctcaccttcatcatcaccgtcccctcctcctaccacagcaaaggatgcagaggtgccatcatgtaatggcttcaataagcggggttcatcagctctggactcagggaagcctccaaagcctgttgaaggtggtgcaggtcagaaccaggctggattctgttttggggtgagcgacacgaaggaaacgccgaagctgccaggtcagaacgccagccggaggaggaacggccggaaacagaagctgtcatccaagcacgatgtttcatctgaagatgaaacggcggccggttcgtagcacaccagcagtttgacccattggcttcggtgatatatcattcgttggcccttggctgtgcctaggggccctagtagctagcagcagcagcagggacggcacatcatgccagctgctgtgatctgaagaggcgtttagctcatcatatgcctcaccttaggcctgtgggggattttccattcaaactcgtcgatgatactacatctttctttctccatctgtgtcgtttgtgttgtaagacagtgacttctgaagtctgatcgtctcggttctttttattaacatctgatatacgttactgcctgtctatagtagttaaagattgtcagcgtatctcaaaagacttaatacctttcgaaggagaagatatgcatcgtt

SEQ ID NO: 133223 - DNA, 1628 bp, Zea Mays
atgagacccaaatatttaacgggcaagtggccatcatggccgtgtttctggagacttcctgcggcgcgtggagagtggaggcagggggagaaggaagcagcagcagcagcagcagcagctccatccgctcgcttccttcccccaccgccagcgtcgcctctccgtgtgcgcgccccgccgggggtggcgtcgctgcacctttgggcagcaggcacctacgtgcggggggagccacacgcctccctctcgcctcttggcatggacgccggcggagagaagtgcggcgacgcggcggcagagggcggagacctctacgcggttctcgggctaaaaaaggagtgctccgaggccgagcttaaggtcgcttaccggaagctcgccaagaaatggcacccggacaaatgctcgtcctccagcagcgtgaagcacatggaggaagccaaggagaagttccaagagatccagggcgcctattccggtctcaatcttccttctctcagcaccctcacacaatacacccgcctcactgctctgttccatccatattcgcaaaccaccccttcacctgtggcaactactgaccaacgacaactgataaactgaacagcagcaaacggaaccgatctagcctgttggtaaactcattgcgtggagcccttgtgctcccatcccattgttcttgtgcagtactctccgacgccaataaacggctcctctacgatgtgggagtatatgacgatgaggacgacgaggaaagcatgcaggggatgggggacttcatcggtgagatggcccagatgatgagccaggcgcagccgacgaggcaagaaagctttgaggagctgcagcagctttttgtggacatgtttcagtccgatattgattcaggattctgcaataggactgccaaggcccatcagtttcaggggccagccaaaagtagaacatgctcgacctcaccttcatcatcaccgtcccctcctcctaccacagcaaaggatgcagaggtgccatcatgtaatggcttcaataagcggggttcatcagctctggactcagggaagcctccaaagcctgttgaaggtggtgcaggtcagaaccaggctggattctgttttggggtgagcgacacgaaggaaacgccgaagctgccaggtcagaacgccagccggaggaggaacggccggaaacagaagctgtcatccaagcacgatgtttcatctgaagatgaaacggcggccggttcgtagcacaccagcagtttgacccattggcttcggtgatatatcattcgttggcccttggctgtgcctaggggccctagtagctagcagcagcagcagggacggcacatcatgccagctgctgtgatctgaagaggcgtttagctcatcatatgcctcaccttaggcctgtgggggattttccattcaaactcgtcgatgatactacatctttctttctccatctgtgtcgtttgtgttgtaagacagtgacttctgaagtctgatcgtctcggttctttttattaacatctgatatacgttactgcctgtctatagtagttaaagattgtcagcgtatctcaaaagacttaatacctttcgaaggagaagatatgcatcgtt

SEQ ID NO: 133224 - DNA, 1496 bp, Zea Mays
atgagacccaaatatttaacgggcaagtggccatcatggccgtgtttctggagacttcctgcggcgcgtggagagtggaggcagggggagaaggaagcagcagcagcagcagcagcagctccatccgctcgcttccttcccccaccgccagcgtcgcctctccgtgtgcgcgccccgccgggggtggcgtcgctgcacctttgggcagcaggcacctacgtgcggggggagccacacgcctccctctcgcctcttggcatggacgccggcggagagaagtgcggcgacgcggcggcagagggcggagacctctacgcggttctcgggctaaaaaaggagtgctccgaggccgagcttaaggtcgcttaccggaagctcgccaagaaatggcacccggacaaatgctcgtcctccagcagcgtgaagcacatggaggaagccaaggagaagttccaagagatccagggcgcctattccgcaaacggaaccgatctagcctgttggtaaactcattgcgtggagcccttgtgctcccatcccattgttcttgtgcagtactctccgacgccaataaacggctcctctacgatgtgggagtatatgacgatgaggacgacgaggaaagcatgcaggggatgggggacttcatcggtgagatggcccagatgatgagccaggcgcagccgacgaggcaagaaagctttgaggagctgcagcagctttttgtggacatgtttcagtccgatattgattcaggattctgcaataggactgccaaggcccatcagtttcaggggccagccaaaagtagaacatgctcgacctcaccttcatcatcaccgtcccctcctcctaccacagcaaaggatgcagaggtgccatcatgtaatggcttcaataagcggggttcatcagctctggactcagggaagcctccaaagcctgttgaaggtggtgcaggtcagaaccaggctggattctgttttggggtgagcgacacgaaggaaacgccgaagctgccaggtcagaacgccagccggaggaggaacggccggaaacagaagctgtcatccaagcacgatgtttcatctgaagatgaaacggcggccggttcgtagcacaccagcagtttgacccattggcttcggtgatatatcattcgttggcccttggctgtgcctaggggccctagtagctagcagcagcagcagggacggcacatcatgccagctgctgtgatctgaagaggcgtttagctcatcatatgcctcaccttaggcctgtgggggattttccattcaaactcgtcgatgatactacatctttctttctccatctgtgtcgtttgtgttgtaagacagtgacttctgaagtctgatcgtctcggttctttttattaacatctgatatacgttactgcctgtctatagtagttaaagattgtcagcgtatctcaaaagacttaatacctttcgaaggagaagatatgcatcgtt

SEQ ID NO: 133225 - DNA, 111 bp, Zea Mays
tggattaacttttgatggttctactgaaatactgcctgtttttgttaattgtctgtaaaattgtttcatttcaagttattggtcggtatattcggatgctgggcattgttg

SEQ ID NO: 133226 - DNA, 816 bp, Zea Mays
gttttggacagaagcctatcgtcaaaggaagtaactcctttggctgctcagacttgggctgggagaatgataccaagacaccagacatcacttccattgctcccatttccactattgcggaaggcgacgagtctgcatttgtcgacagcaattcaaacagctcatttgtgcttcctgccctggagaacagtgctgttgatctcactgatgggctgacagatttagaatcctatatgaggtttcttctggatggtggtccaagtgattcagttgatagccttctgaaccttgatggatcgcaggatgttggtagcgacatggacctctggagcttcgacgacatgcccatcgtcggcgatttcttttgaggattttgaagcttggtcataggagtatgtacatagggactaggggaataaagaccgggggagattgggaagcacctgcttggcaccttgggggtagcatttgctcgtgtctagctcagagatgcagaagttgcattctgaaactacttggttatcgacctgttccctattttagctatctctttatgagagccatttatgagactgaaccattttgttttgctttcttttcgttgttacaatatatggtttaacattatgatttatggatatgtgccaaatatggtgctcaacagtggtcaaacatgccttttagatgctcttgtttctcgtattgttgtgtaccttgtgatatttcattcgttgaaattgagttaaactagttatctgctgaaacttttcttgtacaagcaaaagtattcaagatttaatcttattggcatttggc

SEQ ID NO: 133227 - DNA, 1057 bp, Zea Mays
gtttcgtccaccatttcgctcccgcaagcaccgatttgtttactgctctctccgacgcgcggcggcggagctccctacgacgactgaaccatgtgcggcggcgcgatccttgccaaccttcgcgagccggcgccgcgccggctcacagagcgggacatctggcagcagaaaaagaagctctccaatttatttgttcagcatggcaatatgccatttgttccagcaatgaactctactgcttctgttgatgatcttatcatgaatctgcactctgaccagggaagtaactcctttggctgctcagacttgggctgggagaatgataccaagacaccagacatcacttccattgctcccatttccactattgcggaaggcgacgagtctgcatttgtcgacagcaattcaaacagctcatttgtgcttcctgccctggagaacagtgctgttgatctcactgatgggctgacagatttagaatcctatatgaggtttcttctggatggtggtccaagtgattcagttgatagccttctgaaccttgatggatcgcaggatgttggtagcgacatggacctctggagcttcgacgacatgcccatcgtcggcgatttcttttgaggattttgaagcttggtcataggagtatgtacatagggactaggggtaagcactgccgggggagattgggaagcacctgcttggcaccttgggggtagcatttgctcgtgtctagctcagagatgcagaagttgcattctgaaactacttggttatcgacctgttccctattttagctatctctttatgagagccatttatgagactgaaccattttgttttgctttcttttcgttgttacaatatatggtttaacattatgatttatggatatgtgccaaatatggtgctcaacagtggtcaaacatgccttttagatgctcttgtttctcgtattgttgtgtaccttgtgatatttcattcgttgaaattgagttaaactagttatctgctgaaacttttcttgtacaagcaaaagtattcaagatttaatctt

SEQ ID NO: 133228 - DNA, 1640 bp, Zea Mays
cgtccgcgtccgcgctctccaaagtttcgtccaccatttcgctcccgcaagcaccgatttgtttactgctctctccgacgcgcggcggcggagctccctacgacgactgaaccatgtgcggcggcgcgatccttgccaaccttcgcgagccggcgccgcgccggctcacagagcgggacatctggcagcagaaaaagaagctcaagaggggcggcggcggcgggaggcgctcgttcgcggcggaggacgatgaggacttcgaggccgactttgaggtcttcgaggccgactccagtgattcagatttggagctcagggaggggactgacgacgacgtcgtcgagatcaagcccttcactgccaagaggactttctccagcgatggcttaagcaccatgactagtgctgtagcaaggtcagccaagaggaagagaaagaatctatacaggggtatccgccagcggccttggggcaagtgggctgctgagatcagagatcctcagaagggtgttcgtgtttggcttggtactttcaatagtcctgaggaagctgcaagagcttatgatgccgaagcgcgcaggattcgtggcaagaaggccaaggttaactttcctgatgcaccagcagttggtcagaagcaccgttctggctcagcttctgctaaagcatccaagtcaagttttggacagaagcctatcgtcaaagtagctatgaacaaccttgccaacacaaatgcatccttcttccaatctgctagctacccctccaatttatttgttcagcatggcaatatgccatttgttccagcaatgaactctactgcttctgttgatgatcttatcatgaatctgcactctgaccagggaagtaactcctttggctgctcagacttgggctgggagaatgataccaagacaccagacatcacttccattgctcccatttccactattgcggaaggcgacgagtctgcatttgtcgacagcaattcaaacagctcatttgtgcttcctgccctggagaacagtgctgttgatctcactgatgggctgacagatttagaatcctatatgaggtttcttctggatggtggtccaagtgattcagttgatagccttctgaaccttgatggatcgcaggatgttggtagcgacatggacctctggagcttcgacgacatgcccatcgtcggcgatttcttttgaggattttgaagcttggtcataggagtatgtacatagggactaggggaataaagaccgggggagattgggaagcacctgcttggcaccttgggggtagcatttgctcgtgtctagctcagagatgcagaagttgcattctgaaactacttggttatcgacctgttccctattttagctatctctttatgagagccatttatgagactgaaccattttgttttgctttcttttcgttgttacaatatatggtttaacattatgatttatggatatgtgccaaatatggtgctcaacagtggtcaaacatgccttttagatgctcttgtttctcgtattgttgtgtaccttgtgatatttcattcgttgaaattgagttaaactagttatctgctgaaacttttcttgtacaagcaaaagtattcaagatttaatctt

SEQ ID NO: 133229 - DNA, 615 bp, Zea Mays
cgtccgcgtccgcgctctccaaagtttcgtccaccatttcgctcccgcaagcaccgatttgtttactgctctctccgacgcgcggcggcggagctccctacgacgactgaaccatgtgcggcggcgcgatccttgccaaccttcgcgagccggcgccgcgccggctcacagagcgggacatctggcagcagaaaaagaagctcaagaggggcggcggcggcgggaggcgctcgttcgcggcggaggacgatgaggacttcgaggccgactttgaggtcttcgaggccgactccagtgattcagatttggagctcagggaggggactgacgacgacgtcgtcgagatcaagcccttcactgccaagaggactttctccagcggtactggctcaagctcgaggcggcttattttctatgctcgtctgtgcttttttcgcgtttgattgatgtagacgattagaatctaagtgttggctgaggaattttaggtgggttagggagtaggtgggcgtctgaggtgctacttggtggttggattggggacggggaaagaaaaggatactgtttagatattggattctggcttgttatgggattctgcaacttattggatga

SEQ ID NO: 133230 - DNA, 1661 bp, Zea Mays
accccagaggcccagacaaaggcatctccaatctcctcgccccccacggacctgaaccgagaaccgttaccgccgccggagaagcgccgctcgctcaggaggacagccatggcgccggagccggaggatgatattatgaacgagaagaatccccgcccgctcgacgaggatgacatcgcgctcctcaaaacctatggactggggccgtattcgactagcattaagaaggtcgagaaggagatcaaggaaatggccaagaaaatcaacgacctctgtgggataaaggagtctgatacagggctggctccacctagccagtgggatttggtttcagataagcagatgatgcaagaagaacaaccgttacaagtagcaagatgtacaaagattataagccctaatacggatgatgccaaatatgttataaatgtaaaacaaattgcaaagtttgtggttggattgggagataaggtctctccaactgatatcgaggaagggatgagggttggtgttgatcgcaacaagtaccagattcaaatccctctcccaccaaaaattgacccaagtgttaccatgatgactgtggaggaaaagccagatgtgacgtacaatgatgtcggtggctgcaaggagcagattgagaagatgcgtgaagttgttgaacttcctatgcttcacccagaaaagtttgtcaagcttggtattgaccctccgaaaggtgtcctttgctatggcccacctggtactggcaagacacttcttgcaagagctgtagcaaaccggactgatgcttgtttcatccgtgtaattggaagtgagctagttcagaagtatgttggagaaggtgctcggatggtcagggaactgttccagatggcccgctcaaagaaggcatgcattgtattctttgatgaagttgatgcaattggtggtgctcgttttgatgatggggttggtggtgacaatgaggtgcagcgtacaatgttggaaatagtaaaccaacttgatgggtttgatgcaagagggaacatcaaagttctcatggccactaataggcctgataccttggatcctgcacttctgcgccctggtcgcttggacagaaaggtggaattcgggctacctgacttggagggccgtacccaaattttcaagatccatacacgtaccatgaactgtgagcgagatattcgtttcgagcttctggcacggctctgccccaactctactggagctgatataaggagcgtttgcacagaagccgggatgtacgccattcgcgcccgcaggaaaacggtgacagaaaaggattttctcgatgctgtcaacaaggtcatcaagggctaccagaagttcagtgcaacacccaagtatatggtgtacaactagtcggcgtgtcttcatgggatctgttgtttctagaaactctggatctttttcatggttgtatcatcatgagattctctatgcaaaggttgttgtttgtttagcaaattggatgccgagtgatttgtgacctgtaccgcatgtttttaagataacaaggttcttcgctcggtggttcactgctgcttgtgtctatgactgatgatgtgcacagggcgcaaagttcattcggaaaactgacgcaatgtaaacatcaggtaacgcaggttgttgtt

SEQ ID NO: 133231 - DNA, 1671 bp, Zea Mays
accccagaggcccagacaaaggcatctccaatctcctcgccccccacggacctgaaccgagaaccgttaccgccgccggagaagcgccgctcgctcaggaggacagccatggcgccggagccggaggatgatattatgaacgagaagaatccccgcccgctcgacgaggatgacatcgcgctcctcaaaacctatggactggggccgtattcgactagcattaagaaggtcgagaaggagatcaaggaaatggccaagaaaatcaacgacctctgtgggataaaggagtctgatacagggctggctccacctagccagtgggatttggtttcagataagcagatgatgcaagaagaacaaccgttacaagtagcaagatgtacaaagattataagccctaatacggatgatgccaaatatgttataaatgtaaaacaaattgcaaagtttgtggttggattgggagataaggtctctccaactgatatcgaggaagggatgagggttggtgttgatcgcaacaagtaccagattcaaatccctctcccaccaaaaattgacccaagtgttaccatgatgactgtggaggaaaagccagatgtgacgtacaatgatgtcggtggctgcaaggagcagattgagaagatgcgtgaagttgttgaacttcctatgcttcacccagaaaagtttgtcaagcttggtattgaccctccgaaaggtgtcctttgctatggcccacctggtactggcaagacacttcttgcaagagctgtagcaaaccggactgatgcttgtttcatccgtgtaattggaagtgagctagttcagaagtatgttggagaaggtgctcggatggtcagggaactgttccaggtatatctagatggcccgctcaaagaaggcatgcattgtattctttgatgaagttgatgcaattggtggtgctcgttttgatgatggggttggtggtgacaatgaggtgcagcgtacaatgttggaaatagtaaaccaacttgatgggtttgatgcaagagggaacatcaaagttctcatggccactaataggcctgataccttggatcctgcacttctgcgccctggtcgcttggacagaaaggtggaattcgggctacctgacttggagggccgtacccaaattttcaagatccatacacgtaccatgaactgtgagcgagatattcgtttcgagcttctggcacggctctgccccaactctactggagctgatataaggagcgtttgcacagaagccgggatgtacgccattcgcgcccgcaggaaaacggtgacagaaaaggattttctcgatgctgtcaacaaggtcatcaagggctaccagaagttcagtgcaacacccaagtatatggtgtacaactagtcggcgtgtcttcatgggatctgttgtttctagaaactctggatctttttcatggttgtatcatcatgagattctctatgcaaaggttgttgtttgtttagcaaattggatgccgagtgatttgtgacctgtaccgcatgtttttaagataacaaggttcttcgctcggtggttcactgctgcttgtgtctatgactgatgatgtgcacagggcgcaaagttcattcggaaaactgacgcaatgtaaacatcaggtaacgcaggttgttgtt

SEQ ID NO: 133232 - DNA, 1599 bp, Zea Mays
accccagaggcccagacaaaggcatctccaatctcctcgccccccacggacctgaaccgagaaccgttaccgccgccggagaagcgccgctcgctcaggaggacagccatggcgccggagccggaggatgatattatgaacgagaagaatccccgcccgctcgacgaggatgacatcgcgctcctcaaaacctatggactggggccgtattcgactagcattaagaaggtcgagaaggagatcaaggaaatggccaagaaaatcaacgacctctgtgggataaaggagtctgatacagggctggctccacctagccagtgggatttggtttcagataagcagatgatgcaagaagaacaaccgttacaagtagcaagatgtacaaagattataagccctaatacggatgatgccaaatatgttataaatgtaaaacaaattgcaaagtgttgatcgcaacaagtaccagattcaaatccctctcccaccaaaaattgacccaagtgttaccatgatgactgtggaggaaaagccagatgtgacgtacaatgatgtcggtggctgcaaggagcagattgagaagatgcgtgaagttgttgaacttcctatgcttcacccagaaaagtttgtcaagcttggtattgaccctccgaaaggtgtcctttgctatggcccacctggtactggcaagacacttcttgcaagagctgtagcaaaccggactgatgcttgtttcatccgtgtaattggaagtgagctagttcagaagtatgttggagaaggtgctcggatggtcagggaactgttccagatggcccgctcaaagaaggcatgcattgtattctttgatgaagttgatgcaattggtggtgctcgttttgatgatggggttggtggtgacaatgaggtgcagcgtacaatgttggaaatagtaaaccaacttgatgggtttgatgcaagagggaacatcaaagttctcatggccactaataggcctgataccttggatcctgcacttctgcgccctggtcgcttggacagaaaggtggaattcgggctacctgacttggagggccgtacccaaattttcaagatccatacacgtaccatgaactgtgagcgagatattcgtttcgagcttctggcacggctctgccccaactctactggagctgatataaggagcgtttgcacagaagccgggatgtacgccattcgcgcccgcaggaaaacggtgacagaaaaggattttctcgatgctgtcaacaaggtcatcaagggctaccagaagttcagtgcaacacccaagtatatggtgtacaactagtcggcgtgtcttcatgggatctgttgtttctagaaactctggatctttttcatggttgtatcatcatgagattctctatgcaaaggttgttgtttgtttagcaaattggatgccgagtgatttgtgacctgtaccgcatgtttttaagataacaaggttcttcgctcggtggttcactgctgcttgtgtctatgactgatgatgtgcacagggcgcaaagttcattcggaaaactgacgcaatgtaaacatcaggtaacgcaggttgttgtt

SEQ ID NO: 133233 - DNA, 1492 bp, Zea Mays
caataaatgcagtcgatgggctttcgataagaagaattacccacgagctgaccgagcttggatctaagccaactgcagtgaaatactcgcatgttgcggtaataaaaaacgctagtatgtatggacaggacagctcaaggcatcgattctcgcactagcattatacaaaaatagaagcgcggtttactccccggcggactcgtgtagttctcagtgtttagaacactgaacacacttggatgtacgtagatctaccaggctgcaaggcaaagcacagagtgctcctcctatttaagtgagcttaattaactgagctcatcaagtcagcagcaggcagcagccagcagcagctaatcagccttgagaagcagaaagcttagctcgagtgctaggctgctagctaactaactacgacacgacgagcggcggccggcctgcgggggaagcaggatcgatgaagcctccgtcttctcctggatgcacctcgctcttcctcctcccttgcatcctcctggctgcagtcatgtacctggtcctcttccccgacaacttcaggctcccggccgggatgttcgggtcctctacgtcgtcgtcatgcaactacaacaacggcgcgtcggcggtcggccgtctcgccgccggaggctctcctcctacggatgaggcggtggacctgcggctgctgatgggcatcgtgaccaccccaagcacgtacgagcggcgcgcgctcctgcggctggcctactccctgcagccgcggcccgtgcgcgcggtggtggacgtgcgcttcgtcatgtgccgcatcgagcgggaggaggaccgcatcctggtggcgctggagatcatcgcgcacggcgacgtggtggtgctcaactgcacggagaacatgaacgacggcaagacgtacgcctacttctcggccgtgccggggctgttcgccggcgacggggagcggtacgactacgtgggcaagaccgacgacgacacctactaccgggtggcggcgctggcggagtcgctgcgcgggaaggcgcggcgggacgcgtaccagggctacctgacgccctgccactggctgcccgagaagcagtacatgtccgggatggggtacgttgtgtcgtgggacgtggcggagtggatcgccgccacgccggagctccgggacgaccacaacgactgggaggacgtcaacttcggagggtggctgcgcaagggcgggaggtacaagaacgtgtacaacgaggagccgaggatgtacgactactgggacagggagatggccaccgacgtcaactgcttccggcatgagcacatcgccgacaccgtggccgtgcacaagctcaaggaccgcctcaagtgggcgcgcacactccacttcttcaacgccacgcaggggctcaagccgtctaagctctatcacgtcgacttgcaaaacgtctaccacgtctagtcggtagtatatctctacaactattaagagtcatctgtagac

SEQ ID NO: 133234 - DNA, 237 bp, Zea Mays
cagaactttggtcgtgtcatgatggcccttgcagtggatgtttctcgttttgaaggagtgccaatggctcctccagacccaattcttggggtttccgaggcctttaaagcagataaaagcgagctgaagctcaatcttggtgttggtgcctataggacagaagagctgcagccctacgtgctcaatgtagtcaagaaggctaaaaatcttatgctggagaaaggaggaaacaaagag

SEQ ID NO: 133235 - DNA, 89 bp, Zea Mays
ttatataaggcgtaaccctcttagcgacgcgccatatcggaacccgggtatggtgttaaatgagcaagggccgggtcgtcacccctcaa

SEQ ID NO: 133236 - DNA, 827 bp, Zea Mays
ttcaccatggagtgcacctcaagccgccgccgccgtagccggctctcgcgctgcctcctcctggtgtgcgcagtggcatccctgctgtgccactcccccggcccggcggcggcggcggccgcgccccgccggctgctgcagacgtgcccggggcaggacttcgacgtgccccacgcgcacctgcgcgcgcgggacaacgtgaagccgctcaagtacacggaggagctctccgcgcgggccgcgcagtgggcgcagcagtacaggagcgactgcgaggccgccgcgcccgcgccgggaatcaacgtgttcctcggcgccgcgggcgccacctggctgcccagcgacgccgtcgccgcgtgggccgaggaggagcagcactacgactacggctccaactcctgctccaccggcaaggcgtgcggccgctacacgcagatggtgtggcggggcagcaaggagttcggctgcgccgtcgtcgactgcgactccgggaagacgctcatggcgtgcctctacgagccgcagggcaacgtcgcgggacagaggcccttctgatgatcgccgcctaccatgcaaaccatcagtagtagcgcgtgtccatggcggcagtataccaccggccgttcctagctaatcttggtgttttcttcgccttggtcttgcatttcttttctcatactacgttcctacagtagctcattggttgttgggaggtcgtcagttactagatatacatgcatgatatacatactgtatgtctgtatgccatgagagcgacgagcatataggtttgtcctcgtttgttttgttcatggcaccaccttatc

SEQ ID NO: 133237 - DNA, 124 bp, Zea Mays
ttttttttgtcttttcgtattttacagaattcacatgtttttttgttgttcttttgagttggaaagaaaaatactacatacacactgcacagttactacttactaccgaccatgctactaccac

SEQ ID NO: 133238 - DNA, 1450 bp, Zea Mays
atgtacgagcaggccggggagctccagatcctgctggagtacatggaccaggggtcgctcgagagccaccgcatcgccgacgagcgcttcctggcgcacgtggcgcgccaggtgctgtcgggcatcgcctacctccaccgccgccacatcgtgcaccgcgacatcaagccctccaacctgctcatcgactccgggcgccgcgtcaagatcgccgacttcggcgtgggccgcatcctgaaccagaccatggacccctgcaactcctccgtgggcaccatcgcctacatgagccccgagcgcatcaacaccgacctcaacgacggcgcctacgacggctacgccggcgacatctggagcttcggcctcagcatcctcgagttctacctgggccgcttcccgctcggcgagaacctggggaagcagggcgactgggccgcgctcatgttcgccatctgctactccgactcgccgcaggcgccgtgcaacgcctcgccggacttcaagaacttcatcagcctctgcctacagaagaacccggtgaaccgtccgtccgcgatgcggctgctgcagcacccgttcgtggcccagccgcagccgcagcccctggccgccccgccgtcatgatggctcgccgaaatccacaattcatgaccgatttgattgattgattgcttcccgtcgtggtacaactgaaggcggcgggcggattgatctctcaccttgtcgcctgacctttggggtggatggatggttggttgcatgattggttgtggatggccatgagatgcggtacctagagacgttcctcctaatcctagctaggcatgcaagtggctcaggacaagccgctaacccgcagggctgaccgcacctcgccgcaacgacccgcatccgcataccccgacggcgtactggagctcggaaaggcgcgcacatggcgttccgcggattatggcgccgccttgtatttccctgtccgatcgttgaagcagcagcagagggatcgagttgatgcagagcagcagaagacgagagccacgccgccgccgcagaagtgtcatcgtcggcgccgtttgtctccaactccttgcaggaaaggaagaggaatgcggaggcataggtcacggtcggtcggtgccatggccgaggcggggatgaagcgcagcttgattggtgtcccatgttccatgtgcaaccacctgatagcacgcggcacttgcatccacattgctagcccattatgggaattggtaattgaggcctcctccacagcaatcatcaccgcatcatcatccatcgttgctgaatgctgctgtcgtctcagcacttctttttctcccccctttcatcctttcaatgttcatgttcttccaagtcatcatataaactgggttgttagttaaaaccattgcgtttcatcgttctgcaatactacatgccagtcactctc

SEQ ID NO: 133239 - DNA, 168 bp, Zea Mays
atgtgcactgctcttggaatacattctaagagttttgaaaagccttttcttgagtgcatttctgaatttgatggtacagaaggtgttaaatatatacaacaatctgatattctagactacctaaagcatgtagaatcaaggttgcaagaacatgaaaggtgtacgtga

SEQ ID NO: 133240 - DNA, 1983 bp, Zea Mays
caagcagcaggtcccgagcggtggcggcggcgaccacgtgcgcggcggcgatggtgaggactgaggagctatcccgtatagaggggctgtgcctgtgcgcgaagtgagccacatagcggcggcgagcacgttcgaagcccacgaaaaatggcctcccgcctcttaaccagatcagcggcgtcgcgcctcgtttcccacctccaccgcaagacgccaggcattactccctgcctcctcacccgtggccctgccttggcgtccctcttggggcccactgatggcctcccccacgccgctgactccactctgctccgcgttccgatgcggtggctctcctctccgtcctcggaggcggtggcggaggctccgatgaccgcggacggcctgactgtagactcaatcgccgacaaggggtggacgattcttcccgaagccgagagcgactggcgcagccatgccgcggccgtcgcacagtcagtcaaggtcatcaaaaagcgcctcaagtggggatggatacttgagagaacgaagcaattggctgtggtgttggagaagccagacctctgggaagacccagtttttgctgggagggttagccgtgagcagggtgagctcatgggcaagattaagtcagtgaaccaatttgagcaggaattgattgaacacattgagatgctacggcttgcacgtgaagaaaacgataatgaacttgagatggaaagcatgaaggctttagctgatatgagaagaagtgcaaaggagaaagaacttaatgcgttactttctggagacaatgactcttgttcttgcttcattgaggttcaggcaggggctggcggcactgagagcatggactgggctgcaatggtcatgaacatgtataggtcatgggcccagcgacgaggatataaaatcactgtggtagaagagatgtctggtgaagtagcaggaatcaagagggccactatcaaagttgatggtgaatatgcatttggatatgccaaagctgaagtaggagttcatagattagtgcgaatttctccatttgacagtggaaagcggcggcacacttcctttgcggctgttgctgtaatacctattcttggggataccactagccggtaccagatcaaagattctgatcttaggatagaacgtttccgatctggtggccctggtggtcagcatgccaacactacagagagtgccattcgaattgtgcacattccgactggtataagtgcaacatctcaaaatgaaagatcacagcacatgaacaaggcatcagcaatggcagtgctccaatctcgtcttgatcagcttgagattgcccgccaggcacagatgaatgcagagcacacacaatcactcaacgaaatcagctggggcaaccaaataagatcttatgttctccatccataccgtatggtcaaagatctccggacgaactatgaagtatctgacccggattcagttctagaaggagatctagacgatttcatcttgaactatttgtcttcgtcactggatgaagctgatgtaagtacctgaacaaagaaccatgctcgccatttttcatgagctacctgccaaatcacttggctttgaaacaaaccaactgagacactgctgaagcgctagcagctggaggtgctgctccagtcttttctttggtagccaatacaagtcgaggtcaaatgatgagaatttaaggtacgggatagtagtaggttgcaagtgcaaaaaccagagttagttgcacaggatagagtttatagtgtaacagacctggcaatattgtgaaaaatatttgcctgatattggagacggggttactttttctgtactgcatttgccgtttgtgatcgacgtataaacagtcatccctaattatctagtcaatctagctcctcttttttactgtagtgacagtgttgcacccaggaaagctgaggtggtctacaataattgaccattttctcc

SEQ ID NO: 133241 - DNA, 492 bp, Zea Mays
gtcgccgactcaccgccgacgtcgacgaactccttgaacccattcttcaccggcacggcgacgcgaagcttatgtccgttcggcgacacgacccagcctctcggggcggacgtggaatcacctggccaaaagattgtcctcctcatccccttggcgccgtccgcccccagagtctgcgtgatcccatcatccggcgtccagaagcccaccgctctcgagcttttcccgacgacgttgacgaactcgtacgccggcggctgcagctgcccgtcgagaagggtgaagttaccggcgaggccgcggaaggtggtctcgcgcaccgccttgaggagcgtcgctccggttgccgacacgcctagccggtccaggtccgtggccgccgtgctctgctgccgtgtctggaacgccgggctggagacaccggcagcctcggccgccgccgcgatcgcccacgccgtgtcgtatgtccagagcatgaccacagtcgggtca

SEQ ID NO: 133242 - DNA, 2082 bp, Zea Mays
aataaagtccacagccatttcattttcttctttccccaattcccgtccatcagctcgcagtcgcaccagcgaccagagcagcagaccaagcaagcgcgagggagagaagagacgaagaagaaaagaaaagccggagctctgccgagcttagtccgcggaggcggcgaccggcgacgcgtaaccatggagcgggcggaggaggcgcagcccgccgccgagcggagggcgccctcgacggcgccgtcggcgcgggtgtcgatctgggagtcggtacgcgcgtgcggggtgtgggggaaggagctggacaaggccgagctgcggaggcaggtcgtcatgccacgctacctgcgccgggccgtcgcggccgccgtcaaggccaaggacgaggccgccggcgtggcggtggcggcggcggccgcggaggaccgcgcgggggaggacgccgacggcccggcggtggcgcccgtggtggtgttcgtcaactcgcgcagcggcgggcgccacgggcccgagctcaaggtgcggctgcacgagctcatcaccgaggagcaggtctttgatctttccgttgtgaagccttcagattttgttcaccatggtttgagttgtttggagaggttagctgaccaaggcgataaccgtgcgaaggctgttcgtgagaaaatgaggattgtggttgctgggggtgatggtacagttggttgggtgcttggatgtctctcagatctttataagatgaaaagggaaccggttccacctacaggaatcattccacttggtacaggaaatgatcttgctagatcgtttggatggggtggctcttttccctttggttggcgctcagctgtaaagcgttatctcagcaaagcttccagatctcccatttgccgtcttgacagctggcaaactgtaattcagatgccagaaggagaaatagaagagttgccatatgcacttaagaaagtagaacctgtagaccggttggagatcagccaggagaacggtacagagttatccgaaaaggcttctttctataaaggagtattctacaactaccttagcattgggatggatgctcaggttgcatatggcttccatcatcttcgtgatgaaaagccatatcttgcacaaggaccagttgcaaataagttgatttatgctggatatagctgcactcaggggtggttttgtacaccttgcacagcgagtccacagctaagggggcttaagaacattttgcgactttccattaaaaaggccaattgttcagagtgggagcaagtgaaaatgccttcaagcgttagatccctagttgtgttaaatttatacaattatggcagtggaaggcatccatggggtgatctaagacctgagtatctcgaaaagaaaggctttgttgaagcccattcagatgatggcttgcttgaaatatttggtctgaaggaaggttggcatgcttcatttgtcatggccgagcttatcaaagcaaagcacattgcccaggctgcggctatcaagttcgaaatgaggggtggcgagtggaaccgagcatatgttcagatggacggagagccgtggaaacaaccgctgctacaggagcactcaaccatcgtggaaataaacaaagttccgtatcattctctcatgataaacggggagtaatgagatttttactccgtcaaccagattgtaccagggttgcattcatagatcgttaggatcgtgtacagttcaggagcagcgggcactagatccttagaactgggtcggacggactgcagcgaggatggcatgcatgttcgttggccttttgtcgtgctatggtcgaagccatggccggagcgtgatgtggcaccatgcattgttgtattcgtaccataatatgtgcgttgttgtatcctaagttctttttgaaggaaacatgattgatttgtttgtattgtaacgttgtgtcattgcaaaagaataacctggtgtaaaactgtaaaatgtgacagtctgccgtttgcacagccctgtagcattttttttttgttcttgttaactttttttttatgaaagcattaactgatttgacttgtc

SEQ ID NO: 133243 - DNA, 2235 bp, Zea Mays
gccgacggacgcggctgccggcctggcgctggcgagagccgcaggaaagagaagagaaagaaagagcgcaggcaggctgcgggcatcggcagtcggcaccagtcaaagccaccgttttgattccccttccgttagtaaaacctctgcctcgccgacgcccaccaataaagtccacagccatttcattttcttctttccccaattcccgtccatcagctcgcagtcgcaccagcgaccagagcagcagaccaagcaagcgcgagggagagaagagacgaagaagaaaagaaaagccggagctctgccgagcttagtccgcggaggcggcgaccggcgacgcgtaaccatggagcgggcggaggaggcgcagcccgccgccgagcggagggcgccctcgacggcgccgtcggcgcgggtgtcgatctgggagtcggtacgcgcgtgcggggtgtgggggaaggagctggacaaggccgagctgcggaggcaggtcgtcatgccacgctacctgcgccgggccgtcgcggccgccgtcaaggccaaggacgaggccgccggcgtggcggtggcggcggcggccgcggaggaccgcgcgggggaggacgccgacggcccggcggtggcgcccgtggtggtgttcgtcaactcgcgcagcggcgggcgccacgggcccgagctcaaggtgcggctgcacgagctcatcaccgaggagcaggtctttgatctttccgttgtgaagccttcagattttgttcaccatggtttgagttgtttggagaggttagctgaccaaggcgataaccgtgcgaaggctgttcgtgagaaaatgaggattgtggttgctgggggtgatggtacagttggttgggtgcttggatgtctctcagatctttataagatgaaaagggaaccggttccacctacaggaatcattccacttggtacaggaaatgatcttgctagatcgtttggatggggtggctcttttccctttggttggcgctcagctgtaaagcgttatctcagcaaagcttccagatctcccatttgccgtcttgacagctggcaaactgtaattcagatgccagaaggagaaatagaagagttgccatatgcacttaagaaagtagaacctgtagaccggttggagatcagccaggagaacggtacagagttatccgaaaaggcttctttctataaaggagtattctacaactaccttagcattgggatggatgctcaggttgcatatggcttccatcatcttcgtgatgaaaagccatatcttgcacaaggaccagttgcaaataagttgatttatgctggatatagctgcactcaggggtggttttgtacaccttgcacagcgagtccacagctaagggggcttaagaacattttgcgactttccattaaaaaggccaattgttcagagtgggagcaagtgaaaatgccttcaagcgttagatccctagttgtgttaaatttatacaattatggcagtggaaggcatccatggggtgatctaagacctgagtatctcgaaaagaaaggctttgttgaagcccattcagatgatggcttgcttgaaatatttggtctgaaggaaggttggcatgcttcatttgtcatggccgagcttatcaaagcaaagcacattgcccaggctgcggctatcaagttcgaaatgaggggtggcgagtggaaccgagcatatgttcagatggacggagagccgtggaaacaaccgctgctacaggagcactcaaccatcgtggaaataaacaaagttccgtatcattctctcatgataaacggggagtaatgagatttttactccgtcaaccagggttgcattcatagatcgttaggatcgtgtacagttcaggagcagcgggcactagatccttagaactgggtcggacggactgcagcgaggatggcatgcatgttcgttggccttttgtcgtgctatggtcgaagccatggccggagcgtgatgtggcaccatgcattgttgtattcgtaccataatatgtgcgttgttgtatcctaagttctttttgaaggaaacatgattgatttgtttgtattgtaacgttgtgtcattgcaaaagaataacctggtgtaaaactgtaaaatgtgacagtctgccgtttgcacagccctgtagcattttttttttgttcttgttaactttttttttatgaaagcattaactgatttgacttgtc

SEQ ID NO: 133244 - DNA, 934 bp, Zea Mays
gagaaaccttacccgtcctgtccaccactctcatagcaaagaccaagaccatatccttccacttgctatggcggcggcggcggcgacggcgaccacgacctctccggcgagggcttcgtggcggcctacggttcccgcgacctcggcatcggcagcaggagtctgcttccgtgttggagcgaagcgcttcagtccagggctccgaacggcaagcacctgtcggcaccgacaccgaggcagaacaaggctcacaacagctcacgtcaagagcggggaagccgaggggcgtccaagcacggaggagagcgcaactggcatcggcggcccggacgaggactccttgcggcgcgagctcgaaaccgcgatcgaggaggaggactacgcgcgcgccgcggcgctccgggacgagctgcgcgtgctccaggaggactgccgggccgcggtgctggcggcgaacgcgcggttctacgccgcgttcaaggacggcgacctggcggcgatgcgccgggcctgggccaggggcgaccacgtctacgtggtgcacccgtcggcggggaggatctccgggtacgagatggtgatgcagagctgggagatggtgtgcgacgccggctacgagttcccgctgcaggtggacctgcaggacgtggaggtgcgcgtgcggggcggcgtcggctacgtcacctgcctggagatggtcaggaccaaggggagcagcagctggggcaagcagctggccaccaatgtgttcgaggaggtggacggcgagtggctcatgtgcgtccaccatgcctcgcacttcgatgagtgaaatcgctttgcaattcgatcgatcgatgagcggaaataattttggtcggccgtcagtacagaaacatatggattcagatttcggaaatgtgatctctctctctctcacacacacacacacaca

SEQ ID NO: 133245 - DNA, 3380 bp, Zea Mays
agccgcccgtcgataactaaccgcgcagcggcggacgacgagagcacaggcatgagagcctacgcggcgaccccggccgccgtggccacgctgccgtcggccgcgccgccgctcacacccgacgccgctgccgtgctgtcccgcgccgcggccgacgcgtccaggcgccgccacgcgcacaccacgccgctccacgcggcggccgcgctgctgtccggccccgcgccgctgctccgtgacgcctgcgtcgcgggcctcgcgtccccgcacccgctccgctgccgcgctctcgacctctgcttctccgtcgccctcgaccgcctccccacgtccacggagctccagcaccacgaaggcggcgccttccaccacgcatccgccgcgcctccgctctccaacgcgctcgccgcggcgctcaagcgcgcctacgcgcaccaccgccgcatcgggagcggcggcgtcgagaccgacgaccaccgcgtcggggtgccgcacctcgtgctcgccatcctcgacgacccgtccgtggcgcgcgtcatgcgcgaggcgtccttctcaagcacggccgtcaaggccgccatgctcaggtccctctccgacccggcggcacccgacgccgccgcgtacgtcagcgccagggtcatgcaccggcaggcctcccaccgggaggaggaggtggccaaggtggtggaagtgctgaagagggccaagaagcgcaacccggtgctggtcggcgacacggtggacgtggacgccgtggtgcaagaggtggtcacgctgatacagaggcagcggctcggcaacgcgcgcgtcatctccttccccaaggagttcggcgacctggtcgacatggacagggcgcggctcaccgccaaggtcaaggagctcggcgaagcggtgagatccgcatcggccagcgccggcgtcgtggtcaacctcggcaacctgcagtggctcgtcgaggaaagatgcgcggctcctcggggcgagcaacaacaagagaagaggagggacgtggtgctcgacacggcgcgagccgccgtggccgagatggcgcgcgttctgaacctgtccggcgaaggggagcaccgcgtgtgggtgatcggcacggctacgtgtgcaacgtacctgaaatgccaggtgtatcacccggcgctggagagcgagtgggacctccaggccgtgcccatcacgcccaggcctccaccgccgccgccgccgccgcttgggctctcgccgagtgctggagttaacaggggcatcctgagtagctctgtggaggtgctgtcaacggcgatgacgtccccaatgcaacgggcaccgagcctttgcagcgcttgcgcagagggctacgagcgcgagcgcgccgagatggcttcatccgagcgtgctccctgtccggccgagcagccgatgtcgcagtggctgcagatcggcacgccgagcagcggacgcccggccgaccgcgcgcaggagaaggcgcgggaggctgacgagctgcgacgccggtggcgcgaccggtgcgcgcagctgcactcgcatggccggccgccgctggtcacttgctcagagtggaacggggccagcattcttgccagcatgcaggcggcgccgccggtggtaccggtacggccattggtgcagcgtagggttgccgtggacacggatctcgcgcttgggctggcggcggccaggccggcgtgtgaaacggacgacaagctgctcgtgagacggctcacggaagcggtgagatggcagcccgaggctgctgccgctgtggccagtacgatcgcgaaggccaggtccagcgaatccaggcggcgccgcactacggccggtgtcgacgcgtggatcgtctttgctgggcctgacgtggccgggaagaggagcatggccgaggcgctgtccaagtccgtgttcggcacgggggccgtcaccctgcgcctcggctggccccaagccggcgatgacggcggcgagtccgtcgtgtcgtgccgcggccagacggcgctggaccgcatggcggaggcgatacgggcgaacccgttccgcgtcgtcgtgctggacggcgtcgaccacgcggacagcgtcgtccacgcctccatcctacgcgcggtcgagtcgggccggctctcggactcgcacggccgcgacgtcgccctcggcaacaacatattcgtcgtgatttcgcaatggtcgccgccgttgccagagccggagcacctgaggaagtcgcaagaagccgaaccctttcttcctgactcgcaatggaacctggagcacgggatgaccgccggcgggaagaagcgcaggccggagcagcagctcgaaggagaccggcgcacaaaggcgcgcaaacactcggcacgggagccgcttcccctggacttgaacctgtccatgtccgatgaccataccgacgccgtagacgacagcggcggcgagggatcacggaactcgtccagtgacctgaccgtggagcacgagcaggagtacgtgcagcccgctcactccggcagatgctcggcggcgccactgaccgtgtccgaactcatcaaagctgtggacggagtggtcgtgttcaagccaccggtgagcttggagccactgaagcggagcgtctccgacttggtggtgccggcggcgaagttgggggaaatcacggtcggcgggtggcctgttcacgtcgacgacggcttgctgggcaggctagccgcccgggcagctggagcggcggcggcgggcacgcccatggaggcgtggacgaccggcgaggtgctgtgccctagcagcatgcggcagttcaaacgtagcttgagcagcaacgacgttgacggggcgacggtggaaggcagccgccggagaaaggacggcgagatgttcccgatgccggtgacggtcgacggcaactgattatgaagctgcgcacactccgacgacggcttccatctttattcgctggtcatcaagatatgatcaagcacggtgtacattagtacattcatgtaaattttccagcaatcggtttttttgttttcggtcggagaggagtaacgatcataaaactaaactagctagagacaggacaagggactaggcaggcactagtagtagctagctcctttcccccattttgcctttattacgtgctatttcacggagacgggagatcatgacgaattcttcggttgcttggcggcaatctaccatgattcacttgtgccgcctgcatgcacgcagctcaacatggaattaagcaggtgatcctaccaaggatcgaacattactacatttccaagaatgatgctggccatgcgtactaccgtgttacacacacagcatggccagtaattgacactaatcattatttaatcataaag

SEQ ID NO: 133246 - DNA, 2235 bp, Zea Mays
cgagtagcagagtctggccgccttgtcgcgacgcgacgcgcgatcccatcccttcccatccagcgcggctccaatcctgtcgcggccattaaaagcttccctcccctgcctctctgctccgctcgtctcttctggaaccgtccctcgctcgtcatctttccgccttcgctacgcaattcctgtccacgctgcgggccagttgtgacgaccgcgaagctcgtcagagaaagaagagaggccggcaggcgggcggcgatcggagatggcgccagagaagccccggaaggagcaggaggaggaggaggatgagttgatgctggaggatggaggcatcgaggagagcccgcgccgcagcttcgaggactgcggtgattccgacgaggaggacgatgacaacgatgaggagcgggacggcgacggcgtcggttcgccgcgctccttccagtcccacaagtggccgcagagctacagggaaacaactgatacttacacaatcgctgcatcaccgagctttggttacttgggcccttctacaagcaaatactcactcctcgatcttggtcgtagcggtctgggttctgacctgaagttgcctctattgtcggacaaggctgacggaaagcaagattctgtcaaaaccctgccgaaaacccttggttcaataagagatgagagggtctcatttcaattgcaacacacgggagaactctacattactcaagggtgcaatgtgacgcaaacagtcttcaatgggattaatgtacttgcaggcgttggccttctttccaccccgtttacaattcatgaagctggatggactggccttgcagttctagtatgttttgcgattgtttgctgttatactgggattcttctgaaacattgttttgagagcaaagatggtatctcaagttatccagacatcggagaggctgcatttggaagaattggccgtctgttgatatctattattttatataccgagctatatacatattgtgtggaattcattattttggagggtgataacctcacaacaatttttcctaaagctggaattgattggtttggcattcatgttgatgggaagcattttttcggagtgttaactgctattttagtgttgccaacagtatggctgcgagatcttcgagtgctctcttacctttcagcgggtggtgtgattgcaactcttctcgtattcctgtccgttggtttagtcggtgctaccgatggtataggcttccattcaactgggaaggtagtaaactggagtggcatgccctttgccattggtatttatggattttgctactctgggcattcagtatttccaaatatctaccagtcaatgtccgatcgctctaagttccctaaggcactgttcatatgttttgcaatttgtacagctatgtatggatcttttgctgtcattggctttctcatgtttggagagaacacattatcccaaatcactttaaaccttccaaagcattcgattgcctcaaaagttgcactatggaccacggtgatcaaccctttcaccaaatatgccttgctgttaaacccactagctcgaagtttagaagagttgcgtcctgaaggttttttgaacgaaacatcatgctctattatactgaggactgcccttgttgcgtcaactgtatgcattgcctttcttctgccgttctttggtcttgtgatggctctcattggatctcttcttagtatacttgtggcggtcataatgccagccctgtgcttcctgaagatcgcacaaaacaaagcaacctgtccacaggtgatcgcgagcgtcggtatcgtaatactgggcgtcgtcagcgccgcgctggggacctactcgtccgtgaaaaagatcgcagaaaactactaggctcttgggacagtttctctccgcagaggctactaccacacggttccacgtacgtccggccggagctggggaatggtcagggtttacgtacacgatctcaaagttttgctagaactaccgaaattccctgtagattattactgttatgattcggaccacaatagtctacttatacaaacaaaaaaaaagaactgcatcatcacgtcacttggaataatgtaatcatgccctcctttttttagccgaggtccctaccatctcgctgtactgtagcaggttgctgtgctggcgactgttccctatacaataaggctctgctttgtgcaattgccaattgaggt

SEQ ID NO: 133247 - DNA, 961 bp, Zea Mays
gatcgaccatgaccggcgaagtcaaatgcacagaatctctaattctctcaactcaaaaccctaacatccgtccccactccccaatcaacctgccgccgcccgccagcaccaaacttccatccgccccgagctctgcctccgccgccgccgcgccatgaggcctctcgacgagaaggagacgactcaggtattcgagaagctgttcaagttcacggggcccaacctgaagcacctcctggagcgccccgcagtggagggccccgacgcggagcccggccgctactgcctccggcttcaccgcaatcgcgtctactacgcctccgaggcgctcgtgcgccgcgccaccgccgtgtcccgaccgcgcctcgccggcgtggggacgcccatcggcaagttcacccaccacggcgcgttccaccttacggtccacgcgctcgacctcctcgctgcacacgcgcgccgccgcgtctggctcaaacccgacaccgagcgttcctttctctttggcaattccgtgcccaagtcttctctcgctcgcatcaccgagaacaccaaggccggggacggggtggtcgtcatgtccatggctgacgtccctctcgggttcggcattgcggcgaggtcggcgcaggattgcaggaaggccgacaccaacgccgtcgtcgtgctgcaccagtcggacgccggggagtacctccgcaaggaggaggagctcatgtgaggtgagcgcataggcttggctggttaggtcatattcatgagtgaattatggaagattgtgccttactgttgtgtgttccaaggcttggggcatatatatatgtactgaatgattaatcactggttatgagatgcgattatcgctgttgccagatttgacctttagcagctggaggaacaggattgttcttgaatggttttgttcgtcattttgttgggttcatctgaatagcttgatctt

SEQ ID NO: 133248 - DNA, 106 bp, Zea Mays
ggtgtcttctatacggcgtgcgttctcggctacttctcttaggttgtggctactggctagctataggacggagtgccgtttgaaatagaagacggtgcgtcacatc

SEQ ID NO: 133249 - DNA, 1774 bp, Zea Mays
atctcgcctgacacacaagcagccccatatatggcccggtctcctacccagacaacccgtccgtctctcgttctctccttcctatcggctccacacctccacgcaactggaagcttcgctgcaatctgccctactcctcttccgccgcctccaacaccgcagacgcagctgccgcgggcgggagcttggacgtgctacgctgctctcatctcgtttccgcgcaggaattgttctcaatggcccgcgtgtatgttggcaacttggattcacgggtgacttctggggaactcgaagatgagttccgcgtgtttggagttctgcgaagtgtttggattgcacgtaaaccacctggctttgcatttattgattttgacgacaggagggatgcggaggatgctattcgtgatctagatggtaagaatggatggagagttgaactatctcgtaattccagtggtcgtggtggtcgtgatcggtatggtggatctgagtcgaagtgctatgaatgtggtgagactgggcactttgcacgtgaatgtcgtctgcgcattggctctggaggtctaggcagtggaagacgtcgcagtcgcagccgcagtcgcagtcgcagtcgcagcaggagcaggagcagaagccgcagccctagataccgcaggagtccaagctatagtagaaggagctatagccctcgttatcgctctccaaggcgccgtagtccttcgccagctcgcgcgcgcagctatagcaggtcaccatagtacaactgcaacgatgctgttatgcacaggtaatggtggcaggtactggtgtagcaggagctaggcctgaagcccgtgcctgatacttcttggtgtgagaacttagtccttggtttggctgtcaggaacaaatttggaactgtcgtcaactgcatgacttcagttcaggtttaaaaccttatctagcttaattgtgattgccttgattatgccattatagaacttaatatttggatgtattatgcgactaagacatattacctttcttctctgttgaaaaggcatgttctgcttaaacgactcggccaactacggctctcagttagtcttcatggttttgttcctccattcttggcacgtccttatctgcaaacaaatgtcaacgttccattactagctgccttcgatgtttcatcatgaaattcttcaccgaagatgctacttcatcacaaattagtaacatcctttcccctcatatagttgataaggtttgagtgtactgagcactaacaaatgcagctcgcgaaagtaagaccgtttttcgtcatagaacaagacagctattttaattgcagcactcgtgtgaaaatagatctactctgcatggtggggattggggcgattgaagtgtggccttcagctgcacctagttgggcatcccaggaacctagtcaggctcactacagcaagaggcgcatcctttgactaaacatgttggttttatttcttgtggtttgattcttcacttctgttcattgtgttctgccttcactgcaccctattggtagtggtcgaacaatgcttctgtctgtggtaagttattcttggtacaatggctcttctttaccccctgatcagtgtatgttggactttctgatagagttagcaccaattgtagtataaatatgttctttttttctctggaaggtaattgtaattctatctgaatactcagatttgaggtataatctgctcttgtcaaatgattttttaaagatcattctagtttcacctgt

SEQ ID NO: 133250 - DNA, 1764 bp, Zea Mays
atctcgcctgacacacaagcagccccatatatggcccggtctcctacccagacaacccgtccgtctctcgttctctccttcctatcggctccacacctccacgcaactggaagcttcgctgcaatctgccctactcctcttccgccgcctccaacaccgcagacgcagctgccgcgggcgggagcttggacgtgctacgctgctctcatctcgtttccgcgcagttcaggaattgttctcaatggcccgcgtgtatgttggcaacttggattcacgggtgacttctggggaactcgaagatgagttccgcgtgtttggagttctgcgaagtgtttggattgcacgtaaaccacctggctttgcatttattgattttgacgacaggagggatgcggaggatgctattcgtgatctagatggtaagaatggatggagagttgaactatctcgtaattccagtggtcgtggtggtcgtgatcggtatggtggatctgagtcgaagtgctatgaatgtggtgagactgggcactttgcacgtgaatgtcgtctgcgcattggctctggaggtctaggcagtggaagacgtcgcagtcgcagccgcagtcgcagtcgcagtcgcagcaggagcaggagcagaagccgcagccctagataccgcaggagtccaagctatagtagaaggagctatagccctcgttatcgctctccaaggcgccgtagtccttcgccagctcgcgcgcgcagctatagcaggtcaccatagtacaactgcaacgagtaatggtggcaggtactggtgtagcaggagctaggcctgaagcccgtgcctgatacttcttggtgtgagaacttagtccttggtttggctgtcaggaacaaatttggaactgtcgtcaactgcatgacttcagttcaggtttaaaaccttatctagcttaattgtgattgccttgattatgccattatagaacttaatatttggatgtattatgcgactaagacatattacctttcttctctgttgaaaaggcatgttctgcttaaacgactcggccaactacggctctcagttagtcttcatggttttgttcctccattcttggcacgtccttatctgcaaacaaatgtcaacgttccattactagctgccttcgatgtttcatcatgaaattcttcaccgaagatgctacttcatcacaaattagtaacatcctttcccctcatatagttgataaggtttgagtgtactgagcactaacaaatgcagctcgcgaaagtaagaccgtttttcgtcatagaacaagacagctattttaattgcagcactcgtgtgaaaatagatctactctgcatggtggggattggggcgattgaagtgtggccttcagctgcacctagttgggcatcccaggaacctagtcaggctcactacagcaagaggcgcatcctttgactaaacatgttggttttatttcttgtggtttgattcttcacttctgttcattgtgttctgccttcactgcaccctattggtagtggtcgaacaatgcttctgtctgtggtaagttattcttggtacaatggctcttctttaccccctgatcagtgtatgttggactttctgatagagttagcaccaattgtagtataaatatgttctttttttctctggaaggtaattgtaattctatctgaatactcagatttgaggtataatctgctcttgtcaaatgattttttaaagatcattctagtttcacctgt

SEQ ID NO: 133251 - DNA, 1660 bp, Zea Mays
atctcgcctgacacacaagcagccccatatatggcccggtctcctacccagacaacccgtccgtctctcgttctctccttcctatcggctccacacctccacgcaactggaagcttcgctgcaatctgccctactcctcttccgccgcctccaacaccgcagacgcagctgccgcgggcgggagcttggacgtgctacgctgctctcatctcgtttccgcgcagttcaggaattgttctcaatggcccgcgtgtatgttggcaacttggattcacgggtgacttctggggaactcgaagatgagttccgcgtgtttggagttctgcgaagtgtttggattgcacgtaaaccacctggctttgcatttattgattttgacgacaggagggatgcggaggatgctattcgtgatctagatggtaagaatggatggagagttgaactatctcgtaattccagtggtcgtggtggtcgtgatcggtatggtggatctgagtcgaagtgctatgaatgtggtgagactgggcactttgcacgtgaatgtcgtctgcgcattggctctggaggtctaggcagtggaagacgtcgcagtcgcagccgcagtcgcagtcgcagtcgcagcaggagcaggagcagaagccgcagccctagataccgcaggagtccaagctatagtagaaggagctatagccctcgttatcgctctccaaggcgccgtagtccttcgccagctcgcgcgcgcagctatagcaggtcaccatagtacaactgcaacgatgctgttatgcacaggtaatggtggcaggtactggtgtagcaggagctaggcctgaagcccgtgcctgatacttcttggtgtgagaacttagtccttggtttggctgtcaggaacaaatttggaactgtcgtcaactgcatgacttcagttcaggcatgttctgcttaaacgactcggccaactacggctctcagttagtcttcatggttttgttcctccattcttggcacgtccttatctgcaaacaaatgtcaacgttccattactagctgccttcgatgtttcatcatgaaattcttcaccgaagatgctacttcatcacaaattagtaacatcctttcccctcatatagttgataaggtttgagtgtactgagcactaacaaatgcagctcgcgaaagtaagaccgtttttcgtcatagaacaagacagctattttaattgcagcactcgtgtgaaaatagatctactctgcatggtggggattggggcgattgaagtgtggccttcagctgcacctagttgggcatcccaggaacctagtcaggctcactacagcaagaggcgcatcctttgactaaacatgttggttttatttcttgtggtttgattcttcacttctgttcattgtgttctgccttcactgcaccctattggtagtggtcgaacaatgcttctgtctgtggtaagttattcttggtacaatggctcttctttaccccctgatcagtgtatgttggactttctgatagagttagcaccaattgtagtataaatatgttctttttttctctggaaggtaattgtaattctatctgaatactcagatttgaggtataatctgctcttgtcaaatgattttttaaagatcattctagtttc

SEQ ID NO: 133252 - DNA, 2464 bp, Zea Mays
cttctcacacaaagcttcccttccctctccccttccaacctgcacagcaactgcaagtacttggagagccaggactagtccactagtgctctttcttttgttgcgtcgccatccactccaccacaccaccacctgcccccgaccaccgaaaaaaggtccaagaattcgaggacacctcctcctcttcctcctccacgatggccatgccaagatccttccccaaatcgtagcctttgtttgttcccccaaaaggaaggatttcattccttcccgttccatcgttccgatttgccgtcaagcaaatgcgaagcgtctcccctgtgatcttctttcaccttggcgagctgtgcgactgactggttgatccaggctgtatatacatagggttaattaatgagcggcgccaattcttcgttgccgatgcctccgccgccgccgccaccggcgcccgctgcgtcggcgctcgacaacgtggaggccaagataagccccagcatcgtcttcgtcgtggccatcctggcgatcgtcttcttcgtctgcggcctgctgcacctgctggtgcgccacctgctgcggctgcggcgccggcgccgccgcgcgcgggaggacgcggacagcgtcacggcgttccagggccagctgcagcagctcttccacctgcacgacgccggcgtggaccaggccttcatcgacgcgctcccggtcttcctctaccgcaacgtcgtcggggccgcgccgggcggcaaggacccgttcgactgcgccgtgtgcctgtgcgagttcgcgcccgacgaccagctccgcctgctgcccaagtgcagccacgcgttccacctcgagtgcatcgacacgtggctgctgtcccactccacctgcccgctctgccgccggagcctcctcgccgacctctcgcccacgtgcagccccgtcgtgatggtgctcgagtccgagagcgcccgcgacatggccgcgtccgctgctcgggccaccgacgccgagcccagcgccgggcccggggccacgctgccgcgggaccaaggagcggacgaggtggtcgaggtgaagctggggaagttcatgtgcgtcgaaggcagcaccgccaacgccaacgccaaggcggcggacggagcaggcaccagcggcgacggcgacgtcgacgtcgacgccagtgccaaggaaggtctcggtctcgggcagagacggtgccactccatggggtcctacgagtacgtcatggacgaccacgcctcgctccgcgtggcgatcaagccgcccaagaagaagcccgcggcctccaagtcgcgccgccgcggcgccatgtcggagtgcgagttcggcgcgtccaagcgcggggagacctcgctccgcctgccattcccagcaacggcgcacaagcagcagcagcaggccgacgcgaccatggcgaagctcgccaaggacagcttctccgtgtcgaagacctggatggtgccgccgaccaagaaggatcccgccggcgagaggcgcgccgtgtcgttccggtggccggtgagcggcagggacgagggagaaggcaaggacaggaggagcgggagcgaggctgagtgggacgtggaggccgggagctgcggcagcgtgtcgtcgctggcggaggagaggccgtccttcgcgcggaggaccctgctctgggtcgtcggaggccggcagcagagccgagtcgggagctgttcgtgatcagcagcgcacggttgctcgaagattaaaaaaaagaaagcagagaaattcttttgtgctctttcggcagattggtagtagcgagtagcggttgcaatagctagagatttgcagaacccgaaagctctgaaaaattctttctttcttcctgcttcgtttgaaaacaagtggcaatggcgagcagcggtgaactggacaaatgacgaacatctgcaggtcctaaaccgcaactaacaacagcttctgaaacagctagtgggcgttgctgctcagagattcagaaaccaacagtctgaaacagcttctgaaagaggatcgcgatgggagtccgtgttgcctgctctgcgcgcatggagaaaggcggtttggttggatcgccgcctgccctgctggttcgctggctcgcgcctcgcggtgacgggcatgtgagcgctgcgtgctgcgcgcaccggccaccagtgcgccatggcgtgctcctttgtttgctcctgcttgtaattggaattctggcagggtggctttctccttttcagaagcggcaacgcgggcgtggagtcgagtttaggaaggtggcatgcatcttaacctgacctgtaaaggagggttcggctatcaacaaaagattctctcctctgctcctctgactgctctagtcgagtatatacattttgatacgcagggtcctggatttcttctcttttttttcctggatcaaataattcaaatgtagtgcaagtagaacacactggtg

SEQ ID NO: 133253 - DNA, 2190 bp, Zea Mays
tgtatctcatgcgatctggagcttgtttcaatattgcacaagggacatcattcagttcttaacttttgttcacaacaatgtttctgtacagatgtttttgatatgcccctaggcaatcactaccatagaggcaatcgcctgatagaggaagcagcaggctttggcggccttggcttgtcagcgccggccggcggacatacaggagcttgaagaagttcttcgtttgcgttagctgaatggttgcttgaggaagttgagcttgagggccagcttcccatagtgctgctccacagtagtcctcacgtacttgctgctgcttgacctgctccgctcttcttgtcgaggaaacggagccagaaaacatcgcggagcggggcgctggccgcgggcggcctggaatatttcgccgtcgcagcagagcacgcccagcacctgctccagcgcaccgccgccacagccgacgcttcctcgcgctccgttcccgtcccaccgcggccgctgcgccagcttgtccttgttccagccgccgctcacgacgcggccgtgcagcacgtctaggagaagccgaggatgacagcgaaatgtgattggcaggagaagcagaggagcacaacgaaaggtggccggaaggagcggcggcggcggtggacgggctggattgggcgggtggaaatgatggcgcgcgcgacgggatcacgggaagagttaaacaggcccacatgtcggctttctttttgcgaggagaggtaagtaggagaggacagaggagagaagagatgacaagctcccccaaaatctccactcccggagtgagctccccaccaccacctccgtccccaaatgtcccgtcaccatcaccacgccgccactatcgctgctgccgtgctcttcctcctcacagcgcctccttgcgccgccgaccctaacgacgagcgttgcctgactcacctccaccagtccctctccgattcctccggaaggctcaactggaccaaggcggcgatctctgcgccgtgcgacggcttcttctcgcacctccaaggcgtcacctgcaacaacgggcgcgtgtacaagctagccctcccggatctctcgctcgggggcaccgtcccgccggagctctccaactgcaccaacctccagtcgctggacctgtccgcgaacgcgctgtccggcgccatcccgacggagctctccgcgctgctgaacctcgccgtgctcaacctctccgcgaacgcgctctctggcgccatcccgcgggagctcgccagctgcgcctacctcaacgtcatagatctccatggcaaccagctgtccggccccatccccgaggaactcggcctcctcgtccggctctcgaccttcgacgtctcctacaaccgcctctctggccccatccccgtgctcctcgccaaccgctccggcgccggcacggcagccgtcgggacggcgaggttcaacgccagctccttcgtagggaacaagggcttgtacgggtacccgctgccgccgatgcggacgcgggggctctccgtgctcgccatcgttggcatcggccttggcagcgggctgctcagccttgtgcttagcttctccgccgtgtgtctgtggctccgcgccacggaccggcggactcccaccacccctggcgaggagggcaagatctcccagcccatgccgaactactgaatccatcaaaggttgcatctttggacatataattcctcgtaattgaactgaacacgagatttttcagctgggcttgcaacaaaggttccaccttgaatagattttggttggattcttgaagccagtattggattctggaacgggatccgaggagcataccagacatcttgctgcaggctggttgtgtcagtagtggatcttctaatcgctgtagctttttaataactaatgattttgttgttgctcttatttactgtttggcagagtgacagttgaacttgtgtttcggcttgttcgctgcggcttgctgcggctgcaatccggctgcggctgcggcttctacagtatttttctctctatggattgcagctgcagcagtccaaacagctgcaacagtgtcggcttgcagcctgccgaacacgccctttatagtgaggaatatttgtctgtagacaactggtcttgctcacccgaaagtccgaatccagcgctacttcgata

SEQ ID NO: 133254 - DNA, 340 bp, Zea Mays
tcgaagcgccgcgtctgctacttctacgacgcggaggtgggcaactgctactacgagcattgccacccgatgaagccgcaccgcatccgcatgacccacgcgctgctcggccgctacggcctcctcgaccagatgcaagtgttccgccctcaccctgcccgcgaccgcgacctctgccgcttccacgccgacgattacgtctccttcctccggtccgtcacccccgaaacgcagcaggatcagatccgcgcgctcaagcgcttcagcgtcggcgaggactgcccccatcttcgacggtctctacagtttctgccagacgtacgcggggggctccgttggc

SEQ ID NO: 133255 - DNA, 804 bp, Zea Mays
cacccgaaccaaatcttccttggcacaccaccgatggcgccactcctcttcgtcccgaacaaaaccttggcaccaccgatcctccacgctcgccaccgcttcgcgcccagacccccatccgccgcggccttcctccgcagattttttcccaccaggccaccggcggcgaaggctgacctcctccgcctcatcgccgaccagggccgcggcctcgagacgcagtccgccccttcccgcctcgctgacatcatctcctgcatcgacgcgctcgccgccgtatcccccggcgcagacaccgtatccgacgccgccaagctctccggaacctggcgcctcctctggaccaccgagcaggagcagctattcattgtgcgcaacgccccattcttccgcactgccgccggcgacgtgctccaggtcatcgatgtcgccagcggcgcccttaacaacgtcatcacgtttcctccctcaggcgcgttcgtcgtcaatggcgacatcgaggtccagccgccccagcgagtcaatttcaggttcacacgcgctgctctgagagggaacaactgggaggttccttttccgccgtttggaaaaggatggtttgacactgtctatttggatgacgacatacgggttgctaaggacataagacgagactatttagtggttgagcgtgctccatattcttgggatgtgtagtttctgaagtccaaaactggtcaaaagaacgtttagagaactttatgctttcccaaccaagtatacatgctattccgtttcctatcatgtatattgttatgttccaca

SEQ ID NO: 133256 - DNA, 2195 bp, Zea Mays
acgattccatacaggacctcacctccctactcgcgtagtcatcgtcgtcgtcgtcctcgtcctcccgacgtctggtggtatcggacttgcgtggcgtggaggtccttccgaacttgggatcgatttgcttgtcagcgccgaaccctagctttgcttcgacggcacccacctacggtacgcccgcggccccaagcagtcaggcgacaccgaataatttggttacagagacgagcgggtgcgccggcgagagggcccgattctcaccgcgccggcgatggcgagcagctcgtctccgtcacaggtcatctgcgcctccttcaatcaggacaacagcatgttttctgtcgggaccaaggatgggttcaagatctttgacgctcgtaatgggaggctctgctacgaaaagagtcttgggggattcaacattgtggaaatgctatttggcacaaacctacttgccattgtcggaaccggtgaacagcctgcaatgtctcctcgtcgtttgtgcctgttcaataccaaaacaggagcatcaaagagagatctgaactttaagacttcaattttggctgttcggttaagtaggaagaggcttgttgttgtattgcaggataggacttttgtttatgatctaaatagcactactatattggacgaaattgaaacggtacccaatacaaaaggtctatgcgcatttgctcctaattctgaagagtgttatttggctctcccagcaagcacatccaaaggatctgctttagtatacaaagcatcaaaaccggaattaatatgccagatagatgctcatctggctccgttagctgcaatggttttttctttgaacggcatgtacctggcaacggcttctgaaaagggtaccatgattagggtgcatcttgttgcacaagcaaccaagtcacatagctttcggcgaggaacatacccatcgacaatctattcactggcatttagtccctctgttgatctgcctgacgttcttgttgccacaagttcatcaggatctttgcacatgtttttccttgatgcttccaggaacgcaaggagacaagcaaatacattgttcagctcagtgattcctggatctgtaactgatgctttggatccagctaatcatcatgttattcacaatgttgtcactgcagacatcaagagttgtctagcagtacacagtgttgaaaattcccaaaattcttccaaatttccctcgctgaagactgttatttacattgtaacacacaatggatacttccgagagtatctgatcggcacaaccaagtcaaatgaatcttcatggttgttggagcgtgaatttaatctcctggatgcttattcgggtagtcccaagcagaacgagctgcacatagactgacttgtaatgctcgctcctctgaccggaacctgagcatctccaacagaagttctatatttgagtccttaaaattaaaatatgacctgatttaaagtgtttagggctataaaactgtttgtaactccaacaattgagttctatatcatattattaggaaataaatcatgttatttaggaaataaaagattaaaaatagtgtagaaaatgaagatatggctctagtagatggggtactatatttaagacccgggagactgagccctataactgtttgatgagtttttataaaataggacccctgttggagtatgttggagtatgtttctggtgttagggtcctatatttcaaaataggatcctatttaggactcttgttggagatgctctataggtgattatatcttgggccttgacttaaccggtcattgggactaacttcaactgtacatagtatagaggtgttcatcactggtgggaatctacatgttgcggctcgtggcgcgtgtaaattatcatacaagtggacagcaagtttggtgcaatgcataaaaagctttcctaattttgagtacgtttcactttgagccagttaccccacccacccagaaaaaaacacccttcatcacttttgatcattttgatcactttgaacaagtgtgtaattgttttaccgttgtaacaaaaacaagtcttgtcttcttgctaattacgcttcatcagattgtctttagtgaggactcccttccataggtaccacaagaagattttatttttgagggtacttttaactttttaactttcataa

SEQ ID NO: 133257 - DNA, 765 bp, Zea Mays
tggaaacaccaactgctgtacatgtctaaattatccatgcaatgttttacaggactgttatttacattgtaacacacaatggatacttccgagagtatctgatcggcacaaccaagtcaaatgaatcttcatggttgttggagcgtgaatttaatctcctggatgcttattcgggtagtcccaagcagaacgagctgcacatagactgacttgtaatgctcgctcctctgaccggaacctgagcatctccaacagaagttctatatttgagtccttaaaattaaaatatgacctgatttaaagtgtttagggctataaaactgtttgtaactccaacaattgagttctatatcatattattaggaaataaatcatgttatttaggaaataaaagattaaaaatagtgtagaaaatgaagatatggctctagtagatggggtactatatttaagacccgggagactgagccctataactgtttgatgagtttttataaaataggacccctgttggagtatgttggagtatgtttctggtgttagggtcctatatttcaaaataggatcctatttaggactcttgttggagatgctctataggtgattatatcttgggccttgacttaaccggtcattgggactaacttcaactgtacatagtatagaggtgttcatcactggtgggaatctacatgttgcggctcgtggcgcgtgtaaattatcatacaagtggacagcaagtttggtgcaatgcataaaaagctt

SEQ ID NO: 133258 - DNA, 1822 bp, Zea Mays
cccaaccaactccaccggcacgccgtccgcccctttccgtccgcccgtctcgtgcgtgcaaatccacctccaccccctccttccggctttccccatcttctctttctccgtcccctcccaacacgcgttccccaaattctcccaccctactagaaatccccatatccgcggcggcgccgtccatcggattcgatcctcctagcgagtcgactccatctgatcggcggagccggggcaccagccaccatgtgggcggcatcgtgcctggcgtcgtgctgcgcggcgtgcgcgtgcgaggcgtgccggacggcggtcggcagcatcggccgccgctccgcccgcatcgcctactgcggcctcttcgcgctctccctcttcgcatcctgggcgctccgcgaggtcgccgcgcccctcctccagtcgatcccatggattaaccacttccacaagacccccgaccgcgagtggttcgagaccgacgcggtgctcagggtcagcctcggcaacttcctcttcttcaccatcctcgccgtcatcatggccgggataaaggaccagaaggacccccgtgacaagatccaccacggcggatggatggccaagatcttctgctgggtcatcatcgtcttcctcatgttcttcgtgcccaacggggtcgtcagcttctatgaatctatatccaagtttggctctgggctgttccttctcgttcaggttgttctgctgttggattttgtgcacggatggaatgagaactgggtcgccaaggatgagcagttctggtacatggctctgttggttgtctcggttgtctgttacattgccacgttctgtttctcgggtctcctatttcactggttcactccatctggacatgactgcggactcaacctgtttttcattgtcttcacgttgattcttgtttttgcgtttgctattgttgccctgcacccaaagatcaatggaagcttgttgcctgcatcagttattggtatgtactgtacatatctgtgctacagtggactctccagtgagccaagggattacgaatgcaatgggcttcacaatcactcaaaagctgtgtcaactggtagccttacattgggactccttaccacggtcctctctgtggtctattctgctgtccgcgctggctcctctgcaactgtgctctcgccaccagactcaccacgtgggaccgacaagccattgcttcccttcagcaaggcagacgaacaagaagataagaaggatgtgccgaggccggtgacatactcctactctttctttcacctcatcttctccctggccagcatgtactcggcaatgctcttgactggctggtcaacttcggttggtgagagcggaaagcttgtggatgttgggtggccatctgtctgggtcaggattgcaacccagtgggcgacggcaggtctgttcatatggtcgcttgttgcacccgtcctctttcccgacagggaattctaagttcaaccacggtaagcctggagcatcaaacgtgtctactgtggtagctaatatatcctatcaagtatgttgcctttaaaacatgctccgagtcggtgtttgcccactgttatcaagtttgtctacttaataacatgtgactttaggcattgtgccactatcttaacagtgaacgtgtgctgcttgtattgtgtatatactggagaattttaagaatgcttcgtgcgagcgtgttgtgtatcgattgcttggtggctgtgtctgcggacttaaatcttttgctatgttgattatcttctaattctgagtttgtgctgcagtagtaaaaaaacta

SEQ ID NO: 133259 - DNA, 1648 bp, Zea Mays
cacggattcacggtcacggtcgaggaggaagaaacggtacctcgccgccgacccctccaacgccgacctcctcgaggttcatgaggagcttcttgctgcgattaaggatgccgaggagggtcttctccatttgaagcgctctaggctactgaagcaagtagatgagatctttccagataaggaatcaatatcccaatcacccgaagttgctattgagtcattagatccagatgatgttgagccagaaccactggagtcacatgatttttcagttggatcaaagtgtagattccggcacaacaatgggcgctggtataatggatgcattataggctttgaaggttcaggcgatgcaaggatctcatttctgacacctacatctgaaaatatgtcggtattgtaatgccttctaaagccttgaagcgattcactccaactaggtgggagcagtccttggtaggctccagcatactggcaacttctgggtataactctggcctttggaggagagcagagcttgagtcatgggatgataatctgaagattggccaagttgtttttcaagatgatgggagttctgcgagtctgccaagtgattctctttctgtctcggaatacgctgacatgagtgacgaagatgaaggaagcttaagtgacgaagaatctgagttcagtgacgatgctgatcaagaggacggaagtgttcatcagggtcttggccttttagaattcacaaattttagtggcattcagacagataccatgatcttcgcaaaatgggagcaccacaccaggggtgttgcctccaaaatgatggcaaaaatgggttaccgagaggggatggggcttggtgtgtctggccaaggcatgcttgatccaattccagttaaggtactacccccaaagcaatcacttgatcatgcacttgcttcaagcgaggctgacggaggcagtgggaaaaagcgcagtaggggtgggaaaaggaagcgtgagaagaagtttgcagaacaggccagggctgctaaagctgaagaagctgagagatctgtctttaattttatcaacagccatctagtaagccaagaaggttcgaccaccaaagttagaaagggttcatcagttgagaccaatggactcgctaagaaggaagacagaagatccttggttgcatacggtgaggaagtgaaggagctgaggattcgagttgagaaactggaagagatgaagaaccgtaactgcaaagacaaggcattctttgaagcagcttcaaggaaactggaagagactcggaaggcactcgctgatgctgaagctacccacgcttcagcgacgagtgcagttactagaaaggagaaagagaagaaatggttgaaattctgatgtcaatttcatgtgtgccaacgcttctctgtctgtgttctgacaagaacgtggcatgatgtatgcaacttacaattgttccccatgtcagctcttagccttctacacttgtatgtctatcaagttttagatctgttgtagaagcagtaacactaataattattcgaaggatgtggtatttagatgagttttcggctagtcatcacgtaatactatctctgaaccgccgatcatttggtactagtagacatttcatttgcattccgtt

SEQ ID NO: 133260 - DNA, 1844 bp, Zea Mays
cacggattcacggtcacggtcgaggaggaagaaacggtaccgcgcccgcggcgagagcctgggaggctgggaggaggaagaaccctctcgactcgattcttcgcccatcgcctcgccgccccgatccagttggtggcctatggcgggcgagggcgaggacgaggcggcggccattgagcggcagctggagcagcagctgcaggagcagcggtcctccctcgccgcggtcgacgaggccctcgccgccgacccctccaacgccgacctcctcgaggttcatgaggagcttcttgctgcgattaaggatgccgaggagggtcttctccatttgaagcgctctaggctactgaagcaagtagatgagatctttccagataaggaatcaatatcccaatcacccgaagttgctattgagtcattagatccagatgatgttgagccagaaccactggagtcacatgatttttcagttggatcaaagtgtagattccggcacaacaatgggcgctggtataatggatgcattataggctttgaaggttcaggcgatgcaaggatctcatttctgacacctacatctgaaaatatgtcggtattgtaatgccttctaaagccttgaagcgattcactccaactaggtgggagcagtccttggtaggctccagcatactggcaacttctgggtataactctggcctttggaggagagcagagcttgagtcatgggatgataatctgaagattggccaagttgtttttcaagatgatgggagttctgcgagtctgccaagtgattctctttctgtctcggaatacgctgacatgagtgacgaagatgaaggaagcttaagtgacgaagaatctgagttcagtgacgatgctgatcaagaggacggaagtgttcatcagggtcttggccttttagaattcacaaattttagtggcattcagacagataccatgatcttcgcaaaatgggagcaccacaccaggggtgttgcctccaaaatgatggcaaaaatgggttaccgagaggggatggggcttggtgtgtctggccaaggcatgcttgatccaattccagttaaggtactacccccaaagcaatcacttgatcatgcacttgcttcaagcgaggctgacggaggcagtgggaaaaagcgcagtaggggtgggaaaaggaagcgtgagaagaagtttgcagaacaggccagggctgctaaagctgaagaagctgagagatctgtctttaattttatcaacagccatctagtaagccaagaaggttcgaccaccaaagttagaaagggttcatcagttgagaccaatggactcgctaagaaggaagacagaagatccttggttgcatacggtgaggaagtgaaggagctgaggattcgagttgagaaactggaagagatgaagaaccgtaactgcaaagacaaggcattctttgaagcagcttcaaggaaactggaagagactcggaaggcactcgctgatgctgaagctacccacgcttcagcgacgagtgcagttactagaaaggagaaagagaagaaatggttgaaattctgatgtcaatttcatgtgtgccaacgcttctctgtctgtgttctgacaagaacgtggcatgatgtatgcaacttacaattgttccccatgtcagctcttagccttctacacttgtatgtctatcaagttttagatctgttgtagaagcagtaacactaataattattcgaaggatgtggtatttagatgagttttcggctagtcatcacgtaatactatctctgaaccgccgatcatttggtactagtagacatttcatttgcattccg

SEQ ID NO: 133261 - DNA, 1917 bp, Zea Mays
ctcaccttccatcacggattcacggtcacggtcgaggaggaagaaacggtaccgcgcccgcggcgagagcctgggaggctgggaggaggaagaaccctctcgactcgattcttcgcccatcgcctcgccgccccgatccagttggtggcctatggcgggcgagggcgaggacgaggcggcggccattgagcggcagctggagcagcagctgcaggagcagcggtcctccctcgccgcggtcgacgaggccctcgccgccgacccctccaacgccgacctcctcgaggttcatgaggagcttcttgctgcgattaaggatgccgaggagggtcttctccatttgaagcgctctaggctactgaagcaagtagatgagatctttccagataaggaatcaatatcccaatcacccgaagttgctattgagtcattagatccagatgatgttgagccagaaccactggagtcacatgatttttcagttggatcaaagtgtagattccggcacaacaatgggcgctggtataatggatgcattataggctttgaaggttcaggcgatgcaaggatctcatttctgacacctacatctgaaaatatgtcgatatgcaagttcttcctacagcagcgatgtcgatttggtagtaactgccgcatgtctcatggtattgtaatgccttctaaagccttgaagcgattcactccaactaggtgggagcagtccttggtaggctccagcatactggcaacttctgggtataactctggcctttggaggagagcagagcttgagtcatgggatgataatctgaagattggccaagttgtttttcaagatgatgggagttctgcgagtctgccaagtgattctctttctgtctcggaatacgctgacatgagtgacgaagatgaaggaagcttaagtgacgaagaatctgagttcagtgacgatgctgatcaagaggacggaagtgttcatcagggtcttggccttttagaattcacaaattttagtggcattcagacagataccatgatcttcgcaaaatgggagcaccacaccaggggtgttgcctccaaaatgatggcaaaaatgggttaccgagaggggatggggcttggtgtgtctggccaaggcatgcttgatccaattccagttaaggtactacccccaaagcaatcacttgatcatgcacttgcttcaagcgaggctgacggaggcagtgggaaaaagcgcagtaggggtgggaaaaggaagcgtgagaagaagtttgcagaacaggccagggctgctaaagctgaagaagctgagagatctgtctttaattttatcaacagccatctagtaagccaagaaggttcgaccaccaaagttagaaagggttcatcagttgagaccaatggactcgctaagaaggaagacagaagatccttggttgcatacggtgaggaagtgaaggagctgaggattcgagttgagaaactggaagagatgaagaaccgtaactgcaaagacaaggcattctttgaagcagcttcaaggaaactggaagagactcggaaggcactcgctgatgctgaagctacccacgcttcagcgacgagtgcagttactagaaaggagaaagagaagaaatggttgaaattctgatgtcaatttcatgtgtgccaacgcttctctgtctgtgttctgacaagaacgtggcatgatgtatgcaacttacaattgttccccatgtcagctcttagccttctacacttgtatgtctatcaagttttagatctgttgtagaagcagtaacactaataattattcgaaggatgtggtatttagatgagttttcggctagtcatcacgtaatactatctctgaaccgccgatcatttggtactagtagacatttcatttgcattccg

SEQ ID NO: 133262 - DNA, 6077 bp, Zea Mays
atccccataaacaccttatcccctctctacctctctccactgcatgcctcgctatctcctcctcctcctcagcagcagctctgcaatgccaagggcgccttagccgagttcctcccgagtccagactggtggtggcgataaggttgtcgcgaggggttccgcgcgcggtgctgcgctgcccagagctcggttagcttcggggcggcggcagcccggcagccatggcgcccaaggcggggaaggccaagcccaaggccaggggcgacaggaagaagaaggaggagaaagtgctgcccaccgtgctggacgtcaccgttgagacgccggactacacgctgctcacgctcaagggcatatcaacggacaggatcctcgacatccggaagctcctggccgtccacgtggacacctgccacctcaccagcttctccctgtcccacgaggtccgtgggggccagctcaaggacacggtggagatcgccgccctcaagccctgccacctcaccatcgtcgaagaggactacacggaggagctcgccgtcgcgcacgtgcgtcgcctgctcgacatcgtcgcctgcaccaccgtgttcggggcgaagaagcccgagccgaagcccgatgcggcggatgccgcggccgagtccgccaaagccggctcgccctcgcccggtaagacggcgcccggcggcggcgaggagcccatgtacccgccgccgaagctggagcagttctacgatttcttcaccttctcgcacctcacgccgccgctgcactacattcggaggtcgtcccgcccattcgttgatgacaagagagaagacgacttcttccagatcgatgtgcgagtttgtaacgggaaacccgtgacgattgtggcatcccaagaaggattctaccctgcagggaagcgagcactcatcagccgctccctcgttggactgttgcagcagacaagccgtgcatttgatggagcctacaaggctctgatgaaggcatttgtcgagcacaacaagtttggaaatctaccttatgggttccgatcaaacacatgggtggctccccctgtcgttgccgactcaccatcagtgttcccacctctcccaaccgaagatgaaacctggggtggcagtggtggtggtcaaggaagagacggaaagcacgaccatagaccatgggtgaaagaatttgccattcttgctgcaatgccttgcaaaacagctgaggagaggcaaatcagagacagaaaggctttcctactccacagtttgtttgtggatgttgcagtcctcaaagctgttgcatctatccagcaactgatttccaaccatacaagtttacatgaaacagagaatggcaccatcggttcagttttgcacaccgagcaagtaggtgatatgaaaataatgatcacaaaggacaaaacagatgcaagctccaagctagatgtcaaattggatggaagtcaggctccagggatgtcttctgatgagcttgctcagagaaacttgttgaaaggcatcactgctgatgagagtgcaacagtacatgatacagccactcttggtgtggttattgtaaagcattgtgggtatacagctgttgtccaagttccagtagatactgaactgccagctgcttctgtagcacagcaggagatccacattgaagaccagcctgaaggaggtagcaatgctcttaatgtcaacagcttaaggatgctgcttcataagtcatgtgctcaagcacctggagttcaacggttgcagactagtgatcctcaagacaatgaggctactcaaacttttgtccggaagatattaacagacagcctgcagaagcttgaaaatgaggttccgatagtaacaagacctatcagatgggaacttggtgcttgttgggtacaacatctacagaacccaacttccgagaagacagagactaagaaaagtgacgagactaaggatgtccctacagtaaagggtctgggtaaacaatttggtcagttaaaggagataaaaaagaagacagatgacaagggtggaaaaggtacatatgtaaaaggaaacaattcacctaatacagataatgggcatacagacaacactgccagtgtaaaggatgataaggacattattcttcagagattgcttccggaagcagctttccaaagactgaaggaatcagaaactggacttcatgttaagtcactggatgaactgattgagatgtcacataaatattatgatgataccgcgctacccaaattggttgcagactttggctcacttgagctttcccctgttgatggaaggacattaacagattttatgcacactaggggcctccagatgcggtcactgggacgagtggttgagctttcggataagcttccacatatacagtccttgtgtatacatgagatggtagttcgagcatttaagcacatagttcgggctgttattgcagctgttgatgatataaatgatatggcagactcagttgcgtcatgtttaaatattttgttgggaccatttctggaggaaaacaatgacaaagattgtggtgaggatcataatctcaggaaaaggtggctggaggtctttttgataaagagatttggttggaagtggaaagatgaatattgtcttgatctaagaaaatatgccattctccgtggtctctgccataaggtaggacttgagttaataacaaaagattatgacatggatatgccaaacccattcagaaagtcggatattatcagtgttgttcctatctacaagcatgttgcatgctcatcagctgatggccgcaccctgctggagtcatccaagactttcctggataaagggaaacttgaggatgctgttagctacggcacaaaagctcttgcaaaacttgttgctgtttgtggtccttatcatagaatgacggcaggagcatacagccttcttgcagtagtgctttatcatactggtgacttcaaccaggcaaccatctatcaacagaaggctttagatattaatgagagggaacttggacttgaccacccagatacaatgaaaagctatggagatcttgctgttttctactatcgcctgcaacatacagaactagcattaaagtatgtcaatcgtgccctatatcttttgcaccttacatgtggcccttctcatcctaacaccgctgcaacttatatcaatgttgcgatgatggaagaagggttgggcaatgtccatgttgcactccgttacctgcacgaagctctaaaatgtaaccaacggttgcttggcgctgatcacatacagactgcggcaagttatcatgctattgctattgctttgtctttaatggaagcgtactcattgagtgtccaacatgaaaagaccacgctaaggatacttcaagcaaagcttggatccgaggatcttcggacccaggatgcttctgcttggctggaatactttgaatccaaggcactagagcagcaggaagcagcacgaaatggtactccaaagcctgatgcttcaatagcaagcagaggacatctgagtgtatcagatcttttggattatatcaacccggatgatgagctcaaggctaaggaaatgcaaaggaaacaagtccgtgctaagatcaaaggtcgcactgggcaaaaccaatctgaacttgttgatgatgaagatcaaaggagtcctgcacctaacaatgataaaaatttattaaccgagaatggaaactctggagtaaaagagaatggaacctttgttgagcatgtgaaagatgaaatatcaagtgacactgcaatccacatacctcaagatggttttactgaagagtgcacatctgatgaggggtggcaagcggctgttccaaaggggcgatccacagggagccgcagaactggtgcaggcacgaggaggccaaatctggcaaaaattaatactagttcactaaacagtgagaatggaagatacaaaggaagaggtatatctaacttctcttcccctcgagtttcacctagtgaggctgcagtttctattggttctagacctcttgcaaagaaattggctaagagttcaagcttcaattccaaagcagttagcactgccgtctcatcgaatactggtgagaattctttcaatctcaactccaagccagcaagccctgccattgccacagctgctgccaaggtgataccatccacaacaccaagtgctagtcaaacagtaaggaagtcactttcatacaaggaggtagcaatagctgcaccagggactcttgccaaagcatcgagtgatgtacacacagaagaaaaagatacaggtgaccaaggtgcaagtcctgaaagttctaattctaagtctccaaaagaaatcaatggtcacccttctggggagaaagatggggcaatagaagtgtcgccacaggatgatacttcacaggtatctaaatcacctgatggaggtaaacctgagcaaactgatgttttgattggttcaaatcaaccagatacagtacataaaaaatcctcagatccagcagagacatctgtagcaaaggacatagatcttccggccccggtcatatcatctggaacacaaactgaggctgacaccccaaatgatgaagcaccaactgcaattgaggcaaatgattcttcctccaatgacgatgaaagagattcaggagcagatacaccagaacaactgtctagtggaggtgaaaatgagaaatcttcactatctgagagtgaaaagaatgatacaccaagagaaggtgctaaagagacaacaagtaaactttctgctgctgcggctccattcaatccatccagcgtaccagcttttggttcaatggctgtcccaggtttcagagaacatggagggctattgccatcaccagccaatgtgccccctatgctgtccattcctctccgcaagcaccctcaccaatctgcaactgcaagggtaccttatggtccacgtctggctggaggctacaatagatcagggcaccgaggacttcgtaagaagcctgtgttgacaagtggtgaagcccctacagaaacaaacacgtctggccccaggattatgaaccctaacgccccagagtttgttccaggtcaatctcggagtcctaatgggcatccagcatctccaaatggtcctttagcatctccaggtggtattccatcttcaccacaggaccttctatcctctccagatagtaccttggagtcaccagtaactgcatccccacaagtttctgaatgtagccagattagtcctgaaggagatgttgagggtgtgggtgtaaagcagaacatggatgacacgaaccacccagaaagtaaagatggtgaagtggagcctgagcaaaccaaagctcctgaaggtacagaagaaggcgcagcggtaaaagatgctgctgaagagttgattgcagccgagcagcccaaatcctgggctgactacagcgatggagaggttgaggtcgttgaggttgcaagctaatgaaaatacgaccttctcagatagccaacacagagtggaatttttatttctcgaacagatgagcatttctccttctcaatagatggtgcatttttttacagtgcgggcttctcccgctgtattttctgctaaagaaaagatgctgcttttttggggatagactgaattgccttccagtggcattcaatgacctttgggacttgaaattttgaagactttccagaatgtgtcagcctttgggatttggcatttcttcatctatttttttgctgcgaagaattttggggaataagagcacctcaaagtatcagcaggggagatacggcgttaacatttcatcatttccccatcttgctcctgatttcccccccttggtgaatgtactgtcgacttaacgtctttcatagttatttctttgttacaataaatagactttttgaaccatgtataaaatataaagcaagagattttatctttccacacttgcggttaatccgagcttgtatagcatcgaaaattcgagatcgaactaaagaaagcttcctattgaatttcgctttt

SEQ ID NO: 133263 - DNA, 672 bp, Zea Mays
cctgctcagtgctcacatcagttttgatctgtacacttctaacagttagagtacctgtctgtgatttaaacaaaggctaacatcgaaaggccatcttatgtctcaatattttaatgacagactgcggcaagttatcatgctattgctattgctttgtctttaatggaagcgtactcattgagtgtccaacatgaaaagaccacgctaaggatacttcaagcaaagcttggatccgaggatcttcggacccaggtaagctgaaaaggctggcttggttatgtgtaattccacttagccaccaattttcagttaaatgatctacctttcttgttgcaccaaggaaatctaatagccatattttccacaggatgcttctgcttggctggaatactttgaatccaaggcactagagcagcaggaagcagcacgaaatggtactccaaagcctgatgcttcaatagcaagcagaggacatctgaggtagatgttgtaactgattatgtttgtgaaatattatcattcacgaaactaaactacaggaagaagtttttacttgatttgctaaagaatagttaatcttctaagtttctgtatggattttataggtgataacttgttgtatactggtgattgtttcctttaccctaatactgtcaaaagcagtgcgtaaaa

SEQ ID NO: 133264 - DNA, 899 bp, Zea Mays
agtacgccgtttgcgccatcgttacgtccaccagaaggaaaacccaagccaacgacgacggcacggccaagaaacggggagtgccttccaaggcgaccgccccctctcgcgctccatacgtccatccgtcggcccagagccacaagataacgcagccaagaacaagagacaccgccgagcgagcgaggcggggagaagcaggtccaggaccaggagaaaggaaaaggaagcccagctctctctagcctggagccgagaagccgagggggcgaaggagcagcaaggcatggaggagcccgttccggctgatccccccaggattttctggaagtcaaggagttcaggaccgtgagatcaatgggctgaacgagcagctagaggaagactcccgcgtgctggagcttctgcagaagcagctggctgacgagcgcaggaagcggacagagatcgagaaggagaactccatgctccatgagcaggtcaccatgctgatgaacatgctcgacgagaacgagggtttcgacgaggacggagaggccccgccgcccgattccttcgattaagcgttgttacagtactatatccgttttctttttcccgtcagtgtgaaatcatacgtctctaggtgctggtttcagagtatccgagagatatgggctagctgtgtagtaggatttcattggtggtcgtattccattacatggctttggcttctgtagataaagggtgcattgcatgtctgttgtactgtactgtacctactccttttctaggcttcaaaagtgtatgtgagaaactagcaacatgttatgtttgaatcgaagtgtatgtacatgttacttaaaattcttccttgctatgccaaaattgcaggaaatgtaaacaagatgtgatttccc

SEQ ID NO: 133265 - DNA, 1221 bp, Zea Mays
agtacgccgtttgcgccatcgttacgtccaccagaaggaaaacccaagccaacgacgacggcacggccaagaaacggggagtgccttccaaggcgaccgccccctctcgcgctccatacgtccatccgtcggcccagagccacaagataacgcagccaagaacaagagacaccgccgagcgagcgaggcggggagaagcaggtccaggaccaggagaaaggaaaaggaagcccagctctctctagcctggagccgagaagccgagggggcgaaggagcagcaaggcatggaggagcccgttccggctgatccccccaggattttctggaagtcaaggagttcaggttcagccaatggccggagcctgcaacaagagcctgacaaagacgctaccgaggaaactaacgagcaggctcaagaggaacccatgaagaccgacgacgcaacggacacagcagcagcagcagcagctacagctgagccgtacccgaaagctaacctatccgagaagcggaaggctctcttcgagcctctcgagccgatcaacggcaagcgcggcgctgctgagacgctgctcccaccgccggactttgagcccgcgtcgtaccccaaggggtggctggtgggcaagaaacgcaagctcgtcaacgtagacgtcgtggagagcatgcggaggattgcgatccaggaaatgaacagaaaggaccgtgagatcaatgggctgaacgagcagctagaggaagactcccgcgtgctggagcttctgcagaagcagctggctgacgagcgcaggaagcggacagagatcgagaaggagaactccatgctccatgagcaggtcaccatgctgatgaacatgctcgacgagaacgagggtttcgacgaggacggagaggccccgccgcccgattccttcgattaagcgttgttacagtactatatccgttttctttttcccgtcagtgtgaaatcatacgtctctaggtgctggtttcagagtatccgagagatatgggctagctgtgtagtaggatttcattggtggtcgtattccattacatggctttggcttctgtagataaagggtgcattgcatgtctgttgtactgtactgtacctactccttttctaggcttcaaaagtgtatgtgagaaactagcaacatgttatgtttgaatcgaagtgtatgtacatgttacttaaaattcttccttgctatgc

SEQ ID NO: 133266 - DNA, 336 bp, Zea Mays
atggcaaccgagaagggcacgcaggagcagagcagaagctctaggtgtgataaaccgggcccaaacaagcaagtcccaagtggcacgttgtcagaggtagcaagtggttctcgcatcgagtccgtgacgtcgtcgcctgtctgcggtccagagccgtctccgccaggcaagccacaagaagattttgaccctcaacggcgcccacgtcttccacacgatcgcgagagtgcgggagttgcagtgcaggctgtattaacttcatccaacaagatgtgcatgaccttgctcgcagattccaacggctttgcgagtttagtgccttcactgattggataa

SEQ ID NO: 133267 - DNA, 204 bp, Zea Mays
tgatacctaggaactggaaatcaccacccctcgcataaatggattgagacagagaaaagttgagacgtgtctatttgacaagtgcacatgttattgcgagtttgagaccttgtgtaagagcctaccattgtgttctggaagagttattctgtataaaaaagtggtctttgttttaccacctgaatgcaggacttccttccagga

SEQ ID NO: 133268 - DNA, 1622 bp, Zea Mays
tcatcgtcccctccactccactcgtttctttcgcttcccgcggcgaaagccctcgaagcagataaggcctaccggctgccgccgtgcccgtgctcgcgctcgaccaccgccggccatggtcggcgtcgccctcgcgccggcagtgtcccgcgtgccttgccgtcccggcgcttccttccacgcctcgcgcccctcctcttcggcgcggctcccggccaggccgcgggcgcgggcgcgggcgccgccggagaggctcgtggttgtcgcgcggtactcgtcctcgtacgaggtcgagggcgaggaggaggaggaagatgaggaagggctcgggggtggcggaggctgggggaggagggaccgcgggcccgaccccgactacgacccggcccttgacatcgaacgcatcgagtcctcgaccgtaaggctattggacgaacagaaaagaatggttggtgtagtatctgtcagcgaggcagttcagattgcagacgataatgatcttatactggcaatattatcaatggatggggaccccccagtacttcgactctttgatgagagagattacaaaaaacataggtatgaacaacagaagaagaaaaagattcagcagaaaagatctgtcgcgaaacgcatgggcttgaaggagctgaaaatgggatacaacattgacatccatgattacagcgtgaggcttaaagctgcaaaaaagtttcttaaagctggcgacaaggttaagataattgtgaacctgaaaggacgggaaaacttgtacaaaaaagaagctatcgaactccttagaagattccaaaatgacgttggcgagctggcgaccgaagaaagtaagaatttcgcggagaggaatatatatctggttcttgttcccaataagatagctatacagaaagaacaggatgaattgaacaaaaagggtgctgtgagagaagagaaagaccaatcagacagtgatgaaccagaagagaacgaccaaccagacagcgatgtacccctgacagaactgctggaggaaagtatggaacccgaggcagaagtctcagcaaacgtttgatttgaactgtagaggccaaggtgcctgagattgaaacaagtatcacgcaggtacagttgctgtagaattgcagctctcgtaaatacaaggcaggctggttcttttgtgcaacaattatatctgttaaactccatctccacaagctatccgataggcgccaaggcgtctgacaagtaaacaaggcttgatgatgtatgtcctccaagtctccaacccctcagcattgaaggatgatgatacctaggaactggaaatcaccacccctcgcataaatggattgagacaggttggatccggtaccaataataaagtaattgttaggacagacatttttctagtatcgtccagcacggtggacttttttattttgtgcctcatttccaatcgtttttctttttgactccttgtagagaaaagttgagacgtgtctatttgacaagtgcacatgttattgcgagtttgagaccttgtgtaagagcctaccattgtgttctggaagagttattctgtataaaaaagtggtctttgttttaccacctgaatgcaggacttc

SEQ ID NO: 133269 - DNA, 1677 bp, Zea Mays
ccgatcgaaaagttgcagcggcagtgttgaggccaaggccaccgacccacctctctcatagcactagcagcaatggaggtggagatcctcgagtcctgcatggtgaaacccagcgacgacatagggacgccgccgccgcccatgcacgtggtctggctctccaacctcgatctactcgtggccaggagccacacgcccaccgtatacgtgtaccggcccagccctgacccggacttcttctcgccgggcgtcctcagtgctgccctgtccaaggcgctcgtccgcttctaccccctcgccggccggctcgcgcaggacggcgccggccgcccgcagatccactgcaccggagaaggcgcgctcctcgtcaccgcgcgcgccgacgctaccctccaggacatccccggcgggttcgccccgtcggatgagctgcggcagatgcttgtcccctcggctgccgacggcgaagaccgcgccggcatcttggccatgttccaggtgacgtccttcaagtgcggcggggtgtgcgtgggcgcggcgatccaccacacggcggcggacggcctagcggcgctcgacttcgtcaacacgtgggccgccatcgcgagcaagggcgtcgacgaggccgcgccggcgccgcgcccgtggctggaccgcacgctgctccgcgcgcgctcccctcccgacgtgcgcttcgaccacagcgagtactccccgcggggcggcggcggtccaaagacggcgagggtcccgttcgactccgccatcctacccatgtccaagacccaggtggacgcgctcagggccggcaagaaggtgtccacgttcaaggccgtggtcgcccacgtgtggcggtgcgcgtgcatagcgcgcgggctcgcgggagacgaggacacccgtctgtacatgaccgccgacgcgcgctcccgcgtccgcccgccgctcccggaaggctacctcggcaacgccatcttccgcgcgtcagcggtggccacggcgggcgacgtcgtctccgagcagctcgacgccgttgcgggtagggtgtccggcgccaccgcccggctggacgacgagtacgtccgatcgctggtggactacctggagcaggtggtgggcgatgtggcggggctccgcaagggggagtgggtgatgccggagaccgacctgtgggtgataagctggcaggggctgcccatctacgacgccgacttcggctggggacggccggcgttcatgggccgcgcgtgcctccagttcagcggcctcgtgtacctcgtcccgggcccggacggcgacggccgcctcgacgtcgtcgtggccatggagcccaagagcctggccagattcaaggagctgttgtacgagctcaaaggtgcaggtgttccgtgcacggcagactgagctgctgcattccgtgcaggttccttggcttgctaccggctggcaaaacgaaaacctgtttgacaaattgttccttgcattgcctatctacttcgacctttactgcagtactcctagttttctactcgttgtttgtgatcgcaatctggtgagtactgtactctatatgcatttacatggctatctatattcggagctaaattcatcgccggtcctgtaactcggcactagatgttacttttttcttttccaaaagggaagtgatttcttactatt

SEQ ID NO: 133270 - DNA, 166 bp, Zea Mays
tacaatcaaaagaagtacttgaagaagcacaaggtgcgagattggctccgtgtgattgcagccaacaaggaccacgacgtctatgagctgcggtacttcaacattgctgagaacgagggcgaggaagaagattagactgcattgcacttatatctcagttttgaat

SEQ ID NO: 133271 - DNA, 123 bp, Zea Mays
atggcgacagcgttgaaccgcgggctccgcctcctcaccgtcggcgccgaggtgtccaagccaggcaagcacccctccaatcccgcatcacttcgccttgacctctcaccctggggcgattag

SEQ ID NO: 133272 - DNA, 2170 bp, Zea Mays
tggggacgcaaccgcggccgatatataccaagcctccgcgctgcctctatggccaccgccgccgcatccaccaccacctccgccgccgtgctcgccttcaggctcctccgccgcctgccgcgccgcctcagcgtgtcccgcgcgccgcccgcggcactcgcgtcgtcgtcgtcgtcgtcgtcgcgcagactaccgtccctcgcccgccacccgctcggtcaccgcacccggatggggcacacagccgccgctgcggccgcggccgccgaacccgctctcggactcaccaagcccaacgccgtcgagccgcctcaggtcaccttttccgcgaaagacatcgaattctccgagtggaagggcgatattctcgctgtcgccgtcacggagaaggatctgtccaaggacgcggactccaaattcgagaatgccgtcttgaagaagctggacggccagctcggcggcctcctgtcggaggctgcggcagaggaagatttcaccgggaagacggggcagtcggtggtcctccgcctcgcggggcagggcttcaagagggtgggcctgatcggtcttggtcagagcgccccgtccaccgccgccgctagccgaggcctcggcgagtctgtcgcgtctgttgccaaggccgctcaagctagcagcgctgcaatcgttcttgcctcccccagtgggatccaggaagagttcaagctgactgctgcagcagcagttgcttctggaaccgtgctggggttgtatgaggacagcagatacaaatctgaatcgaaaaaggtgcacctgaaacaggttgatattattggactgggttctggtgcagaggtggatcagaaacttaagtatgctaatgatctttcgtcgggtgtgatattcggaagagagcttgtgaactctcctgcaaatgtccttacccctgctgtgcttgcggaggaggcgtcaaagatcgcttctacttacagtgatgtgttcactgccacagtactagatgtagagaaatgcaaagaactaaagatgggttcctacttgggagttgctgcagcttctgctaaccctcctcacttcatccatttgtgctacaaacccactgatgggaacgtcaagagaaagctggctattgttgggaagggtttaacttttgacagtggtggctacaacattaagaccgggccaggctgcagcatcgagctgatgaaatttgacatgggaggctctgcagctgtatttggtgcagctaaagctttgggacaaatcaagcctcctggagtagaggttcactttatagtcgctgcctgtgaaaatatgatcagtggcacaggcatgagacctggtgacattgtaactgcttccaatgggaagacaattgaggtaaataacactgacgcagaaggaaggctaacacttgctgatgctttggtctatgcttgcaaccaaggtgttgaaaagattattgatttggcaacgctgaccggcgcttgcgttgtcgcactcgggcctagcattgccggaattttcacgccgagcgacgagcttgccaaggaggttgccgctgcttccgaggtatccggcgagaagttctggagactcccgctggaagagagctactgggagtctatgaagtctggcgtggctgatatggtcaacactggcggcaggcagggaggttctattaccgccgcgctgttcctgaaacagttcgtcgacgacaaggtccagtggatgcacatcgacatggccgggccagtgtggagcgacaagaagcgggccgccaccgggttcggcgtttccaccctggtggagtgggttctcaacaactcgtcctcgtcgtgaacaaaacccatacctcccctcgtatcacaatgcctttccatgcgtttttattttgttcctcctcttttgtgctaccattccatagttgcaaactgcagagcgcctcttggcatgtgataccgttgtgatagaataatcagcatgggtagtggtgtcgggtcctcctttccctgaaagaaagcagcggcgtgctggtcgcggtcaagccatgcctgtcgccttccggctgccgctgtgggcatttgtaacgcgtctctgcccagtgaaataacgtttgttccttgtgtttgtgcccccgcccaaaagaaagctgcatcggaactgatcttcc

SEQ ID NO: 133273 - DNA, 1269 bp, Zea Mays
tgtttgtagttcttcatggagatgatgaaagtaccaagggtggaatcaaaactgagaattttgtcatttaagataaagtttgttacacaggttgcggacctaaaaagtaatttgaataccatcaatttggttgctgaagaggttaggagctctgtgaaacttaagcgagtgatgcagacaattctttctttgggaaacgcattaaaccaaggaactgcaaggggtgcagctgttggatttagattggatagtcttcttaagctcagtgatatacgagcacgtaataataggatgactctcatgcattatctatgcaaggttctttcggacaagcttcctgaagtgcttgacttcagcagggatcttgcaaatttagaacctgcctcaaagatacaactgaaggagttagcagaagaaatgcaagcgataactaaaggactggaaaaagtggagcaggaactggcaacagctgaaaaggatccttcagagacagagatattttacaggaaactgaatttattccttgatgacgcccaagctgaaggaaggtcgttagcttcgctttacagcagtgcggggaaaagtgccgattctctagcacattattttggtgaagatcccgtgcggtgtcctttcgagcaagttgtctcaacgttgctaagcttcacgaagacgttcgagcgggcccatgcggagaatgttaagcagatggagctggagaagaaaagagcacaagcggaagcagagaaagagaaggccaaactaactgcccacaagaagagggagtcgctggagcttggaatttcaggccggtgacacaccatatattgcatctgtggatagcacgcacttcactaattctgtgccgcctgatcacctagaccagcggcagaaaattttgtagcgctccttcagcgtgtatcacaaggaagctagggagaagtaatgatgtgtagtcctaatataacagttcactcgatgtacatagcagtttcagatctgttgcttctgtaaagaaaggttccacagctagctcacgaagggagctgcagtctctttggtttgtcaggaagttagggagaagtaatgttgtgttagtcctaatgtaacagttcacctaattagcgagaagcaatactgtacatagcagtttcaggtctattgctgttgtaaagaaaggttctgcaaactcgtttagctctcgatttatcttggggaattcacctgttactgccacttgctatagcaaatctgtaatcttgcgagtac

SEQ ID NO: 133274 - DNA, 1978 bp, Zea Mays
ttcggcaccccagcggcccagccgtcgccgcgtgcgagtcccccagctccgggctccggccaccttctcgagcaccgctcgcccggagaataatcccgccgcagacgccgacgccgccattagcttgatgaatcaaaaacaaggagagagcgacgaggacgccccgcgctgccccacgccccgtgggttcgtcctcgggcgctgctccctgtgcggagcgatggatgagggcgcggaaggagctgctcccgcagtcgctgttgggcacgagacgttgaggcaaggaggagacggaggtgaagacggcgtcggcgacagcgatgactacgctgcaagctgccccccgcaccctcggttcgtccacgggctctgctcacggtgcggggcggagaaggaagaggaggatggaggagttgctcccccccccggagtcgccgttggtcacgagacgatgaggcaaggaggagaccgagacggcgactactacgctgcgagttgccccccgcaccctgggttcgtccatggggtctgggaggcggctggaggagatgctctccccggagttgccgttgggtacgatgtgacgaatcaaggaagaggagacgaggacgataacagcgacgaagacgaagacgacgacactgacactgtcgtcgagtacatccacggcgagggcccggtgctgccagtgccagccatagaggaggcgatgagcattgtcagcgcgtccgacagggcgaccctcatgcgcgagaggaagctgatcctcatcctggacctggaccacacgctgctcaactccacgagtctatacgacctctcccccgtcgagcaagccaaggggtttacgccctacacatttggagacaccagcatcgacctcttccgagtggacatcgacaacctcagcatgctcgtcaagcttggggcgttcgcacggggcttcctcaagcaggcgaacgccttattcgagatgcacgtgtacaccctgggcatccgagcctacgcgagggcggccgtccggctgctggacccgaacggcatctacttcggcggcaggatcgtgtccagaaacgagtcgacgaaggagaacacgaagagcctcgacgtcatccagggcgccgatcccgccatggtggtgatcctcgatgacacggacggtgtctggccggggtacccggataacctcatcctcatggacaggtaccgctacttcgcctccacctgccgcacattcgactacgacatcccgtccctggcggagcagggcttggaagagagggagcacgacggctcgctggccgtggtgctgggcgccctgcagcgcatccaccagggtttcttcgacggccaccgcgcggacgtcagggaggtgatcgcgaaggtgcggagccaggtttgttgaggtttggttgttggcatccagtaatatccaagcagattctgcgtgcgagcgtatattctagttcagattgttgaggtttcagctgaacttgtattcagttactttcagatgtggaccgcagcgcagcaccgagtttgaaactatatatgaaatcatgtcttgatgtttgataaataaaatgcatcaacggtccacgaaggaaattccacggcggagcagcagcacgcctcgccggcacccgacaccaagcacggcaggcagggtgacgtgctcccaagtccccaacccattccgtgagctcgtggtctgcacatgagccaaactttgggtaccgccaagcatcgtcatgcctcacgccagccacccaccggggcacgtcaacgtccccctgacgacaaagacgaaattgacagtttcctttatcattggcagcgctgtttgggcagcagctgcagcagcaaaatcttcaggcatacagtaggcagccagcagctgcagctgctgcagaattagcacagcctatagatctgtactgtacaataatataatactaatatattcactaattttact

SEQ ID NO: 133275 - DNA, 207 bp, Zea Mays
atggggtatgatgatgtggtgttccagaacttacatcatgtttgtgtctttaaggttgctaaggagcacaagaagccttcgttatggtgggtcgctgaagttatcaagtcacttggccttgatcataaagcaatagataactatattggtggtccgattgcggatgaagaaaaccgtgttgtcaaagccgaacagcatgaacattaa

SEQ ID NO: 133276 - DNA, 2380 bp, Zea Mays
aagagaagaatagaagaaaacaagatagaggaaagagaaattccttataactgctattatgtggaggcgtggaacgctcggagcccaatccaaagaagcccaccggcccacctcacaacggcctgttccgcgccctaagtttgctgcaacgccgccaccaatttgcagctccagcaaacggctcgtcgccgtcgcggactcgcagccactccggagcgttgcctcacctgtgtgctcctcgccggcctcgacaactccccggattgtcatagtcgaggcggttctagtcgctgatggtggccatggcgaggaaggacgaggaagaggggcccgcggaccgcgtgccgcacctgccgtggatgcggtaccccgtcgatatcgacaccttctccggccgccccgtcacacagctaccccgcctcgacccgagactggtagaggctttgcagagaatgggaattgaatcatttttcccagttcaagaagcagcctggctggaaacaattggtcctggcgcttttgagagggatatctgtatcaactccccaactggatctggcaaaactcttgcttatgccctacctattgtgcaaatgctctgcacacggaaagtaaggtgcttgcgagctttggttgtgcttcctacgcgggatctggccttgcaggttaaagaggtttttgatgctattgctcctgtggtgggcttgtcagtaggttcagccgttggtcaatcatcaatagcagatgaagtttctagtcttgtccagaagcccagacaggagttttacccaactattgacaaagaatacgtccaaatggaaccacggactaaaattgatatattggtggcaacccctggaagactcatggatcacattaacatgacaaatggtttcagtctggagcatcttcagtacctggtcattgatgagacagatagaatgttaagagaggcttatcaatcctggttgccaacagtgatccaacttacccactcaattggtcaagatcattcctgtcatgacattgatgggaaaactctacttcatccattgactactattagaagatcgggtgtggagcgtgggtttaaaagtaaatgctatccaagattggcgaagatagttttgtctgctacactgactcaagatcctagcaagctatcacaactcgaattgcaccatcccttgttgttgaatagtgggaagaagcgctatagaattcctacaaaacttgaatcctacaaactgatatgtaaatcaaacttaaaaccactctctctcattgttcttctccaagaactgcaagggaataagtgcttagtttttacctcatcagtggaatcaagccacagactaagcactttactgcgttttttcgaaaacttaccctttaaattcagtgaatattcacgtttgcagcgtgaatctactcgaaggaagacactggaggccttcaaggaagggaaaatcgatgttctaattggcacggatagaatggctcgtggaatacatattgatggtttaagatatgttatcaattatgatatgccaccatatgtgaaaacgtacatacatcgagcaggccggactgctagggcaggggaatctggttcctgcttcacctttttaagaaaacacgaggttaaaacttttgacaaaatgctcaaaaaggcagacaatgctggctgcaatcttcattcattgcctgaagaatcaatagaaacacttcgtccagctttctccggtgctctgaggaaactggaaggagcactggaatcagaagcagtgaagaaatatgatttaggagataaaacgccaggtgcttctaaacgaaagagaccaaatcagttgtgcaagcaatagtgctctagttctaacgtcttgacattacaatgttgcacctgcatgtctacagagttacgacctttagggctggttcgatgataagggaattagaggcgattgagggctgatttggtgaccagagaatcgaagggatccataggagaggaatcctcttgctattcaaaccaaggaaatctcttgctattcaattcacttgaattccctgctcatcaaactagcccttactactttacgtttgaggggagttcctccctcgaaagcttttgaattcacagatataatgagaatgagtccatgaagttggtgtagaaatatcttccagttgtgcgaggaaaattttacaaccagcataactgatgagaactgaaaaatatccagcatattttcttatatttatgtactagtcagcacagacatgtttagctattcagatttttgagaatgaaaccctgaaggatcctacctattcagaagatctaatgttgagtgcagcagcagtagtggtttcacaa

SEQ ID NO: 133277 - DNA, 2323 bp, Zea Mays
aagagaagaatagaagaaaacaagatagaggaaagagaaattccttataactgctattatgtggaggcgtggaacgctcggagcccaatccaaagaagcccaccggcccacctcacaacggcctgttccgcgccctaagtttgctgcaacgccgccaccaatttgcagctccagcaaacggctcgtcgccgtcgcggactcgcagccactccggagcgttgcctcacctgtgtgctcctcgccggcctcgacaactccccggattgtcatagtcgaggcggttctagtcgctgatggtggccatggcgaggaaggacgaggaagaggggcccgcggaccgcgtgccgcacctgccgtggatgcggtaccccgtcgatatcgacaccttctccggccgccccgtcacacagctaccccgcctcgacccgagactggtagaggctttgcagagaatgggaattgaatcatttttcccagttcaagaagcagcctggctggaaacaattggtcctggcgcttttgagagggatatctgtatcaactccccaactggatctggcaaaactcttgcttatgccctacctattgtgcaaatgctctgcacacggaaagtaaggtgcttgcgagctttggttgtgcttcctacgcgggatctggccttgcaggttaaagaggtttttgatgctattgctcctgtggtgggcttgtcagtaggttcagccgttggtcaatcatcaatagcagatgaagtttctagtcttgtccagaagcccagacaggagttttacccaactattgacaaagaatacgtccaaatggaaccacggactaaaattgatatattggtggcaacccctggaagactcatggatcacattaacatgacaaatggtttcagtctggagcatcttcagtacctggtcattgatgagacagatagaatgttaagagaggcttatcaatcctggttgccaacagtgatccaacttacccactcaattggtcaagatcattcctgtcatgacattgatgggaaaactctacttcatccattgactactattagaagatcgggtgtggagcgtgggtttaaaagtaaatgctatccaagattggcgaagatagttttgtctgctacactgactcaagatcctagcaagctatcacaactcgaattgcaccatcccttgttgttgaatagtgggaagaagcgctatagaattcctacaaaacttgaatcctacaaactgatatgtaaatcaaacttaaaaccactctctctcattgttcttctccaagaactgcaagggaataagtgcttagtttttacctcatcagtggaatcaagccacagactaagcactttactgcgttttttcgaaaacttaccctttaaattcagtgaatattcacgtttgcagcgtgaatctactcgaaggaagacactggaggccttcaaggaagggaaaatcgatgttctaattggcacggatagaatggctcgtggaatacatattgatggtttaagatatgttatcaattatgatatgccaccatatgtgaaaacgtacatacatcgagcaggccggactgctagggcaggggaatctggttcctgcttcacctttttaagaaaacacgaggttaaaacttttgacaaaatgctcaaaaaggcagacaatgctggctgcaatcttcattcattgcctgaagaatcaatagaaacacttcgtccagctttctccggtgctctgaggaaactggaaggagcactggaatcagaagcagtgaagaaatatgatttaggagataaaacgccaggtgcttctaaacgaaagagaccaaatcagttgtgcaagcaatagtgctctagttctaacgtcttgacattacaatgttgcacctgcatgtctacagagttacgatggtccatgagcatggaagaaacgtgaggaggcaattgattcccagttcaaatcatgaactagaatggggcatgttaaacctacaatttgaagtatgcttggcctttatcagtcaaatttgagccaggttattctggcttgggcttgaaatgttgagccaaatatttgttcaactatttaacttgaaccccttatattaaatagagatatgttaattttctgctttcttcatttgtttgtatctcgtataagatcgtacagttcagacattttgttctccactaacaaaatattgtttttatatggtactgcttgactgaagccatgctgttttctattgtgcctctcagacctttagggctggttcgatgataagggaattagaggcgattgagggc

SEQ ID NO: 133278 - DNA, 3546 bp, Zea Mays
agtattaagagattcagataaaacaaaaagaatacaccgcggagtagcagtacaaatttacggagagatagagagagggctttgacagtttcacaggaggtagcagtggtctcgaatggcttggttgcattgcacggcggagaggatcacgcacgctgtagttaccagtggttgcttggacatgggcggggtccactcgcttttcccgccgccgccaccaccgccattttgacccacgtatatctaccatccatggctgccagccatgggaggatgctcgccaccgcaccgcccgtgccacaggaaccaaaagctacagacctctcgtcaatccatgctgagcagcagtggcgctgtggaagaggcggagcggaggggaggggaggggagccgagcttggcgtggactgtagtgactgctgagcttgcttgtgtagaagaggtgggaaagagggaagagtcagagagggagacagaggtggcttggttcatctgtaacagtcgccatctctgcctgctttccagctcctttgcttgctttccctgcccatctcttttgttctggcctgccctctccatcccgtccaactccctatccttcctccttttgctttcccacatctttgctccaataatgatggcgtggtggtgggtttggtcgtgaacctgccgctgtggctgtgctgcatcccccaccctcgccgctccctcgtccaaatccaccagccgttcgctttcctctcctctcctctccatcatcccggccggctcgccagtcgccaccctccctttcctcttttcagctacagttgagcttgggcagtagtaggttggttctgcttcccttcccctcccccgatcccttttccttgctggggatcgggaggccttcaggcttcaacccatcttcctccctgtccacatctcgctccttgtttggggtagtgccggctggtggtgccgctactgctagccgggaacccaatttcttgataggactggacgactggtgcgtgccaaccacgagtttttcctgttcgctttgctttctcggctcagctactgctgctctgctaggaacaccaacagtagtgtgttcttgcgccggcttttcttgccgtgtttcgggtcgatattattgggagggtgggtctcccgtcccgtttcgatgaggccggaggagagagatgctgccgtggggagagtcagggaccagttccccgtcggcatgagggtcctcgccgtggacgacgaccccgtgtgcctcaaggtgcttgagaacctcctgcgccgctgccagtatcatgtgacaacgacgaatcaggctgttgtcgccttgagtatgctgaggcaaaacagggacctgtttgatcttgttattagtgatgttcacatgccagacatggatggctttaagcttctagagcttgtggggcttgaaatggacctccctgtcattatgttatcggtgaatggagagacaaaaactgtaatgaaggggataactcatggtgcctgtgactatctcttaaaaccggttcggctggaagagcttaggaatatctggcagcatgttgttaggaggaaattcagtaactgtgatcgtgctaacaatgatggctatgaggagtgcaataggccatcaaatgcagattttgatcttgctcacagccaaattacagctgggccacctgaccaaagtgggaggcccagcaaaaagaggaaggaatatcatagtgaagaggaagatgaaggagaagagagtaatggccaagataacgatgatccttcagctccaaagaaaccaagggttgtttggtcagttgaactgcaccgaaaatttgttgctgctgtcaatcagctaggaattgacaaagccgtgccaaaaaggatacttgagctcatgaatgttgagagactcaccagggaaaatgttgcaagtcacctgcagaagtatagactctaccttaaacggctaagtgctgtggcatcacaacaggctagcattgttgctgctttgggaggcaacgacccctttatgcggatgagtgcatttgaaggactccatggttatcaatcttttgtctcttcagcagctctgccatctttcagtccacagggactgttaaatagaaataatccagcatcatttgcgattcaaggggtgtctgcttccaggccaattcagattgcaaccggcaataccacaatgagtcattccattggcgatccaaatgataaatatcaccttagcttaccaggcactagttgcctacaaggaaatctagcacaaggtttgccaactccagttgggcaggtccagctgccacagaagtggatacacgaagaaaccgacgatctatctactatcctttctgcgagtggccgggctaatagtggtgttcctggcacactccaaagtgtcacgaacagtcacttgctgcagcaaggctttgttgaacgtagacaagacaaagttgttatccagccatcttcatctgcaagttcagatcgtcctgaaggcactgttggagtttcctccagtctgatggattcctgtgcaacccagcagagggttgttccattgtctgccttctctagcagtgcatctccaatgaatggctcgttttgcagcaacggtgtagctgagttgggtgctacatcctctggaggtacaagtattttcccctccaatgacctgaggatagaaagagacagcaaagtgggagctagctcttttggtagtgtgatacttctgtctccagacactgtgccaaaccaaaaatacttgaacttcggcggtggaagcgatttgagatcgaacatggagggagggaacgcaggcaatctgttgaatcccaagctactatggagttgtttgccggcctctcagccgcctaatcttatcggaagtcatcatcccatgagccaaagactgaaccttggcggctcaatggtcagacagacaacagcaagtgcttcggcagctgccccacagacgaggatcgacatgtttatctctggagacgctccgaagagcgcgtcggatttgagcttccctaaggtccacagcgagcttagctctagcagctgcagcttcgacggcctcctcaactccataatcaaagtggagaaggacgatgcttccttcagcgatgacctgggatgcgacttgtactccctgggtgcctgtatatgatcgctaccttccacgtatctgcatctgcatctgtgttaatctcccattgtatgctgtgcagctagtgttaatcttaggtagaattgtagctgtgcgcctatctttgcttgcccacagccaagaaaaaaaaattatgtctgcacgtgatgtgctagcagtaagatatctggattgtggaagtcaatgcccatttgctaaatcgagctggagacactgttggcacgagttgattctaaaagcggccttgatgatctaggcccaatttgaatgtcgacacactggtaatgacacgtggtgttcatgtaaacaaatccaaaagttcaaaacaaattgggagatttgaagtcg

SEQ ID NO: 133279 - DNA, 1699 bp, Zea Mays
gaaaaacaaggccgcaggcccgcagctccgcgcgaacaacagccaaccacccacctcacgtcgcgacctgcgagctccacctccggcctccgcccgcccgcccacaccaccaacgcccggaataggcagttgcagttgcagcagcagccagccagacccgccccgccatcgtaggaggaggcccatgccgcgggggcagcagggggcagggtagaatgggcaacgtcacgtcgtcggtggcggcgcggttggccttcttcccgccggagccggcgacgtacggcgtcgagcccgcggaccaggacggtgctggcgccggctctctgctgcggatgacgggggtgtcgccggacgcgggcgtcgaggtgcgcgcgctgcccaccagggccggcacgcgcgtcgtctccgccttctggcgccaccccgcggcgcggctcacgctgctctactcccacggcaacgccgccgacctcggccagatgctcggcctcctcctcgagctccgcacgcacctccgcgtcaacatcatgagctatgattattcaggctatggtgcctctacaggaaaaccatcagagtacaacacatacaatgacatagaggccgtttatgattgcttgaaaaaggagtatgggatagaagaagaggatttaatcttgtatgggcaatcagttggaagtggaccgacattgcatttagcctcacgtctggaaaatataagaggggttgtgcttcacagtggtatactctctggcatacgggttctgtatccagtcaaagtgacactttggttcgacatcttcaagaacatcgacaaaataaagcaggttgactgccctgtgttggtcatacatggcacagccgatgagatcgtggacttcacgcatggcaagcggctgtgggagctagccaaggagaagtacgagccgctgtggatcaaaggcggtgggcattgcaacctggagacgtacccggagtacatcaggcacctgcgcaagttcataaacgccatggagaagctggcaaaggacagcaaggcggccagggcgccgccgccgtcgagcatggccgacgaagtaagacgcaccaagtgcttgagattcgggaagagatgaggctggcggcgaggccatgcgggtctcggccgtctttagctgcgtacgccagtcactaaccccctgctgcattgcattgcattgctttgctgctgctcgtgccgtgtgcaagtcgaaggagcgatgtcactggtcgtcgatgaggaaggaagggactaaggaaagcaggcagatgaatggggattgtttgcctgttgagttgtacgtgctgctctctctgcagacgtcgacgacctgggaaggaaacgcagcagcaaccctaggtcatgtatgatccgtgtgagctgagttcagagtagagtagacagaaagacctgtggctgctgcagtgtgctgcagatcgggagatgcctttgctttcctagtggttgtgcaaaggaattcgtagcgtaatttttctttctcatttttcctacctgtattgtagtcactgtgcaaaggaattcgttttgattgattgattggttgctgcaacaaagtgaagtgcgctgtgacacttgacgacgtagaggctagaaacgagaccctgacgagtgacgaccatattgtttccttgcggcaatgttcgggtccgaccagaggag

SEQ ID NO: 133280 - DNA, 4948 bp, Zea Mays
cgatcgcctacgccccacgcaacgccacgagcccacgacgcaccccgcaagcgaagcaaagcaagccccaggcggcgccgccggcggaggacgcgatggggaataagatcgcgcggacgacgcaggcgtcggcgacggagtactacctccacgacctgccgtccacctacaatctcgtgctcctcgacgtcgtcagccgcggccgcttcctcaagtccgtccgctgcaagcacgacgaggggttgctcctcgtcaaggtctactttaagcgcgccggcgagtccatagacctcaaggagcacgagcggaggctggagcggattaggaacgcgttcaaggggatcgaggggtcccacgtatggcccttccaggtttggctgcaaacagataaggcagcatatctcttgagacaatacttcttcagcaacttgcaagatcggttgagtacacgccctttcctcagtcaggttgcaaagaaatggcttgcctttcagttaattcatgcagtggaacagagccatagtaagggaatttgccatggtgacataaaatgtgaaaatgtgctcgttacttcttggaattggctatatcttgcggactttgcatcattcaagccaacgtatatcccggatgatgacccgtctgatttctcattctactttgacactggaggaagacgacgatgctatctagcacctgaaagattctatgaaagtggtggtgaatcccaagttgcagcagacgcacctctgcaaccatctatggatatattttctcttgggtgtgttcttgctgaacttttccttgaaggccagccactttttgagctttctcaacttctggcttaccggcgtggtcaatatgaccccatacataccctagaaaagatacaagatactggtatccgtgacatgatacttcacatgatccagttggaccccaaaaaaagggtaccatgtcgaagctatctgcagaaatatgaatctgttgtgttcccattttatttttcaaaatttctgcacaagttcttctcggatatcgttccacttgattccgatgctagggttgagaagactcaagaaaattttggaaagatacaggaaataatgatgggtagttcaacaattgaacaaattgagaggtctacatcgtgtgagcatagtgaaccatctgggagaaaaggcatggaaggggaaattttaaactcgccaggaaattatagaaatagcacatctgtatttaagaaaaatactcctgtagaccatcaacatattattggagatatcaatttcctcctcaaagaagtggagggcaggagtaacaacacaagcacaaaggtcacaaaagacacttatcattttgttgcaccgagcattacctgtgcaaatggtgttcagtcctctcatctagttaatccagcaggaagacaaattggaactggtttgatgggccacaaacatgttgtatctcatgtgaagatctcaaagagtaacatacgctccttggtggctacttatgatgatcaatcagatacctatagttttgatatttttcagcagacagactccaaggtgagctgtgaaggcatggtcttgcttgcctcattactttgctcatgcatacgcagtgtgaaaaaacctgagctaagaagggccagcctcattcttctgaagttctcgtccacatacatagatgatgatagtcgcctacagctagtggttccctatgtgattgcgatgctttcagatccgtctgccattgtccgctgtgctgctttggaaaccctatgtgatgttctttgtcttgtgcaagatttccctatcagtgatgctgttatattccctgagtatatcctcccaatgctctctttgctccctgatgatacggaagagagtgttagggtttgctatgctagcaatattcataagctggctttaacagcttataggttcctacttcgttctcgtagcattgcagatattcgacctctggatgaatcagtggtagctcacagatcccaatctgcagattcaccagcgaagaggcaagataatttttttcgccagcttgcagaactgaggaaatctatttatgagatagtgcaagatttggtgatgggacaaaagcagacacctaatacccgtagagctcttctgcaggatataggttatttgtgttacttctttgggcacaaacaaagtaacgattttcttcttcctatacttccagcatttctaaatgatcatgatgagcagctccgtgcagttttctttggccagattgtctatgtttgctattttattggagcaagaagtgttgaggaatatcttctgccatatcttgaacaggcactaagtgatgacatggaggctgtccttgtaaatgcacttgattgcttgaccatgatgtgcagaagtggttatttgaggaaaagagtaattgttggtctattggtaaagattctccccctgctccggtatccaatcaattgggttaaacagtctgctgtaagatttgttgctgcctgcagcgagagcttaggatctgtagatacttatgtgtatctttctcctcatctaaggcagttcctacacatggagccaccttcattggcctctgaaactgctcttctttcatgtcttaagcctccactaccaaaatcaatcttctatgaaggtttagagcatgctcaggacattggagacattttactgaagagcagtggcaagaaagaacagatagtacatggtggaagatatcctggtacagcacaaagtggatccttggccaaccttgaagatatcctgcgaccgaaaggccctaatatttccagcagcatgtccttgtatgtcaaaaactctgtttcttttgaaaaatcactatattctggttttgctctgcatgcatctgctgcaaatagctccttttatgatggcttatctaaaggaataccatcatattctttttgtactgataataagcggggtttaggagaaacacacatggtccctgattcatcagtgtataaagcttcaataaggctaccttggttggaaccaaaccgtcctgccatgcagaccagagatgatcattttagtagcacgcgacaagatttcagcatcaatgactctatgaagagcaattcctctttgcaaggggatatcattccgaactctgatactggagggttgcctttctccagatcagcagtgaacttggagactggatggaagcctcgtggaattctagtggcacatctccaggagcatcgctcttctgtcaatgacattgccgtatcaaatgataataccttttttgtgactgcttctgatgactcaagtatcaaaatatgggatacaagaaaattggaaaaggacattgctttcagatctaggttaacatacagcatgggtaatagccgagctctatgtacgacaatggttcatggtacttcacaggttattgtcggtgccagcgatggaacattacacttgttttctgtggattgtgcacgcagcgttgggactgttgtggaaaggtatgctggaattgttgatgtaaaaaggaacgagattaaagaagacgcaattctcagcgttgtaaattgttcaaccgacagctttagcccgactgttcttttcagcactgaacattgtggcatccataaatgggatacaagaaccaactcagaatcttggtcttttaaatcctctccggaggagggctatatatcggcacttgttgtgggcccgtgtgggaattggttcatctcaggttcttcgagaggcgtccttacactgtgggataataggtttttagtacctgttaaatcgtggaattattcaacattaagcccaatagagaaactatgcttgcttatacctccaccaagttcgatatcctctgctggaaggcctttagtttttgttgccgctggatgcaacgaagtttctctgtggaatgctgagaatggaaactgccatcagatgtttagaacagcaagcactgacaatgaagctgtgatgtcaaaggcgccatcgaggcctgttaacaagccagtcatcaaagatataaggcgagcaggcaattataagtacagaatcgatgaattgaatgacccacctgtacgccatccagggatacgttctttgctgcccttgccaggtggtgatctattaactggaggaacagatttgaagattcgttactgggatcaagcaaggcctgagcaaagcttctgtattgctggtccctcggcgaaagaagtccgttcggcaaaaggagatatcttggagaaagcagttggaaacgatgagtcttacgatataagatccagttttggaatacaggtcgtgcaggaaatgtacaaacagagtagctcggtctccggtttgacgcccaagactcagctcgcggtggcagctgcagattctgcagggtgccatcgtgacgcaatactcgcgttggcatccttcaacttgtctagccagagattggtatcaggcagcagagacggcgctgtcaaagtgtggaaatagcttctccagcatggggtaagattacaagtccacaggcgtgtacatattttggcctgtctagtgctcatacagtacatatgccactagttattgctgtacagaagattattccgatcaatacaagtcaaatttgacatgtacgctttcatccggtgtgaccacctcatctgtttcggttgatataaactataatcacttatcttataggagtatcgtggaatagcaaaaaataaaataaaataatcatgacgaataggaggcaggaggctgtccgactacaactgtatagggctccaatgtctaatcatactcctctacacaagaagtgtttgtagatggctgttattttggataatgaagggcctctaggtagtgttggggccgcaattaaaagaggcctggatgctgaa

SEQ ID NO: 133281 - DNA, 2659 bp, Zea Mays
cgtcccatcgccgtcgtcccagtccacgtccacgtccacgccgacgcacccgcatccctctctcgcctgcgccgcagctatgtcgggctgggacgagggcgccgtgttctacagcgaccaggcgcaattcccccgcggcggccctggcggcgacccagccgccgacctcacccgccactccgccctccgcaaattcaaggagtttctccgcggcttcactggccccaccggcgacttcccctaccgtgagagcctagtacacaaccgcgaccatgtcaccgtcgctattgaggacctcgacgccttcgatgccgagctctctgacaagatccgcaagtcgccggccgattatcttcctttgtttgagacggctgcggccgaggttctcgcaagtctccgttcgaaagtcgccggcgagaccggagagatggaggagcccgtcactggagatgtccagattttcctctcctccaaggagaactgcctgtccatgagatctgttggggcggattacatgtcgaagctggttaagatagcgggaatagcaattgctgcatcgagagtaaaagctaaggccacccatgtaactcttatctgcaagaattgccggagtgtgaggacagtgccttgcagaccaggcctcggcggggctattgttccacgttcgtgtgaccatgttcctcagcctggagaggagccatgccctctggacccttggattgccgttccagataagagcaagtatgtggatctccagaccctcaaattgcaagagaatcctgaggatgttccaactggtgagcttccaaggaatgtgctgctttctgtagataggcacctagttcagactattgttccagggactagattaactgttgttggcatctacagcgtgtaccaagcatccacaacccagaagggtgctgttggtgttaagcagccttacattagagttgtgggtttagagcaatctcgagacaataactcaaatggcccctcaaacttcactcttgatgaggaaatggaattcaaagaatttgcacagaggccagatgcatatgccaagctatgctcaatgattggtccttcaatttatggtcattctgatgtcaagaaagctattgcatgcttgttatttgggggatctaagaagaggctacctgatggtgtacgtttaagaggggacattcatgtcttgcttctcggtgatccctccacagcaaaatcacagttcctaaaatttgtagagaagactgcacctattgcagtatatacatctggcaaaggatcgtctgcagctggtcttacagcatctgtaactcgtgatagtagctcgcgtgagttttatttggaaggaggagccatggttttggctgatggtggagtagtttgtatcgatgaatttgacaagatgagacctgaagacagagttgcaattcatgaggccatggagcagcagacaatatctattgccaaagctggcattacaacagtactcaattcaaggacttcagttcttgcagctgccaatccaattgcaggacgctatgatgatcttaagaccgcgcaagataatattgatctgcagacgaccattctttctagatttgatctaatctttatcgtcaaggatatcagaatgtatgatcaagataagagaatagcaagccacattatcaaggtgcatgccagtggtgctgcagcttcatccacaaacacagaggggagtgaaggagagaattggctgaaaaggtacattgagtactgccgcgccacatgcaaaccacggctttcagaaaaagcagctgagatgctgcagaacaaatatatcgagattagacagaaaatgaggcagcaagctcacgagacagggagggccgcagctatacccatcacagtgaggcagcttgaagccatcatccgtttgagtgaatctcttgcaaagatgagattgacaagtgtggctacaccggagcatgtcgaagaggcattcagactgttcaatgtttccaccgttgatgctgcaagatccggaatcaatgagcatttgaacctgtcaccggagatcgcaaacgaaatcaagcaagcggaggcacaaataaagagaagaatgggcatcggcagccacatatccgagcgacggctgattgatgatctaaaccggatggggatgaatgaatccatcgtcagaagagcccttctgatcatgcatcaaagggacgaggtggagtacaagagagagcgccacgtgatcgtccgaaaggcttgaggtggagaggccagtcagattcacggcatacaacgtacactggaggcggtccttcctcttcggacgtgtgtataccttcactgaaactgcacctttgtctgtccagaggacgaggcatgccttagttgatctctgacatgactcttgtaatctgcacacgagtggatgcaaccttttgcttcgtgcaaatggagctttgtagctgtaccacagtagtctgttgctgcctgtgatcctaaaccatagtgttgtgagcatgaagacttcgtttttttggaagtaaccataggttctgaactgcattgtgctgtgtagctcgtcaatcaattctggaatgcgaactttgtttactgcatcaccaggagtaggacagacagtgtgtggagctta

SEQ ID NO: 133282 - DNA, 882 bp, Zea Mays
atgcggaggaggcaccgaaggccacgagtagcctcggactccgcgggaaggagtaagaaggagggcatggggagggagctgggctcaggcgctgcggtagaaaacgccaggcccgcgtacacgggggctttggctggtgatgcagcggggaccgccaccgtcttcttcgtcggcactacggcgggcaccgaggcagaaaacacccggcgcgcgaacacggtcgcgttggctggagatgcagcggggggcgacaccatcttcttcgtcggcaccacggcgggcgcctgcggcccgatccgaccagtggagcagagggcgcgctggtcaaccgccgcggcttgcgccgcggggggcgctgctatcaccggcgtaggggctggcgcgggagctggagcgggcggttcctcgccgcgcttcaagatccggacctcctccatgacaagccgccggttgggattctccttaacgggggacagctgcttccgcgccgaagcagccggcctagccaccggcgaacggcgtccagacgctgcaggacccttaacgggcgtcgccgtcttctgcgccgcagcaggcttcggcggcgacgtcgaggctatgggcgccgcggcccttgcgggcggcgaagacgcggccgccggcttggggctacggcgccggcgcggcttcgccggggacggggtgtacgcgtcgagatgcaggcggttgttgagcgcatcgtgggatctgagaaccgccgtggccatggcggctatggaggattcgcgagggaggtcgctgcctggctaaccctaagcgttaggggagaggaggcgggcgcggaggagggagagaagaggaagcaaagcaaatacgagacggaagggttgcggtggagcggat

SEQ ID NO: 133283 - DNA, 789 bp, Zea Mays
atgcggaggaggcaccgaaggccacgagtagcctcggactccgcgggaaggagtaagaaggagggcatggggagggagctgggctcaggcgctgcggtagaaaacgccaggcccgcgtacacgggggctttggctggtgatgcagcggggaccgccaccgtcttcttcgtcggcactacggcgggcaccgaggcagaaaacacccggcgcgcgaacacggtcgcgttggctggagatgcagcggggggcgacaccatcttcttcgtcggcaccacggcgggcgcctgcggcccgatccgaccagtggagcagagggcgcgctggtcaaccgccgcggcttgcgccgcggggggcgctgctatcaccggcgtaggggctggcgcgggagctggagcgggcggttcctcgccgcgcttcaagatccggacctcctccatgacaagccgccggttgggattctccttaacgggggacagctgcttccgcgccgaagcagccggcctagccaccggcgaacggcgtccagacgctgcaggacccttaacgggcgtcgccgtcttctgcgccgcagcaggcttcggcggcgacgtcgaggctatgggcgccgcggcccttgcgggcggcgaagacgcggccgccggcttggggctacggcgccggcgcggcttcgccggggacggggtgtacgcgtcgagatgcaggcggttgttgagcgcatcgtgggatctgagaaccgccgtggccatggcggctatggaggattcgcgagggaggtcgctgcctggctaa

SEQ ID NO: 133284 - DNA, 100 bp, Zea Mays
aaaaatatcttctaccagtttatttaaatggctatccaaaaataatcatctttgattctatttttctcgctagccaaagatagaaaacgtgaatgactct

SEQ ID NO: 133285 - DNA, 2745 bp, Zea Mays
tcatccggcaaccaaccacgccccaaaagtctctccccgttgcttccctcccctagtaccagcaatgaacgacgtataaaccacaccaccgccccccgagtcctccctcttgtcatttcgccttcgcccccacccgcccctaccagatctgctccgccgccaccgacaccccctcctcgccttcctccggcgagctcctcgccggagcagggccggccgccgctaccgacccatcacccacaacaggccttactgccgcgtggcccagatccgcgcgctccccgccgatccagatccatggctcgccccggcgcgctcctcctcgccgtcgcggtggccgcgctgctcgcggccgcagtgccgggcgcccgcggattctacctcccggggagctacccgcacaagtacaacgtcggggacgacctcaacgtgaaggtgaactccctcacctccatcgacaccgagatgcccttcagctactacagcctccccttttgcgagccacaagacggtgtcaaggacagcgccgagaacctcggcgagctcctcatgggcgaccgcatcgagaactcgccctaccgcttccgcatgtacaccaacgagtcagacgtcttcctctgccgctccccaccgctgggcgccgacgccttctctctcctcaagaagcgcatcgacgagatgtaccaggtcaacctcatcctagacaacctccccgccatccgctacaccaggaaggacgactacatcatgcgctggacggggtaccccgtcgggatccgcgtcggcgtcgactactacgtcttcaaccacctccagttcaccgtcctcgtccacaagtacgaggatgccaatgtcgcgcgcgtcataggcgccgccgacgccaccgacgccatcccctccggggctaaggatgccgcctcctcctcccctggatggatggtggtcgggttcgaggttgtgccctgcagtatcaagcacaacccagaggacgtcaagtcgcgcaagatgtacgacagctaccccagcaagatcaagtgcgacccgaccaccgtgtccatgagcatcaaggagaacgagcctattgtctacacctatgaggtgaacttcgtggaaagcgacatcaagtggccctccaggtgggatgcctacctcaagatggagggggccaaggtgcactggttctccattctcaactccctcatggtgattgccttccttgctggtattgtctttgtcattttgctgaggaccgtgaggcgtgatctcaccaagtacgaggagcttgacagtgaagcgcaggcccagatgaatgaggagctgtccggatggaagcttgtggtcagtgatgtgttccgtgcgccaagcaacccgatgctgctttgtatcatggttggggacggtgttcagatccttgggatggcggttgtgaccattctctttgctgcgctcgggttcatgtccccagcctcccgtggtactctgatcacgggcatgctgttcttctatctggtccttggaatcctggctggatatgttggtgttcgcgtatggaagacgatcaagtgtggggatcactctgggtgggtcgctgtgtcgtggcgggtggcttgcttcttccccggcattgcattcctgatcctgaccacactcaacttcctattgtggggaagccacagcactggtgccatccctttctcattgttcgttgtgctgcttctgctctggttctgcatctccgtgccgctcacgcttgttggcgggttccttggtgccaaggctccacatattgagtaccctgtccgcacgaaccagatccctcgtgaaatccctcctcagaagtacccatcctggttgttggttcttggtgctggcacactgcccttcggcaccctattcatcgagctcttcttcatcatgtcaagcatatggatgggtcgtgtgtactatgtctttgggttcctcttcgtcgtcttgctgctcctggttattgtctgtgctgaagtttccctggttctaacttacatgcacctgtgtgttgaggattggaagtggtggtggaagtcattcttctcatctggatcggtggcaatctacattttcttgtactccatcaactatcttatttttgacctcaaaagcctgagtgggccagtgtctgctaccctctacatcggttactcactcttcatggtgattgctatcatgctggcaactggcacagttgggtttatttcttcattctgcttcgtccactatcttttctcatcggtgaaagcagattaagtttcttcctgctgaggattcaagtcactcaattgagaggtgagcagaatggacagtgaaaagtttgtagtcacaaatcttagttcatgtcatcttttggtatacaaaagcctggacaactattgcaagggctactaggattcatcaatggatctgtggagaggtgtttgcagcttgcacgatgtaataggttgaattgctttattctcatgtggcgttgctatagttgtttttagattaccattactatatctcaatatgtatgctaagtaccatatctgcttgaatttatgtttattgacattttccccgaatgttagatctagttatctacttatctgctgcaatgtatgtctgttgacatttgccccaaatgttggatccagttatcgccacctactaatagatctttgtagttccacataaaacataattgctgctagaaatcatcatgttggtatt

SEQ ID NO: 133286 - DNA, 2034 bp, Zea Mays
gcacttccgagcgatttcctcgtcatttctctcatccgctgcgcaccctctcccactcggcgaagaagtggggggaaaagctcgaaagcgggagccggcgagcgagatgggcgcagggagcagccgcgcggacgcgccgtcgcggcgccgggcgcgcctcagcctcggcgggtgcttcggggccggatcctcctcgtccgcgcacgacggcgggagcttcgccgccgccgggccctcctcctcgcgcgccatcgaggtacaatcacgacagtcagggcgacaagtgagtgccctgaattttcaggcttctctagctgctaaggatctccaggtttccagtgagtcaaatccaaggctgcattcgtcttcaagtaccataagccatcatctcagattcaatcacctcaattaccatgaaaacaaggaagatggcctggggtctgaaaacgctgaaacaagtggtcttcaaagctcatctaggaaacctgtcatggtaaggggaagtctcattaatgaagctgttaatggtgacatatcaggagaaggaataagttctataggatcagagctggaaaatgttcctagcacagtctccactaatgaaattggtggctcaacttctgaatctggtttgggcccctcatcgatgacatctgaaaggatcatgtctgactcagaagtagagatatctccgcaagggacctcatccacaactgtcatgacaagtgaaagatcagatgcatctcaatctagcttaacatctgtgttttctaactcttcaactgcatcatctgtgatcgtggaaccaatgccagatccaatccctacaacggcagatgtccccatattcagtgggccacatggtgaagctggagggagtatattacatgacgacatgatgagcattttctcaaatgacggtgtaggacgctctatagattcaagcagcagtgaaacaaggaggagtcacagaaggatcctgtgggatgcattttccaggcgtggctcaagaggttatccagaatctgatgctgatgaaatgggattttttagtacatggctagaccttggtgatgatatttttgaagagttgggggaatcaagatattttcatcgcaggcgacatggttcaatcagagtaagccagtattcaagatcccggattagggagcatcgccgtgctgtttttgatagtggtaatgaacaaaacactgctgcatgtcctttggggattcatcaaattggccgatgcacctgtaattctttctttattgctgaagaatctagcgcccgagcaagtatatcaagaattgtcatgttaactgaggcgctatttgaggtgttggatgaaattcaccgtcaacctgcatcactttcactttccatggtctctgttcaggctcctgaatctgtagttgattcgttgccatgtaagagctacaaaaagcttgagacaccccaatgcagtgatgatatggaacagtgccatatctgcctaaccgaatatgaggacggagaccagataagaacccttccgtgcaagcacgagttccacctgcaatgcgttgacaagtggctgaaagaaatacacagggtgtgccctctgtgccgtggagacgtctgcgaagtcgcctcgtgaagaccttggcgctgccatccttccgatgtggcgccggtggatagggcaccaccgccaggcgccagctgttccgtggttgaagctggttcggtcaggcaatggtgatccaacttggacagttgacaccgcaagagcacgtcaactttgactgtctccctgccgaagagaatggccaaaccaaccctgcgaccgatgagtcgctgttcctgtcatcaacttttaagataccgagactttgtatacagtagcttttgtagcctcccgcctcgtgtatgacagcctgtacatatttgtaaattctggaatcaaatgtcacaatcccctgttctcgtgacctgatgttgtagggaacatattcggtgctgatggagccgggaacagagatgtgctgatgg

SEQ ID NO: 133287 - DNA, 1982 bp, Zea Mays
gcacttccgagcgatttcctcgtcatttctctcatccgctgcgcaccctctcccactcggcgaagaagtggggggaaaagctcgaaagcgggagccggcgagcgagatgggcgcagggagcagccgcgcggacgcgccgtcgcggcgccgggcgcgcctcagcctcggcgggtgcttcggggccggatcctcctcgtccgcgcacgacggcgggagcttcgccgccgccgggccctcctcctcgcgcgccatcgaggtacaatcacgacagtcagggcgacaagtgagtgccctgaattttcaggcttctctagctgctaaggatctccaggtttccagtgagtcaaatccaaggctgcattcgtcttcaagtaccataagccatcatctcagattcaatcacctcaattaccatgaaaacaaggaagatggcctggggtctgaaaacgctgaaacaagtggtcttcaaagctcatctaggaaacctgtcatggtaaggggaagtctcattaatgaagctgttaatggtgacatatcaggagaaggaataagttctataggatcagagctggaaaatgttcctagcacagtctccactaatgaaattggtggctcaacttctgaatctggtttgggcccctcatcgatgacatctgaaaggatcatgtctgactcagaagtagagatatctccgcaagggacctcatccacaactgtcatgacaagtgaaagatcagatgcatctcaatctagcttaacatctgtgttttctaactcttcaactgcatcatctgtgatcgtggaaccaatgccagatccaatccctacaacggcagatgtccccatattcagtgggccacatggtgaagctggagggagtatattacatgacgacatgatgagcattttctcaaatgacggtgtaggacgctctatagattcaagcagcagtgaaacaaggaggagtcacagaaggatcctgtgggatgcattttccaggcgtggctcaagaggttatccagaatctgatgctgatgaaatgggattttttagtacatggctagaccttggtgatgatatttttgaagagttgggggaatcaagatattttcatcgcaggcgacatggttcaatcagagtaagccagtattcaagatcccggattagggagcatcgccgtgctgtttttgatagtggtaatgaacaaaacactgctgcatgtcctttggggattcatcaaattggccgatgcacctgtaattctttctttattgctgaagaatctagcgcccgagcaagtatatcaagaattgtcatgttaactgaggcgctatttgaggtgttggatgaaattcaccgtcaacctgcatcactttcactttccatggtctctgttcaggctcctgaatctgtagttgattcgttgccatgtgccatatctgcctaaccgaatatgaggacggagaccagataagaacccttccgtgcaagcacgagttccacctgcaatgcgttgacaagtggctgaaagaaatacacagggtgtgccctctgtgccgtggagacgtctgcgaagtcgcctcgtgaagaccttggcgctgccatccttccgatgtggcgccggtggatagggcaccaccgccaggcgccagctgttccgtggttgaagctggttcggtcaggcaatggtgatccaacttggacagttgacaccgcaagagcacgtcaactttgactgtctccctgccgaagagaatggccaaaccaaccctgcgaccgatgagtcgctgttcctgtcatcaacttttaagataccgagactttgtatacagtagcttttgtagcctcccgcctcgtgtatgacagcctgtacatatttgtaaattctggaatcaaatgtcacaatcccctgttctcgtgacctgatgttgtagggaacatattcggtgctgatggagccgggaacagagatgtgctgatgg

SEQ ID NO: 133288 - DNA, 106 bp, Zea Mays
tatataatactctctatttggaaaacaggtttgttatgcccatcaagaaattacatcttgctgcatgaaacgccgaaacgggccttagcaagtggatgcatgggtg

SEQ ID NO: 133289 - DNA, 489 bp, Zea Mays
atggacgacggcgactggatcacggcgaggtacctcctctcgtcgatcctcgggcggaacccgctggtggtggactacgtcgacgaggagtccttccccgtcgaccttcctccacctcccgcgccgtccccctcttcctccggcggccgccgcgcggagccgccgccgccggtgcgcgcgcccgcgggggtggccggcacggtgtgcgcggtgtgcacggaggagatcgcggcggcggaccccgtggcgcgcctgccctgcgcgcactggtaccaccacggctgcatcgcgccgtggctcgggatccgccccacctgccccatgtgccgcgccgagctgccgccgagggaagccgacgccggggaggatggccccgcccgcgccaagccgccgcccgcggggaccagcgccggcgcgacggtcgcggccgcacgcgcaaggcgggacgcgccgtacgagctcctcgccggcggcgtgctgtccggctga

SEQ ID NO: 133290 - DNA, 303 bp, Zea Mays
agggagggcccaccatgtcagcgccgccgccgccgccgtttctgtcctattctgctcttcctgccgatctgtgcgccgcctcttcttcatcccgtccctagcagccgatcccaactcccgatcttcggttcgtttgaggtatgactctgtattcgcctgttgggggtataatcaatttgggggctggctccttttttaagcgtttctgattgagatgacggaggtgcaaaatactccagcataattggttccttgcttatggagtatttgttaatgttgtagtactatgtgaacatcgaattc

SEQ ID NO: 133291 - DNA, 232 bp, Zea Mays
accataggcatacatggagccatcagaaatggaggaacgaaccacgttgcttcgtcttcatcgacactatgtacacacagttccagatctgcaggctacgagtacagtacggacagtttttgctctttattctgctaagaacgtagtacgatctagcgtcgcgtcgtcgaaccgatgcgtgcgcgcgaaatagtggcgcaccaccggcgctagatcaggaggagcagcgacg

SEQ ID NO: 133292 - DNA, 1430 bp, Zea Mays
gtctgcagaaccgaaaccacccacgcgcgctcgctccccgcgcccaattcggagatccacccccccaccgaatccgctcgcctgcgcctgcgcctgctacctgcgatccatctctcatggcgaccaccagcgccaggaggccgagcggcccggtgctctcggccgcgcactaccgctccgcctcgccgacgcgcgtctcgctcgccgggcagcccgtcagcgtcagcgtgtcctcgtcgtcgcggggccggcggacctgcatgtgctcgccgaccaaccacccgggctcgttccgctgcagcctgcacaaggagcgcgtcaaatatctaacacataaatttagaacaaacaattagagcttatttagatatccatatatcttccttaattcatgcatattaaagtgtcaagcaatttaaagcatagattaggggaatacatgagcatctaaacaaaacatttagcatctatttggatcccataaacttaaaaccggcatgtagaaagtgatttctatttcattattagattatcttttttccatttccaaccaatacaaaaacaggatcttagagaaaaaaacagtgctcgcagaatattgtccacttccactatcagcaaccaaacaaatgctatatgaattcatgtacgtgtacttttgtgtgtgtttactttcatacctgtatattatattcactccgtcctaaagtagttgattacattcatgtgtgtatattcatcccgtcctaaaacagttgatgtgctatatatgattctaattttgtgccaaaatatatagttgacattctcactcttcaagagaatacactcctctctttctaatacatcattttcccaatacctctctctctacttttaaacgtcattttttttatcttttgccttctacgtaggtctctatgataaggtctagaaaatcaattattataagaccggaggagtatgatcaagtctatgcagcgtggcatttctttttctcaaatgcaaaatggaacagaagctcttctgtgaaggactttgactgggcgacgcagtctcacccttgctcttcaatttagttggagatgtttctttatatgtgatgttggaaacagctaactgcaatggccttattagatgtttggtcccagatttggaataataggaggtttggcacatctacagtacaccgatcgatgacgtaatcctttttttttttggagtttggatgaggacacttgacactatctgtagtgcaggatgtatcttgtattcttgtcttgttaagaatttatctacagtacaatagaacgtacgtagcctgggtttaccctccaggcagggtagacggcgtcggcgtgtagtctcgtttttggtctaaccttccggcttcgaacacaaaaaaaaaagtccatgttttttctaataat

SEQ ID NO: 133293 - DNA, 535 bp, Zea Mays
atgcaatatgatttcctcgtatcacagagacaaagacatcctataataatctctattggttacattgcaacaccgtgcaataaaactatgatagactatttcgtgaggatgcaaggttgcaataatgctatcgattcgatacatctctcgttacatgtcatgtcagatatcgaggataagttctgcggccacaaaactcaaaatcatgaaggccttgtttagatgttgtcggattcaccttaatctacatatgtcggatgaattggggtagaatttagttcaagcttcactgtcttcaatccactccaacagatatgaattgatgtgaatctgactacattcgaagaaggccaaaactggagatctatatcccgactattctgaaatcactctatttcttcagtaggcaatccttgaaccccttatccagctcttctttattgaggttcctgccgatgaagacaatcttgttgatgcgcggctcatttggctcccacattctctcaggagatccctggaaaatgtcatggactcc

SEQ ID NO: 133294 - DNA, 1107 bp, Zea Mays
atggtggtgatggagatggtggtcacggagccagcaactcatggccggggggagcacgtcaaggcaccgccgttcatcaggcctgaggaggattacttcgccgagaaaagaaatctgatagttttattggatactggaagccaagtttggtacttcttctggaaagtgaactctggccaaacctcatcatgtctgcagcagcaaaagggtaaagaactcatgtaccagcaagctctgtgttgttttggaaacttcaatgcgatccagcttagtgaaccagctcctcttcaggagctgctgctgatggcactgaaagattatgaatcaatcggtgatgaaaatgacgaggagaaactggagattgcagaggcaaacttgaaaatctctactactctatatgtgtggactgtaggcgtccacaccgaagcgttctgccgctggctcgcgccccgccccacagtgagccgccccgcaatccgccccgcaatccccgtcctcaccgatgaattcatggatgtgaatgacccttcaattgatgctaagtacatggcctatatgttcaagtatgattccactcatggcccgtttaaaggttctattcgtgtcgtggatgattcaaccctcgagatcaatgggaagaaggttgagaatgcaagtgttcttttattacttgctgaaatacataaagttgccaaggatccatcagggaaggacatcaatgcacttgagcagcacatcaagaacctcctgagcccttccaccccatttttcttcaatactctgtacgacccttatcgtgttggcgccgattttgttcgtgggtacccctacagccttcgctttagctcaacattccagactacgatgcccctaccccagcttgttaagccccttgagagaaacaccaggtatgtggatgctattcttacgatcccaaagggcaccctcttccctacgtgtggaatgaaccttgcatttgaccgtgagctcattggtcctgcaatgtactttggtcttatgggtgatggccagcctattggacttgttttgcagccatttgactggattaagaaaactttcttcgagaaaccccaaccagaggcataa

SEQ ID NO: 133295 - DNA, 164 bp, Zea Mays
gttattgtaatgatctatataagtgtgaacatgcacacccacattgttctgtattttttccttctgtatttacttatgagtctgaaatcagttctgcggcgtacacactgtagttccttttgtattaagtgtagtgatgaggtaatgcattgcacttgtactac

SEQ ID NO: 133296 - DNA, 1324 bp, Zea Mays
cgttcactttgctcggcaagttaagatcataagatttttcacgaggctttgctgagttctccatcatattcagtatggaagccttgctagctatggtttcctgactgttgttgttcccacattgtgcgcgcccccttgcctttgtcaggccccctttggaatggaggataggaaaaatataggaataggaaaaatataagaattgagatggtggatattttgaatcctataggaattgaaaacaaaggaactgagataagaatgcctttggtagcaccataggaaaaataaaggaatcactttgctgtgtttttgaatttgaaacaagatagccgttgcatagtggcagcaagccaaccagaaactagaaaaacggcgcgaaaggtagcagacgcgggtgaaaagtagcccgacgcgcgaacattcccgccaggaatcgttccaagaggtctgacctcttggtaaatttcctataaaatcagaccacggaacggcaatcctatggattctttcctttattttttttgggaaccaaagggacagataggaaaaaatccttagcaacagtgatcctacgaatttcctttgccaaccctccgttccaaagggggcctcaatgttttgatgggatgctgattggggactcgattcgtacatgtggctttatacagctaaaactgttcttctcgcaagttacgtttgcgaagccaaaaagtagccggaactcaagcatcgaggcgtttgcggtctgtgagaactactcacctcctgaagggttcaaggaggaagacctataccacctgctagagaaagtgggtactccctcaggagctggcgatctagattgcagaagcggatggctggagggaccaaacaaggtgtacatcccgttcctggcctgcggggatctgagcggctacgactccgaccgctcgtacccgctgcccagcagcacggacggtggctcgtaccggagcctggaccccgtgcagcctcccatcgccccgccttacaagaccgccctgcagatgaagaaggcttccagccacggcgccggcgcggacgccatcaagccgtccgcagactcctgagccgcagaccgtttccgtttaccaccttgcgcggtggaagttgctttcgctgggtcctggacctggctctctagtctctctctacagaaacagaaccttcatctacgaaactaaaaaaaaaggaaaaaggattggaaacattgttgtggtaattttgagctggggatctgtgcagcacgtaactggttactgctgattaggctgagatcactgtttgtgtcctttgcatattt

SEQ ID NO: 133297 - DNA, 1450 bp, Zea Mays
cgacgccaggccgctccgcccaccgcctgccgccgacggtggcttcaagctcacgccggttctgaccgccgccgctgctgaagcttctgatttctgaattggaacgacacggtttttcttgggccgtctaaaagcccagtgggctcaaaaaaattaggcggcgccaccacgtcctcctccgactactcgctcgctccgccccggcgtcccgccctcagccgccgccgtcgccccctccctcggttcgcctcgtcgtcgtcatgggcaaggcctccaaggacaagagggacatctactaccggaaggccaaagaggaaggctggagagctcgcagcgccttcaagctcctccagatagaccaggagttcaacatcttccatggagtgaagcatgtggttgacctgtgtgctgctcccggaagttggagccaggttttgagccggaacctgtatgtaccagcaaaacagtcttctgattgcaaggaaggtgatcttcctctcatcgtcgcaattgacttgcaaccgatggccccaatagaaggtgttatacaagtgcagggcgacatcaccaatgctcggacagcagacgtggtcattaggcattttgatggatgcaaagcagacttggttgtttgcgatggagccccggatgttaccggacttcatgatatggacgaatttgttcagtcccagcttatactcgcggcattggctatcgtgactcatgtactcaaagttggtggaaaatttgtggcgaagatatttcggggtaaagatacgagtctcctgtactgccagctaaaactgttcttctcgcaagttacgtttgcgaagccaaaaagtagccggaactcaagcatcgaggcgtttgcggtctgtgagaactactcacctcctgaagggttcaaggaggaagacctataccacctgctagagaaagtgggtactccctcaggagctggcgatctagattgcagaagcggatggctggagggaccaaacaaggtgtacatcccgttcctggcctgcggggatctgagcggctacgactccgaccgctcgtacccgctgcccagcagcacggacggtggctcgtaccggagcctggaccccgtgcagcctcccatcgccccgccttacaagaccgccctgcagatgaagaaggcttccagccacggcgccggcgcggacgccatcaagccgtccgcagactcctgagccgcagaccgtttccgtttaccaccttgcgcggtggaagttgctttcgctgggtcctggacctggctctctagtctctctctacagaaacagaaccttcatctacgaaactaaaaaaaaaggaaaaaggattggaaacattgttgtggtaattttgagctggggatctgtgcagcacgtaactggttactgctgattaggctgagatcactgtttgtgtcctttgcatattt

SEQ ID NO: 133298 - DNA, 2318 bp, Zea Mays
cgacgccaggccgctccgcccaccgcctgccgccgacggtggcttcaagctcacgccggttctgaccgccgccgctgctgaagcttctgatttctgaattggaacgacacggtttttcttgggccgtctaaaagcccagtgggctcaaaaaaattaggcggcgccaccacgtcctcctccgactactcgctcgctccgccccggcgtcccgccctcagccgccgccgtcgccccctccctcggttcgcctcgtcgtcgtcatgggcaaggcctccaaggacaagagggacatctactaccggaaggccaaagaggaaggctggagagctcgcagcgccttcaagctcctccagatagaccaggagttcaacatcttccatggagtgaagcatgtggttgacctgtgtgctgctcccggaagttggagccaggttttgagccggaacctgtatgtaccagcaaaacagtcttctgattgcaaggaaggtgatcttcctctcatcgtcgcaattgacttgcaaccgatggccccaatagaaggtgttatacaagtgcagggcgacatcaccaatgctcggacagcagacgtggtcattaggcattttgatggatgcaaagcagacttggttgtttgcgatggagccccggatgttaccggacttcatgatatggacgaatttgttcagtcccagcttatactcgcggcattggctatcgtgactcatgtactcaaagttggtggaaaatttgtggcgaagatatttcggggtaaagatacgagtctcctgtactgccaggtaacgttcactttgctcggcaagttaagatcataagatttttcacgaggctttgctgagttctccatcatattcagtatggaagccttgctagctatggtttcctgactgttgttgttcccacattgtgcgcgcccccttgcctttgtcaggccccctttggaatggaggataggaaaaatataggaataggaaaaatataagaattgagatggtggatattttgaatcctataggaattgaaaacaaaggaactgagataagaatgcctttggtagcaccataggaaaaataaaggaatcactttgctgtgtttttgaatttgaaacaagatagccgttgcatagtggcagcaagccaaccagaaactagaaaaacggcgcgaaaggtagcagacgcgggtgaaaagtagcccgacgcgcgaacattcccgccaggaatcgttccaagaggtctgacctcttggtaaatttcctataaaatcagaccacggaacggcaatcctatggattctttcctttattttttttgggaaccaaagggacagataggaaaaaatccttagcaacagtgatcctacgaatttcctttgccaaccctccgttccaaagggggcctcaatgttttgatgggatgctgattggggactcgattcgtacatgtggctttatacagctaaaactgttcttctcgcaagttacgtttgcgaagccaaaaagtagccggaactcaagcatcggtaagtgttatatcttgcaaaataagtcacgcacgagctccttatatgatttctcagccttgagtggttcgcgtagctgctcatggtgactatcatcattagtagtataacaaggactatgcatttcagttggaaaatgggtatgcagtcttcttatgcattttgtctatcctttttccattttgtcaaacagaggcgtttgcggtctgtgagaactactcacctcctgaagggttcaaggaggaagacctataccacctgctagagaaagtgggtactccctcaggagctggcgatctagattgcagaagcggatggctggagggaccaaacaaggtgtacatcccgttcctggcctgcggggatctgagcggctacgactccgaccgctcgtacccgctgcccagcagcacggacggtggctcgtaccggagcctggaccccgtgcagcctcccatcgccccgccttacaagaccgccctgcagatgaagaaggcttccagccacggcgccggcgcggacgccatcaagccgtccgcagactcctgagccgcagaccgtttccgtttaccaccttgcgcggtggaagttgctttcgctgggtcctggacctggctctctagtctctctctacagaaacagaaccttcatctacgaaactaaaaaaaaaggaaaaaggattggaaacattgttgtggtaattttgagctggggatctgtgcagcacgtaactggttactgctgattaggctgagatcactgtttgtgtcctttgcatattt

SEQ ID NO: 133299 - DNA, 1386 bp, Zea Mays
cgacgccaggccgctccgcccaccgcctgccgccgacggtggcttcaagctcacgccggttctgaccgccgccgctgctgaagcttctgatttctgaattggaacgacacggtttttcttgggccgtctaaaagcccagtgggctcaaaaaaattaggcggcgccaccacgtcctcctccgactactcgctcgctccgccccggcgtcccgccctcagccgccgccgtcgccccctccctcggttcgcctcgtcgtcgtcatgggcaaggcctccaaggacaagagggacatctactaccggaaggccaaagaggaaggctggagagctcgcagcgccttcaagctcctccagatagaccaggagttcaacatcttccatggagtgaagcatgtggttgacctgtgtgctgctcccggaagttggagccaggttttgagccggaacctgtatgtaccagcaaaacagtcttctgattgcaaggaaggtgatcttcctctcatcgtcgcaattgacttgcaaccgatggccccaatagaaggtgttatacaagtgcagggcgacatcaccaatgctcggacagcagacgtggtcattaggcattttgatggatgcaaagcagacttggttgtttgcgatggagccccggatgttaccggacttcatgatatggacgaatttgttcagtcccagcttatactcgcggcattggctatcgtgactcatgtactcaaagttggtggaaaatttgtggcgaagatatttcggggtaaagatacgagtctcctgtactgccagaggcgtttgcggtctgtgagaactactcacctcctgaagggttcaaggaggaagacctataccacctgctagagaaagtgggtactccctcaggagctggcgatctagattgcagaagcggatggctggagggaccaaacaaggtgtacatcccgttcctggcctgcggggatctgagcggctacgactccgaccgctcgtacccgctgcccagcagcacggacggtggctcgtaccggagcctggaccccgtgcagcctcccatcgccccgccttacaagaccgccctgcagatgaagaaggcttccagccacggcgccggcgcggacgccatcaagccgtccgcagactcctgagccgcagaccgtttccgtttaccaccttgcgcggtggaagttgctttcgctgggtcctggacctggctctctagtctctctctacagaaacagaaccttcatctacgaaactaaaaaaaaaggaaaaaggattggaaacattgttgtggtaattttgagctggggatctgtgcagcacgtaactggttactgctgattaggctgagatcactgtttgtgtcctttgcatattt

SEQ ID NO: 133300 - DNA, 480 bp, Zea Mays
atggcttcagaaaactctccgtcagagtttgctaagatcgttcagtctaagcagacgaggcaagctcggctgtgcggagcggaccctgagctactgagctccctggcgggcagcgacgcggaggtcatggtcaccatccccaacgagcagctggagcacgtggccgagttccaggaggaggccgacctctgggtcgtcgccaacgtcgcgcgactcctccaactcgagcgtgccggtgggcgcaagcccgccgaccagcctctctcctccgacgggcttcgcacctccagtcggcttcagcccccgtcgtcgtcggagttcagctccctggcgttcggcaccgcccctccgtccggcttcaccccgtcggatggaggcggcttcggcaccccgccgggttccttcaatggcaccggacgtccgggtagcagcaggatggacggtccgggtagcagcaataggagtgaaggttcagattaa

SEQ ID NO: 133301 - DNA, 1725 bp, Zea Mays
atggaggaggaggagggcttcctccacgtgctgcgagcgctgcgggacgccgcgcggagggtggaggccggggaaacacgcgggccggcgctgcaggcgcttctcgcgctcgaggctggcgccgacgacctcctcgccggcgaccccgacctcaccgccctacgccggctcctgtgccgcctcagagccctctcgtgctccctcgacctgtgcgcctccggctccctgcgcgcgcggtgcggcgcgcggagggcggtcgcgcgcgtggccggcgccgtcgccggcgagatccaggcgtgggtcgaccgcgaggccatcgcgcggctcgtggccgcgctgagcagccacggcctcggcggggcgcgcgcgctcctcgcggagctcgaggcacggctgctgtccgcgggcgggcggttcgacccgcggctgcagcgcgcgctgcttcgccacggcgtgttacaggcgctggaggctcggctcggggaccccgccgtgggcgacggctgcgcggccgcggtgctggcgctggtgcgcttcaacaaggacgtgttcgtggggcccgtcctgatgggccccgccgtcggcgcgctggtggcgtccgcgtccgggtccccggcgccgctgcgcgcgctcaacggccttgtggacgccatccggagcccgctggtggacgagctccacgcgcgcggggagctcccgcggctcgtcgcgctgctgtgcgcgcccgacccgcgcgcccacggccccgcgctcggcttcgctctccgcgtcggctactacggccgcaaggaggtggtggacgcgctcctcgccgagggcctcgtgaagcgcctcctctgcctgcagcgctccgacctcggcggctcgctcgcggacacggacgagggcgaggacgaggagggctgcccaaaggcgaagcccgaggacgccaaaaccggtggctttctcctcgtgccctgccttcctctggtgtatctgtgggggcgtcgccagggcgacagcgccgcggacgcggacgcggacacggaagagcggccgttcgtgagcgctgtggcgcggttcgcggtgcaggtggaggtgggcgtcgggttgagcccgcgggagaagcgtgaggcgaagctggagatcctgcggcgggtgcgggaggcggccgtgtcgccggcggaggaggccaccgtgctcgccgaggtgctctggggcgccacgccgtagccgctggcttgagtgcttcaacgatgaccgctgacccgcgggcccacgtgccgcgtacgctagctgtttgctgcagactcgtggttggtgtgcgtactactcgtttttttccttttgtttgtagcatatataagtagttttttcttcttgtttgtgcatatggttttttttttcttatttagtttaatgtttctgtggatattgttagatacagatcttccgttgcagttaggacttgtggtaggagagtcgactccaatccgtgtacgtacgtacgtatgtatacggatggatgatgtacaagagaatcaagatgtaacaagcctgtgaaaaatagtggtaggaaatggttgatgatgcaatgactgactctacacccccttctctccttactttcagaaattcagatacaagcagtaaatggtggtgcaaactgcaaagtacttaaccgacaacaaaaggacaattctattcctgtacaactaataactaacaaagtttgatgtctcgtcg

SEQ ID NO: 133302 - DNA, 1716 bp, Zea Mays
gaacggagcacaacgcacacgtccggccatcttcttcttgcacaagtcgagggccaccgctccgcatccgcatcttcttccagagcaagtcgagcgcggcggccacaaaacccagtcccatacgcacccgtccgttccgcgcgatcagccgagcgatgtcgtcgtcggcgcccgcaccggccgccatggccgtggacgacgcggaggacgaccagctcgcctccatgtccacggaggagatcaccagggcctcccgtctcctcgacaacgagatccgcgtccacaaggacgagctgcagcggtcgaacctggagctggagtctatcaaggagaagaccaaggagaaccaggagaagattaagctcaacaagcagctgccgtacctcgtcggcaacatcgtcgagattttggaaatgaaccctgaggatgaggctgaagaagatggtgctaacatcgatctggactcacaaaggaaaggaaaatgtgttgttctgaagacatccaccagacaaaccatattccttcctgtaattgggttagttgaccccgataagctaaagcctggcgatttagttggagttaacaaagacagctacttgatactagatacattgccttcagagtatgactcacgggttaaggcaatggaagtagatgagaaacctactgaggattacaatgacattggcggacttgagaaacagattcaagagcttgtggaagcaatagtgttaccaatgacacacaaggaccgatttcaaaaattgggcattcgtccccccaaaggggttcttttgtatggaccccctgggactgggaaaacgctcatggctcgtgcatgcgctgcacagacaaatgcaacatttctgaaattggctggtccacaacttgtccagatgttcattggtgatggagctaagcttgttagagatgcttttcagcttgctaaggagaaagccccgtgcatcatctttattgatgaaattgatgccattggaacaaagcgttttgacagtgaagttagtggtgatagagaagtgcaaaggacaatgttggaattgctgaaccagcttgatggatttagcagcgatgagaggataaaggtgatagctgcaacaaatcgtgctgatattcttgatcctgctctgatgagatctggtcgtctggaccggaagattgagttccctcatccatcagaggaagcaagagctagaatcctgcagatccactcgaggaaaatgaatgtgaatccagatgtcaactttgaagagttggcgcgttcaaccgatgatttcaatggcgctcagctaaaggctgtttgcgtagaggctggcatgctcgctctacgccgagatgctacagaggttacccacgaggatttcaacgaggggatcatccaagtgcaggcaaagaagaagtccagcttgaattactacgcgtaagggggggaacgccccgtacttggtgatcattcagttgtttgtgacactgccattgtctgggcaggctaacttactatttgtactataagcaagctgttgcttttgagtcttactccgtatgagagtatcatttatgaaatattaaccaagtctgcctgccgtattggtttctttctcctcacggagaggagctcggccttccacgactgcacatttgctctgttttcagaagttcgtgtgtttaatgataaaaaatcaggtgggaaagctttcc

SEQ ID NO: 133303 - DNA, 1776 bp, Zea Mays
gaacggagcacaacgcacacgtccggccatcttcttcttgcacaagtcgagggccaccgctccgcatccgcatcttcttccagagcaagtcgagcgcggcggccacaaaacccagtcccatacgcacccgtccgttccgcgcgatcagccgagcgatgtcgtcgtcggcgcccgcaccggccgccatggccgtggacgacgcggaggacgaccagctcgcctccatgtccacggaggagatcaccagggcctcccgtctcctcgacaacgagatccgcgtccacaaggacgagctgcagcggtcgaacctggagctggagtctatcaaggagaagaccaaggagaaccaggagaagattaagctcaacaagcagctgccgtacctcgtcggcaacatcgtcgagattttggaaatgaaccctgaggatgaggctgaagaagatggtgctaacatcgatctggactcacaaaggaaaggaaaatgtgttgttctgaagacatccaccagacaaaccatattccttcctgtaattgggttagttgaccccgataagctaaagcctggcgatttagttggagttaacaaagacagctacttgatactagatacattgccttcagagtatgactcacgggttaaggcaatggaagtagatgagaaacctactgaggattacaatgacattggcggacttgagaaacagattcaagagcttgtggaagcaatagtgttaccaatgacacacaaggaccgatttcaaaaattgggcattcgtccccccaaaggggttcttttgtatggaccccctgggactgggaaaacgctcatggctcgtgcatgcgctgcacagacaaatgcaacatttctgaaattggctggtccacaacttgtccagatgttcattggtgatggagctaagcttgttagagatgcttttcagcttgctaaggagaaagccccgtgcatcatctttattgatgaaattgatgccattggaacaaagcgttttgacagtgaagttagtggtgatagagaagtgcaaaggacaatgttggaattgctgaaccagcttgatggatttagcagcgatgagaggataaaggtgatagctgcaacaaatcgtgctgatattcttgatcctgctctgatgagatctggtcgtctggaccggaagattgagttccctcatccatcagaggaagcaagagctagaatcctgcagatccactcgaggaaaatgaatgtgaatccagatgtcaactttgaagagttggcgcgttcaaccgatgatttcaatggcgctcagctaaaggctgtttgcgtagaggctggcatgctcgctctacgccgagatgctacagaggttacccacgaggatttcaacgaggggatcatccaagtgcaggcaaagaagaagtccagcttgaattactacgcgtaagggcttgttcggttataccccaatccatagggattgagggggtttcaatccccaataagtcaaaatcccctccaatccgtatcaatccccttcaatccatatggattggaaataaccgaacaagccctaaggggggaacgccccgtacttggtgatcattcagttgtttgtgacactgccattgtctgggcaggctaacttactatttgtactataagcaagctgttgcttttgagtcttactccgtatgagagtatcatttatgaaatattaaccaagtctgcctgccgtattggtttctttctcctcacggagaggagctcggccttccacg

SEQ ID NO: 133304 - DNA, 1570 bp, Zea Mays
cacaagtcgagggccaccgctccgcatccgcatcttcttccagagcaagtcgagcgcggcggccacaaaacccagtcccatacgcacccgtccgttccgcgcgatcagccgagcgatgtcgtcgtcggcgcccgcaccggccgccatggccgtggacgacgcggaggacgaccagctcgcctccatgtccacggaggagatcaccagggcctcccgtctcctcgacaacgagatccgcgtccacaaggacgagctgcagcggtcgaacctggagctggagtctatcaaggagaagaccaaggagaaccaggagaagattaagctcaacaagcagctgccgtacctcgtcggcaacatcgtcgagattttggaaatgaaccctgaggatgaggctgaagaagatggtgctaacatcgatctggactcacaaaggaaaggaaaatgtgttgttctgaagacatccaccagacaaaccatattccttcctgtaattgggttagttgaccccgataagctaaagcctggcgatttagttggagttaacaaagacagctacttgatactagatacattgccttcagagtatgactcacgggttaaggcaatggaagtagatgagaaacctactgaggattacaatgacattggcggacttgagaaacagattcaagagcttgtggaagcaatagtgttaccaatgacacacaaggaccgatttcaaaaattgggcattcgtccccccaaaggggttcttttgtatggaccccctgggactgggaaaacgctcatggctcgtgcatgcgctgcacagacaaatgcaacatttctgaaattggctggtccacaacttgtccagatgttcattggtgatggagctaagcttgttagagatgcttttcagcttgctaaggagaaagccccgtgcatcatctttattgatgaaattgatgccattggaacaaagcgttttgacagtgaagttagtggtgatagagaagtgcaaaggacaatgttggaattgctgaaccagcttgatggatttagcagcgatgagaggataaaggtgatagctgcaacaaatcgtgctgatattcttgatcctgctctgatgagatctggtcgtctggaccggaagattgagttccctcatccatcagaggaagcaagagctagaatcctgcagatccactcgaggaaaatgaatgtgaatccagatgtcaactttgaagagttggcgcgttcaaccgatgatttcaatggcgctcagctaaaggctgtttgcgtagaggctggcatgctcgctctacgccgagatgctacagaggttacccacgaggatttcaacgaggggatcatccaagtgcaggcaaagaagaagtccagcttgaattactacgcgggggaacgccccgtacttggtgatcattcagttgtttgtgacactgccattgtctgggcaggctaacttactatttgtactataagcaagctgttgcttttgagtcttactccgtatgagagtatcatttatgaaatattaaccaagtctgcctgccgtattggtttcttt

SEQ ID NO: 133305 - DNA, 646 bp, Zea Mays
acatgtgcatgtgcctcaaaacagccggcccagtaaagcgtggcgtttataaattctcccacccgtctagggcaccgttcggacagccccgccgccgcaacatcccgagtcgctcgtcagatcctccagcaacacagcaccttcgccgccgccgccatgggtaaggttcacggatcgctggcccgcgctgggaaggtgcgcgggcagacgcccaaggttgcaaagcaggacaagaagaagaagccccgcggccgcgctcacaagcgcatgcaatacaaccgccgcttcgtcaccgccgttgttggattcggcaagaagcgcggccccaactcatcggagaagtagatctagctatggctttgtgttttattccccactagtttcctcactgatggcaacttgctgaagacttatgctattatctgtatcgatgttactgcaatactgttaagtaggatatatgcatcgtttagttgatcaagttgcctgtggtggtgatccttttagtttgtctggaatgttggaaacatgtttgtgtcgtgctgtgttcgttttgttttgaaactggtaacatgattgagtctaaatgccggtctattctgtttcaaattgtcctgctgcttgattcttaaattggtgatagtgg

SEQ ID NO: 133306 - DNA, 1672 bp, Zea Mays
aaaggaaagcggtgcgagcggaggaggcgaccgaagcgccacttgcttgagtagcgaagcgcgagagcaatggcgtcgctgtcgtgcgcctccacgctgccctggacccccgcctcctacccgcggccctcggcggggcgctgcctcacggcctctcgccgggctccgtcgctggtcatcgtcgcccaggggaaggtcaagaagtaccgccaggtcatattgacagacgacatagaagaggtggggaagaaaggggatacactgaaggtgcgagctggattctaccgcaacttcctccttcccaagggcaaggctacacttctgaccccagaagtcctcaaggaaatgcagctggagcaggagagaatagaagctgagaagaagcgggtaaaagaagacgcgcaacaacttgctcgagtttttgaaaccattggcgctttcaaactccctcgcaaaggtggaaaaggaaaacagatctttgggagggatgtcgacaagaagctggtgacggttccagaaatccgtgaaatcggagagtatgttgcagagatcaagcttcacccagacgtgacagcgcgagtaaggctgaatgtctatgcgaaatgagctcagcagttacagaacctcgagtaatggactttggagaagcctgatgtttgccagtgcagagattttgctgcaagtgccaggtgctgcggtagacatgaggcctggtctggccgtgacttgcctggttttgatacacaattcactggctcactgcgcatcctattccctaccgtgtgaagtcaagttttcaacaattatatctgttgattttgaggcggaaaatataaattgttgtaaagaacaatttgtttgaactgtagagcactacttcgccaaaaacgacccttctttcttgtcctctaaccttccccacctctacgtctgcatccactacaaaaaaaaggcaagaaatttgctaagtatggggctccatagagcgttattcagattggaacaccaacgtacttgacacatgaactgcgtttcttttagccaaagtctgggcgtcaccagcgatctgatacagattcacgcaaaccaactgtattcatctcaacatccacgttctacaaaaatgacagtttcacatcgttgtctaaaaatgcaatgactcccgaataccagtacaactcctcgcttcaccctttacaaaaatccttctgcttctgctaaatgaactagcatcataactgaacagccagcattgcaggcaagggggcattgcacagagctagaaatagcctttccgcttacgcccggtgtacttcgtgtcggcgggcacatcatgtcctcttcttctcatctgctcctttttcctcaggagccaatccttgcctttgccattctttttcgttttctgccgcttcttcggcctattcctttcatatattcccacctgcatttcaagataaattttcatccagtgctggcataatactgatacacatccacaatcatacggtaagagcataagatatgggagtaaaaaacaagaaactatgacactgcaaagattcgtgatcaagcataaagagtcagtatttaactactgcatccaagacaacggcagtgtccatactttatagcattgctgcattagacgactactaattagtatgtgcac

SEQ ID NO: 133307 - DNA, 1718 bp, Zea Mays
aagaaaggaaagcggtgcgagcggaggaggcgaccgaagcgccacttgcttgagtagcgaagcgcgagagcaatggcgtcgctgtcgtgcgcctccacgctgccctggacccccgcctcctacccgcggccctcggcggggcgctgcctcacggcctctcgccgggctccgtcgctggtcatcgtcgcccaggggaaggtcaagaagtaccgccaggtcatattgacagacgacatagaagaggtggggaagaaaggggatacactgaaggtgcgagctggattctaccgcaacttcctccttcccaagggcaaggctacacttctgaccccagaagtcctcaaggaaatgcagctggagcaggagagaatagaagctgagaagaagcgggtaaaagaagacgcgcaacaacttgctcgagtttttgaaaccattggcgctttcaaactccctcgcaaaggtggaaaaggaaaacagatctttgggagtgtcacggcacaggatgttgttgacataataaagtcacaacttaatagggatgtcgacaagaagctggtgacggttccagaaatccgtgaaatcggagagtatgttgcagagatcaagcttcacccagacgtgacagcgcgagtaaggctgaatgtctatgcgaaatgagctcagcagttacagaacctcgagtaatggactttggagaagcctgatgtttgccagagattttgctgcaagtgccaggtgctgcggtagacatgaggcctggtctggccgtgacttgcctggttttgatacacaattcactggctcactgcgcatcctattccctaccgtgtgaagtcaagttttcaacaattatatctgttgattttgaggcggaaaatataaattgttgtaaagaacaatttgtttgaactgtagagcactacttcgccaaaaacgacccttctttcttgtcctctaaccttccccacctctacgtctgcatccactacaaaaaaaaggcaagaaatttgctaagtatggggctccatagagcgttattcagattggaacaccaacgtacttgacacatgaactgcgtttcttttagccaaagtctgggcgtcaccagcgatctgatacagattcacgcaaaccaactgtattcatctcaacatccacgttctacaaaaatgacagtttcacatcgttgtctaaaaatgcaatgactcccgaataccagtacaactcctcgcttcaccctttacaaaaatccttctgcttctgctaaatgaactagcatcataactgaacagccagcattgcaggcaagggggcattgcacagagctagaaatagcctttccgcttacgcccggtgtacttcgtgtcggcgggcacatcatgtcctcttcttctcatctgctcctttttcctcaggagccaatccttgcctttgccattctttttcgttttctgccgcttcttcggcctattcctttcatatattcccacctgcatttcaagataaattttcatccagtgctggcataatactgatacacatccacaatcatacggtaagagcataagatatgggagtaaaaaacaagaaactatgacactgcaaagattcgtgatcaagcataaagagtcagtatttaactactgcatccaagacaacggcagtgtccatactttatagcattgctgcattagacgactactaattagtatgtgcac

SEQ ID NO: 133308 - DNA, 1725 bp, Zea Mays
ataagaaaggaaagcggtgcgagcggaggaggcgaccgaagcgccacttgcttgagtagcgaagcgcgagagcaatggcgtcgctgtcgtgcgcctccacgctgccctggacccccgcctcctacccgcggccctcggcggggcgctgcctcacggcctctcgccgggctccgtcgctggtcatcgtcgcccaggggaaggtcaagaagtaccgccaggtcatattgacagacgacatagaagaggtggggaagaaaggggatacactgaaggtgcgagctggattctaccgcaacttcctccttcccaagggcaaggctacacttctgaccccagaagtcctcaaggaaatgcagctggagcaggagagaatagaagctgagaagaagcgggtaaaagaagacgcgcaacaacttgctcgagtttttgaaaccattggcgctttcaaactccctcgcaaaggtggaaaaggaaaacagatctttgggagtgtcacggcacaggatgttgttgacataataaagtcacaacttaatagggatgtcgacaagaagctggtgacggttccagaaatccgtgaaatcggagagtatgttgcagagatcaagcttcacccagacgtgacagcgcgagtaaggctgaatgtctatgcgaaatgagctcagcagttacagaacctcgagtaatggactttggagaagcctgatgtttgccagtgcagagattttgctgcaagtgccaggtgctgcggtagacatgaggcctggtctggccgtgacttgcctggttttgatacacaattcactggctcactgcgcatcctattccctaccgtgtgaagtcaagttttcaacaattatatctgttgattttgaggcggaaaatataaattgttgtaaagaacaatttgtttgaactgtagagcactacttcgccaaaaacgacccttctttcttgtcctctaaccttccccacctctacgtctgcatccactacaaaaaaaaggcaagaaatttgctaagtatggggctccatagagcgttattcagattggaacaccaacgtacttgacacatgaactgcgtttcttttagccaaagtctgggcgtcaccagcgatctgatacagattcacgcaaaccaactgtattcatctcaacatccacgttctacaaaaatgacagtttcacatcgttgtctaaaaatgcaatgactcccgaataccagtacaactcctcgcttcaccctttacaaaaatccttctgcttctgctaaatgaactagcatcataactgaacagccagcattgcaggcaagggggcattgcacagagctagaaatagcctttccgcttacgcccggtgtacttcgtgtcggcgggcacatcatgtcctcttcttctcatctgctcctttttcctcaggagccaatccttgcctttgccattctttttcgttttctgccgcttcttcggcctattcctttcatatattcccacctgcatttcaagataaattttcatccagtgctggcataatactgatacacatccacaatcatacggtaagagcataagatatgggagtaaaaaacaagaaactatgacactgcaaagattcgtgatcaagcataaagagtcagtatttaactactgcatccaagacaacggcagtgtccatactttatagcattgctgcattagacgactactaattagtatgtgcac

SEQ ID NO: 133309 - DNA, 1944 bp, Zea Mays
ccgtgtcttcttccttccatccctaaaaactgccctccgctcgcgcgacacggaccatgcatcccgattactatctgccgagccgaccagcggcaccagaacccacaaggttcactcatggcgcccacgtccatgctcccgttcgcgccctccaatacgtcgctgccctattcctcccgcgccacaactgccgccgcgttcgctcctcgtgggctccaccacgccgcggccggaaggagcggcggcggccaacggctcgcgtgcgctgcgcctcggcgccgccgcggagggggtcttgtggtcagggcgtcggccgactactacgcgacgctgggcgtgccgcgcgccgccagtaacagagacatcaaggccgcgtaccggaagctcgcgcgccagtatcatcctgatgtcaataaggagcctggagcgactgaaaagtttaaagagataagtgcagcatatgaggtgctgtcagatgaaaagaagagggcgttgtatgaccaatatggtgaagctggtgttaagagtgcagttggaggctccggtggagcttacacaaccaatccatttgatctgtttgagacattttttggagcaagcatgggtggtttttctggcatggaccagagcgcgtttaggacaagcaggcgaagcactgctatacagggtgaagacatcagatatgatgtgattctggggttcacagaggcgatatttggaacagagaaagatattatattatctcatttggaaacatgtgatacatgtggtggttctggatcaaaggctggctccaagatgagaatatgttccacatgtggtgggcgagggcaagtaatgcgaactgagcaaacaccatttggtctgttctcccaggtttctatttgccccacttgtgcaggagagggcgaagtcatttcagagtattgcaggaaatgttctggagaggggcgtatccgtgtcagaaaggagatcaaagtaaaaatccctccaggagtgagcaaaggcagtactcttcgtgtacgtggggaaggtgatgctggaccaaaaggtgggcctcctggagatctctttgtttgccttgatatagaggagccatcagatatcaagagggatggtataaacttgtattcaactgtgtcaataagctatcttgaagctattttgggcactgttatgcaagtcagaactgttgatggaaccagtgaccttcgaatacctccaggtatccaacctggtgatgtaattgtcttagcgaagcaaggagttccatcattgaataagccgtctatacgtggtgatcatctcttcactgttaaagtcgcaataccgaagcgcataagtgggcgtgaaagagaattacttgaggaacttgcatctttgagtaatggtcgctttgcacgaacagacactaagccaaaacctgcccagccaaaagccatacatcaagagaaagaagttggtgctagtcaagaagatacaagcaaatctaaagaagcagagggtgactggttgaagaaacttacagattttgctgggtccattgttaatggcgctgcgaagtggctgaacgacaacctgtaggctgtaaatatttactgcaggatagaagattgtcttacatggtgctgtagtccaatcaaagttcttagattcattgggggtccccacgagctcgtatattcgttttattggagagctgcaagattttcaggctgagtggcaaccgagggagtgaaagttgtcaactaatatcgtcgcggcgttggtcccttgtcattcttgccaagcaattatttttatgtagttggagtccttttcagtctggcaagcggcgtagaagtctgaagctgtgggatgctgatcccaaaccccgggactagacaaacactgtacttgaggttttggattaatcaaattcaccgatatcgaattgcaaactta

SEQ ID NO: 133310 - DNA, 2316 bp, Zea Mays
caatcataaatgcacccgccgtttgcgatgcgacggacgacgacgcggccggaggcgaggcccgcgaccgaggcgaagcgcaggaccgccggcagtcgatcgaaaggcgctctcaaaagctctgcgctgcgctggcagctttgagctttctcgggccggagaaaagccgaaacaaacaaacggactggccgagtcgaggagagagagagggtgagagggagaagagaaggcggagagagaaagcgagctgaggagcgcaggcgctgtcgctggcgaggacatgctcgcggcagcgcggtatgggctcaaaccataggcgtgtcaggaacggtggagagcggcgaccactactcgtcttcgtctcggtcctcgcgcgctcctgggctgcctcttggtgctagaaaccctcgcgtcgcgggtgcttggttgcgactgcaagcgccaagctgctgtgctgtgccgtgggtggcggcggcgggagtggaagtggaaccgcagccggtgctgtgatggacgcgcagcagcagctggatttggtcatgcgtcaccagagcatggccaccgtctgcgagagcgaggacgcgctggggtcgtcggagtcggatcccgcgaggccggcgcgcccgcgcggcaagaggagccgcgccgccgaggtgcacaacctctccgagaaggtgggtgccggaggaggaggagcaggatcaacgagaagatgaaggcgctgcagaccctcatacccaactcgagcaagacggacaaggcttccatgcttgatgatgccattgagtacctgaagcatcttcagctccaggtgcagatgttgtctatgaggaatggcctctatctgcccccaggaaacctgtctggagcacccgagactctggcacccttagaaatgtgcgcagcacttaaccaaagtggtgccaaggcatcaaattccggcgttgtcgttctacctggaaacaaaattcctgtagctcgtcttctacttgatccaccaaaccatgatcagcggcatgaaaacccgcttgtattacaaagtgttcctagtagttcgaccgctgtagagcctcggttccttcaacagccagcacagcccaacctccaatcctttcagctggctgtacctcccgagatgatcttcgacgaggcggacatgatgctaaagcatcgcctagcttcaggtcgagaaaccacatctctaccagtaggacatgaggccaagcctggtaggcaggaagcatgcatggtaaattctgatatttctaacagaggttcactcgggaaagaagtatttatgccctacttgcatagcttgcagagcggcgatacggagggaggtctgagggcaggatcaaactaactacacggtggttcaccctgcaagattttccccatcgggatggacagaggtgcctagctaggagtcgctagtcgatctgaaatgttagaagctagatcaggttgcagtctagtaaaccatcttgtaaaacagagagctacccatctatatgcacgcatgaaatgaatctcggccacactgacctggcggccttgttccagcggcagatgcccaatcctacctctgtaatagcaatcaggaacagcctcgaccgaacggcagcggtccgccattggcgcgcacccaacgccagcgccactccgcgcagccactggatggcgtcgcgccgtcacccaactgcctcaccgctctcagccgtcagtgacaattcaaacacgcaagccagattcgctgatcaagaaagggcggcttccgtcgcagtcgacctcttgtcgctgatgatggatcagttggtccaatatgatgcccatcttgccattcaatgcaacctatagagaggagcctaaaagttgtgttcatgagtcatgactacttgctcgagacgaggatggaatagtcccatgcgaatgcctgagatggcaatgggtacccgatacccgatgggtatttactctattagggtatgtatgtgggctaaatattctacccatgagtctattattgggtaaaaatcgtcacccaatgggtaaatgggtattagaacgttccgccttcacccatacccgttaacccgtgggtataaaatacccaatataaacttatccgaagcatgaacttggactttagtcatccaacttttttactatttaacaacaatttaatgaccatgtaatggaacatgtaatgtgctatttagtactatcatagttttactactttatccaattatctttggtgtgttgaatggatggttaaatgatactagaaaaatttataatggtatttatatggat

SEQ ID NO: 133311 - DNA, 1843 bp, Zea Mays
caatcataaatgcacccgccgtttgcgatgcgacggacgacgacgcggccggaggcgaggcccgcgaccgaggcgaagcgcaggaccgccggcagtcgatcgaaaggcgctctcaaaagctctgcgctgcgctggcagctttgagctttctcgggccggagaaaagccgaaacaaacaaacggactggccgagtcgaggagagagagagggtgagagggagaagagaaggcggagagagaaagcgagctgaggagcgcaggcgctgtcgctggcgaggacatgctcgcggcagcgcggtatgggctcaaaccataggcgtgtcaggaacggtggagagcggcgaccactactcgtcttcgtctcggtcctcgcgcgctcctgggctgcctcttggtgctagaaaccctcgcgtcgcgggtgcttggttgcgactgcaagcgccaagctgctgtgctgtgccgtgggtggcggcggcgggagtggaagtggaaccgcagccggtgctgtgatggacgcgcagcagcagctggatttggtcatgcgtcaccagagcatggccaccgtctgcgagagcgaggacgcgctggggtcgtcggagtcggatcccgcgaggccggcgcgcccgcgcggcaagaggagccgcgccgccgaggtgcacaacctctccgagaagaggaggaggagcaggatcaacgagaagatgaaggcgctgcagaccctcatacccaactcgagcaagacggacaaggcttccatgcttgatgatgccattgagtacctgaagcatcttcagctccaggtgcagatgttgtctatgaggaatggcctctatctgcccccaggaaacctgtctggagcacccgagactctggcacccttagaaatgtgcgcagcacttaaccaaagtggtgccaaggcatcaaattccggcgttgtcgttctacctggaaacaaaattcctgtagctcgtcttctacttgatccaccaaaccatgatcagcggcatgaaaacccgcttgtattacaaagtgttcctagtagttcgaccgctgtagagcctcggttccttcaacagccagcacagcccaacctccaatcctttcagctggctgtacctcccgagatgatcttcgacgaggcggacatgatgctaaagcatcgcctagcttcaggtcgagaaaccacatctctaccaggacatgaggccaagcctggtaggcaggaagcatgcatggtaaattctgatatttctaacagaggttcactcgggaaagaagtatttatgccctacttgcatagcttgcagagcggcgatacggagggaggtctgagggcaggatcaaactaactacacggtggttcaccctgcaagattttccccatcgggatggacagaggtgcctagctaggagtcgctagtcgatctgaaatgttagaagctagatcaggttgcagtctagtaaaccatcttgtaaaacagagagctacccatctatatgcacgcatgaaatgaatctcggccacactgacctggcggccttgttccagcggcagatgcccaatcctacctctgtaatagcaatcaggaacagcctcgaccgaacggcagcggtccgccattggcgcgcacccaacgccagcgccactccgcgcagccactggatggcgtcgcgccgtcacccaactgcctcaccgctctcagccgtcagtgacaattcaaacacgcaagccagattcgctgatcaagaaagggcggcttccgtcgcagtcgacctcttgtcgctgatgatggatcagttggtccaatatgatgcccatcttgccattcaatgcaacctatag

SEQ ID NO: 133312 - DNA, 1827 bp, Zea Mays
aagatgttaagtagagtatcttgcacttgcatatactgtacctagtcttggagtggcgctgttgtaggctgccattgtaaacagaaacagtaaactctgcctagtctaggatggtacgagcactgttccgtgtgacaggttgcactgtttggtctttggtgttgcggtgggaggctgaactgtacacgccacgccattaaaggcgggcataaatgtagcagcagcgtagcgtcgagcgaaccgtcccgtcgccaatcataaatgcacccgccgtttgcgatgcgacggacgacgacgcggccggaggcgaggcccgcgaccgaggcgaagcgcaggaccgccggcagtcgatcgaaaggcgctctcaaaagctctgcgctgcgctggcagctttgagctttctcgggccggagaaaagccgaaacaaacaaacggactggccgagtcgaggagagagagagggtgagagggagaagagaaggcggagagagaaagcgagctgaggagcgcaggcgctgtcgctggcgaggacatgctcgcggcagcgcggtatgggctcaaaccataggcgtgtcaggaacggtggagagcggcgaccactactcgtcttcgtctcggtcctcgcgcgctcctgggctgcctcttggtgctagaaaccctcgcgtcgcgggtgcttggttgcgactgcaagcgccaagctgctgtgctgtgccgtgggtggcggcggcgggagtggaagtggaaccgcagccggtgctgtgatggacgcgcagcagcagctggatttggtcatgcgtcaccagagcatggccaccgtctgcgagagcgaggacgcgctggggtcgtcggagtcggatcccgcgaggccggcgcgcccgcgcggcaagaggagccgcgccgccgaggtgcacaacctctccgagaagaggaggaggagcaggatcaacgagaagatgaaggcgctgcagaccctcatacccaactcgagcaagacggacaaggcttccatgcttgatgatgccattgagtacctgaagcatcttcagctccaggtgcagatgttgtctatgaggaatggcctctatctgcccccaggaaacctgtctggagcacccgagactctggcacccttagaaatgtgcgcagcacttaaccaaagtggtgccaaggcatcaaattccggcgttgtcgttctacctggaaacaaaattcctgtagctcgtcttctacttgatccaccaaaccatgatcagcggcatgaaaacccgcttgtattacaaagtgttcctagtagttcgaccgctgtagagcctcggttccttcaacagccagcacagcccaacctccaatcctttcagctggctgtacctcccgagatgatcttcgacgaggcggacatgatgctaaagcatcgcctagcttcaggtcgagaaaccacatctctaccagtaggacatgaggccaagcctggtaggcaggaagcatgcatggtaaattctgatatttctaacagaggttcactcgggaaagaagtatttatgccctacttgcatagcttgcagagcggcgatacggagggaggtctgagggcaggatcaaactaactacacggtggttcaccctgcaagattttccccatcgggatggacagaggtgcctagctaggagtcgctagtcgatctgaaatgttagaagctagatcaggttgcagtctagtaaaccatcttgtaaaacagagagctacccatctatatgcacgcatgaaatgaatctcggccacactgacctggcggccttgttccagcggcagatgcccaatcctacctc

SEQ ID NO: 133313 - DNA, 510 bp, Zea Mays
ttctaggcaaggagcaagagaaattcaaaaaatagatctaacttattgacaatcctccatcacagtggcagcaaaccatttagaaaagtaatttatgacaatggcggaaaggataacaaccctccaagtttggatgccttatttttcatgactcacacaaagggtggtagttttctagattttgaatcctccagcaagcatgcacaacttgaggaacaaatatcattagatccttctctttctaatgcagaacttatggataagtgcttcccttcaaagagacaggatcacattgttggatatggtggtggcgtgaaagcaagacaccttagaagtccatgcattagtaaggttgaattgatagaaaagttgaaacagtccgaggatgagaaaagagcgatgcaagaagaaaatagagagctacgagaagaaaataaatctacaaacagtcgtatgagtcgtatggaacaggagtgggaagaactaaagaacagattaagtagtagttag

SEQ ID NO: 133314 - DNA, 983 bp, Zea Mays
cacggcccacgatggggcaattgcttcgtgtccattgcgtctctcttctcgacggagctcgagtcgggtctgagaggtggacggagtttcggattcggaggtgatctgacctgtgaggggctgaggaggaggaggaggaggaggaggaggagggatggggcggcggcagaagcggcaggctttgatggcggcattcgcgttggcgctgctcatgggcaccgccgtctacttccgcatctgggcccgccagtccagcgacccctacttcaccgctgacgaccgcgaggagctccggaggcaatttgaacaagcaaacctagaagccatggatgaatctgccgaatggaggatgcaatatgacaaagaagtagagaaaaacaggcagttgcatgatgagctttcaaaggttaaggcctcattagctggcacagcccggcgtcttgagttgttgcagaaggataacgagttgcagaagaggcagactgaatcgctgaggcagcaatgcaattgcactctccattgaaagttatgcaagattaaggacatggaaggagtttttcagcttctttggcggattagctatttttttccaacaccaagggaggaaaaccagattgagttctaggaatgagaactggcatatgaaaatgattgagaacatatatagtgtatagaccatagtgttcgtcctttataccaatggtgagctgcacagttcatccaaagtgatcggtgggaacttcattggtgacaatgcaaagcgcagaagtcaaaacgtaaaagatggcgccatatggttataagctcctaatttctgagtgattttgcagtggcagtttgcatgagtacctgactatctgtagatatacattgtacccggggtgcaaaaagatggtgacaagtttgaaatctgggaccgtgccaatacttattggcaggaaacttaataatccatattgtattatcgatacttgcaattcctt

SEQ ID NO: 133315 - DNA, 1807 bp, Zea Mays
ttttaacaatggagtgggtggctggtgagaaccccaaggatttgctttctttgtctaaaggagtttctgaaaaatttactcaagcttcagataatcagaagttggaagcaaaatctcgccttcttgacctggtcaataaaggtgtagaggcatcgctagtgcagcttcttgagacaggcttgttgcatgctgatcctcatcctggtaacttgcgttatactcctgaaggccgtgttgggtttctagattttggtttgctgtgcatgatggagaggaaacatcagcgtgctatgcttgcaagcatagtgcacatagtaaatggtgattgggcttccgtcgtttatgatttgactgaaatggatgtagttccaccaaaaaccaatctacgtcgtgtgacaatggatttagaggatgcattaggcgaggtaacctttgaagatggcattccagaaatcaagtttagtaaggtgcttggaaaaatttggtctgtggcatttaaatatcacttccgtatgccaccttactacacacttgttctccggtcacttgcctctttggaaggactagccgtggcagcagatgggactttcaaaacatttcaagcagcatacccatatgttgttcggaagcttctgtccgaaaattcacttgaaacaagaagactcttgaatcaggcaatttttaacaaaaggaaagagttccaatggcagaagattgacgcgtttctaaaattggcttcagcaaggaccaacttcaagtataacagtgaagttttgccagagcctgacatgaagtccatgaatgtggctagccttgtggagatcagtgatgcatattcacttgaccgtgctatagctacaccagagagagcattgcatactgcaaacctgtgtgtgaggcttttattatctaaggagagcattgtgattaggagacttattatgacagcgaatgcaaaatctcttgcccgtgatctgatctccagagatgctttgatgttccgggtgctccttagtaaggttattgcggatgttgtctaccaatggatgttgagtgccacaggcttgaaacgagttatggagaccaagatccagacgcccatgaccacaggaaagaacgagggacatctggtgctggctgaagaaccatcgaccctgatggtactccaggcggcagtaaaagaccgaaggattcagctcatgttcaccaagtttgtgagggagttgagagaggagcccgtcttgatgattagggtgagctggaacgtgttcctcatctcggtctcatctgccgctgtaggcctgcaccgtttcttggtgttcttcttgaaggaggatggtgccaggttcttggatgacaaggtcaagaaaatgaagatttggctgatggagttctcgaagcggacggctaatctggagattcaaggaattctgtgaatgttggtggcttttggttgaaggatttaatagctgcttcgcactctggtttttggagttactttctgcatcgagtgaatccagttcctgtttacgctggctgtctgagcttgcttggctgctggtgttcccagagatttataaaaacagggttttcctccgtcattccgccgcagctagtatataatagatggttcttggttgttcatgtactgtgtagctgtatataatagaaacattgcaggatcagtgagtaattctgtggccgagtaaagtgcagtggtggaaggcatgtgttacctactggatataaatatgatgatgtgaatgttcagttgaaaaacttgggtgacatgaactgatgaactata

SEQ ID NO: 133316 - DNA, 672 bp, Zea Mays
ctcagacgctcctagtcaccactcgctgtcctcggcttctcctaaaagctcgacgcgatggcgacgctggtgcggccgcccgcgctgcacgtccgcgccgtgagcggcggcgggaacaaggacagggtggcgccgcagcggccttggtggggcgggaacaagcccatctcaccgcgccagtcgggcgggagcggggcgcgaggaggcgcgggcggcggcggcgtcgcgctggaccaggtgctaggtgtgctccgccgcgacggcgaattcgtccaggccgccgtcggcgccccgctccgcgacgtcttctggctccgcttccttgagaagaagcagcggaagcagcagcagccgagacctaagcacaagcctttccggcagcagcaggaagaggaggaggtggtagtggtggacgagtcgcccccggccttcccgcccccctcgtacccgtcagggttgtcgtgcgtggagctaatggcggccgacttccaggccctcaaggtgtacgccggtagcgcgcggcactctctcgcgcgccgattcctcggtagcaatagcaagggaaagtctgaacagcaacctaaacccaaaccccaggagcagcagaaagagcagcaacatatacttcaggccccagccttccctccgccctcctacccaccaggtttgtag

SEQ ID NO: 133317 - DNA, 342 bp, Zea Mays
accaattcacgcagacgcgtctgtccatttaccaggacaacaaaggcccagccaaggccagcagcagcagcagcagcgcatccgaagatgtccttgcatgtgcatgggaatgggatgatgaaccaaccgggtacggcaatgaagaagaagccggccggcgacaattcgccgccagccgagccaggccggccggccggccggctactatcagaaaatgggacgactcgaggaagcaaaaggcaaaacagagaagagaggccaaaaacaagcacacatgatgcgattcttgctcctgccagcgatcagtcagattttttttctagttcatcgtattcacgcatt

SEQ ID NO: 133318 - DNA, 2834 bp, Zea Mays
cagggcgttcccgccatgggcgtcacccgcgcgcatatcgtcaggggtgactccctggagggcatgcttggcgagtacggcggcggcaagggcggtggtggcaagcccgcgcgcggaggcggcacggtcaggaacacgtcccgcctcgtggcggcgctgacgtgcctccagttcgccttcgccatctacgccaccttcctcctctactacatgagccccgccgtggacctccgcgtgaacgtgaagccagacctggcctgggccacccgcatcgcgcagcactggaagcagctcatcgccgcgcagcccggcgccggcgcgctgtcccccgaggaggcgtgcgagcacgagagcatcgacttcgagcagaagaagtccacggacgaggtcatgatccgcctcaagcgcgagctctacgacgacgtgctcgcgttccagcgccggagcctcggcgccgagacgctgcctgagctgctccggatgcggtcccgctgggccgcgccggggtcgggacccaacgccgacgccgacgccaacgtgccgcgcgtcaccgtcatcctcaaccatttcaagcgccgcacgctgtgcgcgcagctggaccagctgcggcggcagacgctgccgttccaccgcgcctgggtgctctccttcggcagccccaacgaggcgtcgctccgccgcatcgtcgagagctacaacgactcgcgcgtcagcttcgtcgcctccggctacgacttcaagtactacggccgcttccagatggcgctgcagtccgagtccgacttcgtctacgtcctggacgacgacatgatcccgggcgcgcggatgctggagatcctctgccacgtcgccggcaccgacaagtacggcagcgccgtgctggggagcatcggtcggatcctgcccttccggcagaaggacttcaccttcccgagctaccgcaagttccggtccaaggaggccgggctgtacctgccggacccggcctacaacatcaccgtcgaccgcatcgtgcaggtggacttcctgtccagctcctggttcctgcccgccgacctcgtcaagacgctcttcatcgagacgcccttcaccttcatgaccggcgaggacctccacctgagctaccagctgcagaagtacatgggcgcggggtccttcgtgctccccgtcgaccccaacgacaaggagacgtggggagacagcgagcaccgcctcgcctacgtctccgagaccaccgtcatctttaaggacatcgtgcaggtgcgggacgagcagtggtggcgcgcgctcacctctggctacgtcacgcagtgggcggccatgcacccgcagaaggtggacgcgctcttctacgcgcactccctcggcgaggtcagggcgctggcgccgctgctggagcggttccgcaccacgcccggacgcaaggcgtatctcgtcgtgtccggcggcggccactgcccctgcgaggaggccgccaccgttctcaagtggcccaaggtggtgtgcagggaccggcggttcaagatcttcgacctagggatcggcgcgctgtccggtccgtcgcgctccgaggtgcccgtgctccaggccgtctacgccagcatgcggggcatcgtccagatgcacaaccccagcgtggtcgtcgccctcgccgacatcgacgacaaggtcaaagaggcgctccgcatggccgccgctgctgccaccgtcaaccgcaccgcgctcgtcctcgtccccaggagctctgtctccaaggtgctctggatggccaccctcaagcccgcctcactgccaaactggaaccggatgcggatctcggtgaacatcatcacgcagaaccgcgccaagtcgctgctgcgtctgctgacgtcgctgcggagcgcctactacctgggcgacgaggtgcccatcagcttcaacatggacagccgcgtggacgcggcaacgctcaaggtggtaaactccttcgactggccgcacgggcccaagacgctccggcggcggatcatccagggcgggctcatccgggcggtgagcgagagctggtacccgtcttccgacgacgactacggcctcctgctcgaggacgacatcgaggtgtccccctactactacctgtggatcaagtacgcgctgctagcctaccgctacgaccccggcgtgtcgctgccggagctctcgtccatctcgctgtacacgccgcggctggtggaggtggtgaaggagcggcccaagtggaacgccaccgagttcttcaagaaggtgcaccccaacaccccctacctgcaccagctcccctgcagctggggcgccgtcttcttccccaagcactggcgcgagttctacgcctacatggcggcgcgcttcacggaggacgccaagcagaaccccgtgcagatcccgcggtcgcgcaccaacggctggcaggcgtcgtggaagaagttcctcatcgacatgatgtacctgcgcgggtacgtcagcctctacccgaactttcccaaccagacgagcttctcgaccaaccacatggagcccggcgcgcacatcagcgccaagggcaacgtgctcaagcacgacaagacggacttcgaggtgccgctcgtcgccgacgacttctccgtgctgctgcccgcgggcaagatgccgccggcgtccaagctgcccgtcgtcaatctcttcaaccaggccgtgtccctcaaggggctcaaggccgctggagccaagctcggccaggacgtcttcgaatgcaccgccaaggagctcgtcgccgtcgaccgcatcaccggcttgcccacaaactgcaccgccttctgacctacggatgtatctagcgt

SEQ ID NO: 133319 - DNA, 1894 bp, Zea Mays
agacacacttgtcatggccaacttgggttactggcagatgaaagtctcccctggtgtatggtacctacaattggctcctggtcgtagtgccgatctgtatgagctacctccgaaactcattgccattgatagcttgagaggcaaactaatgcatattgaagtgcaaaagaagaaaggcaaggagcatgaggacttgctaaatgctgccgatgactaccacttccaggaaaagacggataacaaaggctggaataagaaccttttgaaatgggcttctagtcttatcactggtgatgcttcatcaaaaagtaaagctgataaaaccactgaccgtaaggatgcaagacaaggggaaaccataaatatattctctgttgcttctgggcatctgtatgagcgtttcctcaaaataatgattttgagtgttctaaaaaagacacagaggccagtgaagttttggttcattaagaattatctatctccacagttcaaggatgtcataccgcacatggctcgggaatatgaattcgagtatgagctcgtcacatataaatggccaacatggttacacaagcagaaagagaagcaaaggattatatgggcatataagatcttatttctggatgtcatttttccactttcactgaggaaggtgatttttgttgatgctgatcaaattgtgagagcagacatgggagaattgtatgacatgaacctgaagggtcgcccgcttgcatatactccattctgtgataacaacaaggatatggatggttttcgattttggaagcaaggtttttggaaagatcatctgcgaggaagaccgtaccatatcagtgcgctttatgttgttgatttggccaaatttcggcaaactgcttctggggatactcttcgtgtcttctatgaacaactcagcaaggaccccaatagtctctccaatcttgatcaggatctcccgaattatgcccaacatacggtgcctatattctctcttcctcaagaatggctgtggtgtgaatcttggtgtggaaatgccacaaaagcaagagcaaagaccattgatctatgcaacaatccaatgacaaaggagccaaagcttcagggtgctagaagaatagttccggagtggactggtcttgacagtgaagcacggcagttcactgcacgaatcttgggtgatgatgtcgagcctgcagatgccacacctccgccatcggaggcaccgaagcctgaagatgatcaggatgtgaaagatgagctatgatcgcaagatgtttccaggcttggtcttactgaatgaaagtttggtgactcgacagtcatcagttcagaacacaggcacacagctagtggagcgcagagggatagtttaacgcaggtgcaaatttgtcaaaacactacacctggaatcctagactacgttgattcaggtatttcgtttacagtaaggccttgttcgtttgtgtcggattggtgggtcggaatgatttctagccgggttgcttttctaatttatataaactttaattagctggaataattccgggtgcaatccgatgtaaacgaacaaggtctaatagtttcaagacctttaaccaaatcatatggcggggaagctgcgtccagtaataggttaacaaggcagccagctggggtgtagaactctgtctgctctcagctgcatacacatagactgtaatggtcaacaatttaagatctccttgagacattgtaaaatttatcggctgccagtcgaaaggcaacagcgaagctggcagctgaaatgcccgagaattttgtagcactcagcaaacggattttttaaacactcagtaagtcaataatgcctgtcgcatgtaacagcaggctattgtgggcatggcagctaacc

SEQ ID NO: 133320 - DNA, 1699 bp, Zea Mays
gaccgccctccgcatctcgtcgacgacgaaaggaaaacctcacaaatcctctggatgcggggtctagccgcctccgccctgtagcaccagtcggatcgaagaagcacaagcgcttcgggtcggcgcgcacctctccctcatggtggcggcgcgaggggcccgatctgggggctcggttgcggcggcggcgctggtctcggttcttctcgtgggttgcctcgtcgcgggcggccagggggcggagatccgtcgccagaaaaacgtgcaggctgcgctccgggccaagtgggctggcacgccgctgctgctcgaagccagctgtaggcaacgttggctgctagaggacctggcgggcgacgggccgacgtcattggcgaccgactctgaatgtgggagagcggagggggtgctcgggcactggaagagggaggcgggtgttggaggacaccgtcctggcggcgctggaggtggaggagggggtggaggagaggagggagaatggaaggatctattttgggattttattgacctctggaaggatctagagaaaggctctgaatgtttaacagcaaaatgctgtgcccagaagattgttgaggatgcccacatactactcaatgaaccgctctcttcaatttttgagttttctcttacccttcgatcagcatcaccaaaattagtgctttaccggcaacttgcaaaggagtcattatcttcgtttcctattgatgattcaccagagaacatttctggtcatggcactggaaaaacttttgatggggctgtggatcctggctcttctggaggaacttgctgctgggtagacactgggaatgttctattgttcaattcagccgatctgcatgaatggcttgggggattgggcaagctagctatggattctactgaacagcctgaactctttgaatttgaccatatatatcgtcgcacaaatattactgctccagttgctatattttatggggctgttgggacaaaatgcttcaaagagctgcatgttcaactagtagaagcatcaaagcagggaaaaatcaggtatgctctgcgtcctgtcctaccatctggatgtgagactacgtccaccttttgtggttcagttggtgctgtagatgcagtcaccttgagtggttatggggtggagcttgccctaaaaaacatggaatacaaagctatggatgacactgctataaagaagggtgttcctctagaagatcctaaaacagaggacctcagtcaagaagtcagagggtttatattttccaagattttggaacgcaagccagagctaaatgctgagataatggccttcagagattatctgttgtcatcggcagtgtctgatacacttgaagtctgggaactcaaagatctgggtcatcagacagcacagcgaatcgttcaagcatcagaccctttacagtcaatgcaggaaatcaatcaaaatttcccaagtatagtttcttcactatcacgaatgaagcttgacgattccatcaaagacgaaattattgcaaatcagcggatggttccacctggcaagtcattgatggctttgaatggtgctttgatcaatatcgaggatcttgatctttacctgttaatggatatggtccatggagaattatccctggctgatcagttcgtccggttaaaggactacagtacatcttatttataa

SEQ ID NO: 133321 - DNA, 306 bp, Zea Mays
atggaggacaagaaccacaacgcatattgcgaggctggtcatgctggccgtcggcgcgaggatggaggagtagaaatgagaatggggatgaaccaacaaccgatggggatggggatgaaccagcagccggtagggatggggatgagccaacaatcgatgagaggaatgaacatggggatggggatgaaccagggaatgccgatgcatcctcctttggggatgggtcctggtggaatgcccggtgttggctacaatcagatgggcacaacatacggtggtcagcagacatacgaaggatacatgtga

SEQ ID NO: 133322 - DNA, 426 bp, Zea Mays
accttgaatcatttgggaaatttaatgcagattggacactcagcatatgttgattctccactcgggccagatgcgtttcgggaatatgaaaccttacttattcaggaccatgatgagcttcttaagaagtctgagaatttagacagacataaagaaagcattcataaagaggcgagtgattttacctctgacgttgataattattctaagtggggttctggggtgcattatggctctaattctgaattcagcccaacgaaaagggatttttttgatgacgaaatgggccaggtagaagcaagagggagaagactgtttgtagctgtgcgtcactttccgatgattttctctcctatttcctcaagggtttttgttttgccctctgaaggcataattgctgactcaagcctgtcgaatcatcatgag

SEQ ID NO: 133323 - DNA, 2410 bp, Zea Mays
ctttttgtggaggcacaacatccttttcagaacagccacgaaaacatgtgctatatgcttgaccacaatgaagcctggtcagggccacgctctcttcacagcagagtgctcgcacaccttccacttccactgtatttcagcaaacgttaagcacgggagcagcagctgcccggtatgccgtatcaaatggaaggagctcccgttccgaggtcccttgcctgctgaattgccccaaggaaatgcgaggatcaatccagttcatgggtaccagaatgggggccatatgaccataccgcggccacttccacttcctcgcgcacgctcttttggccggcttcatcatctggccacgctgctgcctgacgctgaccctggcactttcaacgacgacgaacccttggatttgtcgtgcgaagaggctaacggcactcagcagggctgtttgagaacggtagagataaaagcatatccagagttcacccaagtgcctgaaaatacatcagaaagaaacttcactgttctagttcacctcaaggcaccgcctgctcagcaccttctgcagtcatccagcgatctcggcgacggcaacggagtaagcacgactcgtgcccctgttgatctcatcacggttcttgatgtcagtggaagtatggctggtaccaagctcgcgttgttgaagagggctatggggtttgtcatccagaaccttgggtcctctgaccggctctccgtcatcgccttctcgtcgtccgcacgcaggctcttcccgctccgtaggatgaccgagtctggccggcagcagagcttgctggctgttaactcactgacggcaaacggagggaccaatatcgcagagggcctcaggaagggctccaaggtgatcgaagagcgtcagtcgaagaatccagtgtgcagcatcatccttctatcagatggccaggacacttacacggtctcgccgaccgctggtgtacacaaaggagcgacagagtattgcgcgctcttgccatccacgaccacgaatggcagccagcaggtgcccgttcacgtcttcggattcggcgccgaccatgactcggtctcgctgcactccatctcgcagacttctggcgggaccttctcgttcatcgagacagaggccaccatccaagacgcgttcgcgcagtgcattggcgggcttctgagcgtggtcgcgcagggtctgcatgtgaaggtcgagagcctccaccctgacgtgcacttcggctccatcaggtcaggcagctactctagcagagtctcggatgacagcaggaatggctccgtggacgttggggacctgtacgctgaggaggagcgggattttctcgtgtctgtgaacgttccgccaggctgtggcgagacggcgctcctcaaggttggctgcgtctacaaggacccgctgatgaaggagacggtgaacatgtccggcgtgcaggtgaagatctccaggccagcgttcgtctcggcgcagagcgtgtcggtcgaggtggaccgccagaagaaccgtctccacgccgccgaggtgatggccgaggcgaggttgtccgcggagcgcggtgacctggccaacgcggtctcgctgctcgaggactgccggaggatgatcacggggtcggcgtcgggacagtccggtgaccgtctgtgccaggcgctggacgcggagctgaaggagatgcaggaccggatggccagccggcagaggtacgaggcgtccggccgggcgtatgtgctctcgggcctgagctcccactcgtggcagcgggcgaccgcgcgcggagactcgacggacagcgcgagcctggtccaggcctaccagacctcgtccatggtggacatgctgctgcgctcgcagacgatgagccgcccgtcgacccctcgaccagctccgcagatcaggcacgcgaagtcgttccccgcacgcccgcagccaaggtaaactgcatgcagctgggtgttgccgccgagaaggatttttgtggcgggaggacggcaccagggtatagtttgtgtgggtataagaggggatgtaggtgtaaatttggtgtggggtggtggaggtaaatggtgagaggtatgatattttataattgggggtaggggggctggtatacgtcctgggggaactgggcaggatggtggcctatttatttttgttttgttttttaatatttggtggtgacttggtatactctagtattgtactagctcctttgtgtggtgatgtacataagggaagggtatacacttggactctttgaggagggatggatacctgatcctggtccttgtccttgcaaggtttgtttcctcaacctagaaatggaagaaatggaaaaaggtttgctgccttttactgcaaatggaattaatgatgatcttgggtgcgttt

SEQ ID NO: 133324 - DNA, 3346 bp, Zea Mays
tctctgttcactcctcgctggctcgctcgccatcattcagctcttccccaaccttttccttctccccgccatagataggagctcgctttggtgctgttgctgcttttcctctttgttaaaaaaggctgctcactccgtcgtctcctgtcatccccctttctctcctctcgttgcactggcttggtttggtttggtttggtttggctgcgctgcgaaggtcaaatagccgtccatccataccatacggcatacgcctctctccctttctcttccctcttttctttaacctccctttcttgattttccaagctgctcgcatggccatggcctccgcggcggcgcctcctcctcctcctcctgccagccaccagaccgggcaaaagcgccgccaaatctgcctctgacctctccaccaaatacccaaccagcacccgacaacccgccaccttctctctctctctctctctctctctctctctctctctctctctctctctctctctctctctctctctctctctctctctctctctctctctctctctctcttctcacaaacacaagaagcttgctcagcttagtcagctcagcgcctcagcctcgtcttaaagctagcaccagtaggcgacgctgggtgggagccgagctgcgagcctgcgactgcgagggcataatggagagcagatggcggagggccaagatgtcgctggggctcaacctctgcgtctacgtgccccggacgctggaaggcgacgacgccgcctcgcccagcaccgcctcctccacggcggcgctcgtgtcgccggtggcctcctcctcgtccgccgcgacgagcaccgacaccacccccacggctgccgcgagcaacggcaaggccaacggcgccgccgccgccgccgccgcgctcatgcccaccaccccgacgccgacgtccgccgggctccgcctctccaaatccggcagcaaatccttcaagaaaacatgtgctatatgcttgaccacaatgaagcctggtcagggccacgctctcttcacagcagagtgctcgcacaccttccacttccactgtatttcagcaaacgttaagcacgggagcagcagctgcccggtatgccgtatcaaatggaaggagctcccgttccgaggtcccttgcctgctgaattgccccaaggaaatgcgaggatcaatccagttcatgggtaccagaatgggggccatatgaccataccgcggccacttccacttcctcgcgcacgctcttttggccggcttcatcatctggccacgctgctgcctgacgctgaccctggcactttcaacgacgacgaacccttggatttgtcgtgcgaagaggctaacggcactcagcagggctgtttgagaacggtagagataaaagcatatccagagttcacccaagtgcctgaaaatacatcagaaagaaacttcactgttctagttcacctcaaggcaccgcctgctcagcaccttctgcagtcatccagcgatctcggcgacggcaacggagtaagcacgactcgtgcccctgttgatctcatcacggttcttgatgtcagtggaagtatggctggtaccaagctcgcgttgttgaagagggctatggggtttgtcatccagaaccttgggtcctctgaccggctctccgtcatcgccttctcgtcgtccgcacgcaggctcttcccgctccgtaggatgaccgagtctggccggcagcagagcttgctggctgttaactcactgacggcaaacggagggaccaatatcgcagagggcctcaggaagggctccaaggtgatcgaagagcgtcagtcgaagaatccagtgtgcagcatcatccttctatcagatggccaggacacttacacggtctcgccgaccgctggtgtacacaaaggagcgacagagtattgcgcgctcttgccatccacgaccacgaatggcagccagcaggtgcccgttcacgtcttcggattcggcgccgaccatgactcggtctcgctgcactccatctcgcagacttctggcgggaccttctcgttcatcgagacagaggccaccatccaagacgcgttcgcgcagtgcattggcgggcttctgagcgtggtcgcgcagggtctgcatgtgaaggtcgagagcctccaccctgacgtgcacttcggctccatcaggtcaggcagctactctagcagagtctcggatgacagcaggaatggctccgtggacgttggggacctgtacgctgaggaggagcgggattttctcgtgtctgtgaacgttccgccaggctgtggcgagacggcgctcctcaaggttggctgcgtctacaaggacccgctgatgaaggagacggtgaacatgtccggcgtgcaggtgaagatctccaggccagcgttcgtctcggcgcagagcgtgtcggtcgaggtggaccgccagaagaaccgtctccacgccgccgaggtgatggccgaggcgaggttgtccgcggagcgcggtgacctggccaacgcggtctcgctgctcgaggactgccggaggatgatcacggggtcggcgtcgggacagtccggtgaccgtctgtgccaggcgctggacgcggagctgaaggagatgcaggaccggatggccagccggcagaggtacgaggcgtccggccgggcgtatgtgctctcgggcctgagctcccactcgtggcagcgggcgaccgcgcgcggagactcgacggacagcgcgagcctggtccaggcctaccagacctcgtccatggtggacatgctgctgcgctcgcagacgatgagccgcccgtcgacccctcgaccagctccgcagatcaggcacgcgaagtcgttccccgcacgcccgcagccaaggtaaactgcatgcagctgggtgttgccgccgagaaggatttttgtggcgggaggacggcaccagggtatagtttgtgtgggtataagaggggatgtaggtgtaaatttggtgtggggtggtggaggtaaatggtgagaggtatgatattttataattgggggtaggggggctggtatacgtcctgggggaactgggcaggatggtggcctatttatttttgttttgttttttaatatttggtggtgacttggtatactctagtattgtactagctcctttgtgtggtgatgtacataagggaagggtatacacttggactctttgaggagggatggatacctgatcctggtccttgtccttgcaaggtttgtttcctcaacctagaaatggaagaaatggaaaaaggtttgctgccttttactgcaaatggaattaatgatgatcttgggtgcgttt

SEQ ID NO: 133325 - DNA, 1459 bp, Zea Mays
caacacgaagctgcattaaaaggcgtccggcgggtggagaccagagcagcgcacaagcagcaacgccaacgccaacccaacccaaccctaacccgatctcaccgaggacacacagacaccagaccaccggagcggaccaagtacgagcatgggcggcgccgcggaggaggcgttgcggcgggagtacgtggtcggcgaggagatcgggcgcggccggttcgggacggtccgccgctgctacgccgccgccacgggggagccgttcgcgctcaagacgacgcccaaggcggcgctgcgggcggacccgctggacctggcgctggcggagcaggagcccaaggtgcaccacctggcgtctgccgccagccgccacgtggtcgcgctgcacgccgccttcgtggacgccgacgccgtgcacctggtgctggacctgtgcgcgggcggggacctgttcgcgctcgtctccgcgcggggcgcgctcccggagcccgaggcggcggagctgatggcgcagctcgccgacgcgctcgccggctgccaccgccgcggggtcgcgcaccgcgacgtcaagcccgacaacctcctcttcgacgccgccgccggcggcgcgctcaggctcggggacttcggctccgccgcctggttcggggacggcaggcccatgacggggctggtcgggacgccctactacgtcgcgcccgaggtggtggccggcagggagtacaccgagaaggtggacgtctggagcgccggggtcgtgctctacatgatgctctccgggaccgtgcccttctccggcgccaccgcgggggagatcttccaggccgtgctccgcgggaacctgcgcttccctccgcgcgccttcgccgccgtctcgcccgaggccaaggacctcctgcgccgcatgctctgcagggacgtctggcgcaggctctccgccgagcaagtcctgagtcacccatggattgtgactcgcggcggaagtgtgcctggcggtagactggtttagatgctccgcgccgcatccgatgaatctccatccgaagtgtacatagtggcgtcctccatccaatccaagaggagtagagaaggaccttttgctgttgatctcttcgctatggttctggcaaatgatcgtgaatttggacactagtgctgtagttggttaccagtagcacgcagaaagaagtaatcgttaggctaagcagggatttaggagggctgcctcttcctgggtttgctctgttctgcagtaatcctgtgctcgtcttagcttgtttgcattgcaacccaaacccatgtatgtgtatagcacagccttcttatggctgaggaagagacgactagctctgttcaggagaaaatgcttccgggttcactgtgactgtgagtttctactgtgttggaaccttgaatgaaatatacatcctgaatgtgttaggcttcaaacgattactcc

SEQ ID NO: 133326 - DNA, 1421 bp, Zea Mays
gagcagcgcacaagcagcaacgccaacgccaacccaacccaaccctaacccgatctcaccgaggacacacagacaccagaccaccggagcggaccaagtacgagcatgggcggcgccgcggaggaggcgttgcggcgggagtacgtggtcggcgaggagatcgggcgcggccggttcgggacggtccgccgctgctacgccgccgccacgggggagccgttcgcgctcaagacgacgcccaaggcggcgctgcgggcggacccgctggacctggcgctggcggagcaggagcccaaggtgcaccacctggcgtctgccgccagccgccacgtggtcgcgctgcacgccgccttcgtggacgccgacgccgtgcacctggtgctggacctgtgcgcgggcggggacctgttcgcgctcgtctccgcgcggggcgcgctcccggagcccgaggcggcggagctgatggcgcagctcgccgacgcgctcgccggctgccaccgccgcggggtcgcgcaccgcgacgtcaagcccgacaacctcctcttcgacgccgccgccggcggcgcgctcaggctcggggacttcggctccgccgcctggttcggggacggcaggcccatgacggggctggtcgggacgccctactacgtcgcgcccgaggtggtggccggcagggagtacaccgagaaggtggacgtctggagcgccggggtcgtgctctacatgatgctctccgggaccgtgcccttctccggcgccaccgcgggggagatcttccaggccgtgctccgcgggaacctgcgcttccctccgcgcgccttcgccgccgtctcgcccgaggccaaggacctcctgcgccgcatgctctgcagggacgtctggcgcaggctctccgccgagcaagtcctgagtaagcaccaacatctcgtctgtctgtcgcctgaattgtctgctcatcttcttaccctcctgtttccatctacctgcaggtcacccatggattgtgactcgcggcggaagtgtgcctggcggtagactggtttagatgctccgcgccgcatccgatgaatctccatccgaagtgtacatagtggcgtcctccatccaatccaagaggagtagagaaggaccttttgctgttgatctcttcgctatggttctggcaaatgatcgtgaatttggacactagtgctgtagttggttaccagtagcacgcagaaagaagtaatcgttaggctaagcagggatttaggagggctgcctcttcctgggtttgctctgttctgcagtaatcctgtgctcgtcttagcttgtttgcattgcaacccaaacccatgtatgtgtatagcacagccttcttatggctgaggaagagacgactagctctgttcaggagaaaatgcttccgggttcactgtgac

SEQ ID NO: 133327 - DNA, 2889 bp, Zea Mays
gcaaatgcggacggtacggtactacatgtatgcaagcccggctgtctgtctaatctagcacttgtcagaaatggcgagcaacaccctacgcttcttgcaggccattgcaccgatagtgttgctggcgcgtctagcacaggcgtcagctcagcctcagcggcagccatcgcaacttcttcccccgggggtcgcgaggccgggctgccgcgacaggtgcggcaacattaccatcccctacccgttcggcatcggcgccgggtgctaccgcgaggaatacggcttcgaactcctctgcgacgacgcccgctccccgccccgcctcaccatcagcggcggctaccagctcgccagcctgtccttgtcagccggcgaggtccgcatctacctcaacgcgacgcgcaagtgctacaacgtcaccacgggtgccttcgtcgaccgcaacgacgacgcgagtctggccctcggctctgccagcccctaccgcgtctccccgaccaagacccgcctcgtcgctaccggttgccccaccatcggctacttcgtcgacggcgccggatacttcgtcagcggctgcacgtccgtgtgccggccggcgcagtacgccgtcgaggggcaggggccgtgcaccggcgtcgggtgctgccagagcgccataccgtccgacatctactactacgagcccaacacgctcagcttacagctgcaggcggggaagctggaccccatcctcggtgcaaatgtcaccacgtgccagtacgtgttcctggcggacgccgactggttcagctacaccgacagcgtgttcttcaaccggaccgacgacttcgccgcgcccgtcgtgtttgactgggccgtccggaacgtcggcaactgcagcgccgcgaagctgaacatgacggactacgcctgccggagcagggacagcgagtgcgtcccctccagcaacggcgccggctaccggtgcaattgctcccagggatacgagggaaacccatacctggacggtggatgcagagacatcgatgagtgccttcgcccagatgagtaccaatgctacggaaactgcacaaatctgccgggacactacatctgcaagtgccgtccgggaaccgacggggatccccgccagcggaacggttgccggcccaaggataagttcacgccagctctcaaagtggttacaggggtcagcgtcggggtgttcctgtcagtgttcatgtgcttctggctctacctggggctacagaagaggaagctcatcagaacgaagcagaggttcttcgagcagaacgggggcgtcatcctgcagcagcagatgcgctcctacaccagcgccggcgccggcccaggcgggttcaagatattctccgaggaggagctggagaaggcgaccaacagcttcgccgccgaccgtgtcctcggccgcggcgggcacggcgtcgtctacaggggcgtcctcgaggacaagacggtggtggccatcaagaggtccaagatgatggaggaggccgagaccaaggagttcgcgagggagatgctcatcctctcccagatcaaccacaggaacgtcgtcaagctgctcggctgctgcctcgaggtacaggtgcccatgctggtctacgagttcgtctccaacggcaccctctaccactacatccacgataaggaccgcaagaccgacatcaccctggacacccggctccggatcgcggcagagtcagcggaggcgctcgcgtacatgcactcgtctgcctcgccgccgatcctccacggagacgtcaagacggccaacgttctgctcgacgacaagctcaccgcaaaagtttcggacttcggggcgtccaagttggcacccgctgacgaggccgagattgcaacattggtgcaggggacttgcgggtaccttgaccctgagtacctcatgacatgccagctaactgacaagagcgatgtgtatagctttggtgtcgtcctgctggagcttctgaccgggaagaaggcgctctacttcgacgggccagaggaagacaggagcctagtgtcatgcttcatgacggcgaccaaggctggccggcataaagagcttctcgacagccaagtgaggaacgagatgagagccgaggtgcttgaagaaattgcccacctcgtgatgcgatgcctgagcatgagtggagaggaacgcccgacgatgaaggaggcggctgagaggctggagaggctgaggagataccagcagcacccgtgggctcaggatggcaacctggaagagaggcagaccttgcttcccatggaacaacgggaccttccttccatgttcagacagcaagatatcttagatcttgaagagggcagtgcatatacttacagcttgtaggtagcattatttgtgccgtaattttagcaaattgattcgagtatggcttcttttcgacgaacccttagccatcccattcttaatctgccgatcccaatgcatgtcaaataatccttgtgcctgtagtttgtttgtcagttggcgtcgcattgttataggagctttctgttagccatgcacaaagggagagcctggtcgtgcgatcgtgtgcgcagtccgcacgaccggcgcgtcgcacgctgtgactgaggtgagtgggatggcactcaacgatgagaggcatggcgtgcaaatcagggtgatcgtgccccacatttctttttcctttctttaagcggtaaactgtcaggttgtaagctcatggtctgtacacgtctctttatatacagagtcagaaaagctgttggttgttcacaacaccaaatcagagtgtgcccacttgtgttcgtgtgtgtgcgtgagtcttttctgtgaccagcagggtgagctcgccggcaacaggaggttgcttctcc

SEQ ID NO: 133328 - DNA, 1890 bp, Zea Mays
atgggggcgaaaggcgccgccgctctccgttcctccgtccccccggtcccggggaggggggttctctctcgctcctcgcgacgggatcgcgctccctctcgcggcggtctccggtcggcacccagcgcggcggtttcggcgttcgaccaccagcccttccatgctcctctagatccggtatgttcgcggtccaacctccaggcccccccaccacttggcagcgtggatctttgcaagtacgcccaagatctccccctctgcgcccctgctgatccatcccctcaaccggacctgctatggtcggccgcgggaggcggcgcccccgtttcaacagccaggacggtcccattgtcaagattcggtacagaaaagtgttcggcgcaaacgtcactcgaagatcctctctgtccgactccattgccgcgtatcctggcgtctgacaggctcgaaggggatactgtctactcgccgggctaccattactctcacaaggcggatggggctttgaagccgggcagtcctcctccccctcggcatgctggagggtcctctgctgcgccgcggttgagcggacaaccttcccctgtcacctccaatgtcaacgatgatggctgcttagacagtgtgcctgtctgctccctcggcgttggcatgatcaatatgagtaccactttactgaactctgccccagctgcccatccgattgagtgcccacataccaactgcttagacagtatcctagagagtggccctagcgctgttccggtctctgcttggccggacaattttttatctggccaacagactttgctttcagagtcacaacttgtgaacgataatcgagctattgacttcatcatgcctgctcctgatctgggtgggctgttaggtggctcagtcgcccatgatccagttgtcactgacaatcaggaagtcgtgagaaatctaccttccctcggatcagagaacctaccgacagacaacaccaaattgacagacttcatagccacaataaccaagacaccagagccacctttgatctcatccccgccgcaaccacacctgttaaaatctcagaagcaacccaccactagaagatcaagtgttaggttggctgctaagaaatgcattaagcccgggcgtaaccgggatgcaatatccaaggcccaggaaatcatacttgccaaacttaacaactcggctgttaaaaaggttgactgctctagttcttcaaattgttctaactttgatgagtcttttgagcagatgacaagccttctcacaaagcctctctcgaagaagcaaatggatgcaatcatggagcttttaaaccaagacaaggtcgaggtcgtggccgtgagggaccaggtgccggcgatggagcataggtatgatcctacctcaattaatcatgatttggttttgatgggtcaaaccccagacgatgtggacgacgtgcacgatggtttggaggatctctttggttccactgcccctacccctaaccctaaccctaccataaaccttggcgacgacaatgtcgctgccgagggcgaggctctcccagatgctactgcctccactacggcaagcactggtagaaagaggaaatgcacatccgatgtctgggaggacatggataagattttcgccactgaaaatggtgttgaggttagagtaggagcaaggtgtcatttttacaagaaagaacttgctgcccgttctaccattggcactggtcatttgtctcggcatagagacaaatatggcattggtagcagttcttcaatggcactgggtgctggtctgggtgcctttggtgccagtagcagttctgggatggttcctgaactattttgctgtattaatatgttattaactctgatctga

SEQ ID NO: 133329 - DNA, 1205 bp, Zea Mays
cacaaactcatccggctacagcaagcaagcaaacaaccatagctctcagatcagtcgtcgtagatgtgtgcagtgcagccaattccttgctactcctagtcctagctcgtctgtcccctccccctctctctcctcttcagatcgacgtgcatatataggtccctttgtctcatatatacatatagttcttccatatccagctccttagtccttacataaagattcctgtgaacagatagaaatatagatagataggaaataataaggtggcagctagctagcagtagtagctggagcaggagcaggagctagccatggggctgcgcgacatcgagctgacgctgccgccggggttccggttctaccccagcgacgaggagctggtgtgccactacctgcacggcaaggtggccaacgagcggctcgccggcgccggcgcggccatggtggaggtggatctgcacacccacgagccgtgggagctccctgacgtggcgaagctgagcacgaacgagtggtacttcttcagcttccgcgaccgcaagtacgccacggggctgcgcaccaaccgcgccaccaagtccggctactggaaggccaccggcaaggaccgcgtgatccacaccccctgcagcaggcccgccgccggcggcggccaccaccgcgccgtcgtcggcatgcgcaagaccctcgtcttctaccgcggccgcgcccccaacggcgtcaagaccagctgggtgatgcacgagttccggatggagaacccccacaccccgcccaaggaggattgggtcctgtgcagggtcttctacaagaagaaggcagacgccatggactatgctgactgcagcgaccaggacgccatcgccgtgcatgtgcctcgcggcagcgctgacccgggctactgctactcgcctcctccgttccccgcgctcggcggcagccaccaccacggcggctccctcaacgacgacttccacggcggcatggcgctgcttcagcagcagcagcacaacggcgttttcgacttccacggcggccagcctcaccctcacggcggcggcggcggcctccttgccgggccgccggctacagccgtggggtcaagagacggcggcgatcagtgtggcagcggcgtgctcatggacctaggactcgacgaccactacgcctacaacagctacaacagcctgctgcagatgtga

SEQ ID NO: 133330 - DNA, 1104 bp, Zea Mays
ttccatttctccaaccaagaaggtgggaaatctaggcctgcctctcgtggagctccggaggggactgcaattctgctaatttgtgacagatcatgcaggaataggaggtcaagagagtttctgcaaccccaatgaagatggcaccaggacgatgaaaccctgtccaccggattttgtagctcctaggcaagttcaagaggcgggggacgcaaatactaagtggtggattcctctcggggcaccgcgggcgggcagccgcctgtggaacctgctaagatgaagggccttctcaagggcctccgatacatctcgcagatttttgatgcgaaggagccggagatgcagatcgggaagccgacggacgtgaagcacgtcgcgcacatcggctgggacaacgcctccgtcaccgcgcccagctggatgaacgaattcaaggcttctccgggggcggcgaggggcggcgatcctgagccctcgcagcctgggggttcgggcggatgcggagacgagcaaaccggaggagaagacgctggcggcaaggcggagcggccgcggcggacgagggggaacaaagtgtcgggtggcaacgagccggcgaagcggcgggactgcgcggccgaggggtcgcggcgcgaccggagggttgcgaaggcggcggacgtggcggagggcgccgagggggacgccgccgcggcgccgaggcagcggcggaggaagccccgggcagcgtcggggggcaggtccaagtcgtcgtcgggaggcgccgccgcgtcggacgcggaggcggcgcagccggaggccgaggccgatcgcgacggctgctgaggcgaaggaaacggtggccgcgcgccgttgcgcgttggggttcgactggtatacacggaggcgggaggccggatgccggaacgaggggaacatcttcaaatttgaatttggttttgcttggctgtccggaaatcggagagatttgggtgtgtgtgtgtgtgtctctctcttgtttatgttggttttcgactggttatttccatgcacggattattggtgtttaggatagtcgtgcggcgtagagtggcacgacaagtgtatgcataaacaattgtacac

SEQ ID NO: 133331 - DNA, 1985 bp, Zea Mays
cccatatttagccgttgtagcttccgccctctctctctccctctccaggctcttagaacacgaaacgtgaaggagacataggaggaggaggaggaggaggaggaggatcaatctgccccgttcttggctgcgaggcgatctttgtgccacccaccagcgcgcgaggggcttcattcacctgatcctcgcttcttcttctttcgtcccactggttcgcgttgattgcatttggaggagggggcagtcaagatgaggcttcggctcctggcctgctgctacaatgatccggagatgcggatcgatccggacaccgtctaccccatccgccccgactgccgcgacgacgcccccaagacgcgcttcaagccccggcctggcctgacccttagtccaaagagatggaagcttctccacaacgaggaaggctgcgtggacatagctggaatgatcaagagagtgcaacgtgggggagtccacccaacaatcaaaggagaagtttgggaatttttgctgggctgctatgaccctaaaagcactaccgaacagtgcaaccaattgcgacagcagcgaaggttagagtacgagcaactgaaagctaagtgccgagaaatggacacagctgttggtagtggaagggtaatcactatgcctgtagtaacagaagatggtcaacctatcgaaaaccctaacggaggggcatcaggttctgagcagaaaaatagtggggcaccactcccgaaagaagttattgattggaagcttaccctacaccagattggtctcgatgttaaccgtactgatcgtttgcttgtttattatgagagacaagagaacttggcaaggttgtgggacattcttgcagtgtattcatggattgataaagacatagggtattgtcagggaatgagtgatctttgttcaccaatatcaatcattctggaaaatgaagcagatgctttttggtgctttgagcgtctaatgcgcagggtgcgaggaaatttcaaaagtacttctacttccattggagttcgagctcaactaactaccttgtctaccataatgaaatctgttgacccaaagctgcatgaacatttagaaaatcttgatggaggggaatacttatttgccttccgaatgctgatggttcttttccgtagggaattctcatttgttgatacgatgtacctttgggaagtaagttgtctggacaaaaaagttataataaatttcataagtagtgcatattattaacaattcaatctgaccaccactaatatcaaataattacttctgttatacatctaaatataggcccagtaatgctagaattatgaattggtttatgcatgaaacactactgtacaacttcaaaatgttgcagctcatgtggtctatggagtacaatcctaatctcttttcaatgttggagagtgacactggcacatccagcgcaagcacaaaggatgaaagtgttctaggacagtgtggaaagtttgagcggaaaaaattgcaagcagctaagaaagatgaccagatccctctatctgtctttgttgttgctagtgttcttgaggctagaaacaagaagttattgggtgaggcaaaaggtctagacgatgttgtcaagattttaaatgaaatcactggtagtctggatgcaaaaaaggcatgcagagaagcattgcagattcacgagaagtatcttaaaacggtaaaagcatcataaggacatgtacagcttcacttggatgggctatttatttattttttggactagagaagatataccacagaacttttgttatcctttgtttgtgtattgtgtaattctgacacatttgtaacattgcatttacacaaccaaaagaaaggacgaggatttcattcaaaaataaaaaaaagaaggggaaaaaggatgctgatcttgtaaagacgcgagacaaaatgtttataccataataacgtcatcatgattcttttctgtt

SEQ ID NO: 133332 - DNA, 1798 bp, Zea Mays
cccatatttagccgttgtagcttccgccctctctctctccctctccaggctcttagaacacgaaacgtgaaggagacataggaggaggaggaggaggaggaggaggatcaatctgccccgttcttggctgcgaggcgatctttgtgccacccaccagcgcgcgaggggcttcattcacctgatcctcgcttcttcttctttcgtcccactggttcgcgttgattgcatttggaggagggggcagtcaagatgaggcttcggctcctggcctgctgctacaatgatccggagatgcggatcgatccggacaccgtctaccccatccgccccgactgccgcgacgacgcccccaagacgcgcttcaagccccggcctggcctgacccttagtccaaagagatggaagcttctccacaacgaggaaggctgcgtggacatagctggaatgatcaagagagtgcaacgtgggggagtccacccaacaatcaaaggagaagtttgggaatttttgctgggctgctatgaccctaaaagcactaccgaacagtgcaaccaattgcgacagcagcgaaggttagagtacgagcaactgaaagctaagtgccgagaaatggacacagctgttggtagtggaagggtaatcactatgcctgtagtaacagaagatggtcaacctatcgaaaaccctaacggaggggcatcaggttctgagcagaaaaatagtggggcaccactcccgaaagaagttattgattggaagcttaccctacaccagattggtctcgatgttaaccgtactgatcgtttgcttgtttattatgagagacaagagaacttggcaaggttgtgggacattcttgcagtgtattcatggattgataaagacatagggtattgtcagggaatgagtgatctttgttcaccaatatcaatcattctggaaaatgaagcagatgctttttggtgctttgagcgtctaatgcgcagggtgcgaggaaatttcaaaagtacttctacttccattggagttcgagctcaactaactaccttgtctaccataatgaaatctgttgacccaaagctgcatgaacatttagaaaatcttgatggaggggaatacttatttgccttccgaatgctgatggttcttttccgtagggaattctcatttgttgatacgatgtacctttgggaactcatgtggtctatggagtacaatcctaatctcttttcaatgttggagagtgacactggcacatccagcgcaagcacaaaggatgaaagtgttctaggacagtgtggaaagtttgagcggaaaaaattgcaagcagctaagaaagatgaccagatccctctatctgtctttgttgttgctagtgttcttgaggctagaaacaagaagttattgggtgaggcaaaaggtctagacgatgttgtcaagattttaaatgaaatcactggtagtctggatgcaaaaaaggcatgcagagaagcattgcagattcacgagaagtatcttaaaacggtaaaagcatcataaggacatgtacagcttcacttggatgggctatttatttattttttggactagagaagatataccacagaacttttgttatcctttgtttgtgtattgtgtaattctgacacatttgtaacattgcatttacacaaccaaaagaaaggacgaggatttcattcaaaaataaaaaaaagaaggggaaaaaggatgctgatcttgtaaagacgcgagacaaaatgtttataccataataacgtcatcatgattcttttctgtt

SEQ ID NO: 133333 - DNA, 3125 bp, Zea Mays
ccccctttcccgttcgttcccaggacgagtcgcagcagccggccagccgcacagagtggtggagcctaggaacagaggaggcgccgagccatctccgcagcctgctaccggggaacgggcgggaacggactctaacttagagagagcgcgggcgagagaggtcaaccgcagccggaggcgatggaggtggtggcgctggtgagcggcggaaaggacagctgcttcgccatgatgcgatgcatggactacggccacaaggttgtcgctttggctaatcttatccccctcgacgacaccgtcgatgagctcgacagctacatgtaccaaactgttgggcaccagattgtggtgagctacgcgaaatgcatgggcttgcctcttttccggaggcgcattcgcggatccacaagggatcagggtctcaggtacagtgtcacggcaggtgatgaggtagaagatatgtttgctctgttgagcgaggttaaacgtcgaatcccatccatcagcgcggtgtcgtcaggtgcaatcgcatccgattaccagaggctccgggttgagagtgtttgctcgaggctgggcctggtctcgctggcgtatctatggaagcaggatcagactttgctcctagaggaaatgataaggaggggcattgtggcaataattgtgaaggttgctgcactggggctgaaaccttcttcccacttaggtaaagaactggctgaacttaagtgtcatctgctccaaatgaatgagaattatggaatcaatgtctgtggtgaaggtggagaatatgaaacactaactcttgactgccctctatttcgtaatgcaagaattattcttgatgactctgaagtgatactccactctgctgattccattgcttctgttggaattcttcatccacgggcgtttcatcttgagcagaagccagattcatctgatagaattggggatggttctgccgttcaagagagttctagttgtgtatatgaggttgatgaagttaccactcacgatgatgtgggagaaaaacaggccctgagtccagctgttgatgcttacaccaatgttgacctatgtatctcaaagacagggaacaatttgcgttcaatgagctgttggattcaggatccatccagagcttcggaaggcctgaaggcagaccttatagcagttttgagcagaattgaaaatcagctcaaggaagaagggttaggttgggtgaatgttttgtacgttcacctctacatttcaagcatgaaggaatttggattggccaatgaagtttacgtcagctttattacggaaaagaaatgctacctgggtgttccttcgcgcagtacaattgaattgccactagttcaggctgggttgggcaaagcatatgtggaagtcctagtttcaaatgaggtggtaaagagagttctacatgtgcaaagcatctcctgctgggctcctagctgcattggaccttatagccaggcaactctttatgaagatattctttatatggctggtcagctgggccttgaccctcctacgatgaagctctgtcttggaggtccaagagcggaactagaattagcactacaaaacagtgaagctgtggccaatgcctttagctgctcaatctatatctcggcaatacactttctggtgtactgctctgctcagttgacgtccagcgagaaggaagaaattgaacagacattgaagagttcttatattactcgtttggatcgctcaaaaggtggatcatatccaactgttctgtacgtattcgcgtcagaccttccgaaaggggcacgtgtggaggtaaagcctatactgtatgtcccttccactgatgattgggttgctgccgaagagacggagaccggagttccactgccagcaccgagcaaaacctggactgattgtaccgcaccatactctgcgttgcgcgattcgtgttgccaggtccacacaaccggcgggagaatttgttccgccgtggtgtcgatcacagatgacatcgcatcgaagatctgctctgcagctggacagctgcaccacggagaggagaatctgaaaataatggctagattctgtgctttccagatcgcgaagaccctggcagacaacagattttcctgggacagcgtaacgatgttgaggctctactactcggtagatctcgccgtggcggcagatgcagtgtccggagcattttccgaggccttggccgagcttgcccaagacaacccttccatgagaactgacgttcctttctacaacgttgtgcccgtagccggagctggccgctctgcgtgtgccaacgacataatggcgtgcgagttactggcatccaacgtctccagtgcgaagtccataccagccgaaccgttcgctgtgacgcctgcttgaatgcagctttccttcggaaattggaggtgggcgcacgttggaatttctgccagaggagccggtggccagtcaactgccagttggacgacgacggttgaccagcttctctagggctggcggcggtagcttcgtttctgtgctggcggtcgattaaaaaaaaagaccgtacggtgatcatcacagatgcacccatactgtattattctgtttcagcgtcctatacaaagtatacattgggtctgaattctgattagcctgtgctgatgcttgcaatgacattggttcttctgtgtacagactacggacagagtcccggtcagtaacgtgtgtgtacttgttcttcctctgtgttgacattcttgctcgatggtggaacctgtcgcagttggcggaggtgaagccgcgtagctcacttaggtctgccaaacacttcacttcttagattgtttctgtggaaatcgcttctgatgaatgcaaaatcaattaagtcgtccggttttgatgggaggaatcctacgcttcttaaactctaaattgcacatatttctttatttttctccgcatacaaatttgatgttgaatgcaaaatttatcaagtcgtcgtgtcttgatgagaggaacccgacgtttcttaaatcctaaattgcacagatttctttatctttttccacatgcaacattgttgacatctagattctcgttacagctagatcttt

SEQ ID NO: 133334 - DNA, 2076 bp, Zea Mays
gtcttttcccttccgcgtcggtctcctcccccactcttctacttcttgctgtcgtcgtcttctctcgactccccgtcccctccctctgcctctcccacccgccgcttccggattccgccgcccgtgccctcgccaccaggaattccactcggaccgctgcgtggattcctcggctcgccgtccggatctggcctcgctgagctgcagctgccgcgaatcccgactcgattcggccgcgctcggatctcgccggactagcggggaccgaggcctctcgattcgcctcggggccgagatggatcatgtggtcggaggcaagttcaagctcggcaagaagatcgggagcgggtcgttcggggagctcttcctagctgtgaacgtgcagaccggagaggaggtcgccgtcaagctggaaaatgtcaagacgaagcacccgcagcttcactacgagtccaagctatacatgcttctccaaggaggaactggcattccgcacctgaagtggttcggcgttgagggggagtataacgtgatggtgatcgatcttctcggccctagccttgaggacttgttcaactattgcagtagaaagttttctctcaagaccgtgctcatgcttgctgaccaaatgattaatcgggtcgagtacatgcatcaaaaggggtttctgcaccgtgatataaagcctgataattttcttatggggcttggtaggaaagccaatcaggtatatataatagactatggactcgcaaagaaatatagggatcttcaaactcataagcacatcccatacagagagaacaagaacctcactggaactgcacgatatgcgagtgtcaatacccaccttggcgttgaacaaagcaggagagatgatttagaatctcttggttacgttcttatgtacttccttaggggcagcctaccatggcaggggctgaaagcagggaccaagaagcagaaatatgacaaaatcagcgagaaaaagatgctcactcccgtggaggtactctgcaaatcgtatccatcagaatttatctcctatttccactactgccgttcattgcggtttgaagacaagcctgattactcttacctgaagagactattccgcgatctctttattcgggaaggataccagtttgactatgtgttcgactggaccattctgaagtatcctcagataggctccaacccgcggatgagggcaggtgaaaggactagtggagctgctggaccctcgatggacaagattgagaaggccacaggagaagcaggcggtagaaggaatcttagtggtcctgtgaaccagactgacagttatgcacaacgaccgcgtgagaccgtatctatgtcattaaaggaaattatgcatagcactgaccggtctggggaaaggaccatggagagaccacgtacatcctcgcgcacaggcagtgcatcccgtagagctgttgcatcaagcagcaggcaggcctcatctgtggaaccaagtgagcagcagtatagccgggcaagcagattgttctctagcaacagtggcagtcgcccatctagcacccagagggtgaacccatcgccaggcgaggcaagggctacctccctctcacgggcggcagtcgcgagaggcgctcgcgacgagccactccatcgcagcctggagcttctgtccctcggtggcggcgggaaaaggaagtagtggcaaggaaagcgagcatctgagagcgggcggaagggaagaacgcttgtttgcgactctgtaaatgacaggattcgtcaacagtttccctggggcttcccatagtttccttggtgctccggtctgttgtaccattgcttcatagatagcaacgattccttgttaaacgtgtgctgtgttgcaggttgcgttagggccaagtcctagcctttgtgatggtgattacatttaggggtggtcaagattcacttatttatgtttcttcaccctttcctggactcggcgacttttttcatgtcgaactctgaattttcttattcaacagaagttgataaaaaaggacttcctgtgtaaaccaaataaaaaaacttctc

SEQ ID NO: 133335 - DNA, 2365 bp, Zea Mays
agagaaagcgaagagcaacaagagcaaagcgaaaggcgggcgcagctgtccgctgccttgccttgccttgccttgcctgtgctgtgcgaacctgctcccagttagtagtattcagtttccttatcggctgctgcccatttccgccccctcccgtcttttcccttccgcgtcggtctcctcccccactcttctacttcttgctgtcgtcgtcttctctcgactccccgtcccctccctctgcctctcccacccgccgcttccggattccgccgcccgtgccctcgccaccaggaattccactcggagtaaggagtgttttcccccgctgcttgcttcgcttctccggtcccgggacccgccccgctttcgcccgacttagattccacttctgtccgttcgctcgctcgctcctttgttcttatcccccttgctttgctcgttcgttcgattggagctagccgctgcgtggattcctcggctcgccgtccggatctggcctcgctgagctgcagctgccgcgaatcccgactcgattcggccgcgctcggatctcgccggactagcggggaccgaggcctctcgattcgcctcggggccgagatggatcatgtggtcggaggcaagttcaagctcggcaagaagatcgggagcgggtcgttcggggagctcttcctagctgtgaacgtgcagaccggagaggaggtcgccgtcaagctggaaaatgtcaagacgaagcacccgcagcttcactacgagtccaagctatacatgcttctccaaggaggaactggcattccgcacctgaagtggttcggcgttgagggggagtataacgtgatggtgatcgatcttctcggccctagccttgaggacttgttcaactattgcagtagaaagttttctctcaagaccgtgctcatgcttgctgaccaaatgattaatcgggtcgagtacatgcatcaaaaggggtttctgcaccgtgatataaagcctgataattttcttatggggcttggtaggaaagccaatcaggtatatataatagactatggactcgcaaagaaatatagggatcttcaaactcataagcacatcccatacagagagaacaagaacctcactggaactgcacgatatgcgagtgtcaatacccaccttggcgttgaacaaagcaggagagatgatttagaatctcttggttacgttcttatgtacttccttaggggcagcctaccatggcaggggctgaaagcagggaccaagaagcagaaatatgacaaaatcagcgagaaaaagatgctcactcccgtggaggtactctgcaaatcgtatccatcagaatttatctcctatttccactactgccgttcattgcggtttgaagacaagcctgattactcttacctgaagagactattccgcgatctctttattcgggaaggataccagtttgactatgtgttcgactggaccattctgaagtatcctcagataggctccaacccgcggatgagggcaggtgaaaggactagtggagctgctggaccctcgatggacaagattgagaaggccacaggagaagcaggcggtagaaggaatcttagtggtcctgtgaaccagactgacagttatgcacaacgaccgcgtgagaccgtatctatgtcattaaaggaaattatgcatagcactgaccggtctggggaaaggaccatggagagaccacgtacatcctcgcgcacaggcagtgcatcccgtagagctgttgcatcaagcagcaggcaggcctcatctgtggaaccaagtgagcagcagtatagccgggcaagcagattgttctctagcaacagtggcagtcgcccatctagcacccagagggtgaacccatcgccaggcgaggcaagggctacctccctctcacgggcggcagtcgcgagaggcgctcgcgacgagccactccatcgcagcctggagcttctgtccctcggtggcggcgggaaaaggaagtagtggcaaggaaagcgagcatctgagagcgggcggaagggaagaacgcttgtttgcgactctgtaaatgacaggattcgtcaacagtttccctggggcttcccatagtttccttggtgctccggtctgttgtaccattgcttcatagatagcaacgattccttgttaaacgtgtgctgtgttgcaggttgcgttagggccaagtcctagcctttgtgatggtgattacatttaggggtggtcaagattcacttatttatgtttcttcaccctttcctggactcggcgacttttttcatgtcgaactctgaattttcttattcaacagaagttgataaaaaaggacttcctgtgtaaacca

SEQ ID NO: 133336 - DNA, 990 bp, Zea Mays
agagaaagcgaagagcaacaagagcaaagcgaaaggcgggcgcagctgtccgctgccttgccttgccttgccttgcctgtgctgtgcgaacctgctcccagttagtagtattcagtttccttatcggctgctgcccatttccgccccctcccgtcttttcccttccgcgtcggtctcctcccccactcttctacttcttgctgtcgtcgtcttctctcgactccccgtcccctccctctgcctctcccacccgccgcttccggattccgccgcccgtgccctcgccaccaggaattccactcggagtaaggagtgttttcccccgctgcttgcttcgcttctccggtcccgggacccgccccgctttcgcccgacttagattccacttctgtccgttcgctcgctcgctcctttgttcttatcccccttgctttgctcgttcgttcgattggagctagccgctgcgtggattcctcggctcgccgtccggatctggcctcgctgagctgcagctgccgcgaatcccgactcgattcggccgcgctcggatctcgccggactagcggggaccgaggcctctcgattcgcctcggggccgagatggatcatgtggtcggaggcaagttcaagctcggcaagaagatcgggagcgggtcgttcggggagctcttcctagctgtgaacgtgcagaccggagaggaggtcgccgtcaagctggaaaatgtcaagacgaagcacccgcagcttcactacgagtccaagctatacatgcttctccaaggaggaagtaggccctagagtcctgtcctgtcctgtccagttttacttctgggacggtactctgtggttagttgctagcatgatgcgcgagttgggctaaccttccgctcccccccttttttttgtttcgtcacagctggcattccgcacctgaagtggttcggcgttgagggggagtataacgtgatggtgatcgatcttctcggccct

SEQ ID NO: 133337 - DNA, 3349 bp, Zea Mays
accgcacccggccacccacgcagcaaagatcatcgtctctccgtcctcgcgcagtcgcgcggcggcccgatccacttctccgctctccctcttcccgagcttcaaacaaaaagggtccaaaccaggctaccgttacagctgctcggctgcaccgccaccaacggctattctcatttcaaatcccttcccctcttctccccgtcctccctccaccatccacatcgccctcccctccatctctcgcagcgtccgctccgcctcccgaaaccctagctcggctgatcctgatcccccccaacaccgatggcgccgccgcccaccccgcgttcgacgccggcgcaggtgccgccgggcgcggccgcgacgcctctcaggacgcccgcgtccaagcaccgcctccatttccccgccgccaccccgaggaacgcccaccacgccaaccacggcggcggcggtgccacggagcacccggtcgaggtgatcggccgcatccggaacctcgcctcggggtccgcgtccgcgctggagatcatgggaagcgggacggccgtgcgcgtgcgcggcgacgcggtcgggtgccgcgacttcaccctcgacggcgtctccgtgtccgaagaggaggacctcgagggtttctaccgccgcttcgtgcgctccaggatccagggcgtccgggtcggggccaagtgcacagtcatggtgtacgggcccactgggtccgggaagagccacaccatgttcggctgcaccaagcagcccgggatcgtgtaccgcgcgcttagggacatcctggagggaggcgaaggcgattcagcggaggatgacgccgggtttgacgccggcctcttcgtgcaggtcgcggtgctggagatctataacgaggagatctacgatttgctcgtgggaagcggggccactgctaaaggaaacacccccaaggcaaaactggaagtaatggggaaaaaagcgaagaacgcaagttatatatctggaaatgaagctgggaggatatcaagagaagtgtttaaggtggaaaaacgaagaactgtgaagagcacactttgcaatgagagaagttcacggagccattgcatgattatcctggatgtcccatctgtgggaggaagattaatgcttgtggacatggctggatctgaaaacatagaagctgcaggacaaacaggatttgaagccaaaatgcagacagcaaaaatcaatcaagggaacactgctttgaagcgagtggttgagtctattgctaatggtgattcccatgttccattcagggacagcaaactcacaatgctactacaggattcattcgaggatgacaaatcaaaaatcctgatgattctgtgtgctagtcctgacccaaaggaactgcacaagacagtttctactttggaatatggtgctaaggcaaagtgtattgtccgtgctgctcatgccacaacacctagggacaaaatgagctccgaggagtcatctgtgatgctcaattcaagaatcgttgcaatgaaccagttcatccacaagcttcaaaaagagaacaaattgagggagaaagagcgcaatgaggcccagaatgtgctaaggctgaaggaagaggagctagcacaactgagagcaaagctcaagctgatagaagggcaagggaaagctaccgagaatgagattaattcaaaagttatggagaaaacccagttgttgaggagtgaactcatgaagatggaagaagcgatgcttaagcagcagcaagagcttacttcactgagacagcgactacaggaggttgagcacgaaaaggccgatggttgtcagccattgcagcaggatataattggaggtagattgctggcacggctatcagagatgcctgcaggccttgatcaatcagtggcaatggacatgtctatggacttagacatgggagatcaaccggtcatgcaagatgtcaaggtaataaaggaggatactcgccagcagggccacatatggaatcacacagccacagcagcaagtgcttgcacagggtctgtagtgcaagaagatgatgtcaagttgtccgggtatcctgaaaaaactgtcctcagcaccgtgtttgaggagggagatgaggaggatgcagagaagtgtggtcttcaagaggaggtacgcaaggaggttgtagaggagaactttaatgtggacataacacaacatacactttctgagccagatgatcctgcgacaaggaagcatcggattgaaaacatattcaggctctgtggcaaccatcgtgaaatagctaagaaaccaaaggtccagtcaccagcaaaggaaatgttctgcagcgagaacaagtctccagcaaagcaagtgtttggggatcagaacaaatcgtcatcaaaccaaatttttggagatgaaaacaaggagccgtcggcatggggtgctatagagacccccatgtgcgatgttagagtgactgacagcccagtgtcttctcagctttctccaatcgtatgccaagttgtggctgcaccattatcagaggaactgaatacatgcagtgcagtggaaggaagtgatccgagcaaggagaagaacagtcttgctggacagaaggatggcggcggcctcttggaagtttacataaaatgggagtctggcaacctgatcaaagggctgaagctactgcgcaactcgtgcctttcagatctgaggaagcttatagaggctcatttcgaagaagtgggcagcaaacagcagcagcagcagttcatcttccttctccttggggatccgtccggtgccccggtgtccagggacaaggaagcctcggtgcagataagcaggctgccgcactggaacaaccaggcggacggctacctggcgtgcctgcgcgcggacaagaagccggctgcggaccacacgcccttcagcccgctggacagcaagctgaacacggttgtgaaggacgcgcacctagccggtgcaatgttcgcctaaggcctgtagccctccagcagctacatccgggagctgagagcttgagctccggtgggcatctgttgcggtcacatgactatcatgtatcttctatagttctatgtattatattgattccccgtaaaatattgattgctagtcatgtttcttagcaggacctactagcgagatagctgtaatttcgatggcatcttcagatgccagttctttttcctctctggccgcgagggaaaaaaaaaggttcaggctgctctttgtttttgataatcctatgccagaattcagtcattgtcactctcaaaaggccctttaatcattcagagatgttttccacgtttatcacgtgaaactgtgaaag

SEQ ID NO: 133338 - DNA, 2885 bp, Zea Mays
accgcacccggccacccacgcagcaaagatcatcgtctctccgtcctcgcgcagtcgcgcggcggcccgatccacttctccgctctccctcttcccgagcttcaaacaaaaagggtccaaaccaggctaccgttacagctgctcggctgcaccgccaccaacggctattctcatttcaaatcccttcccctcttctccccgtcctccctccaccatccacatcgccctcccctccatctctcgcagcgtccgctccgcctcccgaaaccctagctcggctgatcctgatcccccccaacaccgatggcgccgccgcccaccccgcgttcgacgccggcgcaggtgccgccgggcgcggccgcgacgcctctcaggacgcccgcgtccaagcaccgcctccatttccccgccgccaccccgaggaacgcccaccacgccaaccacggcggcggcggtgccacggagcacccggtcgaggtgatcggccgcatccggaacctcgcctcggggtccgcgtccgcgctggagatcatgggaagcgggacggccgtgcgcgtgcgcggcgacgcggtcgggtgccgcgacttcaccctcgacggcgtctccgtgtccgaagaggaggacctcgagggtttctaccgccgcttcgtgcgctccaggatccagggcgtccgggtcggggccaagtgcacagtcatggtgtacgggcccactgggtccgggaagagccacaccatgttcggctgcaccaagcagcccgggatcgtgtaccgcgcgcttagggacatcctggagggaggcgaaggcgattcagcggaggatgacgccgggtttgacgccggcctcttcgtgcaggtcgcggtgctggagatctataacgaggagatctacgatttgctcgtgggaagcggggccactgctaaaggaaacacccccaaggcaaaactggaagtaatggggaaaaaagcgaagaacgcaagttatatatctggaaatgaagctgggaggatatcaagagaagtgtttaaggtggaaaaacgaagaactgtgaagagcacactttgcaatgagagaagttcacggagccattgcatgattatcctggatgtcccatctgtgggaggaagattaatgcttgtggacatggctggatctgaaaacatagaagctgcaggacaaacaggatttgaagccaaaatgcagacagcaaaaatcaatcaagggaacactgctttgaagcgagtggttgagtctattgctaatggtgattcccatgttccattcagggacagcaaactcacaatgctactacaggattcattcgaggatgacaaatcaaaaatcctgatgattctgtgtgctagtcctgacccaaaggaactgcacaagacagtttctactttggaatatggtgctaaggcaaagtgtattgtccgtgctgctcatgccacaacacctagggacaaaatgagctccgaggagtcatctgtgatgctcaattcaagaatcgttgcaatgaaccagttcatccacaagcttcaaaaagagaacaaattgagggagaaagagcgcaatgaggcccagaatgtgctaaggctgaaggaagaggagctagcacaactgagagcaaagctcaagctgatagaagggcaagggaaagctaccgagaatgagattaattcaaaagttatggagaaaacccagttgttgaggagtgaactcatgaagatggaagaagcgatgcttaagcagcagcaagagcttacttcactgagacagcgactacaggaggttgagcacgaaaaggccgatggttgtcagccattgcagcaggatataattggaggtagattgctggcacggctatcagagatgcctgcaggccttgatcaatcagtggcaatggacatgtctatggacttagacatgggagatcaaccggtcatgcaagatgtcaaggtaataaaggaggatactcgccagcagggccacatatggaatcacacagccacagcagcaagtgcttgcacagggtctgtagtgcaagaagatgatgtcaagttgtccgggtatcctgaaaaaactgtcctcagcaccgtgtttgaggagggagatgaggaggatgcagagaagtgtggtcttcaagaggaggtacgcaaggaggttgtagaggagaactttaatgtggacataacacaacatacactttctgagccagatgatcctgcgacaaggaagcatcggattgaaaacatattcaggctctgtggcaaccatcgtgaaatagctaagaaaccaaaggtccagtcaccagcaaaggaaatgttctgcagcgagaacaagtctccagcaaagcaagtgtttggggatcagaacaaatcgtcatcaaaccaaatttttggagatgaaaacaaggagccgtcggcatggggtgctatagagacccccatgtgcgatgttagagtgactgacagcccagtgtcttctcagctttctccaatcgtatgccaagttgtggctgcaccattatcagaggaactgaatacatgcagtgcagtggaaggaagtgatccgagcaaggagaagaacagtcttgctggacagaaggatggcggcggcctcttggaagtttacataaaatgggagtctggcaacctgatcaaagggctgaagctactgcgcaactcgtgcctttcagatctgaggaagcttatagaggctcatttcgaagaagtgggcagcaaacagcagcagcagcagttcatcttccttctccttggggtatgtcattcggctctatccatgtcatgctttcacccaagtgctctgtgctacgtgcttctcatcacaatggcgctcatctatcaccatgtactatcttgggg

SEQ ID NO: 133339 - DNA, 890 bp, Zea Mays
atgctagtgtctgagaaggtacctggaagaaggccacgacatgaaccagcttgctaacgccggcaagtacgtatcagcgatggtggcagctgcggttaggttcaagtacgccgcgacgcctacgccgttctggatgtggatggtcattgcatcatctaccggcgccaccatctaccagctctactgggatttcgtcatggactggggcttcctgaacccaaaatccaagaacttttggctccgggatcagctcatcctcaagaacaagtcgatctactatgcttccatgatgctcaacctcgtgctgcgcctagcctgggccgagagcgtgatgaaactccgtctcggtatggtggagtctcgcctgctggatttctcgctcgcttcgctggaaatcatccgacgagggcactggaacttctacaggctggagaatgagcacttgaacaacgctggaaagttcagagcagtgaagactgtcccattaccgttccgtgagcttgaaactgactgatgaagacggagctccatgttgaacagcaggaatttagggggaagaattccaggaatggatacactgtcccctgcaagaactggtgtttaagtggtaataaaacgaatcggagagcgtaactgcacaagaccgagacgctgcagattttaggatggaataagctcaggcgggtgcgccagggtataacatgaggcgttctggtcaggagagatgatgtgcatttaactagctagtggtcgattgagaattgttgcatgtcaatcgactaacaagatcttaattttgtcgatcgtttaagttgtgaaaatgtatctgggaattggtgactgaaaaaaattgcatggaacgaaacatatggtcgttaactaatttatca

SEQ ID NO: 133340 - DNA, 323 bp, Zea Mays
gtcttcctgtacgggtgcaacctctccatgtggaagggcaccaggatcaaccacaacttcatcttcgacttctccagcaccgccctgacgcaccgggacgccttcctcatgtcggcgtccatcatgtgcaccgtcgtcgcggcgctggtcgtcaacctgttcctcaggaacgccggggcgacctacgccaacgcgctgcccggggcacttctgctgctgtcagcaggggttctgttctgcccattcaacattttctaccgctccacgcgcttctgcttcatgcgcgtcatgcgcaacatcgtgctgtcgccattctacaaggt

SEQ ID NO: 133341 - DNA, 797 bp, Zea Mays
gcgcggctcgcccggaccggcgggaactcgtcgccgccgtccgtggacggctccaacagcggccggcacctcctctcttctcccttcgtggcctcgtcgccgcagtccatgtcagacgggagcgtgcagctgcagcaggcgcgcgtggcggagggcgcggctgtggcggaggaggtgatggcggcgctggagcgcaacggcgtgagcttcgtgggcggcgggctgggcaaggccaagaaggacggcagcgggaagcagctcatgggggcgcgccgcgctgctgcagctgccggccacggtgcgcatcgacatcccgcccaccagccccggccgggccgcgctcaaggtgtgggaggagctcgtcaacgtgctccgcaaggacggcgccgaccccgccgccgccttcgtccaccgcaagaaggtccagcacgccgagaagagcatccgcgacgccttcctcgccctctaccgcggcctcgacctcctcaagaagttcagctccctcaacgtgaaggctttcaccaaaatactgaagaaattcgtcaaggtgtcggagcagcatcggaaaggagacctgttttcagagaaggtgaagaggtcgccgttcagcagctctgacaaggtgcttcagctggcggacgaggtggagtgcatcttcttgaggcatttcgcgggcaacgacaggaaggtggccatgaagtacctcaagccgcagcagcccaggaacacccacatggtcaccttcctcgtaggcctgttcacaggcacatttgtgtccctgttcatcatatactcgg

SEQ ID NO: 133342 - DNA, 538 bp, Zea Mays
ctcctacataccggtccctgtccctgtcgacccctcgaggcggatcccacgatggtgaagttctcgcgggagtacgaggccagcatcatccccgagtggaaggccgccttcgtcgactacaagggcctcaagaagctcgtcaagaggatcaagatcgcccgccgcgaccgcgctgcccgtagtaccagcaacgaccacgacgacgccaccaccaccacctatggcttctccgtcctcgaccccgtccgcgccctcgcctcccacttcaacaacgccacgcccccggcctcgccagagggcggcagcgacgacgccttgaggagcttggaatcggattcaggggagctcgtgagagccacggacaagcatgagcaagagtttgtggagagggcggacgaggagctggagaaggtgaacaagttctacgcggcgcaggaggcggacatgctggcgcgcggcgacgcgctcatcgagcagctccgcatcctggcggacgtcaagcggatcctcgccgaccacgcggcggcgtcgtcccggc

SEQ ID NO: 133343 - DNA, 1582 bp, Zea Mays
accaaaccactggctgactcaaagcgatgcgcagctccgtaaccacttcgtcctcacttctcagtccaccttcccgccgcaaccacttcaccacctcatcccattcccagcaatggagctagtagcgtggctcgtcatcgtgttctcagtctccctcgctgggctcctgccagtggtctcggcgtcgacgacgacaccgcagcagcaatgtggcggcaataatgtcggacctgccggagtgagagcaggctactggtcgccgtcctcgaaccgctactccgcggtcggcagcatcgacgcgtccctgtacacgcacctctactacagcgcggtgaccatcgacgagacgagctacgcggtcgctccgcctccgccgacggccgaagacgcctcgctgctcgccgctttctctggcgcggtcaagtccgcgagcccgtccaccaggaccgtgctgtccgtgggcacggacgagtacagggtgggcgagtcgaacgccgccttctccaggatggcgtcggacgcgggcctccgggcggtattcatcaactcctccctgaacctggcccgcgccaacggcttcgacggcctggacctgtcgtggatcttcccggccacgcaggcggacatgcagaacctcggcgccctgctcgcggagtggcgggcgaggatcacggaggaatccgtcgccaagtctttgcctcctcaacctcaaccccttctcctcaccgcgacgctctacttctccaaccacctgttcggcacgcccgacggcaacctcgactaccccgtggacgccatcgcgagcagcctcgactgggccaacgtcctcaccttcggcttccgcggggacagcggcgtcaccgcggccgacgcgccgctctacgacacgtcctcgcacttctcggccagctacggcgtggtctcgtggctggacgcggggctccctccgtgcaggctggtgatggggatacctctgttcgggaggtcgtggttcctcaggaacaaggccaagaacgggctaggcgcgccggccgccgccgccgggacgaagcagaggaggagcaaccagactgggataatcgcgtacgcggagaccgaagagtacctgagctctcaaggcaccgtcgtcacctacgacgaccagtcggtggcggagtatttctgcagcggtgacctctgggtcagtttcgacggcgcgcaggtcgtgcagcggaagctggagttcgcggcgaggtctcagttgctcggctacttcctctggaccgtcggcttcgacgattcgaacagcacaatctccaggaaagcatcggagtcatggcaccagtatgctcagggtggttttggaatcatgcacgcaggaggttcaaaccaatacgttgcatttaactcgtcttcagtatcacttggtagctgctattcgagatctctcagctgtttgctgtcttcagtacttctgttggttattctgtttcgttaaagcgtatcagtaaacaggccagaaatgtaaaataatagtttcaggtgatatattcatcaaagcgaacgtctaatacatgttcaggtgtatttgttgacttctctc

SEQ ID NO: 133344 - DNA, 2120 bp, Zea Mays
gcccaactcaactctccaataggctaatatatatatagtgcttatccatcatgtccagactcttatctacatctaagcacaccaaagaactaatagttgcatcatcatcatatcacggaaccaagaaacgccaagccaaaagaaaactctagacaaccaatgaaaactctaggcaattataagggaaaacatatacttaggtgcatactagagacgataacgaatccaactgacacagtattaacgaacgcatgttgacgaatccaaccgacacagtattaacgaacgcatattgacgagtgggtggcgggcgggtgaggatgaaagaaagatgggaaaactcctttgatccattcattggcgatgaggggctgtgctgtgaggcgaggtgttgtaggctggttggtgtgctcacgagacggtcggcttcacggccacctgcttcgcgggctctgtcccgagcacgccgcccggtgccgacatgccattgacagccgaggggtactgggggagcatgctggtgtagtagatggcgcggccattgctgtcgtacgcgacctgtgtgggggcgggggcgtaggccgtggcgttcgacaccacggctgacggggcggagccgttggcggtggcactgggtggcgcgacggcgtacacggcggggtaggaggtcgcgcctggggaggcggcggccgcaaagtagccgtggggcgccgggatgaagaacacgggggcatggtctgcgccggagccaggagcgacggatgcgtacctgccctgcacctgcacgtaggtcgtcggaggcggagcggatgacagcggcggcacgggcggcttctccgggaactttggaatgtagtactcagcgttggaggttggggtggcggtcacgggagggtaggcgcgggcaagggagtcgtcgctgccgttcctcgggagggcggcggggacggggccgtgggtaggtgccggagccgtcgcaggaggtggtggttggtgggtggcgttgtcggcgacctgcagcttctcgagctcctggatctggcgctggtactccgcaggagagacgacaggggagacagccacgtggtcgcccgcggggttgggatggcggtcgtcgtttttggcaggtatttccacgggcacattctccctgaccgtcggaggatcgcccgccgggtccttgaccttcaccgccgggggaggaacgaagccgttgtcgaggccgaacaggtagtcggggccggccgccgtgagcaccacgtgcgacggctgcggcggcggcggcatctgaaacgccgtctgcggctgaggcggagcctgctggacgaacaccgcctcgtgcttggcctgcggaggcggcggcggcggcgacgacgactgttgcgcgaacaccgactcccgcttctgctgctgcggcggggacgactggtgcgagggcacgggcggcgggtccagcttggaggagggcagcgagacggtgttgagcgcctcgacgatatagaggcgctggtccgccttgggctcgaggagcccggccggcggcgggggaggcggcggctggacggggaagaggaagaccctgagcctgggcgtggctccgccgcggccggagccggaaccggcggcggggccgttgttgtgggcgcggtcgtactcgacgacgaggtgctccagatcctcgtcgttggtgacggagatgagcgcgtccaggtcctccccgggcagctggtacttgacgcagacgtcccgggcgttccccacgagcgtggtgaggcgcgcggcgaagtcggcgaagaggaccggcctctcgagcgacaggatcttggtctcgccgttgacgtacgcgagctggttgtcgtgcggccgcggctggatgcggcccccgtagctgaccatcagacgcaccttggatggctgcggcggcgggcgcggctggggctgcagctgcggctgcgcatgcaccgccgccacagcagcagcaggcacctccgacccctcgtggtgcgtgtcctccggggctgcggcggggttcggggacgactcgccggtttcggccatggcggcggcgcgggcgctaggtctggccgtctggggatgggaggatttgggatcggaaaaag

SEQ ID NO: 133345 - DNA, 876 bp, Zea Mays
atggcgctcgtcgtcacctccgagtcgtgcgcgcccaactggtacgtcggcaccgacaagtccatgatgctcggcaactgcctcttccgctgcggcggcgccgcggcgctgctgaccaacgaccgggcgttccgggcgcgcgccaagatggagctgcgctgcctcgtgcgcgccaacatcggcgcgcacgacgacgcgcacgccgccgccgtgcaccgcgaggacgccgacggccgcctcggcgtcagcctcagcaaggcgctgcccaaggccgccgtgcgcgccttcaccgagaacctgcagcgcctggcgccgcggatcctgcccgcccgcgagctcgcgcgcttcgcgtcccgcctcctcctccgcaagctcctgccggcgggtaccccgcgcaacaagcacgccggcggcagccccaagatcgacttcaaggccggcgtggaccacttctgcctccaccccggcgggacggcggtgatcgaggcggtcaggaagagcctggggctcaccgcccacgacgtggagccggccaggatgacgctgcaccggtgggggaacacgtccgcgagcagcctctggtacgtgctctcctacatggaggcgaagcggaggctcaagcgcggggacagggtgctcatggtcaccttcggctccggcttcaagtgcaacagctgctactgggaggtgaccagggacctcgccgacgccggcgcgtgggaggactgcatcgaccagtacccgccggagacgctcgtcaaccccttttcattttggtgccgaccggactgtacgtttgtttactcgccgatgcaaacttgtacagtacctgctatactctcctgctgcttgcttcatcctgccggcaacagctag

SEQ ID NO: 133346 - DNA, 2378 bp, Zea Mays
cagcgttgctatcatgaccaaggcataccaaaatgttgagaggaatgaactgatttcgctccaggagatcgctagctgtatgcatcttgcggtaagctttgcagagttttgggcgttcatgcttcattcgtgtcagcgtaaccgcttttctattgtttctgatattttaaacgttagctatcaaatctcgtaggacaccattacttgccttcgacagttttcaaccatcttctggttggaaaacttagcccagtaactatccggtcttatttgatccacttcatatgtagcataaggaacaagctgcatgcttgaattattcttgcaaatattagcatgcatggttattgtgattgtgactatctaaaagtatcacagtccctgacctcgtatgagtgtcatagcatagtatgattaccatcttgtgattgcattggaaagcaatgccactgtatcatccatcttttgcacgggcacacaacaggcgaccgttgaaataaatcttccagccacagctcgcctcgacgtgggtcttcccaaacaggttggcagttttcatgaatgtatttaaatgatgttaataatttatgatcaaggtggtgccttggtgggcatgccgctttctgaagcgacagtttaggcgcagctctgagatgagaagacttttgctcacggcctcggccttgggcctgcctaagcctaactgagataagcaagcaaagccaaccagcagtgagtggttggttggccgttggaggctacggcgaccgtattaaccttctccagcagagcacacagcccaagcaagcagaagcagcttacgacccacggcgcatactggctgccagacgcatgcaatcgccccagcttctatataacgccacacaccactgctgcccagctagctgagtaccaagtgtgtgtgtgtgtgcgcgctctctgtcacttattgtgactgactgacccaccgccgacgttccattccagccatggagctgctcgccctgctcaccgtactgctgctcgcgcacaccgcggcatacctggcgtggcaggccgtgtcacgccgccgccgcgcgtgctgctacctgctggactacgcgtgccacaagccctccgacgaccgcaaggtgaccaccgagacggcgggcgccgtcatcgagcgcaacaagcggctgggcctctccgagtaccgcttcctcctcaaggtgatcgtcaactccggcatcggcgagcacacctactgcccgcgcaacgtgctgcagggccgggaggagagccccacccacggcgacgcgctggaggagatggacgagttcttcgccgacgccgtggcgggggtgctcgccaggacgggcgtgcgcgcgcgcgacgtcgacctggtggtcctcaacgtgggctccttctccccggcgccgtccctggtgtccaggctcgtgcgccgcttcggcatgcgggacgacgtgatggcgtacaacctctccgggatgggctgcagcgcggggctcgtcgccgtggacctcgcgcgcggcgtgatgctgacgcggccgcgcaccatggcgctcgtcgtcacctccgagtcgtgcgcgcccaactggtacgtcggcaccgacaagtccatgatgctcggcaactgcctcttccgctgcggcggcgccgcggcgctgctgaccaacgaccgggcgttccgggcgcgcgccaagatggagctgcgctgcctcgtgcgcgccaacatcggcgcgcacgacgacgcgcacgccgccgccgtgcaccgcgaggacgccgacggccgcctcggcgtcagcctcagcaaggcgctgcccaaggccgccgtgcgcgccttcaccgagaacctgcagcgcctggcgccgcggatcctgcccgcccgcgagctcgcgcgcttcgcgtcccgcctcctcctccgcaagctcctgccggcgggtaccccgcgcaacaagcacgccggcggcagccccaagatcgacttcaaggccggcgtggaccacttctgcctccaccccggcgggacggcggtgatcgaggcggtcaggaagagcctggggctcaccgcccacgacgtggagccggccaggatgacgctgcaccggtgggggaacacgtccgcgagcagcctctggtacgtgctctcctacatggaggcgaagcggaggctcaagcgcggggacagggtgctcatggtcaccttcggctccggcttcaagtgcaacagctgctactgggaggtgaccagggacctcgccgacgccggcgcgtgggaggactgcatcgaccagtacccgccggagacgctcgtcaacccctacatggacaagttcggatgggttaacgacgtccagggacaggggagcggcttcgta

SEQ ID NO: 133347 - DNA, 526 bp, Zea Mays
acagcaacaagaagaaaaggagccagatcagagaagaagtggtggcgatgccgccgagggcagtgccgtcgtcgtctcccttgcctcttgcactcgccgccgtcgccatagtcgtcgtagcacttgccgtttcctcctgttccgcgaccaccgatgctccaggcctgggagtgggagcgagagagatggtggcacgggacgaccccaagtgcgaggagatggtgccctgcaccttcaggcgctgcatccagtactgcgtcagcatcgggctgcagcccaaggggttctgcaactccaagcccaacatgcaggtctactgctgctgcgtcatcccctagcatcatagctcctcgtcaacacacctaaatctgcagccctgctagagaagatacgatctctatgcagattagctgcagcgatatatatagatggatgaatcgtgcaagcggttgaactatggtgctggaatctgtaatatatataagcggatcatccaaagtgcaaaacatatagtttttgcattgcc

SEQ ID NO: 133348 - DNA, 3062 bp, Zea Mays
ctgctatgctatgcttaccccgttctctctctcctccctttctttctcatctactactactagactactagtaactccgcttcgcttcttccgaagcggcgcgggcggaagcgagggcagctcacaccaccgtgccgcgcgcgcgcgctctccacccaccacctaattccgccgccgagctcgccgacgcggccacccgcgatcgggcatttggacccgtccccgctcgccgcccgcacggcggctcgttgcgggaaaagtttctcgaggccgtctgtgaccccgctccctcggccgcgagatcccgcccagccgcggtcgcagaatggcgcagagcaactgggaagcggataagatgctcgacgtgtatatctatgactacctgctgaagaggaacctgcagacgacggccaaggctttcatgaccgagggaaaggttgctgctgatccagttgcaattgatgctcctggagggtttctgtttgagtggtggtctgtcttttgggatatattcatcgcaaggacaaatgaaaagcattctgaagttgcagcggcatatctagaggcacagcaaataaaagcaagagagcaccagcagcagatgcagatgcagcaattgcaacttatgcatcaaagacatgctcaacttcagcgaactaacgcgaatcatccttcacttaatggtccaataaatgctttaaattctgagggcattttggggccatcaacagctagtgtcttagctgccaagatgtatgaagagcgattgaagcacccacattcaatggagtctgagggatcacaacttattgaagctagtagaatggctcttctcaagtcagcaacaaaccatgcagggcaattagttccagggactcctggaaatgtgtctacaactctgcagcaaatccaggcacggaatcagcaaacgattgatattaagagtgaaggtaacatgggagtaccccagagatctttacccatggatccatcatctttatacggtcaaggattaattcaacctaaacctggattgagcggtgcagggctgaaccaaggtgtaagcggtttaccactgaagggctggccattaactggaattgaccagttaaggccgaatttgggtgctcaaatgcagaagccatttctttcaacacagtcacagttccaacttatgtccccacagcagcaacaacaatacttagcacaggcccaagcacaagggaaccttggaaactcaactaattatggggatattgatccccgcagacttacagcattgaccaggggtagtttgaatggtaaagatagtcagcctgcaggaacggatggttgtattagttcccctatgcaatccagttcacccaaagtcagaccagaccaagagtatctcatgaagatgcagcagacatcttcccagcaaccccaggaacagcttcagcagcagcagcagaaccaacagcagcaacagagccaacaacaaatgcaacagaacaatagaaaaagaaagcagcctacttcttcaggaccagcaaatagtaccggtacaggaaacactgtgggtcctgcaaactccccaccatctacaccatccacacatactcctggggatggacttggaatgggtggtaatatgcgccacgttccaaagaacttaatgatttatggtgcggatggaactggacttgcctcctcttcaaatcaaatggatgacctggagcagtttggtgatgtgggctctttggacgataatgttgaatccttcttatccaatgatgatggagatcccagggatatttttgctgcactcaaaagaagtcctgcagagcctagcccagccgtttcaaaaggttttactttcagtgaagtcaactgttggcgcacaagcaacagcaaaattgtttgctgccacttctcttcagatggcaagattttggctagtgcaggacatgaaaagaaggctgtactttggaacatggaaaattttcagacacagtatacaccagaagagcatgcccttattatcactgatgtccgtttcaggcctaactctagtcagctggcaacatcttcttttgatagaactattaaattatggaatgctgccgatcctggattctctttgcatacattcactgggcacaacggccaggtcacatcattagattttcatccaaagaaaacagaccttctatgctcttgtgatggcagtggtgaaatccggtactggaatgtgacccagtttgcatgcttgcgtgccataaagggtggtagtgcccaagtccggtttcagcctcatgttggacagtttttagccgcagctgctgaaaacgtggtttccatatttgacattgagacacatgggaaaaaatacactctacagggccataacactgatgtgcagtcagtgtgctgggacaacaatggggaatatattgcatctgtcagtcaggacctagttaaggtttggtcaatgtcaactggggattgcatttatgagcttagttccaatggaaacaagttccattcttgcgtgttccacccgagctattccaatctcttggttattggaggctaccagtctctcgaggtttggaacatggtgaaaaaccagagcctaaccgtacaagctcatgaaggtctaattgcggcgctggcgcagtcaccagtcacagggatgatagcttctgctagccatgacaactctgtcaaggtgtggaaataacagtaacaacgattatgatgcatctaggtagttttttttccagggcaagtgaaatttctcctgctgaggcataaaataaggaagagtagtaaattagatggttgccggtcgcggttcagctgtccaagagcagtgagtttgttgatgggttgtattgtatttatgctgataggctgtttgtgtagctcagaaacaaaaaagaatacattggctgaaaaggtgtccgcctgttttattttttgtttctgccgtatcatatgtaaccatttaacgttccctgttttttaattggaactcgctgcgattggcatctggcagaaaaaaaaccagagatact

SEQ ID NO: 133349 - DNA, 2797 bp, Zea Mays
ttttgtattgatggtaaaactttagtcgctttggatgcaagcaacccaacttttttacagttctaaaataatcagttttttttttttgcaaatttatattgtaaagttggttgcatctctcattgaactatagtcctagtgtcctgtcattcttgcactgtaataggaatataggaccctgataagtgtttggatctcagcaatccacatgcctggcctcttgctatccttgctgccgttgatacattgtttctttgagtgttttatccccttttctggcttctgttaggttttatctctagccctgacttcctatggagctgggagtaagtctttgttgttgttgttgtattaacttttgatggattagattgtgccataccagtgcaatgttccaacagatggatatgttggctattaatgggtaactcactacaatggttcttttggttaatcagggtgtttatgatgtgaatcattcatttcaagaatgtcatacatttcacattctgctgatttctaatttttaacagctcatatttttgaacagggctgaaccaaggtgtaagcggtttaccactgaagggctggccattaactgtgagctatgaaaaaaatgtcatcttatgtgctcatattttcttttggaacctgaccacatatgaatatccatgataccattttacagggaattgaccagttaaggccgaatttgggtgctcaaatgcagaagccatttctttcaacacagtcacagttccaacttatgtccccacagcagcaacaacaatacttagcacaggcccaagcacaagggaaccttggaaactcaactaattatggggatattgatccccgcagacttacagcattgaccaggggtagtttgaatggtaaagatagtcagcctgcaggaacggatggttgtattagttcccctatgcaatccagttcacccaaagtcagaccagaccaagagtatctcatgaagatgcagcagacatcttcccagcaaccccaggaacagcttcagcagcagcagcagaaccaacagcagcaacagagccaacaacaaatgcaacagaacaatagaaaaagaaagcagcctacttcttcaggaccagcaaatagtaccggtacaggaaacactgtgggtcctgcaaactccccaccatctacaccatccacacatactcctggggatggacttggaatgggtggtaatatgcgccacgttccaaagaacttaatgatttatggtgcggatggaactggacttgcctcctcttcaaatcaaatggatgacctggagcagtttggtgatgtgggctctttggacgataatgttgaatccttcttatccaatgatgatggagatcccagggatatttttgctgcactcaaaagaagtcctgcagagcctagcccagccgtttcaaaaggttttactttcagtgaagtcaactgttggcgcacaagcaacagcaaaattgtttgctgccacttctcttcagatggcaagattttggctagtgcaggacatgaaaagaaggctgtactttggaacatggaaaattttcagacacagtatacaccagaagagcatgcccttattatcactgatgtccgtttcaggcctaactctagtcagctggcaacatcttcttttgatagaactattaaattatggaatgctgccgatcctggattctctttgcatacattcactgggcacaacggccaggtcacatcattagattttcatccaaagaaaacagaccttctatgctcttgtgatggcagtggtgaaatccggtactggaatgtgacccagtttgcatgcttgcgtgccataaagggtggtagtgcccaagtccggtttcagcctcatgttggacagtttttagccgcagctgctgaaaacgtggtttccatatttgacattgagacacatgggaaaaaatacactctacagggccataacactgatgtgcagtcagtgtgctgggacaacaatggggaatatattgcatctgtcagtcaggacctagttaaggtttggtcaatgtcaactggggattgcatttatgagcttagttccaatggaaacaagttccattcttgcgtgttccacccgagctattccaatctcttggttattggaggctaccagtctctcgaggtttggaacatggtgaaaaaccagagcctaaccgtacaagctcatgaaggtctaattgcggcgctggcgcagtcaccagtcacagggatgatagcttctgctagccatgacaactctgtcaaggtgtggaaataacagtaacaacgattatgatgcatctaggtagttttttttccagggcaagtgaaatttctcctgctgaggcataaaataaggaagagtagtaaattagatggttgccggtcgcggttcagctgtccaagagcagtgagtttgttgatgggttgtattgtatttatgctgataggctgtttgtgtagctcagaaacaaaaaagaatacattggctgaaaaggtgtccgcctgttttattttttgtttctgccgtatcatatgtaaccatttaacgttccctgttttttaattggaactcgctgcgattggcatctggcagttggttgggaagtcgtgtcttgttgctcgctgtttgatctgcttaaatatgtttaagtgtaaaccgaatgaacatcttgaatggacatctattgagaagagaacagtttgggaacaggcaacagttggatggttagctgactaatcacatcttaaattgttt

SEQ ID NO: 133350 - DNA, 1289 bp, Zea Mays
gcgcgttctaatttggaccagacggctccagaagcttccgccattgacctaacctaacaaccgtgtcgctttatttatcgaaccaagcccaaccccctcgtctgtcgtctcgcctcgtctccgcccagatccacgcgtttcggagttctagctgcgtttattgaccgcccattctctccaaggcatttttcccctcgtcctccctgcgatttcgcgacctccatccaatccctctgcacggagaatcggctaatggcggaggaggggtacaaggtgacgctgaacgtgtacgacctcagcaacggcctcgcgcggcagctgtccacctccttcctcggcaagcccattgaggccatctggcacacgggagtggtggtgtacgggaacgagtactacttcggcggcgggatccagtcgtcccccgcggggacgacgccgtacgggcggccgctgcgggtggtggagctgggcgtcacgcacatcccgcgggaggtgttcgaggactacctccgcgacatcgcgccccggtacacggccgagacctaccgcctgctcacccacaactgcaacaacttcagccacgaggtggcgcagttcctcgtcggcactggcgccggcgtgcccgactacatcctcaacctccccgccgaggtcatgtccagccccatgggcccgctcatcatgcccatgatccagaacctcgagtccacgctcaggagcaacgtcgctccgcagaccacgcagttcgtgcccacgcccgcctccgtctccgcgcctaccgaggctcccgcttccgagcgaaaagcgccggcgccggcggagaaggcttcgaaggaagctcctactcctgcgcctgcgaagaaggaagcccctactcctgcggctgacccgctcgggagcgccagggggaaggtgcaggaggaggtgatgaaggagttcgcggccatcatggccagcggtacgctacgggccagcgaggcggcggcgctggccatgcgccgggtcatggagcgccacggcgacggcgccacgatgcagcagggctagacgaatcaggctgtgaacgcgttccggttccatgggaattggaatttgtcatctgcatgctgatgccgccgccgtatggaaaaaattggagaagttattcctgatatgttcgtgcgattatttgggttggcattaattgcggccgccggacttgttgcccaccgtattactctatgggcggttaatttggtgagatatgctaatttacgttcgctacttcgctactacatgttttaatccgt

SEQ ID NO: 133351 - DNA, 2640 bp, Zea Mays
cgaccttgggaccggaagcgaccaactgacggatcgacaggcccgtgatgccgtcgcggcggcgccgacgcggcgacctcgccgtcgcggtggcggtgctggcgacggtggccctagcggccggggccgacggcggcgcggagttcgactacaggaagctctcggggataatcatcccggggttcgcgtccacgcagctgcgcgcgtggtcggttctcgattgcccctactcgcccttcgacttcaaccccctcgactccgtctggctcgacaccgccaagcttttctctgcggtaaattgctggcttaaatgcatgctgcttgaaccctataatcagacagaccatcccgaatgcaagtcaaggcctgatagtggtctttctgcaattacagagctggaccctggttatataacaggtcctctctcttcagtatggaaagaatgggtcaaatggtgtgtagagtttggcattgaagctaatgcaattatcgctgttccgtatgattggagactgcccccatcaatgcttgaggagagagatctgtactttcacaaattaaagctaacatttgaaattgctttgaaactccgaggagggccatctttggtatttgcgcattcgatgggaaataacgtgtttcgctattttttggaatggttgaaactggaaattgctcccaagcactatatccagtggcttgatgagcatatacatgcatattttgcagttggcgctcctcttcttggatctactgaagcagttagaggcgctctttctggaacaacttttggtcttccagtcagtgagggcacagcacggttgatgtttaatgcatttggttcttctctatggcttatgccattctcaaaacactgcaaagctgataatatctactggaagcatttttttgagggaaaaggaggttgtcctcacaaacaacaatgtgatgaagatgaatatatttcagactacggcggatggcccacagaccttgttaatatcgaggttccttcagctcgagatatgggggcatacccatccatcacagatataaccgagaacataacatccattatggagtgtggaaagccaactctcctgtcattttctgccagagaggtttcagatggtactttgttcaaaacgatagaggattatgaccctcagagcaaggcacttgtttatcagcttgagaagtaagtctacatttttgcacttgcttccatcgcccacaactccctctcttccgcagcccttcttgtattatcagggtgatccagttctgaaccctctcacaccatgggagagacccccaataaagaacgtattttgcatttacgggattgattcaaagactgaggtaggatattactttgcaccaagtggcaaaccatatccagacaactggataataactgatattatttatgagcttgaaggttccctactttcaagatcaggtaattctgtttctgggaagcctaacaattccagtggtgatggaacagtatcatacaactccctctcatggtgcaagaattggcttggaccaaaagtgaacataacgagggctccacaggcagaacatgatggatctgatctgcaaacagccatgaatattgatcatcatcatggtgacgacatactaccaaacatgacgagggttccgcatgtgaagtacataacctactatgaggatgctgaaagtcttccaggatggagaacagcagtctgggagctcgataaagcaaaccacaggaatattgttaggacgccagtattaatgcgtgagttatggcttgaaatgtggcacgatttgcatcctgattcaaaatcgaaatttgtgacgaaagctttccgaggtccactaagaaacgaagactgtcgctgggactatggaaaggctcgatgtggctttccagaacactgtgaatacaggtatacatttggcgatgtccatctgggaatgagctgcagactgagaaatacgtccgctaaccttcttcaacagtatctctgaaatgtcgtgggccgagtaattttgtgttttgttgctcgcatggaaatggtatctgattccccattttgacctgccaatgaaattagccatcaacaaggtagatacagtatcaaccggaggccctcgaatgacaggtcaactcttattcttgtcaccattttggcacacttaaatctttgaagtcgacatatgcaaagctgaaacaacacgttcgcatgacaaattttggttgaagatggaggccaacgtccccaggagtgtcggcagagttttcctcttgtctgtagcactggcaccttcggcgtcctgaaggtgccatgagatcatacactgatgtacactgtagcatggttttgtaaatcaagccgtcacaaattgacttagtcttacaaaaacgataccctatagattggcagtgttaaaattctttacgactcccaattaaccaccttgattgtaatgtgcccttaaagagatgaaaggatgaactctgctcaatattagaccttgtttggttagggtgactagattttactaaaatacaaaagagggtgactaaggtttcctcctaaagtttagggtctgtttgattgtgtttgttgtggctgtgaaaaaaaa

SEQ ID NO: 133352 - DNA, 324 bp, Zea Mays
tgagaagcaggctcggaaaatggggtgggcacacccgccggtggtggccatggaggaggagcgccgtctggtgcggggtttcgtcgacgtccttgtcctcgccggcggccgcacctcgtccggcgccgctgctacttggatctccgaatatatcaataaggccctccggtggacgctcttcttcgaggaggccagcggcggtccctctcgctcctgcggtcctccccttcgactccataatgtcttctctgtgccactttcttctgcttgacatttgcgaatttttgcaacaaattggttgtaagtaatgctgctcagtgcttt

SEQ ID NO: 133353 - DNA, 1547 bp, Zea Mays
cagaatatatactcattcatcatacttaattatgatggtaagaacgatttttttcagttttgatgagtaacagcagtaccacactccgaaagcacaattttgaatacaagcagttccctgttgcgttcactaacaatttgttcttcagtcagtcccaggctgacttccatgtttgcttcaatatctccaccgattattttatccgtaatcacaaacaattggctctttatttttatacagaacattgcatgcactgatacacacaaggtcccagtgtatgcaattccctatgaacgtttgcctcattggagcatagaaaggcaaggcatgaggtccacaacttcagcgagtgcctgtcagttactccgatttgttctcagagttaatctgctgggctagcaacagcagcccaaaagccgcgaataaggataggccggtagatgtgtagccaagaacaagcagtgcggtcttgagcgacttggccaactgcagtgcattgtcatttgtgtattgcgttgtattgtcaggaatactttgcacgcctcgtgctagttgccatgagattaatctggatcaagtaacaagtgtcagatcagatgtatttactttctaatatcacagatgcgctaaaccaaacagtatgacagtccaatgataacacaaaattatgtggaggtgaattctttacagaaagaaatgggttgaccagcgtttgaactttgaacctcgtttcgatgccagggggcaattctaccctctaaccgtgacaagaaaacagaagggaaaatgtagcccaattctaccctctaccaatcaagggcacagctaggttatccatttgataaatggtgttaactagttgcagataactttggagaatcttttgacgacaaatcacaaatcatgttggcataaactatgtagccacatgaagtgaagcatcaacttcataccacgcatctattgtatttccatatgtattcacatgcatacttgagaattaaccgatatcaatctagtgaaaccaaattatactttcagaatatgaaattttgtgttagtttgaatgttacccaaaaattgccgctactgcagaaccgatagtggcactttgagcagtcactccgaactcaaaagcaattacctttagtctccttttttctttcatagcctgaacatcagattgaaccactgggtgtttcgatagcagcttaccattcttgatcattgtttcactaacctttttgagttctccctggttgtactgtcccattgactgaaacctccttccagctgacaccagccgcttgccaaacgctacactatgtaaagcaaacagcaagggacgcgaccttcagacaattgaggactgaattctgacaagtgacaacatcatatggatgcagtccatgcctgatttggcgctgcgcgtcaagtagggctccatcaacggcagctgcttggcaatgctatttgatgttgacgtatcagctaactcccatgcttttgccaggttcaggagcagatcacccacttcttggccacac

SEQ ID NO: 133354 - DNA, 497 bp, Zea Mays
ttccaagtgaaattcgtttatttttccttagaaaaataagaatccttagagaaaatggagttcccaaactaggcttaacatgataaaaactgatcaggtttcgggtacccattacctttcctacttcggtagcattgttgtggtcctgtttttttttttttggtctggtaatggttttatgtttgtttgcaattctaattagcaggcaacgaaattcaagccgaggagaagcgtgggaatcaggattctcgtgagctagtcaggtgaatagggataccgagaacagcttcatggctcaaaaaggatttttgacaccaggttttagtgtgattgtaacgatgtttagttaccagagggaaaatcttgtgactgtacctgtatcgatgtatccaccaccccatatactgtaaatttgttacgtacaatgtctcattgtaaacatcttgagaaggtatgaggtgttgtcatacccattggtgcaaccatccaattaaggc

SEQ ID NO: 133355 - DNA, 2637 bp, Zea Mays
cggtggatctcctggagcattgcttcgttcgagcgaaacggcaggctgcagcccgcagtggtgggtggggcaggggttcccaaatcgatacgactgcgacctgcagttcattcagcaattgttcgaagttcaaacgatggttaggaatcgaagcatcagcatggccacagtataagcaatcgacagcaacagaacgcactactgcgctagtctctagctaccccctcacccagaaccgaccctaccgacaagcgccgaattgttttgatgaatgcagtatacaaacagctgagcttgatagaagggaggaaggaagggtgtgtgtgtgtggcagcgacagaaagctaggtgagatcaccgtgcgaaggcggcgaaaggacgcccgagacggcgaggcggaggccgctgagtcggagacgaagagcgggcgagaacacgtcgccatcgaccttccccttctcgctcaccaggcgatggcttttcgaatggaacggagactagcgaggtcgaggcctcccgttttctggggtcgacgcttttccaactccaaattgggggaacgaattcttctgcgaggagaggagccgaggagtagataatggccacggaattgccaagtgcggactgcggagacaccacaagctcagctatggaagacgacgacgatgggatggcgacgctggattgggcggccaagctgtctggcccaccactctgacgaggctgcacttttccgggcgggctgggtggctgggcaacggccacgcgacgcgacgcgtgtgtgggccagaccattcaggtgggaattattgggctgagccgtatctgtccgaggcccacttgtctgacctcgtttcgttgtcttgtattgtattactgggccgttttgctgaagagacacacccgccggcgactaacaaaaccctcgccagcctttcccgtccgccggccgccgctaatggacgccggcgacgcctccaccgcgcttgccctcacggcggcggaaccatcaccgccgagccccaacaggaggggcaagaggccgaccaacccgcccaagcgcttcgtgcacaccccgatcccgccttcaatcctctcggacccgaccctggccgccgccgccacctccctcctcccggccaactacaactttgagctccacaagacggcgcaccgcatacggtccgcggccgctcgccgcgtggcgctgcagctccccgagggcctgctcctcttcgcgctcccactgtcgcacctcctcgcgccctacctcgagcccggcgccgacaacgacgtcctcgtcctcgccgacgccacctacggggcctgctgcctcgctgaccgccccgccagggcgctcgccgccgacctcctcgtccactacggccactcctgcctcgtccccgtcacggcctcactcctcccggtgctctacgtcttcgtcgagatccgcgtggacgccgcccgcctcgccgccgccgtcagagccgccttcccggacccagcggccgcgccccgcctcgccatcgccgggaccgtgcagttcatcgccgcggtccacgccgcgcgcgagatgctcacggtagagggctaccacgacatcgtcgtgccgcaggcgaagccgctgtccgccggcgagatcctgggttgcaccgccccgacgctcaagaagtcggaggaggtgggcgccgtggtgttcgtcgccgacgggaggttccacctcgaggcgtttatgatcgccaatcccggggtgaaggcctaccgtttcgacccattcctcggggttctcgtgctggaggagtatgaccatgttggcatgaagcaggcgaggaaagcggcggtgctggcggccaggaaggccaagagctggggagtcgtacttggcaccctggggaggcaggggagcaccaaggttcttgacagggtggtggagcatttggaggagaaagagttggaacacacagtggtgctcatgtcggagctttccccggcgaggatggagctatttggagattccattgatgcctgggtgcaaattgcttgtccacgcttgtcgatcgactggggggagggtttcaagaagccagtgctgacaacgttcgagtttgatgtcgcactgggctatgtccctgggtggtgggagaaggggagcaggggttgcggtagtgaatgtggtgttgggtgttgttcaggatcaggaactcgtggaaactgcaactgcagtgatggggattatggtggtgactacccgatggattattattcgcaagatggaggtgattggaatagctgctacatgaagaagaagccatctactggcgagaggaaactgcgggttcggattgcaggcaacgaaattcaagccgaggagaagcgtgggaatcaggattctcgtgagctagtcaggtgaatagggataccgagaacagcttcatggctcaaaaaggatttttgacaccaggttttagtgtgattgtaacgatgtttagttaccagagggaaaatcttgtgactgtacctgtatcgatgtatccaccaccccatatactgtaaatttgttacgtacaatgtctcattgtaaacatcttgagaaggtatgaggtgttgtcatacccattggtgcaaccatccaattaa

SEQ ID NO: 133356 - DNA, 2590 bp, Zea Mays
cggtggatctcctggagcattgcttcgttcgagcgaaacggcaggctgcagcccgcagtggtgggtggggcaggggttcccaaatcgatacgactgcgacctgcagttcattcagcaattgttcgaagttcaaacgatggttaggaatcgaagcatcagcatggccacagtataagcaatcgacagcaacagaacgcactactgcgctagtctctagctaccccctcacccagaaccgaccctaccgacaagcgccgaattgttttgatgaatgcagtatacaaacagctgagcttgatagaagggaggaaggaagggtgtgtgtgtgtggcagcgacagaaagctaggtgagatcaccgtgcgaaggcggcgaaaggacgcccgagacggcgaggcggaggccgctgagtcggagacgaagagcgggcgagaacacgtcgccatcgaccttccccttctcgctcaccaggcgatggcttttcgaatggaacggagactagcgaggtcgaggcctcccgttttctggggtcgacgcttttccaactccaaattgggggaacgaattcttctgcgaggagaggagccgaggagtagataatggccacggaattgccaagtgcggactgcggagacaccacaagctcagctatggaagacgacgacgatgggatggcgacgctggattgggcggccaagctgtctggcccaccactctgacgaggctgcacttttccgggcgggctgggtggctgggcaacggccacgcgacgcgacgcgtgtgtgggccagaccattcaggtgggaattattgggctgagccgtatctgtccgaggcccacttgtctgacctcgtttcgttgtcttgtattgtattactgggccgttttgctgaagagacacacccgccggcgactaacaaaaccctcgccagcctttcccgtccgccggccgccgctaatggacgccggcgacgcctccaccgcgcttgccctcacggcggcggaaccatcaccgccgagccccaacaggaggggcaagaggccgaccaacccgcccaagcgcttcgtgcacaccccgatcccgccttcaatcctctcggacccgaccctggccgccgccgccacctccctcctcccggccaactacaactttgagctccacaagacggcgcaccgcatacggtccgcggccgctcgccgcgtggcgctgcagctccccgagggcctgctcctcttcgcgctcccactgtcgcacctcctcgcgccctacctcgagcccggcgccgacaacgacgtcctcgtcctcgccgacgccacctacggggcctgctgcctcgctgaccgccccgccagggcgctcgccgccgacctcctcgtccactacggccactcctgcctcgtccccgtcacggcctcactcctcccggtgctctacgtcttcgtcgagatccgcgtggacgccgcccgcctcgccgccgccgtcagagccgccttcccggacccagcggccgcgccccgcctcgccatcgccgggaccgtgcagttcatcgccgcggtccacgccgcgcgcgagatgctcacggtagagggctaccacgacatcgtcgtgccgcaggcgaagccgctgtccgccggcgagatcctgggttgcaccgccccgacgctcaagaagtcggaggaggtgggcgccgtggtgttcgtcgccgacgggaggttccacctcgaggcgtttatgatcgccaatcccggggtgaaggcctaccgtttcgacccattcctcggggttctcgtgctggaggagtatgaccatgttggcatgaagcaggcgaggaaagcggcggtgctggcggccaggaaggccaagagctggggagtcgtacttggcaccctggggaggcaggggagcaccaaggttcttgacagggtggtggagcatttggaggagaaagagttggaacacacagtggtgctcatgtcggagctttccccggcgaggatggagctatttggagattccattgatgcctgggtgcaaattgcttgtccacgcttgtcgatcgactggggggagggtttcaagaagccagtgctgacaacgttcgagtttgatgtcgcactgggctatgtccctgggtggtgggagaaggggagcaggggttgcggtagtgaatgtggtgttgggtgttgttcaggatcaggaactcgtggaaactgcaactgcagtgatggggattatggtggtgactacccgatggattattattcgcaagatggaggtgattggaatagctgctacatgaagaagaagccatctactggcgagaggaaactgcgggttcggattggcaacgaaattcaagccgaggagaagcgtgggaatcaggattctcgtgagctagtcaggtgaatagggataccgagaacagcttcatggctcaaaaaggatttttgacaccaggttttagtgtgattgtaacgatgtttagttaccagagggaaaatcttgtgactgtacctgtatcgatgtatccaccaccccatatactgtaaatttgttacgtacaatgtctcattgtaaacatcttgagaa

SEQ ID NO: 133357 - DNA, 1853 bp, Zea Mays
aaaccctcccttgccttgcccagttgcccccaaaccccagccaccagctataccaatggcggccaccgcgatggaccatgacggcggcgacgacgtggtcacaccaggggagcttctcggaaactcattaaccctcgcggccggacgtggcgcctacgccgacggtcgctctgtgcgcgcgtcggtcaccgggcgccgccgcatcgtgccgcccgcacctggctccgacgaccagagatccacggtggaggtggtggggcacaaggcccatggagctgtgccgcagccgggaagcgtcgtcatcgcccgagtaagatgctcagaaatactgggcataatatggtttcaagaattgcaattcatttgcttttgtgaaaacactcaatggcaattggccatgctctgaaatttccaattaccacacgcatcccctggttcaggttggaggtggggcgatgcatgtgtctgaaagtcagagccattactcttgtagttgtctatagggtaataatgggcacaccatcgtatttttcaggcatctttgctgcaggaagtcgtcgaacatagtcacaatgtttttttaaaaagcagaagtttctaaaccgctgattcctgaaagctgtcacttttgcaggtaacaaaggttatggctagaatggcctctgcagatatcatgtgtgttgactcaaaggctatcagagaaaagttcactggcatgataaggcagcaagatgttcgtgcaactgaaattgacaaggtggatatgtaccaatcatatcgtcctggggacattgttaaagctatggttgtatccttaattgacgaaaatgatgcagtacaaataatctctgttttcttctcttgttatcaaccttggttaggtttacttgcccttaggttatccacatctaccttcttaagctgtcgtaactttttaaatctttaaactcttgctttgagggcccgtttggcttggctcctgaagtgctcctccggaggagccggagcacttgaggagccacttttgtggctccggctgctcagcccaaaatagctccggctttctatactgttgaccccaaaacgggcttctcaacacattttgaggagtcgtcttggggtgaacagtagaggtacagccttttgggagtgaggactgaggaggcagagctgcaaaaagtgtctcaaatgctctggcgtgtttggaggagccatgctgaatgggccctgaatatttttcctgtttgaagtagttaatattcttggctggctttggatccttaaataatgttaaagctttctcttggtgatgcaagggcatattacctttccactgcgaaaaatgaacttggagtcgtttcagcacaaagcatagctggtggtacattggttccaatcagttggactgagatgcaatgtgatttgaccggtcaaattgagcaaaggaaagttgcaaaggtggaatagatgtgctgtggccctcctgataaatggtggtggcggtatacaaattgtggaccagtgacaccaggtccttgggcggactacccaattctgcgacgcccaacttcattacagctgcattgagcatgggtttttaaaaccctggctgaatttaactagacatgaatcgtagccatgggtcctgtaacccaaccttgggatctgaatcatagccatgggttctgtaacccagtaaccttgcccttgtgatttgttactctgtgagctaatgacattgcagttttccacctcgtgatttctacaagttttgttgcgcattgttgagaacttgagatctgttgctgtctttctggcatgatgtcaaatggctgtaccggacttgtttcaaa

SEQ ID NO: 133358 - DNA, 1041 bp, Zea Mays
aaaccctcccttgccttgcccagttgcccccaaaccccagccaccagctataccaatggcggccaccgcgatggaccatgacggcggcgacgacgtggtcacaccaggggagcttctcggaaactcattaaccctcgcggccggacgtggcgcctacgccgacggtcgctctgtgcgcgcgtcggtcaccgggcgccgccgcatcgtgccgcccgcacctggctccgacgaccagagatccacggtggaggtggtggggcacaaggcccatggagctgtgccgcagccgggaagcgtcgtcatcgcccgagtaacaaaggttatggctagaatggcctctgcagatatcatgtgtgttgactcaaaggctatcagagaaaagttcactggcatgataaggcagcaagatgttcgtgcaactgaaattgacaaggtggatatgtaccaatcatatcgtcctggggacattgttaaagctatggttctttctcttggtgatgcaagggcatattacctttccactgcgaaaaatgaacttggagtcgtttcagcacaaagcatagctggtggtacattggttccaatcagttggactgagatgcaatgtgatttgaccggtcaaattgagcaaaggaaagttgcaaaggtggaatagatgtgctgtggccctcctgataaatggtggtggcggtatacaaattgtggaccagtgacaccaggtccttgggcggactacccaattctgcgacgcccaacttcattacagctgcattgagcatgggtttttaaaaccctggctgaatttaactagacatgaatcgtagccatgggtcctgtaacccaaccttgggatctgaatcatagccatgggttctgtaacccagtaaccttgcccttgtgatttgttactctgtgagctaatgacattgcagttttccacctcgtgatttctacaagttttgttgcgcattgttgagaacttgagatctgttgctgtctttctggcatgatgtcaaatggctgtaccggacttgtttcaaa

SEQ ID NO: 133359 - DNA, 1537 bp, Zea Mays
aaaccctcccttgccttgcccagttgcccccaaaccccagccaccagctataccaatggcggccaccgcgatggaccatgacggcggcgacgacgtggtcacaccaggggagcttctcggaaactcattaaccctcgcggccggacgtggcgcctacgccgacggtcgctctgtgcgcgcgtcggtcaccgggcgccgccgcatcgtgccgcccgcacctggctccgacgaccagagatccacggtggaggtggtggggcacaaggcccatggagctgtgccgcagccgggaagcgtcgtcatcgcccgagtaacaaaggttatggctagaatggcctctgcagatatcatgtgtgttgactcaaaggctatcagagaaaagttcactggcatgataaggcagcaagatgttcgtgcaactgaaattgacaaggtggatatgtaccaatcatatcgtcctggggacattgttaaagctatggttgtatccttaattgacgaaaatgatgcagtacaaataatctctgttttcttctcttgttatcaaccttggttaggtttacttgcccttaggttatccacatctaccttcttaagctgtcgtaactttttaaatctttaaactcttgctttgagggcccgtttggcttggctcctgaagtgctcctccggaggagccggagcacttgaggagccacttttgtggctccggctgctcagcccaaaatagctccggctttctatactgttgaccccaaaacgggcttctcaacacattttgaggagtcgtcttggggtgaacagtagaggtacagccttttgggagtgaggactgaggaggcagagctgcaaaaagtgtctcaaatgctctggcgtgtttggaggagccatgctgaatgggccctgaatatttttcctgtttgaagtagttaatattcttggctggctttggatccttaaataatgttaaagctttctcttggtgatgcaagggcatattacctttccactgcgaaaaatgaacttggagtcgtttcagcacaaagcatagctggtggtacattggttccaatcagttggactgagatgcaatgtgatttgaccggtcaaattgagcaaaggaaagttgcaaaggtggaatagatgtgctgtggccctcctgataaatggtaaacatgtggtggcggtatacaaattgtggaccagtgacaccaggtccttgggcggactacccaattctgcgacgcccaacttcattacagctgcattgagcatgggtttttaaaaccctggctgaatttaactagacatgaatcgtagccatgggtcctgtaacccaaccttgggatctgaatcatagccatgggttctgtaacccagtaaccttgcccttgtgatttgttactctgtgagctaatgacattgcagttttccacctcgtgatttctacaagttttgttgcgcattgttgagaacttgagatctgttgctgtctttctggcatgatgtcaaatggctgtaccggacttgtttcaaa

SEQ ID NO: 133360 - DNA, 1650 bp, Zea Mays
acatctgtaaagacattttcactagcccaacttcagaaggccacagatggttttgattcaagaagagttttgggtcaagggggctttgggcgtgtctaccatgggacgatagaggatggaaacgaaattgctgttaaattgcttacaagggaggacaggagtggtgaccgtgagtttattgcagaagtggaaatgctcagtcgattgcaccaccggaatcttgtcaaattgattggtatttgcattgagcggagtaaaagatgtcttgtgtatgagctcatacgaaacggaagtgtggaatcccatcttcatggcgctgacaaggctaagggtaagctgaactgggatgttaggatgaaaattgctcttggcgctgctcgaggcttagcatatctgcatgaagattcaaaccctcatgtcatacaccgtgacttcaaggccagcaatatattattagaggaagatttcactcctaaagtgaccgattttggtttagcaagggaagcatccaatgcgactcaacctatatctaccagggtaatgggtactttcggttatgttgctccagaatatgcaatgacgggccatcttcttgttaagagcgatgtctacagttatggggttgtcttgctggaacttatatcaggaaggaagcctgtaaacatctctgagtccaaggatcctgagaaccttgtaacttgggcccgtcctctgctaagccataaggagggcctggagaagttaattgatccgtctctggatggaaattttaacttcgacaatgtagcgaaggtggcatccatcgcttccatgtgtgtgcacacagatccatcgcagaggccgttcatgggtgaagttgtccaggcactgaagctgatctacaatgatccagatgaggcttgcgacgattcctacagtccaaggaattcatctgaccaagacggtgactacgaaggagacctggtctttgagagtggaagctggggctttggggcctctgggtgtctagactaccggaattccttaccgtttgtcactatggactacagttctggccgaatagaagggccgcacgaccctcgcgcggcattgtcagcgggatcccatgcccagtcaccagtgctgcagaatagatcaggccccttgcggatgaagaagaagctggcctccttctaccgctctagaggcagcattagtgagcatgggcacctgccacgccattgatcagtcagtgaactagtgttaggctgttagcttcggttgactctgggattgaggctggcgggggttgtcattacctgattcgtgcctcatgttagtgtacagttcgtggtgacccttcacccttgggtatgggtgttttctctctctctttgccttctgcttcttccccggaagcaatgaggatggggttggcaggtgctctctaattttcgcaaattgcggttcatttctcatgcatctgattggtttcttgccggagttctgggcatcatgttgttgtgactaggtggttgtactggatgcagttcgttgtaaacagacagtgtcagggatctacctcgcgttggagaggtgaactatacagccggctcagttcctcaaatgtcaggtggtacctgtgttaatattcttttggttcttactttg

SEQ ID NO: 133361 - DNA, 427 bp, Zea Mays
gctctcgctcccacgatccggcgctgccacgagcttccagatccgccgcccgggcaatgctgtagctgcccgcgccgagatgggcggcgtcggcgccggctctctcgccctgctgcggctgctcctcctcctgctcctccgcgccgaggcctccgctctccacggttgttctagttatatctgcaccgagccactgactgcaacaccaattggttccccttgtggctgtgtcgagcctattagtgttatcgttgatctggacttagctccttatctactgttcatgagcatagctgagttagaagttgaggttgcagctgggacatttcttaaacaaagccaggtgaagatcatggctgcagttgcaagtatccaggatgaccagaagacacgggtgaccatttatttggtgccgctaagagaacag

SEQ ID NO: 133362 - DNA, 213 bp, Zea Mays
gctctcgctcccacgatccggcgctgccacgagcttccagatccgccgcccgggcaatgctgtagctgcccgcgccgagatgggcggcgtcggcgccggctctctcgccctgctgcggctgctcctcctcctgctcctccgcgccgaggcctccgctctccacgcgactatattacctagcccagcaccaagtccatcaaaagcccctgaagc

SEQ ID NO: 133363 - DNA, 1485 bp, Zea Mays
aaagagagggccgcgacatcgatcagatcacaaggtgcgctggccagtggcagacagacactgccagtggcaccgccgcccgcaaccgcaatggcctccgcctcgcgcctcgtctccctcgcgctctgcctgtgcctgggcgccgcgctccacgcggcgccccggggcgcccacgcggcccgcgccttcttcgtcttcggcgactccctcgtcgacaacggcaacaacaactacctcttcacgcaggcgcgcgccgacgcgccgccctacggcatcgacacgcccgaccagcgcgccacgggccgcttcagcaacggcaagaacgtgccggacatcatcagtgagcacctcggcgcggagcccgtgctgccgtacctcagccccgagctcgacggcgacaagatgctcgtcggcgccaacttcgcgtccgccggcgtcggcatcctcaacgacaccggaatccagttcgccaacatcatccacatctccaagcagctgcgctacttcgagcagtaccagaggcgcctggccgcgctggtcggcgcggaggaggcgtcccgcctggtgcgcggcgcgctggtgctcatcacgctgggcggcaacgacttcgtcaacaactactacctggtgccctactcggcgcggtcgcgggagttctcgctgcccgactacgtctcctacctgctgtcggagtacgcgcaggtgctggcccgcctccacgacctcggcgcgcgccgggtgctggtgcagggggtgggccccatcggctgcgtccccgccgagctggcgctgcacagcgcggacggcgcctgcgacccggagctgcagcgcgccgccgagatgtacaacccgcgcctcatggcgctgctggccgacctcaacgcgcgcctcggcgccggcggcgacccggtgttcgtcggcgtcaacacgcaccggatccacaacgacttcatcgacgaccccagggcgtacggcttccagaccgccaccgaggcgtgctgcggccagggccgcttcaacgggctggggctctgcaccgtcatgtccagcctctgcgccgaccgcgacgcctacgtgttctgggacaacttccaccccacggagcgcgccaaccgcctcatcgtgcagcagttcatgtacgggaccaccgactacatcgcgcccgtcaacctcagcaccgtcctcgccatggacctccggaagcagcagctgcgcacgtgatgtacggtctcatcccatatgcatgcaggcctctgcagcttcaccatcttcattgttgcatgcttgttttcgttcctcgttcgtactcctcatcctggctgctaatgcatccaggtccaggtgtgcctttctcgtttgcgtctcggtgtgtggtgcgttgtacgtgcaattgtgtgtaacagtgacaaccataacttgtccatttctatcatataggacagcgcagctgcatccaatttatataaattttcaggggattcataa

SEQ ID NO: 133364 - DNA, 97 bp, Zea Mays
ctatctatctatctatctatctatctatctatctatctatcaagtcagcctctgctatctccagtcctggcacgcgactgctcgccgtggctctctg

SEQ ID NO: 133365 - DNA, 306 bp, Zea Mays
ggcgaggaaccggacggcgggaatggcgtgattgagaacgggcgacgcggacttgagcagaggcgcagagcattttccctggtcggcggaacggaacggcaacagccgaatcggggggaggacgcagccgtcgttataccaccacagaggaggaggaggacgggggcggggcgcagcaatggcaacggcagcggcagcgaagccaatgggcgtggcggagggaaaggtggcggtggcgctggtccccatggatgcggcaaggcggaggttaggagagaacaaacaatcccgggcattaattactag

SEQ ID NO: 133366 - DNA, 1937 bp, Zea Mays
ggagtccggatcggggatctgcgacaactacgttgtttaacaataataacggacgtgctgatggagggagagtcaagacgaagccaagaaaggccgaggcaggtgccaacaagcactagcagttgtgcccttgctgtgtttggttgggccctcctcttcctcttctccttctccagtcctgttggcatcgcgtacaagagggcagccagtggaccctcgctgccgccattgctggggtgggccgtgctccagccttgtgcggttggcaggcctactagctgtagagtatagtggaggtggagtagtatttttcgcttccattggcctccatccacctctcctccactcgacctgcgcttcactacagcccactggcaggggaaggggagcgtcgaccaattcgtcccgccctcgccgcgccgctggcctcgctcgcgtgccctccccgatggcggcagcggcgatccaccagttcgccgagtgtatcacctgccacgcctggagccccgaccagtcgatgattgccttttgcccaaacaaccatgaagtacatatctataaattcttcacagacaagtgggagaaacttcatgttttgtcaaagcatgatcaaatagtttcgggaatagactggagtaattcatccaacaaaatcgtaacagtttcacatgatagaaattcatatgtttggacacaagaaggatctgattggatacctactctggttattctaaagttaaatcgtgcagctttatgtgttcagtggagcccaaaagaaaacaagtttgccgtgggaagtggtgccaaatctgtgtgtatttgttattatgaacaagaaaacaattggtggattagcaaggttatcaggaaaaggcatgaatcttctgtcactagtcttgcatggcatccaaacaatatatatcttgcaacaacgtctacagatggtaaatgcagagtgttctctacttttatcaagggtgtagacacaaggggatcacaatcgagcacttcaaccaattcaaaattcggagagcaaattgctcagcttgatctatcatctacctgggtatttggtgtaaggtggtcaccaagtgggaagacattggcctatgcagggcataactccatggtttatgtcatcgatgaagttgaatcttctcctgtggcccaaaacttgacgctgcgtgatctgcctctccgtgatgttctttttgtctctgagcgcacattggttggtgtcggatttgactgcaatcctatgatctttgctgctgatgatactgggctttggagtttcgtaagattcttggacgagatgaaagctgctccatcagcttcaaaagcctcacagctctctgaagcccttggaaagctatatggacaatcaaagcagggggctagtagcgacactgttgaaccatcgaaagctcgtggtggggcccatgagaattgcataacgtgtattgtacccttgagaaaaggaagcgatggtactatcaaacgattcagcacgtcaggattggatggtaaggtcgtggtatgggatttggaaaaccacgtcagcattgcaaaatagctcgagggaaggctttcgttaacaatcaaatcgagggggcttctgtcattacccatcgtgctcaggggaccaccattcgtggcagcggggtcctgcaggttttcaagatccagggccagccaggatcgaaaaactcgcctgatggttgaattgtgtgaccgcggaccaccatgtgtaatccaacagtagaataggatggttccatgaaagcaggccctgctgatatgtggcctgtggggagtggggacctgctctattggtggatccccatacgctaatctttgctttgcccctgttcagggacatcccaccgggtcggtcagttttggcagcatgtgcatgagcttctggttttattact

SEQ ID NO: 133367 - DNA, 1557 bp, Zea Mays
ggcctccatccacctctcctccactcgacctgcgcttcactacagcccactggcaggggaaggggagcgtcgaccaattcgtcccgccctcgccgcgccgctggcctcgctcgcgtgccctccccgatggcggcagcggcgatccaccagttcgccgagtgtatcacctgccacgcctggagccccgaccagtcgatgattgccttttgcccaaacaaccatgaagtacatatctataaattcttcacagacaagtgggagaaacttcatgttttgtcaaagcatgatcaaatagtttcgggaatagactggagtaattcatccaacaaaatcgtaacagtttcacatgatagaaattcgtaagtatatgtcaaagtgcaaatttctagaagatctatcttgtttcttactctggcaggggataggtgggtacatatatatattttcatttgacctcagatatgtttggacacaagaaggatctgattggatacctactctggttattctaaagttaaatcgtgcagctttatgtgttcagtggagcccaaaagaaaacaagtttgccgtgggaagtggtgccaaatctgtgtgtatttgttattatgaacaagaaaacaattggtggattagcaaggttatcaggaaaaggcatgaatcttctgtcactagtcttgcatggcatccaaacaatatatatcttgcaacaacgtctacagatggtaaatgcagagtgttctctacttttatcaagggtgtagacacaaggggatcacaatcgagcacttcaaccaattcaaaattcggagagcaaattgctcagcttgatctatcatctacctgggtatttggtgtaaggtggtcaccaagtgggaagacattggcctatgcagggcataactccatggtttatgtcatcgatgaagttgaatcttctcctgtggcccaaaacttgacgctgcgtgatctgcctctccgtgatgttctttttgtctctgagcgcacattggttggtgtcggatttgactgcaatcctatgatctttgctgctgatgatactgggctttggagtttcgtaagattcttggacgagatgaaagctgctccatcagcttcaaaagcctcacagctctctgaagcccttggaaagctatatggacaatcaaagcagggggctagtagcgacactgttgaaccatcgaaagctcgtggtggggcccatgagaattgcataacgtgtattgtacccttgagaaaaggaagcgatggtactatcaaacgattcagcacgtcaggattggatggtaaggtcgtggtatgggatttggaaaaccacgtcagcattgcaaaatagctcgagggaaggctttcgttaacaatcaaatcgagggggcttctgtcattacccatcgtgctcaggggaccaccattcgtggcagcggggtcctgcaggttttcaagatccagggccagccaggatcgaaaaactcgcctgatggttgaattgtgtgaccgcggaccaccatgtgtaatccaacagtagaataggatggttcc

SEQ ID NO: 133368 - DNA, 1655 bp, Zea Mays
ccacctctcctccactcgacctgcgcttcactacagcccactggcaggggaaggggagcgtcgaccaattcgtcccgccctcgccgcgccgctggcctcgctcgcgtgccctccccgatggcggcagcggcgatccaccagttcgccgagtgtatcacctgccacgcctggagccccgaccagtcgatgattgccttttgcccaaacaaccatgaagtacatatctataaattcttcacagacaagtgggagaaacttcatgttttgtcaaagcatgatcaaatagtttcgggaatagactggagtaattcatccaacaaaatcgtaacagtttcacatgatagaaattcatatgtttggacacaagaaggatctgattggatacctactctggttattctaaagttaaatcgtgcagctttatgtgttcagtggagcccaaaagaaaacaagtttgccgtgggaagtggtgccaaatctgtgtgtatttgttattatgaacaagaaaacaattggtggattagcaaggttatcaggaaaaggcatgaatcttctgtcactagtcttgcatggcatccaaacaatatatatcttgcaacaacgtctacagatggtaaatgcagagtgttctctacttttatcaagggtgtagacacaaggggatcacaatcgagcacttcaaccaattcaaaattcggagagcaaattgctcagcttgatctatcatctacctgggtatttggtgtaaggtggtcaccaagtgggaagacattggcctatgcagggcataactccatggtttatgtcatcgatgaagttgaatcttctcctgtggcccaaaacttgacgctgcgtgatctgcctctccgtgatgtgggttctttttgtctctgagcgcacattggttggtgtcggatttgactgcaatcctatgatctttgctgctgatgatactgggctttggagtttcgtaagattcttggacgagatgaaagctgctccatcagcttcaaaagcctcacagctctctgaagcccttggaaagctatatggacaatcaaagcagggggctagtagcgacactgttgaaccatcgaaagctcgtggtggggcccatgagaattgcataacgtgtattgtacccttgagaaaaggaagcgatggtactatcaaacgattcagcacgtcaggattggatggtaaggtcgtggtatgggatttggaaaaccacgtcagcattgcaaaatagctcgagggaaggctttcgttaacaatcaaatcgagggggcttctgtcattacccatcgtgctcaggggaccaccattcgtggcagcggggtcctgcaggttttcaagatccagggccagccaggtagattttttttgggtgcctgtacacagaaacattgccttagcgtagggagaacttgcatctatcaagtagattcaatttttggcgagtaattgtcctttgaattgagtccatacgtattgtgtatccttgctcccaaacaaacccgtaccgtatagtttttagctaggtaggtaggcaattgacgtcatctcttatttctggcgccatgtgtaaaataaccacacacggaattcatccgcggatgctgtgttgggacttatggacgcctcgtttcttctgc

SEQ ID NO: 133369 - DNA, 2118 bp, Zea Mays
ggagtccggatcggggatctgcgacaactacgttgtttaacaataataacggacgtgctgatggagggagagtcaagacgaagccaagaaaggccgaggcaggtgccaacaagcactagcagttgtgcccttgctgtgtttggttgggccctcctcttcctcttctccttctccagtcctgttggcatcgcgtacaagagggcagccagtggaccctcgctgccgccattgctggggtgggccgtgctccagccttgtgcggttggcaggcctactagctgtagagtatagtggaggtggagtagtatttttcgcttccattggcctccatccacctctcctccactcgacctgcgcttcactacagcccactggcaggggaaggggagcgtcgaccaattcgtcccgccctcgccgcgccgctggcctcgctcgcgtgccctccccgatggcggcagcggcgatccaccagttcgccgagtgtatcacctgccacgcctggagccccgaccagtcgatgattgccttttgcccaaacaaccatgaagtacatatctataaattcttcacagacaagtgggagaaacttcatgttttgtcaaagcatgatcaaatagtttcgggaatagactggagtaattcatccaacaaaatcgtaacagtttcacatgatagaaattcatatgtttggacacaagaaggatctgattggatacctactctggttattctaaagttaaatcgtgcagctttatgtgttcagtggagcccaaaagaaaacaagtttgccgtgggaagtggtgccaaatctgtgtgtatttgttattatgaacaagaaaacaattggtggattagcaaggttatcaggaaaaggcatgaatcttctgtcactagtcttgcatggcatccaaacaatatatatcttgcaacaacgtctacagatggtaaatgcagagtgttctctacttttatcaagggtgtagacacaaggggatcacaatcgagcacttcaaccaattcaaaattcggagagcaaattgctcagcttgatctatcatctacctgggtatttggtgtaaggtggtcaccaagtgggaagacattggcctatgcagggcataactccatggtttatgtcatcgatgaagttgaatcttctcctgtggcccaaaacttgacgctgcgtgatctgcctctccgtgatgttctttttgtctctgagcgcacattggttggtgtcggatttgactgcaatcctatgatctttgctgctgatgatactgggctttggagtttcgtaagattcttggacgagatgaaagctgctccatcagcttcaaaagcctcacagctctctgaagcccttggaaagctatatggacaatcaaagcagggggctagtagcgacactgttgaaccatcgaaagctcgtggtggggcccatgagaattgcataacgtgtattgtacccttgagaaaaggaagcgatggtactatcaaacgattcagcacgtcaggattggatggtaaggtcgtggtatgggatttggaaaaccacgtcagcattgcaaaatagctcgagggaaggctttcgttaacaatcaaatcgagggggcttctgtcattacccatcgtgctcaggggaccaccattcgtggcagcggggtcctgcaggttttcaagatccagggccagccaggtagattttttttgggtgcctgtacacagaaacattgccttagcgtagggagaacttgcatctatcaagtagattcaatttttggcgagtaattgtcctttgaattgagtccatacgtattgtgtatccttgctcccaaacaaacccgtaccgtatagtttttagctaggtaggtaggcaattgacgtcatctcttatttctggcgccatgtgtaaaataaccacacacggaattcatccgcggatgctgcatctccaacaatgagacttaaaatagtggcccaaaaattaaaataagatattgatgaagccgtttgttttttatttttgaatttgagccctatattttaagttaggtcgctgatttaaggtactgtttagatgctcttaggtccggttgggacctgtgagggatcgag

SEQ ID NO: 133370 - DNA, 1894 bp, Zea Mays
ctgcggtggcgtggcggtgacgtgccggcgcggcgccgataagaggttgagagagagggaaaaaaagaacaatcaattctccagaccctccccggcaaccgcgtccggccgtccgcttccgtctccttggataaccacgacgcccgccggcaagcgaaagcgaagcgagccaacccagccatggagaaggcgatcgatcggcagcgggtcctcctggcgcacctcctcccctccccctccgccgcctcctcgcagcctcagcttgcggcgtcggcgtgcgcggccggggacagcgccgcctaccagaggtcctcctccttcggggacgatgtcgtcgtcgtcgctgcctacaggacgccgatatgcaaggccaagcgaggaggcttcaaggacacctacccagaggacctcctcactgttgttctcaaggctgttctggacaacactagaatcaatccagctgacatcggtgacatcgtcgttgggacggtgcttggccctggttcccagcgtgcaaacgagtgcaggatggctgcgttgtttgctggattccctgaaaccgtccctgttagaactgtcaaccgccagtgttcatctgggctacaggcagtagctgatgtcgcagctgctataaaggctggttactatgacatagggattggtgctggtttggaatccatgtccataaattccattgcttgggaaggacaagttaacccaaaaataagcgcattccagaaagcacaggattgtcttctgcccatgggaattacttctgaaaatgttgcccatcgatatggtgtaaccaggcaagagcaagatcaggccgccgctgagtctcataggagagctgctgcagccacggcctctggaaaattcaaggatgagatcgtccccgtgccaacaaagatcgttgatcctaaaactggagaggagaaggaagttgtgatatcagttgatgatgggattaggccagggaccacagcatctggattggcgaaactgaaaccagtttttaaaaaggatgggactacaactgcaggcaattccagtcaagtgagtgatggtgctggagctgttcttctcatgaaaagatctgtggctctgaagaaagggctgcccattcttggtgttttcaggagctttgcggctgttggagtggatccagctgttatgggcgttggtcctgccgtggccattcctgctgctgtgaagtctgcaggccttgagattggagacattgatttgtttgaactgaatgaggccttcgcctctcagtttgtctattgctgcaacaagttggggctggacccgttccaaagtaaatgtaaatggaggcgcgattgcccttggacaccctctgggtgcaacaggtgcccggtgtgtggctactcttctaaatgaaatgaagcgccggggcagagactgcagatttggtgttgtcaccatgtgtatcggatctggaatgggggcagcagctgtgttcgagcggggagacgcggtggatggactctccaacgtgagggacatccaggcacataattttctgtctaaggatgcgaagtagaggcgcagaaaaaacatccatccttgagcagcataagcctgctgcatttgtaatatattcgaaatccgtattttttttcttcacaaacactactctatatacgatgaataaaagggcgacaatacagtgtcatcttgtagccacctaagatgcgaaagagaaaagaaggccggctgttcaatgttctgggcttgttctgttattgctttccgtctctcaaactgaacaagcatggtcttttgtgtgtttgaaccagaaggatggagagagcaccttgatttgctgagacgcgtggggtgaggcgaatttgaatttcatttaaaattt

SEQ ID NO: 133371 - DNA, 1977 bp, Zea Mays
ctgcggtggcgtggcggtgacgtgccggcgcggcgccgataagaggttgagagagagggaaaaaaagaacaatcaattctccagaccctccccggcaaccgcgtccggccgtccgcttccgtctccttggataaccacgacgcccgccggcaagcgaaagcgaagcgagccaacccagccatggagaaggcgatcgatcggcagcgggtcctcctggcgcacctcctcccctccccctccgccgcctcctcgcagcctcagcttgcggcgtcggcgtgcgcggccggggacagcgccgcctaccagaggtcctcctccttcggggacgatgtcgtcgtcgtcgctgcctacaggacgccgatatgcaaggccaagcgaggaggcttcaaggacacctacccagaggacctcctcactgttgttctcaaggctgttctggacaacactagaatcaatccagctgacatcggtgacatcgtcgttgggacggtgcttggccctggttcccagcgtgcaaacgagtgcaggatggctgcgttgtttgctggattccctgaaaccgtccctgttagaactgtcaaccgccagtgttcatctgggctacaggcagtagctgatgtcgcagctgctataaaggctggttactatgacatagggattggtgctggtttggaatccatgtccataaattccattgcttgggaaggacaagttaacccaaaaataagcgcattccagaaagcacaggattgtcttctgcccatgggaattacttctgaaaatgttgcccatcgatatggtgtaaccaggcaagagcaagatcaggccgccgctgagtctcataggagagctgctgcagccacggcctctggaaaattcaaggatgagatcgtccccgtgccaacaaagatcgttgatcctaaaactggagaggagaaggaagttgtgatatcagttgatgatgggattaggccagggaccacagcatctggattggcgaaactgaaaccagtttttaaaaaggatgggactacaactgcaggcaattccagtcaagtgagtgatggtgctggagctgttcttctcatgaaaagatctgtggctctgaagaaagggctgcccattcttggtgttttcaggagctttgcggctgttggagtggatccagctgttatgggcgttggtcctgccgtggccattcctgctgctgtgaagtctgcaggccttgagattggagacattgatttgtttgaactgaatgaggtctgtgtcgattgccttgatctacaccctcttctctcacctatttatccataacatctgattactgaatcatccatgcttaggccttcgcctctcagtttgtctattgctgcaacaagttggggctggacccgttccaaagtaaatgtaaatggaggcgcgattgcccttggacaccctctgggtgcaacaggtgcccggtgtgtggctactcttctaaatgaaatgaagcgccggggcagagactgcagatttggtgttgtcaccatgtgtatcggatctggaatgggggcagcagctgtgttcgagcggggagacgcggtggatggactctccaacgtgagggacatccaggcacataattttctgtctaaggatgcgaagtagaggcgcagaaaaaacatccatccttgagcagcataagcctgctgcatttgtaatatattcgaaatccgtattttttttcttcacaaacactactctatatacgatgaataaaagggcgacaatacagtgtcatcttgtagccacctaagatgcgaaagagaaaagaaggccggctgttcaatgttctgggcttgttctgttattgctttccgtctctcaaactgaacaagcatggtcttttgtgtgtttgaaccagaaggatggagagagcaccttgatttgctgagacgcgtggggtgaggcgaatttgaatttcatttaaaattt

SEQ ID NO: 133372 - DNA, 616 bp, Zea Mays
ctgcggtggcgtggcggtgacgtgccggcgcggcgccgataagaggttgagagagagggaaaaaaagaacaatcaattctccagaccctccccggcaaccgcgtccggccgtccgcttccgtctccttggataaccacgacgcccgccggcaagcgaaagcgaagcgagccaacccagccatggagaaggcgatcgatcggcagcgggtcctcctggcgcacctcctcccctccccctccgccgcctcctcgcagcctcagcttgcggcgtcggcgtgcgcggccggggacagcgccgcctaccagaggtcctcctccttcggggacgatgtcgtcgtcgtcgctgcctacaggacgccgatatgcaaggccaagcgaggaggcttcaaggacacctacccagaggacctcctcactgttgttctcaaggctgttctggacaacactagaatcaatccagctgacatcggtgacatcgtcgttgggacggtgcttggccctggttcccagcgtgcaaacgagtgcaggatggctgcgttgtttgctggattccctgaaaccgtccctgttagaactgtcaaccgccagtgttcaatgttctgggcttgttctgtta

SEQ ID NO: 133373 - DNA, 1943 bp, Zea Mays
cccctgcagcctctcgctgcccactttccatgtcactgcaccactgccgcgctgccacgacgcccgccatgcccgccaccggcctctcgtccgcgggcgcttccccgttccgcctgcccgcctccagctcctccgcccagggccacctccgtctctccccccctgctgccactgccagtgccaccgcctgccgccgccgcttgcttctccgctgcgccgcctcttctggcggtggcggcggcagcggctccgacccggtcctagaggagcagcggcgccgccaggccgagctcgccgcgcgcattgcgtccggcgagttcaccgtgcaaggccccgggtggattgcgcctctcgtggggaggctctccaagctgggcccgccgggggagctcgccgccgcgctgctcaccagggtagcgggcgctggcggcccggagatcccgcaggcagtggggtcgatcaacgcggtcgtgggccaggccttcttcgtgcccctgtacgacctcttcctcacctacggcggcatctttcgcctcaactttggccctaagtcgtttcttattgtctccgatccggctatcgctaagcacatcctgagggagaactccaaagcttattccaagggaattcttgctgagatattggagtttgtgatgggcacaggtttgatcccagctgatggggagatttggcgtgttcggaggcgtgctatcgtccccgcactgcatcagaagtatgtgactgcgatgattggtctctttggggaagcttcacaacggctctgcgagaaattggacaaggcagcagtggatggggaggacatggagatggagtcgctgttctctcgactcacactggatgtcatcgggaaggcggtgttcaattatgattttgactcattatcttatgataacgggatagtcgaggcagtgtatgtaacactaagggaagcagagatgcgtagcacttctcctataccaacatgggaaatacccatttggaaggacatttccccacggcagaagaaggtcaacgaagctctcaagttgataaatagtactctcgatgaactaattgccatctgcaagagacttgtagagcaagaagatcttcagtttcatgaggaatacatgaacgagcaagacccaagtattcttcacttccttttggcatctggagatgatgtctccagcaagcaactccgtgatgatttgatgaccatgctcattgctggtcatgagacttcagcagctgtcttgacatggacattttatcttctatctaagtatccaaaggtaatggccaagctccaagatgaggctgatagtgttctaggtgatggtttgccaacaattgaggatgtgaagaaactaaagtacacgactcgggttattaatgaatcattgagactatatccacagccgccggttttaattcgtaggtcacttgaggacgatatcctgggagggtacccaattggccgaggagaagatatttttatttctgtctggaatcttcaccactgcccaaagcactgggatgatgcagaagttttcaatccagaaagatggcctttggatggaccaaatccaaacgagataaaccaaaatttcagttacttaccatttggtggcggaccaaggaaatgtgtgggtgacatgtttgctacttttgagactgtggtggcaacagcaatgcttgtcaagcgatttgactttcagatggctccaggagcacctccggttgacatgacaactggagcaacgattcacacgactgagggattaaaaatgactgttactcgaagaacaaggccaccagtaattccaaacctggagatgaaaattattaccgattcacaagaatccacactttctgccccatcgatggttgttagtgctgcttctgttgcttcaggagaagaccaagggggcatctcctga

SEQ ID NO: 133374 - DNA, 1192 bp, Zea Mays
atcgagtatagcagtcgatggcccatcgagtatagcagacgaagttgtagttgctctcctccgagaaccctcgccgccgccacccaccggagctccggtttgcagttcttcgctgaaggccatggatcacgacagattgaatttgccgagcacgtcggctatttcgctggaggtgatgggccaccagctacatatttcacaggatccaaactccaagcaccatgggaccacggtctgggatgcatcaatggtgtttgtcaagtttttggaaaagaatagcagaaaaggtcgcttttgtccgtccaaactaaaaggaaagagagtgattgaattgggagctggctgcggtctagctgggttcggaatggccttgttgggtggtgatgttacaacaactgaccaagccgaggtgctcccactgcttatgagaaatgttgaacggaacagatcttggatctcacaatcgaaccccgactcagattccgttggctcaattacagttgcagaattggactgggggaacaaagaacatatcaaggccgttgaacctccatttgattacattgtaggaactgacgttgtttattcggagcatctgttgcaacctctaatggagacgattactgcattatctggtcctaaaacaaaaatattgctagggtacgagatccgttcgacaactgtccatgagaagatgatggaaatgtggaaaagcaatttcattgtgaaaacggtctctagatcgaagatggatgtgaaatatcagcatcctagcatacatctctacatgatggacctgaaggcaccattgatccctgaggttgaggctgccgacaatgggaactacgaggaagaggttgaggttgctgtgaatcaagaggaagacgaagatcctggagtgaagagcgaatcttgttccggctcgtcaccagaggctaagagcggcagtctggatgattgggaaatcagaaggtgtggggctatggctgcaaggcttctgaaggatgtgaaactgtaaacatgaatcctagagatcgttttccccccttgtcagagaactctagagctcctttatgttgttgtccttgatagttgttgtactgcccatggcagtctatgttattgtatcttattgcatcagtggatattgataccattccaaaagaaaaaggaagtttctctatctctctct

SEQ ID NO: 133375 - DNA, 1405 bp, Zea Mays
atcgagtatagcagtcgatggcccatcgagtatagcagacgaagttgtagttgctctcctccgagaaccctcgccgccgccacccaccggagctccggtttgcagttcttcgctgaaggccatggatcacgacagattgaatttgccgagcacgtcggctatttcgctggaggtgatgggccaccagctacatatttcacaggtgacgagaactagagtagcaagatgaatcttgcctcttaaaaaaagtttcttttaagaaaaaataattgggctttggattaggaggtggatcaacttcatcttctattcaagctgtagcggccatacttaatggtgggtgatctgaattttcttttgtttctggaattacaggatccaaactccaagcaccatgggaccacggtctgggatgcatcaatggtgtttgtcaagtttttggtaatttctttgagttccaggccttcctgcacaagttgatgaaaagaatagcagaaaaggtcgcttttgtccgtccaaactaaaaggaaagagagtgattgaattgggagctggctgcggtctagctgggttcggaatggccttgttgggtggtgatgttacaacaactgaccaagccgaggtgctcccactgcttatgagaaatgttgaacggaacagatcttggatctcacaatcgaaccccgactcagattccgttggctcaattacagttgcagaattggactgggggaacaaagaacatatcaaggccgttgaacctccatttgattacattgtaggaactgacgttgtttattcggagcatctgttgcaacctctaatggagacgattactgcattatctggtcctaaaacaaaaatattgctagggtacgagatccgttcgacaactgtccatgagaagatgatggaaatgtggaaaagcaatttcattgtgaaaacggtctctagatcgaagatggatgtgaaatatcagcatcctagcatacatctctacatgatggacctgaaggcaccattgatccctgaggttgaggctgccgacaatgggaactacgaggaagaggttgaggttgctgtgaatcaagaggaagacgaagatcctggagtgaagagcgaatcttgttccggctcgtcaccagaggctaagagcggcagtctggatgattgggaaatcagaaggtgtggggctatggctgcaaggcttctgaaggatgtgaaactgtaaacatgaatcctagagatcgttttccccccttgtcagagaactctagagctcctttatgttgttgtccttgatagttgttgtactgcccatggcagtctatgttattgtatcttattgcatcagtggatattgataccattccaaaagaaaaaggaagtttctctatctctctct

SEQ ID NO: 133376 - DNA, 1274 bp, Zea Mays
atcgagtatagcagtcgatggcccatcgagtatagcagacgaagttgtagttgctctcctccgagaaccctcgccgccgccacccaccggagctccggtttgcagttcttcgctgaaggccatggatcacgacagattgaatttgccgagcacgtcggctatttcgctggaggtgatgggccaccagctacatatttcacaggatccaaactccaagcaccatgggaccacggtctgggatgcatcaatggtgtttgtcaagtttttggaaaagaatagcagaaaaggtcgcttttgtccgtccaaactaaaaggaaagagagtgattgaattgggagctggctgcggtctagctgggttcggaatggccttgttgggtggtgatgttacaacaactgaccaagccgaggtgctcccactgcttatgagaaatgttgaacggaacagatcttggatctcacaatcgaaccccgactcagattccgttggctcaattacagttgcagaattggactgggggaacaaagaacatatcaaggccgttgaacctccatttgattacattgtaggaactgacgttgtttattcggagcatctgttgcaacctctaatggagacgattactgcattatctggtcctaaaacaaaaatattggtagcctctgtccccctttccagagattatttctgcaaagcagttgtttgagaactactgaaccgttgctcgctatccacagctagggtacgagatccgttcgacaactgtccatgagaagatgatggaaatgtggaaaagcaatttcattgtgaaaacggtctctagatcgaagatggatgtgaaatatcagcatcctagcatacatctctacatgatggacctgaaggcaccattgatccctgaggttgaggctgccgacaatgggaactacgaggaagaggttgaggttgctgtgaatcaagaggaagacgaagatcctggagtgaagagcgaatcttgttccggctcgtcaccagaggctaagagcggcagtctggatgattgggaaatcagaaggtgtggggctatggctgcaaggcttctgaaggatgtgaaactgtaaacatgaatcctagagatcgttttccccccttgtcagagaactctagagctcctttatgttgttgtccttgatagttgttgtactgcccatggcagtctatgttattgtatcttattgcatcagtggatattgataccattccaaaagaaaaaggaagtttctctatctctctct

SEQ ID NO: 133377 - DNA, 104 bp, Zea Mays
ccatatcagaagctgactaccagagcttgtacacaagatttgaaaatgcatcaccattgacctatatgtttcctttcaaaacttagcctaacattggaactaac

SEQ ID NO: 133378 - DNA, 1181 bp, Zea Mays
ccagcatcgggtcaaaacgaaacgaagcatccacgtttgtcgctcccacgctggcaatggccgccgccgcatctcccgccaccgccgccgccgtccgcgaagcggcgccggcccacagacaaattggaatccgtccgggtcatggtccggccccattccgtatcggcttcctcgccaaaccgtcctcccggtgggccgcgatctctgtgccgcctgggcctcgccgcgcggctccggcggcgtccgcggccagggagagggtcacggaggaggaggagaggcccgtgtcggtggagctggaacccatcgccagcgagcagcagctggactgggtccttggggaggcgcggcagctccagctccccatcgtcctgctgtggatggcgagttggtgcaggaaatgtatatatctgaagcctaagcttgagaagttggcagcagaatatcatccaagaatccggttctactgcatcgatgtgaattgtgttccacaaaagcttgtgaaccgcgctggagtaacaaagatgccttgtatacagctgtggagcgactcccggaaacaggcggaggtgatcggcggcgggcacaagtcttggctggtgatcgatgacgtccggaggatgatcgagcaggaggaatgatccggcgtgtccttttagcgcagcgacctcagtattgccgcttgctcatagtcctagactgggcgtctgggccaggtgtttggtcgtcttgcatatattaggaaccatccatgatcagaggttttgaaaaatcgccggttcgtcttccatatatgaactctctccctggtgtcgcgatcaggaaaatgaaggaattgggctaccagtcatctgcgatgtccttgatgtatccatgtgtgtgtattaaaactggaacttgctgctgtatgagcaataatccagcacagcacggcaggacttattgccggtgtactgactggccttgccattagccactggatctggatggtagcactgttcatggatatgaagattagcatagcgagtacaatctctgctttagggttgtcaaaataacactggtcttgtttacaaacactagcttgtcttgtagcttgcttcttgaattctcaagagacaaattgtagccagctgggaaagtggcagcaggtttccctgtttttcttggtttgctcctgc

SEQ ID NO: 133379 - DNA, 1622 bp, Zea Mays
ccagcatcgggtcaaaacgaaacgaagcatccacgtttgtcgctcccacgctggcaatggccgccgccgcatctcccgccaccgccgccgccgtccgcgaagcggcgccggcccacagacaaattggaatccgtccgggtcatggtccggccccattccgtatcggcttcctcgccaaaccgtcctcccggtgggccgcgatctctgtgccgcctgggcctcgccgcgcggctccggcggcgtccgcggccagggagagggtcacggaggaggaggagaggcccgtgtcggtggagctggaacccatcgccagcgagcagcagctggactgggtccttggggaggcgcggcagctccagctccccatcgtcctgctgtggatggcgagttggtgcaggaaatgtatatatctgaagcctaagcttgagaagttggcagcagaatatcatccaagaatccggttctactgcatcgatgtgaattgtgttccacaaaagcttgtgaaccgcgctggagtaacagtaagcctacccttgaactgtattagtaaataaatctgaaaacatttacacccagctatgcttaactttatgccatttgtagatgcatgtctttttttcttttctttctccgggcagcttctagaattcctttgttgtggttggttccctgttggggttgaaactggaagcctccgctttattggccctggaaactttgttatcagttgccggctttgttatcaacttgcattccctagccttatccttcagctttggtattagagtacaatatcaaatatcctcacatgatgcatttggcctcatcgttagcttgtctgcagcaactgcgtgcatacacaagtgacaaagcagatccctagtacgtttgttaaactaacacgcacgctaatggctccttttgttgggacttgtgaaatctgcaccgcggggctcgagcagaagatgccttgtatacagctgtggagcgactcccggaaacaggcggaggtgatcggcggcgggcacaagtcttggctggtgatcgatgacgtccggaggatgatcgagcaggaggaatgatccggcgtgtccttttagcgcagcgacctcagtattgccgcttgctcatagtcctagactgggcgtctgggccaggtgtttggtcgtcttgcatatattaggaaccatccatgatcagaggttttgaaaaatcgccggttcgtcttccatatatgaactctctccctggtgtcgcgatcaggaaaatgaaggaattgggctaccagtcatctgcgatgtccttgatgtatccatgtgtgtgtattaaaactggaacttgctgctgtatgagcaataatccagcacagcacggcaggacttattgccggtgtactgactggccttgccattagccactggatctggatggtagcactgttcatggatatgaagattagcatagcgagtacaatctctgctttagggttgtcaaaataacactggtcttgtttacaaacactagcttgtcttgtagcttgcttcttgaattctcaagagacaaattgtagccagctgggaaagtggcagcaggtttccctgtttttcttggtttgctcctgc

SEQ ID NO: 133380 - DNA, 1245 bp, Zea Mays
ccagcatcgggtcaaaacgaaacgaagcatccacgtttgtcgctcccacgctggcaatggccgccgccgcatctcccgccaccgccgccgccgtccgcgaagcggcgccggcccacagacaaattggaatccgtccgggtcatggtccggccccattccgtatcggcttcctcgccaaaccgtcctcccggtgggccgcgatctctgtgccgcctgggcctcgccgcgcggctccggcggcgtccgcggccagggagagggtcacggaggaggaggagaggcccgtgtcggtggagctggaacccatcgccagcgagcagcagctggactgggtccttggggaggcgcggcagctccagctccccatcgtcctgctgtggatggcgagttggtgcaggaaatgtatatatctgaagcctaagcttgagaagttggcagcagaatatcatccaagaatccggttctactgcatcgatgtgaattgtgttccacaaaagcttgtgaaccgcgctggagtaacaaagatgccttgtatacaggtacaactgaggcttgttcccttgtccgtggtttccgtctcgcgctaccctctatcctgaggacggtcctttgtcctacgcagctgtggagcgactcccggaaacaggcggaggtgatcggcggcgggcacaagtcttggctggtgatcgatgacgtccggaggatgatcgagcaggaggaatgatccggcgtgtccttttagcgcagcgacctcagtattgccgcttgctcatagtcctagactgggcgtctgggccaggtgtttggtcgtcttgcatatattaggaaccatccatgatcagaggttttgaaaaatcgccggttcgtcttccatatatgaactctctccctggtgtcgcgatcaggaaaatgaaggaattgggctaccagtcatctgcgatgtccttgatgtatccatgtgtgtgtattaaaactggaacttgctgctgtatgagcaataatccagcacagcacggcaggacttattgccggtgtactgactggccttgccattagccactggatctggatggtagcactgttcatggatatgaagattagcatagcgagtacaatctctgctttagggttgtcaaaataacactggtcttgtttacaaacactagcttgtcttgtagcttgcttcttgaattctcaagagacaaattgtagccagctgggaaagtggcagcaggtttccctgtt

SEQ ID NO: 133381 - DNA, 414 bp, Zea Mays
aacagatcctgggtccaaacattctttgctggctttgccctactgcgacggggcatctgaacgatggcaccgagttccaaatcacgaacaactgatgaatgcgccagcagcatttccagttaccacgtgctaccgtgtagatttccctgttcattcttgtaaccaaattgctccggtaggcctacaatcctgttgcattggctttcttgcgtcttgctagctagggcacctgtagaaaccttcagttcttcccgatcttgtaacagcatgtaaagctttttctccctctcccagtctccatgtattttgttcattttttgttgttgtacgagtaaagttgttcttgaggccgaacctactctactgaaacattggatcgtgaagttaatgtgaatatgtgctgcaacttatccc

SEQ ID NO: 133382 - DNA, 3526 bp, Zea Mays
ctcagctcctcctccccacagcctcacgccggtctatcttccaaggtcgccggccaccacccttgctccccgtcgtcagcctcctctcctccttttcccacccacccctctgctgctcttcctggaggctgctcgaaggctcagcgatggtgtgaagacgaaggccctgacgcttcatctgctgcttctttggggtagcagtggatcgcgtcgttcttataaggaggtgctgatcgcagaaaagcccccagacccccgcgttggcgatggtggctgggtgagggttgtgggacaacgggatcatcgtcggagatcctgtctttcaaagccttcttctagtcctgtccctgttgacctgcgtggaaagtgtttcaattgcttctcgccttcccactgtgcggccgtgtgtcgtagcctggtgcggtgtttcctttgccgattgtctgggcaccatgtccacgtgcgcccaggtcggaggacggctctgcattctcctagacacgcgttggggtggcgcccagtttcagggaaccctcaccagtggaggcttccatctgtgctatggagggtaactctagggtcggcggtgctggcaatggtggaggactaaagaagcgcactcgccggggacaaagacgccggaagaaggtcctaggtggaggtcaggatgttcatggctcttctagtcgtgcttcgcctcttccatcatcttcctccccctcgaaggattctgcccctcttgtgagaatcttcgggcgttcaaggatggttgatcgggctgaagatgaccttcattgtgcgctggtcgtaaccgttcttggccaggagagttctgactgcgccgcggaggtcctgtatgcgctcgcctcgaggcttggccttgcagctgatgagctccagctccggcgtgctgcatccaattctttcatggtcttcttcccctttgaggatcatgttgttcacgcctacaatggaggacaatctcttttcatcccatctcggttgcatcttaaaaggcgacaaccgcgtttgcaggaccgtcagccttcctctgttcggacttcggtgcttgatcgcctgggacctcgttttgcttcgtcttcggcggtgagagaaccagttgatgccgcttctctcccgaacgcctcggttgaagagttgtcggcgcctgtgttctcccctctgagtgacccctcggtttctgttgtggggagaccagttgatgccattactctcccaacaacctcggttgaagagttggtggcgcctgcgtcttccaccattcctgggtcctctctagcggtgggatatcccttgctgaacgcttcggatgccggtccgctgcccgcatttatgtcgtccacccagctggcttcttctgttccagatggtgaggtaggggatattcaagttgggttggctgttaaatcttctttggcgccaacttctggttctgggcctgcttggttgattcctgctccttctgtggcggaacagatggagtttggctcgctgctggctagttctggtttgatgatgcttaaaaatcatgaggatatcctttgcattgcttctgtggggacaggcgatctggccttgaatttggctatggaagccggtgatctgtgtgatctgtgggcctgcagaatcaaagctaaacccccttgctttaaagtctatgtccgaagaagggtgcaggttcagccgccacagtctgaaaataatgggctttcttctcccttgctgaaattcaaagaagggattgcaaaaaaagactgatggattattgcccctccccttagtctgccaaacgaaagaagaagatgccaagcaactttcagctgatgcaaagtaggagggtggccaagatgccacctgaattgggctctaactctgctgcacacgtgtgtaggctcttgggtttttgtgatgaacaagaaaatatctccttccaggatgcaagaaaagtacgctaaactgtttgattcagccctttccagggagcacattgctgctttggcggccttgtttggctgggaggtgcctccactcgggcagacctgatcagtgtagttttggtggagctggtagctggtctattttgtttccatggattgtagcggttttctgatatggaatgtgagggaccttaatgatagtgctaagagactctgttaagtctctgtttttttacatccaaccttctattgtttgtctgcaagaaaccaagttgtgctccatctcagattttgatattctttccattcttggtttgggctatagtaattttgtgtataaccctgcgcatgggaccagggggggtattcttgtggcatggcgcgatggatccttttccattggtgcctcggttatcaaggacttctctgtgtcagtacaatttcagatgatgtctggtcaactttggtggttcacaggtgtgtatgggccttatcaggacaatctcaaacaagcttttctccatgagctgagagaggtcaggaacaaatgtgggggcccatggatcattgcgggtgattttaatatgatttacagatcggaagacaagaacaattccaatgtaaaccagaccttgttgggtagtttcagaaactcagtcaactccttggatttgaaggaaattctgttggctggaaggagattcacttggtcaaatcagagggaggatcctactcttgttaagctagatcatgtattctgtactagcagctgggaagagtttttcccggatcgtatgctctatagtaatgccaccgaaacctctgaccattgtcctttgattctcaagctcaaaatggacctcaagggaaagcgcaggttacacttagaaagtttgtggcctaaattccctgggttcttggatgaggttgctgcctcttgaaccagccagttcaaggctcctgccctctagagaaggtgtctttgaagcttaaaagattgtccaaaagattgcagtactgggggcacaaagtggtaggcaatgttgggttccaatttggattagctcgggtgctgcatagattggagattgctcaggacagcatggtattgtcagaagaagaagaagtttggtcattgagaaagctgaagcagcacagccttgtccttgcttctctggaaaggacagttgctcgcttgagatcccggatccattacttgaaggaaagagatgccaacacaaggttctttcatatgcaggcttgtattcggaagaagaggaattttatttccaaattggaagatgatggaaggattgttaccaatcatggtcaaatgcaggatgtgctggatggcttcttttcccaatctattgggttctgaaattcagagaccattcacccttgatttggtaaattgccatagaaatgcagttgatctgagcgccttggagactccttttctgaaaaggaggttcgggacacgattgcaagtcttccttatgacaaggcccctgggtcctgatgggttcatagggagattttataaagcttgttggcacatcattaag

SEQ ID NO: 133383 - DNA, 1218 bp, Zea Mays
atggagggtaactctagggtcggcggtgctggcaatggtggaggactaaagaagcgcactcgccggggacaaagacgccggaagaaggtcctaggtggaggtcaggatgttcatggctcttctagtcgtgcttcgcctcttccatcatcttcctccccctcgaaggattctgcccctcttgtgagaatcttcgggcgttcaaggatggttgatcgggctgaagatgaccttcattgtgcgctggtcgtaaccgttcttggccaggagagttctgactgcgccgcggaggtcctgtatgcgctcgcctcgaggcttggccttgcagctgatgagctccagctccggcgtgctgcatccaattctttcatggtcttcttcccctttgaggatcatgttgttcacgcctacaatggaggacaatctcttttcatcccatctcggttgcatcttaaaaggcgacaaccgcgtttgcaggaccgtcagccttcctctgttcggacttcggtgcttgatcgcctgggacctcgttttgcttcgtcttcggcggtgagagaaccagttgatgccgcttctctcccgaacgcctcggttgaagagttgtcggcgcctgtgttctcccctctgagtgacccctcggtttctgttgtggggagaccagttgatgccattactctcccaacaacctcggttgaagagttggtggcgcctgcgtcttccaccattcctgggtcctctctagcggtgggatatcccttgctgaacgcttcggatgccggtccgctgcccgcatttatgtcgtccacccagctggcttcttctgttccagatggtgaggtaggggatattcaagttgggttggctgttaaatcttctttggcgccaacttctggttctgggcctgcttggttgattcctgctccttctgtggcggaacagatggagtttggctcgctgctggctagttctggtttgatgatgcttaaaaatcatgaggatatcctttgcattgcttctgtggggacaggcgatctggccttgaatttggctatggaagccggtgatctgtgtgatctgtgggcctgcagaatcaaagctaaacccccttgctttaaagtctatgtccgaagaagggtgcaggttcagccgccacagtctgaaaataatgggctttcttctcccttgctgaaattcaaagaagggattgcaaaaaaagactga

SEQ ID NO: 133384 - DNA, 2779 bp, Zea Mays
atggcaacaccaacagccaacagaaggtggggggaaggggacaccgaggcgggcaacgggagcaggtcgggtgggcggtggggggaggaaacgaacaaggccgcgcggtgcgcgggccgccatgtggacgccatgcgcggacgcggcgtggacgtcgtgacgacgcgacacccgccgctcctcccggcccgcaccgccatggccccgccgccgccgcaatgcgcctcaaaacgtccctccgcgcctgcccccgccctccaggtaggggacatggcggaggaggcgtcgccgtcgccgtcgccgcccaagttgctctacattgccatcgccgacggcggggtccgccgggcgttccggtacacgcgccccgtgctgcagagcaccctgcatctcatgggatgcaagcctcgccatgccttcaagattagcaagagagtattcaatgtgatgaagagtgaattcttggccacatcaaagtcagatggggcaaccaaacaagaaaattatcctgcctttggccttggagatggtacagatactccaaaaatgttggagagaagcaatagcagcgtaccatttgaattatacaagaaccagactaccgttgttgtttcaagagaggagtttgtaagtgttgtatgtgatgccctctctttgtacaagtatgttggacccaaccagaaagctgacctgcttcttgcttgcagaattaaagagagaaaggaatcggtggcaatactcttgtgtgggacaagtggatgtggcaagtccactttatcatctttgctgggtagtaggttgggtatcacgacagtagtttctactgattccatacgacatatgatgagaagctttgcagatgaaaaacaaagtcctcttctctatgcatcaacctaccatgcaggtgaatatttggatcctattgcagttgctcaggcaaaggcaaagcgcaatgcaaataaacccacagttgtttctcatccaaataccagtggagacaaagatgtgacttcaggtgacaaatctcagcatggatcttcagaattacctcctagagctgaattgattggcaacaagcaaatggcagtagaaggctacaaggcgcaaagtgagatggtgatcgacagcctggacaggttaattacatcctgggaagagcagaaagaatctgtgattgttgaaggagtgcatctaagccttaactttgtgatgggattaatgaagaaacatccttccataataccatttatggtatacattacaaatgaggataaacacatggaacgatttgctgtacgtgcaaagtacatgactctagacccagcaaagaacagatacatcaaatacattcgaaatattagagctatccaggaatacctatgcaaccgagctgacaagcatcttgtgccgaagatcaacaataccaatgttgaccagagtgtggctgctatacatgcaacagtcttcagctgtcttcgcaggcgagcagccggggagcaactgtatgacctcaacacaaacactgttgctgtagtggatgaggaatacaggaaccagcgtgcagctaacaccttgggttctaagggcatgtttcagttgatccaaaggaaggggtcttcaaggaatctgatggcacttcttaacaccgacggttcagtcaccaaagcttggcatgtaagtgcaagtgatggcaatgggaatcttaatggtatcacaaacaacaagaagtctcctgaaaatcctatgctggatccctcacaaatcgggaaggcagaagccgtcaatctccagtttggtccttttgggatcagtgcctggatgagtgacacgggtggaaccagccatactgggagtgtggaagacctgaggcctgatagtgtggagactggtggtagaaattattcgtcgtgctgcagttcgccaaagatgtcagattccacctcgaaggagcttatggaggactactcagtctatggcagtgacgaagaagctgacgaccctcgtgatgctgaaactgatgatgacctaactgatgaagaaagagacatgcacgaggtatggacgatttatctcagtgtccgacattttttccccttattatctagtttcaccacatcaatacactgcaaatttgaagacaatgctgaatgttctctcgcgcatcaccggatgcttgcagatagatgcaggctctgtagacgagcactcaaccaagtcggatgaggaatacgaggacttagccatgcgtgatgtgatggagaatggtgactggtctgacgacgaccaagctgtgggcaaaaccaagaactcaccagccctggagagcatccatgggagtggggcagctgaagatgatggcataaagagccggtaccaccacaacctggacctgttcctgaaaatgtccaaggaggtagctggcaccagaatgccttgcgcgtcatagtgccaccagggtggagagaaggccggcgacacgctgctctggtcccagtgggtggtatgtttcttgggcacctgcttttgtgatgctgtgagcttgtgctgttgagtgtacaccggtggctgtggctttgtagcatgtacctgtccaaactacaaaatgctctcacctggttgtaaagagaggacctgatgctttgtcatatcatgtagtaggagtattatgtttgacaataatgtcctggccctgctgctgatgaagtcacctcacgtgaactatgtgccatatcatgcatgtcctttggttgatcaatgtttacaaagatgtgtcgtaaga

SEQ ID NO: 133385 - DNA, 2607 bp, Zea Mays
atggcaacaccaacagccaacagaaggtggggggaaggggacaccgaggcgggcaacgggagcaggtcgggtgggcggtggggggaggaaacgaacaaggccgcgcggtgcgcgggccgccatgtggacgccatgcgcggacgcggcgtggacgtcgtgacgacgcgacacccgccgctcctcccggcccgcaccgccatggccccgccgccgccgcaatgcgcctcaaaacgtccctccgcgcctgcccccgccctccaggtaggggacatggcggaggaggcgtcgccgtcgccgtcgccgcccaagttgctctacattgccatcgccgacggcggggtccgccgggcgttccggtacacgcgccccgtgctgcagagcaccctgcatctcatgggatgcaagcctcgccatgccttcaagattagcaagagagtattcaatgtgatgaagagtgaattcttggccacatcaaagtcagatggggcaaccaaacaagaaaattatcctgcctttggccttggagatggtacagatactccaaaaatgttggagagaagcaatagcagcgtaccatttgaattatacaagaaccagactaccgttgttgtttcaagagaggagtttgtaagtgttgtatgtgatgccctctctttgtacaagtatgttggacccaaccagaaagctgacctgcttcttgcttgcagaattaaagagagaaaggaatcggtggcaatactcttgtgtgggacaagtggatgtggcaagtccactttatcatctttgctgggtagtaggttgggtatcacgacagtagtttctactgattccatacgacatatgatgagaagctttgcagatgaaaaacaaagtcctcttctctatgcatcaacctaccatgcaggtgaatatttggatcctattgcagttgctcaggcaaaggcaaagcgcaatgcaaataaacccacagttgtttctcatccaaataccagtggagacaaagatgtgacttcaggtgacaaatctcagcatggatcttcagaattacctcctagagctgaattgattggcaacaagcaaatggcagtagaaggctacaaggcgcaaagtgagatggtgatcgacagcctggacaggttaattacatcctgggaagagcagaaagaatctgtgattgttgaaggagtgcatctaagccttaactttgtgatgggattaatgaagaaacatccttccataataccatttatggtatacattacaaatgaggataaacacatggaacgatttgctgtacgtgcaaagtacatgactctagacccagcaaagaacagatacatcaaatacattcgaaatattagagctatccaggaatacctatgcaaccgagctgacaagcatcttgtgccgaagatcaacaataccaatgttgaccagagtgtggctgctatacatgcaacagtcttcagctgtcttcgcaggcgagcagccggggagcaactgtatgacctcaacacaaacactgttgctgtagtggatgaggaatacaggaaccagcgtgcagctaacaccttgggttctaagggcatgtttcagttgatccaaaggaaggggtcttcaaggaatctgatggcacttcttaacaccgacggttcagtcaccaaagcttggcatgtaagtgcaagtgatggcaatgggaatcttaatggtatcacaaacaacaagaagtctcctgaaaatcctatgctggatccctcacaaatcgggaaggcagaagccgtcaatctccagtttggtccttttgggatcagtgcctggatgagtgacacgggtggaaccagccatactgggagtgtggaagacctgaggcctgatagtgtggagactggtggtagaaattattcgtcgtgctgcagttcgccaaagatgtcagattccacctcgaaggagcttatggaggactactcagtctatggcagtgacgaagaagctgacgaccctcgtgatgctgaaactgatgatgacctaactgatgaagaaagagacatgcacgagatagatgcaggctctgtagacgagcactcaaccaagtcggatgaggaatacgaggacttagccatgcgtgatgtgatggagaatggtgactggtctgacgacgaccaagctgtgggcaaaaccaagaactcaccagccctggagagcatccatgggagtggggcagctgaagatgatggcataaagagccggtaccaccacaacctggacctgttcctgaaaatgtccaaggaggtagctggcaccagaatgccttgcgcgtcatagtgccaccagggtggagagaaggccggcgacacgctgctctggtcccagtgggtggtatgtttcttgggcacctgcttttgtgatgctgtgagcttgtgctgttgagtgtacaccggtggctgtggctttgtagcatgtacctgtccaaactacaaaatgctctcacctggttgtaaagagaggacctgatgctttgtcatatcatgtagtaggagtattatgtttgacaataatgtcctggccctgctgctgatgaagtcacctcacgtgaactatgtgccatat

SEQ ID NO: 133386 - DNA, 2772 bp, Zea Mays
cgtggcagaaccgccattgaagcgggaagaaattcgaagaaccctcgaaatcaggagaaggaaacaaatcatcctcccatcccgagaagagatggcaacaccaacagccaacagaaggtggggggaaggggacaccgaggcgggcaacgggagcaggtcgggtgggcggtggggggaggaaacgaacaaggccgcgcggtgcgcgggccgccatgtggacgccatgcgcggacgcggcgtggacgtcgtgacgacgcgacacccgccgctcctcccggcccgcaccgccatggccccgccgccgccgcaatgcgcctcaaaacgtccctccgcgcctgcccccgccctccaggtcccccgctcgccgccgactaccctgatccggccgccgctcgtttcctgatccggcctcccggcacccccgttgcaggtaggggacatggcggaggaggcgtcgccgtcgccgtcgccgcccaagttgctctacattgccatcgccgacggcggggtccgccgggcgttccggtacacgcgccccgtgctgcagagcaccctgcatctcatgggatgcaagcctcgccatgccttcaagattagcaagagagtattcaatgtgatgaagagtgaattcttggccacatcaaagtcagatggggcaaccaaacaagaaaattatcctgcctttggccttggagatggtacagatactccaaaaatgttggagagaagcaatagcagcgtaccatttgaattatacaagaaccagactaccgttgttgtttcaagagaggagtttgtaagtgttgtatgtgatgccctctctttgtacaagtatgttggacccaaccagaaagctgacctgcttcttgcttgcagaattaaagagagaaaggaatcggtggcaatactcttgtgtgggacaagtggatgtggcaagtccactttatcatctttgctgggtagtaggttgggtatcacgacagtagtttctactgattccatacgacatatgatgagaagctttgcagatgaaaaacaaagtcctcttctctatgcatcaacctaccatgcaggtgaatatttggatcctattgcagttgctcaggcaaaggcaaagcgcaatgcaaataaacccacagttgtttctcatccaaataccagtggagacaaagatgtgacttcaggtgacaaatctcagcatggatcttcagaattacctcctagagctgaattgattggcaacaagcaaatggcagtagaaggctacaaggcgcaaagtgagatggtgatcgacagcctggacaggttaattacatcctgggaagagcagaaagaatctgtgattgttgaaggagtgcatctaagccttaactttgtgatgggattaatgaagaaacatccttccataataccatttatggtatacattacaaatgaggataaacacatggaacgatttgctgtacgtgcaaagtacatgactctagacccagcaaagaacagatacatcaaatacattcgaaatattagagctatccaggaatacctatgcaaccgagctgacaagcatcttgtgccgaagatcaacaataccaatgttgaccagagtgtggctgctatacatgcaacagtcttcagctgtcttcgcaggcgagcagccggggagcaactgtatgacctcaacacaaacactgttgctgtagtggatgaggaatacaggaaccagcgtgcagctaacaccttgggttctaagggcatgtttcagttgatccaaaggaaggggtcttcaaggaatctgatggcacttcttaacaccgacggttcagtcaccaaagcttggcatgtaagtgcaagtgatggcaatgggaatcttaatggtatcacaaacaacaagaagtctcctgaaaatcctatgctggatccctcacaaatcgggaaggcagaagccgtcaatctccagtttggtccttttgggatcagtgcctggatgagtgacacgggtggaaccagccatactgggagtgtggaagacctgaggcctgatagtgtggagactggtggtagaaattattcgtcgtgctgcagttcgccaaagatgtcagattccacctcgaaggagcttatggaggactactcagtctatggcagtgacgaagaagctgacgaccctcgtgatgctgaaactgatgatgacctaactgatgaagaaagagacatgcacgagatagatgcaggctctgtagacgagcactcaaccaagtcggatgaggaatacgaggacttagccatgcgtgatgtgatggagaatggtgactggtctgacgacgaccaagctgtgggcaaaaccaagaactcaccagccctggagagcatccatgggagtggggcagctgaagatgatggcataaagagccggtaccaccacaacctggacctgttcctgaaaatgtccaaggaggtagctggcaccagaatgccttgcgcgtcatagtgccaccagggtggagagaaggccggcgacacgctgctctggtcccagtgggtggtatgtttcttgggcacctgcttttgtgatgctgtgagcttgtgctgttgagtgtacaccggtggctgtggctttgtagcatgtacctgtccaaactacaaaatgctctcacctggttgtaaagagaggacctgatgctttgtcatatcatgtagtaggagtattatgtttgacaataatgtcctggccctgctgctgatgaagtcacctcacgtgaactatgtgcc

SEQ ID NO: 133387 - DNA, 98 bp, Zea Mays
atgttgttgaatgcatcattgttattcctcatgtttaagcaagtgaatgtttgttcacctgaaaattccgctctatatcaacaagatccaaacattgc

SEQ ID NO: 133388 - DNA, 1843 bp, Zea Mays
gtaccattcacaagagagcatctttttctgatagtgaacaaaaaccgcgtgccagccaaaaaaaaagtgagaaaaaactaataatgaataaaaaatgaataaaattgtcctatctctcttccccctcctcacaatcaaaaacacacacacccatatatatacccctcctcattctcctcccggtttcccctcccccattcgtcgcgatccaattccggcgccggagaagacgcgcgcaggccccacccagccgcctacaggcgctccgctcccacagacggacagcttgggctcgacggatgaacatgtgtgagaaagatcagaatttgccatggggatacgacctgttccgcgacccttttgctcctcccaacgggtactacgggcctcctcccggttactgtgatggccactgttgtgacctccatcattacggtagagcatcacatccagatgagactcagttgcattcttctcaactcgcatatgatatgtacaacccatcagtaggcatctaccatcctggaagcacccatgagcacgagcacgagcacgagacagtatatgtagaaccgtctagttcctctccagacacaggtggtgacggttgttttgagatggaggaggaagtagggaagaggttttaccccatggtcccagttccccatgtccccaaaattaatggagaaatcccatcaattgatgaagccactatggaccatgaaaggctgacagaaaggttgaggctgtatgagctggttgaaaacaaggtgaaaggagatggcaactgtcagttccgagcactatcagatcagctttaccaaagtccggatcaccatgaatttgtgaggtcgcagataattaaccagcttaaaactaaccgtgacgcctatgatggatacgttcccatggcatatgatgattacttggagaaagttgcacggaacggtgaatggggtgaccatgtgacgctgcaggctgctgctgacaagtatggagtaaaaatcttcgtgatgacatcgttcaaggatacttgctacatcgagatcctgcctaaggttcagaagtccaacaaagtgatactgttgagcttctgggcggaggtgcactacaactccatacatccgcagaacggtgagtaggcgtgccgttggcatgccgggccttcaccgccaacgtatgcaaccaacatgctgctatatactgtcaatagtctttcttttgttctgagtagtggtaggaatcatgtgcaagcacaaccaaacaagctctgtctattgtgttggtgaagacgattctgtggtttgtgaatgctgcagatgctccgaggtcgcagacgaccaagaggagaagatggtggccgttctcgcagcaccaccaccattgatggcgggttcagctctcttggggctggatggatgttcaggatcaggtggtggtcccggtcccggccatcgtccagatgatactacaagggacgtacgacattatgattaatatatatatacccagagcggagcagaaagacctgataagggaattagttgggatgaatgaaatggaataaacatgggatgggatgggaatcgtcgtcccgtatatagtttagagtggaggccggtgagcgccaactcaaactctttgtattgttgtttatatctacaaattttgccggaacgaggctagaattattggggaacaattatggtaataataaatcggttaagaattgagatgacccagctgttggcagagctcggatcatcatatgaccagaatcagaatggattccccagtgcatctagttttcctctggaagaacagaacaacataaaagaaaaac

SEQ ID NO: 133389 - DNA, 1658 bp, Zea Mays
gtaccattcacaagagagcatctttttctgatagtgaacaaaaaccgcgtgccagccaaaaaaaaagtgagaaaaaactaataatgaataaaaaatgaataaaattgtcctatctctcttccccctcctcacaatcaaaaacacacacacccatatatatacccctcctcattctcctcccggtttcccctcccccattcgtcgcgatccaattccggcgccggagaagacgcgcgcaggccccacccagccgcctacaggcgctccgctcccacagacggacagcttgggctcgacggatgaacatgtgtgagaaagatcagaatttgccatggggatacgacctgttccgcgacccttttgctcctcccaacgggtactacgggcctcctcccggttactgtgatggccactgttgtgacctccatcattacggtagagcatcacatccagatgagactcagttgcattcttctcaactcgcatatgatatgtacaacccatcagtaggcatctaccatcctggaagcacccatgagcacgagcacgagcacgagacagtatatgtagaaccgtctagttcctctccagacacaggtggtgacggttgttttgagatggaggaggaagtagggaagaggttttaccccatggtcccagttccccatgtccccaaaattaatggagaaatcccatcaattgatgaagccactatggaccatgaaaggctgacagaaaggttgaggctgtatgagctggttgaaaacaaggtgaaaggagatggcaactgtcagttccgagcactatcagatcagctttaccaaagtccggatcaccatgaatttgtgaggtcgcagataattaaccagcttaaaactaaccgtgacgcctatgatggatacgttcccatggcatatgatgattacttggagaaagttgcacggaacggtgaatggggtgaccatgtgacgctgcaggctgctgctgacaagtatggagtaaaaatcttcgtgatgacatcgttcaaggatacttgctacatcgagatcctgcctaaggttcagaagtccaacaaagtgatactgttgagcttctgggcggaggtgcactacaactccatacatccgcagaacgatgctccgaggtcgcagacgaccaagaggagaagatggtggccgttctcgcagcaccaccaccattgatggcgggttcagctctcttggggctggatggatgttcaggatcaggtggtggtcccggtcccggccatcgtccagatgatactacaagggacgtacgacattatgattaatatatatatacccagagcggagcagaaagacctgataagggaattagttgggatgaatgaaatggaataaacatgggatgggatgggaatcgtcgtcccgtatatagtttagagtggaggccggtgagcgccaactcaaactctttgtattgttgtttatatctacaaattttgccggaacgaggctagaattattggggaacaattatggtaataataaatcggttaagaattgagatgacccagctgttggcagagctcggatcatcatatgaccagaatcagaatggattccccagtgcatctagttttcctctggaagaacagaacaacataaaagaaaaac

SEQ ID NO: 133390 - DNA, 2066 bp, Zea Mays
tgccctcgtgctcctcccgtcaccctcgtctccactccccgtgacgaccaggaaggaattcttcctccgtccccgttcgccccgtcgtctcgtcgttttctcacctgcgtgctgcgttcgcggacaaagtgtgggaaaatgaaaacctgagcgcaaacaaacactctgagcctcgcaggagggagaggggggagagcggaggagaaaccacctttctttccgttccagacaagctcccagctttgaccgccgccgccgccgccgctgtgtgtgtgtgctcccttagtagttagtccctgtcgcgtcccggatcggagctcccctccgtgcacgggacaccgccggtccgggcgtctccactcccccccggatcgatcagctccgcctccgcaagataggcaagcaatgaggtgcctgcctttcttgcatggagacaccaaagagaaggatccagtcactaagtcggcctctctacggtccatgagcacaacatcaacggagcgcgatgtccgctccggttcagacttcacctccttgaatgtttccgacatgagcgccgagtcgataaggaggacgcagtaccccagcttcactgaccgcccgtctaacctgagggtgttctcctttgctgaactgaagagtgccacccgcaacttcagccggtctctcatggttggcgagggtggctttggctgtgtgtacaggggtgtcatcaagacctccgatgaaccgaacgaacgaattgagatcgctgttaagcagttgaatcgtaaaggacttcaggggcagaaggagtggttaacagagatgaatgtgcttggaattgtggatcatccaaacctagttaaacttataggctactgtgctgaagatgatgagaggggagtacaacggcttttagtgtacgaatatatgcctaatggaagtgtggatgatcacttgtcgagtaggtcaacttctactctgtcatggccaatgagactaaaagtagctcttgattctgctcggggactgaagtatctgcatgaagaaatggaattccaggttattttccgggacctgaaaacatctaacattttgttggatgagaactggaatgctaaactgtcagactttggtttggctaggcatggaccagcagaaggtctgacccatgtctccacagcggtggtcgggactctaggctacgcagctccagagtacatgcagactgggcgcctgaccgcgaagagcgacatatggagctacggcgtcctcctgtacgagctgatcacaggccgccgccccatcgaccggaaccgcccaaagagcgagcagaagctcctggactgggtgaagccgtacatctcggacgtgaaacggttccccatcatcgtcgacccgcggctggaggggcactacaacctcaagtccatgacgaagctgtccagtgtggcgaaccggtgcctggtccggatgcccaagtctcgccccaagatgagcgaggtgtacgacatggtgcagaagatcgtggactgcgtggggaccggcccgccgcagcccccgctgctgcactaccacggctcggcctctgagcctggccctggcgacaagcgcgccaggaaagggtcggtgaagaggaggaggctctgggagctcaggttcggctgccggcacatcgtgtggcgcggctggaagcctgcgatcgtgaaggacatctgaggagggcggggtggctccggtgctgtaagtacagtagctagctagctgttcatagagacggtggtaacagtttgttccaccgtgtagtgcttggttggtatatagggtgagttcatgcttgcataataccagtcgagaagaagaagaagaaaggtgcacagttgagtggggtggcgttggaatggagtacatagagtagtgctgtgtgtaatttccagtgcaacttctgctgctggctttcttcgtctttgggacaagtttggtgtggtcttcggggatgattcagatacccattcccttgtatgccatttttgactgatgtccagggacccagcgcaccctggtctcattcatttcttcgtcca

SEQ ID NO: 133391 - DNA, 2077 bp, Zea Mays
gtcttccccctccctctgccctcgtgctcctcccgtcaccctcgtctccactccccgtgacgaccaggaaggaattcttcctccgtccccgttcgccccgtcgtctcgtcgttttctcacctgcgtgctgcgttcgcggacaaacttcttggttggtgactcggcggatcctgagccagagcctcgcaggagggagaggggggagagcggaggagaaaccacctttctttccgttccagacaagctcccagctttgaccgccgccgccgccgccgctgtgtgtgtgtgctcccttagtagttagtccctgtcgcgtcccggatcggagctcccctccgtgcacgggacaccgccggtccgggcgtctccactcccccccggatcgatcagctccgcctccgcaagataggcaagcaatgaggtgcctgcctttcttgcatggagacaccaaagagaaggatccagtcactaagtcggcctctctacggtccatgagcacaacatcaacggagcgcgatgtccgctccggttcagacttcacctccttgaatgtttccgacatgagcgccgagtcgataaggaggacgcagtaccccagcttcactgaccgcccgtctaacctgagggtgttctcctttgctgaactgaagagtgccacccgcaacttcagccggtctctcatggttggcgagggtggctttggctgtgtgtacaggggtgtcatcaagacctccgatgaaccgaacgaacgaattgagatcgctgttaagcagttgaatcgtaaaggacttcaggggcagaaggagtggttaacagagatgaatgtgcttggaattgtggatcatccaaacctagttaaacttataggctactgtgctgaagatgatgagaggggagtacaacggcttttagtgtacgaatatatgcctaatggaagtgtggatgatcacttgtcgagtaggtcaacttctactctgtcatggccaatgagactaaaagtagctcttgattctgctcggggactgaagtatctgcatgaagaaatggaattccaggttattttccgggacctgaaaacatctaacattttgttggatgagaactggaatgctaaactgtcagactttggtttggctaggcatggaccagcagaaggtctgacccatgtctccacagcggtggtcgggactctaggctacgcagctccagagtacatgcagactgggcgcctgaccgcgaagagcgacatatggagctacggcgtcctcctgtacgagctgatcacaggccgccgccccatcgaccggaaccgcccaaagagcgagcagaagctcctggactgggtgaagccgtacatctcggacgtgaaacggttccccatcatcgtcgacccgcggctggaggggcactacaacctcaagtccatgacgaagctgtccagtgtggcgaaccggtgcctggtccggatgcccaagtctcgccccaagatgagcgaggtgtacgacatggtgcagaagatcgtggactgcgtggggaccggcccgccgcagcccccgctgctgcactaccacggctcggcctctgagcctggccctggcgacaagcgcgccaggaaagggtcggtgaagaggaggaggctctgggagctcaggttcggctgccggcacatcgtgtggcgcggctggaagcctgcgatcgtgaaggacatctgaggagggcggggtggctccggtgctgtaagtacagtagctagctagctgttcatagagacggtggtaacagtttgttccaccgtgtagtgcttggttggtatatagggtgagttcatgcttgcataataccagtcgagaagaagaagaagaaaggtgcacagttgagtggggtggcgttggaatggagtacatagagtagtgctgtgtgtaatttccagtgcaacttctgctgctggctttcttcgtctttgggacaagtttggtgtggtcttcggggatgattcagatacccattcccttgtatgccatttttgactgatgtccagggacccagcgcaccctggtctcattcatttcttcgtcca

SEQ ID NO: 133392 - DNA, 1046 bp, Zea Mays
accaaggcccctctatctttcttccccagcaatgcaattccgcagacagacgcaggcggcaggcagcggcgcagcgcaccgcttcttcctcttctatctctcatctacagccttcgctgcgccgccatggccaccacccgcttgctgccgctgctccgacgccgcctcgccgccgcaatcgccggatcgcctgctccctactccctccgaggaccctcatttcctgcaccagcagctgcagggctaaggtccctcctaaaagctgctggagcgagcgatactgcaacagaaccccaggaccaacagcattccgaaacaactcccccgccggcttctgtcccgacaccggagtccggtctcaaagtcagggacacctccaacctgaagatctcaccaaggcatgacctcgccatgatctttacgtgcaaggtgtgcgagaccaggtccatgaagatggccagcagggactcgtacgagaacggagtcgtggtcgtgcggtgcggtggctgcaacaacctccacctcatggcggacaggcttggctggtttggggagccagggagcattgaggacttcctagcgacgcaaggggaggaggtgaagaaaggttcgacagatactatcagctttactttggacgacttggctgggtctcaggtcagttctaaggggccttccgaacaaaattaatatgatagtgtttggtccagtaagaacctgcagaagcctctctttactataaagaagacgcacatgtcacctgtgtgttgaagagaagaaaaaagcgcctctagaagcctaccttaactgttgcacctgtagttctgcttaacttcatggcttttcatgtgtagctttcgagcccatcaaatacgcgatgttgtgattctattgtagtgtagctatttcctataccaaaaactggatccaggagagcctacataaattgatggactgcccgcatttctgatcatgtagtcagttgtgtgcctgcattcattcacggattgcttgtggcgcctcttacagatggttgttatgacttt

SEQ ID NO: 133393 - DNA, 1815 bp, Zea Mays
ccaatacaagtctttgggtaattgggcacagaagaggagacagagagacggagaggggagacccggtcactgccaatgccaagaacaagaaaccagagaggacagtcgtcaatccaatccgagtctcctccaaaaacccatcaatctgcaggaacgagagcagcaggagagcatcctaggaaaaaagttaggaccaactgaccgagcaaaaaaggtagcatctctgtatcaccaaggcaccgccgatcacagaccaaatccctcccccctcctctggtccatcccacacgtagagcagccggtatttcttcgatccgtgcttgcgctttttttttctctttgtaaagatttcgtttccctcccttttaactgttgtcgagaagtttcgacaagagtggtgtgagtgttgaagagctcctcaacatgatggatccggccttgcttgacgacgtcatacgccggctgctggaggtgaagaatctcaagcctgggaagaacgcgcagttgtcggagtcggagatcaagcagctctgcgctgccgccaaggagatcttcctgcaccagcccaacctgctggagctcgaggcgcccatcaaaatctgcggtgatgtccatggccagtactctgatctcctgaggctattcgattatggtggctatccgcctcaggccaactaccttttcttgggtgattatgtggatcgtggaaagcaaagcttggaaacaatatgtcttcttttggcctacaaggtcaagtacccagagaacttctttcttctaaggggaaaccatgaatgcgcatcagtaaatcgcatctatggtttttatgacgagtgcaaacgcagattcagtgtaaagctgtggaaaacattcactgactgttttaactgcttgccagtgtcagcattgatagacgaaaagatcctctgtatgcatggtggtctatctccagagttgaacaagctcgaacaaatacttaatctgagtcgccccacagacgtgcctgatactggattgctctgtgaccttctttggtctgatccttctaatgaagcaacaggatgggccataaatgatcgaggtgtttcatatacatttggtcctgataaagtttctgaattccttgagaagcatgatttggacctcatctgccgagcccatcaggttgtcgaagatggatatgagtttttcgctagccgccaactcgtaacaatgttttcagcccctaactactgtggagaatttgataacgctggtgccatgatgagtgtagatgagacattgatgtgctccttccaaatactgaaacctgcgaggaaggtgttgggtggttcaactaataacaaatcaggcttccagtcatcgagaggatggtgacaatggcaagcctgatatcaggttggttggtgagcagcacgccagtggtcgacggggggttgttccatcataatcatattacagcggctgcaactgacaggcccaatgcatcttctcttccatgttggatcaacactcttgtaatgtattatttactgtgcggatctgagaggatgtgaatgatttcatttgcgtcctcaagttcaaaagattcaggaaggcatgcttgaaataaaaatagccagaaacatgcaaggtgctccacgacgcagcacggcatttccagtgttttctttttgctgtctagttctgaatatattttaccgccagaccagcacgtaagcttgcctggcaatggtttttatttgttgctatgccatctcaaaagtcaaaaccatggatttatatcaaaagtcaaaagactttgagaagtattta

SEQ ID NO: 133394 - DNA, 1815 bp, Zea Mays
ccaatacaagtctttgggtaattgggcacagaagaggagacagagagacggagaggggagacccggtcactgccaatgccaagaacaagaaaccagagaggacagtcgtcaatccaatccgagtctcctccaaaaacccatcaatctgcaggaacgagagcagcaggagagcatcctaggaaaaaagttaggaccaactgaccgagcaaaaaaggtagcatctctgtatcaccaaggcaccgccgatcacagaccaaatccctcccccctcctctggtccatcccacacgtagagcagccggtatttcttcgatccgtgcttgcgctttttttttctctttgtaaagatttcgtttccctcccttttaactgttgtcgagaagtttcgacaagagtggtgtgagtgttgaagagctcctcaacatgatggatccggccttgcttgacgacgtcatacgccggctgctggaggtgaagaatctcaagcctgggaagaacgcgcagttgtcggagtcggagatcaagcagctctgcgctgccgccaaggagatcttcctgcaccagcccaacctgctggagctcgaggcgcccatcaaaatctgcggtgatgtccatggccagtactctgatctcctgaggctattcgattatggtggctatccgcctcaggccaactaccttttcttgggtgattatgtggatcgtggaaagcaaagcttggaaacaatatgtcttcttttggcctacaaggtcaagtacccagagaacttctttcttctaaggggaaaccatgaatgcgcatcagtaaatcgcatctatggtttttatgacgagtgcaaacgcagattcagtgtaaagctgtggaaaacattcactgactgttttaactgcttgccagtgtcagcattgatagacgaaaagatcctctgtatgcatggtggtctatctccagagttgaacaagctcgaacaaatacttaatctgagtcgccccacagacgtgcctgatactggattgctctgtgaccttctttggtctgatccttctaatgaagcaacaggatgggccataaatgatcgaggtgtttcatatacatttggtcctgataaagtttctgaattccttgagaagcatgatttggacctcatctgccgagcccatcaggttgtcgaagatggatatgagtttttcgctagccgccaactcgtaacaatgttttcagcccctaactactgtggagaatttgataacgctggtgccatgatgagtgtagatgagacattgatgtgctccttccaaatactgaaacctgcgaggaaggtgttgggtggttcaactaataacaaatcaggcttcaagtcatcgagaggatggtgacaatggcaagcctgatatcaggttggttggtgagcagcacgccagtggtcgacggggggttgttccatcataatcatattacagcggctgcaactgacaggcccaatgcatcttctcttccatgttggatcaacactcttgtaatgtattatttactgtgcggatctgagaggatgtgaatgatttcatttgcgtcctcaagttcaaaagattcaggaaggcatgcttgaaataaaaatagccagaaacatgcaaggtgctccacgacgcagcacggcatttccagtgttttctttttgctgtctagttctgaatatattttaccgccagaccagcacgtaagcttgcctggcaatggtttttatttgttgctatgccatctcaaaagtcaaaaccatggatttatatcaaaagtcaaaagactttgagaagtattta

SEQ ID NO: 133395 - DNA, 483 bp, Zea Mays
agaagaggagacagagagacggagaggggagacccggtcactgccaatgccaagaacaagaaaccagagaggacagtcgtcaatccaatccgagtctcctccaaaaacccatcaatctgcaggaacgagagcagcaggagagcatcctaggaaaaaagttaggaccaactgaccgagcaaaaaaggtagcatctctgtatcaccaaggcaccgccgatcacagaccaaatccctcccccctcctctggtccatcccacacgtagagcagccgtggtgtgagtgttgaagagctcctcaacatgatggatccggccttgcttgacgacgtcatacgccggctgctggaggtgaagaatctcaagcctgggaagaacgcgcagttgtcggagtcggagatcaagcagctctgcgctgccgccaaggagatcttcctgcaccagcccaacctgctggagctcgaggcgcccatcaaaatctgcggt

SEQ ID NO: 133396 - DNA, 687 bp, Zea Mays
tttttttttttggattgagcgatattatcttgttgtgttcgccaggacacagaccgccattgacattttggcgaagcaggcgtacgacgacgcggcccggttcacacggcggcagcgggacgcgatcgctaagctgtggaactcgatcaaggagcagcagatccggcggaagcaaggcaagtcggtgagcgggaagctggacgtgaacgccttcgagtacctccaggagaagtactcccgcgagaagatgagcatccggcacagcgtgggcggcggcggcgatcgtcgcgcgacgcagtggctgggctaggccgtgcgtgtgtgtgatggtttgtgcctttggcttcatcagcgacacggcgtgggagttgtttgtgcttggtttttcgtagaggagaggagagagttgacatgatcttccccgtagcatgtgatgggtggctcttggtgtaacgttacgtactagctgcactgaactcgttgcatgtctttatcagtgctggaactggaagcagcagctgaaactgctgacaacgacatggcagtgcagcacagtgcggctgttgggggcaaaatgctttgtttatgccggcacccggcagcacatactactagagtagcagcagtctatcaccacccttatttgatttctctgttcggttcggattaaaactaactgttttaact

SEQ ID NO: 133397 - DNA, 1710 bp, Zea Mays
tagtctctctcttccaaaactccaaaccaaacaaactcacgcccatcagcggtcagcccatgtcctccgaggacctcttcgacggcctgcctccgcccgccgccgccaccgccccggccggaggcggagctggcgcggcctccctcttgcagcccccgccgccaccacctcctccttctctggcgcaagcaacggcacccaagcccgcgctgaagagctcactcaagcggagcaagccctccccctcctcagacgctactccctcttccactcctgcccccgcggctgccgcgcccgaatcccatgttcctgagaaacgtcttcggttcagaacaaccgttgatgcttcagaaacacaagtgattgaggctatgcagaagatagcttcacacatagggaacgcttcaaaattcagcaaggcatcaaaactagctttgcaactcatcgaggctggaagcgtcaagcctggaacaatcggtcatttctttgctatactagaagctgcgatgtcttcaccgggagtgtgcaacgagccttctgtacgagcagactaccacaaattgttcgatgctgctcagggtgtaacagagttactcaaccaagagcagaaaaatcgattcaacatatgggtgctgcatgcagtggtggctaacgatcttttcactgatgacagctttgtgttctcaaaggctgtaggaaagatcaaagatgccatctcagccctgccagtggcaacggtggatgacgacaacgacgaagctgcggcccttgctgctgcgagcaaaactgatgtggcgacggataacgaagcaggtcatggcgtcccagccgcagcttctgactctgtggtggatgatggcgcgcatgccgtggccttggagccggaagaagaatcctccgaccctttcggtttagatgggcttcttgagcacaggcctaagaagacgtctgggagagctcgagagaaggcagtcgcggctctgaacagaaagacggtcgaggaggaagcaaagagggttctcaagtcgcagcgggaggcccttctgaaatgcctggaaatagccgctcggcgctacagaatcccgtggacacagaccgccattgacattttggcgaagcaggcgtacgacgacgcggcccggttcacacggcggcagcgggacgcgatcgctaagctgtggaactcgatcaaggagcagcagatccggcggaagcaaggcaagtcggtgagcgggaagctggacgtgaacgccttcgagtacctccaggagaagtactcccgcgagaagatgagcatccggcacagcgtgggcggcggcggcgatcgtcgcgcgacgcagtggctgggctaggccgtgcgtgtgtgtgatggtttgtgcctttggcttcatcagcgacacggcgtgggagttgtttgtgcttggtttttcgtagaggagaggagagagttgacatgatcttccccgtagcatgtgatgggtggctcttggtgtaacgttacgtactagctgcactgaactcgttgcatgtctttatcagtgctggaactggaagcagcagctgaaactgctgacaacgacatggcagtgcagcacagtgcggctgttgggggcaaaatgctttgtttatgccggcacccggcagcacatactactagagtagcagcagtctatcaccacccttatttgatttctctgttcggttcggatt

SEQ ID NO: 133398 - DNA, 1514 bp, Zea Mays
tggtcgctgtcgtccgtccgtttggagaggtgacgtggcgcgttccgatcggacggtcggcgtcgactcgacgcgagctcgtccctcgtcttctccttttctttttctttccgagaggcgggatttccttcgccgccgccgcccccagtgaccaccttgccgaccggagcgtgtgaaccgtacggagtcgcccgcgtgagatgacggccacctccgcgttcgagtcgtccccggagatggagcggttcctctgcgagcggctgctgaacacggagcagcccatcgcggagcgcttccgggcgctcttctccctccgcaacctccgcggggatgcgccgcgccgcgccctcctccaagctgcaagggatccttctaacttgcttgcccatgaggctgcatttgcacttggacaaatgcaggatgctgaggctattcctgcactggtggcagttctcaaagatctttcgctacatccaattgtccgccatgaggcagcggaagctcttggagctattggcctggaaaagagcatccctgtgttggaggaaagtctaacaactgatcctgctgtggaggtccaagaaacttgcgagctggcactaggacgaatagaggagaataagaaagttaatggggctgagagtacaaccacttcaccctttctctcagttgatccagcgctgccttcaaagcatgggctttcagtagatcaattaaggggccttcttctcaatgagcaagagagcatgtaccaacgttatgcagctctttttgcgcttaggaatgatggtggagatgctgctgtttctgctattgttgcagctctgagcgtcaaaagtgctcttctacgtcatgaggttgcttatgtgttaggtcagctgcaaaacaaagccgcttcagatgcgctttctacagtcctgaaggatgtctgtgagcatccaatggtcaggcatgaagctgctgaagcccttggctcaatcgcagaccaagaaagcattgcccttttggaggagtttgcaaaggatcctgagcccatagtctcgcagagctgtgaagtagctctcagtatgctcgagtatgagagatcggggaaatcctttgagtttctcttccttcagactcctcatgtgcagtcctaggttcctcttcgtcgatgatcactcaatgcgaagtgactgaaagcttcttgtattggttaatgtgactggaccagccatatatccactggctttgatgatactctttatcctgataggattttttttttggttaatcgtgatatggaggttgaaacacggagcagcatgaaaacaaatggaaaagaaaccatgaaaactatgaaaacttataaatttcgacaaaagaatacatgcgaactatgtcagtggttggtttcggcaattatacactcgcagcaaagaaaactgggttatcctcaccagcgcgaatccagatctatgcataaagggaaccacttatttatattcttgcaaaagcatttttgcaggatgttc

SEQ ID NO: 133399 - DNA, 1417 bp, Zea Mays
gtcgactcgacgcgagctcgtccctcgtcttctccttttctttttctttccgagaggcgggatttccttcgccgccgccgcccccagtgaccaccttgccgaccggagcgtgtgaaccgtacggagtcgcccgcgtgagatgacggccacctccgcgttcgagtcgtccccggagatggagcggttcctctgcgagcggctgctgaacacggagcagcccatcgcggagcgcttccgggcgctcttctccctccgcaacctccgcggggatgcgccgcgccgcgccctcctccaaggtttagactttggcgtttctgtgagatacattttggtcagcaccaaagaaagagctgcaagggatccttctaacttgcttgcccatgaggctgcatttgcacttggacaaatgcaggatgctgaggctattcctgcactggtggcagttctcaaagatctttcgctacatccaattgtccgccatgaggcagcggaagctcttggagctattggcctggaaaagagcatccctgtgttggaggaaagtctaacaactgatcctgctgtggaggtccaagaaacttgcgagctggcactaggacgaatagaggagaataagaaagttaatggggctgagagtacaaccacttcaccctttctctcagttgatccagcgctgccttcaaagcatgggctttcagtagatcaattaaggggccttcttctcaatgagcaagagagcatgtaccaacgttatgcagctctttttgcgcttaggaatgatggtggagatgctgctgtttctgctattgttgcagctctgagcgtcaaaagtgctcttctacgtcatgaggttgcttatgtgttaggtcagctgcaaaacaaagccgcttcagatgcgctttctacagtcctgaaggatgtctgtgagcatccaatggtcaggcatgaagctgctgaagcccttggctcaatcgcagaccaagaaagcattgcccttttggaggagtttgcaaaggatcctgagcccatagtctcgcagagctgtgaagtagctctcagtatgctcgagtatgagagatcggggaaatcctttgagtttctcttccttcagactcctcatgtgcagtcctaggttcctcttcgtcgatgatcactcaatgcgaagtgactgaaagcttcttgtattggttaatgtgactggaccagccatatatccactggctttgatgatactctttatcctgataggattttttttttggttaatcgtgatatggaggttgaaacacggagcagcatgaaaacaaatggaaaagaaaccatgaaaactatgaaaacttataaatttcgacaaaagaatacatgcgaactatgtcagtggttggtttcggcaattatacactcgcagcaaagaaaa

SEQ ID NO: 133400 - DNA, 2096 bp, Zea Mays
cccgcgtgagatgacggccacctccgcgttcgagtcgtccccggagatggagcggttcctctgcgagcggctgctgaacacggagcagcccatcgcggagcgcttccgggcgctcttctccctccgcaacctccgcggggatgcgccgcgccgcgccctcctccaaggtctcgtctcgcttcactgaatcggctttgctactcttcaaagcttggtcgaaggctttagcagcttgtggatttagcaacagatttctggtccctgctgctttgcagaactaatcgagtagatggagtggataccatactgtgcttcactaatttggtgccttgattgcagcaccattagtcctaggtacttcgtcggttttgttccaaactctagtgtccttacagttcatactagtgctgaggtgatgaactgacgatactagaaaatttaactttgatggattctttatgttattcaccaaattgatctcaacaagctgcactagttcattttgtgctagtgctagcagtagttgtttaatgttaataatacggagtatttcataacacttgttttaggtttagactttggcgtttctgtgagatacattttggtcagcaccaaagaaagaggttagcattataggagctgccaaacatattaccaatatatttgctattagagggtttatctcaaattttggtattgtttcaatggttgagattattttatatttattgctatgtagtacatattaaattcctgaaagtttggatgactgccacttttttgttcctttcctgctatgtataactgtgagattatgttgttaactttggtctgctactctgctgtcaacaaaagccattacagacaaacctgatatctcttagatttcttttagtagtcattactgaaaaagaaaactgtactatactagttatgcaagaattgaaaagcacatcaagggcctgattcgcaaccaccacttttgcgctgctagctgtgcatattcagatttctgcaatttcatgtttgagagatcaaaagattgtgcttaagaaaacctgacatattttgtaaattgttcagctgcaagggatccttctaacttgcttgcccatgaggctgcatttgcacttggacaaatgcaggatgctgaggctattcctgcactggtggcagttctcaaagatctttcgctacatccaattgtccgccatgaggcagcggaagctcttggagctattggcctggaaaagagcatccctgtgttggaggaaagtctaacaactgatcctgctgtggaggtccaagaaacttgcgagctggcactaggacgaatagaggagaataagaaagttaatggggctgagagtacaaccacttcaccctttctctcagttgatccagcgctgccttcaaagcatgggctttcagtagatcaattaaggggccttcttctcaatgagcaagagagcatgtaccaacgttatgcagctctttttgcgcttaggaatgatggtggagatgctgctgtttctgctattgttgcagctctgagcgtcaaaagtgctcttctacgtcatgaggttgcttatgtgttaggtcagctgcaaaacaaagccgcttcagatgcgctttctacagtcctgaaggatgtctgtgagcatccaatggtcaggcatgaagctgctgaagcccttggctcaatcgcagaccaagaaagcattgcccttttggaggagtttgcaaaggatcctgagcccatagtctcgcagagctgtgaagtagctctcagtatgctcgagtatgagagatcggggaaatcctttgagtttctcttccttcagactcctcatgtgcagtcctaggttcctcttcgtcgatgatcactcaatgcgaagtgactgaaagcttcttgtattggttaatgtgactggaccagccatatatccactggctttgatgatactctttatcctgataggattttttttttggttaatcgtgatatggaggttgaaacacggagcagcatgaaaacaaatggaaaagaaaccatgaaaactatgaaaacttataaatttcgacaaaagaataca

SEQ ID NO: 133401 - DNA, 237 bp, Zea Mays
atgttgctcggattccaccctcctcaatgccatcgaagagagaagttctgttgctacgatggctgcacaaagtgcataaattttccaataggaacagggcatacaatcaatagacgaagagagactaactgcaaagtgaaaggggttgcaaatttaaacttaactactcaaataaaatttcacaaaggaacagtcaacctaggatgttcagataaaaatgggattctacattattag

SEQ ID NO: 133402 - DNA, 124 bp, Zea Mays
tactagtattttttttatttcatgcaatatatgtacaaccaaataaaatagcatacaaccgttcagaaaccaaaatcggggctagtgcgtttagcgagattagtatacagatacgaggcaatag

SEQ ID NO: 133403 - DNA, 2005 bp, Zea Mays
ctaggctcacagctcgcgactcgcaaggaggagcttgcggcagctcggtatgaaaaagggcatctgtcttctttatccatcgtccgtctccttccacccagacacaggccaggcgggcccattgttgcccaagaccctggaatccggagcaggagtcctctctctctctgactctctcctgagggggaggaggaggaggaggaggcagaggcggaagagcaaccaccaagcagcagagcgcgaggcgacacggggacggagccctggaggtctctcgcgagtccagaggcgatcgacggagtcgcgattcgtctcccagtaccgactaatctctcgctcccgcttccgcttccgcttcgatcccgtgctgcttgcccactgctgtaatctcgtgcttgcccagtgctctagttcgagcactctcttgcttctcgcttcgcttcgctgcctgccgcgctgcgtcgagagctttcgccttgcaccggcgattgccccgacacgattgcgtccggtttttcttctaggttctgcgtagatagatagataggtatatatttttcgagtccaattacggggtgcttctggcactggtgaggaaggctattagggttgcctgcctgtgtgtgctgaccgtgaacggaagcgaaggtttctcgcgctaatctgccaggacgctttgttctttcctggcccttggtagttagcagggtgtctccaaccattacactgtcaagtctggactctggaagggttaaaatctcatgaaagtaacgacgccaatcgtgccagcactgctacgctacgagccattgcaccgttctgtgtctctgcgtgaaccaacaatttccatgggttcggccaaaaattcctgccctccgattatcctggttcttcctactactgtaagcagtttactccgtgatatttagaaccgtctccattgcggtactacttagatattgctgcattgttaagctctttccgcaccattcgtatttatcacatgattccctgtccttcttgcatcagcacagggtttctctttgtagggatatgaacaacgggactttggtttttaacggcagctagagggtagcctggagtgagcatttcattctggagatacaatgggtggctgctgctgctgctgctgttctgcaagggcatctgattcagatagagcaccggtgcgcatctatcaccgacaaaatcccgaggaacatgcacccttgtcgtcagcctttgatggaccatcgccaacttctgctatagttgcagttgacacaaatcttgatacaccatctcttgacacttaccgagcaccacctgcacctttgccatatgatgtttgcttcacagtttcagaaaatcctgatgtggagaagtcaggcattaaaatcaaaactgacgggcagcagtccccaaaagtggacgaatttgagtcgtgcgaaaaaggtgcccctgaggataaggctgatgaggaggaggatgtttgtccaatatgtcttgaagaatacgacaaagaaaatccacgttcggtcaccaagtgcgagcatcatttccatctctgttgcatactcgaatggatggagaggagcgagacatgcccagtctgtgaccagataactctgatagatgggatgtacgaatagcattcttggcggcggttcctgttgagttggcgttctttgtttttgtttttgttgtggtctggtctggacggctgtctggtggaggagatggttgatgagtcttggcaaaaaaataatttatagaagaaaaatgacatgaaattgtgctagagtcgcctgtgtcctgtttttacctgaaaaccctgtgagatttgctccctggtttcctcttgcttggtttgcgtgttcattcttccatttagatttcagtttctcagtgcctgtgtgacagggaaatcatctgtattgtacagttagtctgaaacggtgacagaaaagaagaaaagctgattctaccatatggttggtttgaa

SEQ ID NO: 133404 - DNA, 1830 bp, Zea Mays
ctaggctcacagctcgcgactcgcaaggaggagcttgcggcagctcggtatgaaaaagggcatctgtcttctttatccatcgtccgtctccttccacccagacacaggccaggcgggcccattgttgcccaagaccctggaatccggagcaggagtcctctctctctctgactctctcctgagggggaggaggaggaggaggaggcagaggcggaagagcaaccaccaagcagcagagcgcgaggcgacacggggacggagccctggaggtctctcgcgagtccagaggcgatcgacggagtcgcgattcgtctcccagtaccgactaatctctcgctcccgcttccgcttccgcttcgatcccgtgctgcttgcccactgctgtaatctcgtgcttgcccagtgctctagttcgagcactctcttgcttctcgcttcgcttcgctgcctgccgcgctgcgtcgagagctttcgccttgcaccggcgattgccccgacacgattgcgtccggtttttcttctaggttctgcgtagatagatagataggtatatatttttcgagtccaattacggggtgcttctggcactggtgaggaaggctattagggttgcctgcctgtgtgtgctgaccgtgaacggaagcgaaggtttctcgcgctaatctgccaggacgctttgttctttcctggcccttggtagttagcagggtgtctccaaccattacactgtcaagtctggactctggaagggttaaaatctcatgaaagtaacgacgccaatcgtgccagcactgctacgctacgagccattgcaccgttctgtgtctctgcgtgaaccaacaatttccatgggttcggccaaaaattcctgccctccgattatcctggttcttcctactactgtaagcagtttactccgtgatatttagaaccgtctccattgcggtactacttagatattgctgcattgttaagctctttccgcaccattcgtatttatcacatgattccctgtccttcttgcatcagcacagggtttctctttgtagggatatgaacaacgggactttggtttttaacggcagctagagggtagcctggagtgagcatttcattctggagatacaatgggtggctgctgctgctgctgctgttctgcaagggcatctgattcagatagagcaccggtgcgcatctatatgtggagaagtcaggcattaaaatcaaaactgacgggcagcagtccccaaaagtggacgaatttgagtcgtgcgaaaaaggtgcccctgaggataaggctgatgaggaggaggatgtttgtccaatatgtcttgaagaatacgacaaagaaaatccacgttcggtcaccaagtgcgagcatcatttccatctctgttgcatactcgaatggatggagaggagcgagacatgcccagtctgtgaccagataactctgatagatgggatgtacgaatagcattcttggcggcggttcctgttgagttggcgttctttgtttttgtttttgttgtggtctggtctggacggctgtctggtggaggagatggttgatgagtcttggcaaaaaaataatttatagaagaaaaatgacatgaaattgtgctagagtcgcctgtgtcctgtttttacctgaaaaccctgtgagatttgctccctggtttcctcttgcttggtttgcgtgttcattcttccatttagatttcagtttctcagtgcctgtgtgacagggaaatcatctgtattgtacagttagtctgaaacggtgacagaaaagaagaaaagctgattctaccatatggttggtttgaa

SEQ ID NO: 133405 - DNA, 1274 bp, Zea Mays
ctaggctcacagctcgcgactcgcaaggaggagcttgcggcagctcggtatgaaaaagggcatctgtcttctttatccatcgtccgtctccttccacccagacacaggccaggcgggcccattgttgcccaagaccctggaatccggagcaggagtcctctctctctctgactctctcctgagggggaggaggaggaggaggaggcagaggcggaagagcaaccaccaagcagcagagcgcgaggcgacacggggacggagccctggaggtctctcgcgagtccagaggcgatcgacggagtcgcgattcgtctcccaggatatgaacaacgggactttggtttttaacggcagctagagggtagcctggagtgagcatttcattctggagatacaatgggtggctgctgctgctgctgctgttctgcaagggcatctgattcagatagagcaccggtgcgcatctatcaccgacaaaatcccgaggaacatgcacccttgtcgtcagcctttgatggaccatcgccaacttctgctatagttgcagttgacacaaatcttgatacaccatctcttgacacttaccgagcaccacctgcacctttgccatatgatgtttgcttcacagtttcagaaaatcctgatgtggagaagtcaggcattaaaatcaaaactgacgggcagcagtccccaaaagtggacgaatttgagtcgtgcgaaaaaggtgcccctgaggataaggctgatgaggaggaggatgtttgtccaatatgtcttgaagaatacgacaaagaaaatccacgttcggtcaccaagtgcgagcatcatttccatctctgttgcatactcgaatggatggagaggagcgagacatgcccagtctgtgaccagataactctgatagatgggatgtacgaatagcattcttggcggcggttcctgttgagttggcgttctttgtttttgtttttgttgtggtctggtctggacggctgtctggtggaggagatggttgatgagtcttggcaaaaaaataatttatagaagaaaaatgacatgaaattgtgctagagtcgcctgtgtcctgtttttacctgaaaaccctgtgagatttgctccctggtttcctcttgcttggtttgcgtgttcattcttccatttagatttcagtttctcagtgcctgtgtgacagggaaatcatctgtattgtacagttagtctgaaacggtgacagaaaagaagaaaagctgattctaccatatggttggtttgaa

SEQ ID NO: 133406 - DNA, 1164 bp, Zea Mays
ctaggctcacagctcgcgactcgcaaggaggagcttgcggcagctcggtatgaaaaagggcatctgtcttctttatccatcgtccgtctccttccacccagacacaggccaggcgggcccattgttgcccaagaccctggaatccggagcaggagtcctctctctctctgactctctcctgagggggaggaggaggaggaggaggcagaggcggaagagcaaccaccaagcagcagagcgcgaggcgacacggggacggagccctggaggtctctcgcgagtccagaggcgatcgacggagtcgcgattcgtctcccaggatatgaacaacgggactttggtttttaacggcagctagagggtagcctggagtgagcatttcattctggagatacaatgggtggctgctgctgctgctgctgttctgcaagggcatctgattcagatagagcaccggtgcgcatctatcaccgacaaaatcccgaggaacatgcacccttgtcgtcagcctttgatggaccatcgccaacttctgctatagttgcagttgacacaaatcttgatacaccatctcttgacacttaccgagcaccacctgcacctttgccatatgatgtttgcttcacagtttcagaaaatcctgatgtggagaagtcaggcattaaaatcaaaactgacgggcagcagtccccaaaagtggacgaatttgagtcgtgcgaaaaaggtgcccctgaggataaggctgatgaggaggaggatgtttgtccaatatgtcttgaagataactctgatagatgggatgtacgaatagcattcttggcggcggttcctgttgagttggcgttctttgtttttgtttttgttgtggtctggtctggacggctgtctggtggaggagatggttgatgagtcttggcaaaaaaataatttatagaagaaaaatgacatgaaattgtgctagagtcgcctgtgtcctgtttttacctgaaaaccctgtgagatttgctccctggtttcctcttgcttggtttgcgtgttcattcttccatttagatttcagtttctcagtgcctgtgtgacagggaaatcatctgtattgtacagttagtctgaaacggtgacagaaaagaagaaaagctgattctaccatatggttggtttgaa

SEQ ID NO: 133407 - DNA, 582 bp, Zea Mays
ggtaggttggagattgatttctgctttcctgctggttcatacaacctattcttctgactccatttgggtcgatcgcataagctgatgggccacaaaggatgttgttttgagaatatccatggttgggacatcaaatggacacagttgggacatcaagtttagacgagaaagtgtatttacaacgtgcaagggtgacaagaatatgaacactctaatgcaccacccttttagtaactgggctgatacagtgagtcgctatttcacaagatcgtcatggccctatcaggaacggagatgctcttagcgaagcaggaggacatggtagacgtgaacctgaagctaaagctgacttccagccaatccaactagcagcagcaggcggggagtggatgcgcctgctagatgagtgctagctttgcgtatacgctcgctcgacaaacgtgtgttgttaactattgtatatagtgttataattactgtcctttattcctgatgtttgttttgtagttgaaactcacattgttttctcatttccatctcgattttgtatgccgtgaccatgaaaaaacaaatgttttccta

SEQ ID NO: 133408 - DNA, 85 bp, Zea Mays
gatccatatttggcttaggtctagcatgccaaatggacagccaaaatggcttctttgtttcataccaaattatcctatgcttatc

SEQ ID NO: 133409 - DNA, 2003 bp, Zea Mays
atacatgctcgctcttcctcgtctagtcgtcttggtgagtctgatccctctctccttccgtcatccaccatctctagggttttagcgccccattttcgcatcgccattcccgatcggatcgccccttccccacccaaccctccggcgccgccacccttcgtgtcagagggtcggtctccaccgaaagcctcgcaacaaatctcctccgtttcttgctccggccatttgttgcaaagatcgtgttttccccccctcatccatgcctcgcgttccatcccttccgtccccggaaatccctccgctttcttgagatctcccgttcctcgatctgacctcgcctcgtcccgccaccacaagcaacagctgttttgcgccacgatcctcagggttgcgattctcgcgtccatttgctcgccccaatacctttcgggagcatctgatctcgaacagtgagacaaagtagccacctttgtgccgttccttgcgtatcggtgggtggcggcgctgcccattcctatgaatggacgggagggagtccacggtggcgtcggggcccaacttctcgtccttcttcgcgcagcaccggggcatcggggcgccgggtgtccccggccactcgcaggggcttcacgccccgccgcccggtgggtaccggcagcatcttgatgctgtctctgcggggtatgcattccagaccccgcatgttgggggtcccagcattgggcaggggtacgaggcctcacctcatgcggcacagcacagcgccggtggcggctctggctccggtggttgtggtggtatggacattggcatgggtgcggccgtgagtgccgatgttaagggggatcaggggagtgggcctggccaggatgagcaggtgaagaagaagcggggcaggccaagaaaatataagcctgatgggtctgtgactcttgggttatcacccacttcatcatcgacgcctcactcgtccagctcggggatgggaaccatggttaacactccaggctctggatttgggtctggaggatcagggggttcaggttctggtgcaccatcagagaaacgtggcagggggcggccacctggctctggaaagatgcaacagctggcttcgcttggaaagtggtttcttggctctgttggaacaggttttactccgcatgtgattattattcaaccaggagaggacgttgctgcgagaataatggccttctcacagcaaggcccaagggcagtgtgcatcatttcagcaactggagctatttctacagcaacccttcaccaggattcagactccggtggtgtggttacatatgagggccgatttgagatcctgtgcctttctgggtcatacttggtggtagaggatggtggcacacggacccgaagcggaggtctttgcatagctttgtgtggtcctgaccacagggttattggtgggagtgtaggcggagtcctgacagcagctggaacagttcaggtgatagtggggagcttcatgtacggaggttcgaagaagaacaaggtgaaagcggaggtggacatggagcccgaggaggtggcacccgcggagcacagtggcatggtccctcctgcgatgagtggcggcgggtgggaagcgggcatgatgaggcagatggactcgagaactcctgccattgatatcaactcgatccgcgggtagtagggtagcagttgttgcctggttgggtggataaaggctctgtgacaaagtcgaatcctcctcctaggacacacacagcacgcatgtactaactaactaactaacagctctgttgctgtggtttaggatactcagaactccgagtatatcgtatgtgatattgttgttgtatgaaataattaacggttggttggtcgtgttattatgttaaatatatatatgaaatgctgctgttgggtctccactccaattatatatgattccatacagatatgactgctgttgcgaaatgaatggattgagttggtactgattg

SEQ ID NO: 133410 - DNA, 2131 bp, Zea Mays
cctcgaacacatacagcatacatgctcgctcttcctcgtctagtcgtcttggtgagtctgatccctctctccttccgtcatccaccatctctagggttttagcgccccattttcgcatcgccattcccgatcggatcgccccttccccacccaaccctccggcgccgccacccttcgtgtcagagggtcggtctccaccgaaagcctcgcaacaaatctcctccgtttcttgctccggccatttgttgcaaagatcgtgttttccccccctcatccatgcctcgcgttccatcccttccgtccccggaaatccctccgctttcttgagatctcccgttcctcgatctgacctcgcctcgtcccgccaccacaagcaacagctgttttgcgccacgatcctcagggttgcgattctcgcgtccatttgctcgccccaatacctttcgggagcatctgatctcgaacagtgagacaaagtagccacctttgtgccgttccttgcgtatcggtgggtggcggcgctgcccattcctatgaatggacgggagggagtccacggtggcgtcggggcccaacttctcgtccttcttcgcgcagcaccggggcatcggggcgccgggtgtccccggccactcgcaggggcttcacgccccgccgcccggtgggtaccggcagcatcttgatgctgtctctgcggggtatgcattccagaccccgcatgttgggggtcccagcattgggcaggggtacgaggcctcacctcatgcggcacagcacagcgccggtggcggctctggctccggtggttgtggtggtatggacattggcatgggtgcggccgtgagtgccgatgttaagggggatcaggggagtgggcctggccaggatgagcaggtgaagaagaagcggggcaggccaagaaaatataagcctgatgggtctgtgactcttgggttatcacccacttcatcatcgacgcctcactcgtccagctcggggatgggaaccatggttaacactccaggctctggatttgggtctggaggatcagggggttcaggttctggtgcaccatcagagaaacgtggcagggggcggccacctggctctggaaagatgcaacagctggcttcgcttggaaagtggtttcttggctctgttggaacaggttttactccgcatgtgattattattcaaccaggagaggacgttgctgcgagaataatggccttctcacagcaaggcccaagggcagtgtgcatcatttcagcaactggagctatttctacagcaacccttcaccaggattcagactccggtggtgtggttacatatgagggccgatttgagatcctgtgcctttctgggtcatacttggtggtagaggatggtggcacacggacccgaagcggaggtctttgcatagctttgtgtggtcctgaccacagggttattggtgggagtgtaggcggagtcctgacagcagctggaacagttcaggtgagtgtgatacaagtatagaccatctgactgacctttagtgaagtaattatatatggatataccgtcggcattgcagttttggtgtcgtatggtttgttttctatgtcatcttctgcataaagagaaaggaaccgtggttttgcattgctgcaggtgatagtggggagcttcatgtacggaggttcgaagaagaacaaggtgaaagcggaggtggacatggagcccgaggaggtggcacccgcggagcacagtggcatggtccctcctgcgatgagtggcggcgggtgggaagcgggcatgatgaggcagatggactcgagaactcctgccattgatatcaactcgatccgcgggtagtagggtagcagttgttgcctggttgggtggataaaggctctgtgacaaagtcgaatcctcctcctaggacacacacagcacgcatgtactaactaactaactaacagctctgttgctgtggtttaggatactcagaactccgagtatatcgtatgtgatattgttgttgtatgaaataattaacggttggttggtcgtgttattatgttaaatatatatatgaaatgctgctgttgggtctccactccaattatatatgattccatacaga

SEQ ID NO: 133411 - DNA, 2981 bp, Zea Mays
acactcctgaagtgcggaaatccaaagtgtgttgtgttgcgttgcctgaatgcctgcccgccgccaaaacccataaaccctaccctctacagcgcctccgtcgctgctcccggcggcgatggggggtgggccgcgcacgttcccgggcgggctgtctaagtggcagtacaaacgcatgcacgagaagctggcgcggcagaagcagcgggggctcctccgccacgagaagcagctctacctcgcccgcctccgctccgagatccgcgcctcccgcctccctggcgccgccgcggaagctccaccggggggcgaggggcccacctcgtcgcgcgcccacatccgcgcccttgccgaccgcttccgcaggcccggcgccgaggacctctggaacgaggacgacgggcccctccgccgcgtcaagcggccgcccactgggatcgcgtcgggtgtccggcaccagcagcagcagttggactcggggaagccccgcggaggaccgagttgggaggacctgacctctctggatcaaccgaggcctttagacaggggaaaagggccgacctcggccgcgttcaatccgagaagagagtacctaacggtggtggcgccctggtgcccgcgttgggatccgcgacctctcggtttcgttgctcccaaaaagtcttatccggtgatgactcgttgctccgtgagttgccagccatgtgtcgacctgaggccattggttgctagtgggcttactgaggatgggaatggaaggaaggacacgccattggcacagtttaatcaggagaggttctactcggtggctgcgaggcgattcggcaggaaatggagaccagattcgtcggaccaggatgacaagggcacgtctgcgcccaagaagaatctgaggttcggaaaaaagtttggggcttcgagcgaagaggattcagaaattgacgagtctggggacacaggtgccatcaggaggaggtggagcagtgctgctctcaggaactgcgatgtgaagaaggaaaggcgggtgctcaagtcttacgaggaggaaagcaatgatctcgcgggtagaatccaagagctgcgagaggagattagaaatagggaggttttgggcactgagaggaggcgttacgagtccaggggtgaatctctgcttaccagtaaaagatttgatcagtgtggtgtctccgcgctgacagtcaaagcacttactgatgctggatatgtacagacaactgtggttcaagaggcagctcttcctatatgtcttgaaggtaaagatgttcttgtcaaggccaaaactggaaccggcaaaagtgcagcttttctgcttcctgcaattgaatcagtcttgaatgctatgaagagcaatacaaatcagcgagtatctccaatatttgctcttgtcctatgccctacaagagagcttgctattcagcttacagctgaagcaaatgtcttgttaaagtaccatgaaggaattggtgttcaatctcttattggtggcactagattcaagcttgatcagagacgattagaatctgatccatgccagattttagttgcaacacctggtagactgctggatcacattgaaaacaaatcatcattctctgttcgtttgatgagattgaaattgcttgtgttggatgaagctgatcatttgctagatctgggtttccgtaaagacatagaaaagattgtcgataccttgccacgtcaaagacaaacattgctcttctcagctactattccaaaagaggttcgaagagtttcacagctagtattaaagagggatcacgtttttgttgacacagtgggccttggagctgttgaaaccccaactaaggttcagcagtcatgtcttgtggtgccacatgagctgcattttcatacggttcatcacctgcttcgagagcatattgatcgtgaagttgattacaaggttattgttttctgcacgacagccatggtgactgagtttatgtatatcatgcttcgagatttgaagttaaatgtcagggaaattcactcgaggaaacctcagctctatagaactcgcatatctgaagagttccggggctctaaccgcatagttctcgtaacgtcagatgtttctactcgtggggtgaactatccagatgtcacccttgtgattcaggttggtgttcctcccgatagagagcattacatccatcggcttggaaggactgcaagggaaggtaaatctggcaagggaattcttttgcttgcgccatgggaacaatacttcttggacgagataggcgatctcccgattgacaagtatccagcaccagacattgaccaggagatgaagcaaaaggttgacgattcaatagagatggttgacatgagcatcaaagaagcagcataccatgcgtggctgggttactacaactccatcgctgacataggtagagataaaagaatggttgttgacctagcaaatcgatttggtgcctcgattggcctggagaagcctccagcgatataccggaagaccgctctgaagatggggctcaaggatgtccctgggattcgaataaggaaatgacatgttcctccacagcaataagggaccttttagcctcgacattggattggaggacatgtaattgaattgggttcaaaatatacaaaattactcacctctgttgcaatggcctaactccttaaatgcatcttcgatttctttaactgctgtttctgtagcataaagacataattagtaaacacacaggatgctatcatcaacatactaacaaataataacaatataaaagaagtaaaagttaatcctagcagatcaacatttcaactaaaatacaggaagccataaaaaatgttgagctggaaaataaaatttagttttctgaaagctttagctttcaccatttcaaatatgtacaccaactgccaaaggaaaacctaaacatgtcgattcatctataatcaaagct

SEQ ID NO: 133412 - DNA, 2962 bp, Zea Mays
acactcctgaagtgcggaaatccaaagtgtgttgtgttgcgttgcctgaatgcctgcccgccgccaaaacccataaaccctaccctctacagcgcctccgtcgctgctcccggcggcgatggggggtgggccgcgcacgttcccgggcgggctgtctaagtggcagtacaaacgcatgcacgagaagctggcgcggcagaagcagcgggggctcctccgccacgagaagcagctctacctcgcccgcctccgctccgagatccgcgcctcccgcctccctggcgccgccgcggaagctccaccggggggcgaggggcccacctcgtcgcgcgcccacatccgcgcccttgccgaccgcttccgcaggcccggcgccgaggacctctggaacgaggacgacgggcccctccgccgcgtcaagcggccgcccactgggatcgcgtcgggtgtccggcaccagcagcagcagttggactcggggaagccccgcggaggaccgagttgggaggacctgacctctctggatcaaccgaggcctttagacaggggaaaagggccgacctcggccgcgttcaatccgagaagagagtacctaacggtggtggcgccctggtgcccgcgttgggatccgcgacctctcggtttcgttgctcccaaaaagtcttatccggtgatgactcgttgctccgtgagttgccagccatgtgtcgacctgaggccattggttgctagtgggcttactgaggatgggaatggaaggaaggacacgccattggcacagtttaatcaggagaggttctactcggtggctgcgaggcgattcggcaggaaatggagaccagattcgtcggaccaggatgacaagggcacgtctgcgcccaagaagaatctgaggttcggaaaaaagtttggggcttcgagcgaagaggattcagaaattgacgagtctggggacacaggtgccatcaggaggaggtggagcagtgctgctctcaggaactgcgatgtgaagaaggaaaggcgggtgctcaagtcttacgaggaggaaagcaatgatctcgcgggtagaatccaagagctgcgagaggagattagaaatagggaggttttgggcactgagaggaggcgttacgagtccaggggtgaatctctgcttaccagtaaaagatttgatcagtgtggtgtctccgcgctgacagtcaaagcacttactgatgctggatatgtacagacaactgtggttcaagaggcagctcttcctatatgtcttgaaggtaaagatgttcttgtcaaggccaaaactggaaccggcaaaagtgcagcttttctgtcttgaatgctatgaagagcaatacaaatcagcgagtatctccaatatttgctcttgtcctatgccctacaagagagcttgctattcagcttacagctgaagcaaatgtcttgttaaagtaccatgaaggaattggtgttcaatctcttattggtggcactagattcaagcttgatcagagacgattagaatctgatccatgccagattttagttgcaacacctggtagactgctggatcacattgaaaacaaatcatcattctctgttcgtttgatgagattgaaattgcttgtgttggatgaagctgatcatttgctagatctgggtttccgtaaagacatagaaaagattgtcgataccttgccacgtcaaagacaaacattgctcttctcagctactattccaaaagaggttcgaagagtttcacagctagtattaaagagggatcacgtttttgttgacacagtgggccttggagctgttgaaaccccaactaaggttcagcagtcatgtcttgtggtgccacatgagctgcattttcatacggttcatcacctgcttcgagagcatattgatcgtgaagttgattacaaggttattgttttctgcacgacagccatggtgactgagtttatgtatatcatgcttcgagatttgaagttaaatgtcagggaaattcactcgaggaaacctcagctctatagaactcgcatatctgaagagttccggggctctaaccgcatagttctcgtaacgtcagatgtttctactcgtggggtgaactatccagatgtcacccttgtgattcaggttggtgttcctcccgatagagagcattacatccatcggcttggaaggactgcaagggaaggtaaatctggcaagggaattcttttgcttgcgccatgggaacaatacttcttggacgagataggcgatctcccgattgacaagtatccagcaccagacattgaccaggagatgaagcaaaaggttgacgattcaatagagatggttgacatgagcatcaaagaagcagcataccatgcgtggctgggttactacaactccatcgctgacataggtagagataaaagaatggttgttgacctagcaaatcgatttggtgcctcgattggcctggagaagcctccagcgatataccggaagaccgctctgaagatggggctcaaggatgtccctgggattcgaataaggaaatgacatgttcctccacagcaataagggaccttttagcctcgacattggattggaggacatgtaattgaattgggttcaaaatatacaaaattactcacctctgttgcaatggcctaactccttaaatgcatcttcgatttctttaactgctgtttctgtagcataaagacataattagtaaacacacaggatgctatcatcaacatactaacaaataataacaatataaaagaagtaaaagttaatcctagcagatcaacatttcaactaaaatacaggaagccataaaaaatgttgagctggaaaataaaatttagttttctgaaagctttagctttcaccatttcaaatatgtacaccaactgccaaaggaaaacctaaacatgtcgattcatctataatcaaagct

SEQ ID NO: 133413 - DNA, 923 bp, Zea Mays
attcagttttgctgggcttgccggccctggccggcgaggcgagtaggcgacccggcgtgcgttggactctctctctctctcccccttttcaacgcggtggagtcgagccgaactcaacccaacttctctccctctccctcgcctgcctgccgttccgcgtttgaccaactcccccgcaccgtaaccctagcagcagatcggccatggagagctgggcgacctgggtggggacaagcgtcacctccgccttcttcgcctccctcgagcgctgctcctgcatcaacctctccaccgacgacgacgacgacgacgaggaccacgacgaggccaaggaccggcccctcatcctcgccgccgccccacgccacgactccgccgccaagcccgatccagactccgccgccgaggaccaggacgaccagaagcaagagcagccgccgctgccgcccgtatgaatcgaacccgattccttgcttgtactagctgctactgctgttatgtcgccaaataaagtcgtgtgtgcgtgtgcagtcagtactactgctctgctgctactatcctagtcctagtatattagtatattatacagtcctctgtgaaatttgaatcgactcgaaaaccaaaccccaccaacatgagcttgttaatatttgtcctcccgaatcaaccagcgcttgttaataatggctgatgatgcatgcttctactatcctgcctgcactctgcaatcactttgaacttgaattttcatgtgtagtgtagtgagtagtgcagatttgtatatagatgtggcttgttgctgcttgctgcgtagtaagtaaagtaatccattcactgggaatgatcttccgatggtgttcatgaaaatagcaccatctgtactttctatccagcggtgcttgcaataataaagaacgattaaa

SEQ ID NO: 133414 - DNA, 2317 bp, Zea Mays
gaaaagctcgcggggacaaactgctgtagcagtcgaatcgaatggaagcacgagtgcaggggctgggaattctacgtgccagcccaggaaggagggtgggtttccttaccgatcgagaggaggagaaggaggtgcgaatcaatccacgccccggctaacggggcgagcggcggcgcgggcagtgggggcggagaggcggcgcctgatctggagggagggagggagcgggcgggcttcgccgtgccgtgatcggcgcgggggggaccggggaaggtggtgggtggatgagtccgtgatagtggaagtggctgctagcgtggagaggaggtgtgaaccagcccagcccacacggcccaacccaaagcctgcaaaaaatggaaaagggtcccacatgtcggcgcgattttaccgtggacgactggagggggcgacggggacgaacgagacgaccgtatttgttatcggactgggaagcagcggcggtacaaagtgtgggagagaaaggagaagagacttgatgtcctcgcagtttgtccaatagatctcctcgccgcctcacccgtctcctcctccgcagcttccccgcgatcccgaccatggagggcgacggtaccaaccttgatgcggcgatagagtcgctcctgaatgtcgagaagcagatgaggctggccggagatgtcgccggcactcggaaggccgtcatcgacatcgtcgagctctgctacaaggccggcgcgtggaagacgctaaacgaccagatcgttctcctatctaagaggagaggccagcttaagcaggctattactgctatggttcagaaagcaatggagtacattgatttgacaccaggcattgacacaagcatcgagctaataaaaacactgagcagtgtctctgctggcaaaatctatgttgagatagagagagcaagattgatcaaaaggcttgcaaaaattaaagaggagcagggacaaatttacgaggctgctgatttgatgcaagaagttgctgttgaaacatttggctctatggcaaagacggagaaaattgctttcattcttgagcaggtccggctatgcctggatcggcaagattttgtcagagcacaaattttatccaggaaaatcagtactagagtatttgacgcagatccatcaaaggaaaaaaagaaaccaaaggaaggtgacagtattgttcaggatgctcctgcagatattccttcccttctagaattgaagcgcgtctactacgaactgatgattcgttattactctcacaacaatgattacttggaaatctgccgttgttacaaggctatttatgatattccagcaataaaagaggatccaacaaagtggataccgattcttaggaagatctgttggtacttggtgctagcacctcatgatcctatgcaatcaagccttctcaatgctacactagaggataaaaacctttcagaaatcccaaatttcaggttattactgaagcagctggtcaccatggaggtgatacagtggacaagtctgtgggaattcttcaaggaggaatatgagaaggagaaggatcttcttgggggagctttgggtgccaaagcttcagaagatttgaggctgaggattatcgaacataatatcttggttgtatccaagtactatgcaagggttaccctcgagaggcttgctgatcttctttgcctgactttgcaggaggcagagaagcatctctcagacatggttaactcgaaatctctagtggcaaagatcgacaggccgatgggagttgtcagcttccggacgacccaagacagcaatggcacactgaactcatgggccacgagccttgagaagcttctggacctcgttgagaagagctgccacgagatacataaagagaccatgatccacaagacggcgttaaaagtttaactcttttggtttaggttttgaaacccgtgctgttcatgagttaccgtaacaggagggggggttttttgttgttgttgggcacggccagtgtccccgcaaatttgctttgactcgctgaatatttttcggattcctagatctgcaatcagatacctagtcctgaaaaaaaaaagtagatgcacctttttttttattaaaattcagttctccaggcttcagtctcggaaaagtagacaccttgtttgggcgagccactttgtaacgggcacaatcagaaatgcgttcccgttttcagcctggcccagaaacggttttccagacgttttttaaatttttttgtttaaaattttaaaaatctgaaaacgtttataaaaaactgaaaagaaaaa

SEQ ID NO: 133415 - DNA, 1735 bp, Zea Mays
ggggcgagcggcggcgcgggcagtgggggcggagaggcggcgcctgatctggagggagggagggagcgggcgggcttcgccgtgccgtgatcggcgcgggggggaccggggaaggtggtgggtggatgagtccgtgatagtggaagtggctgctagcgtggagaggaggtgtgaaccagcccagcccacacggcccaacccaaagcctgcaaaaaatggaaaagggtcccacatgtcggcgcgattttaccgtggacgactggagggggcgacggggacgaacgagacgaccgtatttgttatcggactgggaagcagcggcggtacaaagtgtgggagagaaaggagaagagacttgatgtcctcgcagtttgtccaatagatctcctcgccgcctcacccgtctcctcctccgcagcttccccgcgatcccgaccatggagggcgacggtaccaaccttgatgcggcgatagagtcgctcctgaatgtcgagaagcagatgaggctggccggagatgtcgccggcactcggaaggccgtcatcgacatcgtcgagctctgctacaaggccggcgcgtggaagacgctaaacgaccagatcgttctcctatctaagaggagaggccagcttaagcaggctattactgctatggttcagaaagcaatggagtacattgatttgacaccaggcattgacacaagcatcgagctaataaaaacactgagcagtgtctctgctggcaaaatctatgttgagatagagagagcaagattgatcaaaaggcttgcaaaaattaaagaggagcagggacaaatttacgaggctgctgatttgatgcaagaagttgctgttgaaacatttggctctatggcaaagacggagaaaattgctttcattcttgagcaggtccggctatgcctggatcggcaagattttgtcagagcacaaattttatccaggaaaatcagtactagagtatttgacgcagatccatcaaaggaaaaaaagaaaccaaaggaaggtgacagtattgttcaggatgctcctgcagatattccttcccttctagaattgaagcgcgtctactacgaactgatgattcgttattactctcacaacaatgattacttggaaatctgccgttgttacaaggctatttatgatattccagcaataaaagaggatccaacaaagtggataccgattcttaggaagatctgttggtacttggtgctagcacctcatgatcctatgcaatcaagccttctcaatgctacactagaggataaaaacctttcagaaatcccaaatttcaggttattactgaagcagctggtcaccatggaggtgatacagtggacaagtctgtgggaattcttcaaggaggaatatgagaaggagaaggatcttcttgggggagctttgggtgccaaagcttcagaagatttgaggctgaggattatcgaacatgtattggttactttgtgtttggtctagttattttgctctatgcttgtccattgaatctgatctcttgctctcttcagaatatcttggttgtatccaagtactatgcaagggttaccctcgagaggcttgctgatcttctttgcctgactttgcaggtttgtttgttttttcacctttgcatgatattgtatttcctttgtgatgccaaccgtggcatcttgtgtttaaacccactacatgacaatcacctgaattgttaggca

SEQ ID NO: 133416 - DNA, 1176 bp, Zea Mays
ggggcgagcggcggcgcgggcagtgggggcggagaggcggcgcctgatctggagggagggagggagcgggcgggcttcgccgtgccgtgatcggcgcgggggggaccggggaaggtggtgggtggatgagtccgtgatagtggaagtggctgctagcgtggagaggaggtgtgaaccagcccagcccacacggcccaacccaaagcctgcaaaaaatggaaaagggtcccacatgtcggcgcgattttaccgtggacgactggagggggcgacggggacgaacgagacgaccgtatttgttatcggactgggaagcagcggcggtacaaagtgtgggagagaaaggagaagagacttgatgtcctcgcagtttgtccaatagatctcctcgccgcctcacccgtctcctcctccgcagcttccccgcgatcccgaccatggagggcgacggtaccaaccttgatgcggcgatagagtcgctcctgaatgtcgagaagcagatgaggctggccggagatgtcgccggcactcggaaggccgtcatcgacatcgtcgagctctgctacaaggccggcgcgtggaagacgctaaacgaccagatcgttctcctatctaagaggagaggccagcttaagcaggctattactgctatggttcagaaagcaatggagtacattgatttgacaccaggcattgacacaagcatcgagctaataaaaacactgagcagtgtctctgctggcaaaatctatgttgagatagagagagcaagattgatcaaaaggcttgcaaaaattaaagaggagcagggacaaatttacgaggctgctgatttgatgcaagaagttgctgtaagtttgccccgcactataattgaggacatgtaattccatattctgtgacaatgtttttgtcattctttagtaccgttcctcaattctcactatccatgactataatggactaacaagctgtttatcaggttgaaacatttggctctatggcaaagacggagaaaattgctttcattcttgagcaggtattccctccgttcttttttatttgtcgcggtttagttcaaaaatgaattagcgggcgacaaatatttgagaacggaggtagtactatggcaacctactatgttaatacttggtattcttactaaaatgtgtattc

SEQ ID NO: 133417 - DNA, 739 bp, Zea Mays
agaaacaaaataatcaagtgcatcccagagcaaccgatgtgcttgcctcctgaactcaatcagtgaagcctccggttctgtgtcattctcaccaatccaaccataccagccttccttctcatgtgcatagaatggccttgcaggaggtggaggcagcggtcttggacgaggccctgctctcttccattcttcaatgagttgtttttcacttttgggaggtggaggctgtggcaaatctgaggttagaggatcttctgacccaactaaatcaaacagctccctctgactacataatgaagttcgatcgactaggttagcaaacatagctcgtagaggaatcagcattctttgtccaccaaaagtctcggaaccagccaagaatattattgtagttggtgggtaacctaatgcttgaagtagaagtccagcctggaatcacaggattgtttacatcacagcattagcaataaaaatgaatcagtaagctggtatggtgaatcaggcatagtatcaagcagattatatcgtgcagctcaatgtgtgccacaagaccaaggaatggaaagaagagacgaagtctttctacttttatagttaacttttctttctttaaacttctttgtctcgagcttgattttcataatgattagattagtacaaacaatgtcgtataaaagcaaaacatgaagttcatatttcaaaggtaaaggcccacatggtaaaggaaaattatcatata

SEQ ID NO: 133418 - DNA, 2037 bp, Zea Mays
ctctctaacaatactaatactactgcatcaatgtttgtatgtatagagagagcgcaccttatattataggtatagaataaaaagtggttacgccttatattatgggacagagggagtatctagctagctagttagttattgtgtgtgttgctcacctcagtacttctgcctgttcctttgccgccttgctctgcagggagatacccaaggaggtttacaacaacttggacactggcagccaggatgagaaatggtgggagggagtggacctccaaaagctcattctggctcacaataatcttgaggtgttaagagaagaccttaggaacttgtcttcgcttgttgttctaaatataagtcacaacaagatatcttcccttccagcagctatcggagaggttgacttctcaaacaattgccttactgagcttccacctaacctcgccacatgcccggacttgtccgaactcaaggcatcaaacaacaacatatccagagtaccagatgtacttgctggctgttccaagttaagtaaattggatctagagggtaacaagcttgtggcactttctgaaaacatgtttgtgtcatggacaatgctcacagaattgaatctcgctcgttacagcaaagaatctacttacagccatcccagaaataacttattgtcttcaataccagctgatattggcacgttatcaaagttaggcatacttgatctccattctaatcagctaaaggagtatccagttggagcctgcaacctcaaattatctttccttgatctatcaaataactcattatctggtctaccagctgaactagatcatagatctgattcttgcatgcgtgataagtgtatgctttggcctttaagaacctcatatagtttgtggtactgccttactgaaaattctgacaatccatgcgccactcaaggtaaaatgactaccctaagaaagcttctgcttactggaaatcctatgaggacacttaggagttcattggtttctggaccaacaacaacattgctgaagtatctgcgcagccggctttcatccgatgaggaagcatcaggatccagaagcaccccaactaaagatgaccaaattgctgcagcaaggcgcttgtccttatcttcaaaggaactggacttgagtggccttggagtgaccagtgtaccagctgccgcgtgggagacaagtgatgtggtgaaactggatctttctaaaaattcaatagaagatctaccaaatgagttgtcattatgctcatcacttcaatccttagttttgtctaataacaagataaaaaggtggcctcacacagtggtttcctcccttccctgtctgtcttccttaaagctggacaataaccccttggtagagatatcatccactgatcttgtgcctctgtccaaacttgaagtacttgatctaagtggcaatgcttcagcacttcctgaaccttctgcagtttctgcattaccacagctgcaagagctttacctaagacgaatgaaactccatgaatttcctaatggtttgctgggcctaaaactgcttaggattcttgacctgagtcagaatcaccttacaactgtgccggagggcatcaagaatttcactgcactcattgagcttgatctgtctgacaacaatataacagcactcccagcggagctgggattgcttgaagctaacctgcaagtgctgaaactggatggaaatccgctaagaagcataagacgaactctgttggagcgaggaacgaaagcagttctcaagtacctcaaagaaaaattgccgtctgaataatatttatagaacaaactattgttggagtaatggaataaaatgtttttttgccactgtatctcagttttctggactgaattttgtgcaaaagtatctggaccttgtgtgagaagagagctttgtgagtgtgttgttggatatactggttatagtccacatgttttattggaacaaaaatattttctctgttcaatctttacatggacacaacctggaaaga

SEQ ID NO: 133419 - DNA, 85 bp, Zea Mays
aggaggaaacaccagtggctataatggctgaagacaaacaacatgccctggcaattggatatacaaaaatgtcagcaaaagacat

SEQ ID NO: 133420 - DNA, 687 bp, Zea Mays
gatactcattgctggcggctttcagcttcgagacagtactcggccaaatcagcttatgaaaacttctttcaaggctcagttcaatttcagcgatgggagcgaatatggaagccatgggtgccaggcaaatgccatttgcttctttggttggtggtacataaacggtgctggatatgtactagcttgctctacaaagtttgccgcatccagtgtgctgtcctcactgtgatcaggtcgatgggacaagtgatcatcagctcactaattgtgcgtttgtgagacattttgggttcaatctcctgcggggatttggccttcgaggtctgtcaccttctgttgaagatagatcctttgattacgggccagctaacggaccagtgcagaaatacctcaattttctgagcctggagccctggactctggaagcatcggaatctccatgtttttgatggtgctgccccagaaatggcaggtgtattgcttgctgcttgaggaggtacaactttgggagcaaatattgagttcaaaaccctcccttgccgctgcaacctcctcctcatccgctgcacataccccggatgggccaagtacgcctcgctcactatttgtcggctggatgtccgtttcttgcttgttttcattcctgtcgaaatccaaatggcggcctgctgtttcctaatgctgtgg

SEQ ID NO: 133421 - DNA, 2660 bp, Zea Mays
gtgcgaagcacatcccaccatggcgccatcccttgccgacctctcccgagagctctgcgcagccgtcgtcaaatccaccttccgcccccacctctccctcctcgccgcctcgccatcccttctcaccgccgtcctccaccgcctctccccgctcccctccgctgcgctcgccttcttccgcgcgctgcctccgccgcacccgctggacgcctcgctcgccgtcctccgcctcctggcgccgcacccgcgccaccacaccgccgcgcgggccctcctccgggacctctcccttcgccacccgctctcctccccgctcctcctcccctccctcctcgccggcccccacgtccccagctggctcgtcctcgtcctcgcccagtcagcgcgcccccacgacgccgtacgggtgttcgaccacatgcgcgcgcgcggcctcgcccccgacgcccacgcctgcaccgcgctcctcacagcgctcgccagggcccggatgacggccaccgcgcgcagggtgttcgacgaaatggccagggcggggctcgccgccaccacgcacgtctacaacgccatgctgcacgtgtgcctcaaggccggggacgccgcgcaagccgaggcgatcgtcaccaggatggacgcggccggcgtgaccttggaccgattctcctataacaccgtcatcgccctctactgccggaaggggatggggtacgaggccatgtgtgcgcgggaccgcatggacaaggaggggatacggccggacactgtcacatggaactcctccatccatggcctgtgcaaggaaggcagggtgaaggaggcggctcagctcttcacggaaatggttgcggcacaggcgacaccagacaatgtcacctacaccacactgattgatgggtactgccgcgcgggcaatgttgaggaagctgtcaagctccgagggagaatggaggccgcagggatgctcccaggggtcgccacttacaatgccattctcaggaagctctgtgaggatggcaacatgaaggaagtccatcggttgcttcatgagatggacgggaggaaggtgcaggctgatcatgtgacctgcaacacgctcatcaacgcctactgcaagagaggcgacatgacctcagcatgcaaggtcaagaaaaagatgatggagtctgggctgcagctcaatcacttcacttacaaggctctcatccatggattctgcaaggccagggagcttgatggagccaaggaagccttctttcagatggtcgatgcaggtttttcacccaattatagcgtattttcatggcttgtcgacggtttctgcaagaagaacaatgcagatgcagtgctagccatccctgatgaacttatgaaaagaggccttccaccagataaagcggtatatagatctctgattcgaaggctttgcagaaaagggctggttgatcaggcacaaagagtatttgaccagatgcaaagcaaaggcttagtcggtgacagtcttgtatatgccacactcgcatacacatacctgacaaaaggaaacccaactgccgctttgaataccttggatggtatgacaaagaaccaattgtacataacaccccagatttacaactgcctgtgtacttcttatgctgatgagaaggaaaccctcaatatgctgtgggttcgtgctattgagagaggcctaatcaagaagagcgtgtacaaactgatgcacgaagcaaggctggaatcaacaaagcttacagttgagactgggtgatatgctcctgtttcaaggccagactatctaggggctacacttgatacttgaatacaattggattcaggacattcaggatgcaacctctgtttgtgttttcactgaataccttgatatttgggatatgttatctgggactgtactgcagccaggtgaagatactcattgctggcggctttcagcttcgagacagtactcggccaaatcagcttatgaaaacttctttcaaggctcagttcaatttcagcgatgggagcgaatatggaagccatgggtgccaggcaaatgccatttgcttctttggttggtggtacataaacggtgctggatatgtactagcttgctctacaaagtttgccgcatccagtgtgctgtcctcactgtgatcaggtcgatgggacaagtgatcatcagctcactaattgtgcgtttgtgagacattttgggttcaatctcctgcggggatttggccttcgaggtctgtcaccttctgttgaagatagatcctttgattacgggccagctaacggaccagtgcagaaatacctcaattttctgagcctggagccctggactctggaagcatcggaatctccatgtttttgatggtgctgccccagaaatggcaggtgtattgcttgctgcttgaggaggtacaactttgggtaatggctggagcccatagggttttccctcttgagttaccttacacctattgattatgcttcgattatgatcattagtatttcagtcacagactcacatgcatggatgtaaagctaagaattcactttccaaattcaaaagccactcaatcacaatcagcttgttgatgagacacaaatcaaacattcaaactttttttttttgcaatattcagttctgtaagaagtag

SEQ ID NO: 133422 - DNA, 1782 bp, Zea Mays
cccaccatggcgccatcccttgccgacctctcccgagagctctgcgcagccgtcgtcaaatccaccttccgcccccacctctccctcctcgccgcctcgccatcccttctcaccgccgtcctccaccgcctctccccgctcccctccgctgcgctcgccttcttccgcgcgctgcctccgccgcacccgctggacgcctcgctcgccgtcctccgcctcctggcgccgcacccgcgccaccacaccgccgcgcgggccctcctccgggacctctcccttcgccacccgctctcctccccgctcctcctcccctccctcctcgccggcccccacgtccccagctggctcgtcctcgtcctcgcccagtcagcgcgcccccacgacgccgtacgggtgttcgaccacatgcgcgcgcgcggcctcgcccccgacgcccacgcctgcaccgcgctcctcacagcgctcgccagggcccggatgacggccaccgcgcgcagggtgttcgacgaaatggccagggcggggctcgccgccaccacgcacgtctacaacgccatgctgcacgtgtgcctcaaggccggggacgccgcgcaagccgaggcgatcgtcaccaggatggacgcggccggcgtgaccttggaccgattctcctataacaccgtcatcgccctctactgccggaaggggatggggtacgaggccatgtgtgcgcgggaccgcatggacaaggaggggatacggccggacactgtcacatggaactcctccatccatggcctgtgcaaggaaggcagggtgaaggaggcggctcagctcttcacggaaatggttgcggcacaggcgacaccagacaatgtcacctacaccacactgattgatgggtactgccgcgcgggcaatgttgaggaagctgtcaagctccgagggagaatggaggccgcagggatgctcccaggggtcgccacttacaatgccattctcaggaagctctgtgaggatggcaacatgaaggaagtccatcggttgcttcatgagatggacgggaggaaggtgcaggctgatcatgtgacctgcaacacgctcatcaacgcctactgcaagagaggcgacatgacctcagcatgcaaggtcaagaaaaagatgatggagtctgggctgcagctcaatcacttcacttacaaggctctcatccatggattctgcaaggccagggagcttgatggagccaaggaagccttctttcagatggtcgatgcaggtttttcacccaattatagcgtattttcatggcttgtcgacggtttctgcaagaagaacaatgcagatgcagtgctagccatccctgatgaacttatgaaaagaggccttccaccagataaagcggtatatagatctctgattcgaaggctttgcagaaaagggctggttgatcaggcacaaagagtatttgaccagatgcaaagcaaaggcttagtcggtgacagtcttgtatatgccacactcgcatacacatacctgacaaaaggaaacccaactgccgctttgaataccttggatggtatgacaaagaaccaattgtacataacaccccagatttacaactgcctgtgtacttcttatgctgatgagaaggaaaccctcaatatgctgtgggttcgtgctattgagagaggcctaatcaagaagagcgtgtacaaactgatgcacgaagcaaggctggaatcaacaaagcttacagttgagactgggtgatatgctcctgtttcaaggccagactatcta

SEQ ID NO: 133423 - DNA, 128 bp, Zea Mays
gtcggactcatttcgggcgacctaaaattataaaaagcttgaaattcaaattctaccccgaaaatcatttgttggcccaaaaatcaattcctggcccgaaattcacatcggagcccaaaattcaaatc

SEQ ID NO: 133424 - DNA, 1130 bp, Zea Mays
accgctcccgctcccccacccacccacccacccagacccagccacccaccggacggcttggctggccctcaatcattggcccctccaccgcctccattcctctctgctctgttctgctccaccaccctgatgacgacgaggccagacggcagcgcctccacgcccgcggacaagcagctcgtggcggcctccaacggcaacggcaacggcaacccgctggccgtccgcaaggcgccctccaaggaccggcacagcaaggtggacgggcgaggccggcgcatccgcatgcccatcatctgcgccgctcgcgtgttccagctcacgagggagctcgggcacaagtccgacggacagaccatcgagtggctgctcaggcaggccgagccctccatcatcgccgccaccggcaccggcaccacgccggcctccttctccacctcgtccccgtcatcgctccgctcctcctcgtcctccacagccggcgtccacccgcacgccgccccggcccaggggttctgggcgctgccggcgcgggccgacttcggacagctctggagcttcgcggccgcgccggagatgatggtcgccgcggctgcagcagcagcgccgggcatggccggggaggcgtccgccgccagggtcggcaactacctccccgtcgcgcagggcaacctcaacctgctggcctccttctccggcgggcctgctcccacagcggccgccggacgggccgaggaggagaccgcccgctaagggtcgtcaattcccagtctctctgtgtgtggctcaatccgggatagacagtgtcactctcacccaactctccatttctttttttggggttcagttcagatcagtgttggccacccgaattgggtggccttccactccatcccagtgagcaatcaagcaaggaggagctgcatcagctctccctcccgtcctatctatctatatgattttttttctttctttttgagcattggattagtgctctcaactacccacaagtgtttattagtcagccagctccttcagtgctactagcagctcagttcagtccatggtatgtgtccggattgtttgctgatgtgcttgttgatcaattaatggacataatggttgcgaaa

SEQ ID NO: 133425 - DNA, 1386 bp, Zea Mays
ttctcccgccaggttgctccgcctataggactccgctcctttgagctcccctcccctcgcatcgcatcgcatcgatcctcccatctgcgcacccgcaagcctattcgccgcacctcctcaggtgaccgggaagatgatgccgttgagccaaaccgacttctcgccgtcgcagttcacctcctcccagaatgccgccgccgactccaccacgccttccaagatgcgcggcgcgtccagcaccatgccgctcaccgtgaagcaggtcgtcgacgcgcagcagtctggcacgggcgagaagggcgctccgttcatcgtcaatggcgtcgagatggctaacattcgacttgtggggatggtcaatgccaaggtggagcggacgaccgatgtgaccttcacgctcgacgatggcaccggccgcctcgatttcatcagatgggtgaatgatgcttcagattcttttgaaactgctgctattcagaatggtatgtacattgcggtcattggaagcctcaagggactgcaagagaggaagcgtgctactgctttctcaatcaggcctataaccgatttcaatgaggttacgctgcatttcattcagtgtgttcggatgcatatagagaacactgaattaaaggctggcagtcctgcacgaatcaattcttctatgggagtgtcattctcaaatggattcagtgaatcaagcacaccgacatctttgaaatccagtcccgcaccggtgaccagcgggtcatccgatactgatctgcacacgcaggtcctgaatttttttaatgaaccagcgaacctcgagagtgagcatggggtgcacgttgatgaagtactcaagcggttcaaacttttgccgaagaagcagatcacggatgctattgattacaatatggactcggggcgtctttactcaacaattgatgaattccactacaaggcaacttaaccgatttgaaggtcagcctgctggaaatggcagaggactaagtatcacttgtactaaaccaaagtctggaaatgtcatgttgtgtcatgaaatgcatggttggtttatggaaacatttatatcttgtatcaactagttgatttgtatctcttgtgtcaacttaatgactgagccaacaaaaggaagatgtagaggcagacagacatttgtagattggctgatagctgattcgggtagctggtccaattgcaatctggggcccaataattcagatgcaaaagcagaaagatatttcactgtcgtttcttttgatgcaaaagaaattaaattataaggaaatgaagactgttccattatttcccattagtttatgcagtcatgatgtatttcatagttttaaatttaataaaagcgtgtacatttatccattt

SEQ ID NO: 133426 - DNA, 1879 bp, Zea Mays
atggcgttggcggctaggggtttagggtttgggtgttcgtcgtggcacagccgcacaggtggtttacgtggaatgcttggagccttggactgcggactcagtcagtcactcacgctccgttggcgggaagcagggtttcatttcccgcgcttttgcccgttctcccgccaggttgctccgcctataggactccgctcctttgagctcccctcccctcgcatcgcatcgcatcgatcctcccatctgcgcacccgcaagcctattcgccgcacctcctcaggtgaccgggaagatgatgccgttgagccaaaccgacttctcgccgtcgcagttcacctcctcccagaatgccgccgccgactccaccacgccttccaagatgcgcggcgcgtccagcaccatgccgctcaccgtgaagcaggtcgtcgacgcgcagcagtctggcacgggcgagaagggcgctccgttcatcgtcaatggcgtcgagatggctaacattcgacttgtggggatggtcaatgccaaggtggagcggacgaccgatgtgaccttcacgctcgacgatggcaccggccgcctcgatttcatcagatgggtgaatgatgcttcagattcttttgaaactgctgctattcagtaagtataaactataatgtatacattgtccctaaagcattccagtagtaccttttctgtaggaaagtcaccatgcttttgtgcggatgtacattggttatcaaggaatggtatgtacattgcggtcattggaagcctcaagggactgcaagagaggaagcgtgctactgctttctcaatcaggcctataaccgatttcaatgaggttacgctgcatttcattcagtgtgttcggatgcatatagagaacactgaattaaaggctggcagtcctgcacgaatcaattcttctatgggagtgtcattctcaaatggattcagtgaatcaagcacaccgacatctttgaaatccagtcccgcaccggtgaccagcgggtcatccgatactgatctgcacacgcaggtcctgaatttttttaatgaaccagcgaacctgtaagttacatattcacaacctgcaacttattatgttttgaccagcctttccaataaaagtgtttcctgaataaagtttaagctaaacataaccatcactttttttcttattcaaatatgatgccacatttacctaccctttttcagttaacaaataaaaagttgcatttgctgtgatgccctggttagcaagttctctcatcttggtttgccattctattgttgacagcgagagtgagcatggggtgcacgttgatgaagtactcaagcggttcaaacttttgccgaagaagcagatcacggatgctattgattacaatatggactcggggcgtctttactcaacaattgatgaattccactacaaggcaacttaaccgatttgaaggtcagcctgctggaaatggcagaggactaagtatcacttgtactaaaccaaagtctggaaatgtcatgttgtgtcatgaaatgcatggttggtttatggaaacatttatatcttgtatcaactagttgatttgtatctcttgtgtcaacttaatgactgagccaacaaaaggaagatgtagaggcagacagacatttgtagattggctgatagctgattcgggtagctggtccaattgcaatctggggcccaataattcagatgcaaaagcagaaagatatttcactgtcgtttcttttgatgcaaaagaaattaaattataaggaaatgaagactgttccattatttcccattagtttatgcagtcatgatgtatttcatagttttaaatttaataaaagcgtgtacatttatccattt

SEQ ID NO: 133427 - DNA, 2454 bp, Zea Mays
aaatcaaatcgaagctttcattcttaaaggcttagcagcacattcagaagtatcctactcaaatagatagaagcaaagcataataagcacattcagggaaccaatttggtcttgatatttttgaaccagtagttgggatgcagagaaccaatttggtccaccggaaccactaacaggggaagatgctccagccaactttctagacaaataaagatcagccatgtcgtcgtcatcatctaataattacggaagcacatctctcacctggcaaatagagaacagttcccagccaactttctagacaaataaagatcagccatgtcgtcgttatcatctaataattgttcaagctcatatctcacctggcaaatagagaacagtttgtgattcctatcacaagaaaaacggaagaactgatccacaaattctacatgtctctctatgtttcatgcatgattcagtcaacctcaccaatcctgtctcgccctctcggcgtcttttgcttccccgggccacatatctgtccatcatggccgacaccgccgtcgccacaaccacggtctgctccatgtgcagtgacgtcggcttcaccaagaagctcttccgacgagggtgggacgcaagtccgatcgcgcttgcagaagggcgtctagttacacgagggcgacaggggaggccgtggcaaggaggaggcacacgaggccacgacgaggaggaggagcggggcggctagccaccgcaacggggatccatggtgcacgcaacagggcgtagcagacgggtggatttgggactgaaggcgagcccatggcgttggcggctaggggtttagggtttgggtgttcgtcgtggcacagccgcacaggtggtttacgtggaatgcttggagccttggactgcggactcagtcagtcactcacgctccgttggcgggaagcagggtttcatttcccgcgcttttgcccgttctcccgccaggttgctccgcctataggactccgctcctttgagctcccctcccctcgcatcgcatcgcatcgatcctcccatctgcgcacccgcaagcctattcgccgcacctcctcaggtgaccgggaagatgatgccgttgagccaaaccgacttctcgccgtcgcagttcacctcctcccagaatgccgccgccgactccaccacgccttccaagatgcgcggcgcgtccagcaccatgccgctcaccgtgaagcaggtcgtcgacgcgcagcagtctggcacgggcgagaagggcgctccgttcatcgtcaatggcgtcgagatggctaacgtaccgataatcctcttgttcgtcctttggtccgttgatatgcagatgttctcggcgttaattcatctgccgcggttcccttttcagattcgacttgtggggatggtcaatgccaaggtggagcggacgaccgatgtgaccttcacgctcgacgatggcaccggccgcctcgatttcatcagatgtaccttttctgtaggaaagtcaccatgcttttgtgcggatgtacattggttatcaaggaatggtatgtacattgcggtcattggaagcctcaagggactgcaagagaggaagcgtgctactgctttctcaatcaggcctataaccgatttcaatgaggttacgctgcatttcattcagtgtgttcggatgcatatagagaacactgaattaaaggctggcagtcctgcacgaatcaattcttctatgggagtgtcattctcaaatggattcagtgaatcaagcacaccgacatctttgaaatccagtcccgcaccggtgaccagcgggtcatccgatactgatctgcacacgcaggtcctgaatttttttaatgaaccagcgaacctcgagagtgagcatggggtgcacgttgatgaagtactcaagcggttcaaacttttgccgaagaagcagatcacggatgctattgattacaatatggactcggggcgtctttactcaacaattgatgaattccactacaaggcaacttaaccgatttgaaggtcagcctgctggaaatggcagaggactaagtatcacttgtactaaaccaaagtctggaaatgtcatgttgtgtcatgaaatgcatggttggtttatggaaacatttatatcttgtatcaactagttgatttgtatctcttgtgtcaacttaatgactgagccaacaaaaggaagatgtagaggcagacagacatttgtagattggctgatagctgattcgggtagctggtccaattgcaatctggggcccaataattcagatgcaaaagcagaaagatatttcactgtcgtttcttttgatgcaaaagaaattaaattataaggaaatgaagactgttccattatttcccattagtttatgcagtcatgatgtatttcatagttttaaatttaataaaagcgtgtacatttatccattt

SEQ ID NO: 133428 - DNA, 1392 bp, Zea Mays
ttctcccgccaggttgctccgcctataggactccgctcctttgagctcccctcccctcgcatcgcatcgcatcgatcctcccatctgcgcacccgcaagcctattcgccgcacctcctcaggtgaccgggaagatgatgccgttgagccaaaccgacttctcgccgtcgcagttcacctcctcccagaatgccgccgccgactccaccacgccttccaagatgcgcggcgcgtccagcaccatgccgctcaccgtgaagcaggtcgtcgacgcgcagcagtctggcacgggcgagaagggcgctccgttcatcgtcaatggcgtcgagatggctaacattcgacttgtggggatggtcaatgccaaggtggagcggacgaccgatgtgaccttcacgctcgacgatggcaccggccgcctcgatttcatcagatgggtgaatgatgcttcagattcttttgaaactgctgctattcagtaagtataaactataatgtatacattgtccctaaagcattccagtagtaccttttctgtaggaaagtcaccatgcttttgtgcggatgtacattggttatcaaggaatggtatgtacattgcggtcattggaagcctcaagggactgcaagagaggaagcgtgctactgctttctcaatcaggcctataaccgatttcaatgaggttacgctgcatttcattcagtgtgttcggatgcatatagagaacactgaattaaaggctggcagtcctgcacgaatcaattcttctatgggagtgtcattctcaaatggattcagtgaatcaagcacaccgacatctttgaaatccagtcccgcaccggtgaccagcgggtcatccgatactgatctgcacacgcaggtcctgaatttttttaatgaaccagcgaacctcgagagtgagcatggggtgcacgttgatgaagtactcaagcggttcaaacttttgccgaagaagcagatcacggatgctattgattacaatatggactcggggcgtctttactcaacaattgatgaattccactacaaggcaacttaaccgatttgaaggtcagcctgctggaaatggcagaggactaagtatcacttgtactaaaccaaagtctggaaatgtcatgttgtgtcatgaaatgcatggttggtttatggaaacatttatatcttgtatcaactagttgatttgtatctcttgtgtcaacttaatgactgagccaacaaaaggaagatgtagaggcagacagacatttgtagattggctgatagctgattcgggtagctggtccaattgcaatctggggcccaataattcagatgcaaaagcagaaagatatttcactgtcgtttcttttgatgcaaaagaaattaaattat

SEQ ID NO: 133429 - DNA, 1038 bp, Zea Mays
ttctcccgccaggttgctccgcctataggactccgctcctttgagctcccctcccctcgcatcgcatcgcatcgatcctcccatctgcgcacccgcaagcctattcgccgcacctcctcaggtgaccgggaagatgatgccgttgagccaaaccgacttctcgccgtcgcagttcacctcctcccagaatgccgccgccgactccaccacgccttccaagatgcgcggcgcgtccagcaccatgccgctcaccgtgaagcaggtcgtcgacgcgcagcagtctggcacgggcgagaagggcgctccgttcatcgtcaatggcgtcgagatggctaacattcgacttgtggggatggtcaatgccaaggtggagcggacgaccgatgtgaccttcacgctcgacgatggcaccggccgcctcgatttcatcagatgggtgaatgatgcttcagattcttttgaaactgctgctattcagtaagtataaactataatgtatacattgtccctaaagcattccagtagtaccttttctgtaggaaagtcaccatgcttttgtgcggatgtacattggttatcaaggaatggtatgtacattgcggtcattggaagcctcaagggactgcaagagaggaagcgtgctactgctttctcaatcaggcctataaccgatttcaatgaggttacgctgcatttcattcagtgtgttcggatgcatatagagaacactgaattaaaggctggcagtcctgcacgaatcaattcttctatgggagtgtcattctcaaatggattcagtgaatcaagcacaccgacatctttgaaatccagtcccgcaccggtgaccagcgggtcatccgatactgatctgcacacgcaggtcctgaatttttttaatgaaccagcgaacctcgagagtgagcatggggtgcacgttgatgaagtactcaagcggttcaaacttttgccgaagaagcagatcacgtatagctcctcacttcactttgactagcacacacagcaaaaaaaaaaaaaaga

SEQ ID NO: 133430 - DNA, 2290 bp, Zea Mays
tttattataatacgactagtgaagtatatttatgttacacgagtggtcattatctatgtgtattgattttgatcaccggctattcatattcatatattggagaatgttcgaatccatatgtgtattcactacaaaatatgaatattgatgtgaaatagactatctaatttgtattcgatcagttcattttcactggaaaggcagaaagcagagaaattccatacgttcgtactcgttggctagcatattatcctctaccacttgaaaacaacaattcgccaaaaaaaaaaacattcatagcacggcccatttttgcaaaaatggtggttgggccttatcagcatcacagctcagcccagtccagcgacagtgatgttagtttgtgttggcctcctgctgctcctcctcctgctgctccacggcgtcggcgtcggtggcgccgttccggcgagccctccgaatcctactcatcctagctagcgctgcctgccctgcttcactccctcccaccctcactggcgcctcaccatgatccatgtcgactttccctcctccaccccccagcgccgctaggagccccgtcgccagggtgcgcctcgaccacctggtcccgttcgacggcgccttcaccccggcctacgcgcgcgcagtcgaagccgtcgctgcttccctcacgcgccacggcgccgccgccgtcgacctccctgcagcggacgccgctgtcgtccggtgcgccctcgagtccgcgcgcgccttcttctgcgaccgctccggcctctacgtctaccgcgccgggagggctctggatgatggagagttgtcacctgcttgcatgtctgatgctttcagatgtttgggtaagacagcccgtgctgctctctgtgcaatagcacggaaccttcgcttacgttcagatgctttcagccatttgcttgatgacaacccattgcctcttgatgaggtttcagcttcagaattgatggtgtcattttctcatgggcacccccaaagcagccaggcacctatggtgggcctcaggccatcaatggctgaagttgatagaggttttgttacactggttgcttctgaccatccaggaattgaggtttgcaacccaaatggtcattggtacccagcggatgtgggctcaagccctgatgtcctgttgcttttgactggaagagccttgagtcatgttactgctggcctacgtctaaattctcagtacaggatcattaataatgaaaacagggcatcactcatgtttaggctcatgcctcgtgccaatgcaatattggactgctctccaatttcagctgctgggcattgcacaccacagatccaccggcccatatctgcaagtcagtttatggatgatttgcgtgctgaagagaatgtttaccatcacttagaagcaccgcctgaatcacagggaaactttgttaatgaaccatcgctcagaagtgtactgtcagaccctttgtctggggcttttcttgaagatgctatggttctcccatgtgggcactcgtttggtggcctcatgctgaagaaagttcttgaattggcaaggtgcagcatttgcaacggagatgttgatgaggcctccttatttcctaacctcgctctaagagcggtagctaccgtggtgaagatggaagacgataggaggctctttcacaatgcggcccttcgaaagcgcaggaaagaagtgactgagcatatggatgcccaaaggcgaaatggaagtagcaaggacagtattgagctggggctagaagctgaaagccctagagcgttcaagggggtgcagtacccgtttgtggtgggtgagagagtcctgatcatgggaaacaaaaggacgcctgataaattcgttgggaaggaggcagtggtgacatcacagtgcctgaatggctggtaccttgtgaaggcagttgatagcggagaaagcatacggctgcagtacaggtcgctgaggaaagcaggggagctacaagtgcaagcactcctgcagagtagacgatgattttttgcactagtgttgcttgtctcgtgttttgtttctgtcctatgcgatgaaaaggaaaaggaaaggatgcagcgtccttttgtacaaatttccattcagttttgccagccaagtcacgtagctgtaaaatgacagatgttgtgtggtgttctgtggcctttgtgcttgtgcactaagtcttgttaattgtcatacatgctcccttcgtaaaaaaaaaggagtcttaagtacaagattttttttctaaatattttgatt

SEQ ID NO: 133431 - DNA, 2266 bp, Zea Mays
tttattataatacgactagtgaagtatatttatgttacacgagtggtcattatctatgtgtattgattttgatcaccggctattcatattcatatattggagaatgttcgaatccatatgtgtattcactacaaaatatgaatattgatgtgaaatagactatctaatttgtattcgatcagttcattttcactggaaaggcagaaagcagagaaattccatacgttcgtactcgttggctagcatattatcctctaccacttgaaaacaacaattcgccaaaaaaaaaaacattcatagcacggcccatttttgcaaaaatggtggttgggccttatcagcatcacagctcagcccagtccagcgacagtgatgttagtttgtgttggcctcctgctgctcctcctcctgctgctccacggcgtcggcgtcggtggcgccgttccggcgagccctccgaatcctactcatcctagctagcgctgcctgccctgcttcactccctcccaccctcactggcgcctcaccatgatccatgtcgactttccctcctccaccccccagcgccgctaggagccccgtcgccagggtgcgcctcgaccacctggtcccgttcgacggcgccttcaccccggcctacgcgcgcgcagtcgaagccgtcgctgcttccctcacgcgccacggcgccgccgccgtcgacctccctgcagcggacgccgctgtcgtccggtgcgccctcgagtccgcgcgcgccttcttctgcgaccgctccggcctctacgtctaccgcgccgggagggctctggatgatggagagttgtcacctgcttgcatgtctgatgctttcagatgtttgggtaagacagcccgtgctgctctctgtgcaatagcacggaaccttcgcttacgttcagatgctttcagccatttgcttgatgacaacccattgcctcttgatgaggtttcagcttcagaattgatggtgtcattttctcatgggcacccccaaagcagccaggcacctatggtgggcctcaggccatcaatggctgaagttgatagaggttttgttacactggttgcttctgaccatccaggaattgaggtttgcaacccaaatggtcattggtacccagcggatgtgggctcaagccctgatgtcctgttgcttttgactggaagagccttgagtcatgttactgctggcctacgtctaaattctcagtacaggatcattaataatgaaaacagggcatcactcatgtttaggctcatgcctcgtgccaatgcaatattggactgctctccaatttcagctgctgggcattgcacaccacagatccaccggcccatatctgcaagtcagtttatggatgatttgcgtgctgaagagaatgtttaccatcacttagaagcaccgcctgaatcacagggaaactttgttaatgaaccatcgctcagaagtgtactgtcagaccctttgtctggggcttttcttgaagatgctatggttctcccatgtgggcactcgtttggtggcctcatgctgaagaaagttcttgaattggcaaggtgcagcatttgcaacggagatgttgatgaggcctccttatttcctaacctcgctctaagagcggtagctaccgtggtgaagatggaagacgataggaggctctttcacaatgcggcccttcgaaagcgcaggaaagaagtgactgagcatatggatgcccaaaggcgaaatggaagtagcaaggacagtattgagctggggctagaagctgaaagccctagagcgttcaagggggtgcagtacccgtttgtgggaaacaaaaggacgcctgataaattcgttgggaaggaggcagtggtgacatcacagtgcctgaatggctggtaccttgtgaaggcagttgatagcggagaaagcatacggctgcagtacaggtcgctgaggaaagcaggggagctacaagtgcaagcactcctgcagagtagacgatgattttttgcactagtgttgcttgtctcgtgttttgtttctgtcctatgcgatgaaaaggaaaaggaaaggatgcagcgtccttttgtacaaatttccattcagttttgccagccaagtcacgtagctgtaaaatgacagatgttgtgtggtgttctgtggcctttgtgcttgtgcactaagtcttgttaattgtcatacatgctcccttcgtaaaaaaaaaggagtcttaagtacaagattttttttctaaatattttgatt

SEQ ID NO: 133432 - DNA, 2249 bp, Zea Mays
tttattataatacgactagtgaagtatatttatgttacacgagtggtcattatctatgtgtattgattttgatcaccggctattcatattcatatattggagaatgttcgaatccatatgtgtattcactacaaaatatgaatattgatgtgaaatagactatctaatttgtattcgatcagttcattttcactggaaaggcagaaagcagagaaattccatacgttcgtactcgttggctagcatattatcctctaccacttgaaaacaacaattcgccaaaaaaaaaaacattcatagcacggcccatttttgcaaaaatggtggttgggccttatcagcatcacagctcagcccagtccagcgacagtgatgttagtttgtgttggcctcctgctgctcctcctcctgctgctccacggcgtcggcgtcggtggcgccgttccggcgagccctccgaatcctactcatcctagctagcgctgcctgccctgcttcactccctcccaccctcactggcgcctcaccatgatccatgtcgactttccctcctccaccccccagcgccgctaggagccccgtcgccagggtgcgcctcgaccacctggtcccgttcgacggcgccttcaccccggcctacgcgcgcgcagtcgaagccgtcgctgcttccctcacgcgccacggcgccgccgccgtcgacctccctgcagcggacgccgctgtcgtccggtgcgccctcgagtccgcgcgcgccttcttctgcgaccgctccggcctctacgtctaccgcgccgggagggctctggatgatggagagttgtcacctgcttgcatgtctgatgctttcagatgtttgggtaagacagcccgtgctgctctctgtgcaatagcacggaaccttcgcttacgttcagatgctttcagccatttgcttgatgacaacccattgcctcttgatgaggtttcagcttcagaattgatggtgtcattttctcatgggcacccccaaagcagccaggcacctatggtgggcctcaggccatcaatggctgaagttgatagaggttttgttacactggttgcttctgaccatccaggaattgaggtttgcaacccaaatggtcattggtacccagcggatgtgggctcaagccctgatgtcctgttgcttttgactggaagagccttgagtcatgttactgctggcctacgtctaaattctcagtacaggatcattaataatgaaaacagggcatcactcatgtttaggctcatgcctcgtgccaatgcaatattggactgctctccaatttcagctgctgggcattgcacaccacagatccaccggcccatatctgcaagtcagtttatggatgatttgcgtgctgaagagaatgtttaccatcacttagaagcaccgcctgaatcacagggaaactttgttaatgaaccatcgctcagaagtgtactgtcagaccctttgtctggggcttttcttgaagatgctatggttctcccatgtgggcactcgtttggtggcctcatgctgaagaaagttcttgaattgctctaagagcggtagctaccgtggtgaagatggaagacgataggaggctctttcacaatgcggcccttcgaaagcgcaggaaagaagtgactgagcatatggatgcccaaaggcgaaatggaagtagcaaggacagtattgagctggggctagaagctgaaagccctagagcgttcaagggggtgcagtacccgtttgtggtgggtgagagagtcctgatcatgggaaacaaaaggacgcctgataaattcgttgggaaggaggcagtggtgacatcacagtgcctgaatggctggtaagctgttgggattattattattatttttcccccttgggttagaagtttggcttagtggcagaagccgtccgggggctgcaggtaccttgtgaaggcagttgatagcggagaaagcatacggctgcagtacaggtcgctgaggaaagcaggggagctacaagtgcaagcactcctgcagagtagacgatgattttttgcactagtgttgcttgtctcgtgttttgtttctgtcctatgcgatgaaaaggaaaaggaaaggatgcagcgtccttttgtacaaatttccattcagttttgccagccaagtcacgtagctgtaaaatgacagatgttgtgtggtgttctgtggcctttgtgcttgtgcactaagtcttgttaattgtc

SEQ ID NO: 133433 - DNA, 1887 bp, Zea Mays
aaacccttcctctcccgttcttccttttttctttctttccacctcgcgccccgcctcgcctctcccaccatggcctccgccgccgccgccctctaccggagcccctccttgctgagccgccgccacctcctcatccgcctcctctccacgcagacccagctcgtcaccccaccgacgcccaccaccccggccgacctgtcccgcctcaagtcctccatccgcgacgccgccaccaccccggacgcgcttgccaccctgttcctctcgggcctcccgcacccggccttcctcgccgaccgtccgctcttcgcgctctccgtgcaccgcctcgcctccgccggccgccgcgacctcgtcgcctccgtcctctcctcctccctcaccgccctccccagcccacacccgtccgagggattcctcctacgcctcatctccctctactcggccgcaggtatgcccgaccactccctcgccgtcttccgcctcgtcaagcccgcctccgaccgcgccctctccgcgctcctatccgcctaccacgacaaccgcctttacgaccgcaccgtccgggccttcaacaccctccccgccgagctcggtatcaagccgggactcgtctcccacaacgtcctcctcaaggccctcgtcgccagcggggacgtcgccgcagcccacaccttattcgacgaaatgcctgacaccgctggcgtccaaccggacatcgtctcctgcaacgagatcctcaagggctacctcaacgccggcgacgccgacgcctttgatcggctagtcaaggagatcgctggtccgaaaaggcgcctgaagcctaatgtcgggacctacaacctccggatggccctgctgtgctccaaaatgaggagctttgaagctgaagaactgttggatgtcatgggggcaaacggcgtcccgcccaaccgcacgagcttcaacacggtcatcaaggggctctgcaacgagggggaggtgggcgctgccatggctctcttcaagaggatgccggaggtgcccaggcagcacggcaaaggggtctcccccaactttgagacctacattatgctgctcgaggctcttgtcaagaagaatttgtttgatcctgcgctggagatctgcaaggagtgcctgcgcaacaagtgggcgccgccattccaagctgttaaaggtttggttcagggtttgctcaagagcaggaaggccaagcacgcaagggaggttttcatggccatgagaaaggctgtcaagggtgacgccaagcaggagtggatcaaggttgaggctcagttcccgatgttgcttgctgacaagaaagcctaaccaccaggatcattttgcagcctacatctgttattgctcaaaatggtttgttttagatgagctttgcatttttttaagttaattatgaaatgggtgactgttgatggtttaccattcactcatgtatgcttagttacttatgacacaaaatgcttctcatccgggtccttttatattctaagttccatgaactcggaatgcacactgcagatcttcatgttaccaagatagggcaaggagcaactatttcctcgactttttttttttttgcaaagataaaataagctaattcttatggttaacatttcctttttgtatgtgtgaccggatgttgttgtgtggttacatttcacaacatgggtatgctggcattttgtgttttgaagtgctattatgtaatttgctgtaacccgtttcacatcacctggctgtgatgctgtattatgtatgttaccttgattgatgagctgaatggagtggcttcaccgcttcagcaggttacgctgtcctcagtgtggagtttgaaataggagatatgatggataagttgatggagat

SEQ ID NO: 133434 - DNA, 1121 bp, Zea Mays
ggttggtttctttctctcctctctcctctcctctcctctccccgtggccacaccacagccgccggaagctcctcctcctcctcctccttctccatgagagagatctagcaaagcatagcctccttcctgctggcgggatctccttttgattcgtaacttataacgaaagaggaggaggcacagcaccttgtcaaatgatgaactctcagaagctgcagctgcccgttcaggatctgatgagtctgagagggagatcattcatcatcagcaaggtgatgatgcaccagtgcactgcagctgcttcgtcgtcgtcttcacctgctcctgctgctagaggcctgcaggttgctgcccatcccagttccagcaggaggcggcgtcctcgtggcctcgttgccgcggccggcagtgacgacgacgaatgcgcttcagctggtggtgagtccgagtcgtcgtcgtcgggcgggaaagacgatggcggcggcggcttgtcccgagaggatctggaacgcctggtcgggagtgacgaagatgccaagttcaatgggttggatcttgcaaacctcatcaggaagaagtacggtagatcgtacgatgtgacgctgataaagaaagagttcatggggaggaatctgctggccatgaatgtgatgtggaagtacagggagcaaagatcgttcccgctgagcgaggaggagtacctgctgcggctggacgatgtcgccaacacgctcaagtgctggggagccgtggcgcacgtgcgcaacacgctggagaagctcaaggagaggccgcgcatcggcaaggccgtcagcatcttcatcgacatggaccagaccggaggccgctccaacgaatggatttacaagtagcttcccactccatcgatcatgtatatgcatccatcgcccccatgaacaaacacattcatcaggtgtatggagaatgaatgtgggtaccaatttcatctccaacaatcaagcacatcgcaaagatcataccatcacatgatcttattgattcttagatcgcacctaagcatgtctcttgatattctcacatatgacaccatgcatgtatacaacgagctccttcatcaatactagttaagtattgcaata

SEQ ID NO: 133435 - DNA, 469 bp, Zea Mays
ggcagaggacagtttagttggtgctggtgctggtggaggaagaagcagcgcagcaggtggcagggatgggtcgcggcggcgggatggggaacccagtcaacgtgggcatcgcggtgcaggcggactgggagaaccgcgagttcatctccaacatctccctcaacgtccgacgcctcttcgacttcctcctcagattcgaagctacgacgaagagcaagctggcaagtttgaacgagaagctggacatcctagagcggaagctggaggtgcttgaagtccaagtgggcagcgcgacgaccaacccttccgtcttcaactaggaatcgcgggtttatatgtataaataaatagataaatgtaggtatgaatgttgcttgtaccaacgaattctggtcgctatcaatcatgtaatgtaatggattttgttattattattgtggtatgtgtaaagatgtgcagaattgaaaag

SEQ ID NO: 133436 - DNA, 4190 bp, Zea Mays
caagcaaagatggcccacgcgcggccacacccacgtcagcccatccgattcctcgccgccgccgccatgcttctcctttcctccgccatcttcaccaccgcacgcctcccactcgccgtctccgctcgcctcccaaaccctaccaacaccacccgcctcatcttcgccggcctacctgcctcctccccggtccgcgccttctgccccagggcgcgcccctccccctccacttgcgccgccttctcctccaccatggccgcctccgacaaccccctcctcgtcgccgacttcgacttcccgcccttcgaccgcgtcgagcccagccacgtccgccccggcatccacgaactgctaacacgactcgagggcgagcttgaagagctcgagaagggcatcgagcccacgtgggcgaagctggtcgagccgctagaacgcatcaccgacaggctcgaggtgatctggggcatggtcgatcacctcaagtccgtcaaggactccgctgatctccgcgccgccgtagaggaagtgcagcccgtaaaagtcagtttccaactaaggctaggacagagcaagcctatctatgaagctttcaaggccatcaggaactcttctaattgggacagtctcagcgatgctcgcaagcgtatagttgaagctcaaataaaggaagctgttctcagtggagttgcacttgaggatgaacaaaggaagaaatttaaccaaatcgaacaagagcttgaaaaactgacacaaaagtttagtgaaaatgtgctggatgccacaaagaaattcgagaagttaattactgataagaaagaaattgagggtttacctgctacagcccttggtttagcagcgcagactgctgtgtcaaagggccatgaaaatgctacagctgaaaatggaccttgggttatcacgttggatgcaccaagctatattcctgttatgcaacatgctcgaaacagagagctccgggaagaagtttatcgtgcttatctgacccgcgcctcaagcagtgaacttgataacaccaatatcatctgccaaattctaaagttaaggctagagaaggctaaacttcttggctacaagaactatgctgaggtaagcatggctcagaaaatggcaactgttgagcgagtagaagagcttctcgagaagctgcgtgctgcttcctgggatcatgctgtcaaagatatggaagatctgaaagtctttgcgaaagattctggttctcctgaagctaatgatttgactcactgggaccttaccttctggagtgaacgactgagagagtctaaatatgatatcaatgaggaagagctgcgcccttattttgcactacccaaggttatggatggcctcttcactctggcacataagctttttggagttactgttgaacctgcagatgggctggctccgatctggcacagtgatgtcaaattttattgtgtcaaagactcttccagtagccctgttgcttacttttacttcgatccttattcaagaccatctgaaaagcgtggaggggcttggatgaatgtagtcttttctcgaagtcgcgtgctagctcgcaatggtttggctgctaggctgcctgttgcccatatagtgtgcaatcagactccaccagttggcgagaagcccagtctcatgaccttccgtgaggttgaaactgtgttccatgaatttgggcacgcccttcagcacatgcttactaaacaagatgaaggctttgttgctggcattcgtggagttgaatgggatgctgtagagttaccctcccagttcatggagaactggtgctatcacaagaatactcttttgagcattgcaaaacattatgaaaccggtgaaactcttccagaggaaatttatgcgaagcttgtagctgcaaagaatttccgtgctggcaccttgagcctgcgtcagatacgatttgccagtgtagatatggagcttcatacaagttatgaccccaatggctcagtgtccatatatgatgtggaccaaagagttgcagaacggacacaagttcttgctcctctgccggaggacagattcctgtgcagctttagccatatttttgcaggtggctatgctgctggatactacagttacaagtgggctgaagtactgtcagctgatgcattctcagcttttgaagacgctggtttggatgatgagaaggcaatcgaggaaactggcagacgattcagagacactgttcttgcgcttggaggtggaaagtctccgcttgaggtgttcgtttcattccgaggacgggagccttcgcctgaaccacttcttagacaaaacggcttgcttcctgttgctgcctagtgccccaaagatttctctgttatttatgcttaaacagggaccattttcatccggtcaattatttgatgaagatagacatttcacccttgtttgtttaccctcctctagattattaaataagttagaagacaaacaaacaacatatattattaatgtatgtgttttttatatgtgtctagattcatcgtctgctatttgaatatagacataaaaatgaaatgaataccagttttttagaacggaatgataggtggtgcttatataatctataagcttgattgtaaacaaagagggcctaagctgaggtagtcatggtccaactgccggagctgcccgtggaggtctctactggctgacatgatctctggcatcaggggatgcgagcggtcgccggcaacaaactcgcagaccacgccgcccacctctagcatgctgcacccgggcaccttggccaccctcctctcctccatgtcccgccgcaccttgagcacctcctcccacttgccccacccggcgtacatgttggacagctgcacgtgcaccccgctgtggtccagccccagctccgccagccagcgtaccacctgctcgccggcctccacgtcgccgtgcgccgcgcaggcgttcagcaacgcgcccagcacgtacgagtcgggcctcatgggcatcgaacgcacggcctccaaggcgtccgccagctgtccggcgcggcccaggacgtccaccaggcacccgtagtgctccacgccgggctccatgccgtgcaccgcccccatgctgcggaacacctccttggcgcggccgacgaggcccgcgcggccgcaggcggtgagcacgcagatgaaggtcacctcgttggggcgcaccccttccaccagcatctgcccgaacaggtcgatcgcctccccgcagcggccgtggtccgagagccccgagatcatggccgtgtaggcgaacacgtcccgctgcccccgcggtgccgccgcgaacacctgcctcgccgtttccaggctcccgcacttggcgtacatgtccaccagcgccgtcgccactacgccgtccatcgccacgccgtggccgccgccgccgacgagcaaggcgtgcacccacctgccctggtccagcgccccgagcgccccgcaggcggtcagcaccccgaccaccgccgccctgttggggcggacgcacgacctgagcatgtcctcgaacagccgcacggcgtcgccgaagctgcccgcggccacgtaggcgctcagcatggcgctccaggcgacatcgttcctgcggggcattccgtcgaacagggcgcgcgcctcatccacgtgcccggccttggcgcaggccgtgaggagcgacgtccaagagcacacgtcggccgcgcgggaggcgacggcgcctccgaagaggcggcgggcggctggcaggacgccgtgggtggcgtaggcgtggatgaggccgttggcgacgtaggcgtgggcgtcccaggccaggacgacggcgagggcgtggagacagggcacgatggcgtgggagccgaatggggactccggttccagatacggtggcgctgacgagtctgcggcggctttaaggaggaaggagaaggtgtagttgttcggccggaagtcggggatgatgcggcggaggcgcgggaacaggcggagggcgccgagcgggtgcgctgggagcagcgagcggagtagctggttggggaggaagcggtcggcgaggaggagcgtggaggagcggagcaggtgcccgtccacctgccggagctgagcggcgctcagcgacggccggcacagcagctgcagcgccgccgccgtggctattgattgcat

SEQ ID NO: 133437 - DNA, 583 bp, Zea Mays
agatccattatggagtggttatattattttctgtgtgatcagatgggttaaagaaaagatattttctagtatggaatgtataaatgtaattatattcctatggtggtacgtctttctaaccttgctattacattttcattatggctttgtgtttacccaaagttccaaacctttcaggtactgcttcgctttcaggtggatttgtcttgtaaatggtatgtggatctgtagcttccagaggcaatgagccttgcaggcagtttgtagtataaaaaagtccaattatgtccgctgttggttcgacccagcgtgtgccgaggatttctaatgccgagcataagtatggatttctactgccgagcataagtatttgaaatcaagaacctgcattcattcaatcataatgtgtttcctatcaagcataagcgtgtgtgtgttgtttgatatttgctttcttcctctccagattaaactgttttgttgaagattcaatcatcctctaactaattaactaatttaaatatagcatgtataattacttgttcatgctttcccaatgctggatagggcgcccctagtaata

SEQ ID NO: 133438 - DNA, 151 bp, Zea Mays
gcattggttggtgctatttcaattggtttatttgtgcctgagttattgtacccattaataaattgatgattattttgacattggtgataagttacagtaaactaaccaaaacagaaacaactgatttccccctaatgtacacagcttttca

SEQ ID NO: 133439 - DNA, 584 bp, Zea Mays
gaatcccacgccaatgcggagatttcctctccatctccgttcccctggcaaccatctccaccacaccgtcggcacgcccgcggctaggatgtcggacgcgaagctaggcaccaccacaccaggctgccggagtcgacctgattttggtgaggaccactcgcatcgattggtttccttacgcaaagcagcaaccagccggcggcgtcggatgtcgtgggcgccacagagcaccgacgaacaactacactagcctttcgccccaaggttgctatcaccaaaactcatatgttggttcgttctgacctccaagcttggtgccgagaacaccaaacgaatcgtgtcactagcatcgtcctccttcgatttggtagtccgccctggaccctagtcgtttaaggtgcaagaatcgtcatccttcccctttgaatggttgctagcttctaagaaacttccatgtatatcataccttttttggttagatctgctcatggttcatttgctgacggtctctcctatttgtatgtggatctgtttagttgtagctaatacattgaagatattttgcaacaatctaataagaaaaa

SEQ ID NO: 133440 - DNA, 1079 bp, Zea Mays
atctcgggcgctactgatggaatatggatgggcaggcgaaagagcaggaggagcagaagaagcgcggtttgctgacgtctccatcccatcatgtattatcctcagcctaccgtctccttggcggcggcggttgccctcctccgcccctcactccgccgccactctcaaagggcgtcatcccttctccgctcctccacgccgcctccatgggttagtgcgaggaggaggacggccgtctccgacgacttcttcaccgtcgagttggacgctactggagtggaaccggaaccggattccatcgacgacgggctcccctctccatgggagggagctgtcgtctaccgccgcgacgctgccgtccagcacctcgagtacgccagcacgctggagcgcctcggcctaggggacctctcctcccccgactcccgcgcgcgcgccgctgacctgggcctggctggagggaccctggacagcactggcgcgcagcctcggacccccgtgctcgtctccgtcgacgtgaccaggcgccgcggccgcctgcgcctggacggcatcgtgcgcaccgtcatcaccctcggctgcttcaggtgtgctgagccagctcctcaaggtatatttgccaatttctccctgctgttgacagaagacccagtagaggaggaaccagacctcggcacgatttttcaagaggacgacgacaaaggtggtgcttcgctagcctgcgccatggatggagatcaagatatcgactgggatgaccggctgcatttcccagcagctgacaaggaaatcgatatatccaagcacatccgggacatgattcatctggagatcaccttggatgcagtgtgcaaccccaactgcaagggtctatgccttacctgcggcgcaaacctcaacaccaccagcagctgcacatgcaagcccaggaacgtccaaggactttctcctctcaaaggggttttcaagtgatgatgcggataccaaagtttgtacaaccagcccaacttcatgtcatgctgtgagcctgtgacttctagattcatataatcgcaaatatgcattgaaacttcacattt

SEQ ID NO: 133441 - DNA, 675 bp, Zea Mays
atctcgggcgctactgatggaatatggatgggcaggcgaaagagcaggaggagcagaagaagcgcggtttgctgacgtctccatcccatcatgtattatcctcagcctaccgtctccttggcggcggcggttgccctcctccgcccctcactccgccgccactctcaaagggcgtcatcccttctccgctcctccacgccgcctccatgggttagtgcgaggaggaggacggccgtctccgacgacttcttcaccgtcgagttggacgctactggagtggaaccggaaccggattccatcgacgacgggctcccctctccatgggagggagctgtcgtctaccgccgcgacgctgccgtccagcacctcgagtacgccagcacgctggagcgcctcggcctaggggacctctcctcccccgactcccgcgcgcgcgccgctgacctgggcctggctggagggaccctggacagcactggcgcgcagcctcggacccccgtgctcgtctccgtcgacgtgaccaggcgccgcggccgcctgcgcctggacggcatcgtgcgcaccgtcatcaccctcggctgcttcaggtgatctgtctatagttgatgaatgccacccaaattcctgtcatgtgatcagcaattttttaaggctgtctttcaggtgtgctgagcc

SEQ ID NO: 133442 - DNA, 1914 bp, Zea Mays
ggcagaccgtgttctcccgctccgatccgccagagcaaaccctagccaatggacgccgccgccgttcacaagcgcaagcgacctgaagaggccgacccaagcgcgggggagctcgacctctccgccgccgacgccgtcgaggtactcgacctccgggccgccaaacgcctccttctggccttcgagcgccgcctccgtgacaacctcgaggcgcgcatgaaataccccgacgaccctgcccgctttgcagactccgagatcgcgctccacgccgagaccgaccgcctccgcctccttgccggcgcgcctgagctcttccccgacctcgtccccatcggcctcgcctcttccctcgcctcccttctcacccacgacaatgtcgatctcgcagctgccgccgcatcactcctcgccgacctcaccgactccgaggacccctccgacctcgccgctgtccaggccctcgccgacgcgctcgtcgacgccaacgcgctcgacctcctcgtccacaatctctcccgcttttccgagaccgaccccgatgaggccgaggccgtgcacaacaccctcgccgtcctcgagaacctcctcgacctccgccccaacctcgccgacaaagtctgcggcggaaccaagcttctacgatggctcctctcgcgcgtcaaggcacgcgagttcgacgccaacaagcagtacgcctccgaaatcctcgcgatactcctgcagaacagccccgccaatcagaagcgcctcggccagatcaacggagtcgacgccctgcttcaggcggttgccatgtacaaatcaagggacccaaagacgtctgacgaggaggagatgctcgagaacctcttcgactgtctctgctgcgtgctcatgcccctggagaacaaggagaggtttgtcaaggctgaaggtgttgagctcatgatcatcattatgaaacagaagaagctggcatacagctctgcgacccgcaccctcgattttgccatgaccaagttcccgcctgcgtgcgaacgatttgttgatgtgcttggccttaagactgcttttgcggccttcatgggcaagattcccgtgaacaagaaaaacaagaaagagagttaccaggaggagctagaagagcgtatcatttcacttattgcttcattgtttggtggtattaccaaaggctcacgaaggatgaggctactaggaaaatttgttgagaatgaatgtgaaaagatagaccgccttatggagttatacacaaggtattcagacagagtgaaagaagagactgaaagacttgatagtcttgatttggaagatttagagatggacgatgatgagcggtataaccgaaaactcgaagctgggctttacacactgcagttaattgcgcttattctgggacacatctggcactctgggaattcccagatgagagcaagagtagaattacttcttaagcagaacaaacttacaaagcaagatgtgaagagcatacttgaggagtaccatgacaacattggagatttggatggacctgaagagaaggaaagagcacaagtgcggaccaaggaaattattgacgcgttgtgatgtgcatgggcctagggtagttggttgtggagcaagacagaggctggtagatattttgagtatgttgagtgaatttatatccgcagtcagcaaagctgtgtaacttactaggttgtagatgatggatgtcagaaacaagggtgcattaattagttctgttgtattctatttttgtgtaaacttgctagttactatttgtcgttatatgctttgggaaggaatttgtaacacctcaaaaacttaacttgggaatttagtaaaattctccaaagaaaataagagaatgaaatatgaaaatagaaaataaaatagaaaaggaagtaagaa

SEQ ID NO: 133443 - DNA, 1858 bp, Zea Mays
ggcagaccgtgttctcccgctccgatccgccagagcaaaccctagccaatggacgccgccgccgttcacaagcgcaagcgacctgaagaggccgacccaagcgcgggggagctcgacctctccgccgccgacgccgtcgaggtactcgacctccgggccgccaaacgcctccttctggccttcgagcgccgcctccgtgacaacctcgaggcgcgcatgaaataccccgacgaccctgcccgctttgcagactccgagatcgcgctccacgccgagaccgaccgcctccgcctccttgccggcgcgcctgagctcttccccgacctcgtccccatcggcctcgcctcttccctcgcctcccttctcacccacgacaatgtcgatctcgcagctgccgccgcatcactcctcgccgacctcaccgactccgaggacccctccgacctcgccgctgtccaggccctcgccgacgcgctcgtcgacgccaacgcgctcgacctcctcgtccacaatctctcccgcttttccgagaccgaccccgatgaggccgaggccgtgcacaacaccctcgccgtcctcgagaacctcctcgacctccgccccaacctcgccgacaaagtctgcggcggaaccaagcttctacgatggctcctctcgcgcgtcaaggcacgcgagttcgacgccaacaagcagtacgcctccgaaatcctcgcgatactcctgcagaacagccccgccaatcagaagcgcctcggccagatcaacggagtcgacgccctgcttcaggcggttgccatgtacaaatcaagggacccaaagacgtctgacgaggaggagatgctcgagaacctcttcgactgtctctgctgcgtgctcatgcccctggagaacaaggagaggtttgtcaaggctgaaggtgttgagctcatgatcatcattatgaaacagaagaagctggcatacagctctgcgacccgcaccctcgattttgccatgaccaagttcccgcctgcgtgcgaacgatttgttgatgtgcttggccttaagactgcttttgcggccttcatgggcaagattcccgtgaacaagaaaaacaagaaagagagttaccaggaggagctagaagagcgtatcatttcacttattgcttcattgtttggctcacgaaggatgaggctactaggaaaatttgttgagaatgaatgtgaaaagatagaccgccttatggagttatacacaaggtattcagacagagtgaaagaagagactgaaagacttgatagtcttgatttggaagatttagagatggacgatgatgagcggtataaccgaaaactcgaagctgggctttacacactgcagttaattgcgcttattctgggacacatctggcactctgggaattcccagatgagagcaagagtagaattacttcttaagcagaacaaacttacaaagcaagatgtgaagagcatacttgaggagtaccatgacaacattggagatttggatggacctgaagagaaggaaagagcacaagtgcggaccaaggaaattattgacgcgttgtgatgtgcatgggcctagggtagttggttgtggagcaagacagaggctggtagatattttgagtatgttgagtgaatttatatccgcagtcagcaaagctgtgtaacttactaggttgtagatgatggatgtcagaaacaagggtgcattaattagttctgttgtattctatttttgtgtaaacttgctagttactatttgtcgttatatgctttgggaaggaatttgtaacacctcaaaaacttaacttgggaatttagtaaaattctccaaaggtttggagttagaa

SEQ ID NO: 133444 - DNA, 208 bp, Zea Mays
ttttgcttttcccctgtatattttccattcagtgtcagtcgtatggtggtgttgggtctctttagacaaactggggactgttgcttatcctaaaaattcgattgtattgtgtggcatgaaatgatcgatgtcaaagaatattttgaacatgctgccacctaattatacttttcatatgaacatcataaggaagaagtgatgtttgcat

SEQ ID NO: 133445 - DNA, 678 bp, Zea Mays
ggtgtggagccgaaacctccaaaacgccaacggttatctcctcgccgatcggcggaagaatctcgattcgattcaaaatccacgtatccaaatcgcaagaccacacccacacctccctcctcccctccacccagagcgatcccgcccgcccgcatcggatcacatcgcgccggagcctgacgccgtgccgtcaacgaatccatgggacccacgccgccgcacacggacgacactagggttgcgcagctcccgctccccggcggcgccgaagattacgtgcgcgactccatccacgcctccctgggcctccccgtctccgatcgctccctccgcctcaagctcctcgcctccgaggagcagcgccaccgcctccaggaccacgtcttctcgctcgaggaagacctccgcgcagcccagcgccgcatcgacctcctcaaggccgaggccgccatgaacgccgccggcctccgccgctgcgtcgaggaaaaggaagccgtggccgccgcatacgccgacctctccgacaagagcagcaaggagtgtcggctctacgagcgggacctcgagcgcgccatggagtcctgtgacgacctcgccagggagaacgacgacctccgcgcacgcctaaaccagaacacagatgtcagttgcctccttttttttcaaacggattcctaa

SEQ ID NO: 133446 - DNA, 727 bp, Zea Mays
aacaacgcctggggtgtggagccgaaacctccaaaacgccaacggttatctcctcgccgatcggcggaagaatctcgattcgattcaaaatccacgtatccaaatcgcaagaccacacccacacctccctcctcccctccacccagagcgatcccgcccgcccgcatcggatcacatcgcgccggagcctgacgccgtgccgtcaacgaatccatgggacccacgccgccgcacacggacgacactagggttgcgcagctcccgctccccggcggcgccgaagattacgtgcgcgactccatccacgcctccctgggcctccccgtctccgatcgctccctccgcctcaagctcctcgcctccgaggagcagcgccaccgcctccaggaccacgtcttctcgctcgaggaagacctccgcgcagcccagcgccgcatcgacctcctcaaggtacacaagtcagaagggacctctcccccatttcattcttgattcgtcacccatttcctcttcttcctcaggccgaggccgccatgaacgccgccggcctccgccgctgcgtcgaggaaaaggaagccgtggccgccgcatacgccgacctctccgacaagagcagcaaggagtgtcggctctacgagcgggacctcgagcgcgccatggagtcctgtgacgacctcgccagggagaacgacgacctccgcgcacgcctaaaccagaacacagatgt

SEQ ID NO: 133447 - DNA, 101 bp, Zea Mays
agctggaggaacttaacatggagggacggcaggcgaggcacacgatctcaacaacagtaggatgtacccccatctccgcgctaccattgttctacacgctc

SEQ ID NO: 133448 - DNA, 235 bp, Zea Mays
aacaaactacctcaaatttattcataattatccatggcatgatgaagaaacctgcccaaattgaaattacagcccacgaaacagaattgttctagcgatgtcctccatctcacttattccaaagccaattaaccacctaaagatgcaagaaagaagagaaaacatacaaatccatggggttccccttcattcttccttgtttggtgatacaattgcagtaccactttccgaatct

SEQ ID NO: 133449 - DNA, 1165 bp, Zea Mays
cagcccagcacacagcccataacgatggcccccggcctattcgggctcgcctaccatctctcctccggtccttcctatcataccggcgggcggcgcggggcagctaatcggcaatccggcttcgcctcgtcgcagtccaatccgcactcaccgccgccctcccgcccctcacctgcccgcggcagtgtcggagtaaaccctaccggacctatcgtcacgcgactgcgggagttgcttgcttcttctgccgctctctcgctccgtcccttccgcccatggagacctcgctgcgcttgcgcagtggcggcggcctccgcatccacgccaaggagaagctgcccctcggccacagctcgctgctgcaggctcatgcggagctcgacctccacacaagccccgccggagttactaccccgagttatctcgctctctttgtcaggcacttctactcgcagctatcagccaatctcggagctggcgtccagttgcacaacggcgatgacctcgcctacagttttcgcgccaagaaggccgtcctgttcaaaccagataatgggttcctaggtctgaaccttaaagggcgcctacttaccgataaagagttgaagccgacgaagacaactggatccgttgaactggcatggaccatacttgacttgaaacagggccaagacgtaaggctcaaagttggttacgaattgtgtgacaagctacactactccagctgaacaccgtagacaagttgtggaccctggattttgcaatacggtgtgccacacccccactaaaagtttcacgtgcactttgctaaaaatcctttcagcaatttggcaaacaattgagaatttgtcctgtaatttggtgtacacgtactaattaacataaataggtcttaaattcaacaatttagtacacaatgtatgaataatcaacaaatgatcccctaattactatttcctatatctaccagctacattaatcaattgaactaatttgaggataaattgatctggttagtaactactgccagagtaagtctgcaacatacattggacctggccttggggagttcagacttggctctgcagtactgctgcctgtcccctgtcgcaatgtgctgtgctgctgtgtggaactggaaacaaaaagagaggtgaggtactga

SEQ ID NO: 133450 - DNA, 288 bp, Zea Mays
atggatctggaacacaatatccatactcctttatctccttatgctgctcagaaatatcaaacttttcatgagcttgtcaataaccttcagaattctagagctgataaagacaaatggacccatccgtggggcaactctactttcagctcatccaagttctatagccttacttttcaatcaattcagccccctgctgcctttaactggatttggcagtctaaggctgtacagactgctgaagttatgtgggtttccattggaatcatgagcttgacttcttctcgataa

SEQ ID NO: 133451 - DNA, 109 bp, Zea Mays
caaaaatgatggagcagcaaaaaagggtactgctattgtctgggaggcaacaagttggcttcaactatttttaaattgtcataaagtacatctaatcttattgttgatt

SEQ ID NO: 133452 - DNA, 1485 bp, Zea Mays
atggctcgttcgccgccgccttcttcgtcggccggcggcgcgcagtacgcgcagcagttcctcaacacggcgctctcccagcggggcccgtccgcgctgccgtacgccgaggacgtcaagtggctcatccgcaaccacctggtagcgctggccgaggccttcccctccctccatcccaaggccgccctcttcacccacaacgacggccgcgccgctcacctcctccaggccgacggcaccatccccatccaccacgccggtgcctcctacaacctccccgccgtcatctggctgcccgagccctacccgcgctccccgccgctcgtcttcctctccccgacccgagacatggtcatcaagccccaccaccgcctcgtcgacagctccggcctcgtcgccaacgcgccctacctccgctcctgggtcttcccctcctccaacctcgtcgacctcgtccgatccctctcgcacctattcggcctcgacccgcccctcttcaccaggaaccctcctgccgccgcacaggctccgccaccgaatccctcgccgacccagcccccaccacggctcgccgcctccccttccccctcctacagcaggcttgggggtgccgccggcttcccggcgtcgccccagctcgccccccgcccgccccccacggaggaccccgccgaggtcttcaagcgcaacgccgtcgccaagctcgtcgacatggcctacgccgacgccgccgcactgcgcaccgcacgggaggctgaggtcgacgccctcttcgccgtccaggccgagctgcggcacaggggaggcatcgtcgctcaaggtgtgcgcaacatgggggaggagatggaagcgctcgagcggcgcctgcaggacgtcatgatggccaccgatgttgtggaggactgggtcaggcagaacaacaggagaggcagcaaccaagccaccgaggacgacgaagccatcgagccggcggatgtgctgtccaggcagatgatccagtgcacagcggcagatttggcgctcgaggacaccatctacgcgctcgacaaggcaatccaggaaggatccgtgccctttgacggctacctcaggagcgtgcgtgcactgtcccgtgagcagtttttccaccgcgccctatctgccaaggtgcatagcgcgcagcagcaggctaaggttgctagcatggcagcacgggcgccaccgcagtacgcatcatagggatcatgggaaggggaagatgattcaatgctgcctgtcacatttacttagtaagactggatggatatgaaaggacttgtctctataatagcttgagtttgaatgtatgcatatatggcttttgagcttgcagttcacattgcatgcttcatttctgtctattacaataacttgacaattccatcttcacagaaacatttggatgtcttgttcttctttggagacaaacccacttctatctgtttatgatatgaaatttcatgggcc

SEQ ID NO: 133453 - DNA, 1781 bp, Zea Mays
ttgcaacacacgggtacgcacctaataaaaagataatactacaattactcgggcgcaaatgtgtttgtttaaaaataaaggaaaacaacaccatcccacccaaggccagcgcatgggcagaaaggaaggagaaggaaaaaaaacccgccctcccctcccgcaccgcaccccagcaaggcaggcaggcaggccagccagaatcacacgacacacgcatacagttttagtttgttcaactacacacgcaaatcggaatcgaaaccctatctcggatccgatggctcgttcgccgccgccttcttcgtcggccggcggcgcgcagtacgcgcagcagttcctcaacacggcgctctcccagcggggcccgtccgcgctgccgtacgccgaggacgtcaagtggctcatccgcaaccacctggtagcgctggccgaggccttcccctccctccatcccaaggccgccctcttcacccacaacgacggccgcgccgctcacctcctccaggccgacggcaccatccccatccaccacgccggtgcctcctacaacctccccgccgtcatctggctgcccgagccctacccgcgctccccgccgctcgtcttcctctccccgacccgagacatggtcatcaagccccaccaccgcctcgtcgacagctccggcctcgtcgccaacgcgccctacctccgctcctgggtcttcccctcctccaacctcgtcgacctcgtccgatccctctcgcacctattcggcctcgacccgcccctcttcaccaggaaccctcctgccgccgcacaggctccgccaccgaatccctcgccgacccagcccccaccacggctcgccgcctccccttccccctcctacagcaggcttgggggtgccgccggcttcccggcgtcgccccagctcgccccccgcccgccccccacggaggaccccgccgaggtcttcaagcgcaacgccgtcgccaagctcgtcgacatggcctacgccgacgccgccgcactgcgcaccgcacgggaggctgaggtcgacgccctcttcgccgtccaggccgagctgcggcacaggggaggcatcgtcgctcaaggtgtgcgcaacatgggggaggagatggaagcgctcgagcggcgcctgcaggacgtcatgatggccaccgatgttgtggaggactgggtcaggcagaacaacaggagaggcagcaaccaagccaccgaggacgacgaagccatcgagccggcggatgtgctgtccaggcagatgatccagtgcacagcggcagatttggcgctcgaggacaccatctacgcgctcgacaaggcaatccaggaaggatccgtgccctttgacggctacctcaggagcgtgcgtgcactgtcccgtgagcagtttttccaccgcgccctatctgccaaggtgcatagcgcgcagcagcaggctaaggttgctagcatggcagcacgggcgccaccgcagtacgcatcatagggatcatggtcagtatgcttgcttggtttgctatttcctccgattttgtctgtcttacctgtctgtgtaaagtttctaccccatgcttgtttactgcttataccagggaaggggaagatgattcaatgctgcctgtcacatttacttagtaagactggatggatatgaaaggacttgtctctataatagcttgagtttgaatgtatgcatatatggcttttgagcttgcagttcacattgcatgcttcatttctgtctattacaataacttgacaattccatcttc

SEQ ID NO: 133454 - DNA, 336 bp, Zea Mays
atgacgaaggcccttgtcgatctcaccacagccatcactcagatgatcagcaggccgccaacaccgccaccacccccagcgtccactagccctacttccatcccatatggcatgccaggtgccctgaaacatcagaagcccaaggggcttatactatcaggtgccccaaggcacgaggggctccgagagcttataccattagatgccccgagacgtcaggggtcccgggaacttataccgtcaggtgcccaggggcacgagaggcctaggtacttataccatcaggtgctctgggatgcgatgggggccgagggcttataccaccaggtgccctag

SEQ ID NO: 133455 - DNA, 945 bp, Zea Mays
ctcgaaagtcgaaacacagcacagcacaacaggagccaccgccccctttttccttccccccgtctcttcaattcaattcgtacggcacggccaccgggtcaccgcagcaacagaatgcggcgaatctgcatccccaagcttgtgattcttctgctgctctgcaccaggacgctgccggcgggcgtatcctctgcaaagatccatgggaacccagccaacgacctcgtggccctcatcaacggcaagagggaggcgagcaggctgcctgcgctgcgcaacagcagaggcctcgggtgcatggcgctgcagtacatctccgagtgcatggcggccaccacgggcggcgccgcctgcagcagcggcaacacgatggcgtgccagacccccgaggcccacatcacggaggtctacgccgccaactgcggcgtggagctccccacggtggacgtcatctccggccgcctcttcggctgccaccgggaccgcgacggcccggaggacgcgctggcatcagccaccgcgctctcggtgatccgcggcaaggagcacacccaggtgggcgccggcttcgaccgccgcgggcccttcttctggtgcctcctcttcagcagcggcagccccaactccacctttctcctggaggccggcggcaagggcatcgaccagacccatggctgcttcagcgctccggatcgcccctcgtgcaacgccacgccgccgcgccccggccagctcatgtgcaccattaccgcagcggcggctgtgctgctcttccgttgccttgtctccacctagctactccgaccggagtatcctactagcagcagctatgagcttcctggatgatgatattgtattgtattgcaaatctcggaccaatgtcatattccattcattcctggaactggaccagtgtcatattgtatttgcttacgccttaccata

SEQ ID NO: 133456 - DNA, 881 bp, Zea Mays
cgtcatgaagcccgccgacgaggccggcatacttcctggacgtcaagctcggcgtccagtacagtctctggggtggttctgtcataaatctaggaaccaaaaagcacagagataagtactttgatggaattgacaatttggattatccaggctgttttgcaatgacagaactacatcatggatcaaatgtccaagccctacaaactaccgctacatttgatcctgtcactgatgagttcattattaacaccccaaatgatggagctattaagtggtggatcggcaatgctgcgcttcatggaaaatttgctactgtctttgcaaggttaattttaccccttcaaggaaaaggaggggaggctgctaatatgggcatccacgcgtttatcgtccccatacgggaccttgaaactcacgctgttcttcctggaatcgagatcaatgactgtgggcacaagatcggcctgaatggtgtagacaatggtgcgctgaggttccgctcagttaggatacccagagacaatcttctgaatcagttcagtgatgtgtcacgggatgggaaatacacgagcagtctgcccgcaattaacaaaagattttgcagcaacccttggggagcttgtcggtggacgagttggcattgcttactgttatgtgggtgttctcaaagtcgcagtaacgattgctgtgaggtatgctctgctgcgccaccaatttggtccacctaagcagtccgagatcagtgtgttggattatcagtctcaccagcacaaactgatgcccatgttagtgtcgtcgtatgcgtttcacttcgccacggtgcagttagtggataagtatgttggaacttgctctctgatgcaagttgatccaacggggga

SEQ ID NO: 133457 - DNA, 154 bp, Zea Mays
cacaaaggtggacgattatttaaattgataaggggtgtcacagaacacaagttgttttcatcacacaacacatatgctacaaacaagaaaacgtagaacaattattgataatacaccgtatacatattataaaatatatggtcgattgcttaca

SEQ ID NO: 133458 - DNA, 339 bp, Zea Mays
atggtcctcaccagtaggcagtggagtggtctcaagcaattaggagctcgacgatggcgcctccaaggccgcggcctccatggctggggccaccatgccgacggcaccaacaccgggggctaccgtggtggtggatctatggatggcggctcccatgacagcgcaaccaagggcaccgggggctcctgcagcggtggatccaaggctgcagcctccatggctggggccacccacgacgtcgcaaacaagactacgacctcccatgatatcgccaccaagcatgggggctctgcgccgcggcatccacaggcggggccatcctcgccggcgcctccatag

SEQ ID NO: 133459 - DNA, 956 bp, Zea Mays
atgaagctacaagagcgggacctcgacgcgtacgccaggaagcgctggttcaccatgggcttcctccataaggccgccgccattcccagggggtcggtgccggtgaggagcctctgcatggtgacccaggtggaagatactaagtcgatcctgaagttggtggccctcgacgcgctcaaggtgttcgaccaaatgtccagcccagactcggacatctgccaggaagcgcacacgctagtggccagctcacggaacttgctcttcccaggattcgtgtcgtgtgttgagacaggaatgatgcagaagcaaaacaatgacaacttggttgctctcacggttacctatcttttaactcatggagtctatgaagaaggcattgatgagatcggcaagattattcatgaaaatggcagtcaagtctacatggaaggggctaaaatgaatgcttagattgggttaacaagccctcgttttattggagctgatgtttgtcaccttaaccttcacaagacattttgcatttcacatggaggaggcagtcccgacatgggtcctattggggttaagaagcatttggcaccgtatttaccatttcgcccagtgatttccactggtggatttcctcgatcttcccgagaaaaccaaccctcttggcaccatttctgctgctccctggggatctgctctgattctgccaatttcctacacatatataaccatgatgagttcacaggggctcactgatgcttcaaagatcgcgatcttgaatgcaaactacatggcacaacgtctagagaaacactacctagttctgttctgtggagtcaacgaaattgtcgcccatgaattcatcattgatctaagagcatttaaggcgactgatggtgacaatgttgttgtatacaccaagaactgccctgaggttgtagaggatgtagagaggtggttgggctatt

SEQ ID NO: 133460 - DNA, 270 bp, Zea Mays
ctacccaaatatctattaaaaaatgtaaacaaaatgattgcaactgctggtatgttgtaattacaactgctggtgtggtgggattgcaagcccgcattatgtgtgattgcaactgttgtataattttactcaaatatctgttaaaaaatgtaaacaaaatgattgcaaccgatggtgtgttgtaattgcaactgctggtgtagtgtggatgcaactgctgagttgctcttatgtgattgcaagtactgaataactctgagaaattttgtt

SEQ ID NO: 133461 - DNA, 1074 bp, Zea Mays
atggtgaaggtcgtacaccgcaatagtgcatccgcgctaagtagagcagcgcgagcggatggatgtggcagaagaatgggtggggaggcgggggatccaaaaactataggaagccagcaccgacgggcaccgcgtctgcgcgattacgcaagagatgacaatgttagtgcgaagtggagaactgcgatgcttcaactgatgcaacccttttggaggttggagctcgccgcatgcgtgctggcctctatgcttcatcacggaagtgaagaggcggatggggagatgaaacggaaggggcctacttgctgtgccgtcatacagatgttcagaacacggaagcgaagtgacgacgcatgggagctaggggtgtgggcgagcaccggcttcaggcacgtgtcgtcggcgagggacagtcgcgtgaacatatattccagggcattcatcctctccgcgtccatctactctgtggcggcggcgcccgcggaggatcgtccttgtccggcaaagccgccacctcggtctcgaacgccggtaaggtgggcctcggcgtcggcaagctcagcgctttctccgatcgttctctcgtctccgctcactgacgccgccgcccccaagtccagacctgacaagggcggcggcaaaggcccttcctcctgtctcgacttggatgtcgaatggatcgccgagcacgcgcggcaggtactactgtactatactacgttacgcttacgccacacctcacggttagggatggcaacgggtaaactatccgcggatagtgtctctggacatccatatccgcgacttatatccgatatccgaacccgtacccgttacccgctatggataacaaatagtatccacatccgttacccgcgggtaacggatatccgtggatatatccgtttgcccactacacatacaacatatttaaatccagcaaattcaaacatgatatcatatttgtctagcaaatttaaatatgataaaaacatacaaccatacagaatttgtccagcaatgaaatctgatacatgtattaaggcatacagcgagcaatataaaattgtctag

SEQ ID NO: 133462 - DNA, 277 bp, Zea Mays
atgaggggcgatggccgtggcggcggagggagacagccttcctacgcggcgccggacggggcgaatgcggtggcgatcccggtcgcctcaaggaagatggtgcagagtctcaagaggatcctggccgaccgctcggagggcgagatctacgccacgctctgcgactgcggaatggaccctgacatagccgtcgagaggctcatctcccaggacccctgcacaactaaggtggagcctgacaaagctagagtggttgcttgcaaccggcctcacaggt

SEQ ID NO: 133463 - DNA, 291 bp, Zea Mays
atggatgggtttatagaactcacaagcggtctaggaggcaaggtgcacggggtccttgtagataggatgctgtcacttggccttaggtaccagaaccttcatctcctagacgacgtggacggcccacgtgaccttgagatccgacgcgtgccgagacagaaatcgttggcgctgacgccgtccccgacggggagctcgcgggagacagcccccacgtttgttgcgtccccgccggggacgtggggtcattgggctggtccagactcttcatccctctgtgactccccgtag

SEQ ID NO: 133464 - DNA, 105 bp, Zea Mays
caattatttaaatcatgaaatgagttttcctaatttatccagaataggattttggagcattacactaatctatatgtccaacaactccttgatacttagaactat

SEQ ID NO: 133465 - DNA, 151 bp, Zea Mays
taatgttgtacctatattacgttagatttagtcgctattgaatcgtaaatgttaaatttctgtgcgcagccggacaatattgatataagattgatacctaaagtcggtatgacatttagtaacgtggacgaggcgtaaaatttttatagtc

SEQ ID NO: 133466 - DNA, 1668 bp, Zea Mays
aatacagatagatagatctagcaaatcgcgccgccccagccgatggcagcagcagcagcagggtgggccgacctcccactcgacatgctggacgaggtcatcgcgcgcctcccgatccccggcgaccgtgcccgcttggccgccgtgtgccgcgcatggcgctccgccgcgcgcgaggtcgtgagccacctcccgtggatcgtgctcccatacggcaccgcctgcaccgccggccacggcgcggcctgttccgccttccggatccccgggttccccgacgacaccacctgcctcggcgccgcctacgactgctggctcgccctcgaccgcacggacgacgtggtccggcgcacgcccttccgggacacagggcgcttcgtcaggggcgagtgggaggaggtcgtgtactccaggcccgacgtgaatcacaagcacgtctacgcgctgcacaaccccttcagcaacgtcaccgtgcccctcccggacctggacgccgtcattggccatgtcgccgagaccttccgggtgcttaaagtgctcatgcgttcgccggctcccgacgacctcatcgccgtcacgaccaacagctggaactgcaacgtcatcttgtgtcgtcctgggaagggcacgtgcgtgctaccctattacagggtcgtggacgtcgcgttccttggcggcgacacgctgtacggaatcacctccggtgaggaactcattgccttccacctcggcgaggatgacatacctgatgttaccaagatcgagctagtcatcaagaacccgttggcctgttattattatgaatgtggatgggtgtggccagaagaagtactagttgactacactagcaacgaggaggatgattattattacacggatgaggaggaggacccggaggatataaacgaagaagaggcagccgatgatgagccagcggaccaacaagcattggaggacagcttcaacggcgacgagatggtctcggacaacgaggtgcttggagccaaggacaaggacttgctacttacgggtcgatacctggtgcagtcgctgagcggggagctactgctcgtgaggcaccataggcgggcatgcccgcattgcctaggccgcacttgcaatctcgaggtcttcaaggcagattttagcgcgggcaagtgggtggccgccggattggccaaggacgaggcgatttttctcagtcgatcgcacagcaagtgcgctcgcgcacgcagaggcatcaggcaaggctttgtttactatacaacacgtatcaacgacgtgttcgacaccacatccagcactgttcgtgccattacagttgggtggccacggctatgcgtagcggagaaatcgggatggtttttccctccggagcttgtggtttgacagagttgtgctggtgtctctgactattttcatccacatttcttttaattaggtctagtgcttcttcttcttttttgcaaactataatacatcgactcaacaagcctgtccatcccaaactgcctgaaattcatgttttgtatccacagagaggtaagtgtttttgagctgatggtcaaatagctgcaaaagttttgtacggaaacctatctgtccaagataaccaactcttgtgacttgtgatcagcacgatattcaaatagaatgttcaaactttat

SEQ ID NO: 133467 - DNA, 1581 bp, Zea Mays
gagggaggtgcacaaaattctatgtttgcagttgtattggatgagatgaagcaagaacttcacccaggcggatcatacacaagattttcttttgtagtgaagttacttcatatcaaatctcgttaccggatcagtaatgttgccttctctgctattctaaagttgttgtcattggctttcccacattgttttgtaccaacatcttataaggaagctaagaaacctattaaagcattgggacttggatatgagtcaatccatgtgtgtcctaacaattgtgttttgtttcgaaaggattatgcaaaaaataatgagtgcccagtgtgtggttcatcaagatggaaagatggtgaacaaagaaataagagccctcagaaggtgttgtggcattttcatttgattcctagattgaagaggatgtttgcttcagaaaaaaactctgaggatgcacaatggcacaagttgaagaggaaagaagtggaaaatgagcttagccatccagctgatggtcaggcatggaaagactttgatagaaaacataattggtttggagaagatcctagaaatataaggcttgggcttgccacagacggttttaatccctttggcaaaatgagctcctcttacagtatgtggccagtttttgctatcccttataactttcctccatgggtatgtatggagcaatggaacttcatgatgtgtctacttatccctggtcgggaatgtccgggaaaagattttgatgtatttcaacaaccactagttgatgagttacaacaactttggttgggtgtttctacttttgatgcattgagtagaagggattttgatctacatgctgctgtaatctggtgtattcatgactatcctggtttgagcactttgtctggtagagttacaagaggatactttgcttgtgtacattgtgacaaagatccttgctctaaaagaataagaaataaaatatgttatataggtcatcgacgttggcttccacatgaccatccatggaggaaaaagaaggattatgatggccaaattgagaaacgtgagaagccgcatcaatttagtaccaatgagttgatgcagcaattggaaagggtcaaggaagttaaaccagggaaacatccaaacaacaataagaggaagcgagatgcaaatgatggtcaatgttggaagaaacgatcgtgcctgtgggatttgccatattggacagatttgaagctgcgccataaccttgatgtaatgcacattgaaaaaatatatgtgagtcttttgcttggtacatttcttgctcttccaggaaagtcaaaggacagtattaatgcaaggcttgatttttgaagacaaaatcattagaaaagatctacacctgaagcatgatggaggttcctatgttgttcctcatattccctgtacaatggataaaaatcaaaaggtagcattttatgatttttcgaaaagtgtaaagtttccagagggttatgcttttatccgagcatcatgcatcactcctgaaggatgcaccctccaaggcttgaaaactcatgattgccatatcatacttcaacagagaat

SEQ ID NO: 133468 - DNA, 90 bp, Zea Mays
ctactcatagaaaataaatgtgaaatagaagtgttattgattcgattgataaatacaaatcgaccgtataactctctatttatagaagag

SEQ ID NO: 133469 - DNA, 1933 bp, Zea Mays
gtaacagcagtcagcagcagggttctttcttgtcacctggagctggacctgacgatggcataccatctcatctcttcaccgacgttccttctcgcacaattgctcgccgtcgccgtccctctccttctgctcctgctttaccacggctcatcaattcgccgccgtcgtcgcagcagcagatcggccaagcagggaggacagctcctgccgccttcgcccccggcgctgcccatcatcggccaccttcacctcgtcagcgacctcccgcacgtctccctccgtgacctcgccgccaagcatggtggcgacgacggcctgatgctgctccgtctcggcgctgttcccaccctcgtcgtgtcatcgccgcgggcggcggaggcgatcacgcgcacgcacgaccacgtgttcgcgtcgcggcccacgtccactctcagcgacgagatcctgtacgggtcctccgacatcgccttctccccttacggcgagcactggcggcaggccagaaagctggtcaccgcgcacctcttcaccgtcaagagagtgcactcgtaccgctgcgcccgcaaggaggaggtgcgcctggtggtagccaaggtgcgggaggcggcggtggcgggcacggccacggacatgagccttgccatgaacacgttcgccaacgatatcatcagccgcgccgtgtccggcaagttcttccgggcggaaggccggaacaagctctttcgggagctggtggaggccaactctgatctgttcggagggttcaacctggaagactacttcccgggactggcgagggcgttaggtttccttagcagaaggttgttgtttctgcgcaacaggcggcgggtccaggagacgcacaggagatgggacgagctgctcgaaaccatactgagcgaccacgagggaagaaggggctctgtctctgtggacggtggtggtgacttcaccgacgtgttgctctcggttcagacagagtacggcatgaccagagatcatctcaaggccatcttggtggacatgttcggtgcgggcactgacacgtcatccttggtcctagagctcgccatggccgagctgatgcgcaacccacagcagatggccaagctacaagctcaagttcggaggcacacaccggaggggcaggaaacggtggaggaagagaacctatccgacatgcccttcctgagagccgtggtgaaggagacgctgaggctgcacccacctgccccgctcctcgtccctcacctgtccctggcggactgcgtcgtcgatggctaccacgtcccctccggcacccgggtcatcatcaacgcgtgggctcttggcagagacccgggctcgtgggagaagccagaggagttcctgccggagaggttcatggacggcggcagcgctgctggcgtcgacatcaaggggaaccacttccacttgttgccgtttggagctggacgaaggatttgccctggcctcaactttgggatggctacggtcgagatcatgctagcaaacctcgtgtactgcttcgactggcagctgcccatgggcatggaggagaaggacattgacatgacggaggtgtttggactcacggtgcatcccaaggagaagctcatgcttgttcccaaagttgctcgtgtactgcaactgctcgtcaataattccatcgtccaagttgctgatcgaagggactcgagatcgatcatgcatgtatatggtttatttggagtagaaaactgcatgcagcgggtgtagaggacgagcacgtacgtacgtacaatgcacatgctatcgtacgggtatatatgtatgtattatactaggaaaagatgtccgagtgttgctatcgtacgggtcatgtaaacaatgttaagcttatgtgtctttttacttttatatagtaataaaaaagctattttgtagagaggtg

SEQ ID NO: 133470 - DNA, 112 bp, Zea Mays
ctcatttttttgtttcacatttctgtatatttttttcattgttttttggtattgtttttcatcatgttcttattcaattgtattttgtatttttgcagatgatttgaacgcg

SEQ ID NO: 133471 - DNA, 106 bp, Zea Mays
ctcgctttgccctattttttacgcaggcgggcgctggcgtggggagagtaaaatcatagtcgcaccggtgcccacattagattcttaatagagtagtatgcccaca

SEQ ID NO: 133472 - DNA, 441 bp, Zea Mays
atgagcaattcgccatgtcatcgccaagattcccagagggtagccaagggagttcacgacccaactgtcttaagggcaggggagcatccgaaccatgggaatttccccgccggagttcgtggtcagaggaagatccgcaccacgcctacatcatcgctctgggtatatgatgtggtcgacgatattctccgttgcatgtggatgttcatcgtagtagcgcctgggtggaatcgcgctccgggacatcggaattcgtcgccggagatgtgccccgccgcggatcggagccgcgacgaggatgggactctgcatagtgcaatcatcggtgagcaacgctctacctgttttgccaggacctctgcatcgtataacgcgtgtaagcatgtgatatgggtcaccaggggggctgatcgcctgacctcggcgagggcgccgccgtga

SEQ ID NO: 133473 - DNA, 1003 bp, Zea Mays
cagatcgtcaaccgccctcatcccctctctcctcacgccaatccaaaccctagccatcgccgccatcgccgagtaccaggcctccggggaacgcctcatcggcctgcatgtcgatccacaccgcccgccctgctccgtgcgtcaccctccccacggaggcgaaggcgccctgcgccggagatcgcgggatggttccacgcggctcctaggctaccagctggccatacggatctttccaagatcgcttcctcactcctcttccctgaaggcgacaacgactgtggaggaggcagcgggggtcagcgaagaggtggtcgcgttcacgcggggcgcagcctcacggcccgagttatgtctcatcttcccccctccccgacgacgcggactcccatggtttgtggcttcgtgattcatcatattggaacccctcgccgcctgcccagccagcgccagcgcccccacccagcgaccccgccgtcgccggtgaccagccccaaccccatcacaaggccggcgacaaggaagcggatgttgccaccgccgaaactgatgggtacaaggcggggtcgtcctcatcgcacctgtctcgactgctccgggagttatctcctatattgcagttatccagaaccgcgtcgcccctccattcatccttgacaacgctgcctgtgttgctttacgtgttcagggcttcagcaatccaggtgccaccagtgtgggcgcgatccatcacgagtcgatgctggcgagccagccatagcgcgacatctgatgcttctgcttccttacatgaacatgcatcagtaaatatggacctcggtggttttctccacattaggaaagctggaagagccttttgaactcagttttttttgctaacagtggtgttatggtgaaacagagttttgtgtgtatgtaccaacagctaaaatgtaaacacgacattatcatagttgagtacaggaataattatctcttatatcttattgcaaaatctgaaaca

SEQ ID NO: 133474 - DNA, 319 bp, Zea Mays
ctgtattcacatcccttcaagccgaagaaagcaaaatggatcaagtctaactttggcgcttcagaacagactaacaaaactgccatcgaagattgtataggtgtgactctgttcagtgatagtcttgaggttctagaatagaagggtagtggtgtgcattggtgtatctgtttacaggataatagtggttggttaggtgtgtgcagaaaaagtttagtgttatggtttgtatgtgatacatattaactgtgccttggaatgttcatgtgttatcctgattgcatgtgatatatctcgttcagttgaagttgtgttttct

SEQ ID NO: 133475 - DNA, 1743 bp, Zea Mays
atggatccccaccgccgctcaccggaatacaactccctcctcctcgccggcccgcgcctgggtcctctgaagcaagcccacgcgcgcctcgtcgtctccggccacggcgattccttgccgctcatcaccaagctagccacgctcgcggttgcggccggcgccgcctcctacgcccgcctcctcgccgcctcccacccggcacccgactcctttctcttctgctccctcacgcgcgccaccgcgcgccgcgggctccccgccgccgccctcgccttctaccgctgcctactcgccgccgccctccccttctccagcttcgcattcacctccgtcgccaaggcctgcgcggacctgtccgcgatccgcgctggtatgggcatccacgcccacgccgtcctcctcgggctcggctccaaccggttcgtgcagacgtcgctcgtcgtgctgtattccaagtgcggccagctggatgttgcgcgcaagctgttcgacgcgattcgtgacaagagcgtagtcgcttggaacgcgatgatttcagggtacgagcagaacgggctcgctggaagggcgatcgaggtgtatagggagatgcaaatggccggggaagctccagattccgcgacgtttgtggccacgctctctgcctgtgcgcaggctggcgctttggacttgggacgtcaggtggacaagctcattgtttctgagaggatggagatgaatgtggttcttggtgctgcacttgtgaacatgtatgccaggtgtgggcttgtgaacaaggctcgtgagtggttcaatatgctccaggaacgcaatgtggttacgtggacctccatgattgcaggatatggcatgcacggacatggcggcgaggcagtcaagctattcaatttgatgagacagcaagggccaccacccaatgatgtcacttttgttgcggtgctgtctgcgtgcgcacatgctggattggtaagcgagggccgggatgcttttgcttcaatgaagagtgtctacggattggtccctcgtgttgagcactattgctctatggttgatatgtatggaagggcaggacttcttgatgatgcgatgcgatttatacatgattcgatacccggagagcctggacctgaagtttggacagctatgcttggtgcatgcaagatgcacaaggatttcaatcttggagtggaggttgctgagcgattgatcgccctcgagcctgagagtccatctcaccgtgtgctgctttctaatctatatgctttgtctggtaaaatgaaccatgttgagaaggtgagggatacaatgattaagagaagattgaagaagccaataggatatagcttgattgagattgctggtgttgctcatttgtttcgcatgggtgagaagtctcaccccaaaacttcagagatttaccaatatttggagaaactgatcgaaaagattactgatgttggttatgtgcctaaaactgactcagtgttgcatgagttggaagaagaggaaagggagtttgcattaagataccatggtgaaaaactggctgtagcctttggactcatgatgacttctgggtgcaccactccaatcaggataattaaaaacctgcggatatgtgaggattgtcatctagctatcaaatatatgtcagccgtggagaatcgagagataattgtcagagatatgcaccggtttcaccatttcaaagctggaaagtgttcctgtcaggaatattggtga

SEQ ID NO: 133476 - DNA, 1591 bp, Zea Mays
ccattcaaccacccacgcgctcctcatgattatttattttatttattcaaagcaaagtctcctgcttccttccgtcttgctcctcgacccttcttccttccccaccaccgcgttccaatcaatcccaatcgcgacccagccagaggcgagcgcgagaaaatccccattccccaatccccacgccacagcctcccttccctccccgtctcctccaaattcaatcgtctccaagcgccaatccgccccgtctccaaatcccaggcaggcaggcagccaaccagccatggagtgcgagccggaggagctgcagttcctgggcgtcgtcggcatctaccgcttctccgcggagatcctccgaggcccgcaccgcccgctcttcgcgcgcatcgcggccgccttcgcgctgcccctctccgcgctgttcctcctgcacgtcgccatctcgcacgcgctcttcacccacatcgactccgacgacacggccctggacgcatcctccccgggcaccgacacgcagcgccgcctgctgtcccgcctcgcctccgactggctcgccctgctcctcttcaagtccgcctacctcctcgcgctcctcctgctctcgctcctctccgtcgccgcctccgtgttctccgtcgcctccgtctactccgccaagcgcgacgcgctcaccttcccgcgcgtgctctccgtcgtgccccgcgtctggcggaggctcgccgccacgttcctcgccgccttcgcgctcctcttcgcctaccacgccgtcgccgtgctcgtcttcgtcggcctcctcgtcgccgcggacaacggctccggcctcgcgggcctgctcgccttcctcgtcgccgtcgcctacctgctcggcctcgtctacctcggcgtcgtctggcacctcgccagcgtcgtctccgtgctcgaggaccacaagggcttcgccgccatgcgcaagagcaaggacctcatcagggggaagctcgtcaccgcgggtgctatcttcttcacgctcaacgtcgtcttcgccgccgtcgagctcggcttccgcgcctgggtcgtcaggggatccggcgccgcgtcgtcaaggctcttgctcggcctcatcatgctcgccgcgctctgctgcgtcgtcatgctcgcgctcgtcacgcagaccgtcgtctacctcgtgtgcaagagctaccaccacgagagcctcgacaaggccaacatctccgaccacctcgaggtctacctcggcgactacgtcccgctaaaggcgtccgacgtgcagatggagcagttccaggtctgactgtgaatcccatagcttctctgtctttatcactgctcgccaatccatcctctgatgccggaattctcctgttaccaccggcagccaggtaatctgtaattgtgtacgtacagcaggcagcaggtgatgaacatacttgcgttaagtaggaagaattgggaatttttgtcttgggggtacaagaataatggggatctgtacttcccttagtctcttcctcaaggacatggttccttcccttgtttacatgatttataaacaggagatgaatggaattgggcatgccgaatttacaaactt

SEQ ID NO: 133477 - DNA, 493 bp, Zea Mays
attggtcccctttgatgttggacaggtggtttatgcctctcaagatcgattggtgatcaggatgtaggtgaatttattattccggttccttatgtgaagcaaattaagctgtctaatgctggaggccatcttattatttcaagcgacggtgtctgggatgcttttgactgcagaaatggcttttaaatgtgcacgagggcttcctcctgaggccgcagctgagccaattgttaaagaagcagttgaagcaaaaggattgagagatgatacaacttgcattgtcattgacataatatcaccagagaaaccaaaacgcactatacaatctcaaagaacgccaggaaaaggccttgtgcttcttaaaaaaattctttttaaggaaaacaacatctaactcgttgtctctcccttataagaataattatcctgagccagatttggaggaggtctttgaggacggatgcccatccctatcaaggaggtttgtatcctt

SEQ ID NO: 133478 - DNA, 1114 bp, Zea Mays
tattcagttttaattttaattctagtatgcctatgaaaaaaaataatccgtgaatccctgaacgaaattagttagattttagacacgcgaagggggtgggtagacgaaacagcagagcaatctcccgccacgcgcttccacaaccaaccaccaccttgcttattgctgctcgcttccttctctacagatacaagctattgcttacgtgctgcttcatctttatcctcgtctctgttcgtcatctccatctcccttaccgatccgatcgtcaagcaagctaagccaccctgacatggcatcttcacccccctcctccgcctcgctacggcagaggccagccgccgcggcggcgacgcccgatcagcagcacgagccaccacgtctcgaagacggcctcctcccgaaccaaggcggatccccggcgacatcggcgctgtcccaggcgctgtcctccacggcaaacctggccaacctgctcccgaccggcacgctgctggccttcaacctgctggcgccgacgttcacgaaccacggcgcgtgcgacgccaccacgtcgctcctcacgcggggcctcctggcgctcctcgccctcgccagcgcgctggcctgcttcaccgactccctcaagtccccgcacgacggccgcgtctactacggcgtcgccacccgcacgggcctctggctcatcgactacccgccgggcgcgccgccgctgcccgagggtgccaccgggcgctacaggctcgcgttcatcgacttcgtgcacgccgcgctgtccgccgccgtcttcggggtcgtcgccgccagggacagggacgtcgtcgtctgcctgtacgggcccacgccggacagggccacgcaggacctgctcgacgttctgccgctcggcgttggcgtgctctgcagcctcctcttcgtcgccttcccaaccaccaggcacggcatcggataccccgtcgtcgccaatgccgtcgccgcagccaccgccacttcctcctaacaatagtttaatttaatttaatttcttcgaggctttaatgccttaatgtaactgcgttcgtatgtactattcatattttttttcatcaatcaaaacgacaacaacacacgttca

SEQ ID NO: 133479 - DNA, 2680 bp, Zea Mays
gcacgacgcctacatctgtcaaccacaacccaagcgctcccccctccccgtcgcctgcaggatctcctcgggccaaggaatcgttcccctccggcgaccttcctccctccctccgttccgtttcggtccttccactgtatcaccggcaaagcaaaggatcggaggccactccgcccggaggagcaagccgactctgagcattggagttgtgcttgttcaaaagtgtgaattgcatggagatgggaatgactcctgatgtaatgtatggacaaaatgtttttgttcctgctactgcaactccctaccaatatggttatgcagaagttggatcacagatggaatggtgtaaccagtcgagctctttaggatatgatggccaagataatttctatccgactgaaggcatgcaatgcgtatactacgcagccccagacaacggatctgtgcatcctacctacagttcttacccttctgatccttctttcgtacccgatggctcatttatgcctcaggagtatgttgctgaccctgctaactccacatgccaaatagcccagacatcctattatattccagctgttcttccttatgcacaagatagtgccttgggaagcgcgaccacacatcttcactccaactccaatgttgcatttcttcctggcataccaggttatgctgcaacatctgcaaatgcagcatttcctttaattgctcccgtcaccacaaaaagtgacattgttatgcatccacatgtacagtctactattgtcccttcaaagcagttccaggactatgcaaagccaccaaaggttcagctgcacaattcagttccacagaagcaagagttgccagatagatgtatgattcctgctaaactccctcatgcttctcaggtatcagcacatttgtctggaaacaattgtcttggatgtgctgctgggtctgatcttcggaagtgggctgctgccgagaaattccaaccatcttcaaagtcaagtggccatctaaatgctactggccaaaaagcgcatagcttagttgattctgagaaaccaagcaatcagaggcctgctataattgtgaagtctcacacaacaaggctccctgttggtaatccggatgggacaatcgttataagaaccgaccagtacaacagagatgatctccgactcgactatatgtatgcaaagttctttgttatcaagtcaattggtgaggcagatgtgcacaaatcgataaaatatggtgtatggtcaagttcctccagtggaaacagcaagctagatagcgcattcagggatgctgacaggatatcgaggaggcattctactaagtgtccggttttcttgttcttctctgtcaatggtagtgggcacttctgtggcatggctgagatggtcggacctgttgattttcacaaggacatggacttctggtgtcaggataaatggaccggatgctttcctgtgagatggcacatcgttaaagacataccaaatggttctttgcagcatatcacactgcagaataacgaaaacaagcctgtgacgcacagcagagatacacaggaagtaccatacctccctggaatgtctgtgatcaatatcttcaaagacatcaaagtgcggtactgcctttttgatgattttatgagctatgaggcagaagaggcgcaaaagagggcacacagaaggtgcaagctaagttcgaatgctccagactttgtacctgtctcacagcgtacaaaagatgagtctggcactgagcagagagaatccaggagcgtacttgtagacaggacatctgggatacaaaatgcggccgagaagccccacgataccaaggtgatcaagcctcaggatccgtgcgtctccgaagagcaggctagcgaggccgagaaagagaatggacctcagggatgtcgttgcagcggcaatcagggccaagaggaggcagcgaaaactgcaactaaccacccgccagcttcaggcttgaaggcggcaggtgcggaggggaagcagcagcagcagcgctggaagaaggtcgaaaatccaaagcagcatgcggacagcgtccctgcccagtgctcacaggaagaagcacctgagaagcggttaaatggggtcagcggctgttcgagcgcagttcaagagggttgcgaggagcagagggccgctgccaaacttgcttctctcaagatcggttccagggcggcagtggaagctgaccgtaaaactagcgcagttggtgtggtgacaatcggctcgatgcctgtccgggttgactgttgtgacgtctagtagtggcccatccggagctttttttttttggtctcacccacagttttttccctttttgcccttctgggttaatcttttacccctccctgtctgccaaggctttcatttccatttccatttccattttcctttttcttttggttgaatgtgcctgccatggttggtggttcctagcttctatatggcatcaaaaaaagaaaaaaagaaaagaacaaaaaaagatgatgattagttaggttcaagtttcattgagtgaaaagctagttttaaaggcaacattctggtggtgggtggtggtttcttttgtggaaaagaaagaagagactatatcagacgttcgttttaatgacattattaagaaaaaaagagagtaggttaaa

SEQ ID NO: 133480 - DNA, 2627 bp, Zea Mays
ttctttcattcagctctgatggcttcgttccattgcaaaccacctcccgttctgatttctgcgggcggaattccataaggccctcccccctcccctatcctcctccccttgccactccaattcctctgcaaaattttctcatggcagccgacgtttccatccgcactcgatccgcctcaaccacccgctaattcctcctagttctagacttctagtctcctctctctctctctctctctctctctcctgcgccgactcatcttcatcctcgtctcacctccctgctgctgctgacgctgctgccggcaagatcaaatcgttcaaaagaccctggatttcggcgaattctagatggatcatgtgttttaggtgattggtgctttcgacctcattagtgccttttgttcaattgctggacccaaggagcagagttctgtcgacatggcatctccaagaggaaggatgtcatttccccttcgttcctttctgatgatctgcctcatggctcagctgggagcttccaatgttgtactcatggcgaacaacactaccctgtcgttcgacgacgtcgaggcaatttttactccagcagtgaaaggttcaggtgtaaatggtgtcctttatgctgtggaacctatggatgcatgcagtccattgaaaacaaaagcgataggaggctctgtctcaccatttgcgttggttataagaggcggttgccatttcgatgacaaagttagaaatgctcagaatgctggattcaaggctgctgtagtatatgatactgaagacaacggtgtccttgtttcaatggctggaagctcgtctggagtccacatatatgccgtgtttgtctctaaagcgtcaggggaggagctgaagaaatattcaggccaaactgacgcagagttgtggataataccaacatacgcgaactcggcttggtcaatcatggcaatttcatttatatcactgcttgttatgtctgctgtcctagccgcgtgtttctttgcgaggagacaccagataagacgggacagggctcgacttccccaaactcgggagttccatggaatgaacagccggttagttaaagcaatgccaagtcttattttcacgaaagtgcaagaagacgactgcacatcagcaacatgcgccatttgcttggaagactacagtgctggagaaaagctaagggttctaccttgtcgacacaagttccacgcagcctgtgtggacctatggctcacctcctggagaacattctgccccgtatgcaagcgggacgcgaatgctggaacaccagacccccctgtatcagagtcgacgcctttgctctcatcatccgccattcgcttaccagaaccaaccgcttcggcttccttccggtctacagtggcagcagcagcgtctccccccaggccaatcagccggcatccgtcaccatcacggtccatatcccgcaagcactccgtttcgggttccagcatccctggcacccctatccccaggtttcatgcaagctcatcatctcctacctgcacaagtggaagcagtttggacctcgcaaacatgccgtcgtctccatggcctcgcgcttcgcaccttgcatctgctcactcttcgtgcggtggccgcctgtccccgccgatccacatcaggaatacctctgcagcgcacgtctcgcgctctgcctatggatctcccagccgttacgtaggctcgtcgcacatgtcccgtggatctccgagttgctactaccttggatcttcttcagggcagcagcatccttacctgaggcactgcaccttgtcaggcacgagcctgttcaccatggtgccccaatcaccgcaacagaaccagctgcagcacggtggagactcggaaaaagatctgtcagctgctgcaccattccgtcagctctactacctgcagcattgtccagattctggcacgtcgtctcagtcgcttccagggtgctgattcttcattcttgctgcaaaattcaccattttaacattgatggtggctccagtaaagctcccggccgtgaggaatcttacatggcaccgaattgacatgtggatttgagctcctcagttcaccatgatgatgagagaaaaaaggtgcgacagaattgcttgtaagaagagagaattgcaccccccagaatgtgtggcttcatcttgaagaagcaaatgcccatgtcgggtttcaccagcgtttagcgtgtactgatacagctctgtagtaattctagttgctgtttgtctatcgaggtttgagccggtagcattccttcctctcttttttgttttcctaattttgaattagttatatgacagacaaggttttcaagaaaagaaataacaagttttacccctgcatttttacagagaggtatgttgaactcaggatctttgccttgcctcgatgggatggttttttaccactgtgttgtttatggtcagtgaaatgtgcatgaagcctcgatggcacttgttctcccgttcagtatgaactacttagtaagtcgctagcagactagcaaattcactataggaaatttaaatttatgggggagttgctctgatgaggcggaaagattgttggtgccaagaaacgcagca

SEQ ID NO: 133481 - DNA, 2594 bp, Zea Mays
ttctttcattcagctctgatggcttcgttccattgcaaaccacctcccgttctgatttctgcgggcggaattccataaggccctcccccctcccctatcctcctccccttgccactccaattcctctgcaaaattttctcatggcagccgacgtttccatccgcactcgatccgcctcaaccacccgctaattcctcctagttctagacttctagtctcctctctctctctctctctctctctctcctgcgccgactcatcttcatcctcgtctcacctccctgctgctgctgacgctgctgccggcaagatcaaatcgttcaaaaggtgttttaggtgattggtgctttcgacctcattagtgccttttgttcaattgctggacccaaggagcagagttctgtcgacatggcatctccaagaggaaggatgtcatttccccttcgttcctttctgatgatctgcctcatggctcagctgggagcttccaatgttgtactcatggcgaacaacactaccctgtcgttcgacgacgtcgaggcaatttttactccagcagtgaaaggttcaggtgtaaatggtgtcctttatgctgtggaacctatggatgcatgcagtccattgaaaacaaaagcgataggaggctctgtctcaccatttgcgttggttataagaggcggttgccatttcgatgacaaagttagaaatgctcagaatgctggattcaaggctgctgtagtatatgatactgaagacaacggtgtccttgtttcaatggctggaagctcgtctggagtccacatatatgccgtgtttgtctctaaagcgtcaggggaggagctgaagaaatattcaggccaaactgacgcagagttgtggataataccaacatacgcgaactcggcttggtcaatcatggcaatttcatttatatcactgcttgttatgtctgctgtcctagccgcgtgtttctttgcgaggagacaccagataagacgggacagggctcgacttccccaaactcgggagttccatggaatgaacagccggttagttaaagcaatgccaagtcttattttcacgaaagtgcaagaagacgactgcacatcagcaacatgcgccatttgcttggaagactacagtgctggagaaaagctaagggttctaccttgtcgacacaagttccacgcagcctgtgtggacctatggctcacctcctggagaacattctgccccgtatgcaagcgggacgcgaatgctggaacaccagacccccctgtatcagagtcgacgcctttgctctcatcatccgccattcgcttaccagaaccaaccgcttcggcttccttccggtctacagtggcagcagcagcgtctccccccaggccaatcagccggcatccgtcaccatcacggtccatatcccgcaagcactccgtttcgggttccagcatccctggcacccctatccccaggtttcatgcaagctcatcatctcctacctgcacaagtggaagcagtttggacctcgcaaacatgccgtcgtctccatggcctcgcgcttcgcaccttgcatctgctcactcttcgtgcggtggccgcctgtccccgccgatccacatcaggaatacctctgcagcgcacgtctcgcgctctgcctatggatctcccagccgttacgtaggctcgtcgcacatgtcccgtggatctccgagttgctactaccttggatcttcttcagggcagcagcatccttacctgaggcactgcaccttgtcaggcacgagcctgttcaccatggtgccccaatcaccgcaacagaaccagctgcagcacggtggagactcggaaaaagatctgtcagctgctgcaccattccgtcagctctactacctgcagcattgtccagattctggcacgtcgtctcagtcgcttccagggtgctgattcttcattcttgctgcaaaattcaccattttaacattgatggtggctccagtaaagctcccggccgtgaggaatcttacatggcaccgaattgacatgtggatttgagctcctcagttcaccatgatgatgagagaaaaaaggtgcgacagaattgcttgtaagaagagagaattgcaccccccagaatgtgtggcttcatcttgaagaagcaaatgcccatgtcgggtttcaccagcgtttagcgtgtactgatacagctctgtagtaattctagttgctgtttgtctatcgaggtttgagccggtagcattccttcctctcttttttgttttcctaattttgaattagttatatgacagacaaggttttcaagaaaagaaataacaagttttacccctgcatttttacagagaggtatgttgaactcaggatctttgccttgcctcgatgggatggttttttaccactgtgttgtttatggtcagtgaaatgtgcatgaagcctcgatggcacttgttctcccgttcagtatgaactacttagtaagtcgctagcagactagcaaattcactataggaaatttaaatttatgggggagttgctctgatgaggcggaaagattgttggtgccaagaaacgcagca

SEQ ID NO: 133482 - DNA, 2663 bp, Zea Mays
ttttgggcgggactgatgcctctttcacagggtttttctttttctttttgggcgatttcgtgctcaaattgacatcttctaaccagtccaatgcacttttcgtacccgtgtacaagaccctggatttcggcgaattctagatggatcatgtgagtgctcttttcccatgaccgtggaaaacaaatacctcctgctgctttctgaaagcaggctgtgaaaagaaaaatatgactttggcctgtgaattgtgatcttgttattctaggcctctactatcttcagtggtgatacaatcatacaatacactgtacagactgttcgtgttatgtgaagttgcgtcgctcctgcttttccatttcaatcaatgttgttaactttactaatatatgattgcaggtgttttaggtgattggtgctttcgacctcattagtgccttttgttcaattgctggacccaaggagcagagttctgtcgacatggcatctccaagaggaaggatgtcatttccccttcgttcctttctgatgatctgcctcatggctcagctgggagcttccaatgttgtactcatggcgaacaacactaccctgtcgttcgacgacgtcgaggcaatttttactccagcagtgaaaggttcaggtgtaaatggtgtcctttatgctgtggaacctatggatgcatgcagtccattgaaaacaaaagcgataggaggctctgtctcaccatttgcgttggttataagaggcggttgccatttcgatgacaaagttagaaatgctcagaatgctggattcaaggctgctgtagtatatgatactgaagacaacggtgtccttgtttcaatggctggaagctcgtctggagtccacatatatgccgtgtttgtctctaaagcgtcaggggaggagctgaagaaatattcaggccaaactgacgcagagttgtggataataccaacatacgcgaactcggcttggtcaatcatggcaatttcatttatatcactgcttgttatgtctgctgtcctagccgcgtgtttctttgcgaggagacaccagataagacgggacagggctcgacttccccaaactcgggagttccatggaatgaacagccggttagttaaagcaatgccaagtcttattttcacgaaagtgcaagaagacgactgcacatcagcaacatgcgccatttgcttggaagactacagtgctggagaaaagctaagggttctaccttgtcgacacaagttccacgcagcctgtgtggacctatggctcacctcctggagaacattctgccccgtatgcaagcgggacgcgaatgctggaacaccagacccccctgtatcagagtcgacgcctttgctctcatcatccgccattcgcttaccagaaccaaccgcttcggcttccttccggtctacagtggcagcagcagcgtctccccccaggccaatcagccggcatccgtcaccatcacggtccatatcccgcaagcactccgtttcgggttccagcatccctggcacccctatccccaggtttcatgcaagctcatcatctcctacctgcacaagtggaagcagtttggacctcgcaaacatgccgtcgtctccatggcctcgcgcttcgcaccttgcatctgctcactcttcgtgcggtggccgcctgtccccgccgatccacatcaggaatacctctgcagcgcacgtctcgcgctctgcctatggatctcccagccgttacgtaggctcgtcgcacatgtcccgtggatctccgagttgctactaccttggatcttcttcagggcagcagcatccttacctgaggcactgcaccttgtcaggcacgagcctgttcaccatggtgccccaatcaccgcaacagaaccagctgcagcacggtggagactcggaaaaagatctgtcagctgctgcaccattccgtcagctctactacctgcagcattgtccagattctggcacgtcgtctcagtcgcttccagggtgctgattcttcattcttgctgcaaaattcaccattttaacattgatggtggctccagtaaagctcccggccgtgaggaatcttacatggcaccgaattgacatgtggatttgagctcctcagttcaccatgatgatgagagaaaaaaggtgcgacagaattgcttgtaagaagagagaattgcaccccccagaatgtgtggcttcatcttgaagaagcaaatgcccatgtcgggtttcaccagcgtttagcgtgtactgatacagctctgtagtaattctagttgctgtttgtctatcgaggtttgagccggtagcattccttcctctcttttttgttttcctaattttgaattagttatatgacagacaaggttttcaagaaaagaaataacaagttttacccctgcatttttacagagaggtatgttgaactcaggatctttgccttgcctcgatgggatggttttttaccactgtgttgtttatggtcagtgaaatgtgcatgaagcctcgatggcacttgttctcccgttcagtatgaactacttagtaagtcgctagcagactagcaaattcactataggaaatttaaatttatgggggagttgctctgatgaggcggaaagattgttggtgccaagaaacgcagca

SEQ ID NO: 133483 - DNA, 5332 bp, Zea Mays
atgtatggaggcccccatcctcaccgttttcccttttgcctgacacaacacaacagggaggctgcaccagaggctaatggttaccatcacagcccccatggtgtggaccagagtcaggttgtggatgctgataagcatataaaccatcattccacagacgacaatgctccctccagcgcttcaggccacagacatggtggtatcagccgtcatgcatccacatcttctgttgatgaccgctccatcaagtctggtgacgattctgatggggccgagagtaccaatggcagaagcagtaacacggagatctcgtttctagaaaatgataccgtctggataccacctcaagcggcagataaggaggatgaggcccagagttttgctacaagcattgcttatgacgacgacgatgacgattatagtgatgggataaagtggggccagtcaagtttcccatcccctggtaagcagcatgacgccggcactagcaatcatagggaggtacgagaaaaagcgatgctagaagctatgaatggccagctgaagatacttgtcagtcggtttctcgcatctgttggcattccgtcttcgaacgaggaggctagcgatagctggcttgacattgtcacctccctgtcatgggaagcagcgctacttatcaaacctgatggtagcatgggaaaggaaatggaccctggctcttacatcaaagtcaaatgcatagcatctggtactcgccggcaaagtgaggtgatcaaagggttagtattcaagaagaacgctgctcataagcacatgccgacaaattgccacaatcctaggcttctacttgtcaaaggagtccttgggcattctgatgtcggtttgtcgtcgtttaattcaatgggtcaggaaaaggacctgttggagagagctatcggtaaaataatggagatatgcagtcccaatgttgttctggtcgagaaaactgtttcacgaaacattcaagaacttcttctgaaagaaggtgtcactctaatttttgatttgaaactcaaccggctacaaagaattgcgcgctgtactggctctcccataatatcgttttcagaagttttggataaaccgaagctgaagcaatgtgactactttcatatcggaaaatttaccgaggagcacaacaatgccagtgagggtggaaagatgacatctaaaacattaatgttcttggaaggctttccatgtccactcggttgcacgatcttgctaaaaggagcaaacagtgaagaattgaagaaggtcaaacaagtaatgcattttacagtctttgcagcatatcacttgatccttgaaacatctttctttgaagatcaaagggtttttctgaatgatagtactacaaaagaaacttctgctactgctacagaagggacttatggtgttgctgctcttagtgggcctattcctaactttccttcacatgatgattctccggcacttagactgttccatgccacttctaatagctatgctgatgtgaacaaacctttgatatctccaagaaatgtggataaattcagtgcagtatccagcagctcttcaaatgaccttgaacaaggtgcaaatgtcaggtccaataatgccgagaggttaacattaccagtccaagggccactaaggaaattgttcgctgacatgttatgtcaccagaatatttacttacccgttacatcattgcaagaggcaaatgataacaggaaggaagtcagggttgaatccagtcaagaaactgttagtaatggtttccataggccaaagacaggagagtctgtgatttccattgaaaatggggagtccataaatgatgcccagacacaagaaattactcaagcaataatgccaactggttcttctgtaagtgataaggatgcagaatcacctgttatgggagacaatggggcacatagtactacaagtatcattatcaaagagaagcatgctgacggcgatcaagctgatgatgcacttgattctcacagcatactgattttgatgtctagccagtgcacagaaaagcaggttatctgtgaacaaagccatttaacccgtataaaatactatgggagttttgatgtgtccttggggcgatatttgcaagacattctacagaatcagcagaaactgagttgctcttcatgtggagagcctccagagtcgcacatgtactcctacacgcaccgcaatggaaatttgaccgttctagtgaaacgtctggtgcccaaacactatttgcctggcgaatctgaaggaaaaatatggatgtggactagatgctcaagatgtgatcatgaacatggggtatccaaaccaactccaagagtactaatatcagctgaagcacgcaacctctcgtttgggaaatttctggagctcagtttttcaagccactctgcagcaagaaggttatctatatgtggacatctggtcaacagggattgcttgcgtttttttgggctgggctctaaagttgctatgttccggtactcacctgttgaaatttacactacctgcaaaccacaacctactctccaattcgtcaaccccatcagacaggattggtttgaaggacaaaggagaaatgttcatgctaaaagtatggcacttttctctggggttgcaagatttctacagaacttgaagaatgaacatcctgatgcaataacattagcagtcaattgtggcctcacactccctgttaaggacttcactgaactagaagagttgttgataaaagaaaaggcccagtttgagagttctttggacaaggccactgacgaaaatgggaaaccattcgggtctgtgcatggagtattgaatataaattggtactatcaggatcttctacttaagctttacatttgggaccgccgtctatatcaactattctattgcaaatctgtccaactagaaagttgttctaattacaagaatcctgctggtactgttgatgggaactgtgatgataactttggtgttgataagaaaatcggtgaaattacatctgatgaaattacggcagctttgggggtatccagtaccatggagtctgcaagtaacaaacttgatcatcaatcaggtgacaccacagcactcttacttcataaaagccaggaagctgggcactcggaatttccttgcaatggaggtagtaaagctgaagaatcttctattgctcatggtcaaataaaggtagatggcacaacagaaaccacaaatgatccttgttttgaaatatccaatgatatggaggtccaggccaatcttacagtagcagatccaatacccatggaacaggagcgttgtagcactccccaacaattcaaatatccttattgggatgacagggagaggtggatttggaattcattttctgagtctcaaatggcttacagggatgacattgaaattggatatttgggcaaatttgaactcattaacaattatttgccacattatctttctcccttgtttgaacaacatgatgattcatactctccgcagttcgcggtaggtccaggtagtaatattttgtgcataatggaagatgagatatccagcataatagctcgtgctcttgccatatctgatgaacgccaccatttgatagatttaaaattcgagaacggaatggattattccaaaggagagtatgctaaagcaatagagaaatcttttagttttctgtctgaaagttctttcagctcatcaccatggtcatctacagattctgaagcaagcttatcgtctctgtcttcattttcatctgatgacttttctggttatgatagctcatctttattgtccccaatgcatccagaaatgactgtgaatgggaaagtaactctcaaagacaaatattcagttactgttgtatatgacaatcaattctttgcactccgaaaaaagtgttgcccatccgagcttgcatatattacttctttaagccgctgcaagaagtggaatgctcaaggtggaaagagcaaggcctattttgcaaagacgacggatgacaggttcatcattaagcaaatcaagaaaacagagtttgagtcatttattaaatttgcacctgattactttaagcatgtttaccattctctggacactggaagccaaacttgtctcgccaaaatattaggaatctatcaggtaattatatcacgagctcgagttggattcgtttcgttttactgttttctttcccatgtggactaacttgcctgtttcaggttaagcaaattaagcatggtaaagaggtaaagattgacttgatggtgatggaaaatcttctctttggccacaatatttcacgaatttatgacctcaaaggtgctacattttcgcgacgcatcactgactcaaatgatcatgatactgtttacctggatcaaaattatgttgaggacatggggttttctccaatctatattggtggaagaacaaagcatcttttgcagcgtgcaatctggaatgacacggcttttctcacttcggtgaatgtcatggactattctctacttgtgggagtggacaaagagaagcatgaacttgtgtttggcatcattgattatctgaggcaatatacttgggacaaacaactggagacatgggtgaagacttctctggtagtacccaaaaatgttttaccaactgtaatttcccccaaggaatacaaaaaaaggtttaggaagttcatggcgaagtactttctgtcagttccagacacatggagtcctgataatccgtctaagccatgcaaatcccttggtcagagcaatcgcaagttggcggaagtccagaatggtgataacctgtcagagcacccaaatgaagttgaggggtgtgcctaatcatgtgcaggatttcctggcagttttgttgaatcctatcatgttgttgtttggctatatttcactttgtaaaatggtgtacatagaaggacctcactgttgatttatccaaaagtttgcggtttttaggcaaattgttgggcaagtgaggtccacaggacgtgtacctatgttcattgttaatttcacaattattatagtgaaattaagaattcatatgatcatttttttggacctaccacttgtgagactgaagcagtctattcttcacttatgactaactgtccaagaccaagatagacatttcctacctctattgaaattaggtcaatttgagtattatgttgtactgtgtacccccactgtactgctgggatatgtaaaaggttccgtataaatgtctgctcccctgaccttgtttgttgcacgcagcacaatacata

SEQ ID NO: 133484 - DNA, 753 bp, Zea Mays
atgcattctcgatcggcggttaggctaggtggatcagaaagaatcagatggtttattcgaaaagactttttatatcttgtcgccttgcttgtcgacggcggtgagcggcagcatctccaagcgggctctgggcgcctggttctgcgagagtcggtgcctgacgtagccgtagaaggtgcatccgacgagcgtgacgccgcagccgagtgcgttcatggcggagatggggttccggaacaccatccaggacgccagcaccgccacggccaccttgaggttgccggccacgttgaaggtgactgccgtcgtggagtggatgacgtagaagatggagaagttgaggcagaaggccagcaccccggaggtgacgacgaccgccagcgccggtcccacggactcgtgcgtccgcagccaccccagcacggcgccgccctccagcgccacggccggcaccgacaggatcagcgtggccagcggagccatgtagtacaccgtgttgatgctgtcgaacttgtagccgtggagcagcgactctgccaggatggtcttggtggacgtggccaggcaccccaccagcgcggcgcagaagccagccgtgttgaagctcagctccgtcacggaggtgacaaggattcctccaacgatgggcaccaaggacgcccagatgcgccactcaaagtatttcctccaaaccagccactgaagaaccactgtcgttgccggagtgaacgacttgatcgtctgcatgaatga

SEQ ID NO: 133485 - DNA, 1441 bp, Zea Mays
aaagttaataaccgggccggatgggccggcccaccgtcgctgctagctcattcatttcttctttccctgccgggccccggcggcctctcctctcctcgcttgtccccaccaggcgccatggacgctggcgacgacgaaccccccgttctcctcgaccgcgccgcccgcgcctcccgaggcaagaggataaccaagctgctcgaggacgaggtcgagcaggacgaggctttctggaaccaagaagccctcaaggatgaggagaacgatgacaactacgtggaagagccggatgctggtgacgaattcgacagtgattttggtgaagatgaatctgaaactgatgatgagccggagaaggaagtacgcgagagattacctatcaagaaacggctaatgtttcctggcaagacgctgaggaagaccaacgtcaagaagaagaaggcgaccccaaaaccagaagatggcacaaaagccgacaagtctgctgataagccgagttcatccacacaagcagatcttcctgatgaactggaggctgagaaggccatccggaaatcaaccagaacgtcggtcatcgtgaggcaagctgaaagagaagcgatacgtgctgaaaaagaagcaacggccaagccgattaagagaaaaaaggagggagaagaaaagcggatgacacaagaggagatgcttttggaagcagctgaaacagagatcatgaacatgagaaatctagaacgtgtcctggcaagagaggaggaagtgaagaaaaaagctgttgttcataaggacacttatgagggtcctacaattcgttttttctcaagagatggggaatcacgtctggaattcataaatggagcatcatttgggtctgaactttgtacaacatcatctccttatccggagaaacctgtttgtgtggtgacaggacttccagccaaataccgtgatccgaagacagggctgccttatgcaactatggaagcatttaaaataatccgggagagtttcctgaaagaggaggctgatagaaagcgtccgaacatgtcgaatatgggagagcttttcgaatcaataactggtggacacttgatgcctaagaagagaagggttgagataaggtctccgaacatgttaggaggctctaggcatggcgggcgtacctggcgaatacctgcttttgatatggtggacgaggactaacgagacagatcccgtggctcccaatatgtcgaatatgagagatctttctaaatcaatagccggtgaagaggaagatggataggatgttgtatttagtgttagatcttgtgcttgtagttatcttaatgtatttttgtcagttgataaattcatggttattaaagtggtaaaacgttaaaatgttatgaaacaactttttaatattttaacgtttaaacgaacgttgaaacgtcttttcaga

SEQ ID NO: 133486 - DNA, 1599 bp, Zea Mays
atggagggcttgtgctttgcgcggtgccggttcacgcggctcatggcggcgatgcagctggcgatggtcgtgctggtcgtggtcatcagcatggctagcctccaccgtttctacgccacccacagcctcctcccggggctcgcctccgtcgccgaccccgcgcgctgcagcagcaagttccacaccgacgacacggctggcttctccagcagcttcgacgtccgcgcgctcgcagaccgcgtggacgaagtgctggtccagctcgccgagctccaggacaagctggaggccacggcgctgaaggtggcgaagcagagcaagaagagcaaggcccggcgcaggccgcaggagaacatgacgatgccggagttccggcggttcctggaggacgaggtcatccacccgctgtacagcgcgcacatcgcgctccggctgatccgcatcccgcgcccgcccgacgagggaggggacggcggcgacgcctcctcctcctccggcatggacccgctcgtcaacttcttcgcgtccgaggagacgcgcaagtacgtgacggccaagggcaatcgcgacggcctgcccagcgtgtacggcacgaaccggacgtacggcagcgtggggcacgcgtgcgtgctgatgcggcgggagctggatgagtacatgagctacgacgtgggcgcgcgctgccccgacgactgggacctgggccagcgcctcatgctgggcggctgcgacccgctgccgcgccgccgctgcctggccccggcctccaagctcttccgccgcccgctgcccgtcaacgagtcgctctggacgctgcccgacgacggcaacgtccggtggagccactaccactgccgtggctacaggtgcctgtccgccaggaaccagcgccgcggctacgaccgctgcgtggggtgcttcgacatggaccgcgagaggcagcggtgggccaaccgcaccgcgtcgtcgtccctcgccaacttcctcgtcgacgacgtgctcgcggcgaagccaggcgaggtgcgcatcgggctggacatgagcgtgggcacgggcagcttcgcggcgcgcatgcgggagcgcggcgtgaccatcgtgtcggcggccatgaacctgggcgcgccgttcgcggagacgatcgcgctgcgcgggctggtgcccctgtacgcgaccatgagccagcggctgccgctgttcgacaacaccatggacctggtgcacacggcggggctcttcgaggggtgggtggacctgcagctgctggacttcgtgctcttcgactgggaccgcgtgctccgccccggtgggctgctgtgggtggacaagttcgcctgcgcgcgcaaggacctggacgactacatgtacatgttcctgcagttcaggtacaagaagcaccgctgggtcgtctccttcaagtccaaggacgaggtctacctctccgcgctgctcgagaaaccgccgaggtcatgatcatagatcatcatgcacgcatccaggttctttaattagtttgtaaactaggtctgatcgtccaatcaagctaacttgtcggacaatataataagtaactgcaaaggagatttggatgtgtgttctccc

SEQ ID NO: 133487 - DNA, 1063 bp, Zea Mays
gcggtccagatcgatcggtatttgcagattggtgcgtccacacgagagtttacggcggcccaaaccccccaaatccagttccatcccaatcgccgagaaggggaagccaaatcgatggcggcggcggcggccggcggcgagaacagcggcgcgggcgcgggcgcgggcgagggcgagttctacctgcggtactacgtggggcacaagggcaagttcgggcacgagttcctcgagttcgagttccgccccgacggcaagctccgctacgccaacaactccaactacaagaacgacaccatgatccgcaaggaggtcttcgtctccccctccgtcctccgcgaggccaggaggatcatccaggagtccgatatcatgaaggaggacgacagcaactggcctgagcccgaccgcatcggccgacaggagctcgagatcgtcatgggcaacgaacacatttcattcaccacttccaagatcggctccctcgtcgatgtccagtccagcaaggacccggagggactccggatcttctactacctcgtccaggatctgaagtgcttcgtgttttcactcatcaacctccacttcaagatcaagccaatccagtcttgagctccatctcaagccttcatgcgactgttttggagtgttttaagagagaaccttgtaccatgttaagatgatgttgagcttgtgacgatgcgcacggtagaagtggaacctttttttttttttgcggttggattgtgcaaactgcgagcagtagtgagtgtggtatatttgtgccttcagtttcctgttgggtggagtgttcttgtcgtttggcacggcacactagtattcttctctgttatcagcgctctgttgaaggatggaatggatatccagattgtctgggacttgtggtgatgcagatccagccagtaactagtatgaatttctctagtggggttgttgggctgctaaaaaccgccggactgagcaaaggaaccttgcgtctttgtgtaaagcagcagtcgaatctgtgtgtgtgtgtttgtgattaaagtcgtcattcggtcct

SEQ ID NO: 133488 - DNA, 632 bp, Zea Mays
tacgtacgtgtcattacacgtaggataacgttcgttattagctgttacgcttacacgttgtaatatacattaaatatatatgcaatttctcaagccaagaaggtggtgagacatcgtcggcgtaggcgcgcggggcttcatcgtcgtcgaggatgcatcgggcgggaaggccagtagtgtgtgtgtctcaaccctcagctggagagcagcgcgatgatgtcgagcgagacggagcagagctggccgagcgtctcctccctggcggcgagctcggccgggtactgtccgggcctctggcggcggaacagcgtgcggcacacctgcgggtactcggcggcggcggcggcgggtgcttggccgacggtctgtggccgtggccgtggtcgtggccgtggccgtggccgtggcttttgtgcgcggccggcgggccagcgcgggaggagagtgcggctatagggaggactgccaggaggaggaggaggaggaggagcggggcgttattggtcgtcggtgtggttgctgccattattgcgtgcagctgcttgccaagagagcggagagatatgctggctgagctagtagcttagcttgtggttggtctttggctatgtgtgatgtgcttgtgaatggat

SEQ ID NO: 133489 - DNA, 2382 bp, Zea Mays
tctagccatacctcaccgccggcggagtagcagcagggggagaccgggttggagggttcgcaggaggcggagcccaccatgcctacgtccgtgaggaaccagctgcagcggccggccgagtgcccgccagcgccgcggaagccggtgtgggcgcctccgctgccgtcgacgcccgccaacaagcgcagcaggccgtctccgccctcctccgcggcgccggctcgccgggccttcttccccgtcgcgcgacctcaccaccgtgttccgcgccctgccgcccaagaagcggatccgcgtggtgtgaccctggcgcgcaggacgggacggcgtggatctggcgagtcagtaagcaccgacgatctgccccccgcgctctcaacaacccccgcccccatcgctctcctccgaggtggttgtttcttcgcccagtacccagttcgtccgcctccttctcttcgagtttgggtgcccatggccatggagaccagcagtgcgcccgccgccgccaccgaggccggctggtacgtgcttggaccgaaccaggagggcgtcggaccctacgtgattgctgagattcgaggtggctgtttccttcactctcctagcaattcaacgcgtttcaaggctgctaggtcaggtgaaaatggaagaacgtatgaagctagacttgttgcaatttatagacatgggctgggaactggaacagtcatcttgttcgcgtcgagcgggaagcattcgcgcgtgctggtgttcatcagtgaggacctcttctttatttacctgctgccgccgatcatattcaatgcaggtgaaagacttggttgtggacaacctctacgtttcacttatccagcgtacatgtcctcaccttgccacagtgagttgttcctgttagagaaggaagatcccatgaagaaagagctaatgcaattggttgtaaccacacgacttgaccctgaactagaagtgcccttgttactcaccggtccattaaaattagtccatgcatttctggtttccccagctgaagtagatttggctgcagcttgtgtgatgcatgttggacgtcccttttggctgcattgccctggattcttccagaaaatatgggatacattttatctcatcctaatatacagtgcggtttctcgaggttctatttcattgcttgacatccctttctctgatttatctgatgtggttgctgcagatgattacttctatattgaaggtgcttctgcgagtattccacggtcgattgctaaggtgacattaaatgaaagcaaaaccaaagtagtcaatttctcaatagcctggtcgtcctcaccagacctcgtacaatatagacctttcttcagcacaccagaacttgttgagttccctacatccaagcctggccagaaagcttatgcctatttctacccaccatcaaatcccaattttcaaggtttgccttatgaaaagcctcctttgcttgtcaaaacacatggaggaccaactgctgaaacacgtgcaattctggacctcagtgtccagtattggacaagtagagggtgggcgtatgtcgatgtcaactatggaggaagcactgtcgtcgagtcggaccgcagagatgatgatgggctttctgaggcacttatgcttggcgtaggctgcaacattgacataattctccaagggaagaagcggtttgacatgaatcctcccgtcgatcccttcgaaactaaaagtgagctgcaggacacatggttcgcaccaaattctccatccatagataacaaggattttaatgttggagatcacatagacgtcaagcttattgaagttggtgcagatggtggctccatagatgaacttaccgcgtttaaagaaaaaccttctgaaaatgttctgtcaagagtttcttggcagaaagaagaggttgtcaaagagccatctgttggttccttcagaaacttgttactttaccaccaagcatgtgtatcagttgatgaagatggggatcacatttttatctctgacagtaaccatcataggatcatcattagcaacagcaatgggatgattttagattataagtcagccaaatttttgcgcccagcttcatcattttatcacgctgctgaagactgtcaatttattgtagattcagagaatcatgctgtcagaaaagcagatttgggaaggactttacaaacagtttatccagtcttcaataaaagcaatggcatctggagctggattaccgataagcttggtatgagaaaagaagctactccaactattcaagattttcatgcagactccatgccacttccatggcatttgattagaattttcattagattttcgtgggagggagattgttttgttaacaattga

SEQ ID NO: 133490 - DNA, 140 bp, Zea Mays
gaggatttggaaatttgaaagtaaacaaaaagggaatctaactctaagcggtcagccacctgaaaatagaaaaaaactgaaaaaagaaaagaaataataaaattggaaaaaaaagaagaaagtcgctcggcctagccaag

SEQ ID NO: 133491 - DNA, 1499 bp, Zea Mays
ctcgcttccagactgccccctcctcgagccctcgcccgcgttcgcccccggctgggatcaccgcgcgtttgccggcgccatggccgtcgcagtcgccgtcgccagccaaaatccactagcagcgcgtaacctcctgccgatctaggttggtgcgcgctaccgcttccctccccttctgctccccgtcgacgccatctcctcagccccagattgcatctccctcttcttcctctggttctttcggcccgggcagaatgcctcttttttttcttcttcttcttactcgcaggctgcgggcttatgctcgaaggcgcgatctttacgctcggagtggcttcgtttcaggagacgggggatttcttctcgcccttttcctcgccttgcggctgcggaataccggggccggcctggatttgctcgagagtgagaggaaggcgtaacagtgtgaaggaggcgcgggggacaatatggctgcggaaatggtgaaagcggcgacgagcgacaagctcaaggagatggattgggcaaagaacatcgaaatctgcgagctcgtggcgcaggatcctgggaaagcgaaggatgtgatcaagtctgtaaagaagtgtatagggagcaggagcaagaccactcaactctttgctgttatgctattggagatgcttctgaataattgcggagagcctgtccataggcaggtcattgataatggccttcttccaatacttgtgaagatagtgaagaaaaagacggatttaccagttcgagaaaaaatatttcttctgttagatgcaacacaaacatcccttggtggagctaaagcaaggttccctcagtactatgaggcatactatgagttggtgtctgctggtgtgcaattttcaaatcggccaaatgttcttgtcacacgagcagaagtgccagtcccagaaacgagaacagaaccaaataatgaaagtttatcgacccgtttgactgaagctcaacaggaagtgcacactcagcctgttcctgatgcaagtatagtccagaaagcctctagtgtcatggaagtattgagggatgtgcttaattctatggatcctaggcaccctgagggagcaacggatgaatttgtgttggatcttgtcgagcaatgtacgtttcagaagcaacgaataatgcaccttgttatgacatcaagggatgaaacactggtatcacaagctatagagctaaatgaagagctacataaggttctcgtccggcatgacgcgttgctttcagttcatccgacaacagcagtagcttctaatataaaggaagaagaggaggaagaggatgctgaaagtctctatcggaggtaggaccgatcatgcaccattttctttcagaacggtggtatgcagcctcttacagaattctatccttactaaaacagactgcggaaggggaaggcgctgtcgcaggactacacagatgacctggtgccgtcgttccgatccatgcccgaggacaagctg

SEQ ID NO: 133492 - DNA, 1836 bp, Zea Mays
ctcgcttccagactgccccctcctcgagccctcgcccgcgttcgcccccggctgggatcaccgcgcgtttgccggcgccatggccgtcgcagtcgccgtcgccagccaaaatccactagcagcgcgtaacctcctgccgatctaggagacgggggatttcttctcgcccttttcctcgccttgcggctgcggaataccggggccggcctggatttgctcgagagtgagaggaaggcgtaacagtgtgaaggaggcgcgggggacaatatggctgcggaaatggtgaaagcggcgacgagcgacaagctcaaggagatggattgggcaaagaacatcgaaatctgcgagctcgtggcgcaggatcctgggaaagcgaaggatgtgatcaagtctgtaaagaagtgtatagggagcaggagcaagaccactcaactctttgctgttatgctattggagatgcttctgaataattgcggagagcctgtccataggcaggtcattgataatggccttcttccaatacttgtgaagatagtgaagaaaaagacggatttaccagttcgagaaaaaatatttcttctgttagatgcaacacaaacatcccttggtggagctaaagcaaggttccctcagtactatgaggcatactatgagttggtgtctgctggtgtgcaattttcaaatcggccaaatgttcttgtcacacgagcagaagtgccagtcccagaaacgagaacagaaccaaataatgaaagtttatcgacccgtttgactgaagctcaacaggaagtgcacactcagcctgttcctgatgcaagtccagaaagcctctagtgtcatggaagtattgagggatgtgcttaattctatggatcctaggcaccctgagggagcaacggatgaatttgtgttggatcttgtcgagcaatgtacgtttcagaagcaacgaataatgcaccttgttatgacatcaagggatgaaacactggtatcacaagctatagagctaaatgaagagctacataaggttctcgtccggcatgacgcgttgctttcagttcatccgacaacagcagtagcttctaatataaaggaagaagaggaggaagaggatgctgaaagtctctatcggagactgcggaaggggaaggcgctgtcgcaggactacacagatgacctggtgccgtcgttccgatccatgcccgaggacaagctgcggcggccgctgaccatccaatcgcctcaccccgacaagagactgggtgcgctgaacatccgctcgccggaccgcgaggaaccgagacttgatcctgctccgctgatcccgccgccgcccgcaaagcacgccgagagggagaggttcttccgagagaagagcatcgacggtgtggccagccttccgggccacatgaggggcctgtcgcagcacagccgggacggcagcagctcgtgtagcggcagcactgattacggcgactgaaaggggaggggtgagcagcagcagcagtacatatagggttccccttcttggggctggtctcacacttggtcaggccaggcaggcgatacattggtgttgtgccggagtttggatcgtcggcgtctccttcatgctgacctgtgtacacttgtcttggtagcattttgttcatttttcatattttccctttggctgatatgacattactgggaggccgttgtgttggtgtggcgttgtgggttctttccctttgaggtctctatagatgattgtgatctactgcatgggggtatgcttgggtctgaagcattgctgtgactttacccttttggctttctgctcctgtgtgtggtgta

SEQ ID NO: 133493 - DNA, 2090 bp, Zea Mays
ctcgcttccagactgccccctcctcgagccctcgcccgcgttcgcccccggctgggatcaccgcgcgtttgccggcgccatggccgtcgcagtcgccgtcgccagccaaaatccactagcagcgcgtaacctcctgccgatctaggttggtgcgcgctaccgcttccctccccttctgctccccgtcgacgccatctcctcagccccagattgcatctccctcttcttcctctggttctttcggcccgggcagaatgcctcttttttttcttcttcttcttactcgcaggctgcgggcttatgctcgaaggcgcgatctttacgctcggagtggcttcgtttcaggagacgggggatttcttctcgcccttttcctcgccttgcggctgcggaataccggggccggcctggatttgctcgagagtgagaggaaggcgtaacagtgtgaaggaggcgcgggggacaatatggctgcggaaatggtgaaagcggcgacgagcgacaagctcaaggagatggattgggcaaagaacatcgaaatctgcgagctcgtggcgcaggatcctgggaaagcgaaggatgtgatcaagtctgtaaagaagtgtatagggagcaggagcaagaccactcaactctttgctgttatgctattggagatgcttctgaataattgcggagagcctgtccataggcaggtcattgataatggccttcttccaatacttgtgaagatagtgaagaaaaagacggatttaccagttcgagaaaaaatatttcttctgttagatgcaacacaaacatcccttggtggagctaaagcaaggttccctcagtactatgaggcatactatgagttggtgtgtttattatgatatatagctgaagctatcatttatcttgcctccatagtctgctggtgtgcaattttcaaatcggccaaatgttcttgtcacacgagcagaagtgccagtcccagaaacgagaacagaaccaaataatgaaagtttatcgacccgtttgactgaagctcaacaggaagtgcacactcagcctgttcctgatgcaagtatagtccagaaagcctctagtgtcatggaagtattgagggatgtgcttaattctatggatcctaggcaccctgagggagcaacggatgaatttgtgttggatcttgtcgagcaatgtacgtttcagaagcaacgaataatgcaccttgttatgacatcaagggatgaaacactggtatcacaagctatagagctaaatgaagagctacataaggttctcgtccggcatgacgcgttgctttcagttcatccgacaacagcagtagcttctaatataaaggaagaagaggaggaagaggatgctgaaagtctctatcggagactgcggaaggggaaggcgctgtcgcaggactacacagatgacctggtgccgtcgttccgatccatgcccgaggacaagctgcggcggccgctgaccatccaatcgcctcaccccgacaagagactgggtgcgctgaacatccgctcgccggaccgcgaggaaccgagacttgatcctgctccgctgatcccgccgccgcccgcaaagcacgccgagagggagaggttcttccgagagaagagcatcgacggtgtggccagccttccgggccacatgaggggcctgtcgcagcacagccgggacggcagcagctcgtgtagcggcagcactgattacggcgactgaaaggggaggggtgagcagcagcagcagtacatatagggttccccttcttggggctggtctcacacttggtcaggccaggcaggcgatacattggtgttgtgccggagtttggatcgtcggcgtctccttcatgctgacctgtgtacacttgtcttggtagcattttgttcatttttcatattttccctttggctgatatgacattactgggaggccgttgtgttggtgtggcgttgtgggttctttccctttgaggtctctatagatgattgtgatctactgcatgggggtatgcttgggtctgaagcattgctgtgactttacccttttggctttctgctcctgtgtgtggtgta

SEQ ID NO: 133494 - DNA, 1838 bp, Zea Mays
ctcgcttccagactgccccctcctcgagccctcgcccgcgttcgcccccggctgggatcaccgcgcgtttgccggcgccatggccgtcgcagtcgccgtcgccagccaaaatccactagcagcgcgtaacctcctgccgatctagacgggggatttcttctcgcccttttcctcgccttgcggctgcggaataccggggccggcctggatttgctcgagagtgagaggaaggcgtaacagtgtgaaggaggcgcgggggacaatatggctgcggaaatggtgaaagcggcgacgagcgacaagctcaaggagatggattgggcaaagaacatcgaaatctgcgagctcgtggcgcaggatcctgggaaagcgaaggatgtgatcaagtctgtaaagaagtgtatagggagcaggagcaagaccactcaactctttgctgttatgctattggagatgcttctgaataattgcggagagcctgtccataggcaggtcattgataatggccttcttccaatacttgtgaagatagtgaagaaaaagacggatttaccagttcgagaaaaaatatttcttctgttagatgcaacacaaacatcccttggtggagctaaagcaaggttccctcagtactatgaggcatactatgagttggtgtctgctggtgtgcaattttcaaatcggccaaatgttcttgtcacacgagcagaagtgccagtcccagaaacgagaacagaaccaaataatgaaagtttatcgacccgtttgactgaagctcaacaggaagtgcacactcagcctgttcctgatgcaagtatagtccagaaagcctctagtgtcatggaagtattgagggatgtgcttaattctatggatcctaggcaccctgagggagcaacggatgaatttgtgttggatcttgtcgagcaatgtacgtttcagaagcaacgaataatgcaccttgttatgacatcaagggatgaaacactggtatcacaagctatagagctaaatgaagagctacataaggttctcgtccggcatgacgcgttgctttcagttcatccgacaacagcagtagcttctaatataaaggaagaagaggaggaagaggatgctgaaagtctctatcggagactgcggaaggggaaggcgctgtcgcaggactacacagatgacctggtgccgtcgttccgatccatgcccgaggacaagctgcggcggccgctgaccatccaatcgcctcaccccgacaagagactgggtgcgctgaacatccgctcgccggaccgcgaggaaccgagacttgatcctgctccgctgatcccgccgccgcccgcaaagcacgccgagagggagaggttcttccgagagaagagcatcgacggtgtggccagccttccgggccacatgaggggcctgtcgcagcacagccgggacggcagcagctcgtgtagcggcagcactgattacggcgactgaaaggggaggggtgagcagcagcagcagtacatatagggttccccttcttggggctggtctcacacttggtcaggccaggcaggcgatacattggtgttgtgccggagtttggatcgtcggcgtctccttcatgctgacctgtgtacacttgtcttggtagcattttgttcatttttcatattttccctttggctgatatgacattactgggaggccgttgtgttggtgtggcgttgtgggttctttccctttgaggtctctatagatgattgtgatctactgcatgggggtatgcttgggtctgaagcattgctgtgactttacccttttggctttctgctcctgtgtgtggtgta

SEQ ID NO: 133495 - DNA, 1841 bp, Zea Mays
ctcgcttccagactgccccctcctcgagccctcgcccgcgttcgcccccggctgggatcaccgcgcgtttgccggcgccatggccgtcgcagtcgccgtcgccagccaaaatccactagcagcgcgtaacctcctgccgatctaggagacgggggatttcttctcgcccttttcctcgccttgcggctgcggaataccggggccggcctggatttgctcgagagtgagaggaaggcgtaacagtgtgaaggaggcgcgggggacaatatggctgcggaaatggtgaaagcggcgacgagcgacaagctcaaggagatggattgggcaaagaacatcgaaatctgcgagctcgtggcgcaggatcctgggaaagcgaaggatgtgatcaagtctgtaaagaagtgtatagggagcaggagcaagaccactcaactctttgctgttatgctattggagatgcttctgaataattgcggagagcctgtccataggcaggtcattgataatggccttcttccaatacttgtgaagatagtgaagaaaaagacggatttaccagttcgagaaaaaatatttcttctgttagatgcaacacaaacatcccttggtggagctaaagcaaggttccctcagtactatgaggcatactatgagttggtgtctgctggtgtgcaattttcaaatcggccaaatgttcttgtcacacgagcagaagtgccagtcccagaaacgagaacagaaccaaataatgaaagtttatcgacccgtttgactgaagctcaacaggaagtgcacactcagcctgttcctgatgcaagtatagtccagaaagcctctagtgtcatggaagtattgagggatgtgcttaattctatggatcctaggcaccctgagggagcaacggatgaatttgtgttggatcttgtcgagcaatgtacgtttcagaagcaacgaataatgcaccttgttatgacatcaagggatgaaacactggtatcacaagctatagagctaaatgaagagctacataaggttctcgtccggcatgacgcgttgctttcagttcatccgacaacagcagtagcttctaatataaaggaagaagaggaggaagaggatgctgaaagtctctatcggagactgcggaaggggaaggcgctgtcgcaggactacacagatgacctggtgccgtcgttccgatccatgcccgaggacaagctgcggcggccgctgaccatccaatcgcctcaccccgacaagagactgggtgcgctgaacatccgctcgccggaccgcgaggaaccgagacttgatcctgctccgctgatcccgccgccgcccgcaaagcacgccgagagggagaggttcttccgagagaagagcatcgacggtgtggccagccttccgggccacatgaggggcctgtcgcagcacagccgggacggcagcagctcgtgtagcggcagcactgattacggcgactgaaaggggaggggtgagcagcagcagcagtacatatagggttccccttcttggggctggtctcacacttggtcaggccaggcaggcgatacattggtgttgtgccggagtttggatcgtcggcgtctccttcatgctgacctgtgtacacttgtcttggtagcattttgttcatttttcatattttccctttggctgatatgacattactgggaggccgttgtgttggtgtggcgttgtgggttctttccctttgaggtctctatagatgattgtgatctactgcatgggggtatgcttgggtctgaagcattgctgtgactttacccttttggctttctgctcctgtgtgtggtgta

SEQ ID NO: 133496 - DNA, 3296 bp, Zea Mays
ggacatgtgcgctttctccgcctttcctctcgtctcctcgtccgttgggggctcgggcgctcggctggatccatttcgcgtggcgcgcgcggtcgacgggaggtcccagccagccagcgagagagggagccggggccgggcggggcggcacctcgcgagatggcggcggaagcggacgacccgtcgctggcggcgaccctggagaagttccgcctctacgagacgcgcgcgaggttctacgtgatcgggagctcgcgggagaagcgctggttccgggtgctcaagatcgaccgctccgagccctccgagctcaacgtaagcgaggaccccgtctggtactcgctgcaggaggtcaagagcctcctccagcggatcgacgagggcaaccgatccaccgggggcctcgccttcgtcaccaaggcatacggcatcgcaggttgcatcaagttcctggagtcatactacctgattttagtcaccaaacgccgtcaaatcggttgcatttgcgggcatgctatatattgtatagatgagagccagatgatcaccatcccacactcatcagtgcaaacagatgttgcgacctctaagaatgagctgaggtacaagaagcttttggctagtgttgatctcaccaaggatttcttctatagctacacatatccaattatgcagagcctgcaacagagtgttacttctgcagggatgaaagaaatgccttatgaaaatttgtttgtctggaacacttttctgacagagccagtacgttcaaggtgccacaatactctctggacagtagctcttgtccatgggcacttcaagcaggtcaagctatcaatttttggcagagagataaatgttgttctcagctctagaagatcccgacacttcgccgggacacggtatttgaaaagaggtgtgaatgaccatggaaaagttgctaatgatgttgaaacagagcagatagtctttgaagaagaggctggttcctggaagggaagaatgagtgccgtagtacagatgcgaggatcaatccctctcttttggtcacaagaggcatctcgacttagtcctaagcctgatatttttgtgcagagatatgatcccacatatgaagcaacaaaattacattttgatgatctcgcccggcgatatggacatcctatcataatacttaatttgataaagactgttgaaaaaaggccacgtgaaatgatgctcaggcgtgaatattgtagagctgttgaatatcttaatcaaaatgtcccagaggagaagaagttgagattcatccactgggattttcataaatttgctaaaagcaaatctgcaaatgtactgggtgttttaggaaaagttgcgggtgaagcactggacctcactgggttttactacagcggaaagccaaaagtccagaaaaaaaggttaattcagcttagtcgaactagcactgcaagggatggctcccttgatataagggccagttctggagatctttcaaggctcagggatggctcccttgatataagggccagttctggagatctttcaaggctctctagtaatgctgaggcacttagttctacaggctttcaagatatgagaaatcaggctaacaaacaagagtttcttggtgatactccctgttaccaaactggagtgctccgtacaaattgcatagattgcctggatcgcacaaatgttgctcagtatgcatatggccttgctgctttggggaggcaacttcatgcaatgggactgacagatgttttaaaaatccaccctgatagcagcattgcttctgctttgatggaaatgtaccagagcatgggtgatgcacttgctcatcagtatggaggatctgcggcacataacacggttttccctgagaggcaagggaaatggaaggctactactcagtctcgggagttcctgaaatcaattaaacggtattacagtaatgcctacactgatggtgagaagcaggatgctataaatctgtaagtctatcgtgttgcttttatcataatagatgtactgtattaaacatataaggtagtgagtgaaccagctcttgagttgtctagtgccatgggtgcaatcagatttctggggtactaattcttagtttggtggtactatcagatttctggggtattttcaaccacaagaaggaaaaccagctctttgggagctggatactgattactatcttcatgtgacgacagctggggatgatcttatgtctgatagctaccacttgagttctgcacctggaaataatgtgttcgtggggtctggagctgcattgaaccctgggaccatattgagccctgtcccagcatgcaaagaggatttctcacggaagaagcttacttcgttcgacaaacttatagaaagaacatgtagttctataaggaatgtaaggcttcattgtgacgctgatctaaagccaagtggaggtgttggaacttctggaatggcaccagatgcagctgagatacagcttaaaagccccaactggttgtttggtcaaaggaagcatacggagacaatttcaaccgcaagagttgccccggttgaaaacgtgaacgaggggaacagagacgagtcaaatgtgtctctttgtggggaactaatttggctatcctcctcagttgaatcatgcgaggaggacattttcagaaggtaccttgcattcacgacagcggatgtagagaatggctggtatggcggaacactgctatatgaccgagatgaaaacagcggggcttacaggcactattctgagctctgccagggagctgtcatggatccctttgagcatgaccctgagaaagagcggcactacgcggaggcccttagcgtggatctcggcgatgcacgggtggaggccgaaatgcaggccgcgctggatgactaccaggtcatagggtcggacctgagcatcatcccttcgtgcggagcactcgcagaggacccgagccagctgacgaggtggatcattggagatgagaggctgcttgtgggtgctgctgcgcagtagaccggtggggttctgtcttctactcttctgtggaaggttgtacagagcaacagattgccattcaccgacccagcctttgtgttttatagatacttccctgaaacaattactccatgtatttagcagcaggtgttttatagacacttccctgaaacaattactccaacacgtgcatgcaatttattgttgtgcagcaggtggtattgctgctgggattagctttggcaataatagttgattgttgtgcagc

SEQ ID NO: 133497 - DNA, 3151 bp, Zea Mays
ggacatgtgcgctttctccgcctttcctctcgtctcctcgtccgttgggggctcgggcgctcggctggatccatttcgcgtggcgcgcgcggtcgacgggaggtcccagccagccagcgagagagggagccggggccgggcggggcggcacctcgcgagatggcggcggaagcggacgacccgtcgctggcggcgaccctggagaagttccgcctctacgagacgcgcgcgaggttctacgtgatcgggagctcgcgggagaagcgctggttccgggtgctcaagatcgaccgctccgagccctccgagctcaacgtaagcgaggaccccgtctggtactcgctgcaggaggtcaagagcctcctccagcggatcgacgagggcaaccgatccaccgggggcctcgccttcgtcaccaaggcatacggcatcgcaggttgcatcaagttcctggagtcatactacctgattttagtcaccaaacgccgtcaaatcggttgcatttgcgggcatgctatatattgtatagatgagagccagatgatcaccatcccacactcatcagtgcaaacagatgttgcgacctctaagaatgagctgaggtacaagaagcttttggctagtgttgatctcaccaaggatttcttctatagctacacatatccaattatgcagagcctgcaacagagtgttacttctgcagggatgaaagaaatgccttatgaaaatttgtttgtctggaacacttttctgacagagccagtacgttcaaggtgccacaatactctctggacagtagctcttgtccatgggcacttcaagcaggtcaagctatcaatttttggcagagagataaatgttgttctcagctctagaagatcccgacacttcgccgggacacggtatttgaaaagaggtgtgaatgaccatggaaaagttgctaatgatgttgaaacagagcagatagtctttgaagaagaggctggttcctggaagggaagaatgagtgccgtagtacagatgcgaggatcaatccctctcttttggtcacaagaggcatctcgacttagtcctaagcctgatatttttgtgcagagatatgatcccacatatgaagcaacaaaattacattttgatgatctcgcccggcgatatggacatcctatcataatacttaatttgataaagactgttgaaaaaaggccacgtgaaatgatgctcaggcgtgaatattgtagagctgttgaatatcttaatcaaaatgtcccagaggagaagaagttgagattcatccactgggattttcataaatttgctaaaagcaaatctgcaaatgtactgggtgttttaggaaaagttgcgggtgaagcactggacctcactgggttttactacagcggaaagccaaaagtccagaaaaaaaggttaattcagcttagtcgaactagcactgcaagggatggctcccttgatataagggccagttctggagatctttcaaggctcagggatggctcccttgatataagggccagttctggagatctttcaaggctctctagtaatgctgaggcacttagttctacaggctttcaagatatgagaaatcaggctaacaaacaagagtttcttggtgatactccctgttaccaaactggagtgctccgtacaaattgcatagattgcctggatcgcacaaatgttgctcagtatgcatatggccttgctgctttggggaggcaacttcatgcaatgggactgacagatgttttaaaaatccaccctgatagcagcattgcttctgctttgatggaaatgtaccagagcatgggtgatgcacttgctcatcagtatggaggatctgcggcacataacacggttttccctgagaggcaagggaaatggaaggctactactcagtctcgggagttcctgaaatcaattaaacggtattacagtaatgcctacactgatggtgagaagcaggatgctataaatctatttctggggtattttcaaccacaagaaggaaaaccagctctttgggagctggatactgattactatcttcatgtgacgacagctggggatgatcttatgtctgatagctaccacttgagttctgcacctggaaataatgtgttcgtggggtctggagctgcattgaaccctgggaccatattgagccctgtcccagcatgcaaagaggatttctcacggaagaagcttacttcgttcgacaaacttatagaaagaacatgtagttctataaggaatgtaaggcttcattgtgacgctgatctaaagccaagtggaggtgttggaacttctggaatggcaccagatgcagctgagatacagcttaaaagccccaactggttgtttggtcaaaggaagcatacggagacaatttcaaccgcaagagttgccccggttgaaaacgtgaacgaggggaacagagacgagtcaaatgtgtctctttgtggggaactaatttggctatcctcctcagttgaatcatgcgaggaggacattttcagaaggtaccttgcattcacgacagcggatgtagagaatggctggtatggcggaacactgctatatgaccgagatgaaaacagcggggcttacaggcactattctgagctctgccagggagctgtcatggatccctttgagcatgaccctgagaaagagcggcactacgcggaggcccttagcgtggatctcggcgatgcacgggtggaggccgaaatgcaggccgcgctggatgactaccaggtcatagggtcggacctgagcatcatcccttcgtgcggagcactcgcagaggacccgagccagctgacgaggtggatcattggagatgagaggctgcttgtgggtgctgctgcgcagtagaccggtggggttctgtcttctactcttctgtggaaggttgtacagagcaacagattgccattcaccgacccagcctttgtgttttatagatacttccctgaaacaattactccatgtatttagcagcaggtgttttatagacacttccctgaaacaattactccaacacgtgcatgcaatttattgttgtgcagcaggtggtattgctgctgggattagctttggcaataatagttgattgttgtgcagc

SEQ ID NO: 133498 - DNA, 501 bp, Zea Mays
ggatgacgccgcacgcacgaggtgcaagtgcaaacgaccgcgtccgagtccggatccgccaccaccgcgccctcgccgcactacaggcacgtggagcccatcggcggtgagccggaggctggagcacgcgcggcggtggcggcagcggctgcgcttgcggcggaaggaacggggtggggattcgaatcgaaggagcagcggcgatctactgttcccttgtattatgcccgcaactttacttctcaaagccaaagtatatgttgaagaatggcttggagctaacagtactgacaccaacttttggttatgatcagaagcgactggagtgcagtaatgaatctctaattgtttgcaatataagaaccagatacctcattcaaatggtttttccatgttacagattggtagccaagaacaaagaggttagctagtggtgatatgcgataaagttttcatatatacaacaataaagctgagaattgtggtctgcaaataatacag

SEQ ID NO: 133499 - DNA, 1951 bp, Zea Mays
ggatgacgccgcacgcacgaggtgcaagtgcaaacgaccgcgtccgagtccggatccgccaccaccgcgccctcgccgcactacaggcacgtggagcccatcggcggtgagccggaggctggagcacgcgcggcggtggcggcagcggctgcgcttgcggcggaaggaacggggtggggattcgaatcgaaggagcagcggcgatctactgttcccttgtattatgcccgcaactttacttctcaaagccaaagtatatgttgaagaatggcttggagctaacagtactgacaccaacttttggttatgatcagaagcgactggagtgcagtaatgaatctctaattgtttgcaatataagaaccagatacctcattcaaatggtttttccatgttacagattggtagccaagaacaaagagaaaaacacacaacagtaatgggtcacgaccatatgtctcgtataaagatgcatatggcagaaggttcttttggtgacaggatccggtgccagcaacctgggtgcaatgaggttgtcgatagaagggtagtgtactgcaaaattcacagtggagagttgtcatgccaacagttcagttacctccagagcggactggagagctcaggtttatctgtgcgccctgttaacgacagccaatttaagggatctgtttccattgcagcagtgccatgcactgagcaagagttacatgtcaagcatgaaggtggtgatcgaggtaaactaaaggatagttctgggtacactttgggtcaggctgcacaatttatcttctctggggcaagcatgctttgcaagaacgataactgcagcaagcaagcacacgagaactcaatccactgtaagttgcatagcggcggcgttaacaagggctgcatggcacggggctgtacaagaggtgcgcatggaggcacgcctttgtgcattgggcacggaggtgggaggcggtgtgtggtccctggatgcccaaatgcagcatgtggccaaggccgtagcgaccgctgcgtgaggcacggtggcggcaagagatgtaaattcgaagggtgcgcgaagggcgcgcaagggaacaccgatcactgcataaggcacggtgggggaaggcggtgcaggttccaaggatgtacaaagagtgcgcagggacgcacagatttctgcatcaagcatggtgggggcagccggtgcaggttccaagggtgtggcgcgagcgcaaaatggggaacggatttgtgctctgtgcacaggaagagcctgttgggcggtgacaatgccatccctgaagctttggccgccccttcagaaaaacgacgccgggccaagacgccccaaagggaagcgaagccgtccgaggtcttccaagagaatgtcacaacagcagctactgctggtaacagcacacagcacacgggcttccttctcgtagctgcccctgttgctaaccgtgacatactgaccaatggtatggcagtgacggggcaagctgcaatagccccccaacggatagtggcaccgatgttcatgagatcaccaacgccatctggatcagtggctgcctcggcacagaggtgggaggcgggagcaagcaggggtatgctgggtctgtagaaaggtggtataatttgggaaggcttggagacaccttgcccaagatagttctctgattattggctttcagactgagaaacctctgaaacttgacagccttgtgccgtcaacggactctagtgatgtcctgtgcagctgtgctctctcatttgtattgtaaattgtaatgcaaatctctagttgttcttgtgtatgttctcttgtcgccttgtagtagcgtggaaaccggtcgggggaccatctggaactttggatgataagcaataatattgtggcatggcctagctttgcaggtccagttggacttttttaagtagtggacattttaca

SEQ ID NO: 133500 - DNA, 393 bp, Zea Mays
ctagtgccaaattgcttctgcattctcttcccttcctgcatttcctcctctgtctcatcggggacccctgtccctcgtggcgacggccggtcgaccgccgctgccgaggacttcgccggcgacgaccacccccacgcccactacattatatgttgaagaatggcttggagctaacagtactgacaccaacttttggttatgatcagaagcgactggagtgcagtaatgaatctctaattgtttgcaatataagaaccagatacctcattcaaatggtttttccatgttacagattggtagccaagaacaaagaggttagctagtggtgatatgcgataaagttttcatatatacaacaataaagctgagaattgtggtctgcaaataatacag

SEQ ID NO: 133501 - DNA, 1843 bp, Zea Mays
ctagtgccaaattgcttctgcattctcttcccttcctgcatttcctcctctgtctcatcggggacccctgtccctcgtggcgacggccggtcgaccgccgctgccgaggacttcgccggcgacgaccacccccacgcccactacattatatgttgaagaatggcttggagctaacagtactgacaccaacttttggttatgatcagaagcgactggagtgcagtaatgaatctctaattgtttgcaatataagaaccagatacctcattcaaatggtttttccatgttacagattggtagccaagaacaaagagaaaaacacacaacagtaatgggtcacgaccatatgtctcgtataaagatgcatatggcagaaggttcttttggtgacaggatccggtgccagcaacctgggtgcaatgaggttgtcgatagaagggtagtgtactgcaaaattcacagtggagagttgtcatgccaacagttcagttacctccagagcggactggagagctcaggtttatctgtgcgccctgttaacgacagccaatttaagggatctgtttccattgcagcagtgccatgcactgagcaagagttacatgtcaagcatgaaggtggtgatcgaggtaaactaaaggatagttctgggtacactttgggtcaggctgcacaatttatcttctctggggcaagcatgctttgcaagaacgataactgcagcaagcaagcacacgagaactcaatccactgtaagttgcatagcggcggcgttaacaagggctgcatggcacggggctgtacaagaggtgcgcatggaggcacgcctttgtgcattgggcacggaggtgggaggcggtgtgtggtccctggatgcccaaatgcagcatgtggccaaggccgtagcgaccgctgcgtgaggcacggtggcggcaagagatgtaaattcgaagggtgcgcgaagggcgcgcaagggaacaccgatcactgcataaggcacggtgggggaaggcggtgcaggttccaaggatgtacaaagagtgcgcagggacgcacagatttctgcatcaagcatggtgggggcagccggtgcaggttccaagggtgtggcgcgagcgcaaaatggggaacggatttgtgctctgtgcacaggaagagcctgttgggcggtgacaatgccatccctgaagctttggccgccccttcagaaaaacgacgccgggccaagacgccccaaagggaagcgaagccgtccgaggtcttccaagagaatgtcacaacagcagctactgctggtaacagcacacagcacacgggcttccttctcgtagctgcccctgttgctaaccgtgacatactgaccaatggtatggcagtgacggggcaagctgcaatagccccccaacggatagtggcaccgatgttcatgagatcaccaacgccatctggatcagtggctgcctcggcacagaggtgggaggcgggagcaagcaggggtatgctgggtctgtagaaaggtggtataatttgggaaggcttggagacaccttgcccaagatagttctctgattattggctttcagactgagaaacctctgaaacttgacagccttgtgccgtcaacggactctagtgatgtcctgtgcagctgtgctctctcatttgtattgtaaattgtaatgcaaatctctagttgttcttgtgtatgttctcttgtcgccttgtagtagcgtggaaaccggtcgggggaccatctggaactttggatgataagcaataatattgtggcatggcctagctttgcaggtccagttggacttttttaagtagtggacattttaca

SEQ ID NO: 133502 - DNA, 668 bp, Zea Mays
gcggccgagtcgcacactccaatgaagggaagctttggttggttgactgctccatccacccaccccctacagttcagttcagttcagttggtctaggccatggccatgtccgcttcctcctcctcgcgcgccctcctccgccggatcggcggcgcgctcctccgccgctccttctcctcctcatccgccgcctccgcagggtaccacgtcgcgggcgggcccagctacatgcgcggcgccgtcttctgggagcccggccgcccgctcacgctcgaggagttccgcatgccgcggcccaaggccggcgagctcctcatcaagaccaaagcctgcggggtctgtcactccgatctccatgtcctcaaaggcgagctccctttctccacgccctgtgtcgtgggccatgagatcactggagaggtggttgaccatggcacgcacactcctgttgagatcatcaacaggttcccagtcggaagtcacgtcgtcggcgccttcataatgccatgtgggaactgcttctactgcgttaagggccaagaagatctgtgtgagtctttcttcgcgtataatcgtgccaaggggacactctatgatggcgagacacggctgtttctaaggggcaagatcgtaggacgagctgtggttgagatcatggagtgatgacg

SEQ ID NO: 133503 - DNA, 1538 bp, Zea Mays
gcggccgagtcgcacactccaatgaagggaagctttggttggttgactgctccatccacccaccccctacagttcagttcagttcagttggtctaggccatggccatgtccgcttcctcctcctcgcgcgccctcctccgccggatcggcggcgcgctcctccgccgctccttctcctcctcatccgccgcctccgcagggtaccacgtcgcgggcgggcccagctacatgcgcggcgccgtcttctgggagcccggccgcccgctcacgctcgaggagttccgcatgccgcggcccaaggccggcgagctcctcatcaagaccaaagcctgcggggtctgtcactccgatctccatgtcctcaaaggcgagctccctttctccacgccctgtgtcgtgggccatgagatcactggagaggtggttgaccatggcacgcacactcctgttgagatcatcaacaggttcccagtcggaagtcacgtcgtcggcgccttcataatgccatgtgggaactgcttctactgcgttaagggccaagaagatctgtgtgagtctttcttcgcgtataatcgtgccaaggggacactctatgatggcgagacacggctgtttctaaggggcaatgggaaaccggtgtacatgtatagtatgggagggcttgcagagtattgtgttgtcccagccaatgcgctagcagttctccctgactcactgccatacacagaatcagcaattttaggatgtgcagtgtttaccgcgtatggtgccctgaggcatgctgctgaaatgcggcctggtgattcagtagctgtgatcggagttggaggggttgggtcaagctgtttacagatagcaaaagcctttggagcttcccaagtcattgcagtggatgtccttgatgagaagcttcagaacgctacaacacttggagcaacccacactgtaaatgcagcaaaagatgatgcagttgaaaggataaaggaaattactgatggtaggggtgtagatgtggctatagaggcacttggtaaggcgttaacattttcccagtgcgccaagagcgtgcgtgatggaggcaaagctgttatgatcgggcttgctgcaacgaacgtaatgggagaggttgatataacccgtcttgtccgacgacaggtgaaaatcattggctcatatggcgcaagggctaggcaagaccttcctcagatagtgaagctcgcggagagtggtgccttcaatctccaaaacaccatatcaaggaaatgcaaatttgaggaggcgaatggcgcctatgaggatctcaatcagggcaagatcgtaggacgagctgtggttgagatcatggagtgatgacggacaaggtaatcaatcctgtggttccaagtctgggtcacacaacaataaagttttgcgtgctctttcacagcattgtcaaaatctgtagatgaccaaactgcattgtgtgtgtgtgtgtgtgtgtgtgtgacagtgtgttgttggaattaacatttgcccttaaattatgtctgtacacgccc

SEQ ID NO: 133504 - DNA, 2826 bp, Zea Mays
gcagcagcacccacccactctcccctcctcgattcccgattcctcctcgctctcgcgtgccatcgccgttcaccgcgcgctcatgtcgtcttctccctccggatgccaatgtcttgccatgaccatgcggccggccaccgccgtcttttccagctaagaaccaccaccaccaccacgaggctttttctttccctcctcgtcgccgtcctcctggtcgccgacgtctgctcggcggcgcggcagttctccacggtcgccatctcgcacgcgcccaacgccacgctcgtctgcgccctcgtcaccgccgccgccgatgacgacgcggggtcgccgggctccaagcagctgcgctgcacgtcgctccccgacggcgagcagttcgtgtacccctccgccgacatcccctacaacgcgatcgcggccgggaccgacttcctctgcggcctcatggcgccgctcggcggccacgccgccatgcgctggtggtccttcaccgaggagttcgccgccaaccgatcccgccccgtggggcgccgcctctactggggcccgtcgctgcgctcgctcagcgccggcggatcccacgtctgcggcctctccgacgaccacgaccccacctgctgggagtggccgcacctggacctgcccaaaggcctcgacttctcccgcatcgcgctgggccacgacttcctctgcggcatcgacaagctcgacaacaccagcatgagctgctacggcgccatggcggcgccgtcgctcgcgcccgaccccgcgcccttgaggaccgtcgccgccggccaccgccacgcgtgcgccgtcgacgcggagggcggcttcgcctgctggggcgacggcgacggcgacgtccccgaggtgccggcacacgagctgccggacgacatgttggccatggcgctcggcaacggcacgacctgcatcctctccggcagcggcagggtccggtgctggggcgccgtccaggtgccggaccagtacaggaccgcggatttcctggccatcgaggccgacggcgacgcggtgtgcggcatcctcaacagcaactactccgtcgcgtgctgggggaggagcgaccgcttcggcgccggcggtagcctagtctacaacagcaccatgcccggcgcgtgcgcgcgcaagaagagctgcccctgcgacatcatctcgggctccggcgcgctctgcggcaccggcggcgccgagggcggcgaggagctcgccgtctgccgggcctgcgcgacgccgctgaacgcgtccaggatcctcattgccaacggcagggcgggaccggcagccggaggcgacgccgggaagaagaaggccaagaccctggccgtcgcggtcggcgtcggcgccgcggtactcgcggcggctgcggtggcgctctacctcgtggcttacaggaagccggacaagaagaagaagacgctgacgctgcgtctaggggagcggtcgtcgcggcgcccgtgccgcgacgtggaggccgccatggtcatgccggcgccacaggtctcgccgctgcggtcggcgcggccgctcgggtgcgaggagttcacgctccgggacctgtcgcgcgtcaccgacggcttctcgaacgagaagaagatcgggtgcggcagcttcgggtcggtgtaccgcgccaggctccccgacgggcgcgaggtcgccatcaagcgggcggagcgcagcagcagcggcggacgccggagacgccgcttcgacgccgagcgcgcgttccgcgcggagctgcggctgctgtcgcgcgtgaaccaccgcaacctggtgcagctgctgggcttctgcgaggagcgcggcgagcggatcctggtgttcgagttcatgccccacggcgcgctccacgaccaccttcactgcagcagcagcagcggcaacggcgggcgctcgccgctgttcacgtcgtgggaggcgcggctccgggtggcgctggacgcggcgcgcggcgtggagtacctgcattgctacgccgtgccgggcatcatccaccgggacgtgaagccctccaacatcctgctcgacggcgactggacggccaaggtgtcggacttcgggctgtcgctagccagcggcagctcggcggcggccgccgccgcgtcgtcgtccgccacggccggcacggtcgggtacatcgacccggagtactaccggctgcaggagctgacggagcgcagcgacgtgtacagcttcggcgtggtgctgctggagctggtcaccggccgcaaggccatccaccggacgagccaggacggcagcgggtccccgcggaacgtgatcgagttcgccgtgccggcggtcgagacgggcagcatcgccaggatcctcgacgagcgcgtgcctccgccgcgcgggcacgaggtggaagcgctggcgcgcgtcgccaagatcgccacggagtgcgtccggccacgggggcgcgcgcggccgatcatgtccgaggtggtggcggagctggagtgggccgtcacgctgtgcgaggagtccgtcgtggccagcgacgccgccgtgggaaccgtcggcgggcagcagaacagctcgcggcacggcggctccgacctgccgcggtccgagtccgacggcccgagcccgtttcacacccgtgaactgggtttcggcttcgggccgagccgaccagtcacccatggcaggtcccactcgacaatgtgaaatcattgttttttgtctcttcttttctcttcgccgtcttccacggttggttggtatactgtatacattgtataggctgaattagtcgatgtgcataaaaaaaatcaaattttgaaaagaaagaaaaaa

SEQ ID NO: 133505 - DNA, 3149 bp, Zea Mays
aacccgtgccgtgcctgccgagcccaaccactccaccaccctctggctctcctcgtcctcggcgacgagttctcccccttctctctcctcttctcgccctcgccttcgcgtagtcgagtctcatcgtcagctcctcgcctgtcgcctccgctgcgcgtcgccggacgagaggagagacagacagacagacagagaggggaaagggatccctccgaccaggcccaccgccgtccatccgcccccggatctcctccgtccccaccgccgtcgccgacacacgactccaggtcaggtcagtgttgatggataatctctctccaagcactctgctcaacagtatcacctgtcttggcgccttaacatctgatgtctctactgtgagacccaagcctgttcagaagtattgcaaaaatgtatatgatatctcaagcatcgtgaatccccttcttgaagatctttgcaagtctcccgaagagcaacttaatgaggtcctaagagatcttgacaccgctgtcaatgaagcttcaggtcttattggaaactggcaccagacaaccggcaaaatatgttttggttggcaaattgagtcagtaatatcagatattcagggatgttcccttcagttgtgccagctggttcattcgctattgccttctctgactgctcgtgcatgcacatgtattgagaaactccaggacataaattatgagcacctgtttgatctggttaaggaggttgccatggagcttgcagagacaggtgcagtgagttctgagaatctgttgaaactatcaagtttgttgagcttgtcaacaaacatggaattgtacatggaagctgtttcccttgagaatctcagaacaagggcactacgaagtgagaatcgtgaagaactggagctagccgagcagatgattccactggtcaactatatgcatgatcatcttctcagggaaaaacaacagcttagcatcaatggtgtccctattcctcctgatttttgctgtcccctttccttggagctgatgtctgatcctgttattgtagcgtctggacagacctatgagcgggtttatatcaagttatggcttgatgagggttttactatctgcccaaaaacacggcaaagacttggccactccaatttaatacctaattatactgtgaaggctctgatagctaactggtgtgaatcacatgacattaggctccctgatcctataaaatcactgaagttgaactttccttctgctgcctcctcccttcaggatttgagtgctgcaggtggcagccctctacatcctactcttgtgtcaaggtctaatattcctgggtccccagaagctgatgtgcacttgagaaacttaaatggcgcatcttctcctcgtagtttggccaatcagaattctcatgtgcatgcaaaccgtcctggtcatgaggtatcgacgagtcaaacttcagaaaatgcaaatggttctgcaccagatgtttcgaggttatctctcgcaggttctgaaacaagagagtctagtatggaagcaaagcgtgctggttcgattggacaaatgtcagaacattctactgatgaagcatttcaatcttctaatttagataggaatctgcaggacaacttggctagctcttcattgaatggtagtctcccaaatagtggtcaacttgatggggaatgtgacaatggggtgacaagggttccaagcgataggacaaattacagtagtgatgcatctggagaggttacagatggcggtgctgcgcccgtagcctcttctgttcctcaaagggaacacttaattcctgcaagattgggtactagacaatttataaggcggcaaccatcagataggggtttccccagaattatatcttcatcaacgatggatacacggagtgatctctctgccattgagaatcaggttcggaagctgattgatgatttgaaaagtgattccatagatgttcagagatcagcagcatcagatcttcgttctctagctaagcacaacatggagaataggattgtcattgcaaactgtggggctgtaaacgtgctggttggtcttcttcattcaccagatgccaaaacccaagaacatgctgtgacagctcttttgaatttgtcgatcaatgacaacaataaaattgctattgcaaatgctgatgctgtcgaccctctcattcatgtccttgagactgggaaccctgaagctaaagagaattcagcagctactctattcagtctctcggttgttgaagaaaataaagtgaggattggacgatctggtgccatcaagcctctagtagacttgctaggaaatggcacccctcgaggaaagaaagacgcagctacagcattgtttaacctgtcgattcttcatgagaataaagctcgcatcgtgcaagctgatgctgtacagcatctggttgagcttatggatcctgctgctggaatggtcgacaaagctgtggctgtgttggcaaaccttgctacgataccagaaggaaggaatgcgattgggcaggcacgtggcattccagcccttgttgaagttgttgagttgggctctgcaagagggaaggagaatgctgcggccgcgttgcttcagctctgtacaaacagcaacagattttgcagtatagttcttcaagagggcgcagtgccccctctagtcgccctttcacagtcgggaacaccgcgtgcgagagagaaggcacaagcgcttctgagctacttccggagccaaagacatgggaattcagcaaggagatgattttcccccttgtgttgtagtgtacattaaagcgtcaccttttatgcccatcatcgtgattgggtcctgttgactgttactgattggcgctggtaaatgcgttggctggaattatgcagtgccctgtgctctgtttatagattgagattgttattgctcatctcatgtaagtgttgtgggcggtgagtgttgtctgttgagatggtatgtttttttttcttctctttttcgtttttgaggattttttgtacagcttatccgttggtagcaacttgcatattcactgattttgtcctgtatgtatattctattagctgtggcctgtggaattatgatggttcgatggttgtacaagttatt

SEQ ID NO: 133506 - DNA, 3139 bp, Zea Mays
aacccgtgccgtgcctgccgagcccaaccactccaccaccctctggctctcctcgtcctcggcgacgagttctcccccttctctctcctcttctcgccctcgccttcgcgtagtcgagtctcatcgtcagctcctcgcctgtcgcctccgctgcgcgtcgccggacgagaggagagacagacagacagacagagaggggaaagggatccctccgaccaggcccaccgccgtccatccgcccccggatctcctccgtccccaccgccgtcgccgacacacgactccagtgttgatggataatctctctccaagcactctgctcaacagtatcacctgtcttggcgccttaacatctgatgtctctactgtgagacccaagcctgttcagaagtattgcaaaaatgtatatgatatctcaagcatcgtgaatccccttcttgaagatctttgcaagtctcccgaagagcaacttaatgaggtcctaagagatcttgacaccgctgtcaatgaagcttcaggtcttattggaaactggcaccagacaaccggcaaaatatgttttggttggcaaattgagtcagtaatatcagatattcagggatgttcccttcagttgtgccagctggttcattcgctattgccttctctgactgctcgtgcatgcacatgtattgagaaactccaggacataaattatgagcacctgtttgatctggttaaggaggttgccatggagcttgcagagacaggtgcagtgagttctgagaatctgttgaaactatcaagtttgttgagcttgtcaacaaacatggaattgtacatggaagctgtttcccttgagaatctcagaacaagggcactacgaagtgagaatcgtgaagaactggagctagccgagcagatgattccactggtcaactatatgcatgatcatcttctcagggaaaaacaacagcttagcatcaatggtgtccctattcctcctgatttttgctgtcccctttccttggagctgatgtctgatcctgttattgtagcgtctggacagacctatgagcgggtttatatcaagttatggcttgatgagggttttactatctgcccaaaaacacggcaaagacttggccactccaatttaatacctaattatactgtgaaggctctgatagctaactggtgtgaatcacatgacattaggctccctgatcctataaaatcactgaagttgaactttccttctgctgcctcctcccttcaggatttgagtgctgcaggtggcagccctctacatcctactcttgtgtcaaggtctaatattcctgggtccccagaagctgatgtgcacttgagaaacttaaatggcgcatcttctcctcgtagtttggccaatcagaattctcatgtgcatgcaaaccgtcctggtcatgaggtatcgacgagtcaaacttcagaaaatgcaaatggttctgcaccagatgtttcgaggttatctctcgcaggttctgaaacaagagagtctagtatggaagcaaagcgtgctggttcgattggacaaatgtcagaacattctactgatgaagcatttcaatcttctaatttagataggaatctgcaggacaacttggctagctcttcattgaatggtagtctcccaaatagtggtcaacttgatggggaatgtgacaatggggtgacaagggttccaagcgataggacaaattacagtagtgatgcatctggagaggttacagatggcggtgctgcgcccgtagcctcttctgttcctcaaagggaacacttaattcctgcaagattgggtactagacaatttataaggcggcaaccatcagataggggtttccccagaattatatcttcatcaacgatggatacacggagtgatctctctgccattgagaatcaggttcggaagctgattgatgatttgaaaagtgattccatagatgttcagagatcagcagcatcagatcttcgttctctagctaagcacaacatggagaataggattgtcattgcaaactgtggggctgtaaacgtgctggttggtcttcttcattcaccagatgccaaaacccaagaacatgctgtgacagctcttttgaatttgtcgatcaatgacaacaataaaattgctattgcaaatgctgatgctgtcgaccctctcattcatgtccttgagactgggaaccctgaagctaaagagaattcagcagctactctattcagtctctcggttgttgaagaaaataaagtgaggattggacgatctggtgccatcaagcctctagtagacttgctaggaaatggcacccctcgaggaaagaaagacgcagctacagcattgtttaacctgtcgattcttcatgagaataaagctcgcatcgtgcaagctgatgctgtacagcatctggttgagcttatggatcctgctgctggaatggtcgacaaagctgtggctgtgttggcaaaccttgctacgataccagaaggaaggaatgcgattgggcaggcacgtggcattccagcccttgttgaagttgttgagttgggctctgcaagagggaaggagaatgctgcggccgcgttgcttcagctctgtacaaacagcaacagattttgcagtatagttcttcaagagggcgcagtgccccctctagtcgccctttcacagtcgggaacaccgcgtgcgagagagaaggcacaagcgcttctgagctacttccggagccaaagacatgggaattcagcaaggagatgattttcccccttgtgttgtagtgtacattaaagcgtcaccttttatgcccatcatcgtgattgggtcctgttgactgttactgattggcgctggtaaatgcgttggctggaattatgcagtgccctgtgctctgtttatagattgagattgttattgctcatctcatgtaagtgttgtgggcggtgagtgttgtctgttgagatggtatgtttttttttcttctctttttcgtttttgaggattttttgtacagcttatccgttggtagcaacttgcatattcactgattttgtcctgtatgtatattctattagctgtggcctgtggaattatgatggttcgatggttgtacaagttatt

SEQ ID NO: 133507 - DNA, 3217 bp, Zea Mays
aacccgtgccgtgcctgccgagcccaaccactccaccaccctctggctctcctcgtcctcggcgacgagttctcccccttctctctcctcttctcgccctcgccttcgcgtagtcgagtctcatcgtcagctcctcgcctgtcgcctccgctgcgcgtcgccggacgagaggagagacagacagacagacagagaggggaaagggatccctccgaccaggcccaccgccgtccatccgcccccggatctcctccgtccccaccgccgtcgccgacacacgactccaggtcagtgttgatggataatctctctccaagcactctgctcaacagtatcacctgtcttggcgccttaacatctgatgtctctactgtgagacccaagcctgttcagaagtattgcaaaaatgtatatgatatctcaagcatcgtgaatccccttcttgaagatctttgcaagtctcccgaagagcaacttaatgaggtcctaagagatcttgacaccgctgtcaatgaagcttcaggtcttattggaaactggcaccagacaaccggcaaaatatgttttggttggcaaattgagtcagtaatatcagatattcagggatgttcccttcagttgtgccagctggttcattcgctattgccttctctgactgctcgtgcatgcacatgtattgagaaactccaggacataaattatgagcacctgtttgatctggttaaggaggttgccatggagcttgcagagacaggtgcagtgagttctgagaatctgttgaaactatcaagtttgttgagcttgtcaacaaacatggaattgtacatggaagctgtttcccttgagaatctcagaacaagggcactacgaagtgagaatcgtgaagaactggagctagccgagcagatgattccactggtcaactatatgcatgatcatcttctcagggaaaaacaacagcttagcatcaatggtgtccctattcctcctgatttttgctgtcccctttccttggagctgatgtctgatcctgttattgtagcgtctggacagacctatgagcgggtttatatcaagttatggcttgatgagggttttactatctgcccaaaaacacggcaaagacttggccactccaatttaatacctaattatactgtgaaggctctgatagctaactggtgtgaatcacatgacattaggctccctgatcctataaaatcactgaagttgaactttccttctgctgcctcctcccttcaggatttgagtgctgcaggtggcagccctctacatcctactcttgtgtcaaggtctaatattcctgggtccccagaagctgatgtgcacttgagaaacttaaatggcgcatcttctcctcgtagtttggccaatcagaattctcatgtgcatgcaaaccgtcctggtcatgaggtatcgacgagtcaaacttcagaaaatgcaaatggttctgcaccagatgtttcgaggttatctctcgcaggttctgaaacaagagagtctagtatggaagcaaagcgtgctggttcgattggacaaatgtcagaacattctactgatgaagcatttcaatcttctaatttagataggaatctgcaggacaacttggctagctcttcattgaatggtagtctcccaaatagtggtcaacttgatggggaatgtgacaatggggtgacaagggttccaagcgataggacaaattacagtagtgatgcatctggagaggttacagatggcggtgctgcgcccgtagcctcttctgttcctcaaagggaacacttaattcctgcaagattgggtactagacaatttataaggcggcaaccatcagataggggtttccccagaattatatcttcatcaacgatggatacacggagtgatctctctgccattgagaatcaggttcggaagctgattgatgatttgaaaagtgattccatagatgttcagagatcagcagcatcagatcttcgttctctagctaagcacaacatggagaataggattgtcattgcaaactgtggggctgtaaacgtgctggttggtcttcttcattcaccagatgccaaaacccaagaacatgctgtgacagctcttttgaatttgtcgatcaatgacaacaataaaattgctattgcaaatgctgatgctgtcgaccctctcattcatgtccttgagactgggaaccctgaagctaaagagaattcagcagctactctattcagtctctcggttgttgaagaaaataaagtgaggattggacgatctggtgccatcaagcctctagtagacttgctaggaaatggcacccctcgaggaaagaaagacgcagctacagcattgtttaacctgtcgattcttcatgagaataaagctcgcatcgtgcaagctgatgctgtacagcatctggttgagcttatggatcctgctgctggaatggtcgacaaagctgtggctgtgttggcaaaccttgctacgataccagaaggaaggaatgcgattgggcaggcacgtggcattccagcccttgttgaagttgttgagttgggctctgcaagagggaaggagaatgctgcggccgcgttgcttcagctctgtacaaacagcaacagattttgcagtatagttcttcaagagggcgcagtgccccctctagtcgccctttcacagtcgggaacaccgcgtgcgagagagaaggcacaagcgcttctgagctacttccggagccaaagacatgggaattcagcaaggagatgattttcccccttgtgttgtagtgtacattaaagcgtcaccttttatgcccatcatcgtgattgggtcctgttgactgttactgattggcgctggtaaatgcgttggctggaattatgcagtgccctgtgctctgtttatagattgagattgttattgctcatctcatgtaagtgttgtgggcggtgagtgttgtctgttgagatggtatgtttttttttcttctctttttcgtttttgaggattttttgtacagcttatccgttggtagcaacttgcatattcactgattttgtcctgtatgtatattctattagctgtggcctgtggaattatgatggttcgatggttgtacaagttatttatttgatctgtagtaccagctaccaaataaggccacatttggacgcaaagtatttttgaagtattggataaa

SEQ ID NO: 133508 - DNA, 536 bp, Zea Mays
ggatcagtcaggaccgccgcttcccgtgcaccaccagcccgaactcggcttctgccgccgccgccgacggggcaaggtcatgcctttccaccactaaatggtcctgctccattccagctccagccttcgccgccactgccccacggggcgatgaagaggacggctgcggaggcggcgcagcagcagttgctggacgagctggcggcggcggcaaaggccgctgaagctggcaattccattggcgtgcgagcgatattggcgcggctcaatcaccagcttcccccgctcgggaagccgttcctccgctccgcctcctacctcaaggaggccctcctcgcgctcgccgaaggccatcacggcggctgccatcatcgcggcgtacaagactttctctgaccactcgctcgtgctccagttcaccaacttcaccgcaacgcaggcacttcttgacgaaattggtggcagcacgtcgtcctgtatccatgtcatcgattttgatcttggcgttggaggccagtgggcttctttcttgcagg

SEQ ID NO: 133509 - DNA, 327 bp, Zea Mays
atggctgctccggtcgttgcatgctccccggcgctccgggtccaagtgaaagcagccatggatgtagcgtcatttcgggtaccgacatctctcagtttccccagggaaagacttaatagacagcgccaggcggacgtagtcctcgacgccaatggtcatgtacatcagcgcgtacctgccgttggtgagcaccttgacgacgtcgccgacgttggccaccagcgctccggggatggggtcgacgctgatccacgcaccgcacctcctgatctgcagcctcgggacggcgctgacctggagcagcagcgtgaggccggcggcgtctga

SEQ ID NO: 133510 - DNA, 2617 bp, Zea Mays
gtcatcggcaggacatccacaccaacccgtgctcaaggaaaaaaaaccggggcggcgaaaaccctcgaaccctaatccttacgcccctcatggcggacgctgatgcggcgctgccaacgccgcctccggaggtagtagcccccgaggagcatcccgtgggcgccgaatccaccgtcgccgcgccggccgaagtcgataacaagcggaagctagaggaggtcagcgccgacgcggaggtgaaaggcaccagcgaggacgccaagcgcccgcgcgtggacggcgagcccgacgccgcaacaggggttgagcagcaaatcgatgggtcctccgtgaatgcggatcccgcagctccggaggataaggctgctcttaacgttggcgcagcaatggatggtgataatgacacgcctgctcccgctcccgctccagactcgcaggcggtttctgacgagaagccgcttgaagcagcagctgaagctccacagcaggaaggtgatgcagcaactgctgtacaggagatttctcgtaagatcgaagtgcccaacagcaaggttggtgtcgttattggaaaagctggtgagacaatcaggaacttgcaaatcagctcgggtgcaaagatccaaatcaccaaggacatcgaagcggactcaaatgccctgactcggccggttgaactagttggaacacctggcagcgttgataaagctgagcagcttattaagagtgtcatagctgaggctgaggctggtggttcccctgccttaatagctagaggatttggaagtggacagcctggatcagagcaatttgagatgacagttcctgataacaaggtcggtctcattatcggaaaaggtggtgagacaattaaaggcatgcagaccaaatctggtgctcgtattcagttaataccccaacatcctccagagggtgttacattgactgaaagaattgtacgtgttactgggaataagaagcagattgaagctgcaaaggatttgatcaagcaagctatgaatcagacattttcaaagcatacaaatcagtctggcggatatggtccacaaggttaccgacctcagggtcatggtgccgcttctcagttggggccacgctctcagaatcatggctatggatacccacctagaggtatgcctccacctcaaaactacaacgcaccctacggtggctacccaccgcagggaccgtcaagaggtggcatgggctgggaccagaggccgggcccaccaacccatccttcgtaccagggtggtggttctgactactacaagcagggatctcagccatatgatagccagccacccagctaccctcctgggccagggaattacaacagttatgggcaatcccagggccctaactatggccaacctcagtatccgcaacatgcacctcaacagaactacagccatggctatggtgatcctagatacaatgccccccctccgaaccagcagtactatggtcagccaccgatggccccgcagcaaggctatcctcaacagccagatccctatgctaggcctccatacagtggacctggtcaatggacccccaggggtgctcccgccgcagatggctcctaccaggcgccaccttcatcttatgggccaccgtctcagcaacctcctgcttatgggcaaacatatggtgcagcaacgggacctgatgggtatggtcaacagggttacccacagcagggtggccaggtaccagcttcatatggtcagagtgcaccagcagctccaggatatcctcagcaaggcacgcagcaaggtggctatgcacagtacccgcagacccaaccagcatatggtgatcaagcagctcaagccaatgcgaactatgggtaccagggagctccagcagatcccaactacggaagtgcgtacccacagcagccagggtatggtcctcctggtcaggcaactggtcaggctggttatgcatcctctgcgccagcggccagccagcctgtgtatggccaggctggatatacccagccacctacaaatcctccaagttatgatcagtctgcagcaccagcggcgactcagagcggttatgctgcgccccctgcaaatccacaacagcctgctgcagcaaaaggggtctcgccacagcctgctgctgctgctgctgctggatatggtgctagcgggcagtggacggcatgagcctcgtcttccgaacttcgatgacagcaaggtcaggttggatatccgcttttggcgcgtgtttgaatgtttgcatcttttggatgtctgtggacgcatcatgtagggcttgaccccgttatcgaaagagattgtaaccccttgagttgtgatactggacatcttctgtagtatctacgagtagttgcttaatgtgacttttaaacattctattcagtttggatgttccttgtcttgctacttcacagcttgccaagccagtaatctttggattcatgtttggttgctctttggtctttgctgtcgttcctgtaaataaatattggcgtttggccttctcttacgtcgttcatgggatgacggggtgccctttcgagttggcaatagatctgctgttcatccaaactcagttggttttg

SEQ ID NO: 133511 - DNA, 1553 bp, Zea Mays
ttatgttagtttgtagtgtctgttatttacttccccttttggtttctaacatgaattcttgtacagacattttcaaagcatacaaatcagtctggcggatatggtccacaaggttaccgacctcagggtcatggtgccgcttctcagttggggccacgctctcagaatcatggctatggatacccacctagaggtatgcctccacctcaaaactacaacgcaccctacggtggctacccaccgcagggaccgtcaagaggtggcatgggctgggaccagaggccgggcccaccaacccatccttcgtaccagggtggtggttctgactactacaagcagggatctcagccatatgatagccagccacccagctaccctcctgggccagggaattacaacagttatgggcaatcccagggccctaactatggccaacctcagtatccgcaacatgcacctcaacagaactacagccatggctatggtgatcctagatacaatgccccccctccgaaccagcagtactatggtcagccaccgatggccccgcagcaaggctatcctcaacagccagatccctatgctaggcctccatacagtggacctggtcaatggacccccaggggtgctcccgccgcagatggctcctaccaggcgccaccttcatcttatgggccaccgtctcagcaacctcctgcttatgggcaaacatatggtgcagcaacgggacctgatgggtatggtcaacagggttacccacagcagggtggccaggtaccagcttcatatggtcagagtgcaccagcagctccaggatatcctcagcaaggcacgcagcaaggtggctatgcacagtacccgcagacccaaccagcatatggtgatcaagcagctcaagccaatgcgaactatgggtaccagggagctccagcagatcccaactacggaagtgcgtacccacagcagccagggtatggtcctcctggtcaggcaactggtcaggctggttatgcatcctctgcgccagcggccagccagcctgtgtatggccaggctggatatacccagccacctacaaatcctccaagttatgatcagtctgcagcaccagcggcgactcagagcggttatgctgcgccccctgcaaatccacaacagcctgctgcagcaaaaggggtctcgccacagcctgctgctgctgctgctgctggatatggtgctagcgggcagtggacggcatgagcctcgtcttccgaacttcgatgacagcaaggtcaggttggatatccgcttttggcgcgtgtttgaatgtttgcatcttttggatgtctgtggacgcatcatgtagggcttgaccccgttatcgaaagagattgtaaccccttgagttgtgatactggacatcttctgtagtatctacgagtagttgcttaatgtgacttttaaacattctattcagtttggatgttccttgtcttgctacttcacagcttgccaagccagtaatctttggattcatgtttggttgctctttggtctttgctgtcgttcct

SEQ ID NO: 133512 - DNA, 1077 bp, Zea Mays
gccgtcacaacggcgcctatggccaagccttccgtccagactcgtttcgtgttggattcgatggcagcggagagggtgaaggtcgctgagaattgggagcgggcgttggattcgttggagaacatgaatcaacgcctgggaaagttcgacaaggtccagcgccagttggtggagcagtcggaggtggcggcgcaggcggccaagcaggcggtgaaggagcgttctgttctgtcgcgtcaggtggaggaatctgggcggttgctggcacggctacagctggaatccatggcggcggagacgaagaagtccaggaggagcggatccaccagtccgtcatctgggtcttcaccccctgttcaggtatggaagggtcctcagaagggtgttcagctcaatccactgcctgggatgtcattcccaaagtttgatgatgtcgatccgagagtttggttggacaagtgtttggattacttccatattttcaaggtttctgaagctatgtgggtacaagtggcgtctctgcacttggaagggtttgttgcttactggtttcacgtgcataaactgaaacagagaacggacgagtggaaccattttgctcaggctgtgttgaacaagtttggcgcagacgagtatccaaaggcgatgaggagattgatgggtctcaggcagacggggtcgttggacgagtttgtgcgggcgttcgaggaagcacagtacatggtatcgctgcataaccccgaagttgggatgaactgaatgatcaatacaaaggaaggtcgacaaggttagtgttccagtcgaggtcctcgtccacagtagtcaaggtcaaggcgatcagtggtactactgatagggtgcatgaaggtgcggggtcttttgaagaacatcacgccaggcaagcaagacgcggcgacactctcctccatcgcctgacccctcctttgtatgtatctaattaggagtagctatatatatacaccaagggtcatgcagtcccaaattttcatgatcgtctcgtgtccctaatccagtttttaaatatgtgcatctttactttactgttgtgtgtgcaat

SEQ ID NO: 133513 - DNA, 754 bp, Zea Mays
aggcggccgataacctcatcgtctcatcctcttcctcctcccgtccaaacgcagccgaagaggaaaggagagagagaggcggcgaggatggggcggaagcggaaggagctgctgtcgtcggctccatggaggacgggggaggcggcggaggacgaggacgcggcaaggatgagccgcgaggggaaggtcagcgtcaccagcaaccccggggagacgcccaccatgagcatgccccggagcaagcgccaggacctcgacctcaccgtcgacgacttcgaggaggacgagatcgaccctgagctgcgctactccttccagcggaacagcaggtttctgaagagagtttttagcgtggacacacttgtcaagcctctccctcctgtaatggcatacagcgtatcccgcaatataaacttcttcttccggatcttcacacagttttgggttacccagatgcctgaaaatgttttacttctatgcgaacggaatagtagggtgctgatgtgggatgtcttgctctacgtacatataatagctgagagagcaacttatctctaagagcaacttataatatctgctctttgaagtatcatttgcatgtactattttccctagtaaacaatggtctgaagccagtactccatgtatccctcctctcatgggtgatcatggtatagatgtccctttatgtactaataaaatagaaattgcatcgatccttgctgatctagctggatcgttgctcttagaccaa

SEQ ID NO: 133514 - DNA, 1378 bp, Zea Mays
aggcggccgataacctcatcgtctcatcctcttcctcctcccgtccaaacgcagccgaagaggaaaggagagagagaggcggcgaggatggggcggaagcggaaggagctgctgtcgtcggctccatggaggacgggggaggcggcggaggacgaggacgcggcaaggatgagccgcgaggggaaggtcagcgtcaccagcaaccccggggagacgcccaccatgagcatgccccggagcaagcgccaggacctcgacctcaccgtcgacgacttcgaggaggacgagatcgaccctgagctgcgctactccttccagcggaacagcaggtttctgaagagagtttttagcgtggacacacttgtcaagcctctccctcctgtaatggcatacagcgtatcccgcaatataaacttcttcttccggatcttcacacagttttgggatgaagaaggaattgccaatgcccagaagtcccttggactggggaacgaggacggctcccgccgaatgcgctgatcgtggtcaaaccaagttttctgtaccgggttcagaactcttttgccctagacactggagacgtgttatacgcctcgaaagacatggcatgggacatttttagggaaatttggatccataccattaaaagatcaccactttggatccataccattactatatcacttacatgtggttccacatgagtcaatgacatgtggggtccatggtatatatctaaagtttggatcttttaatggtatagatccaattgttccacatttttaaggttggcttgcaattttgtttatcctagtgtgtctgtttcatgtatgtttgaagtccagatcttgtgcttgcaaaatagaggagtcgaggtggcacatcgaactccaggccaatggaacgaaatgcctacctgttcatttccacttcaacagttccattgtatactagtcaaagacgagcttgggcatatctttttctgcttcattcctccttttcctttatgatcattagtattgttatccttttctatgtctcccaatatgctgaagaaaagcaaatcatgctgtgcacattggttggaccttggaccaggaggactcccctgtctggaacccatcacatttgtatcttttatccttccagcagcagcaaatctattagcacggagaaatggagttgggtgtatgtaacgtggcagacatgagcaaagtggtcagccacattgctaattgactgcatcgttgctcttagatcaacgcaacgaatctagctagaagctagctaacttgtgtcgcagctgcattggtcgcttttggtgttccaaagattcagagccaaaggcagtggtcctggacacgcctttgttttcttt

SEQ ID NO: 133515 - DNA, 1492 bp, Zea Mays
agagatcgaggagcgtaaggtagaggagatatatagcgcaaggaggagcctcgccaacctcgaagctagtccaaactagtgggaggttgtgtgcagtgatcgatcgaggaagacgagaagcttttcgctgctagctaccgcccgcccggtgtctgtcgatctgtgacgaccgccaagccgaagccaaaaaggcagcagtagtcgtcaagttcatcgatctcggcatcgacgaccgcccgtccatggcgcggggcaaggtgcagctgcggcgcatcgagaacccggtgcaccggcaggtgaccttctgcaagcgccgcgccgggctgctcaaaaaggcccgggagctctccgtcctctgcgacgcccacgtcggcatcatcgtcttctccgcgcacggcaagctctacgacctcgccacctccgggaccatggaagagctgatcgagaggtacaggactgccagcagcagagaagcagccgacggctgcggcgacaataacagaatggacgcaaagcaagaaaccatggtgctgcaacaggaaatcaacctgcttcagaaaggcctgaggtacatctatgggaacagaacaaatgaacacatgaatgttgaagaactgaatgctctagagaggtacttggagatatggatgtacaacatccgctctgcaaagatgcagataatgattcaagagatacaagcactgaaaagcaaggaaggcatgctgcaagctgctaacgaagttcttcaggagaagatagtagaacagagtagtttgcttgacgtaggcatggttgtagcggatcaacagaacgggcattttagtacagtcccactggtagaagagatgatcagtaacccgctgactatactgagtggctattctaactgtaggggctattccttctgacactgtcatgacaccctggggggctaactctctgttgattactactactagtgtgtaatactaccagttaataaagcttgtgtaacttgccatatagccagccctccaggagtgccctggtattgtatctgtgtgctttttttttacttcccataataaagaactgttgagaagctctaatgttgtgctacttcttcctcgtcaattgatacagcaatagctacagttttgtagcagaggtggaatgaacactctaaactccatcagtagtttgagaaaacatatctcgaaaacggataggatttgctgtttacaccagattgaccatggatgaacataacccatgacggagatgaaaaatgcattgtccagttggcttcctcaaccaattccacacttattagagaaaactaggaaagaaaaactaagaactcggcatgagagacgtcaatgttttgttgtcacgctggtgtgctcagtagaataggcatcactcgatgtggttcagctcttctggcctgtttttacagaagggaaacaaagatggaattagaacaaagaaggaacctccaacattgtaaaaa

SEQ ID NO: 133516 - DNA, 1134 bp, Zea Mays
atgtccgctccgatcatcttgtcacatgccggcaagctcacggacgttgacgggcgagacgacgtcagcgccgccgtggaacgccagcctggcgacgatgacgttgacggccgccgtggggtggtatgcgtcccagaacacgtagcgctccctgtggtcgcacggcggcatgaagggcaggcaggtgacctgcccggcgttcctgccgatgccgcagcacccgcggtcgacgacggcgaagccgaacgcggccgggtcggtgaggatggccctgaacaccgcgaagttgtcgaggtacgtgaggctggcgccgggaaggccggcggcagcgttgccgttgaggcggtcgaccagcgcccgcacgttggcgttgaaggggagcacgaggtcgtccaccgcgcgcgagcaccgccccgcgaggctctgcgcgcgcacgctcgggatgcagcccacggaccccacgccggccaccacgaaccgcctgcccccggcgccgtgcagcctggccagctgcgcggccagctgccgcgcgagcaggtccgcgaactgctgcgggccgtaccgccgccgcgtgtcgtagttgggcatcaggtagttgttgaggtagtcgttgctgcccatccccacgaacaggacggagcgcgccaccaggtccgccgccgccgccgcgcccgccgcgccggcgatccgcgccacggtcgtctcgaagttctggatctgctggttgaatgggatccgcccgacaaagttgccgccactgtcgtcgaggatcccggcggcggcagaggcgtagttgacgccctgcaggacatgctgcacggacgaggcttcagagtagggtggcaccaggggcagtccaagcagctcggcgagctcgtcgacgatggtgtagccgttgcagaagcggccggtggggccgccggcgaagtcgatgccgtaggggaagtagttggccttggcaagcgatgcgaggttgttgttgttgccgctgtcgatgagcgagtcgccgaacacgaacagcgccggcgccctcccctctccgccggcggtggccgcagcggtgacggccgggaccacggcgaggagcagcagccaccacgggaggccggcggcggcggccatcgtgggccgtaa

SEQ ID NO: 133517 - DNA, 1879 bp, Zea Mays
caaaggctcgcagcgaagccgccctcacagtcacagctacttctgctcgcccgccactcggagtagcgtagtgccgtgcggtggtgagtgacaggaaggatggaagaaggcttcaccggcggcgtccggatcgtgtccaggcgtctcgtccggccggagccgaccgcgagctcgccggacaacaacagcgcgccaccggaagaggaggaggatgagataatgcacatgacgccgtgggatctgcgcatgatcacggtggactacatccagaagggactgctcctgcccaagcccccggcagcaggcggggcacacgcgcaccgactcgtggacggcctcgcctcgtccttcgcacgcgccctggcccgcttctaccctctggccggccgcctcgccgtggatgccgccaccggcggcccgggcgtcgtcgtctcgctccgctgcagcggcgagggcgccgagttcgtccacgccgaggcgccggaggtcaccgtcagcgacatcatcacgctgcccgcaggccattactacgtccccagcgcgctggtctggtcgctcttcccgctgaacgggctgctgggcacggacgccgccctggacgacgactcccgcgcccccctgctatcggcgcaggtcaccgagctcgccgacggcgtcttcgtcgccatgtcgctgaaccacgccgtgggcgacgggaccacgttctggcacctgttcaacacctggtcggagatcagccgggcgggcggcgaggggcgcgaggcggagctctgcacgccgcggccggtgctggacaggtggttcctcgacacctgcccggtccccatcgctctgccgctgcgcaagctggaggacatcgtccggcagcccgagtacccgccggtgcgggagtgcttcttcgacttccctgcggagagcgtgcggaagctcaaggcgaaggcgaacgccgagattgcggcgggaggcggcaccgcgccggccgccgtcgtgctgtcgtctctgcagtccctgttcgcgcacctgtggcgggcggtgtgccgggcccgggagctcgcgccgggcgcggagacggcgtacctccttcccgtcgggtgccgcgcgagggtgcgaggcgtcccgcaggcgtacgtgggcaacgccgtgacgctcgccgtggcaaagtcgaccgccggcgaggtgctgggcggcgggctgggctgggcggcgttgctcttgaaccgcgccgtggcgtcgttcgacgaggcgggcgtgagggccgagctcgcggcgtgggcgcgcgaccctcggttcgcgtacgtggagccgcgcgggtacggcggcgccgcaacggtcgcgaccgggagctccccgcggttcgacgtctacggcaacgacttcgggtggggccggccgctggccgtccgcagcggcgccgggaacaagatggacgggaaggtgaccgtgtacgagggccgcggcggcgcgggcagcatggcgctggaggtgtgcctggagccccaggcgctcgccaggctcgtcgccgacgacgagttcatggaggctgtgactgtgagcgctgccgcgccgtgaatgccttgttaattataaacccagcgcatacttagttgtagactgcatgtttatctttcagtttattgcatgcgtgtgagccccagtctgtggtgagccgcacgggtaggagggcgttacgagaatagctccgcacgaccctgagatggccggagttttagcagcatcgtgcgcatggggatggacatgcgaccaagcacgacgcaggctgaacacgactgttttctccttcgttgttctctgaataaaggaatagacaatatacagaaaacgctgccactttcagcagcacccaaaaaacagcctctat

SEQ ID NO: 133518 - DNA, 592 bp, Zea Mays
gtgacatttatctatatacactccgttattatatgtgttgtcttctttggcgcatgtatgagatgcacccggctttgtcccttaaaaccgggtgtgacaatttctttcctaataatatagtttactttctaaaatatatgatttggcgcttaactattggagctcaatttttagtaccctaaacacttcaaatgatgtagtattttaattcttattgcactattttgagacacattgtcggagatgttctaattccttttgttgaaaccttccacggtttctctccttccaaatattctaccaaaagtatatgttggggacttgttctcaaatgcttcgaattaagaacaaggcaacacaaaatgttaaatattaacgcccttcgtccttcgaaacattatttcccttaggacataatgatcttcagacgaaggtcatgaaggacataccttcgaacatcgaaggtatgaaggtaaaaaaaggaaacgaatacaaaagataacataaacagtcgtgtaacattatcaactcatcttcattatattatcatgagaaaataaaacaatattgaattacatttgataccttcgac

SEQ ID NO: 133519 - DNA, 95 bp, Zea Mays
gccgccagccatccactaccaccggccaccgcacctcggcgttcggcgactcgacgtcctgctcggacttcggcgactcgacgtcctgctcctcg

SEQ ID NO: 133520 - DNA, 1519 bp, Zea Mays
attgtccattttgcgccaccgatcgatcgagctctaggcctctagctagcgcgctgcatatgtgcggcaacttttcttttatctgacacacgtacgtacgtacgtactcttacggcccacgatggccgccgccgccggcctcccgcggtggctgctgctcctcgccgtggtcccggccgtcaccgctgcggccaccgccggcggagaggggagggcgccggcgctgttcgtgttcggtgactcgctcatcgacagcggcaataacaacaacctcgcgtcgcttgccaaggccaactacttcccctacggcatcgacttcgccggcggccccaccggtcgcttctgcaacggctacaccatcgtcgacgagctcgccgagctgcttggactgcccctggtgccaccctactctgaagcctcgtccgtgcagcatgtcctgcagggcgtcaactacgcttctgccgccgccgggatcctcgacgacagtggcggcaactttgtcgggcggatcccattcaaccagcagatccagaacttcgagacgaccgtggcacggatcgccggcgcggcgggcgcggcggcggcggcggacctggtggcgcgctccgtcctgttcgtggggatgggcagcaacgactacctcaacaactacctgatgcccaactacgacacgcggcggcggtacggcccgcagcagttcgcggacctgctcgcgcgccagctggccgcgcagctggccaggctccacggcgccgggggcaggcggttcgtggtggccggcgtggggtccgtgggctgcatcccgagcgtgcgcgcgcagagcctcgcggggcggtgctcgcgcgccgtggaacgacctcgtgctccccttcaacgccaacgtgcgggcgctggtcgaccgcctcaacggcaacgctgccgccggccttcccggcgccagcctcacgtacctcgacaacttcgcggtgttcagggccatcctcgccgacccggccgcgttcggcttcgccgtcgtcgaccgcgggtgctgcggcatcggcaggaacgccgggcaggtcacctgccagcccttcatgccgccgtgcgaccacagggagcactacgtgttctgggacgcataccaccccacggcggccgtcaacgtcatcgtcgccaggctggtgctccacggcggcgcggacgtcgtctcgcccgtcaacgtccgtgagcttgccggcatgtgagaagatgatcggagacatatatatatatatatactagaaataactatttcttttgaaccatttgataaggcttctcccctggagtcgaaacccaccaatacacttcttttgttctaaattattactacctccgttttcaaatgtttatcgcccgctagtttatttttaaactgaacaaccgtcaaataaaagaaagaaggggtagttcacatcatttttaaggagccatttggaacccttgccgcaagacaggcgcaacacatgccattgattttcaactgtataaaacaaaacaa

SEQ ID NO: 133521 - DNA, 386 bp, Zea Mays
ggtccttggctgtgtgtcgtgcatagtaggttcagttgttgttgtcatgcatgctcctaaagagcatatgcctaactctgtcaaggaaatctagaacctagctactcaaccagggtttctagcatatgtggtgacagcattgttacttgtgggagcgctagtgctcttctttgaacctcgatacggttagactaacatcctgatatatctgggtatctgctcttcaatgggatcgctaacggtcgtgagcatcaaagccattggtgtttccataaagcttacgttggatggggtgaatcaggctgcttatccatacacatggctttttcttaattgtttgtggggtttctcaaataaattacctgaacaaggcattggataccttt

SEQ ID NO: 133522 - DNA, 842 bp, Zea Mays
atctattttacgggcggataaagacgggcggtaaatcctagtcccatccaatcccgtcacgttcggcgaaacccgggttataaaaccggagcacctcgccccccctctaccaccaccgcagccgcagcacaatcgcctcgccttcccttccccaccagcccgtctctctcttctctctgactctctctctcgtagccgcgtccacctcgcagcagcaagcaagcgcgaccaaatggcgcctctaggagacggcggagctgctgccgcggcggcgtccaacaacctggtggtgtcgttcggcgagatgctgatcgacttcgtccccgacgtggccgggctgtcgctggccgagtcgggcggcttcgtcaaggcacccggcggcgcgcccgccaacgtcgcctgcgccatcgccaagctcggcggatcctccgccttcgtaggcaaggtacgtcccgtttccatctccgtctccgtctccgtctccgtctcgtagatccgcttgatctgctcgtttgggcggcgtgctctcgaccgggatgcgggatctggccatccgatctccgccggcgtcgcctcggctgggatccgcgtgccactgccagcacgggccgcggccgttgacctctgccttcctaaagttccgtccgttcatatttgaccccgatgcttcggcgacgttgttctctcttttttttcctgggcggcaaaaacattgttgtgctgcagctagatgtgtctttgtcgttggacagatgccattgtatagatcttgacgtattctatgcgtcccgaaaaaaagttatatcccggaatttatttattttttcttcaaaagaaaatac

SEQ ID NO: 133523 - DNA, 1448 bp, Zea Mays
ataaagacgggcggtaaatcctagtcccatccaatcccgtcacgttcggcgaaacccgggttataaaaccggagcacctcgccccccctctaccaccaccgcagccgcagcacaatcgcctcgccttcccttccccaccagcccgtctctctcttctctctgactctctctctcgtagccgcgtccacctcgcagcagcaagcaagcgcgaccaaatggcgcctctaggagacggcggagctgctgccgcggcggcgtccaacaacctggtggtgtcgttcggcgagatgctgatcgacttcgtccccgacgtggccgggctgtcgctggccgagtcgggcggcttcgtcaaggcacccggcggcgcgcccgccaacgtcgcctgcgccatcgccaagctcggcggagctggacctgggcctggtgcggcgcgccagggtgttccactacggctccatctcgctcatctccgagccgtgccgctcggcgcacatggccgccatgcgcgcagccaaggccgcgggcgtgctctgctcctacgaccccaacgtgcgcctcccgctctggccgtcgcccgacgccgcacgcgagggcatcctcagcatctggaaggaggccgacttcatcaaggtcagcgacgacgaggtggccttcctcacgcgcggggacgccaacgacgagaagaacgtgctgtccctgtggtttgacgggctcaagctgctcgtcgtcaccgacggggacaagggatgcaggtacttcaccaaggacttcaagggcagcgtgcccggcttcaaggtcgacaccgtcgacaccaccggcgccggcgacgccttcgtcggctccctcctcgtcaacgtcgccaaggacgactccatcttccacaacgaggagaagctccgcgaggctctcaagttctccaacgcctgcggcgccatctgcaccaccaagaagggcgccatcccggcgctgcccacggtcgccaccgcccaggacctcatcgccaaggccaactagatggccgcacgccccgccgttccaccacgtcactgtcccccgccgccccgcccctcgtcgtcgacgtcctcggtttcggttcattaggtagatcgagtcttagcgtccgtctctgcgcctctacgctgagacggtttgtttgggttaattaagttagctttcgtggagatttcgccccggggcatcaataaaatgttggcatgcgtggtgggatgctatcctttttttttattttattttattttatttttagcttggatcagttggggttttgaacattgctagtgtcgtgtgattgggaaggctaatgtgatgccttcgatgcagagttttcaatgaatgccttggtgcaaacgtacgattgtgtaataatgccttctattgatcagcgactccaatagtccaatgtgcaagtattcttcgtcttcttggct

SEQ ID NO: 133524 - DNA, 1491 bp, Zea Mays
cgcagcacaatcgcctcgccttcccttccccaccagcccgtctctctcttctctctgactctctctctcgtagccgcgtccacctcgcagcagcaagcaagcgcgaccaaatggcgcctctaggagacggcggagctgctgccgcggcggcgtccaacaacctggtggtgtcgttcggcgagatgctgatcgacttcgtccccaacgtcgcctgcgccatcgccaagctcggcggatcctccgccttcgtaggcaagttcggcgacgacgagttcgggcacatgctggtgaacatcctgaagcagaacaacgtgaacgcggaggggtgcctgttcgacaagcacgcgcggacggcgctggccttcgtgacgctcaagcacgacggggagcgcgagttcatgttctacaggaacccgagcgcggacatgctgctgacggaggcggagctggacctgggcctggtgcggcgcgccagggtgttccactacggctccatctcgctcatctccgagccgtgccgctcggcgcacatggccgccatgcgcgcagccaaggccgcgggcgtgctctgctcctacgaccccaacgtgcgcctcccgctctggccgtcgcccgacgccgcacgcgagggcatcctcagcatctggaaggaggccgacttcatcaaggtcagcgacgacgaggtggccttcctcacgcgcggggacgccaacgacgagaagaacgtgctgtccctgtggtttgacgggctcaagctgctcgtcgtcaccgacggggacaagggatgcaggtacttcaccaaggacttcaagggcagcgtgcccggcttcaaggtcgacaccgtcgacaccaccggcgccggcgacgccttcgtcggctccctcctcgtcaacgtcgccaaggacgactccatcttccacaacgaggagaagctccgcgaggctctcaagttctccaacgcctgcggcgccatctgcaccaccaagaagggcgccatcccggcgctgcccacggtcgccaccgcccaggacctcatcgccaaggccaactagatggccgcacgccccgccgttccaccacgtcactgtcccccgccgccccgcccctcgtcgtcgacgtcctcggtttcggttcattaggtagatcgagtcttagcgtccgtctctgcgcctctacgctgagacggtttgtttgggttaattaagttagctttcgtggagatttcgccccggggcatcaataaaatgttggcatgcgtggtgggatgctatcctttttttttattttattttattttatttttagcttggatcagttggggttttgaacattgctagtgtcgtgtgattgggaaggctaatgtgatgccttcgatgcagagttttcaatgaatgccttggtgcaaacgtacgattgtgtaataatgccttctattgatcagcgactccaatagtccaatgtgcaagtattcttcgtcttcttggctacaaa

SEQ ID NO: 133525 - DNA, 1187 bp, Zea Mays
aattgttcttgacttcgcttgcattctattccaccgctcaccacaagaagccacctcaggctcacgccgcggttccacacgagcaaatcccgccgcttcctccccacgcaccccttcccatccttcccgaagcacgaggcgagccgggccgccggatatggcgccggcggcgccgtacggcggggccgagtcgcagcggcaggcggacctactcaagcaggagggcaacgcctttttcaggaaggaacgcctcagcgccgccatcgacgcctacaccggggccataactctttgcccaaatgttgcagtatattggaccaaccgagcactttgctataggaagcggaatgagtggactagagttgaggaagattgcagaacagctatccagcttgacagccagtctgttaaggcacattacatgctcgggttatctcttgtcaacagccaaagattatcagaaggaataaaatcactggagaagtccttggagcttggaaggggtgcacatcctgcaagctacatggttgaagagatatggcaggagctttctaaagcaaaatacatcgaatgggagagcttatcaagagaccgaacttgtcaactgcaaaagctgaaggtagcatgtaaagaggccctaacgagttacaacagccttgataacccagccgcaggtgcgccagtagaacagctaaatgagctcgaggaagttttcaagaaggctgcaaagactgatactccagcagaagtacctgaccatctctgttgcaaaatcacacttgatatcttcagagacccggtgatcaccccgagcgggattacctacgagagggccgtacttctcgaccaccttcaaacggtggggaggtttgaccccgtgacccgtgaggctcttgaaccgcaccagctggttcctaatcttgccatcaaggaagctgtgcatgcgtttttgagtgagcatggttgggcttacaagattagatgatcgctttggaatacaggttttggatactgtcggatgtgacggtgggatttttttgttcactgttggggggcagattttaatctgggatggctgcgtacagattcaccttctccagttgtgtacatatgagatgctcattatgatagtaattgtgaacagtacaccaaaggaagtgaagttgagcgtctgagttcctgactgc

SEQ ID NO: 133526 - DNA, 1269 bp, Zea Mays
aattgttcttgacttcgcttgcattctattccaccgctcaccacaagaagccacctcaggctcacgccgcggttccacacgagcaaatcccgccgcttcctccccacgcaccccttcccatccttcccgaagcacgaggcgagccgggccgccggatatggcgccggcggcgccgtacggcggggccgagtcgcagcggcaggcggacctactcaagcaggagggcaacgcctttttcaggaaggaacgcctcagcgccgccatcgacgcctacaccggggccataactctttgcccaaatgttgcagtatattggaccaaccgagcactttgctataggaagcggaatgagtggactagagttgaggaagattgcagaacagctatccagcttgacagccagtctgttaaggcacattacatgctcgggttatctcttgtcaacagccaaagattatcagaaggaataaaatcactggagaagtccttggagcttggaaggggtgcacatcctgcaagctacatggttgaagagatatggcaggagctttctaaagcaaaatacatcgaatgggagagcttatcaagagaccgaacttgtcaactgcaaaagctgaagtgcgtgacttgaatctatcttttccggacagggctatactgtagcaccctaatgtatttgttctgtgtcttttagggtagcatgtaaagaggccctaacgagttacaacagccttgataacccagccgcaggtgcgccagtagaacagctaaatgagctcgaggaagttttcaagaaggctgcaaagactgatactccagcagaagtacctgaccatctctgttgcaaaatcacacttgatatcttcagagacccggtgatcaccccgagcgggattacctacgagagggccgtacttctcgaccaccttcaaacggtggggaggtttgaccccgtgacccgtgaggctcttgaaccgcaccagctggttcctaatcttgccatcaaggaagctgtgcatgcgtttttgagtgagcatggttgggcttacaagattagatgatcgctttggaatacaggttttggatactgtcggatgtgacggtgggatttttttgttcactgttggggggcagattttaatctgggatggctgcgtacagattcaccttctccagttgtgtacatatgagatgctcattatgatagtaattgtgaacagtacaccaaaggaagtgaagttgagcgtctgagttcctgactgcatcttc

SEQ ID NO: 133527 - DNA, 1734 bp, Zea Mays
atggcagacaatgtcactgcgtacgtgcaagaactggaggcggcgacattgcagtctgcaccatggggagcatgggctacgacaatgacaagaagcccagggagcagcaggccaggaggccgagtacggccaccatgttcctcctggtcctcaccaacgcggcctctgtcttcgtcttctccggggccggcgcggcgctccacgcgcacgtcgggcggcgctacccggccgtagtccacgcctggagctcggcgaagctgctccgcgagctcaacgccaccgggctggcggtcgccgccagccacgcggaggtggtggacctgtcgggccgcctcaccgcggccaacaaggtcctggaggccattctcggcggctcgaccgccaagcgcgacatggaggcggcccgggaggagcagcgggaagcggcggcgggcgggctgtggcagcgggagctaaagctgggtggcgagctgaagctggtggtcggcccgcacaggggcgggggcgcggacgcggtgacgttcccgtcgctggggcaggcgtgccaccggtaccgggacgagctggagcgatacatgaactacacggtgggaggggagtgcccctccgacgaggcgtcggcgcagcggctgatgctcaaggggtgcgagccgctgccgcggcggcggtgccggccgcgcacccccgcggggtacgtggagcccacgccgctgccggcgagcctgtgggcggtcccgccggacaccagcatcgtgtgggacgcgtacacgtgcaagagctacggctgcctcgcgcggcgcggcaaggccaagggcagctacgactgcaaggactgcttcgacctcggcgggcgggagaaggaccgctgggtgcgccgccgtgataaggagaagggcgacgagcgcaactcgctcgactacaccatcgacggcgtgctggggtccctgcccagcggcagcgtgcgcatcgggctggacatcggcggcgggtccggcacgttcgcggcgcggatgcgggagcgcggcgtcacggtggtgaccacgtccatgaacttcgacgggccgttcaacagcttcatcgcgtcgcgggggctggtgcccatgcacctcagcgtggccagccggctgcccttcttcgacggcacgctggacgtggtgcactccatgcacgtgctcagcagctggatccccgacgccatgctcgagtcggcgctcttcgacgtcttccgggtgctgcgccccggcggcgtgttctggctcgaccacttcttctgcctcggcacgcagctggacgccacgtacctgcccatgttcgaccggatcggcttcaagaagctgcggtggaacgccggcaggaagctcgacaggggcatccacatggacgagtggtacatctccgcgctgctccagaagcccaggaggtgataccacggatggatatggatgggtgcatgcttacgacttacgacatcgcacgcaactttgaactttccacgcattacggcacttctctgactcccctagcctagcttctcctcgtcttctccatgccgcatgtacttattggtacctccctcttccgccgtctctccatttattgcctataaatcagtttaattaaatccataggttcatactagagatgattgagtttcgatatagacggttcttctttgaataagaactgcttggataacccaaccttgaacaaaatgatgaggtggttcatgtgtac

SEQ ID NO: 133528 - DNA, 1667 bp, Zea Mays
agatgcagtcatgcagctgaggccatgcaggaggaagcaacaatgcaagtcatcctcctcctgttgctcccgttggttctcccggcggtcatcctgatcgtccggcgtgcaacgccggcgatgaaggcatgcctggccaatctcaagttcgttctagcaggtaataagccaccggacatgttggtcacggactgtgccgccgcgtatggccttctcgtgcggggcaggaggacggccggcgtcggcggcggcggctccttctccaaccgcctttcatccatgtcacccagcgccgtcctctcgggccgccgctaccataacatcacctcggcgccctacggccagctctggcgcgccctccgccacaacctggcctcgggagtcctccacccgacgcacctgcacggcggctacgcagccgcgcggcgccacgcgctacgcggcctcgtcgccgacctcagggaccagcagctcgccaacggcgtggtgctcgccgcggagagcatccgcggcgcggtgttcggcctcgtctccgccatgtgcttcggcggcgacggcgccgccgacgcggccgtggtccgtgccatggccgacgtccagacggagctcgtcctgtccctgcccgcggcgcgcgcgttcgtgtccgtgccgttcccggcgctgtctaggctgatctaccgcgagcggtggaacaggctggccgcgatacggcggaggcaggaggagctgtacctcccgctcatcgacggctgccgcagccgtcgccgggagcctggcgaggcgctgacttacgtgcgcacgctcctcgacctccgggtcccgttagaggagctcgaagcggacggcaagcacaacgctgcaggaggcaagcggaggctcgaggacggtgaactcgtgggactttgctcggagttccttggttccgcaactgaatccctggccgcggcgctgcagtggatcatggcgaacctaatcaaacgcccagacgtgcaggaggccgtacggagagaggtcgacgctgctgtggacgccgacgccgaggaggtcggggaagaagcccttgcaaagctggaccacctcaatgctgtcatcttggaggcgttcaggctgcatcccaccaccatgtgggtatttaggcaggtgatggaagaagaccaagtggttcatgatggtcaacgtgttcctacgggcaccaagatcgtcttctcgttggaggctctagggcgagacaagacagtgtggtctgacgaccctggcgagttcaagccagaacgcttccgtgcatgcggaggcggagaaagcactactgccaagaagaagctgatgtccatggccgccggggacgagacgatgaagatgatgccctttggggctggcaggaggatgtgccctgccataagcatgtcgttgctccacatcggctacttcatggcgaacctcgtgcgggagttcgagtggggagaggcggcggagggtgagcacgccgtggaactccgctcggatgtcagcgtcctcctgttcaacttcatggagcgtccgctgcgtgcgcgccttgtgcctcgccgtcgacccgtcgtcgtcgccgaccggaggccaagaggcaagagcctttaaaggatcatggatgggcaagtgttcctgctcgtccagttggagctagcaggcga

SEQ ID NO: 133529 - DNA, 3038 bp, Zea Mays
atctccccactcctaccggcctgcagctgtttgcgaggcaagcgtgtcttctgcgcgcgcgacggacggcgcgagggcaagcagcgcctccgtgttccgcccgtgcgaagggaggggaacgagagctccggcggcggcccccgcctcgccccatgtctgtgcctctcgtcgggttggctgatacccctatcccaacatcttcttccctcccattcccatggagctcctcccggctccctttccctctttcctccctagaccccaccaactgcctctttccagaccctgccatggccgcctccaagagcccatcacggctgctttcgcgcaggctcctcccctcgcgctccccttccaagaagcaactagaagaagcagcagctcccataccccacgcccaagtacccgtccgtgcccccccgcccagagaccaacaacaactcacccgctgccgccgccgctgccgcctggcccttccccttcctccggcagcactggcagtgagcgcctgattgtttccgagacgaagctcatcacggtgcactcctgcgctgggcgcctaggggacgctcgcaaggtgttcgaaggaatggcgtgcagggacctgctcgcctggtcggccatgatcggtgcctacgccatcaggggcctgtacgaggaggtcgtcgcgctcgcggtggccatggtcagggaaggggtcatcccggacaggttcctgatcacccggattctacaggcctgtgcgtacacagaggacctggagctcgggacggcgatgcattccctggcgatccggagaggtttcatggcggagggagcgagggacgtgcccgtggggaactcggtgctggccatgtacgtcaagtgcggagagttgggccgtgcgcgcgccgcgttcgacatgatggggcagcgggacctgtgcacgtggaactcgatgatcttcgggtgctgccgctccaacgaatgggaagaggcacggaggctgctcgacgatatgaggcgccaaggtacagagcctgggcttgtcacatggaacacgctggtttcgagctacgcgaggtctggggaacttgatgtggccatggagatgctggagcagatggaggagtccggtgttgctccggacgtcgtcacctggactagccttgtgtctggttttgtccacggtgataggggtggcgaagcactttggtgtttcgcgcgcatgcgccttgctggagtcgaaccaaacggcatgacaattgcgagtgccatctcagcttgtgctagtttgcggttgctgagtcagggcatggagctccattgccacgcaattaaggttgggagtgtgaacaatgtgctctcggggaactccttggttgacatgtatgcaaaatgtggagaaatcattgcagctaagagagtatttgatgaaatacccgagaaggatatcttctcctggaactcgatggttgcagggtatgcacaggcgggctattgcggcaaagcatatgagcttttctgtgagatggagagccttggtgttcggcgcaatgtgatcacgtggaatataatgatctcgggatacataagaaatggggatgatgagagagcttttgaactatttcagatgatggaaagctgtggagtaaaaagggacacagcttcatggaatgcactcattgctggttcggtgcataatggtcattctgatagagccctgagaatattctggcagatgcaatcactcttggtgagaccagacttcattacaatattaagtatcattccagcttttgcgaacctagctggattttggaaagtacgggagatccacgcctgcatttatcacaacaatttagaaatggatggcaaaatagcaaatgcactcatcaatgcctattcaaaatctggtgaccttgctggtgcttgtgctgtttttgataggcactcatcaaggaacattatttcttggaattgtataattcttgcacacttgctgcatggttctccaagtgaagcactggatcgcttttgtgagatgaaacaagaaggcgtgcggccagatcatacaactttgactgccgtaatcaaggcctatggcctccagggaaaggtatctgaggcgaaacgaatatttcacaatatgacccacgattacaacattattccagatttagatcattacacagctatagttgatctccttggccgctcagggagtctacaagaagcgtacgagtttattggtaatatgccactcatacccaatttagcagtctgggaggcattgcttactgctgcaactattcatggaaatgcaaggctcgcaaacctgacagcaagagagttgtcatcgcttgatccgagtgaccctagaatccaaagactggtttttaattactggggtctaactggaaagtctgttgatgtgccactcatgacggtatacaacggaggaagagagttggaagatgttgatagttgttcggttgaaatcaagaacaatgtctatttgttctcaaccggtgataatttagcattagagagtacagttgctgaattgaagctgattatgattcagatccgaatgtcattgctgaacatctctaatgagactaacgctgaagaagagaaagaagaattatcaggaatacattgtgagaagctagcaattgcttttgcaatttcaaattcccctcctttcagaagcatacggataataaagaccttaaggatgtgtagccattgtcacatctttgccaagctagtttcagaaaaatacgagcggcagatactaatcaaggattcaaattgtttgcacaagtttgaggatggaaagtgctcttgtgaaggttattggtgaatacaactaatataagtgcaccaatggtttctgttcatttatgcgtcgtccatactggctttttcatgtatgtgagtgtagtgttatcagttcatagttgtattggtacgaaaaattactgtagccagttttgctcataaaaaaacctaatgttgtcttattgctatattttagttggaagtagtagata

SEQ ID NO: 133530 - DNA, 84 bp, Zea Mays
aagcgtgtgagagcgcgatggtctcgcctctcatcctggtgtggagcagcggaggacgagctgcagaagcccgagaaggttgag

SEQ ID NO: 133531 - DNA, 1620 bp, Zea Mays
tccgtccacttgtgtacatgtctagctaggtgggtctccatccatcgatctgtgtcgtctctgtgtgtggcgtgtgggtgtagttagggctggtggtcttgtactacctagtcgacctcttcttctttctcccctcctcctgacctcctcctcctcctgcgtgctataaagaagctaggctgcgtggacgggagggtaatgacacgagcagcagcatcaggccgccgtcgaccgagctcgagcatggggggagcatccggaggcgaccagcagccgcagcagcacggcggcgccgacgacgcagacgatgggcacctgcagcaagcaagcggaggcgacatggtgatgcccgggttccggttccaccccacggaggaagagctcatcgacttctacctccgccgtagggtggagggcaagcgcttcaacatcgagctcatcaacctcgtcgacctctaccgttacgacccatgggatctccctgctctggcctccattggggacaaggagtggtacttctacgtgccgagagaccgcaagtaccgcaacggcgaccgccccaaccgggtgacgccgtcgggctactggaaggccacgggggccgaccggacggtgtacgtcgaggtcaagcggccgatcgggctcaagaagacgctggtattctacgtggggaaggcgcccaagggacttaggagcagctggatcatgaacgagtatcgccttccttccggcgaggctgaccgctaccaaaaggaaatttctctttgcaaagtgtacaaacgaccagggatcgaggacaactttcacctcagcaccaccacggcaagatcatctggctcaaaggcagcagcaaacatggacaagaagcaccaccggacgtcggcgtcgccccgcctggcgccgatgttcgacggtggccactcatcagctcacatgaacaagccatacggtggagcaaacaccgccatagccataacatcatcagctgcagctcgagcagtaacaatggtgcctcagacgtcaatgttcctatcaacaccctcacttagctccaccacgtcgacggaggaggacggtacatcactctacctcatgaagggtgctaataactcaccgatgttgcattcttccacacatgccctgcttaatgcaaactcggctacaatggcaacaattccaatagatgagctgagtagggcaatcggatcatatagtagccaaggaaaccctaaccatcccttgccatcacaaggtccattgcttccttttcctagtatggaaaagatttgggattggaatccactcctagaatctcccaaggtttgcacaagcttcaagtgacttccaagtgactcgaagcatatatatgcatgcatgcttgcacgtattatatatatgaatacaggtgtgtgtatatgtgcaggcgccacaaaattattatttgggctagaatatggttaagatgtaatggaatatatagggtgagttagttctagtcctatgcaatgcatgctccgctatattaatcagttcaccatctccacacatcaatagttggtgtaacgatatgttaatttctattatttgataatgcagaccttgtagttgaactcgattaaa

SEQ ID NO: 133532 - DNA, 851 bp, Zea Mays
cgtagacagatggccacaagtggacgcgccgccccccgccctagccttggccgccttcgttcctcagttcgcgctttcgcgcgcatgcaccttcctcttcctgcgtgcgtgcctatattaggcggatgagctcaccgcgccgtgatctgacccaattgacgatgcgccagatgcagccgactgaccaccagcacccgagcagcagcgagagagcgccgccgctcgcggccgccgtcggcaaagatgatggcgcgtcgtcgtcgtcgtcgtcggtggtggtcaagatcgacgacctccgctgccacggagactggggggcggccgctgggtccgccgccgtggacgtgtgcctcgccgcggccgccgtggccggcgccgcgctgctggcgtggtgggccgtcgcgttccacccgtcgtacgcgcagctgtggatggtgccgctcggactcgtgctcgccggcaccccgcccgtcgtctgcctcgcgctccgcttcagccccgacgcccgcgcgccgccgccgccgggaaaagacggacccgcgggtgcgcgtgcgccgccgccgccgccgccgttggtcgccgttgtcatcgacaagcagtagcgcgttcgtacgtgtgtgcatggtgcgtacatatcaaagacacatctctgctgccgtgtgtatattctttgattagtttcatttgggccgggaggcgagggcataatatgctgtgatatgtacagaggtagacgacgatggagtcatggagatcatcctgagatgtacgtgctttgatttggggtacgaaaaaaaaggcatcgaataaagaatgtaataaacagcaacaaacaattctgtgattgttga

SEQ ID NO: 133533 - DNA, 1467 bp, Zea Mays
atgccatctctagtccttgctgaaggccctagcgtcaaccatgtaaaggcggcatccgatgacatcaactcggataagttgtgcgtgaaggttgctgcaaggggtgcacaagcagtggctgctgatgtcgcacttgttcctactacaccagcgacctcgttggctgcaccgacttccccacctaagagtgtcaacgacgactgcaagagcaacaatgatgttgcggtgcctagactttctgcgactgtgttacatgacatcaccaaactcatcgagcccctaccagttgtggtgagggttgtttcaagcacacctccaccagctccattgggtattcagctagtgttcgaaagcatgcctagtaggtgcaaagcatcggttctctggatactattggcaattccctggccaccttttgtgcctatgtatttggttggagatgcagttgttgtggctgtggtgacagttatttcaagtatgcctctgttattgcagtgctatcacagtggagtagcatgtgtgctgacggatgcaaattcatcattatctacatttcagcttgagagaaatgttgtctggaagccaccttggcagtaccataacactagctctgagccgctggtgctgatgaagtttgtatatttctctactggagtccatggcactctggacatggtcagtacaatttctgagcagtgctatgtcgtcttgcatttattgatcacaagtgaaacatgcatgtcttggacactatctcttgcccaagaactgaagaccgatgatgtgagccttgttgcatctgacgaaaattcctatgggttaatagttccaagctatacttcctgctcctttcatgagggcctctctgagatgctatgccaattggtgatattttttgttgtagtattatctgaacgtgaagaagacaaacaccttcattgcgcacaacaaatgtactcggtttcagaaatatctattcgtcgtgtggggttcttggctagcataatgaaggagaaaagtggtattgatctggttgacatggttgttcagttattcctgtttttcgaccacaacttgaacgaaatatttgcaactttggctagtggaccggaaagaagcttttgtgcaatgttcagtgctgcatatattgagttgtatctagtggtgcagcaacaaggggcattattccacatagctgatgggggatttgcaagcttgttttgcatctacttgtggaaagtatcatggccttctttcaccatcagtggtacaattatcgcaatttggtgttgtgacctgttcaagaagctcccatggcagcctccaaatcaagagggagtacaccagcagcaatgtgatgctccctgtcagctggaaattgtatactatggaaatgatgtcgtatacaatcaggatccttttgtgagtcacgatgtaattaagaataagttcaccactttcccttag

SEQ ID NO: 133534 - DNA, 1902 bp, Zea Mays
gaggaaaccgccgccggattaagagaaaaagcttcggctccaactaacttaaccgtcgtgccggccgctccgctccccttctctctacaaatagtcaaatagagaggcgactatcactctcacactccccaaccgtcactactcactagccagccatggagacccagagcaggttgctcgtcagcctgtgcgccgccgtgctgctgctgctgctcctcgctccgggcctcgccgctgccttcaactacgccgacgcgctcgccaagtcaatcatctacttcgagggccagcgctccggcaagctgccgccgggcaaccgcatggcctggcgcggcgactccggcctcagcgacggcgcccagcacaatgtggacctggtgggcgggtactacgacgccggcgacaacgtcaagttcggcctgcccatggcgttcaccaccacgatgctggcgtggagcgtggcggacatgggcaagttcatgggggccgagctgccgcacgccagggccgccgtgcgctggggcgccgactacctgctcaaggccgccacgtcgaccccgggcacgctctacgtccaggtgggcgacccggcgcaggaccaccggtgctgggagcggccggaggacatggacacagcgcgggccgtgtacgccgtgggcgccgggggcgcgccgggctccgacgtggccgccgagacggccgcggcgctggcggcgtccgccgttgcgctccgccgcgccgacccggcgtacgcggcccgcctggtccgcgccgcagtgctggcgttcgagctcgccgaccgccaccggggctcctacagcgcgggggcgctcagctccgcggtctgcccgttctactgctcctactccgggtacgaggacgagctgctgtgggcggccgcgtggctgcaccgcgcctctggcaacgccaccttcatggcgtacgtgcgcgccaacggcgcccaggacggcgcgggggacgacgactactccttcagctgggacgacaagcgcatcggcaccaaggtgctgctggccagggccgtcctgcgccgggaccggggccggaacctcccggggctgcagccctacaaggcgcactccgacagctacatctgctcgctggtgcccggcgccagcgggttccaggccgggcagtacaccccgggcgggctcctctaccgtgaaggcagcagcaacatgcagtacgtgacggcgaccacgttcctgctgctggcgtacgccaagtacctccggtccgccggcgccaccgcggcgtgcggcggcgggcggggcgaggtggcccccgcggagctggtggcgctggcgaagcgccaggtggactacatcctggggaagaaccccgccgggacgtcctacatggtggggttcggggaccggtacccgcgccggctgcaccaccgcggcgcgtccatgccgtcggtgcgcgcgcacccggcaaggatcggctgcgaccaggggttcgcgtacctgcactcggcggcgcccgacgccaatgtgctggtgggcgccgtcgtgggcgggcccgacgcgcgcgacggattcgtcgacgaccgcgacagctacggccagaccgagcccgccacctacatcaacgcgccgctcgtcggcgtgctcgcttacttcgccggcaccaccaagtattgacgcagatgctgctcctgctgctgctgctgtttgccgtgcgttgtatcgtgtcactgtgcgtactcctcctagtctagtcgtgttgtgttgacagtgtgggagcgccggagcaaaaggcttggtcgagctcccccgtcagtagtgccggcggcgatagtgcctgcgctcgtacgcatttatttcaaattgcaccgtaagctccattggtatttgaattatcgtacaatttgctcaa

SEQ ID NO: 133535 - DNA, 2581 bp, Zea Mays
gaaagagctagcagccagcagcagcagcagatacgtacaggtacaacaagcagagctatctaggtaggtagcaacagagagagagagagagtgaagcaggcagaggcagcagcatggaaatggaatggtggccatatgattcatggatgatgggtgcatggtggacgcgatcgaatcgaacgcgatcccctcccccctcaccccctaatttcactcggatccatgcctgtgtgtgctagctgccgtcgtcggccttgcctcgcaaaagtacccccaaccccccactatatataagtgcagcgcctttcctcccctgccaccaccagcttccctcctagctcttctctttcctcatcatcgtcttcctcccctcacatcctctggcctctggtcctccaccgtcctgctagccagagctgctcttgtacgcgcagctggcctctgtgcatatcaccagcacaccgcgcaggggaaggaaattaacaagagaaaaggcaaggagagcaggcaggcaaggaagctgcagaagccaaggaaggagaaggaggatcatcaatgagcatctcggtgaacgggcagtcgtgcgtgccgccggggttccgcttccaccccacggaggaggagctgctcaactactacctccgcaagaaggtggcctcccaggagatcgacctcgacgtcatccgcgacgtcgacctcaacaagctcgagccatgggacatccaagagaaatgcaagatcgggtcgggtccccagaacgactggtacttcttcagccacaaggacaagaagtacccgacggggacgcgcaccaaccgcgccacggccgccgggttctggaaggccaccggccgcgacaaggccatctacaacgccgtcaagcgcatcggcatgcgcaagacgctcgtcttctacaagggccgcgcgccgcacggccagaagtccgactggatcatgcacgagtaccgcctcgacgaccccgctgctgctgctgctgctggatccggtgatgccgtggccaacgacgacgcagccgccacggctgctgctgctgccgccgcgtcgtcggacggcgggcaggaggacggctgggtggtgtgcagggtgttcaagaagaagcaccaccacaaggagtcaggtgggggcgggggcaacaagcacggcagcagtaacagcgagcatgggcacggcggcgccggcaaggcatcggctgcggctgcggctgcggcgcaccagcaccagcaccatggaggcctgcagtactcctccagcgacgaggcgctggaccagatcctgcagtacatgggcaggtcgtgcaagcaggagcacgagctggtgtcgccggcgccggcgccgccgggacgggcggcggcgtccaggtacctccggcccatcgagaccgttctgggcgggcacgcgttcatgaagcttcccgcgctcgagagcccgtccgcggccgcgtccgcatcgctgacacagccggcgcagcacgacgagctctaccgcgccgccgggaacgggatcacggactgggccatgatggaccggctggtggcgtcgcacctgaacgggcagcaggcgcccgccgcggcggaccagctcggcggcggctgcggcttcgacgcggacgccggcgccgaagacgcggacgccggcctcgccttctactccgccgccgccagccggctgctcggctccggcggcggcgccggcagcgacgacgacctgtggagcttcacgcggtcgtcggtttcgtcaacggcggcggcggcggccacgtccacggagcggctcagccacgtgtcactgtagacgccgttcttcgtcgccgtcgccgtcgccttaactatgtacgtacgtacgtcgtaagcccctacgtgatgacatggccagcatgccctggtggtacacgtactagtaaagaagagacaaacaccaacagcaggagcagagagagagaaagaggaaataaaagaagggtctctagagagagagagagtgatttcagaggaggtgattagagtgatgagagagactgaaagtagatcgatggatcgctgattcgctgatacgattaaagctggcagtaagttggagtggcactgtcactcggacgccacatgcatcatctctcctttctatagcttcattctctctccatcatctcagccactgtttaattaacccccggccaccgattgttattactataatatataaccacagcattttactagcagattgatactacatctaccactgttactatatattagattgttcatttcaatataattaggagagagaggaggggagtaattaattgacagcgagcagcatggcaaaaacagtgtaaggcgattattattgctggtttgtttactagtacctacctacgtacgtgctgtgggcggtgtgtgtgcatggtgtttgcagtttgcacatgtgcatcctttatttttaattattcccatgactatatatatagatattaaatatacatgcaggttgtatctatctatctatacatacaaattgcatttctgtctgtctctccctctgaatatgaatgatacccgtg

SEQ ID NO: 133536 - DNA, 2997 bp, Zea Mays
gaaagagctagcagccagcagcagcagcagatacgtacaggtacaacaagcagagctatctaggtaggtagcaacagagagagagagagagtgaagcaggcagaggcagcagcatggaaatggaatggtggccatatgattcatggatgatgggtgcatggtggacgcgatcgaatcgaacgcgatcccctcccccctcaccccctaatttcactcggatccatgcctgtgtgtgctagctgccgtcgtcggccttgcctcgcaaaagtacccccaaccccccactatatataagtgcagcgcctttcctcccctgccaccaccagcttccctcctagctcttctctttcctcatcatcgtcttcctcccctcacatcctctggcctctggtcctccaccgtcctgctagccagagctgctcttgtacgcgcagctggcctctgtgcatatcaccagcacaccgcgcaggggaaggaaattaacaagagaaaaggcaaggagagcaggcaggcaaggaagctgcagaagccaaggaaggagaaggaggatcatcaatgagcatctcggtgaacgggcagtcgtgcgtgccgccggggttccgcttccaccccacggaggaggagctgctcaactactacctccgcaagaaggtggcctcccaggagatcgacctcgacgtcatccgcgacgtcgacctcaacaagctcgagccatgggacatccaagagaaatgcaagatcgggtcgggtccccagaacgactggtacttcttcagccacaaggacaagaagtacccgacggggacgcgcaccaaccgcgccacggccgccgggttctggaaggccaccggccgcgacaaggccatctacaacgccgtcaagcgcatcggcatgcgcaagacgctcgtcttctacaagggccgcgcgccgcacggccagaagtccgactggatcatgcacgagtaccgcctcgacgaccccgctgctgctgctgctgctggatccggtgatgccgtggccaacgacgacgcagccgccacggtaagcaaagcaacgaccctgatcgccgttaatctcttctctgcaccaccagttcacgtacgccaccattaataattgcctgccgtaagataagaaacaattatatggcggtggtggtgcaatcatgcgagtacggcgacccgccttgatttgatccagctccaggctcaaggctccggccgtatttttttccgctctcttgttttgattgattgatgaggaggagagagagagcagtaggcgctagctactagctagctaggggaaggagggagggacggacgtagtaataattattaaactttgccatgtgcctcatgtgccccaaaaggtagcaataattaacactgctgcactgtttttttttaatctgcttcttgtcgacttgtcgtcggcggcgatgtcgcggtggacaggctgctgctgctgccgccgcgtcgtcggacggcgggcaggaggacggctgggtggtgtgcagggtgttcaagaagaagcaccaccacaaggagtcaggtgggggcgggggcaacaagcacggcagcagtaacagcgagcatgggcacggcggcgccggcaaggcatcggctgcggctgcggctgcggcgcaccagcaccagcaccatggaggcctgcagtactcctccagcgacgaggcgctggaccagatcctgcagtacatgggcaggtcgtgcaagcaggagcacgagctggtgtcgccggcgccggcgccgccgggacgggcggcggcgtccaggtacctccggcccatcgagaccgttctgggcgggcacgcgttcatgaagcttcccgcgctcgagagcccgtccgcggccgcgtccgcatcgctgacacagccggcgcagcacgacgagctctaccgcgccgccgggaacgggatcacggactgggccatgatggaccggctggtggcgtcgcacctgaacgggcagcaggcgcccgccgcggcggaccagctcggcggcggctgcggcttcgacgcggacgccggcgccgaagacgcggacgccggcctcgccttctactccgccgccgccagccggctgctcggctccggcggcggcgccggcagcgacgacgacctgtggagcttcacgcggtcgtcggtttcgtcaacggcggcggcggcggccacgtccacggagcggctcagccacgtgtcactgtagacgccgttcttcgtcgccgtcgccgtcgccttaactatgtacgtacgtacgtcgtaagcccctacgtgatgacatggccagcatgccctggtggtacacgtactagtaaagaagagacaaacaccaacagcaggagcagagagagagaaagaggaaataaaagaagggtctctagagagagagagagtgatttcagaggaggtgattagagtgatgagagagactgaaagtagatcgatggatcgctgattcgctgatacgattaaagctggcagtaagttggagtggcactgtcactcggacgccacatgcatcatctctcctttctatagcttcattctctctccatcatctcagccactgtttaattaacccccggccaccgattgttattactataatatataaccacagcattttactagcagattgatactacatctaccactgttactatatattagattgttcatttcaatataattaggagagagaggaggggagtaattaattgacagcgagcagcatggcaaaaacagtgtaaggcgattattattgctggtttgtttactagtacctacctacgtacgtgctgtgggcggtgtgtgtgcatggtgtttgcagtttgcacatgtgcatcctttatttttaattattcccatgactatatatatagatattaaatatacatgcaggttgtatctatctatctatacatacaaattgcatttctgtctgtctctccctctgaatatgaatgatacccgtg

SEQ ID NO: 133537 - DNA, 1911 bp, Zea Mays
ctcctagctcttctctttcctcatcatcgtcttcctcccctcacatcctctggcctctggtcctccaccgtcctgctagccagagctgctcttgtacgcgcagctggcctctgtgcatatcaccagcacaccgcgcaggggaaggaaattaacaagagaaaaggcaaggagagcaggcaggcaaggaagctgcagaagccaaggaaggagaaggaggatcatcaatgagcatctcggtgaacgggcagtcgtgcgtgccgccggggttccgcttccaccccacggaggaggagctgctcaactactacctccgcaagaaggtggcctcccaggagatcgacctcgacgtcatccgcgacgtcgacctcaacaagctcgagccatgggacatccaaggtacgtacgtacgcacggccggtccggtccgatccggtaccactgccttcttcaacttcaagttcaagcacgcgcgcgcgcagtagcagagcagctcgtggtcgtggatcagatcggatcggagctggtgcacgaccatgagagcacggacatgaacatgaacagaccttgttgtgaatgcaactgccttagctagctaccaagcaagtactctcgttcgtacagcagcatgtatagcttatgttcgttgatcgacaaaactagctagcaaacaatcaaacgcgatcgaattcatcgcgcgctaactactggctaacaactgctactactactaaagccgctagctccattccatgcatggaaatcgcgcgcagagaaatgcaagatcgggtcgggtccccagaacgactggtacttcttcagccacaaggacaagaagtacccgacggggacgcgcaccaaccgcgccacggccgccgggttctggaaggccaccggccgcgacaaggccatctacaacgccgtcaagcgcatcggcatgcgcaagacgctcgtcttctacaagggccgcgcgccgcacggccagaagtccgactggatcatgcacgagtaccgcctcgacgaccccgctgctgctgctgctgctggatccggtgatgccgtggccaacgacgacgcagccgccacggtaagcaaagcaacgaccctgatcgccgttaatctcttctctgcaccaccagttcacgtacgccaccattaataattgcctgccgtaagataagaaacaattatatggcggtggtggtgcaatcatgcgagtacggcgacccgccttgatttgatccagctccaggctcaaggctccggccgtatttttttccgctctcttgttttgattgattgatgaggaggagagagagagcagtaggcgctagctactagctagctaggggaaggagggagggacggacgtagtaataattattaaactttgccatgtgcctcatgtgccccaaaaggtagcaataattaacactgctgcactgtttttttttaatctgcttcttgtcgacttgtcgtcggcggcgatgtcgcggtggacaggctgctgctgctgccgccgcgtcgtcggacggcgggcaggaggacggctgggtggtgtgcagggtgttcaagaagaagcaccaccacaaggagtcaggtgggggcgggggcaacaagcacggcagcagtaacagcgagcatgggcacggcggcgccggcaaggcatcggctgcggctgcggctgcggcgcaccagcaccagcaccatggaggcctgcagtactcctccagcgacgaggcgctggaccagatcctgcagtacatgggcaggtcgtgcaagcaggagcacgagctggtgtcgccggcgccggcgccgccgggacgggcggcggcgtccaggtacctccggcccatcgagaccgttctgggcgggcacgcgttcatgaagcttcccgcgctcgagagcccgtcc

SEQ ID NO: 133538 - DNA, 850 bp, Zea Mays
ctttcctcatcatcgtcttcctcccctcacatcctctggcctctggtcctccaccgtcctgctagccagagctgctcttgtacgcgcagctggcctctgtgcatatcaccagcacaccgcgcaggggaaggaaattaacaagagaaaaggcaaggagagcaggcaggcaaggaagctgcagaagccaaggaaggagaaggaggatcatcaatgagcatctcggtgaacgggcagtcgtgcgtgccgccggggttccgcttccaccccacggaggaggagctgctcaactactacctccgcaagaaggtggcctcccaggagatcgacctcgacgtcatccgcgacgtcgacctcaacaagctcgagccatgggacatccaagagaaatgcaagatcgggtcgggtccccagaacgactggtacttcttcagccacaaggacaagaagtacccgacggggacgcgcaccaaccgcgccacggccgccgggttctggaaggccaccggccgcgacaaggccatctacaacgccgtcaagcgcatcggcatgcgcaagacgctcgtcttctacaagggccgcgcgccgcacggccagaagtccgactggatcatgcacgagtaccgcctcgacgaccccgctgctgctgctgctgctggatccggtgatgccgtggccaacgacgacgcagccgccacggtaagcaaagcaacgaccctgatcgccgttaatctcttctctgcaccaccagttcacgtacgccaccattaataattgcctgccgtaagataagaaacaattatatggcggtggtggtgcaatcatgcgagtacggcgacccgccttgatttga

SEQ ID NO: 133539 - DNA, 1438 bp, Zea Mays
ctgcttggtgcttcctcagccgcgccctgaggttcttcccgcccagctcagccgctccctcctctccttccctgctcgcccccggctccttggttctcctcgccggcgcccttgccctctccctctggcgagcttccctgcttcccagtcgtcactccctgccagacccctgctcgctcgcgccctgccgaggtctcgcccggccgcagcccctctcgtcttcctcggatccggcctcggcttgtcggtgctcggactgaagttcatcgcgcccagccccaacgcccggccaagctccctgctcgcgccctgggttgcttgctcaggctgctgctcgccgcgcgccctggcgttcgccgtggccaacgcgccgagctcttcgctgttgtccgtgcgcgcgcgcctgcttctctgtccatggccgcgtttctctgctcggcctcctacccctctgcacgcagtcacgtcccactgcttggctaccgctcatccgtcgtgctcgggccaccctggtattccagctcgtcgttgcgttgtttgtcatcgaccttgctaaatcgctcattgctcgacgccagtgatggctgtcgtggagcaccgctgcgaactcccagcacccttgctctgctccaggaaatatcaagccttgaaccgccatcgttttgttgtgacgtgtgtgtgcgctactcaccccacgtcgtcttttttttgtgtttgggcagtcccgcggcatctgcaaaccttgcctctctagtcgtcatgttctccctatctaccaaatcgtcgcgccgtgctgagttccctggccatcgcgtcttttcttacagacgctcagtctcgccgcgcgtcctgtttcctgctcgccagcgtgccctcggctcgctcgactttaattcccaatcgcgtcatcgacctcgtcgtttgccgtcgagtcgtcaaacacgtcatccccggctcgatccccacctcaccagtttactccagacttcaatcgaaggtcgtcgtcgttcgtgcatccccaagaaatcccaagaatcgggtgaagacgaagctagcagcgcgattttccccaagcgctcaacaaattgcctagatcggaaaatcgctaccgatctcgcggattcgagtcagctgttgaaacggtaagctgatgaattattcataatagttcgatcgttaaataaattaatgtgctagtgcgatgctcattaggtgctcgataattgcgtgagtcacgaaactctcgtcgacttcgcggttcttgcgattatcgagccagattcagttatggcgcgtcatttagctattccggtcaattagctgaattagtgtaccgaatagaatattaacatgcctgtgtgatgaggaaatagtttaatcacttatacagatgtgtatatatttacgataaagaaatatttaagtaactgttgacatg

SEQ ID NO: 133540 - DNA, 777 bp, Zea Mays
aagcttctgcctcgcgaaaaccctaacaattccagcccctatataaccacacccacgccgcctccgcccgaaccctagaatccaccctgccgcctcaccgcctctctcaatctggtatgtgccgtccgtcgcctcagtctcttcccgccgccgcttcggagactaacttctctccctttgttgttctctcttcgcagataccgcagatccgtcgtccggtgagtggaagccgcacgaacccatggcctccggcgagcttgcctgcacctacgccgctctcatcctcagcgacgatggcatcgccatcaccgtgcgtccttctccctcgccgccggctcttttaaatctccccgcttattctttttgagcgggtgaggagatgcgtgattgttcctcttcttggcaggccgagaagatcgccacgatcgtgaaggcggccaacatcaaggtcgagtcctactggccggccctcttcgccaagctcctggagaagcgcaacgtcgaggacctcatcctctccgttggatctggtatgcatcccccctttgcccctcaagatattatgcccggggtttgcaatgtgtgggtagttcgtggtggcgacgttgtagatttagcttatttcgttatgttgcttgtcttttattgatcttaaacttgttcgagacgtattgaaacagtttttatcacccaaccatgtgacattgtcagttctagaaattcaacttgaatgattataagtcgtcatattcactgtaattgaacctttgattcgac

SEQ ID NO: 133541 - DNA, 726 bp, Zea Mays
aagcttctgcctcgcgaaaaccctaacaattccagcccctatataaccacacccacgccgcctccgcccgaaccctagaatccaccctgccgcctcaccgcctctctcaatctgataccgcagatccgtcgtccggtgagtggaagccgcacgaacccatggcctccggcgagcttgcctgcacctacgccgctctcatcctcagcgacgatggcatcgccatcaccgccgagaagatcgccacgatcgtgaaggcggccaacatcaaggtcgagtcctactggccggccctcttcgccaagctcctggagaagcgcaacgtcgaggacctcatcctctccgttggatctggtggcggagctgctccagttgctgctgccgcacctgctggtggtgctgcggctgctgctgccccggctgtcgaggagaagaaggaagaggccaaggaggagtctgatgacgacatgggcttcagcctgttcgactgaggagaccccctcacccagccattagcaaatttcacttgtgctgtcaaagactatcttgtcttatgttatgtctctaggcttttgttacaactacccaagttttgagtttttgagatgtggctatggcatgaactcaaaccatcttatgagggtgaaacctgtttctaatttctatattgttgctgttcattaaaaaaagaaaaaaggctaccaaaagaccgcaaaaaaaaaaaaaaaa

SEQ ID NO: 133542 - DNA, 732 bp, Zea Mays
ggacgatagtgtgtatttatatacttacaataaactgagaagcaagtatctgtctctttacctgaattggaccttagggtttcaatgtttaatttgacactgtacatggcgcatatgtttgaatcttcattgcattactgaaatgcaagacaatgccctgggtattttcagaatgcaggagtatgggacctttaatttgtgccaaccttagctgcactgaagattgtaacagtgcatgtttatacttgaattggatggtggattgtgttgaatttgtcaccctttgctttgatataagaacctctagttatatgctagaaggactaatcgttttggtgtgttgaaatggttttgtaggtggcggagctgctccagttgctgctgccgcacctgctggtggtgctgcggctgctgctgccccggctgtcgaggagaagaaggaagaggccaaggaggagtctgatgacgacatgggcttcagcctgttcgactgaggagaccccctcacccagccattagcaaatttcacttgtgctgtcaaagactatcttgtcttatgttatgtctctaggcttttgttacaactacccaagttttgagtttttgagatgtggctatggcatgaactcaaaccatcttatgagggtgaaacctgtttctaatttctatattgttgctgttcattaaaaaaagaaaaaaggctaccaaaagaccgcaaaaaaaaaaaaaaaa

SEQ ID NO: 133543 - DNA, 881 bp, Zea Mays
ccggtgtaggatgttcttgtcccacctccgtgccttgcccttctcgatgagtgcctgtaggacctgcaccgtcccttctgcatcctcctcatttggcagctctatgctgaggtgaaacagggggacgaaggccgagctcatgaccctgtttctcgtgccacctcttttgtccctaggtgaggtctgtccgttgctcccaacaatgttcactacctcctgagacctgtccagatgaacaacgctcttgaggtgcatctccgtgtcgatcgaccactgcgggtcaggaggaacaccgatgaaccgaggcgatcctagatccaccaagtatgggcttgagactagcagaagcagcttctcagttagcacaaggaacttcccagcccccttgagtgtcttgcacatgacaaatgtctcctcctttagtctgccactgtcagcttgggcaagcaacgattcaccgatggcttcttcccaggagtagggaaacaaagggcgatctctggcaacaggcctggggaaacgtactcgcaagtagttggattcgtgagggttgcttcggtttctaatgctctgggcagttctgcctgtggcttcaagaatgctagccataggccgtgccacaagcccagctgttcccattgctaaacctgtaggaacagacgtgctgttggtcaaatgggaacaaattgaatataaatgcttaatacaatggttgtacctgagatgaccccgggaagaccatgtttctcagctcccctaatcggtgattgaaggagcccagtcagaccctggagagaatcattacagcgcagaacatacagcatgtcagcatgcttagataaatgcccagcaagatttatcgtgataaatgaaaaaaaaaa

SEQ ID NO: 133544 - DNA, 2849 bp, Zea Mays
atgtccaacgtgaccgtgtgcgtgcggttccgaccgctgagccacaaggagaggaaggccaacggcgacaacgtctgcttcaagaggctggactcggagtcttttgttctcaaggatgagagggaagaggatgtcgtattcagtttcgacaaggtgttctatgaagatgcccaacagtctgacgtctacaacttccttgcagtccccattgtttcagatgccatcaatggaataaatgggactataattacttacggtcagaccggggcaggaaagacgtacagcatggaggtggagatatatttggaaaaggtgagggaccttcttgacttgtccaaagacaacctgcagatcaaggaaagtaaaacccaaggaatttacatttctggagcaacagagatatctatcctcaacagttcagatgccttggagaacctttctcaaggaattgccaacagagctgttggggaaacacaaatgaacctggctagcagtagaagtcactgcttatacattttctcagtacaatatggatgcacttcagatgagagggtaacaacagggaagattatacttgttgacttggctggttctgagaaagttgagaaaactggtgctgaaggacgggttcttgatgaggcaaagacaatcaacaaatccctctcagctctaggaaatgtcatcaatgccttaacgactggtaaacagaatcatgtgcctttccgtgactcaaaacttacgcgcattcttcaagattcgttgggtggcaactcaagagcggcattgctgtgttgctgttctccgagcccatcgaatgcagcagagagtctgtccacgcttcgctttggaaccaggcatgccagtcaaccagtttcacacctgtaccgcattgttctcataaaggctcctccgaaattgattcctgagtcagtggataacaccaagaagcccgccgtcgagactcatgatcaagatgatctgcgggacaggatactgagcaagcatcttactctgaaccaaacttgtgttcagctaaggttgagcctgaaggaggaggatgtggatttgttagaagaactgttcgtgcaggaaggcatcatcttcgatgccagttccgtcgtggacatcgactcggtgttccgggacactgcaagcgaggagatctcgttgctgatgcaagccgtcgaggagctcaaagaaactgtggaagaggcgttgcagctcacggacgagaacgaaaagctaagacgtagcctccaagtcgcacaggagatgaccactcaggcccagctcgccgccgccgccgccgtcgctggagctgcccggagccgtactctgcttgatttcgtgccggcagtcctcttccggccatttggaaaactaaaaatattcgtcggttcatctactgggcaggatgcacacgtggctccgcatccaaccgttcctgggtcgcacagcccatcccgccgcgccgtctccctctcgccccaaacccctctcctcctctctttctctatccacctttccaccgtcaccatggccaccgccactacgtccgcctatcattgcaacgccgtcctccaccttcccagacctccgcagttccgccggctcctgccccctctcccctccctcgtcacccgcagagccgcgagcgtcgggctgggggtcgcccgtctcggttcgagggcgagggcaagggcaagttccgtaccgccaccgccaccattttttgaaaccgtggaggaggaggaggaggaggaggaggagcgtgggtggtcggatgcggaggcgggattcagtgacgaggcagaggatgagcaggagtggtcgggcggcaacggcgcggcgcgcggggaggacctgggcgcggacgccggcgaggaccttagcgggtgggcgcggcagtggccgcgcccgcgggagctgttcgtgtgcaacctcccgcgccgctgcgacgtccaggacctgctcgagctcttcacgccccacggcaccgtcctctccgtcgagatctcacgcgatgccgagtccggaattagccgaggaacggcttctgtgacgatgcgatctctagcagaagctcgggcagccatcgacgctctggatggattcgacatggatgggcgtgaggttttcgtgaagctagcgtccgacgtcatttccaacaggaaaaacgtgaacctggcccacataacgcccacgaaggaccacatcttcgagaccccgcacaaggtctacgtcggcaacctcgcgtggtctgttcagccgcaagacctgagagagctctttacccagtgcggaaccgttgttagcacgaggctgctgacggaccgcaaagggggcaggaaccgagtctatgggttcctctcgttttcttccgcccaagagcttgaggaagcgttaaagctcgacagaacggtcttcttcggacgggatatcgtagtgaaggaagcccatgtagagcgccagacgcgctgagccgctgagtgttacccttgagaactgcactttttttgtctgcctcgttgactgactaagctcatgctccaggcacaagctacacagctgacgaagaagcaattgagcggttcatcgcgaaagagttaaaaaaaaaaacggtagtgtaaattagtaccattgctgcaactttgtcagcgccgccgtggatgctggtgtgagaaattctaggacgaactgagaactggtattgtagtggtaatacatgttgttttagcttcttataataccctccatacagtaatagtgctccttcaccacacgtttctaatgtctcgaatttttgtttgtgaaagggattctaattgagttggtcagattgtagaaga

SEQ ID NO: 133545 - DNA, 882 bp, Zea Mays
tgcagggtggcaactcaagagcggcattgctgtgttgctgttctccgagcccatcgaatgcagcagagagtctgtccacgcttcgctttggaaccaggacaaagctcataaaggctcctccgaaattgattcctgagtcagtggataacaccaagaagcccgccgtcgagactcatgatcaagatgatctgcgggacaggatactgagcaagctaaggttgagcctgaaggaggaggatgtggatttgttagaagaactgttcgtgcaggaaggcatcatcttcgatgccagttccgtcgtggacatcgactcggtgttccgggacactgcaagcgaggagatctcgttgctgatgcaagccgtcgaggagctcaaagaaactgtggaagagctcacggacgagaacgaaaagctaagacgtagcctccaagtcgcacaggagatgaccactcaggcccagctcgccgccgccgccgccgtcgctggagctgcccggagccgtactctgcttgatttcgtgccggcagtcctcttccggccatttgggtttgtaccagagtgacgacagggtcaatgcccattgtcctgtgaggctgtgaagaaccatacacttgggatatagtagatcacgaccatggtggtacacagtatataatagttgcaatacagatactagactactgatatccttggaacttcagtctgtttgaaatacggcgagaatactgatagctatgtcatgtgtatcggatatttttcgtttttttgtgtgctggaagtgtctactccgtagttgtttttgaggattcgcctcttccccctttcaaagtactgatgaattgtcgtttttctttttaataacagaactttaagttgacttc

SEQ ID NO: 133546 - DNA, 3429 bp, Zea Mays
atgttcggacttcaggcgagcggcgcggcggcctcgtgggtggtggggcggatgggcaccgacgcgcatctctacgacgaccccgacgacgcctccatccccgagctcctcgactcccgcttcgacgccgacaaggtcgacgccctcaagcgcctcctcgccctcatcgcgcagggcgtcgacgtcgcgcacctcttcccgcaggttgtcaagaatgtggcgtcgcagtcgctcgaggtcaagaagctcgtctacctctacctcctccactacgccgacaagcgccaaaacgaagcccttctttctattaacatcttccagaaggatttatcggatataaacccactggtgagggcttgggccttgcgcactatggctggcattagactacacgttgttgctccgcttgtgttggttgctatcaagaaatgtgccagggatccgtctgcgtatgtaaggaaatgtgctgcctacgcactttgtaagctgtgcgacttgattccagacgaaaatgcggctttggaggaggttttgtctagtataacccacaccttcttctctatgcagcaactctgcattccatatacgtatctcaagcctgccctgttgatgttgttgcagatcgtggacaccttgttcagcgacaattcccctggagtagtaggagctgccgctgttgcatttaagtcggtctgtccaagttgtttaccgttagtatcaaaacatttccggaggctatgtgagaccctccctgatatcgaggaatggactcagatcgtcctcatcgagatcctcttgcgttatgtaatagccagacatgggttggtcaaggattctttactctttgcttcagatttaccgacagagattcatggcgttacagattcagatgctgttgctagcgtgcccacccaatctgattctatcgtcaatggggtttctgatactatatcaagcatcatgctgttccggcactacatcgaacaatgctcaggttcctctgatagagaaggcaataatttagaattatcgtctgtcaccgcaaacaacaacgatgatgtcacaattcttttgaaatgtacatcacctcttctatggagtcgaaatagtggagttgtacttgcagcagcaagtgtgcattggatcatggctcctattggggacatgaagaaaattgttggcccaattttgtttactctacggtcatctcctgatgcagcatatgtgatgcttggcaacatagtagtttttgtcaagacaatgccatcattgtttgccccgttttatgaggacttctttgtaaacacttcagatccgtaccagacgagggctttgaagcttgaaatactgaccactattgccacagagtcatctattccggccatttttgaagaatttcaggattacattaaagatccagataggaaatttgtagcagataccgttgcggctattgcattgtgtgcccagaaacttccctctattgccacttcttgcctcgagggacttttggcacttgtattttatgaatcttttattagtaactcagttcacttagatggagaagatgctgttttggttcaagcaatcttgtcaatcaaagcaatagtgaaaatggatccagtatcccacgaaaaggtatgttgtaatgttcaatcatgcattagagctgtaattgtccgcttggttcgtggtttggacaaactcaaggaacctgcagcacgatccttgatcatttggatgtttggagagtatagcttcatgggggatctcactacaaagattgttcctcctgttctcaagtatcttgcgtggtccttcgttgctgaagtggtggaaacaaagcttcaaatcctaaattcttctgccaaggttataatgcgttgtacagaagaagacatggaagaattcaaaagcatagttgcatatgtcattgagttggctacgtgtgacttgaattatgatgttcgtgatcgtgctcgtttactatcaagactcttgccgtgctacatgactcaccaagggtcctcacatcaacctcagaatggtgatatctataaagagctagccaatcatatatttaatgggaagttgcagccaacatctcatccagcaagcaactatcgcatatatcttccaggttcactttcgcaggttgttcttcatgcagcccctggttatgcaccacttccaaagcctcaaagtatggaattaaaccataatgtcacggcagcaattagaggcaaggccaaactttctggaagtgactccgatgctgaatctggatcttcaacatatgagagcagctctgtttatgattcggagagtgaaggtgctggcctatcggacagggatactgttgaatcccatcaggctcaagaagataaccaggatgctccactggtacagatatatgatgctagtatacagcaaggccaggcaggtcaaaatactgaggaaaatttggcagatcttatcagtaccgatttgactgagttgatgtctaagtcagccttggaatcatggcttgatgaggctcctgctgagccagttgttcagaatttgacacagacatcgtctgccagagtttcttttacaaaccgcaactttgagcgaaaacctaaactgcacacattgttagacccatctggcagtaatggattaagcgttctatatgccttctcgcctgaggtttcacccagatcacgtttgctagtatgtgtagacctatattttgagaatgtcactacacagcagctaacagatataaccattgaatctgaagaggcttctagcagtgtggattttatagaccaaacatcagaaggatattcgggtgtccctactatcgttcctgtggaagggatacattcgttggccccacaacaaatggcaaagttggttcttcaggtccattttcatcaccatatcttgcctctaaagctgtctgtgttttgcaatgggaaaagacatccagcaaaacttcatcctgacattgcttatttcgttcgtccactacccatggacctaaatactttcctatgcaaggaaaaccaattgaggggaatgtttgagtatgcgaggaggtgcgctttcaaagatcatcttcagaagctaggtcacgaggacagtgcagagcacatcgataagaaccttcaggtggcccagagtgttgcttcaaaaatactgagcaatgctaatattcaccttgtctcaatggatatgccagtaaccttcagtgtcgatgacgcctctggcttgtgttggagattcagcggtgaaatcctgagcacttcaaaaccttgcctgattaccatcctggcggaagggcgtgcctctggtccgctggaccttgctgtgaaggtgaattctgaagatacggtgttcgccctgaatctcctgaacagagttgtggcgatcatagattga

SEQ ID NO: 133547 - DNA, 283 bp, Zea Mays
cctttttcatgttctattctatattgggaaatttggatccataccattaaaagatcaccactttggatccataccattactatctcacttacatgtgggtccacatgagtcaatgacatgtggggtccatggtatatatctaaagtttggatcttttaatggtatagatccaattgttccttctatatttgatttacaaatttcaagttcgaatcctaaaatagagtttaagaattcaaatttttaatacatactcaaaaacaattatgatgcaatagatata

SEQ ID NO: 133548 - DNA, 1723 bp, Zea Mays
tagtagcccttctagaactctcccatccggttcctaccgagttttccttccccacctccccgccccacccatcgccgaatcggagtcccgctcgcgtccacccttgccagagctcgagagctaccttctggtccggttggacagatcccttcgggcgcagcgtccccccgagattattcaggcaaggtgctgtaacataagatgcaagggggaagaggtgggaggcagggtttgttcggttttggggacccttttgttggtttcggcagctttggacagccagggaacataatgtccggtttctttggtggcgcaaatccctttgatgaccctttcttcacaaacccctttggtggcatgatgcaacctagtttctcaacccctttcagcggcatgatgcaacctagcttcatgaacccctttggtagcatgatgcaacctagcttgcttggatcaagtatgtttgcatcccatggcaatctcaatggaggcacttttggaagccagacacatctcaatcaaggcatgagcaatgccagtggtttcattcagcaagcctctgaatcgagcaggcctaaagggccaattatcaaggagttgtcttcagatgacgaggataaaccagaggatgataaagaagatggcaagaagaatggcaactttaggaagcatccaagggaaagcagagaaccgtgtgtggaggacccagatgaagaagaagaagaagataataaaagacctaaacatagacaatttgggagggagctcagcagatctggtacatcacgtctacagcctcagacatttatgtttcagagttcaactgttacatatggtggtccaaatggagcctgttatacatcttcaacgactaggaagactggtgcaaacggaattacactggaagaaagcaaggaggcagacacaactactggtaaagccacccacaggatctcacgtggcattggcattaagggtcactcgttaacaagaaaccttaactccgatggacgtgtgaacacccttcaaactttacacaacttgaatgaagatgagcttggtgggtttgaagaatcatggcaaagaaatgccaggcagaatatgcctggctgggatactagaatgaacatgcttggcaacggaaatcttcacacgggcttccgagatgcgaatcaaaggccagcacttcctgccccaggacgatcccgtaaagcgaattcctcatggaacttccagaatggctcttccacgggtcgtgcaccccgcacatgagttcttctgtgccatacgcaggatcacagtgctcagtaccggtcgcatccactattttgcagaaaaatgttgcaacccgagcgctcattcgaaagactactgtatagcttatgacagttttttaatattgaagagcttcactggagacaactgaaaatcagaagctttccttagtttgagcagttctatcctagtgctccaatcactgtagtttagtgctgcctaatatgttttgatgggaaggacaatttcttcatgaatgactcgccctagaatcatgtagcctcttgccaacagcttatacatccacatatttaaactctactctgcgaacacttgaaaagtcttatatggtggtatatggtggcatgagtatgtatgtttgtaatttttctttcagatgcattctagctgccaataagaccgtctgcagcagtctatctagagttta

SEQ ID NO: 133549 - DNA, 127 bp, Zea Mays
atgcgatgtgctcatctccctcctatcctctgctccccagctccgatccagcgctctgggctgtgctccctctctcctccatgcgtgaggtgccagcggactgaccttccccatgcagctccttcct

SEQ ID NO: 133550 - DNA, 922 bp, Zea Mays
cgacggaccccccctccgtccccggcctccaccctcataaatccccgcccgccccgacacaccagcccccgcccacgcattccgattccaaattgaacagctctgctagctcagacacaggtggggggaggcggcggcacggcagctgcagcaaactacaaggcggcgagcagaggcagagccgcgccaaaagcgaggggaagcatccaagcctcgggcgatcccgccgaagcgccctcgtccgcttcgtccctgctgtcagagccgccgccgcggcgcgcgggcgcgcgtgcttgcttttatatacaggcgacccgcgtgcccgggctcttcgttgcctgcctctgactctgcagtctgcacgcacgcactcacccaggcggagcacgagagaagccggccggcggcgatggagtggctggatgagtacgagaagctggtgatccggatgaacacgccgcgggtggtcatcgacaatgccgtctgccccacggccacgctggtgcaggtgacccctccgcctctggttcttgggcgcgcaactagcgctcgtgactcgcagtggttgctgacaccgtgctgcaggtggacagcgccaggaagcgagggctgctgctggaggcggtgcaggtgctggccgacctggacctgtccatcaacaaggcctacatctcctccgacgggcgctggttcatggacgtcttccacgtgaccgaccgcctgggccgcaagctcaccgacgccagcgtcatcgcctacatccagcagtccctgggcacgtgggtcgagccggcggcggcggcgccccccgaggggctgacggcgctggagctgacggggcccgggcgcgcgggcctgctctccgaggtgttcgccgtgctggccgacatgcagtgcggcgtggcggacgcccgcgcgtggg

SEQ ID NO: 133551 - DNA, 2052 bp, Zea Mays
cgacggaccccccctccgtccccggcctccaccctcataaatccccgcccgccccgacacaccagcccccgcccacgcattccgattccaaattgaacagctctgctagctcagacacaggtggggggaggcggcggcacggcagctgcagcaaactacaaggcggcgagcagaggcagagccgcgccaaaagcgaggggaagcatccaagcctcgggcgatcccgccgaagcgccctcgtccgcttcgtccctgctgtcagagccgccgccgcggcgcgcgggcgcgcgtgcttgcttttatatacaggcgacccgcgtgcccgggctcttcgttgcctgcctctgactctgcagtctgcacgcacgcactcacccaggcggagcacgagagaagccggccggcggcgatggagtggctggatgagtacgagaagctggtgatccggatgaacacgccgcgggtggtcatcgacaatgccgtctgccccacggccacgctggtgcaggtggacagcgccaggaagcgagggctgctgctggaggcggtgcaggtgctggccgacctggacctgtccatcaacaaggcctacatctcctccgacgggcgctggttcatggacgtcttccacgtgaccgaccgcctgggccgcaagctcaccgacgccagcgtcatcgcctacatccagcagtccctgggcacgtgggtcgagccggcggcggcggcgccccccgaggggctgacggcgctggagctgacggggcccgggcgcgcgggcctgctctccgaggtgttcgccgtgctggccgacatgcagtgcggcgtggcggacgcccgcgcgtgggcgcaccgcggccgcctcgcctgcgtcgcccacctccgcgcggacgaccctgccgacggcgacggcgacggccgtgtatctcgcatcctggcgcgcctgagccacctgcttcgcggcgacggcgtggttgccccgggcgccgtggccgccgtgccggcctccggcgtcgcgcacgccgaccgccgcctgcaccagctcatgtccgccgacctgcaccgcgcggcgccggtccctgtcccggtcccggccctggcgcccgccgtgtccgtgcagagctgggccgagcgcgggtactccgttgtcaccgtgcagtgcggcgaccggcccaagctgctgttcgacgtggcgtgcacgctccacgacatggactacgtcgtgttccacggcaccgtggacaccgcggcggggcgcgcgcgccaggagttctacatccggcgcgccgacggcagccccatccggtccgaggccgagcgcgagatgctcacccaccacctccaggccgccatcgagcggaggtcgctggagggcgtgaggctggagctgtgcgcgccggaccgggcgggcctgctgtcggaggtgacgcggacgttccgcgagaacgggctgctggtggcgcaggcggaggtgtcgacgaagggcgaccaggcgtgcaacgtgttctacgtgacggacgccgccggcaaggcgccggaccggggcgccatcgacgccgtcagggagagggttggcgcggaccgcctcgtggtgagcgaggagccccgcccgccgcagcagcagctgtacccggacgcctccgggccaggcagcggcggcggcggtggcctcgggctggtatacctcggcaacctcgtgaggaggaacctgtacaacctcggcctcatcaagtcgtgctcgtgactcgtcaaggccggccgggtgctcgggtcgagacgcgcgtcgtggaggggacggacggacggacacgcgccattgctctgtgtacgtactgtattgtacatacagggcaccgacgccgtggcgtggcctggagcaggatggctagccgtacgtagggaaactctgtagccgtgtactgtagatagacaaaaccgtcgtcgctggcagtggtagggggggggtgcattcatcgtgcgtgggacgattcgttatttattactgtacctgttattctttccgttcgttgggtaaccacacctctctctctttgc

SEQ ID NO: 133552 - DNA, 182 bp, Zea Mays
gtgaccgagcgtgcacaaaaagaagtcatagcacgcgtgggtctgggatttggacgttgttgcccctagtaattgcaaaaaaaagatgcatttaagaggaatcgaacttgagacctccagtctagaatgccttggagctgctgcagcaaccaatcaagcctgattgttttagtgacgttaat

SEQ ID NO: 133553 - DNA, 203 bp, Zea Mays
gcgtgtaaacctaatagtagcagcatttttgctaattgggattattagattagtattatcagtttatgtccaatacatatatagatacgtacgtagacgacgttataaaaacgattagtaatgtcggttacaaaatataattattataattagttcctacttcatttttataaaatttctagaaataaataactttatttttc

SEQ ID NO: 133554 - DNA, 1102 bp, Zea Mays
agataccattccggaagggacccagacgcagcctacacctgcacggctgcaccgcagggaggcgccatctgacccggccccggcggcgctggctgccccgtcgcccccagacccacccagaggaatcacgcagatattgccttcccccgtggcatgcacccaccgacccacatgcgcgcgcgcgcacccatcgggaattccggacccgattcgctttcctatttcattccactccacccgcttttgggtgtgtggacgatgcatggggagagagagagggagcgggagagtctcctcctcctccccgaccggagcgccggtgccatggaagggggcggcgagcaccaccacccgcttagcgtattcctccgggacgcgaggctcgcattcagatgggacgagctcggtcaggagatcatgaggatcgcggtgcccggcgcgctcgcgctcatggctgacccagtcgcctccctcgtcgacaccgccttcattggccacataggtccagttgaacttggagctgtaggtgtatcaattgccgtgtttaatcaggtctcaagaattgcagtgttcccacttgttagcgtcacaacatcatttgttgctgaggaggatgctatgtccaatggcagagacaatgacaaaatacatcaacaaaacgaacgcaatgtttcggtcagtgaaatggatgaactgattcctcctgaaggggctagtgccagtaccagcatatcgtcttttgaaactgattcatgtgaggtcagtgttgagcagaagaggaaaaatattccatcagtctctacagcactactacttggtggggtgcttggcctacttgaaaccctactgcttgttctctctgcaaaacctatcttaggctacatgggtgtaaaaccggactctgcgatgatgaagcccgcattgcagtacttagttctcagatctcttggtgctcctgctgttctgttatctctggcaatacaaggagtctttcgcggatttaaggatacaaagacgcctctatacgcaactggtataataatatttcatttcttagatagtaaatgatatatacttggcaaattgaattctaaaagaaatc

SEQ ID NO: 133555 - DNA, 2240 bp, Zea Mays
agataccattccggaagggacccagacgcagcctacacctgcacggctgcaccgcagggaggcgccatctgacccggccccggcggcgctggctgccccgtcgcccccagacccacccagaggaatcacgcagatattgccttcccccgtggcatgcacccaccgacccacatgcgcgcgcgcgcacccatcgggaattccggacccgattcgctttcctatttcattccactccacccgcttttgggtgtgtggacgatgcatggggagagagagagggagcgggagagtctcctcctcctccccgaccggagcgccggtgccatggaagggggcggcgagcaccaccacccgcttagcgtattcctccgggacgcgaggctcgcattcagatgggacgagctcggtcaggagatcatgaggatcgcggtgcccggcgcgctcgcgctcatggctgacccagtcgcctccctcgtcgacaccgccttcattggccacataggtccagttgaacttggagctgtaggtgtatcaattgccgtgtttaatcaggtctcaagaattgcagtgttcccacttgttagcgtcacaacatcatttgttgctgaggaggatgctatgtccaatggcagagacaatgacaaaatacatcaacaaaacgaacgcaatgtttcggtcagtgaaatggatgaactgattcctcctgaaggggctagtgccagtaccagcatatcgtcttttgaaactgattcatgtgaggtcagtgttgagcagaagaggaaaaatattccatcagtctctacagcactactacttggtggggtgcttggcctacttgaaaccctactgcttgttctctctgcaaaacctatcttaggctacatgggtgtaaaaccggactctgcgatgatgaagcccgcattgcagtacttagttctcagatctcttggtgctcctgctgttctgttatctctggcaatacaaggagtctttcgcggatttaaggatacaaagacgcctctatacgcaactgtggctggagatgcgatcaatatagttttggatccaatatttatgtttgtgttccaatatggtgttagtggtgccgccatcgctcatgttatatcacaatatttcattgcatccatactcttatggagattaaggttgcatgttgatttgttgccacctagcttcaaacatctgcagtttggccgatttcttaaaaatggttttctgctacttgcacgagttattgccgcaacttgttgtgtgacactatccgcttcaatggccgcacggctaggttcaactccaatggctgcattccagatctgcttgcaaacctggttggcttgctcacttcttgccgatggattggcttttgctggacaagccatacttgcaagtgcatttgctcgtaaggactatccgaaggccaccgccacagcttctcgtatcttgcagctggccttggtcttgggacttctcctaagcatacttcttggtgttggtctgcgcatagggtccagattatttacatccgatcagggtgtactgcatcatatctacataggaataccgtttgtctgccttactcaaccaatcaacgctctggcttttgtttttgatggtatcaattacggagcatcagatttcggatatgctgcctactcaatggtccttgttgccgttgtcagtatcatttgcatcctcactcttgaaagttatggcgggtttattggaatctggatagctctggtgatctacatgagcctccggatgtttgctggattttggaggatagggacggcacaagggccctgggcttatcttcgcggctgaacatagaggcagagctagtaacctgactcaccagcacgacgagcacatggtttattattgttcacggaagtggcagtccttgatgtggtctcgtaaatatgccatacggactcagggtctttttggtttgctacctaacttgtcatactttgcctaacttttctgcttaaggttagttcttcaattcggacaactaaccttaggcaaagtgtgacgcagttagccacgagccaaacagtccctcagttcgtcaaacttaggtctgtgagtttggcggatgtgtaggcactcacatcgttaaacaaatctgttgtactggcctagattgtgacagatgcaaaattatgtcatggttggctactatgcgtagcagggctgcaatacatgtttccatc

SEQ ID NO: 133556 - DNA, 2845 bp, Zea Mays
atggaggccgctgcttctcacctggtggtgtcggtaggggacatggaggtggtattgctggatggtggcagggctggatcacggcacaataacatcgttggaggcgcggacgggggcgtagcgcaccggaagacaggttcccgtcgggtacgggtatgtggacgggcgggtaacggatatccgttggataatggatacccggcgggtacgggtactgatagatccgtacccacgagcgtaaatgggtatgggtttgattttatctcgtgggtatggatacgcgaaccatatatccgcgttctacccgcccgattgccatccctactggcgggggagttcgactgctggagaacacgtcggcgccggagggcagggcggcggaggactctgacggggggcgtggtcgggggcacaacgcgccggaggtccgaccagttgttgggattcacgggaaggcgggagcagtgggccccaaaacattttgggcttggggatgggcctttccctgctgcccagcgcaatcggcgggcaccacgcgcgcgcaataaagcaactcctcctgccgcgacgcccttctcctccaccgctccctgccccgtggctccgcttcgttcgtcgccgcatcgccgagggagagggcaagcccagaagacgcctccgtcgccgctctacctgaggtcggacaatcaggccccgctaccgctcctaggtcgcgacccctctccggttctccgccccgaccgcgcccttggcttccaccgccatcaccgcctccacggccatcaccactgcctcgcccaccggcgtcacggccccgcccttggcccccaccgacacgtacacggcctacttcgtggccgccgtcctccgccgttgcgcacgctgagccggaggttggagatctgcctcgtcgagctggagacggaggtcagcctccgcctacgaatcatcatcatcagccaacagcatttcgttggcacttaaagttcaagatagcctgctgtaggccatcggccgtacagatgattgatgatgaggccaactttggtaatatccttgatgcctcagaagaagttcaggttactgcaaagttccgtcccaaggaacgacccaaaccccgaaaaacagctctatcatccagatctgcagcgcctaatcctactgaagaaactggagataggaaagtaggaaccttcaatcaagtcaattcttctaaagagctcacttgccaagaaaggacatccttgatgtgccctagtactgagtcagttgatattatcgctggttctcaaggtattctcgatacaccattggaagatgcattggcagttccccagggttctctgcctggtgcttctgctgcaggtaggacttctcaatatggtgaacacaatgatgatccttctaagttagctacacaccaagaaaacttggtggtttcagatatcaacgtcccacctaacagttcatgtggcaaggctattgatgatatagttgaatttgaggacatgtgtgatgtccaaattgaagaggaaagagttacaaagttccaaccaaaggcgcaaacgaagctccttaaggaaatagccaaatctcggaagactaaccaaaaggtggaaacttccactgtagatgtggttacacaaaatggaaagggcaataatattcagacaaggctccatggcaatcaggtacaggatcctaaaagtcatgaaagtgtgcagatcccagattctgaagaattattagcaactgataatagtaaaggttgcaatttagctaaactcaacaatgtccttgaggagtcagtccaagaggaaacaatagctaagtttcgttctgatttgcaaccaaagcccaggaaggcttcatcccatgttgctgcgattaaaattaatgttgctgctgttgctccaatagttggagtttgtgacagcaacaatgacatgtacagagaacctaaagatcaagaaaccatcaccggtccagtggtttggtcaccacaggctgtgcatgctgatgttgatttagacaatcacaatgaaccaattaatcctcctatcgatggtactcaatcaatgattggcgaagtcccaagtacagcttttacaggaagagaaaagggaaaatcaaaatctgtatcttttgctctatcggatgcttctggggtagctacccctatagataccaattctgagatgggtaacatcggcgattcctgtagtgacaaattgactgatgaaaatttaagtaactcatctcggcatatcgctgaaaagcattctattaccaaggaccaatattcaaatggtcaggaccatgagcgggagccactagatcatgctgttcaacagcaaccaaaatcggatgttggagaaagagcatcatcaatgaaacgacgctgcaggaaaaaggtgcaaaaagttgggacacctaatcacactgttgatgattattttggtgaagactgtgttgaaccttcattagctgaagaagataacaatactggtgatgattacactactggtaataaccataaggctaggaaaaagtcaaggggtggtgtagaagagtcacagcagcagaaagttcaaaaaaataaaagcaaggtgtcttcacggggccgcaaaagaaccttgaaggatgaaacggcagagaagcctgagaagaagctaacccacaggatacgtcagaggataacaaaagaggttaaggctttactggaaacacctcgtgagcagataaaacccatgaagctaagcgcatcacatctcaggttgttacaagaagctagagagcgtgttaatccaaaagggattccatccgggccatcttctaatacaag

SEQ ID NO: 133557 - DNA, 985 bp, Zea Mays
ggaagatggtcaaaatcagataccgacttgttttacgagggtcttcgacaaattggtagtgattttgcaatgatacaacaattattccctgataagactcgccatcaggtgcggcagaaatttaaatctgaggagagaaaaaatccattgctagtccatgatgctataactcatcgctcaggagataatttgtatttcaaaaaggtaattaagcagctcaacattgaagatgttgtgctgccagatattaaaagtacacaaaaacaagatggtgcatcaagtgaaagaggccctggaaatgagaatgtactggatgatttatacggggaggaaaatagttcaaattggttgaacgaagagcatgacgtacagatggctgatgtggaagaagagcatggcgaacagatggatgatgtggatctcggaaatgatggtggtgatgatgatcttggggatgtttttgattggtactagtttgatcatggctggatgatgtggaagaagagcatgatcttggaaatgatggtggtgatgatgatcttggggatgtttttgcttggtactagtttgatcatggctgggattaggactcacgatattatgattatgattctgctaatgttttgaggtatggagttggtttgtcaacgttttgttaatcatagtaatacaaatatatactgatttcattttaacagcacattgcaaggctcctgaacaaactatacaaactacattttttagcttgaacatttatggattttagtttcttgaattctatgtttgcgctctggttcccttatgttgctaggactccctccttccaaattgtaagttgttatggcttttctaagtatattgcttttgctacatacctagatttgtctcggtacataacctgtgtacatagaaaagcctgaactaacttacaatttggaactgagggagtatattgtatacagctcatctttcctagaaaaaaaaa

SEQ ID NO: 133558 - DNA, 1094 bp, Zea Mays
acgtacgtctcctccagctcgagctcacgaccctaaccctagctaactggctatataagcaccacggttgctacacacattcctcacctctccaagctccaaacttccattatctgctgtaactacacactctagtagcagcatcgatcgccggccggccgtttccgagcaacatggggaaacacttcctccaccagctgctcgccgtcgccctggcactcttcgtttcgccaacgagatcggacgactggcttccggccaccgccacgttctacggcggcgctgacggctccgacacaatgggtggcgcgtgcgggtatggcgacctgtacgagcagggctacggcgtgaacaacgcggcgctgagcacggcgctcttcaacgacggcgcttcgtgcggacagtgctacgttatcaggtgcgacagcagcaagaccgggtggtgcaagcccggcagcagcaacttcgccgtcgtctccgccaccaacttctgcccgcccaactgggagctccctaacggcgggtggtgcggcccgccccgcccccacttcgacatgtcccagcccgcctgggagaccatcggcatctacagcgcaggcatcatccccgtcctctaccagcgcgtcaagtgctggcggagcggcggcgtgcgcttcaccatcgccggcttcgaccacttctacatggtgctcatcaccaacgtcgccggcagtggctccatccagagcatggctgtgaagggcgccaacacggactggatccccatgtacaggaactggggtgccaactggcactgcctcgcaggcgggctcattggccagggcctcagcttcgcgctcgtctccaccggcggacagaacatcgtcttccaggacgtcgttccagcgtggtggcagttcggccaaactttcaacacctaccagaacttcgactactaaacatcatttgttacttccttccaatagatatattaaatatgttgtcttattttcattacgaatgtagtttggaaacctttttattattatatataattcaaccacaaagtaatcattgtaaattcatggagtattcagttgtgttacatagtttgg

SEQ ID NO: 133559 - DNA, 3527 bp, Zea Mays
cacccccggcttccagccatctgctccttgcccgccatggcggtggcggcggtggtcttggtcttcaccagcacgacggccgttgccgcttccttggccgttgtccgcagcagctgcgtccccgccgagagagctgcgctgctgtccttcaaggcgagcataaccagcgacccggcgggccggctgcgctcgtggcgcggccacgactgctgccagtggcgtggcgtgagttgcggcaacaggagccacgccgtcgtcgggctcgacctccgcaacgactactggcagcatgacagcttcttcagcgaccacgacagtggcaaccactggctgcgtgggcagataagcccctccataaccgccctgcggcgcctgaggcgcctggacctcagcggaaacctcctaggaggtccaggcgtcaccatacccggcttcctcggctccctcagcagcttggtgtacctcaacctctccgccatggacttcgacggcatggtgccgcctcagctcggcaacctctccaggctggtgcgccttgacctcaacaatccgctcctcggtaaccagtactcaccagatctgtcgtggctatcacggctctctttgctggagcacctcaacctgaacatagtgaacctgagcacagtggctgatccgacccaggctatcaacgcccttgctaacctgagagtgctgcacctagatgaatgcagcatcagtatctattccttgctctcgcgcctgaccaaccttacagccgtcgaggagcttgacctctcgaacaatttcctgttcagcggcccattctcgtcccgctggtggttctgggacctgggcagccgcctcaggagtctccagctcgatgcgtgcggactgtttggatcgtttcctcgcgagctgggatacatgacctcacttgaagtgcttgatcttggcaacaacgatctgaatgggatgttgccagagacgttcagaaacatgtgcagtctcaacacactgacccttgcctacaccaacattggcctggacatagcgcgtctgctggacaggctaccaagctgcccagagaggaagctgagggagttagacctgagccaagccaacttgacagggaccatgttgaactggctgccgaaccaaaccagcctgaccctacttgatgtttctggcaatcaccttactggccctgtgcctgtggagataggcgagcttgcagccttgagttccctagatgtgtctggcaacaacctgaatggcgtcatgtcagaagagcacttcagcaagctaacaagtttgacatctctcgatctgtccgacaacaatctacagatcagagtggatccggactgggtgccaccgtttcaactgaatgtagcagagttttcatcctgtcagctgggttcccgattccctgcctggctacgctggcagaaccaagttaacgtccttgacatttcgtactcgaaccttaccggtacgattccagaatggttttgggctgtgtttgctaacgcatcaagcttggacctctcttacaataagattactggtgagctgccccgtgatttggagttcatgtcagtgggaatccttcagctcaggtcaaaccagctcactggctcggtaccacggctgccaagaagcattgtgacgtttgacatctcaaggaactctttgaatggaccactgtcactgaattttgaagccccactactacagctggtggttctctactccaaccgaattactgggcttattcctaatcagatttgtcagtggaagcagctgcgagttcttgatctatcagacaatctacttgcaggggagcttcctgattgtggcaccaaagttgcaaaacaaggcaattcttctagcacctccatgcctcattctagtcccgcgagtcctccaagcttgaatatccgtacacttcttttaagtagcaacagcctttcaggagaattcccattgttgctacagagctgcacaaatcttcttgtccttgatctatcacacaataagttcactagaaacttgcctgcatggataggtgagagattacagaatttggaaattctagcattaaggtccaataccttttccagccacattccaggcgagataacaaggcttcctgcccttcagtttctggatcttgcaaataacaacttatctggaacattgccacagtctctagcgaacttaaaagccttcactactatcgcatatacaggtggaacaggaaacccttttgatgaagaatatgatggagagtatggttttgttactatgggaccatctgacgacagtttaactgtggagaccaaagggcaagaactcaactatacagaaagcatgatatttctgatgagcatagatttatccaacaacaatttagctgggccgatcccagaagaaataggcactcttgttggcttgataaatttgaatctgtcacggaacttgattagcggaaagattccggagcagattggaaatttgcaatcactggaatctcttgacctgtcgaacaaccacctttctggtgaaattccctgggatttatcaaatttaacttcgctgagttatatgaacttgtcctacaacaatttatcgggcagaataccctctggacatcagctggatacactcagcagtgatgatccaacttccatgtacatcggcaatcctgatctttgtgggcatccactcccaaagcaatgccccggagatcatcagacaccagatgtggaacatcccatcagagatcatgaagatggctcaggctcagatcgaatgatggacttgggtcttggtttacttgttggatttgtggtgggcctttgggtggtgttttgtggcctcctgttcaagaagaagtggaggtgcacgtatttcatgctattagacaaactgtatgacaaggtatttgtcttttccgtactcatttggaggaaatggttcagcgaggcaggtgaacactaagcaaggcttagaaagaaataattgttctccctcacttcctcccatcaactggaaatgttgcttcctgatgagatgcttttgcttcttctttctccctagagtctgctacgtctgtactgtacaagtggaagtggtaaacagagccccaagtcttgccgtttcaccatatgctactactactagtctgttatctcgaaaagctatccatgtcattgcatgttatttaatctaagtaaccgttcagttacactaaccgatgttgaatgaggcatgcattcataccttgttgccggtcagtcttgattggcgtcgttctgctcctgaagctttcaattaactgccagccacagccatgagcatctgctatgtatgtacgcatgtatgcatgcacacaatattttatccctagtccttcctagctgtaatttcatccttcacttcctcaaattggttttttcttggcacataaatcaaagcggattgatttcaattcaattgaactcaattgttttttcctaactaccaccaattcggtgcctagg

SEQ ID NO: 133560 - DNA, 299 bp, Zea Mays
gtacgtggaccgcctgtgcggatcccggtctggatccggcgacggcagcctctaccacggcgcgaagaaggggtcggcgaccgcgggtctcgtgcgcgactgtttggagaatccagcggacagcgtgggccacctccgcgacgcggcgcaggagataggcggcgccgggatggtttgtgttttgtgggctcgggctggcccggcacggttgggcctacaccgtgcccatgctcgggaagagtaatgggcccgttgggcggcacgacacgattaagtggtcgggcttaaccgtgccgggc

SEQ ID NO: 133561 - DNA, 751 bp, Zea Mays
gcgagcaaatttcgctcaagaatgaagatggaaagacaggccacgtccacgtacgttgatcaaccaaccacgtgcttcacgtctacaacgcacgccgcggatacggaaacggacgctagctagctagcttcagtcggaccgcatgcggttgagctggttgagcgccggctggaggatgttgaagagcacccagccgatggcgggcgcgacgacgatgagcaggaggaggccgcggctgtcgtcggcgggcgcggcggcggcgattgccgcgaggtcctgcaccacggcggcggaggcttcgggcggggccgccatcccggcggcggcggcggcgccgaggcccaggccggcggccacggcctggctgctgcgcatgcggttcagctggttcagcgccggctgcaggatgttgtacagcacccacccgatggcgggcgccaccacgacgagcagcagctggccgcggctgtcgccgccggcgtccgccgccgccacgtccgccagcgcagcgtcgggcgacgacgccagcgccgcgaggaaggcgcccgccagcgtggacgacgcggacacggacagcgcagccttcttggcggcctgccccgtccggacgcgcagcgagacgctgccgctgctggtggacggcgccgaccgcgccgcggccttggcggcgggcttcagcagcgccatcgtggctatggtcgccatggcaactagcagagcagagatggcggtggcacctgctggcagtggc

SEQ ID NO: 133562 - DNA, 263 bp, Zea Mays
ttgtttttatttttctagagataaaactacttatctaaagcagataaatgtattttcatggggcctaaatattttatttgggtttggagtatcagaatctatcttcatgtttttagattttttttaaagtgtagagacattttctatggtttaaaaaccttttatcaactatttactgttttttgacaaaaaagtacaaaaccaaatttaaaaccaccccaaaccagagagataatttgaatggtttcaagagtatcgagtgg

SEQ ID NO: 133563 - DNA, 802 bp, Zea Mays
cgagcccgcgaacccgttgctggcgccggcgccgagcccggcggccctgggcgcgtagctctggcctggatttgttgccgcggaggcgtagttgctggggctgacaagcctgctagacgcggtcagatcggtggtggttctcgcgtcggacgtcgggctgggcagcgacgggcccgcgccggccagctccttctcgccggccttggtcggcttcttgggaagccggccgaggatttgcttaatcatggcggactgtactgtaatacgcccacaaacaggtccccgatcagaaccacgctagctagagaaatctccccaaatccatcatcccttcgccacctgaacaaatcgaacgccgcaccgcatggagcaaaattggggagaaccccgcaccgcacctggggaccaaatcgccgcttccggaggcgaatccgcgatcgccgccctcgggataccgcgcgttccgacgagaaaagacaatcaggcaggcgcagcaataaaggagcagacccggcggcggagtcaaaagggaaaacgggggcgggggagcgaaagaaaaaagggaaaaaaaaaaaaccccccgcggctttgtcacgaatttccgccgggagtggcccgcaaattgggcggatttgttggtgcgggaagctgtggggattgggggtcgaactcgcggaggcgctggtggctggtgcggtctcttcccggcaggcggtgcaggggcagcggagggagacggggagggaggagaggagacacagtaggtggtggtggtgcgcgagcgcgagggcccaaatcgggt

SEQ ID NO: 133564 - DNA, 511 bp, Zea Mays
gcaccatcccatcctccatcgcgagagacaccccatggcgtccttctgccgcgccgccgccgccgccggggcgaggtcagcggcgctccgctcgaggtccccgacggcgagaccgttcttggcggctacgtctcctgtcgcgccgccacgcttccacaggcccctcgtggcggcggcggcggcgctggcgagtctggagtcgctcgtgccgctgcacagcgcggtggccgccgcgcggctgcggtcctgcatcgccgccggctccgcgtcctggagctgcctctcccaaggtttgaccaagcgcatctgaccatggctagggccaaaaaaaatgctaaagagactggctcatgcactagtgcatcactatttcatgtttcagtatctttgtgttgttctgtaagggttatctgtcagcgttcagatctgattccgttactcgatggagtaaccgagatgcgttccagatccttaaaattgttggtgattatgcattggctatctttgctgc

SEQ ID NO: 133565 - DNA, 766 bp, Zea Mays
gcaccatcccatcctccatcgcgagagacaccccatggcgtccttctgccgcgccgccgccgccgccggggcgaggtcagcggcgctccgctcgaggtccccgacggcgagaccgttcttggcggctacgtctcctgtcgcgccgccacgcttccacaggcccctcgtggcggcggcggcggcgctggcgagtctggagtcgctcgtgccgctgcacagcgcggtggccgccgcgcggctgcggtcctgcatcgccgccggctccgcgtcctggagctgcctctcccaagattttgctctacctcggtaatgaaggttgaagaaggcgatcagttcagacggggctgccaagttcccatccgtctacacttgacgctcccagccccaagctccaaaagctcttggctgccagcagttctaagtgacgttagcgcttttggtgtgtgtgatgatggttctacgcgtggttcttgcagatttaaacatttgtttcgttcttggtgcttagcaaatatgcatcgtcagactaacaatcagttacatagctagtgttgatgcttgtgtaacaaagatgaatctgttggagctgctagggtgccaaaggtggggtcccctattcggcagagctctggcagacggtaaattctatgaatcgattcgtttaggctttgttcggttatttcaattctatgtggattagagtgtattgcaatagattggcatggattttgacttattatggttttaaaccgattcaataccatcc

SEQ ID NO: 133566 - DNA, 530 bp, Zea Mays
atgtatttatatctccttaagctctcataacctatagcctctctagtacacatgaccatagtccatctagtatacctaacattccccactccttgaaatgcggcttgcccccaagccgctgacggtgtatgatcaacttcttcggttgttgattagcgtcattgttgaatgcatcacgcctctgcagccctccatctgaaatgtgacagctcttgcaacactagaacaacacctgaagcgagcaacatgacagcgcgattaccaggatcccaaacaaagatagaaaaattgccttggccactactgacagcacccagaccagagaatctgacagcactggcgattagacccaatacaatcccttcaagctggaagattgagactgaaacaaagcttagtgagtcaatgacaatgttgattgtcttcaccttatcaagaccccgtcctttagcaccagttgtctcaactttctcagaaccatccaaatcaataagtataatcttccctgatggtaccctctcatctgatgt

SEQ ID NO: 133567 - DNA, 3012 bp, Zea Mays
atgcctctgtgtgtgttgtgtctgcgagcgcaggtgcggtttctgttggtcgcttggccagcgaccttgcaggtggtgccagagctgcttggggtcatccttgtcttctcctgctggaacaaccccttgggtaacagacttgcagaggtcggcaggtatggcgcaatacagatccacacacagcttgaagaagagcgacatctcggtgaggatgccacaggtgagctggtgggatggcgtgaggtaggagagctggtccggcagcgagaacgggctgtggtcgaaccctgccacctcgacaggctcgcccatggtcgtgcgcgtgcacgcgaaggagaagttgtcgacgaccatggccatgggcgtgcgtgcgctagcgccccacccgacgcggccgcgcctcagatccctcgagagctatgcaactgctccagcctcgcccacctcagcctgggggtcaaccagctggagggtgagattcctgctggccttggtctgctgtctcagcttcgcaccctctacatccactacaacaatttagtagggagcatcccaccgtcacttggtaaccttaccctgcttcagattcttgatgtccttgagaacaaactggtaggcagcatacctgtaagcctttcccatttagatcgtctggtagactttgaggtgggtagaaataatctctccggcacaattccaccactgctcttcaacaagtcatcgctcctgtatctcggagttgcatcgaacaagctgcatggaagcttgccagctgatgcaggcaccaacctgcctggtgtcaaaaagctcctcctaggtaacaacaggctgtccggaacacttcctagttcacttggtaacgctaccatggtcgaaatattaggtcttggattgaacagattccaagggagggtggcacctgagataggaaagctgtgcccgtttaatgtcgagatgagtgcaaatgaactgcaagcagaagatgaacagggttgggagttcttcacgctgttcacgaactgcacccgtcttcaactgatcgatctacccctgaacaggttaggaggagtgcttcctacttccatcactaacttttcaacacagatccaatggctcagcatcgcggccaatggcatatctggggtggtcccctcaggcttaggaaaccttatcaaccttagcaacctagacatgggtgaaaacgacctgcatggtgtaattcctgaagatatcgcaaaacttacaaatctgcaagtattgttgctagcaaataatcagttctcaggaaatataccatcctcctttggcaacctcacacagctgcagttgttttccttgtcgaacaacagccttgatggccccatccctagaagccttggtaacttgaaaaacttacctagcctggatttgtcctccaatctactcacgggcttcatccctactgagatctttggcctcccctcactgacagattacctattgctatctgataattacttatctggggtaattcctgcacaagttggcagcctaaaaaatatccaaactctcaatctgtcaaaaaacaacttttctggagaaataccagctgcaatcggtggttgtgtaagtttggtgtggcttggtttggctgacaactccttcacgggtagcatcccaaattcatttggcaatcttagaggcctcaacacactaaacctctctaggaattccttgtcaggaacaataccacaagagttgggaaatattactggtttacaagaattatttctggcacataatcatttgtctggaatgattcctaaagttcttgagagcataagtaatttggttgaactagacctctcctttaatatccttgatggtgaggttccaactcgtggggtgtttgctaacatgactggattctcaatggctggaaatcatgggctttgtggaggcattcgagagctagaattgcctccatgtcaggatatgccacaaaagaggtggcaccgtggactgcttaggattgtgcttccaattgctggcactgctatatgcatatctcttctattgtttgtgctctttctgttgaagtggaaagtaacatctgaaaagacaaaaaccgacagctttattgggttgaccgacaagtatccaagagtttcctaccttgaattgtttgaagctactgatggatttgcacccaccaatctgcaatctggttcttcaagaagtttcttggcagaatgcgaagctttgaggcaggtgaaacatcgaaatctgatcgatatcattacctgctgctctagtgttgacactagaggcaatgacttccaggcattagtgttcgagttcatgcccaactacagcctggatagatggctgcaccagcaaacggatgagcagctgcacaaattaaatttaatccaactcttgaatattgcagttgatgttgctgatgcaatagattatcttcacaataatagtcggccatcagtcatccattgtgatttgaagcctaacaacatcctccttgatagtgactggactgcttatgttgctgactttggactttcaaaactgattggtgaatccatgaacatatctggatcatatagtggaagctccatagggataagaggaactgttggatacgttgctccagaatatggaggaggtgggcatgtatccactgcaggtgatgcctacagctttggggttacccttctggagatgttcacagggagagcaccaactgatgatatgttcatagatgggttgagcttgcacttgtttgctgagatggccttacctgacaagttgacagaaattgtggatgcagtgctattagaggtgcaaccatatgaaaacactgcaaattatgacaaaatactggcttgcttagcttcagttgtcagagtcggcatctcatgctcaaaacaaaccccatcagagagaatgagcatgaaagatgcggccattgagctgcatggaatcagagatgtggtaaaggagaactatgtatag

SEQ ID NO: 133568 - DNA, 1413 bp, Zea Mays
atggagactgtgttcaagtggagagcaagaacaggaggcggagtctcgctgatccatctcctcgtccggtgttttgcagtgtcagctgccatcttgctgctggcagatgggaggcatgctgatgccgtagatcccgccgcacccgtggagatacagcagacaggcagcagcagcgaggtggccgacgagcagcagtggcggatggtgaggaccagggggaaccagttcgtcgtcggcgacgacgacgaccacaggccgttttacgtgaacggcttcaacacgtactggctgatgatcctcgccgtcgacccgtccaccaggggcaaggtcacggaggtgttccagcaggcggcggcggccggcctcacggtgtgccgcacctgggccttcaacgacggcggctggagggcgcttcagaagtcgccgtctgtctacgaccaggatgtcttcaaggcgctggatttcgtggtgagcgaggcgaggaagtacaggatcaggcttatactgtcactgatcaacaactgggacagctacggcggcaaggcgcagtacgtcaaatgggccggggacgacgccgccgccgacggcggccgcctcaacatcaccgcctccgttgacgatgacttcttttccgaccaaaccgtgaaggtctacttcaagaaccacgtcaagaacatgctgacgagggtgaacacgtacaccagtgtgatgtacaaggacgacccgaccatcttcgcgtgggagctcatgaatgagccgcgctgcacgtcggatccagccgggaacaagctgcaggagtggatccaagagatggcgttccatgtgaagtccatcgacccggaccacctgctggaagttggcggcttggcgcagagggcttctacgggccctcgtcgccgtcacggcttccggccaacccgaacgcctatgctggccaggatgccgggcgcgactctggaggcacggctctggttcgtggactcgtggatggaggcgcacatcgccgacgccgacggcacgctgggcatgccggtggtgttcacggagttcggggcgtccaccaccaaggcccggagcggctgcttcaacgcgaccacgagagaccagttcatccaggcggtgtacgcgcggctcctcaactccacgcggcgtggcggcgccggagcgggggctttgctctggcagatgctcccgctggggaccgactacatggacgatggctacggcgtcgtgcttcccagggcggcggccactgcccggatcatctcggcgcactccagggacctggccattttcaactcgaggtgcgcctggagctgccgctgggggtgcaggaggcgggggcacaagtcggaggatcctgatgttgatgatgacctgccgctcgtcgaggataaacaacgagaagcatag

SEQ ID NO: 133569 - DNA, 506 bp, Zea Mays
gagttcggggcgtccaccaccaaggcccggagcggctgcttcaacgcgaccacgagagaccagttcatccaggcggtgtacgcgcggctcctcaactccacgcggcgtggcggcgccggagcgggggctttgctctggcagatgctcccgctggggaccgactacatggacgatggctacggcgtcgtgcttcccagggcggcggccactgcccggatcatctcggcgcactccagggacctggccattttcaactcgaggtgcgcctggagctgccgctgggggtgcaggaggcgggggcacaagtcggaggatcctgatgttgatgatgacctgccgctcgtcgaggataaacaacgagaagcatagaattaatactactaatgagagataaatggccgtgcgttgctacggagcaaaaatatttaaaaatgttgatagaaaaggcatatagataactctatttcatcatacaattgatacaaaagtagcagttaaattgccaa

SEQ ID NO: 133570 - DNA, 110 bp, Zea Mays
gcaattaggatatgacctcaaagtttacctgttcttgttcttgcaggtcaaagcagttggagaggaaatgggaatagggtttctagggcttggctttcagccaaaatgag

SEQ ID NO: 133571 - DNA, 121 bp, Zea Mays
ggtatacaaagtttctaaaagagttgattgtttctcttgtcaatttagtttttttcctttcaaaaacaattgtggttcatataacttatcgctgtacactgtactcagtcttaaattgtag

SEQ ID NO: 133572 - DNA, 336 bp, Zea Mays
atggaataccgccacagccccgctgcaccaccgaacgccaagggcggttctggttctggctgctgcccggagaacaaggacgtcgccgcgccaaacctcagctcagcagcggaggaggtgtctgccaccgtcgctaccagcgacgacgacggcctctgcaagggcaacaagaacgtggctgctgccagcaaaaaactcaagccgcacatcgtcgcggagcgaaagcgccgggatcggatgagggattacttcggcgagctgctggcgctaatgccccagatccctgcgaagagtgacaagggcaccatagtgggacatgcggtcgactacatacag

SEQ ID NO: 133573 - DNA, 2255 bp, Zea Mays
cgcgttgacaggtgtctctgcaacaagtataaaaggagacgggctgagccggcatcgatcgatctccgtatcgccggccgcttcctctccccctcttgcggccgtcgactcagccgctttcttctttctccgatccattgctcacgactgccggacgactgccagtgccatggcgactcaagcacgcgagaaccaccgccattcttttacgactaaggacgagaggagtggtgaaggtgcggaggatcaggcgatcgacgactggctcccaatcacctcatccaggaatgccaagtggtggtactccgcgttccacaacgtcaccgccatggtcggcgccggcgtgctcagccttccttacgccatgtccaagctcggctggggacctggcatcgcggtgctgatgctgtcgtgggtcgtcaccctgtacaccatgtggcagatggtggagatgcacgagatggtccccgggaagcggttcgaccggtaccacgagctcgggcagcacgcgttcggcgagcggctgggcctctggatcgtcgtgccgcagcagctcatcgtcgaggtgggcggggacatcgtgttcatggtcaccggaggcaggtcgctgaagaagctccacgacgtggtcgtctgcgacgctgccggcagctccccaacttcaactccatctccggcgtctccggtctccatcgccgccgctgtcatgtcactcagttactcgaccatagcttggggagcgtcggtgcacaagggcaagctgcccgacgtggactacgaggttctggcggcggcggcgacggcgtcggagaaggcgttgagctacatggcggcgctgggggacgtggcgttcgcgtacgcggggcacaacgtggttctggagatccaggccaccatcccgtccacgccggagaccccgtccaagaagcccatgtggaggggcgtcgtggtcgcctacgccatggtcgccgcctgctacttccccgtctcgctactcgggtactgggccttcggcaaccaggtcgacgacaacgtcctcgtcacgctcagcaagccccggtggctcatcgccctcgccaacgccatggtcgtcgtccatgtcattggcagctaccagattttcgcgatgccggtgttcgacatgatggagacggtcctggtgaagaaactgcatttcccgcccggccttgccctccgtctcattgcccggagcacctatgtcgcgttcacgacgttcatagccattaccatccccttcttcggcgggctgcttggtttcttcggcgggttcgcctttgcgccgacaacctatttccttccctgcgtcatgtggcttgcaatctgcaagcccaaaaggttcagtctctcatggttcgccaactgggcctgcattgttcttggagtggtcctgatggtcctggcgccaatcggagcactccggcagatcatcctgtctgccaagacgtaccgattctactcgtaaacaaactagctaccgcgtgctcagccacagcgggctgcgtgtcttctgtcgtcgtacgtaccaaccaaatagaagaggatagcctcctgtaaccagagcttgatccgtccgaatgagatgatagtcgtcagaggcatgttgtgagtgtagagatggccaaacgggccgcccggcccggcccggcctgggcccggtgaagcccggccaaaaaccgggccgggcctgctgtgccagcgggcttaattttctgtccaagcccggcccgcagcgggcctaaacgggccgggccggcccgtttagcacgaaaaaacgggccaaaagcgggctaaacgggccgataagcacattttagtgtaaaaaaaccgggcttaacgggcttagaggtaaacgggccgtgccgggctagcccaccgtgcctaatttcctgtccaagcccgcccgcttattataccgtgccgggttcggaccgggtccaaaaagcaggcttcgtgccgggctcacgggcctcgtgctttttggccatctatatgtgagtgttcagttgctgattaagtcagagggtctttcatatacccatgtatagatgtccaaacgggcggcacggcccggcccagcccgagcccgactcggcccggcccgtttgagcccggcacggttaggcccggccacttaatcgtgccgtgccgtgccgcccgacgggcccaaacctcttcccgagcccggcacggtataggcccgaccgggccgggccggcccgaatagcacggcccat

SEQ ID NO: 133574 - DNA, 1458 bp, Zea Mays
atggcgactcaagcacgcgagaaccaccgccattcttttacgactaaggacgagaggagtggtgaaggtgcggaggatcaggcgatcgacgactggctcccaatcacctcatccaggaatgccaagtggtggtactccgcgttccacaacgtcaccgccatggtcggcgccggcgtgctcagccttccttacgccatgtccaagctcggctggggacctggcatcgcggtgctgatgctgtcgtgggtcgtcaccctgtacaccatgtggcagatggtggagatgcacgagatggtccccgggaagcggttcgaccggtaccacgagctcgggcagcacgcgttcggcgagcggctgggcctctggatcgtcgtgccgcagcagctcatcgtcgaggtgggcggggacatcgtgttcatggtcaccggaggcaggtcgctgaagaagctccacgacgtggtcgtctgcgacgctgccggcagctccccaacttcaactccatctccggcgtctccggtctccatcgccgccgctgtcatgtcactcagttactcgaccatagcttggggagcgtcggtgcacaagggcaagctgcccgacgtggactacgaggttctggcggcggcggcgacggcgtcggagaaggcgttgagctacatggcggcgctgggggacgtggcgttcgcgtacgcggggcacaacgtggttctggagatccaggccaccatcccgtccacgccggagaccccgtccaagaagcccatgtggaggggcgtcgtggtcgcctacgccatggtcgccgcctgctacttccccgtctcgctactcgggtactgggccttcggcaaccaggtcgacgacaacgtcctcgtcacgctcagcaagccccggtggctcatcgccctcgccaacgccatggtcgtcgtccatgtcattggcagctaccagattttcgcgatgccggtgttcgacatgatggagacggtcctggtgaagaaactgcatttcccgcccggccttgccctccgtctcattgcccggagcacctatgtcgcgttcacgacgttcatagccattaccatccccttcttcggcgggctgcttggtttcttcggcgggttcgcctttgcgccgacaacctatttccttccctgcgtcatgtggcttgcaatctgcaagcccaaaaggttcagtctctcatggttcgccaactgggcctgcattgttcttggagtggtcctgatggtcctggcgccaatcggagcactccggcagatcatcctgtctgccaagacgtaccgattctactcgtaaacaaactagctaccgcgtgctcagccacagcgggctgcgtgtcttctgtcgtcgtacgtaccaaccaaatagaagaggatagcctcctgtaaccagagcttgatccgtccgaatgagatgatagtcgtcagaggcatgttgtga

SEQ ID NO: 133575 - DNA, 1929 bp, Zea Mays
atggcggcagtccagccgtccgtggagatgacgacgcagcaagggccgccagccgccagctattctccggccagggatggcggcggcggcaggagcgccgaggatgaggagaaggagaaggcggcggcgatcgacaactggcttcccatcagcgcgacgcggaatgccaagtggtggtactccgccttccacaacgtcacggccatggtcggcgccggcgtgctcggcctcccctacgccatgtcccagctcggctggggtgccggcatcacgatcatgctcctgtcgtgggtgatcacgctgtacacgctgtggcagatggtggagatgcacgagatggtgccggggaagcggttcgaccggtaccacgagctggggcagcacgcgttcggggaccggctgggcctgtggatcgtggtgccgcagcagctggtggtggaggtgggggtgaacatcgtgtacatggtgaccggcggcacgtcgctgcagaagttccacgacgtgctggtgtgcggcgacgcggcgtgcgagggcgggcgcaagatcaggctcacctacttcatcatgatcttcgcgtcctgccacttcgtgctggcgcagctgcccaacttcgactccatctccggcgtgtccctggccgccgccgtcatgtcgctcagctactcgaccatcgcgtggggcgcgtccgtcagcaaagggcgggtgcccgacgtggactacggactcagggccaccacgccgccgggcaaggtgttcgggttcctgggcgcgctcgggaccgtggcgttcgcctacgcgggccacaacgtggtgctggagatccaggccaccatcccgtccactcccgagaagccgtccaagaagcccatgtggaagggcgtcgtcgtcgcctacctcgtcgtcgcgctctgctacttccccgtctcgttcgtcggctactgggctttcggcgatagcgtcgacggcgacatcctcgtcacccttaacagacccaggtggctcatcgccctcgccaacatgatggtcgtcatccatgtcattggcagctaccagatctatgcgatgcccgtgttcgacatgatagagacggtgctggtgaagaagctgcgcttccctccaggcctcacgctccgtctcattgcccgtactgtctacgttgcgttcacaatgttcatagccatcacgtttcccttcttcgacgggctgctcagcttcttcggcggattcgcgttcgcgcccacaacctatttccttccatgcatcatgtggctcgcaatctacaagcccaaacggttcagcctctcatggttcaccaactggatctgcatcatccttggagtgcttctgatggtgctggcgccgattggagggctccggcagatcattatcagcgccaagacatacaagttctaccagtaaacattgcacaattatcgtgcaaaaaacaacgcaaaccccttgcttcaccagtaactgacagacaagtcttgttaggccatatataccatgttaccatcagctgaacaggttctggattttgttccatgagggcttccaactccttgtttaatttggcacgacaaaaaactcgcaccgggtgctctaatcggcggtcgattacagcgtccagtgcgagttctttgccgtgccaaaattgaaaggaggtcggctcggatgccggggcatgcatacaggacctagaacccgtttcggttgatgagaatgttcctggcatgtaatgcttcccttgttggttgtggtctaacctaggagtttgctttgagtggatctttgtacaattgtacgtgtatatgatgtttttttacattattcaggggaattggatcttagcttctgtgtgtgtatgcgtaaaaagggaaagagttgtgcttcatatatgtatatttttagatggcctaaaatgtgtcg

SEQ ID NO: 133576 - DNA, 1761 bp, Zea Mays
ctccctagctagctagctctccagtctccactgctgaaaggcgtccgtcgtcgtcgagatgaggcccgcccgcccgccgacgatggagatgcaaccaccaccgacggccatgcaaggccggagaagcccgcgaccgctggaggagtcgatcgagagctggcttcccatcagctccagcaggaacgccaagtggtggtactccgctttccacaatgtcacggccatggtcggcgccggcgtgctcagcctcccctacgccatgtcccagctcggctgggaggtcggcgtcacggtgctggttctgttgtgggccatcacgctctacacgctgtggcagatggtggagatgcacgagtgcgtcccggggaagcggttcgaccggtaccacgagctcgggcagcacgcgttcggcgagcgcctgggcctctggatcgtcgtgccgcagcagctggtggtggaggtgggcgtcaacatcgtctacatggtcaccggcggcacgtcgctgaagaagttccacgacacggtctgcggcgacagctgcacggacatcaagctcacctatttcatcatgatcttcgcctcctgccacttcgtcctctcccagctccccagcttccactccatctccggcgtctccctcgccgccgccgtcatgtcgctttgctactcgacgatcgcgtgggtcgcctcggcgcacaaggggaggtcgccggacgtgcactacggcctgcgcgcgacgacggcgccggggaaggtgttcggcttcttcggcgcgctgggggacgtggcgttcgcgtacgcggggcacaacgtggtgctggagatccaggccaccatcccgtccacgccggagaggccgtccaagaagcccatgtggaagggcgccatcgtcgcctacgccatcgtcgccgcgtgctacttccctgcctcgctcgtcggctactgggccttcggcaaccaggtcaacgacaacgtcctcgtcagcctcagcaaacccaagtggctcatcgccctcgccaacatgatggtcgttgttcatgtcattggaagctaccagatatttgcgatgccagtgtttgacatgatagaggcagtactggtgatgaagtttcggttccgtccaagcctgatgctccgcctcatttcccggagtgcatatgtcgggtttacaatgttcatagccatcaccttccctttctttggtgcattgctcagcttctttggtggatttgcctttgcaccaacgacatattttcttccttgcatcatgtggctcagaatatacaagcccaaaacttttagtgtttcatggtttaccaattggatctgtattgttctaggagtgatgttgatggtactatcaccgattggtggacttcgacagatcatctttaatgctaagacatacaacttctaccagtaaatataattcattcaacacaaaaccaaggtttatgccatagttaaaatgtgctcgacatgtctcaagttttgaatggggcttattgtttttcttcgacatggcagaaaattcatatcgtgtgatgtatttagtatataatgttacagttatccaagttttcatcgtgcaataagatggcatgtgtcatattcaaagcttgttgctactcaagacaatctgtgatgtgtcatggtcccgttaataatggcttaacctagaagtttgcttttgatttatcatgtgcatatatattgtttgtctatattatatataggttgcttatttgcatgttattagga

SEQ ID NO: 133577 - DNA, 1806 bp, Zea Mays
ctagctagctgactgactggctaggctccccggccgggtcgtcgtcgtcctcgccgagtacatcagctctgcgctagattattgctttcgcttgcacagtcgttgcacttgtagtacaattcattcattcattcattaaaagcaaggaagaagacttggaactctgctagctagcagtagccagtagctagtgctaccttcccctgctccgacctctatctgtcgttctgtctatctcgtccgtcgccgtcgagccggctatggagatgcagccacagctcggcgactcttctccggaggacaagctcgccagccgccctctgacacccggagggcgctggccggactcgcagtggcggcccgcagaggagaaggccatcgacgactggctccccatcaacgcgcggaggaacgccaagtggtggtactccgccttccacaatgtcaccgccatggtcggcgccggcgtgctcggcctcccctacgccatgtccgagctcggctggggccccggcatcgcggtgctgctgctgtcgtggatcatcacgctgtacacgctgtggcagatggtggagatgcacgagatggtcccgggcaagcgcttcgaccggtaccacgagctggggcagcacgcgttcggcgagcggctgggcctgtggatcgtggtgccgcagcagctggtggtggaggtgggcctcaacatcgtctacatggtcaccggcggcacgtcgctgaagaagttccacgacacggtctgcggcgacgacgaccaccggtgcaagggcagggacatcaagctcacctacttcatcatgatcttcgcctcctgccacttggtgctctcccagctccccaacttccactccatctccggcgtctccctcgccgccgccgtcatgtcgctttgctactcgacgatcgcgtggatcgcgtcggcgcagaaggggaagtcgccggacgtgcactacggcctgcgcgcgacgacgacaccggggaaggtgttcggcttcttcggtgcgctgggcgacgtcgcgttcgcctacgcggggcacaacgtggtcctcgagatccaggccaccatcccgtccacccccgacaagccgtccaagaagcccatgtggaagggcgtggtggtcgcctacgtcgtggtcgccgtgtgctacttccccgcctcgctcgtcggctactgggccttcggcgacggcgtcgacgagaacatcctcgtcacgctcaggaaacccaagtggctcatcgccctcgccaacgtcatggtcgtcgtccatctcattggcagctaccaggtgtacgcgatgccggtgtttgacatgatagagacggtgctggtcaggaagtttgggttccgtccgaccctcatgctccgcctcgttgcccggagtgtctacgtcgggttcacaatgttcgtagccatcaccttcccattcttcagtgcattgctcagcttcttcggtggattcgccttcgcgccgacgacgtatttccttccatgcatcatgtggctgacaatatgcaaacccaagactttcagcatctcatggtttaccaactggatctgcatcgtcctaggtgttctgctgatggtactgtcaccgatcggtgggcttcggcagatcatcttgagagccaagacataccacttctaccaataaagtcgattcatttaacaccaaaaaaagaacccaaggtttgcgtcagatttattttgcagacgctcagcgtgtgtgtctcgagttttgaatcggacttcatcacctttatctccatcgtggcaaaagaaaagaaaagaaa

SEQ ID NO: 133578 - DNA, 1600 bp, Zea Mays
ctgcaaagagagatccttgtttgattttttttgtttacaaagatctgactgtgcgcttaatttggggatgaccgatgaaatcgactcaactccctgcagctcgccagccgccctctgacacccggagggcgctggccggactcgcagtggcggcccgcagaggagaaggccatcgacgactggctccccatcaacgcgcggaggaacgccaagtggtggtactccgccttccacaatgtcaccgccatggtcggcgccggcgtgctcggcctcccctacgccatgtccgagctcggctggggccccggcatcgcggtgctgctgctgtcgtggatcatcacgctgtacacgctgtggcagatggtggagatgcacgagatggtcccgggcaagcgcttcgaccggtaccacgagctggggcagcacgcgttcggcgagcggctgggcctgtggatcgtggtgccgcagcagctggtggtggaggtgggcctcaacatcgtctacatggtcaccggcggcacgtcgctgaagaagttccacgacacggtctgcggcgacgacgaccaccggtgcaagggcagggacatcaagctcacctacttcatcatgatcttcgcctcctgccacttggtgctctcccagctccccaacttccactccatctccggcgtctccctcgccgccgccgtcatgtcgctttgctactcgacgatcgcgtggatcgcgtcggcgcagaaggggaagtcgccggacgtgcactacggcctgcgcgcgacgacgacaccggggaaggtgttcggcttcttcggtgcgctgggcgacgtcgcgttcgcctacgcggggcacaacgtggtcctcgagatccaggccaccatcccgtccacccccgacaagccgtccaagaagcccatgtggaagggcgtggtggtcgcctacgtcgtggtcgccgtgtgctacttccccgcctcgctcgtcggctactgggccttcggcgacggcgtcgacgagaacatcctcgtcacgctcaggaaacccaagtggctcatcgccctcgccaacgtcatggtcgtcgtccatctcattggcagctaccaggtgtacgcgatgccggtgtttgacatgatagagacggtgctggtcaggaagtttgggttccgtccgaccctcatgctccgcctcgttgcccggagtgtctacgtcgggttcacaatgttcgtagccatcaccttcccattcttcagtgcattgctcagcttcttcggtggattcgccttcgcgccgacgacgtatttccttccatgcatcatgtggctgacaatatgcaaacccaagactttcagcatctcatggtttaccaactggatctgcatcgtcctaggtgttctgctgatggtactgtcaccgatcggtgggcttcggcagatcatcttgagagccaagacataccacttctaccaataaagtcgattcatttaacaccaaaaaaagaacccaaggtttgcgtcagatttattttgcagacgctcagcgtgtgtgtctcgagttttgaatcggacttcatcacctttatctccatcgtggcaaaagaaaagaaaagaaa

SEQ ID NO: 133579 - DNA, 1942 bp, Zea Mays
ctccgcctccgctacctctgacctctccaatccgttactgctcaaggctctgcgctagccgcccgcgcgtccggctccagcctctgccatgggatcagccggtgaggcactcccgccgccggccagtgagacgcgaccatgggacaactattctcaggccaagctttccacagtcgctcttgcgcccaaagggaggcgtgcggcgtcagacgcgccggcgggaggggaaggcggctggagcgggcaggacgagaagccggcggccgacgacgactggcttccgatcaacgcgaggaggaacgccaagtggtggtacgccgccttccacaatgtcaccgccatggtgggcgccggcgtgcttacccttccctatgccatgtccgagctcggctggggcgtgggcgtcacggtgctggtcctgtcgtgggtcatcacggtgtacacgctgtggcagatggtggagatgcacgagtgcgtgccggggaagcggttcgaccggtaccacgagctggggcagcacgcgttcggcgagaagctgggcctctggatcgtggtgccgcagcagctggtggtggaggtgggcctcaacatcgtgtacatgatcaccggcggccagtccctgcagaagttccacgacatggtgtgccatggccggtgccggcgcatcaagctcccatacttcatcatggtcttcgcctccgtgcacttcgtgctctcccagctccccgacttccactccatctccagcgtctcgctcgccgccgccgtcatgtcggtcggctactcggcgatcgcgtggaccgcgtcggcggcgcaggggaaggcggcggaggcggaggccgactacagcctgcgcgccacgaccacgccagggaaggtgttcggcttcctgggcgcgctgggcgatgtggcgttcacgtacgccgggcacaacgtggtgctggagatccaggccaccatcccgtccacgccggggaagccgtccaagaagcccatgtggaagggcgtcatcgtcgcctacgtcgtcatcgtcgcgtgctacctccccgtcgtgctcgtcggctactgggccttcggcaacggcgtcgacgagaacatcctcatcaccctgaaccggccgcggtggctcatcgccgccgccaacatgatggtcgtcgtccacgtcgtcggcagctaccaggtgtacgccatgccggtgttcgacatgatcgagacggtgctggtcaggaagtactggttcacgccgggattcaggctccgtctcattgcccggactgtctacgttgcactcacaatgttcgtggccatcacattccccttcttcagcgagctgctcagtttcttcggtggattcgcctacgcacccacgagctacttccttccctgcatcatgtggctcatcatctacaagcccagaaggttcagtctctcatggttcaccaactggatatgcattgtcattggggtgctgctgatggtgctatcaccgattggcggacttcggcagatgattctgaaaatcaagacatacaaattctaccaagactactctggcctaagccataattaacacgcgcccatcatcggctgaaactggtttctaaatctcatcgatgccatggaattccaaaaaaaataaaacattctcagagaaagatacatacatgtacagtctcatgactaatgatgatcagtggtcttgttaatttgtcttgaaccatgaattggttatggattaccatatgcatatatgtatcagtattgtaggggaaatgtttgtgtgtgttcactttggactttgatagagtagcttgtagtgggacattgagaaagatgcatgggccttacatggtctatgttaaatcccatccccccctgatatcattgtatattcttttcttcttcaaatgattcttcgtaatatattattctatctgaaatc

SEQ ID NO: 133580 - DNA, 937 bp, Zea Mays
atgaagaacaggcactgcataaattcaagtcaatgttttccatctatcaggctaacttttgtacagtttccgatgttacattcacaacacggaaatggctctaaaactacccctcaaaaacggctcgcacctgtgcaagagccaagaaccatcaccatcactccttgtggtccctcctccaaccctctccccttttatggcctcatcatatatgcaataaactcgccgttccattgtatggatatggaaagtccagagagaattctcaatccaaacgatacgcacgctcgatgctctcctcacatgcagcacgacgaacttccaacatgtctgaggctcgctgtcatttgccaacttggctccaaaacttaggcagttacaaaaatgaataccagaccttcaggttcgatgcgacacgatctttcgtcaggtcactttgtataccaaaggaaagctatgcagatcagtcatgccaacaggtctcctgtaacgtatcaaaaatggtccagaaacacagttaatctatttctccctcttcaacatcagccactggttcatctgtgaaatcaccatcctcatcatcctcatcgtttttcatgtacagcccgagcttttctagtgtgttgcttcccatttgaaacccaggacttgtttcaccaaccaagttgggtatctgttcacctgtgacacttccgagcatttcaagatctttcaaaaaatggctcccttcattgatgtcaacagttttctccatctgcaagccaacattgcttacactacaagtatggcaatagcagagcatatgatgttgaatgtggagagcatacagtagatattacctcttgcaaagctttgcgagctgcttctctctcaagttctctttgtcgcttagcttcagcagcagcctcagcagctgctgctgcttcagccctcttgc

SEQ ID NO: 133581 - DNA, 1566 bp, Zea Mays
accaccaaacggcaaacggaaacgggggcagttggtgagttgggacttgggagccgacgctgtcggggtgatccagtcgccgccgacgccgccgaacgcgcccgcgcccgagcctccctctacgcggacgcgggaggacccttccactcccagagccgggcgtgtccgatcgtgagcccatggcggaatccatcgtctccggcgccgccgccccgccgccgggcgcgccctcgttctcctacctggccgtgttctccaactgcccgctcgtcgccgcggtgctcgccttcgccatcgcgcagtccatcaaggtcctctccgcttcccccctctccctttcgacaccaaaaacgcgctgaccatctttggcaggcggtggatctggtaggcagccttatcattttgggacgcgttgtggtgatctgggggaggcaaatgagtgtcctttgcacttcaaagctcctgcttgatgaattttgcttccttaggtcacctcacttagcttcaagtatggacctcagtcgtggaaggtacattcctgccgtgtagattgtggacagaagtacaagtaccgtgtacatacgaggacaggactgtacgatattgatgggagttgagtacactgtaggaaattagtgtcagtttgttgctgaagtttcagacttccagttgatatatacagaacgataaatgcggctgcggttatggtggaaatctgatagccaagatctactgccagaccagacgaggatgaaacctgcagaacaaaggattaacagctagcctgtggaagcctttccatgtgtactaaatttttgcatgtgtccaaaaccagtcatgcaaaatgatggcatacagtgccatagcacttaggcacgtgtgatgtgctttaattccaacagtccgtccctacttgccccatgttttattttttggtatctcagaaatactgattagttattgtgcctttttttcatcaccttcttttttttttctttcagaaacacaacttctgcaccacggtttcactgcatgcattgcttctcattatacagacttgactgtttcttgcggcactttgcaggtgatgtatgatgcctttggtgttaggctacatgcagggaagcaagcagaggtcttgaaccagattgtgtacgagcttccatcagaacatccactagctgaaacaagaccgctgcgagagctgctagggcacacacctccacaggtatttgctggcggagtgcttggatttgcagtagccacatttacagcgatgattgctgggcttggtagttgactccgcatttgaagaaatggtcaacattcgcattgaagttctggaattcaaattggacacatgtttcctagccagcttatgatagataatgcgttgtgtataggtgtatttaatatgcaaattgatgtcaatttgttgaagagaaacttgcgccattcttttgtagttaatcgacgagtgaactatatgctgtattcgttcctgtccaaagtatttggagtgattgaaagtacctggtgataaagcattcatgagatttctgcaca

SEQ ID NO: 133582 - DNA, 976 bp, Zea Mays
accaccaaacggcaaacggaaacgggggcagttggtgagttgggacttgggagccgacgctgtcggggtgatccagtcgccgccgacgccgccgaacgcgcccgcgcccgagcctccctctacgcggacgcgggaggacccttccactcccagagccgggcgtgtccgatcgtgagcccatggcggaatccatcgtctccggcgccgccgccccgccgccgggcgcgccctcgttctcctacctggccgtgttctccaactgcccgctcgtcgccgcggtgctcgccttcgccatcgcgcagtccatcaaggtcctcaccacctggtataaggagaaccggtgggacgcgaagcagctggtgggctccggcgggatgccgtcctcgcactcggccaccgtcaccgcgctcgccgtcgccgtcgggctgcaggaggggttcgccagctcgctgttcgccaccaccgccgtcttcgcctccgtggtgatgtatgatgcctttggtgttaggctacatgcagggaagcaagcagaggtcttgaaccagattgtgtacgagcttccatcagaacatccactagctgaaacaagaccgctgcgagagctgctagggcacacacctccacaggtatttgctggcggagtgcttggatttgcagtagccacatttacagcgatgattgctgggcttggtagttgactccgcatttgaagaaatggtcaacattcgcattgaagttctggaattcaaattggacacatgtttcctagccagcttatgatagataatgcgttgtgtataggtgtatttaatatgcaaattgatgtcaatttgttgaagagaaacttgcgccattcttttgtagttaatcgacgagtgaactatatgctgtattcgttcctgtccaaagtatttggagtgattgaaagtacctggtgataaagcattcatgagatttctgcacagccattgcgatt

SEQ ID NO: 133583 - DNA, 2183 bp, Zea Mays
ctcgttttgttatttcgccgccgttcgccgtcgtacagccgagccgccgccgagtcgagccggcaaagcgaagggaaggagagcggggtgaagaggagaggactccatggcgacagcctcagtgactttcaagtcacgggaggatcaccggaagcagctcgagctcgaggaggcgcgcaaggccgggctcgcgcctgcggaggttgacgaggatggaaacgagatcaatccccatattccccagtacatgtcctcggccccatggtatcttaatgctgagaagccgagtttgaagcatcaacggaagtggaagtcggatccgaactacaccaagtcgtggtatgatagaggcgcaaagcttttccaggccaacaagtacaggaaaggtgcttgcgaaaactgtggagccatgacacatgacaagaagtcttgcatggagcggcctcgaaatgtgggggctaaatggacaaatgtcaacatagctcctgatgagaaggttgaatcttttgagcttgactatgatggaaagcgcgatcgttggaatggttatgacccatcaacctacactcgagttatcgctgattatgaagctagagaagaagctaggaaaaagtatctgaaagaacagcagctcaagaaacttgaggagaaggatactgagaaggatgatgagaatgctggtagtgaagatgatgaagaagatggcctgaggatagatgaggccaaagttgatgagagtgcccagatggacttcgctaaggtagagaagcgtgtgcgcacaaccggtggtggaagcactggtactgttaggtatgtactgcactgctactcagaaaacagatcatgttcctcctagtgctagggttcatgtgctaggatttatcagtttctagtgctagggttcatgtgtcaaggatttatcagcttctagtgctagggtcctgtgtaaaggatttattagcaaccaatttacatgctgatggtacttttttgttgccacaggaacttgcgtatcagagaagacacggcaaaatatcttttgaatcttgatgttaactctgcatattatgatccaaaaactcgctccatgagggaagaccccttgccagatgcggatccaaatgataagttctatgtgggtgacaaccaaaatcgtcttagtggtcaagctctggagttcaagcaactcaacatccatgcatgggaagcttttgaaaaggggcaggatatccatatgcaagcagccccatctcaagcagaactgttgtataagagtttcaaggtcaagaaagaaatgttgaagtctgaacataaggataaaattatggagaagtatgggaatgctgcgtccgaagatgcaattcctcgggagctgctgcttgggcaaagtgagagagagattgagtatgaccgtactggtcgaataatcaaaggacaggatgtatctcttcccaagagcaaatatgaagaggatgtgttcattaataatcatacgagtgtgtggggttcatggtggaaagatcatcaatggggctacaagtgctgcaagcaaactatcaagaatagttactgtactggcttggctggaatagaagctgccgaggcatcagcagatctaatgaaggccaatatggctcgcaaggaggctgcagaagatgagcctgtacagcatgaagagaagcgattagccacttggggaaccgatgtgcctcaggatcttgttcttaacgagaagaagctccaggaatctctaaagaaggaaactgcgaggaggaaagaggagaaggatgaaaggaagaggaagtataacgtgaagtttaacgatgaggttactgcagaagacatggaggcctaccgtatgaagaggattcaccatgacgatcctatgaaagattttctcaactaaaagtgtggtaaatgtccgcactgccgtataacattggtggcaccctgccttgcagtgaagctgtgtaattgtaagatagactatgtacctgtccgaaccagggtggtgctgtaaactactctagtctagaatggctatgctttttacaagctgcgtgttgaaatgacatgatttctgatatcagaatccttgcttccatagttcccgtatccaagacacgggagccttcttcaggtgtatctaaccagaaacatgtggacatttttaccttaaattt

SEQ ID NO: 133584 - DNA, 1457 bp, Zea Mays
atcactgatgtaatttcaatatgtagtttgtctagtttgaatcttcttctaagccagtggctgtggctccatcgtccgattatctatccatggttactagcgacctcgagtttctgattgagttcggtaacagcctcccgcggcgccggcggacacgcaggcggcgcaattgatacagacgctgttcaagccctcggtcgtgtcggcgcccgcggcggcaggtcgattccgtgttggtcgcagacttgtaggcaccttcggctcccctcctgccggatgccaatggcctggtcaggcctgttaaagtgcctgtgctgctttctgcttgaaagtttggatcctaggtatctggatgacaagacacgcccttcagcttcagtacaccagcttctagttctagcgctgcatttcctctccacagtaatgcccaagctcaatacaccaatcatgaaccgttcgccaatgcacccaccctacttcctgccaatcggcggcggacataagggcatgtgtggtaggtaatgagaaactatttatgattggtggacatgagggagactttatgactaaaccaggatcacctgtttttaaatgttggtggaactacagaaaagcatgccatcaccaagaagatgattcttgttggtgaagtcttccgttttgatttggaagcattgacctggtcagtcattgggcgcatgcctttccgaatcaagacatccttatctaggtactgactactgagaggggaggggggctctgttttacttctgggcagcgagatcatgggcctgacaatccagctccaaagaaagttgttgggagtctgggactatgtggagaacgaggctgcacttgtgatggcagaagttgtgacagtttgtttcccctgaaaattgtagatttgcatctgatttcctgtccaacagctaggtccctttcagagaagagagttgcttgttttgattcccacatccggaatccgaagttcagatatgtctccaaacaaccagaagatatggacataagcaactaccaaagatcattcttattggagatattcagcgcaaagcccacccaccaaataatcatgatgttcttctttccctagctgttgcagagaggtcggaactgtttgggctttcactagccaattaaaatattaagtagcaagctgagtaccatgtcagtattaaatctgtctctgtaattgcctccgaaattggtgtgcgtgtttctcatcttgttggtttcttagtatatgtaatctgcacttagaggtacaatataggtgcacaggggcaggacctgtacttaaatgttagaatacctgttcagggtttggagtttttcccgtgtaattactatttcacccctctgtaatgggcctggcccagtttactcgcatctattaatatatcacccaacccctgttagggttagggttttcaccggtc

SEQ ID NO: 133585 - DNA, 378 bp, Zea Mays
atggacgcggcttgggctgaggcgagcactagagaagaacagcggcgacaaggcaagaagatggctggcgagctgggcaccggcgaccagagaaccacgacatccgagctgcggacggacgagcaggaaagcatcagagagcaaggcgactatagaagatgggtgagggagcaccggccagcagaagagcagaggccgagcgagctagggactggtgaccgagcgccaaggaaaggaagaagagggagcaggtgcggcaaaggaagggaggagcagagacgtgcgttgatggtctgtagtagatgcagtccatgcatcggctgggataaggattggagacctgttcgtgctggaaatatcagagagaacatcggctga

SEQ ID NO: 133586 - DNA, 1350 bp, Zea Mays
atggcagagattgctgttcttcttgtcctgaagaagattgcaatagctctggcaggagagaccctaagttttgctaaagatttgcttgcaaagaaatctgagttggtggcagcgcttccagatgacatgaaactgattagtaatgagcttgagcttattcgggcatttctaaagaaaattggccgtacgggccgaaaagatgaagtgatagaaacatggatagggcaagtccgaagactggcttacaatatggaagacactgtagaccattttatttatgtagttagtacacacaatcagacaggatcacctttggattacttgaagaagatagccaagaagcctcagcgtctgctttcactagatgaaattgctagtgagattaagaagataaagcaagagcttatacaactatctgaaagtagctatgaaacagaaaaggaaatgtatcttcctggacacgattactcaatcagagatgaggagcttgcaggaattgataaaaataagcaaaccttgattagttcattaaaatttgaagatccatcacttcgaatcattgctgtccggggtatgggtggcattggaaaaagcactcttgccaataatgtgtacaaaaatgaagggttcaactttgactgccgtgcatgggtttctatatctcagtcatataaactcgaagatatatggaagaaaatgctgacagatatcctcaagaaagataagaaagaatttgatcctggaacaattgatagtgcagaactaaaggagaaattaataaaaactctagacaaaaagcggtacttgatcatactggatgatgtctggatggctgatgttttttttagaattaaagaagttcttctagataatggccttggaagcagagtaataatcacaacaagaactgaggaggtagcttcactagctgaggatagttgtaagatcaaagtagaacctcttggtgaccatgattcctggcttgtattttgtaggaaggcatttcctaaagttgaaaaccatatctgcccttcagagttacgccagtgtggtgaaagcattgtggagaaatgtgatggtctgcaattagcccttgtggcaataagaagcatattgtcgttgagaccaaagaatgttgctgagtggaagctattttatgatcagcttatctgggagctacacaacaatgagaaccttaatcgcgtggagaaaattataaatctaagctataaatacttaccagactatttgaagaactgcttcctgtattgtgccatgtttccagaagactatctaatacacagaaagagattgattagattgtggatagctgaaggatttattgaataa

SEQ ID NO: 133587 - DNA, 166 bp, Zea Mays
ttttttttatccgccatctcgagccgtcgcctccgtgctcgattcttccgcctcgtgctcgtcgttccgtgcttcttacctgctcggtcctacatcacctccccatccgcctttggccgcaactggcggcccttgccgttgatggactccaactcctccccttgtg

SEQ ID NO: 133588 - DNA, 2281 bp, Zea Mays
caccaagtatttttttcacaaatatatatatggcacgtactaccatgtcagcgttatacattatacacataaaatttgtatacggaagagaaatgtggtgaagcgaagagataattcatgggaaataatccatatccccgatcgaggacaatatatgcaaagggccaccagagtcattattattacgtgtaaaacaaagatgtgcgagacagagataaggatgactctgttgtttgtcgtcatgctagctagtcacccaaatttccacaaggtagaacatatgtctagttctatttctatataaagcagacaaacgaggttccgttccataacagcagtcagcagcagggttctttcttgtcacctggagctggacctgacgatggcataccatctcatctcttcaccactgttccttctcgcacaattgctcgccgtcgccgtccctctccttctgctcctgcttcaccaacgctcatcaattcgccgccgtcgtcgcagcagcagcagcagatcggccaagcagggaggacagctcctgccgccttcgcccccggcgctgcccatcatcggccaccttcacctcgtcagcgacctcccgcacgtctccctccgtgacctcgccgccaagcatggtggggacgacggcctgatgctgctccgtctcggcgctgttcccaccctcgtcgtgtcatcgccgcgggccgcggaggcgatcacgcgcacgcacgaccacgtgttcgcgtcgcggcccacgtccactctcagcgacgagatcctgtacgggtcctccgacatcgccttctccccctacggcgagcactggcggcaggccagaaagctggtcaccgcgcacctcttcaccgtcaagagagtgcactcgtaccgccgcgcccgcaaggaggaggtgcgcctggtggtagccaaggtgcgggaggcggcggtggcgggcacggccacggacatgagccttgccatgaacacgttcgccaacgatatcatcagccgcgccgtgtccggcaagttcttccgggcggagggccggaacaagctcttccgggagctggtggaggccaactctgctctgttcggagggttcaacctggaagactacttcccggggctggcgagggcgttaggtttccttagcagaaggctgttgtttctgcgcaacaggcggcgggtccaggagacgcacaggagatgggacgagctgctcgaaaccatactgagcgaccacgagggaagaaggggttctgtctctgtggacggtggtggtgacttcaccgacgtgttgctctcggttcagacagagtacggaatgaccagagatcatctcaaggccatcttggtggacatgttcggtgcgggcactgacacgtcatccttggtcctagagctcgccatggccgagctgatgcgcaacccacagcagatggccaagctacaagctcaagttcggaggcacacaccggaggggcaggaaacggtggaggaagagaacctatccgacatgccctacctgagagccgtggtgaaggagacgctgaggctgcacccacctgccccgctcctcgtccctcacctgtccctggcggactgcgtcgtcgatggctaccacgtcccctccggcacccgggtcatcgtcaacgcctgggctcttggcagagacccgggctcgtgggagaagccagaggagttcctgccggagaggttcatggacggcggcagcgctgctggcgtcgacatcaaggggaaccacttccacttcttgccgtttggagctggacgaaggatttgccctggcctcaactttgggatggctacggtcgagatcatgctagcaaacctcgtgtactgcttcgactggcagctgcccatgggcatggaggagaaggacgttgacatgacggaggtgtttggactcacggtgcatccaaaggagaagctcatgcttgttcccaagcttcctgctactgctgcacctactgcaactgctcgtcaactccatcctccaagctgctgacgatcgaaggaaaactgcatgcagcgggtgtagaggacgagcacgtacgtacgtacaatgcacatgccaatggtgaagtgaactacactctacagagatatagatggtttggagtttggattccatgtatatatatatctattattatactaggaaaagatgtccgagtgttgctatcgtacgggtcatgtaaactatgttaatcttatgtgtgtgtttacttatatagtaataaaaaaagctattttgtagaga

SEQ ID NO: 133589 - DNA, 532 bp, Zea Mays
gttaggattaatctcgggcaccgcggctcctcgtcctcccaagccaaggcgccgtgggagctcgggatctcatgtcgtgctgtcacctagcagagagaagggccaaccatgagcaattcgccatgtcatcgccaagattcccagagggtagccaagggagttcacgagcgagggtcgagcctaatcccagctgtcttaggggcaggggagcatccgaaccatgggaatttccccgccggagttcgtgggcagaggaagatccgcaccacgcctacatcatcgctctgggtatacgatgtggtcgaggatattcgccattgcatgtggatgttcatcgtagcagcgcctaggcggaatcgctctccgggccatcggaattcgtcgccggagatgggccccgccgcggagccgcgacgaggatgggactctgcatagtgcaatcatcggtgagcaacactctacctgttttgccaggacctctgcatcgtataacgcgtgtaagcatgtgatatgggtcaccaggggggctgat

SEQ ID NO: 133590 - DNA, 420 bp, Zea Mays
atggcatcgattgcatactcacaaacttccataaaaaatacagacacgaccactcgattagtacaccatggatacgttgttcacggaatcgaccacgagggccacgacaaatcttcaggctcgaaaggctacctgtcgagcttcggcgacgtcgtcagagactgctcggaccatttcaagagtgtttgtgagaaacaggagaacaggctgaagaagaggttcctctacggcttctccatgggaggaaccgtggtgcttcagctccacaggaaggatcctctctactgggacggtgccgtgctgcttgccccaatgtgcaagtggcatgagcatttgatcactgggactgcgcagtcaataattttcgtgaatgtatacagtaaacaccgatgcgatgataggaacattgttgttcactag

SEQ ID NO: 133591 - DNA, 672 bp, Zea Mays
gactgcattggtgccattgatggcaccccatgtgctggcaagggtgcctagatacatgcagcaagctttcaggggtaggaaaactaacccggcacaaaatgtgatggttgctgtggactttgacctcaagttcacaaatgttctagctggctgggaggggtctgcccatgatgcacttatcctggctgatgccattgagagggatgatgggttcactgtcccacaaggtaaattctacttggtagatgcggggtatgcatgccgcactggctatctacccccccttcagggggttaggtaccattttagtgagtttgggagcataaatcgacctaccaatgcaagagaactgttcaacctgagacactcatcacttagagttactgtggagagggctataggtgcattgaagaacaggtttcgtatcttggacaacaagccctttcacaagtataagacacaagtcaagcttgtgttggcatgctcgatcctgcataactagattttagcctttggcattgatgaagtagtgcctgatgaagagggtttcactagcacacaacaagatccacttgatgacaatggtagccagagccaagaatccagagccatggttgcaaaagagggatgccctttgcaattgttatgtgggaagggaggggtagctctaag

SEQ ID NO: 133592 - DNA, 288 bp, Zea Mays
ttgatcatactggatgatgtctggacggctgatgttttttttagaattaaagaagttcttgtagataatggccttggaagcagagtaataatcacaacaagaactgaggaggtagcttcactagctgaggatagttgtaagatcaaagtagaacctcttggtgaccatgattcctggcttgtattttgtaggaaggcatttcctaaagttgaaaaccatatctgcccttcagagttacgtcagtgtggtgaaagcattgtggagaaatgtgatggtctgccattagcc

SEQ ID NO: 133593 - DNA, 767 bp, Zea Mays
gttttgaagttttgtaatagatttagggagctctttcactttggttttattgaggcataaaagcctaaggaaatagaagaataccacacagataatgctctgctggtgtcgaatgtaattaaggtgcgaagcctggatggatcaatggttgatggaatgcccttgctgcattggagcacagccactcgtcgagaatatgatcccactagcactgcttcattatttccaccataagttgtactgaaaccctctcttttagattggaaaatggcaagttcacgcacaagatcatgcattcgaatacatttaatcctaccaaagcagttcctctctgcaacgtgaagcatgctccgtcgtataagttctttaagataactttcagcagtgtcttctaagctgcatgcccctttttgttcaataaatccttcagctatccacaatctaatcaatctctttctgtgtattagatagtcttctggaaacatagcacaatacaggaagcagttcttcaaatagtctggtaagtatttataacttagattcataattttctccacgcgattaaggttctcattgttgtgtagctcccagataagctggtcataaaatagcttccactcgtcaacattcttcggtctcagcgacaatatgcttcctattgccacaagggctaatggcaaaccatcacatttctccacaatgtttataccacactgacgcaactctggagggcagatatggttttcatctttcagaaatgccttcct

SEQ ID NO: 133594 - DNA, 2829 bp, Zea Mays
atgtgtttgtgccctcatgtttttttcattcccattttttcagtgttttttataatagatcaagatcagaatgtcacaggccagcaaggcgctcatgctgtccgtcgctctccccgtgttgaaaacaagagaaagcaattagataaaaatgaattgaaggaaaggaagaagagattaaggttgaaagtccctcctatacaagacgccgaaagtgatgatgaaaaagacacagagtttgttcctggtggcgatgggtctggtgatgacaatgttggtattgttggtggagatgaaaataagggtataactaagacacgagctattcgatgctcacctgggaagtttataaagcttgtgaattctctatctgatgaattgaaaagtcaagtggttgctaaggggtttggcggcctgcttagattcaagccacatttattgtcgagaaagttgcttagctggctgatgcggaagcttaacccagaaacaatgaaattagagattggtggtgggaaagagattcaaatcaccgaacacagtgtttggtgtgttttgcagttaccaaacgttggcagtgatccgccccccatgtctgatgcagatgctcgttccttgcgggacgagctgggggagcaaatttgtggcaaatcttatagacggatatctggtatcaatatatctgttatcactgatagattgcagaagaggactctcaatggggagctgggcctgagagcctttttcatggcagcatttcagtgtcttctattctccaatactgacactcgcatcagaattgatgatgtgaagtacactcaggacatccagaacatgggcaacaagaactggtgcaaagctgtagtagacaggctgagcatagctgctcgtctttatagaaaggattttgcggagaaaggcattaacgcacccatcagtggatgcgggatctttgtagctatgctttatgtcgacaacctgcaacatggattagacacaagtcctttttcaatccctcgatgtgctttcttggactccaagatgattgatgctatagcaaatatggatctcaggggagatgttcctcctgggaccactgagtttggacacctcaggccccatcccgcgcccggcgcagccgcggacgcgccgctctcgcggtggctgcgccggctcgaggcgttcctgtcggcggcggggctggcggcgtcgacgccgctgggcgtggcggcggccgcctcggcgctggccgtcgtgggcctggcgctgccggccgccgccgtcgcgctctccccgtgccgcggcggcgccgccgcatgcggcgacttcgaggtcgaggtgttcgaggtctgcgtcctgctctcgcaggcggccgccgcggccgttgcgctcgcctgcgtctcgcgcaaggtggccgtgcacggcctccgcaggttcctcttcgtcgacccggacctcggcatgcggatccgcttccagaaggagtacgtcgccaggatccaggacttcttccgcactctgacgtggtggatagtgccgtgcctagccgtgaaggtgacccgggaggtctcccgcttcgcgcacatcctgcagcaggggtcgtcgtcggcctggacctggagggcctgcgcggtgctgttcgcgtccgtggcgtcgtggacgtacctgacgacgatcatcctgtcgtcctgcatgctcttcaacctggtgtgcagcctgcaggtcatccacttcgacgactacggcaagctgctggagcaggacgcggacccgcttgtgtacctcaaggagcacctgcagctccgccacaacctgtccaagatcagccacaggttccgcgtgttcctcctcctgctcttcctctccgtcaccgccggccagttcgccatcctcttcaagaccacggcgtacagcgggccgatcaacttcaccaacggaggggacatcgctgtggtcggcctcgtcctctgcctgcacgccgctgccaagatctcccaccgagctcagaacatcgctgcgctggctagccggtggcacgcgctggcgacgtgctctaccgactccacctacgtgaccaccccgaacagttccgggaacctcgcgcctttccccgcgcacctgttcctgagagactactcggggagtgacctggagtccctggacagcgcgtcggttcagggcagctcccacggcacggcccagctggcctcctacatgtcctcgtaccacaagagggagtcgcttgtgctgtacctgctggccaacccaggcggcatcacgatatttggctggatcgtcgaccgggcgttcctgaacaccatcctgatgctcgagctgacccttgtgctcttcgtgcttagcaagaccgttgtgatcccggccaagacactggtgcacagttacatcggctacccatgattacgaccagattcaggttcaggttcagttaggcgatgggatttgatgacaggcaggttgccggggtttgcacgctacggtgaatgaaactggtaggaatggtgggtctcccccctcaagcgcagatcatatgcgctggcaatccaagcatgccgcaggttgaaggcaggctgagggctagggtcgtgacgtgtacagtttttttggggaaaaaaatctctacagccggttgcagaaagcggtcctgcaggttgcaaagcaggttgcttcagatttacacttctgcaccaatcaatgatcagagattgtttttctctgcagccagttgaagagaatttctcccggtacatatactactaatactataaaccaatatatgtattattgtacgtatacacgcacgcaatgtatatgcac

SEQ ID NO: 133595 - DNA, 303 bp, Zea Mays
gcttggcggggtgacatcggcgtggctgacccttcagctttctccttgctgctggcgatctacactgctctgctaggtcttcggaggaaactttgcttggtttgtaccaagcgggcggcgacggcttttcgacgtcgtttctccttcttgaaggcgcggcccaggagacctccagtttgtgtgttcgtccgtgttgtggaggctctttgtcaccccgcttggttcgatggtgttccggcctttgtcgcttttggcgtctgctcgctcccggggttcggcgttgtgggtctttgctcgtggtga

SEQ ID NO: 133596 - DNA, 392 bp, Zea Mays
ctcggaagttagtagattctcggaagttagtagcttcacgccgtcagcgccgtcagctgactaacttcctacgactaacttcctacggcttactgtagcccctagaaagttagctggctaacttcctacggctaaataagcctctaggaagttaatttgaccagcattacaaatgctgtttatttttattttacaccacattccacaacataacaaatatatcaacagctatatagcacaacatattttcacataaaacatctcacacacaatcgcataacaatatttaaatccatagtctcatcaattacatcacaaaagtctcatccatagtcataataagacacatctcatcatccagtactaataagagacaatatctcatacatagt

SEQ ID NO: 133597 - DNA, 198 bp, Zea Mays
cgtccttgttcactcccttctttttcttcccatgaacctccatcatctcccttctctctcaaattgagggctctcaagcccaaccatatgacatatataaataaaacgattcacaaatcaaggttcacctgcatgagtaaagttgtcccatatgcttgggctccttcagtcttcatcggttgcccctttgtactgcat

SEQ ID NO: 133598 - DNA, 806 bp, Zea Mays
gccccctccctgcatcacaaccttttttccgttcagtctgtttccccactctctccccaaagccaaacaccggaccacccctcccccctccattcctccctctccctacacctccgctccctctcgccgctttcccccacccaatccgaccgctgggccgcctcctctccgccggggccggcgattccccggagattccgcgcgattcggctcagattctgggctcctcttgtggtttctcggcgaatcggcgggatcgggactcccggctggagggaatggatgcgtgccccctgtgcgtgggaatctttcggtgtgcaaggaacggtgcctgtggaaagtagcattacgaggacatgactacaggagatggctgctggtgcctggtggtgctagacagttgatgctgcgtgccttatcctgtactgatatatggacaaaataggattggctggattgggagactttggtttacccaagcatgacgctctagcagcatgcttcttcttgtttgtactttgcaacctaactgcaacttgtgcatccctttgtggaatgtgcttgcagtcgtagctttaccatcggtaggtgttgggattggattagatctggaactttttggctgcttcgaaggctggctgatgctgactggcatatgtatcgttcactatgcacattccttttagtatgctttgtcacttcttggttcaagtagtagcagtaatcactgctaaccattggttgttcttttccaactacgttgcttggctacattgtagcaatgttcttttaaatcagagatgcct

SEQ ID NO: 133599 - DNA, 1985 bp, Zea Mays
gccccctccctgcatcacaaccttttttccgttcagtctgtttccccactctctccccaaagccaaacaccggaccacccctcccccctccattcctccctctccctacacctccgctccctctcgccgctttcccccacccaatccgaccgctgggccgcctcctctccgccggggccggcgattccccggagattccgcgcgattcggctcagattctgggctcctcttgtggtttctcggcgaatcggcgggatcgggactcccggctggagaatcttccgtctctttcgctaactgtttggatcattttacgtggagattgcatgccatcaccttccttgaagtgaaaaatatatgggctgatcttggcatttcatgggaggttttgaagatgatgaaccaccctcaaaacgcgcaagagcatcctcagtagaatctgcaagtttaccagactgtttcttgttttcaaaatctgccaatcctttgggaagtacaatggctagacctttgccttcccaagggaaagaagctatggttggttccaagggtgttattaagaaggaggaatttgttaggataatcagcaaaactctgtatagtcttggatatgagaaaagtggagcagttctggaagaggaatcagggattactttacataaccctatggtgaatcttttcagagagcaggtgattgatgggaattgggataatgcggttgttaccttgaataagattggccttcaagatgtaaacatcatgaaatctgcggcatttttgatattggagcagaaattctttgaacttctaagaaatgacaatgtcatgggcgctatgaagactttacgacgtgagatcacaccccttggtgtgaatagaaaaagagtgcatgaactgtcgacttgtatgatttcttgttctccacagcagttgttccttgggttttcaaaacttggcattgattcttctagttcaaggtttaagcttctagaggaattgcaaaaggtgctccctccaactgttatggtgccagagaggaggttagaaaatttagttgagcaagcacttactgtacaaagagatgcttgctacttccataattctgttgatgggttgtcactttacattgatcatcattgcgggaaagatcagctaccatctcgcacgttacaggttttgcatgcacatcatgatgaagtgtggtttgtccaattttcaaacaatgggaagtatttagcctcagcgtcaaatgataaatctgcaattatatgggaggttaatgaagatggagagctattactgaggcatacattgagtggtcatcaaaagtcagtgatgatggttgcatggagttcagatgattgccagctcctcacatgtgggcaggaggaagccatcagacgctgggatgttaaatctggcaaatgtcttcatgtttatgaacatcctggcattggtttgagatcatgtgcttggtttcgagatggaaagcaaatattgtctggtctagctgatcaaaccttttgcatttgggatttagatggtaaggaagtagattgctggaaagggcagagatcggcaacaacatctgattttgctgtagcaaaagatggaaatcttataataagcttgagtagggacaatgcaattcttctatttgatagggagacaaaacatgagagaataattgaagagggtagtacaattacttcattttctctatcagaagatggtgatttcctgcttgtaaatcttgtaagtgaagagattcatttgtggaacataagaaatgatcctgttcgagtcaaccgatacaatggccataagcacagccggtttgtgataaggtcttgttttggcggatctgagcaggcgttcattgctagtgggagtgaagattcacaggtatgatggttgccttgtgatccacctaggtactatagaactaatattgtactatatgtgcacttacattttgttgtctt

SEQ ID NO: 133600 - DNA, 2565 bp, Zea Mays
gccccctccctgcatcacaaccttttttccgttcagtctgtttccccactctctccccaaagccaaacaccggaccacccctcccccctccattcctccctctccctacacctccgctccctctcgccgctttcccccacccaatccgaccgctgggccgcctcctctccgccggggccggcgattccccggagattccgcgcgattcggctcagattctgggctcctcttgtggtttctcggcgaatcggcgggatcgggactcccggctggagaatcttccgtctctttcgctaactgtttggatcattttacgtggagattgcatgccatcaccttccttgaagtgaaaaatatatgggctgatcttggcatttcatgggaggttttgaagatgatgaaccaccctcaaaacgcgcaagagcatcctcagtagaatctgcaagtttaccagactgtttcttgttttcaaaatctgccaatcctttgggaagtacaatggctagacctttgccttcccaagggaaagaagctatggttggttccaagggtgttattaagaaggaggaatttgttaggataatcagcaaaactctgtatagtcttggatatgagaaaagtggagcagttctggaagaggaatcagggattactttacataaccctatggtgaatcttttcagagagcaggtgattgatgggaattgggataatgcggttgttaccttgaataagattggccttcaagatgtaaacatcatgaaatctgcggcatttttgatattggagcagaaattctttgaacttctaagaaatgacaatgtcatgggcgctatgaagactttacgacgtgagatcacaccccttggtgtgaatagaaaaagagtgcatgaactgtcgacttgtatgatttcttgttctccacagcagttgttccttgggttttcaaaacttggcattgattcttctagttcaaggtttaagcttctagaggaattgcaaaaggtgctccctccaactgttatggtgccagagaggaggttagaaaatttagttgagcaagcacttactgtacaaagagatgcttgctacttccataattctgttgatgggttgtcactttacattgatcatcattgcgggaaagatcagctaccatctcgcacgttacaggttttgcatgcacatcatgatgaagtgtggtttgtccaattttcaaacaatgggaagtatttagcctcagcgtcaaatgataaatctgcaattatatgggaggttaatgaagatggagagctattactgaggcatacattgagtggtcatcaaaagtcagtgatgatggttgcatggagttcagatgattgccagctcctcacatgtgggcaggaggaagccatcagacgctgggatgttaaatctggcaaatgtcttcatgtttatgaacatcctggcattggtttgagatcatgtgcttggtttcgagatggaaagcaaatattgtctggtctagctgatcaaaccttttgcatttgggatttagatggtaaggaagtagattgctggaaagggcagagatcggcaacaacatctgattttgctgtagcaaaagatggaaatcttataataagcttgagtagggacaatgcaattcttctatttgatagggagacaaaacatgagagaataattgaagagggtagtacaattacttcattttctctatcagaagatggtgatttcctgcttgtaaatcttgtaagtgaagagattcatttgtggaacataagaaatgatcctgttcgagtcaaccgatacaatggccataagcacagccggtttgtgataaggtcttgttttggcggatctgagcaggcgttcattgctagtgggagtgaagattcacaggtctacatatggcatagagccactggtgatctcattgagactctcgctggtcactcgggcacagtcaactgcgtaagttggaatcctgtgaatccccacatgctcgcatcagcgagcgacgatcacacagttcgtatatggggggcaaaggtcagtcttaagcgcaaggatgttgggagcagcaattgcaacagtaacgggttccaccactcgaatggaaatgcacatggcaatggtttcgctcaccagtgcaacgggaacagcaccaaatgatttgccaaggcaatgtacccccatggatggttgactggcatctgtaaatccccctttacttccctcctagaacaagagtcgccgccgaaatagtaaaagaaaagaaaagcaaaaaagaaagctgcagcacaaagtgtgggcaacctgctgggtttcgtgcgccatctttcccttgttctatcatgacagccatcacatttatttcttaattcaagatgggatggaattatgatattactttgcgtctttgatatcttgatttatcctccctgattgattgtaacttcattttgatggtggtgatggttaactctgattgctgtctaaacaaccggacggaacttatcataaatttaagtaaaatcagtcatctagttcaagggatca

SEQ ID NO: 133601 - DNA, 565 bp, Zea Mays
gtgtcatcacgacatcaaatgtgacatcgactatagaagcatcgtcccttgatcctccctagccgagcttagattatttttcccattgatcctagcaatatggagcagacacgcttgtctggaaagatatgcatatccctgtgtaaccatcacaagtatcattatgtaactagatgcatccacttccagataaccttggcaaaagtcggtcgactaggagtaccagtggacaatttgccttaaaaaagtgaacactgacagcatctttggacatcaatataatacatcaaacgtatatgcactgcaaagtagttcaaacatatatatgaacatgtaactgcatatgtaaacatataactttgcaccgcacaaaagaaactagcggaccctgttggcagtcagattacgcacatatgcgcagcaaattctggtaacagagaaatctggtaacttccaatcgagttatctgcctgactgcctctagttccaccctgcctgggagaattgaggaacacgacgcatctctgcaggtctagtcgacgtcccaacgtttccactcaccgtt

SEQ ID NO: 133602 - DNA, 1032 bp, Zea Mays
agccgccgccgtcctcccaatcccctccccacatcgggaaccgccgccgacgccgcaggaggagacgcatcgaggttagcacgcgaagaagcgaccatgagggccaagtggaagaagaagcgcatgaggaggctcaagaggaagcgcagaaagatgaggcagagatccaagtaggcagatcgagatggattgtggacctgatgacatgcgtgggtacatacatttcttcggatgcgttggtgtgcctgtggagagatgtcaacctgccatggtgtcacggtccgccatcagttgaacgtcttgcctgcacttcagtaggccacttttcatggttctagttgtatttgaatccagcgtttgccactaagataaatcagacagtcgttttgtgaacctattatgatggagctttatttgctgataatatctagctacctatttgagctgagtgatccctgcacttcattatggttggcaactatgtttcttaaccatatcaatatctttgttttgagaaacattgtctagttataccattctaaactttcttattagaaaaagctaaccataaaagctacgggtatctaactttcttattagaaaaggtaaccataaaaactacgggtatctagcgtacgtttgtgagggctttatttcaagaatttcagttttagttttctagctttactataaaacaactccaacaattattgaagtgggttcgagatgtgtttggtttacacatggactctagcttttgtaatataattgatttgtgtaagttttctggattacctttgatgattagtgggttgtcacgataaaacctaagcaatgcattgtgtaattggtgacatggtgggtaattctcatgcaacttcataaggagatatagaaactatttttgaagcaccctgacctctagtttttttaaagccatagcttgtgaagctagaccaatttagatggaagaacttggaacaaacatgaaatttgtgaagtgaagccctttcaaaaaggaccctaatctag

SEQ ID NO: 133603 - DNA, 278 bp, Zea Mays
agcaggtcgagatggcagaggtcccacgcggggagctcatagcgccgcatcatggtggccttgccgatcttcggcatctgcacggaagctgtggcggcctcgacacggatctagctgcatgtgtcgccgccacgcttcttcaggttgggcacgtcgatgccccctggaaagcggcggccactggccccgggggaacgggaggacgggtaagcgtggtggaggaggggctgcttgacgggggagcgggacatgggatccaggctgcgagcgccacctaa

SEQ ID NO: 133604 - DNA, 1575 bp, Zea Mays
atttacctattgccattcgtaggatagggccctagcgcgattagaagggacacgagcaaccgatgctgccgcagcctcacactcaaccaatatttctcctgtatacaaagaaaaagaaatcttccatacatcagactttgactcgcttctatctcgcgcaagccgagaagaaaggagcccgtctacgcgagagatgggcggctacgagaacggcgagtcgacggcggccgcggcgcttgctgacggtggtgtgattctgggcgtggacggcggcaccaccaacaccgtttgcgtctgcctgccggctgcaatgacgccgccggagtctccggccaccgtacccgtgcttgcacgcgccgtcgccggctgctcaaaccgcaattccgtcggagaaaatgctgccttggaaactctcgagcaggtcatgacacaggctctagcattggccaacacagatcgttcagctgtccgagcagtttgtttagccgtatcaggagtgaaccatccttcagatcagctgaggatgctggaatggatccgggatctgttcccagacaatgcaaaaaattatgtagaaaatgatgcagtggcggccctggctagtggtacaatgggaaagctgcatggttgtgtgttaattgcgggcactggatgcattgcttatggagttacagaagatggaaaagtagcaagagcagctggtgctgggcctgttttgggcgactggggtagtggatatggcattgctgcacaggccctgacagcagttataaaagcatacgatggtcgtgggccacaaactagacttacaagagatatccttgagaagcttgatctttcttcaccagatgaaatcatagggtggacatatgcggatccatcttgggctcgtattgcagcacttgtaccagttgtggtatcttctgctgaagatggtgatgaagtagctaacaaaatcttgcatgattcagtccaagagttggctgacactgttatagcggttgttcagcgtcttagattgtgtggcgaagatggaaaggacatgtttccacttgttttggttggaggggtccttgaaggaaataaaaagtgggatatcagtggtgaggtcataaaatgtatttccaaggtcttcccgggcactgatcctatttggcctgaggtggaaccagcaatcggtgctgccttgctagcctggagccatcaccacaaagggttgaaattggagaatggaagttgattcccagcatttaagggtgtcaattgtacattgaggagttggcgagccaaaggggtattggtcccaatgatacattcatcggcatgaaggcttttcgttcccagcaaaaagaataaatcgtggatgggtgcaaacatgcggtgtggatagaacatatttctgatgtaagtaggtagtaagaattgttcaaatattcctctgattctaactctcggtgattgttgtatgtgttctgtttgtgtttggaggtagtaacatgtatctgtctaccatggataattgatcgtcaaatgttcagatctttttttacatacattgtgcttggcctctataaa

SEQ ID NO: 133605 - DNA, 2840 bp, Zea Mays
tggagtcggttgatgcgagatgctttgtgaaggtgaaggaccaaagctaaaccccacgtccccctcacgcgctcccatctcccaccccccggcacgcgccgaaacccaagctcgcgcgaaatccaaggtaagaatccagggggggcggcggcgccctcaccccccacccagcaccccctcctcaccgtcgagcccgtcggagtcctttcctcccgagttcgtcgagtgcgtagccgtctcgccggtctccgatgacgacgaatcagatgattgctgcgtttgcgacggcgacgatgtggactccatccgctacttcaaccgccaactgcgtgaggcgaaagagttcatcaggaggtataagcctggggactggattgagggagtcggaagtgcaaaggctggacattttgtcttgcctgaggtcaccacattgctcttggtgggccctagaggttctggcaagagcacacttgtaaaccgaattactagggtctttgacaaggatgatgatccttttgcaccagatcgagcacaggtgtcatgcaattcaaaatcaaatggtacaatgtttcttcgcgagtatccaattccaaggaattcaagtgccgtatgtatttacgatacacgtggctggtcaaacgacctagagaaaaatttcaaaatgctgcatcagtggatgacaaaaggaataagccatggggagacaacaatgtgggatgatgatgaaggcaataagatagggaacatgaaaccattggggaggcaatacagttttcttcgttacaaaatccggaaggtcaatttcgtgttatttgttgttgatggtgttgctgtcctcgagtcaatggatgacagcaataaaggatacactgagatacttcgtcaaacttttatgtatccgttcttgtcgattggagatgataaacctgttgttgttgtcacacatggtgatagactgtcgatacagcaacgtgttcacgttcaagctgagttagcagagctactagatattcctgcccagcaaatttatgatataccaggatccgatgatgaccaaactgatatggttgtactggatatgctacattactgtgtccgacatgcagagcagaacctccctgttaagttaaactaccatttggaggtgcttgggcatgaaactctcaataaaatggcagagcaattgatgggcttagatgcagtcattgaagtcgccattattttcctatgcatcctggtcctgctgcttcgattttccgataaattggtgcagccgtagctacgttctgcacttggggttgtaactaagaaaacatcatggtgactacttgtcctcctcagctagtagagtaccctaactacttttatgtgtgcattgtatatattgacagaacgcgctgtgctggaaatctgtatatatttacaataatactaaatccgatctcgaatatttgtcgcaactaaaacacgacaaataaaaaagaacggacaggacagggtataatacaatacaactagtttctcacgaactgcccgaggaagaattctcagtacaggcaactgaaaactaagcaagaacgccgccatcatcacatcttaacattgtcccaagtccaccggagccatgcaactcggttcttcggagtggtgatgcacctaaatgccgcgcgtcggatcggcgacctaaacagctcagtagctatgaagaacagctcagatccctgagacacgccgtccttttctacgagctgcagcaactctaccacctcttcttgctcacgcctgatggcactgctgctctcgttcctgcttccgagcatgctctcggacacgccttcggcatagtaccccgtgttcttaggcttcttggctgggcggctgccgaccatgtggatgtggtggtcctggcttgaccatggggacgcacggccagacctgtaacaccccaggctctcctccggacaagcggcattgtcccctgacgctcgagcatggttctcttcctcgcctcctccgcccccgcctggtgttctgtcaccggcgccaccacctacggacggcgaatttgtgccgtctttggggccgaaaagaacggcgagcgcgtcctcgtgcgcgagcgccttgccacggaagtcttctgctgcactggtctcctgctagccagcaacggcgaatacgtaaggtaagaggaccgaccattcagaataaaccattctgcaatttaataaccacagatgtccagctaacggtggcactgttaaactcacagaaagcaagaactggcattaagcacaacgggctgtacttaccgtgatctggttgtcccatccgtcagcatcctgtgtaacagtgctcgaactcttgtcccacccgcctcctcctccaggtccagccttgtcgttctgcagtctccacaggctgtacatcctcttcaggccgttgaacttgttctgcagctgcttggtatcataagacctgcgtgtctcttccttgaagttgcggtacagattgtgccaccctatcttggtcaaccccttgctgttgtagttctgcttttccttctcggcgatgcagaggtccaggaatattcttgtggtggtgtcgtcccagtgagcacggcatcgatccatctgcgcgtcacttttcctttttacatgtctttctgattacaagatctatacgccacacgtgcatcaccaacaacaggatacaaggaaagttagctaacacttgcctcgacggggttgtgcctcgctggagttgtatgcagatcgtagccacaaacttcaggtgcagagcatgatgacgtcgaggagtaagccagagttgtcaccctccag

SEQ ID NO: 133606 - DNA, 1640 bp, Zea Mays
ctactcatcggggcatgtcgctcgcccagatggccgggtgtgggtcgcgcgcttcagcgccatccattttcggggctagttgattcggcaggtgagttgttacacactccttagcggatttcgacttccatgaccaccgtcctgctgtcttaatcgaccaacaccctttgtgggttctaggttagcgcgcagtttggcaccgtaacccggcttccggttcatcccgcatcgccagttctgcttaccaaaaatggcccacttggagctcccgattccgtggcacggctcaccaaagcagccgcgccgtcctacctatttaaagtttgagaataggtcgagggcgttgcgcccccgatgcctctaatcattggctttacccgatagaactcgtgtgggctctagctatcctgagggaaacttcggagggaaccagctactaggtggttcgattagtctttcgcccctatacccaagtcagacgaacgatttgcacgtcagtatcgcttcgagcctccaccagagtttcctctggcttcgccccgctcaggcatagttcaccatctttcgggtcccgacaggcgtgctccaactcgaacccttcacagaagatcagggtcggccaacggtgcggctcgtgagggcctcccgctcgtcagcttccttgcgcatctcaggtttctgaacccgtcgactcgcacgcatgtcagactccttggtccgtgtttcaagacgggtcggatggggagctcgcaggccgttgcggcgcagcgccccgaggggcgcgccagccccatccgcttccctcccagcaatttcaagcactctttgactctcttttcaaagtccttttcatctttcccttgtggtacttgttcgctatcggtctctcgcctgtatttagccttggacggagtttaccgcccgatttgggctgcattcccaaacaacccgactcgttgacggcgcctcgtggtgcgacagggtccgggccggacggggctctcaccctcccaggcgtccctttccagagaacttgggcccggtccgtcgctgaggacgcctctccagactacaattcgggcggcgaggccgcccgattctcaagctgggctgctcccggttcgctcgccgttactaggggaatcctcgtaagtttcttctcctccgcttatttatatgcttaaactcagcgggtagtcccgactgacctggggtcgcggtccgagggcaagctcggtcgctcgatgggtccttagggccgaatggccggccgcgcgccgggacgctgcaccgagaacaacttgatgtcgcccaagacgtgctgcgcccggcgcggttcgtcggcagcccctgcttcggcccacctcgccctacagcgcggggggccagacgccacgtccctcgccccgcgggggggtgttgggagtgtcttttggcgtgacgcccaggcagacgtgccctccgccagatggcttcgggcgcaacttgcgttcaaaaactcgatggttcgcgggattctgcaattcacaccaggtatcgcattttgctacgttcttcatcgatgcgagagccgagatatccgttgccgagagtcgtgtcgattaaggtgtaaccgctgcccggggagcggaaggcgggcc

SEQ ID NO: 133607 - DNA, 570 bp, Zea Mays
ccccgaggggcgcggcggataccgtcgcgccgacgacggctgccgggggccctaggcccccgggcttggccgcggcacggcgacaacggtccacgcccgagccgatcggcggaccagcaggagccgttcctcatacggccggggcgcgtcgccagcccccatccgcttccctcccggcaatttcaagcactctttgactctcttttcaaagtccttttcatctttccctcgcggtacttgttcgctatcggtctctcgcctgtatttagccttggacggagtttaccgcccgatttgggctgcattcccaaacaacccgactcgttgacggcgcctcgtggtgcgacagggtccgggccggacggggctctcaccctcccaggcgtccctttctagagaacttgggcccggtccgtcgctgaggacgcctctccagactacaattcgggcggcgaggccgcccgattctcaagctgggctgctcccggttcgctcgccgttactaggggaatcctcgtaagtttcttctcctccgcttatttatatgcttaaactcagcgggtagtcccg

SEQ ID NO: 133608 - DNA, 2307 bp, Zea Mays
ccggcacgcggcggcccgctctcgccgcgcgagcaactcgagcattccgccagcagccgacgggttcggggccgggacccccgagcccaaccctcagagccaatccttttcccgaagttacggatccgttttgccgacttcccttgcctacattgttccattggccagaggctgttcaccttggagacctgatgcggttatgagtacgaccggacgtggacggtattcggtcctccggatttacaagggccgccgggggcgcaccggacaccgcgcgatgtgcggtgctcatccggccgctggaccctacctctggctgaacggattccagggttggcgggccgttaagcagaaaagataactcttcctgaggcccccgccggcgtctccggacttcctaacgtcgccgtctgccgccacgtcccggctcgggaaatcttaacccgattccctttcgggtgacgcgcgtgatcgcgctatgtgccgggtttcccccgtcccttaggatcggcttacccatgtgcaagtgccgttcacatggaacctttctcctcttcggccttcaaagttctcatttgaatatttgctactaccaccaagatctgcaccgacggccgctccgcccgggctcgcgccccgggttttgcggcggccgccgcgccctcctactcatcggggcatgtcgctcgcccagatggccgggtgtgggtcgcgcgcttcagcgccatccattttcggggctagttgattcggcaggtgagttgttacacactccttagcggatttcgacttccatgaccaccgtcctgctgtcttaatcgaccaacaccctttgtgggttctaggttagcgcgcagtttggcaccgtaacccggcttccggttcatcccgcatcgccagttctgcttaccaaaaatggcccacttggagctcccgattccgtggcacggctcaccaaagcagccgcgccgtcctacctatttaaagtttgagaataggtcgagggcgttgcgcccccgatgcctctaatcattggctttacccgatagaactcgtgtgggctctagctatcctgagggaaacttcggagggaaccagctactaggtggttcgattagtctttcgcccctatacccaagtcagacgaacgatttgcacgtcagtatcgcttcgagcctccaccagagtttcctctggcttcgccccgctcaggcatagttcaccatctttcgggtcccgacaggcgtgctccaactcgaacccttcacagaagatcagggtcggccaacggtgcggctcgtgagggcctcccgctcgtcagcttccttgcgcatctcaggtttctgaacccgtcgactcgcacgcatgtcagactccttggtccgtgtttcaagacgggtcggatggggagctcgcaggccgttgcggcgcagcgccccgaggggcgcgccagccccatccgcttccctcccagcaatttcaagcactctttgactctcttttcaaagtccttttcatctttcccttgtggtacttgttcgctatcggtctctcgcctgtatttagccttggacggagtttaccgcccgatttgggctgcattcccaaacaacccgactcgttgacggcgcctcgtggtgcgacagggtccgggccggacggggctctcaccctcccaggcgtccctttccagagaacttgggcccggtccgtcgctgaggacgcctctccagactacaattcgggcggcgaggccgcccgattctcaagctgggctgctcccggttcgctcgccgttactaggggaatcctcgtaagtttcttctcctccgcttatttatatgcttaaactcagcgggtagtcccgactgacctggggtcgcggtccgagggcaagctcggtcgctcgatgggtccttagggccgaatggccggccgcgcgccgggacgctgcaccgagaacaacttgatgtcgcccaagacgtgctgcgcccggcgcggttcgtcggcagcccctgcttcggcccacctcgccctacagcgcggggggccagacgccacgtcccctcgccccgcgggggggtgttgggagtgtcttttggcgtgacgcccaggcagacgtgccctccgccagatgggcttcgggcgcaacttgcgttcaaaaactcgatggttcgcgggattctgcaattcacaccaggtatcgcattttgctacgttcttcatcgatgcgagagccgagatatccgttgccgagagtcgtgtcgattaaggtgtaaccgctgcccggggggcggaaggcgggcc

SEQ ID NO: 133609 - DNA, 1216 bp, Zea Mays
gatcatctttaacctctgccgttgagctctcgtggccatctatctctttcccctgcgcgcgaagctcaatcccttcctccgcgccgcccctgcgtactcgtctctggcgctgttcagctcaaaaaaaatctctcagccgctcatccctatctgttcagccagcacaagattttcctatgtcagtcgttctcatcctctccgcagccactgtacctgactgcgtgatatttttgccgccgccctgttcgttttatatgcgcgcagctcgccggccgtacgctcgccggagcccttcccctgctcggcctctgaggtttcccagtagcggcgcctagcatcttctccgcgcgcagcttgcttcctccctctgccgctcgtctccatctctccatctcccaaaagaccgcgcctagctccagccatgagcgccgacgtcctctctctgtgcttgatctcccagtcctccgctccctgaaaccttcacccacatgtttgtgaaggtccggtagtggagatcttgcgaggtccactgctctgcgctcctattccacctgtctcatcccctcatcatgctcgacacttgctccctggcagcatgtcgtagcagcatctgtgcttactgtgccgtgctgtttctctgcacgcgtcaagctctcgcgctgaatccagccccatgttgacgcgttcatgttccagcttgtcgtgccgcgtcgtcatcactttctgttgcgagctcgattcccgttgtcatcgggctttgtgcgtgctcgcgtttgccgtcgagtcgttgaacccgtcatcctttgctcaaccctaccccgccagctcgctccagatacaatcttgttatcgtcccgcgcgtcatcaagaatcccaagaatcgggtgaaaacgaagctagcagcgcgatattccccaagcgctcgacaattgcctggatcggaaaatcactaccgatctcgcggattcgagtcggctattgaaacggtacgttaattaatcgcgtgatgcggaagatgagccaagtcgaccccaagcgtgggcttcttcgcaaggcgatgctgatggacaaacctgaagatggtcgtcaagtgctcatcgactaacaacactaacctagtgttactcaggcaagccccggtgcatttgccaccttccttgatgtttttaaaatctttctcacttgattgctgcattaggtgataggagttgattgc

SEQ ID NO: 133610 - DNA, 339 bp, Zea Mays
atggaggagactggacagagcgccgacaaaggagagaggtggggcgagggtggccggacagagagagcaggcgcgcgcgttaaggctggagcaggagcacgccggctagctcgcgcagccgacgagcaaagcaggagggagctccggccggactcgacagaggaagctgggggttgcgatttccatggccgagcagagaaccggcaagggcgcagcgggaagggactcgacgagctgaaggccgagctgggcagggaagcaagcaagcgcgcgggagatgagcagggacggagagaggagcagagagtgtcatcggctggggtggatgccgagtactga

SEQ ID NO: 133611 - DNA, 1052 bp, Zea Mays
gcgcgcctgctctctctgtccggccaccctcgccccacctctctcctttgtcggcgctctgtccagtctcctccatggccgcgcctggtccctacttgagctcggctctgccctctactccagctcgtccctctctgttgttctcgctgttgggccggtctatagctcgccgttgcccatggccgccatcgagcttcctgctcacgcctatctccctcccatgcgcgcgtgaggtcgacagtgatcccggtcctagctcggatcttgctcctgttcaccggcctcgcgcactactgttggtggacgctatcatcgccagcgactcgattctcctccgctgcgttggtcgtgcttgtcgtggccaggccacaaaccttcctcaagcatgagcatgacatcgccttagagtcaaacccctagctgctactccatcatcgttgtcgttcgcctctataacgtgctcagcagcgtcgtgtcatggagcgcgatagggaacaccttggtcgcgtgctccaccgtgtcgagctccttggcgtcgctcgccctgttgttccctatcgggctcaccccagccgttcttctgctcctcgcatcgtgattgccgagttcatcggcaaccacagtcacgtcgtgccgcgccgcgagttcgctccccgctatcgtcgtttcctcgtgtccgctggccgtgcgcccctgcagctccctgttcggcaaaatgagtggaccggtgctcatcgcgtgttggaaagatcggcaccgatgttcttgccgaatattgattgtttgattttggggagatcgacgcacacatggtgctcaatgaatggttcaaaccagatagcctcgtcaaaatcacggctccgagtcgattcggaaatggtaagctgataatttattcagaatagttcgatcgttaaataaattaatgtgttagtgcgaggctcattagtgtgctcgataaattgtgtaagtcacgaaactctcgtcgacttcgcaattcttgcgattatcgagccaaattcagtatggcgagttatttcgctattccggtc

SEQ ID NO: 133612 - DNA, 265 bp, Zea Mays
aaccaaagccgacggttatatcctgacaatcacttaatacaactcgtcaactctacacatacagacacatactccctccgtttctttttattagtcgctgggtagtgcaaaattgcactatctagcgactaataaaaagaaacggagggagtatcaaccaaagcattttagtttaaaaatgaattagtggacaacacatattcgagaacgaatgtagtatttcgtgagacatgacgatacatgagtagtccggtatttaggtaat

SEQ ID NO: 133613 - DNA, 301 bp, Zea Mays
aaagtggatgtctttggtgaagggcacggtggaacggagggaaaacgacacggaggcacgcggcgacgggcggcagggctgttcggccttgcgtatgggctgaaaacgaggggttcgccatggcgcacgggccgaaaaacggaggctcgggcacgacctccaaaattagctaagtcccaagcttgtggaagacaccgaacctaaactgcatgtcttaagtgaaagggcaaggtggaacggagggaaaacgggaggaggcgcgcggcgacgggcggcagggctgttcggccttgcgtttggg

SEQ ID NO: 133614 - DNA, 3213 bp, Zea Mays
atggcggcggcggcgacagagctaataccaataccacccctgctcatcatcttgctcctccatgcgagcattctctacgtacctcgcgcgggcgccgcggcgcgtcacggcggcggcggcgggggcgtgcgttatgtacgtacccagcaggagtcagcagcacaggacctcctccgatggaagtcgatcctgcgaagctcgccgcgggcgctgggctcgtggcagccgggaaccagcccatgcagcagcaactggacgggcgtcgagtgcagcgccgtggtgcgccgcggccaccgtggccccactggtgggctggtggtgaccgccgtctccctgccgaatgccagcatcgacggccacctcggtgagctcaacttctcggccttcccgttcctccagcacctggacctcgcgtacaacagcctgcacgggggcatcccgccggccatcgcctccctacgcgcgctctcctacctcgacctcaccggcaactggctccacggccacgtaccgccggaggtcggcggcatgcggcgcctcgtccacctcgacctgtctttcaacaacctcacggggcgtgtccccgcgtcgcttgggaacctgacggcgctggtcttcctcaacctccagacgaacatgttgtccggcccgatccctggcgagctcgggatgctggccaacctagaggttttggatctcagcacggcatcgttgagtggggagatacctggaagcatcggcaacctgaccaaactggccgtcctgctgcttttcaccaaccagctatcggggcctatacctccttctctaggcaacctcgccagcttgagtgatcttgagatcgcccagacccacttgagcggtgggattccagtcgccctggggaatctcactaagctcaacacactcatcctatcacagaatcagctcacgggctcgattcctcaggagatagggttcttggcgaatctaagcgcactgcttgcagattccaaccagctaggaggccccattcccgcgagcattgggaacctcactagtctaacataccttcagctgaccaacaaccagctcgtgggctcgatccccggtgagatcggtcgcctggtgaacctgcaggtcatggctctgtctgaaaatcagatttcaggatcagttcctgcatccgttgggaacctgacgaacctcatagagttcaacatgttcagcaacaggctgtcgggttctctgcctcgagaatttcgcaatcttacactgttagtcgacgtcattttgggcaacaactctctctcgggggagctgccctctgacatttgcagagggggcaacctttttgagttcacccttgcaatgaacatgttcaccggtccaatccctgaaagcctaaaaacatgggacatatcagatttggggccgtacccacagcttgtcgaagcagactttggaaggaacaggctccatgggtatttgtccaagacctgggcttcaagtgtcaatctaaccacactgaatatggcagaaaacatgatatctggaaccttgccacctgagctttcaaacctagaaaagttggagttgctcctactgcacaccaacaaactaacaggcgagataccgccagaactagccaatctaccgaatctgtacaaactcaatttatcgcaaaacctgttttcaggcaatataccacctgaatttggtcggatgaaaaatctgcagtttctcgatgtatcaatgaatagtttgaatgggtccataccacaagagcttgggaattgcactgggctactgtcattgcttgtcaaccacaatagtttgagtggagaactgccaacgaccttgggtaatctggggaaccttcagattctgttagatgtgagcaacaacaaactcacgggcgagctacccggtcagctcgggaacttggtgaagttggagtccttgaacctctcgcataatgaattcaatgggagtattccacactctttttccagcatggttagtttgtcaacacttgatgtgtcatacaataacttggaagggccccttccaacagggccactattttctaatgcttccataggatggttcctccacaacaatggtctatgtggtaatctctcagggcttccaaaatgctcttcagccccaaaactagagcatcacaacagaaaatcccgcggcctggtgttaagcattttgattcctttatgcatagttactattattcttgcaacctttggagtaattatgattattcgtcacaaaagtaagaggccacaagggactacagccacagatagaagagatgtgctatctgtttggaatttcgatgggaaaatagcatttgaggatatcattaaggcaacagaaaatttcagtgagaagtacatcgtgggttcaggagggtatggcactgtctacaaagctcaacttcaaggggggagattggttgcagtgaaaaagcttcatgaaactcaagaagatatgagcgacgaaaaaagattcataagtgaaatcgaagtgttgacgaagatccggcaccgaagtatcgtcaagttgtatgggttttgctcccatcgactatacaaatttctagtatatgattacattgacagaggaaatcttcgcgcaaccttggaaaatgacgatttagcaaatgagctaaactggcggaggcgagctgccattgcaagagacatggcccaagctatgtgctacttacaccatgaatgcagcccaccgataatccatcattttaaggcctgtgttgctgactttggcacagcaaggattataaaacctgattcatcgaactggagtgaactagcagggacatatggttatatagccccagagctttcatacacatcagttgtgacgacgagatgcgacgtctatagtttcggtgtggttgtgctagagattgtgatggggagatatcctagggagttgcagtcccttggttccagaggagagcgtggtcagcttgcgatggatttcttggaccagcgcccatcatctccaacaattgcagagaagaaagaaattgatctactcatcgaagtggcatttgcttgcatagaaacttctcctcagtcaagaccagaaatgcgacatgtctaccagaaactggttcaccaacaaccgtcatcgcttgcctcaccctcaaattcaattaaactagaacaaataacagatggggaagtgtag

SEQ ID NO: 133615 - DNA, 841 bp, Zea Mays
gacaatacccagtgtatcctagggcgcagcaagcgagagagagagatcggagccgagagaggagggataagagatggcgccgccgtggtcccgctcctccatcgtcgttctgtgcgtatggtgtggtcgaggatgatcgccggtgcgcgtgcaaactttccgtggcgttggtgggcgagatagggcctcaggtcactggcgattgctcgccggaatacaaactcaacggaagatctgcgtcgcaccgtggacagcactgcgtccaccgccaccctcggtgagactcccctctcttgtttgccttgtcctatacctcgagtagagccattcggtgtagctagagaagaactggggtgccagggcgctgcctcgccggcaatagcgccgccgcgggagagccagcgccaccgcctgggggagcttggatgagggaggacggccgtggccgttgatcggctaacaagcggttcggattagatctggccgataccctttcgaaacttaaaatccgagccgtcgagcacgtatcgtgcggctcgagattgatctggacgtgggcgtctcagtagccgtggatctgtgatccgatggtctccattttgtaccggttcatacgggtatccgatctaatcttggacgccgtttcaggatcggatggctcgcgtgcgctaatacccctttcggctgtggcgttttgcataagagacccttagtttctcaggaataaacccacagtccggtagtatgcaaaagtatttacggttaggtcctgattcttttggaattaaccccgaactctttaaaaatgatacccgctatccacaggattagaaaattacag

SEQ ID NO: 133616 - DNA, 340 bp, Zea Mays
gacaatacccagtgtatcctagggcgcagcaagcgagagagagagatcggagccgagagaggagggataagagatggcgccgccgtggtcccgctcctccatcgtcgttctgtgcgtatggtgtggtcgaggatgatcgccggtgcgcgtgcaaactttccgtggcgttggtgggcgagatagggcctcaggtcactggcgattgctcgccggaatacaaactcaacggaagatctgcgtcgcaccgtggacagcactgcgtccaccgccaccctcgaagcgaggttacgaggaacccgaagatcaaattggagaagttcctggatttgcaccaaaaagg

SEQ ID NO: 133617 - DNA, 1118 bp, Zea Mays
ccactagccctcctttgctcactccttcgtctcactctcactctctgcgctcgctctgctcttgctctccctcacgcatgccatggttgggctctggagctcgagcccgcaccgccgctctacgcctcccacaaccaaccatttgctccgagaaccgcatcaccggctgcgccccacctcccttgcccactcgcacaagatcttggctttactctccatctcgcgctcctctccgcctctacttgcgcagagcgccaccaccatgaacgtcaccgcgacgagctcatcgacctccctcgtcactcactctctcgtctcttcaccttgccaagtgaatgcacctcgctttcctccttgggatccacccgaactcgtgctctgtccgtccgtctatagccggcgctgagctcgtggccgccttgggtcgccggatccggtgatcccggggccgccgtgcagctccgccggccgccggccccagatctgcctcgccgcgcgccggccccggagacccccacccccgccggccttcttcgggcgctgcttcgcctggcgccacccccaccggctcttcccctgccggcctctccaggcgccgccttgcggaagcgccgtcccccgccggcgttctccgggcgcgcccgcgcaggcccgttccgccgcgctggggcggtcgccgccgggcgccgtcgcgcgccggccagctctgcctctggctggccgggccgccgtgccgtgctgctccgccgcgcgctggccggagcgccgggctgccgctccgtgctgctccgctacgcgccggccacacgccgtgctgctccgccgcgcgtttcgggcgagctgcggagatgaagtcgtcgctgctgcagtcatgctgtgcttcaaggttgcgccaaggcttcccgtcgtgtggcgagcgaaagcttaagtgatacgacttcgtcgttggcgtggttaaccctgttgggggcgttatcgttgccattcttgttagattctgtggtgcctacgatcgactcctaagcccctagaataccaatccgtaactggaaattctcgatgatgagtagatctattctactgagagaaacaggggtacataccttcattgttgttta

SEQ ID NO: 133618 - DNA, 717 bp, Zea Mays
atggctcccccctgcgtccatctcctcgcgccgcctcccctcgcgccggtggccgcctctcaccgcactatggcccgtcttcctttatctacacgaacgcggaagagaaatttgacacttagaaatatggcatctgccatcatgcttatgtactattatatcttggctttagtagtactatcacataagtggaagtgttggaagatagaaaggaggataaaaattaaagaacttagaagtcaacgtatgtaccatctaatttgtgagagcgatgttaagtgtataaatgaccttcgcttgaataggagaaaatttcatatattgtgtgagatgcttagagatgttggtggtttgaggggtacaagaaatacaccattggaagagatagtagcggcattcttacacacactggctcatcatgtgaagaatagaacaatagggggtttcttcttgaggagtggtgagacagtgagcagaaacttccatgcatgcctcctagcagtattgaagcttcaccaattgctccttaagaaaccagaacttatacctgagggctgcacagactttagatggaagcacttcaagagctgcttgggtgcattggatggcacacatgtaaaggtccctaatcagatgacaatgcttttcgcgcttcctgagactcttaggagagaattcatccagaacatgattgcggatgaagctcaaagtaagtga

SEQ ID NO: 133619 - DNA, 668 bp, Zea Mays
caatatcccctgtcctccccttcttccttgcaaatttaggagatggagtctgccttctcctcgtccgaggagaaccatccgctgctgctgccgttggggaggtcggcctcattcttgacggggcgcagacctgggcggcgcgcggccgctactccggcatggcgtcgtggcgggagaagcgtgggggacgacatcgggagcgcggaaggcggggggaattgaccacggcgttggagaagaacggcgggcaacccgtccgagccgccatggttggtcgtcggccaaatccaggcggcgcaggcgtaggtggcctccaccgaggcctctcctctgctgcctgggttggcgtcggcaggacggtggaggtggcagtgactgcggcttggcgtagagcggagatgattgtggtgtcgaggattccggcgtcgcgcagcacacactgtccgtatccatggaccgggcagaagcctggtgggtacgggttggaggtcggcgtcgcctcgactggagtcgaagacggaggaacaaccgccactgctggcgcgcgtgcgcgacgcgacatcgatccacggcgcggcagttcacggcgagcggttctacgaagtgtgggaagccacacgccggtgaaaccgtcggcgctcatctgcatgatggcactctggatggcg

SEQ ID NO: 133620 - DNA, 2330 bp, Zea Mays
acatcctctcttcatactatctaccacaactagttgccagagttcgtcatggacttctacaaagagttcgtggagacttcgtccgatgacgattccgaagactgaggtcgacactcgacaccatgtacgtttagcaagcccttgagcaactaggtgttggaggttcgagcgggcgtcgtagacgctcttccttgccacgtctagtaatccatagggatcacagtgctagcgaaaatctgataaagctccactacttcggtccaaatcctgtctatcccgcccacattttccaacgaaggtttcggatgcagcggcctttgttcctgcgtatccttagaggtgtgcagcaagtggacggatttttttactgttaggtgtgatgctacgggtttagcgggactcggtccgttgcaaaaagtctctgctgctttgcgtgtcctcgcatatgggttgcctacggatgctgtcgatgagtacattcaaatcggacaaactaccgctagggactgtctcatccgtttctgccatgcaatcatctcatgctacaaccaacgttacctccgtattcctaacagaaacgatgttgctcgcatacttcgtgtcaacgctgataggggtttcccgggcatgcttggctcaattgactgtatgcattgggaatggcgtaactgtccaactgtatggcggggtcaattttgtggccggaactcacgtccaaccatgatattagaagctgtggcgtcgtacgacctctggatttggcatgccttttttggaatgccaggaagtaacaacgacctcaacgtgctccataggtctcccattttcgatcctttacacaacgacgccatgcccccccgtgcactacaccatcaatggtacacaattcaatttcgaatattatttagcagatggcatatatctgaattggcccacatttgtgaaagctattcgtcacccattcgaagaaaagaagattcactttaccatgatgcaggagagtgctcgtaaagatatcgagagaacttttggtgtgttgcagtcgcgtcgggcagtactccgcgggccagcttatggttgggttcgcaatcacctcacggagatgatgattgcatgcattatcatgcataacatgattgtcgaggacgaaggcgaaggagcagaaaatgttgattttgttggtgccaccccacctcctgatctttcgactgcaattccgtaagtccggaacgagtggttgaacacgactgcctggtccgaaatgccaaatgaaggagatattgatatcacctgcaagaacacgtacctatctttgcagtacaaccttgtcgaacatctttgggcaaggcgtggttccatgggttgaagtatggctacttaattaagttgtcgagtatcagtgtaatgtgttggtgtctactttagtgtactttagtcgatgtaagcctccagttgtggtcaagataactgctgttatgtgagcgtcttggatgtaactatgtatggtttcatccatacttcaataaaatttagataatgtgtgctttgttcattagcaacttaaattaagggagttctcaaacataacataaacgtctaaaggtaatgagctcaaacataacatatagtggacaagttcaaactgacaattcataaccataagtgacgagaataagtttacaaacataacataatcttgagttcttcaactgaaatgaagacactaacgcagtccaaagtcacacttcaaaaaatgtgattattacagcacgcattactaaaacagaaactcaactagtgaaaaccgtggtccacaattttcactaaacgaacaactcagtttggattgttgacaaaccagtccacaagtgctttcctctttgctatgaaagcaggcctcaaatcttcggctatgtcctccaaatccacagccattgcttccttcaactcatcgttcttctctttgcgttcttgaaacttcagttttgttttctccacttcaatttgttcttgttgaacttgcagcttcttatattcgagatccttgaaaacctcataatgtgcttctttcttctccactttgtcttcactttgtttcaaccgggccatttgcaggtcatgaattctggtcaaatacttcatggactgggacgacgtggacatggccttcttccttgatgcctttgtggagtctcggcctaatggccttttcccagttaaacctagagaatcgctatccaaatcgtttacacttgcagttggtgtggcactgccaaccggtgacatccctgctgcccctcgtagtgaagtgccttgaacaatagcttgcc

SEQ ID NO: 133621 - DNA, 452 bp, Zea Mays
gaggcaaagtactgtccgaagtgtaaatcgtctaggttcatggaggtagactctggtgatggacagaagaggcagctcgacctccccgtgacaatcctacgccaccttccgttcataccgaggatccagcgtctatacatgaccgaggaatccacgaaacagatgacatggcacaaaaaaggcaaacgatacaatcctgacaagatggtgcacgcatccgatggtgaagcatggacccactttgatgtcattcaccatgagaaagccgaagaggctcgtaatgttcgtgttgcgctggccacagatgggttcaatccctatggaatgaccgctgccccatacacatgttggctcgtgttcgttatccccatcaatctccccccggcgtatgctttcaaagacagaacatattcgtgtcgttgataattcctggacacccggggaataaaatg

SEQ ID NO: 133622 - DNA, 843 bp, Zea Mays
attcgtggcggctgatcgtcattaccaggtatgctattcccttgctgcccctcgctcgtgccttccgtttgcaccgtctggtttttccgttcagccgagtactccagttcatcgagcgctccagttcgtccgtctccttggtccaagtggtggccgcgaactcctactggatgctgcgtcctccccaccgccgccgctgaccagatctgtgccgccgctctggagcgctctgcggtctacgcgacggcgcgcacaggagctgaggacctcggcctgtaggtcatggactctccacgagggattgataacgttgtagtaggtgcggcattgtctctgtctctgactgaagaaaatgtgcaattgttgttcggccgtggcgtgtcgccaaccaatgaaatgactgcaccgcgctgcgaagaggaagattggagtttagcttgtattggccaggacgatcgcgtcacatttggtacctcgggaaattgtaatccaagtgaatatgttgattgggattcaatcgaagttgaagacaggtggaccgaggaaggaagacagaatgttactagtgaacaagcattgtatatccagctgggtttgcataatgaggatgtgtttgaatctgctcaaagggaagaagaatcagctcgtcatgttagatggagtaatagagactttttggatggtgaagcatcagctgccattccatgttctgattctgtggtagatgaggaacggattgtttatgacatgaacaatcctgttaagaaaaaaaccttcttaaattttccttcaggcaattttccttcgcatcacagggctaagttaagaaaaaaaccttcttaa

SEQ ID NO: 133623 - DNA, 387 bp, Zea Mays
atggaggatatcttccgggccaccaccagctcgtccatcaaccaccacgccgtcttcgtgttcgagttcgagaacgtgcagatggagctcaagcagctggcggaggcggaggacgacggcgcaggcgcagcagggcagacggggaaggtcgaagaggaggtgcagagtaacgctgagggcgggagcaatcaggagggccgaccaggcaagatgggtcaaatcatggggtgggcctccaaatcgctgaagccgcaaatccttcaggcaagatgggaagggaaatccgttttgggccactgggcccttatgcatgtgcaccccccatccgctgggctccgccttctgtccaaaccttggagatccagccttggcccttggagtagataa

SEQ ID NO: 133624 - DNA, 570 bp, Zea Mays
atgggtgtttgtcgccggcgaagggcccgacgaagaccaggcgaaggggtcgacgaggctaccaagaccggggcacctggcgtaggatggcggaccctttttcagctcctcctagagctggcgacctgccttctgatcctgtcattcaacaaatactacgccttcgccatcctcaccgccgtcgtcgccctcctccaaccgaagctgcggcatgcggcagacagacacgtgttgccatccttcacacaggacatgatcggagacgatgaggacagtccatacctgggccatttgctggacctttcacaaggcatcgccagttctggcggcctcttcacggcgatcgccggacgcttcatggtagggccattcaacacggttggtttcttcttcttctgtgcgatagctctcgggctgtatctgtccatggtggtgacggtgggagctgtgtctcgtccccacgccaagtgtctcgccatcgtcgtcgtggtcctcgtcgtgctcacgcttatcgccgcctgcatcctatttgttgggcactcgggaagcaagccgcaggttgtcacctag

SEQ ID NO: 133625 - DNA, 682 bp, Zea Mays
atgggtgtttgtcgccggcgaagggcccgacgaagaccaggcgaaggggtcgacgaggctaccaagaccggggcacctggcgtaggatggcggaccctttttcagctcctcctagagctggcgacctgccttctgatcctgtcattcaacaaatactacgccttcgccatcctcaccgccgtcgtcgccctcctccaaccgaagctgcggcatgcggcagacagacacgtgttgccatccttcacacaggacatgatcggagacgatgaggacagtccatacctgggccatttgctggacctttcacaaggcatcgccagttctggcggcctcttcacggcgatcgccggacgcttcatggtagggccattcaacacggttggtttcttcttcttctgtgcgatagctctcgggctgtatctgtccatggtggtgacggtgggagctgtgtctcgtccccacgccaagtgtctcgccatcgtcgtcgtggtcctcgtcgtgctcacgcttatcgccgcctgcatcctatttgttgggcactcgggaagcaagccgcaggttgtcacctagtagatccatagatctttatctacttaattatccttggcattctgtttttcttttagtttacttgtatgtatctgtctatctgagaatgatgtccgatgcatgctcccgtttg

SEQ ID NO: 133626 - DNA, 408 bp, Zea Mays
cagcacacaccgtcgtccttgtacgtagctagcactagcggtgatagatggcgatgttgagttcctacgccatccggagcccggcgctgcgttgggcgacctcacgcaaggagtcccgctcccgggctgctctcttcacgtgccatgcggataagtacgggtacaacgacatccaacccagtgccctggtgcaccctcgatcgcgaaaagaacgacggcgactggaggctgaaggacgagaaggaccaaatcaccctcaagtttttggtgggggagacgacgagcaacgataaactggaggttgcaacaacggaggatcggaccaggcgctcttggtcatcaggtacaagaaaaaggagagcaacgtcgtcgtcgtcgacgagagcccggcgagctcgctggacgtcc

SEQ ID NO: 133627 - DNA, 123 bp, Zea Mays
atggcgcgtgtcatcatctttaatctcggtaactcttccgatatgcgtctcatcgtgtttcgcctcctcatggtcagccccatctgggtcacggggccgaaagatcttgacattgcttcgtag

SEQ ID NO: 133628 - DNA, 1112 bp, Zea Mays
cacatcctgcttactgcccacaagaaagaagctagggaaacccgggggatcggaggactgaggagaggcagaaaacagaaggcccggctgcggctgcggctgcggctgcctttggtttcgtcgtcgtctccgcctgttttcccctctttccatggcaggctgatgctcttcaacacacacagtccactgtcgctcctcagttataagtagctagggcatctggctgctggaaaatcaagcacgcatccaccacacacacagctagctagcagatcgtttcgagtgaagatccaaagaggtagagagatggaaaggatgagttcgtcgctgcagtactgggtggaggagcacaagctctcaaccatcggagccgtgtgggcgacggcggtgggcgcgtcggtggcgtacagccggcggcgggcgccggcgcgggcgacgggcatgcgcctcatccacgccaggatgcacgcgcaggcgctcacgctcgccgtcctcgggggagccgcgctcgcgcaccactaccacggcaagagcaccaacgccgggaagaggcagcagcaggaggacctggactacggcttctactcgcagctgccgccggccaccgacgccgacggcaacgagaacgagcgctggagctggtagagcatgctgcatcgggacaagaacaagacagcagcgagaagaaagaaaaaacaataaattagtagcaataattggtgggtggtttggcatttggcaatgatgcgtgacgtggcgcctgcaggctttcttggtcctaatcctaatcctaatcctaatcccaatccatccagctaagacgtccacgcccgtggttttgtcctgttgatttgccaccggagacgacgatgcagcgcttgctctttgatttccatggcttattatcgatcagcctccgattcttctcctgcactactactacttgtaccatttcatctattgattgaatgaatggtcacgatgatgacgataattatgttttgtttgtttgcaaaaaaaaaacagtggatgtcatgtggcggttctgtgctgtgtgtgtgtgactactgccttgcgttattttaattattgttgcaccagcttgaggcata

SEQ ID NO: 133629 - DNA, 280 bp, Zea Mays
tgtccttggtcgacagcgccctctacaatgctttcttggggggaagaagctgaagcagcacgccttgcacggtggcaaggggagacagaggatgagtccctccccctgttccgctcccatagcgtcaacagcccccgcagcaccgacccgaatagctaatcaaggtcctcggcgtcatcgacgtggaccacggggttgggtaccgaggtgctagcctgccgcgacgaggacccgccgcccttcgtctccgctcctccccagcagcgggtctttgcggacc

SEQ ID NO: 133630 - DNA, 580 bp, Zea Mays
atggcttctgatggcactgctgaaatgcgaatgttctgtttcgacaacattgccaagagaatcattggaaaaccatgcgcttctctcttaacatcagctacaagcacttccaatattccaccagatttagcagcgattgtgtccctcaaattcacatttgctgttgtttacaatgaaatgtcatttcaagtttcagaaaaagaactcttcatcaagtcagtcatagcttcacatggaagagacctaaccttcccgtcacccaaactaaagattccagtgcaaccgtcaactccaacgcaactactaggtgcagcaaaacagccagtttcaccttcttcagcactgtccaaactatcgactgccatttctccagagaatagtcctcaaactgaagacaatcttcaaaatgaagaccagaacatactggcttttgaatcaccaccaaaaagggctaggcgtaaatccttgaagtttgactgtgacaaaaatctacacgatgaataaaaatgtatggttccatttattccatttattcataaatattatctattgtaatcctttacttcagttacagcaaaaa

SEQ ID NO: 133631 - DNA, 1260 bp, Zea Mays
atgcccccgcctggctcccccatccacgcaacagtcttcgctctgcgtcctcaacccacgctcccctgccctccgcgatgctcgcgccgcatccgcgtccgccgcccacgctccccctgccctccgcgatgctcgcgccacatcctcatcccccacctcccttcgctaccgccccctcgtctgagctccacccccaccgtcgcgggtgctcgacaccagctcggaggcagtggccgccaccgagggccagatcttgccgttctccaatgggccttccaagacaccaaccagactgtgtggctgctgctcctcaagacgcgagtccgcccgccgctctgtcaagtcaagggtcggaaagtgcgcacgtcgtcgttctcccgccggttactccggcccccgcccccgccgcctcccttcgcaccgacactgccacctcctcgtcggaaaccgccgtccccatcgccaccgtgctctccactaaacgacaaaccagctcccagatctagcaccgacaccatcaaaacaaacccattcctctcccagccaccatccctaccgacgagcacacacccgccacggccacctccggttgtaggtccgcctccgccaccacctcctcctccgccaccgccgccgtcggtgggctactgggagagccgtgtccggaagcccgacacgtcgaaagaaacccgttcgtcggcactgtcgccgccaccacaagctagcaacttcaggagcgtccctgcacccaccgatgcgttcccaagccgtccgcccgagagctccaaccaaggcgacaagtcggaggacacgacgccacggtcgaagctgaagccgctgcactgggacaaggtccaagccagctccgaccgcgtcatggtgtgggatcagctcaagtccagctcattccaggtgaacgaggagatgattgagacgctgttcatttgcaacccagccaatgcgccgaccaaggaggccacgaggaggccggtgctgctgacgcccagggccgagaacaaggtgctagatccgaagaaggcgcagaacattgccatcttgctgcgcgcgctgaatgtgaccaaggaagaggtctgcgacgtgctctgtgaaggcatatggaataggtacaacgagttatatctgcagtctcctgttcttcagctgaagatcatacttgctgtggagcctttgatcccttcagagggaccaaggattggagagcatattttcggttacacggaatcgaatgttgctggttag

SEQ ID NO: 133632 - DNA, 1164 bp, Zea Mays
atggccaggtgggcgctccagcgaactctttcaggtggagaattgggaaaccatggagaggttcagtgcatcttcaattacctccagtgcgacccagaagatcattattttcttctaactgagagccctctgactgcccctgagacccgggagtacaccggagagatcatgttcgagacattcaatgtgcccggcctctatattgcagtccaacctatccttgcgctggctgctgggtacactacaaccaagccaccagctgatcaaacaccagatagttctccgcctgcatttaagcatgtgctgcgtcagcctataatagaaaatgggaggctaaagaagaagcattgggtgatagaccatcttgtgcatgaggggtttgaaagcactgctcggcatgttgatataccctacctccctatgctggcattagatatccttgggagtactaaatggagggtgaatagaagagttcatgatgttgttgagactatctggagtcaaggtggaggcattgcagggctggtggacaaggcaaataatcagaggaccctgatgaaatgtagaaatggaagtaccagcataaagaaggcaaagaaaactaaccgtgagctgcatgtgagagatgtgacactaagctcaaactctcgggcggccactaggaaagtctgggttgtgctggttgaagatacacttgctaacaaatatggtggtggcattgaaaagctttctcacgagggcaagctagcttttgtggagaaccaactgtttgatatatttgattcagcagcaaatcctattgatgggaactactggtggacgaatgctgaggatccctttcagtgtttagctgcatgcatggacctttctgatgccttaagaagtccatcaccttaccatgcggtctgtcacctgcttattcatcaggattttcgcatcgcgcctccgcctcccaggattgtcgcaccacacctccgccattttcgccatcgcgccctcgacaccacctcccatggatcctcgtgcgtcacatggaagattggaggaggcaaaggaggtgcggaggtggatgatgtttcgggagttaaggaaggaaaagggatgcaatttaatcaacaattgagaaccaaatctgatgcttatgtgccgattcaacgaggctaa

SEQ ID NO: 133633 - DNA, 556 bp, Zea Mays
gaagaatcaatccgacagcacccctctccctcgcatctacttgctcgcccagcagctgccccaaccctcgcgtccgcatcgattcaaggcagctcaatcttatatattccattccgctcggttggattcatcttcccctcgccctccctcgtcgataaaaccgatgcaccgcaccgcctcgcgaaccctagcggcggcgggatgaggggaagaaggttacaggcacggcgcgtgaagggtcctgtcctgcccagtcccgtctggtccgccgcgatgccgtggcctgagatgtggctgcctcctgcggccgaggaggagggtgaggcagaggacgttgtggggagtactccgttgtgggtgggggatttcaggcgcggtgggggtggaggacgagtggggactggggagtgcgagggggcgagccgcgagccagaaaagagaggcggacgtgacgaagctcaagctcaatacgcgcggctagcggaaatcttgggtccgagctgcaggacacgcgtcagcacgcgattggtcgaagacgcgtcgaacgcggaggagc

SEQ ID NO: 133634 - DNA, 1682 bp, Zea Mays
gtgaatgtgatgctccacctccactaccactctatcgcccatatcgtccgtggtccgtctcgcgccgagcattcgcattggcaaccaaaccaagctgcttgcattgttgcccgtcccttcgttgttcagagatcgaacatccaagtcgttaggaaatggaggcggcggcggcggggagcggcgggagtggtgcggcgaccaagctgcagaaggtgtaccgcagctaccggaccaggcggaggctcgccgactccgccgtcgtcgtcgaggagctctggtggcaagcactggacttcgcaagacttaactacaacactatctccttctttgacgaacccaagcctaaggctgctgcctcacattggaatcgtattggccaaaatgcgttgaaggtgggtcacggtctctccagggagcccaaggctctcaagttggcttttgagcactggatcgaggctattgactcgcgacatcgctccgggcacaacctgcatttctactataatttatggtgccaaagccaagctggtcagcccttcttctattggcttgacgtcggggatggaaaagaagtggaccttcccgagtgtccaagaactttgctgaagaagcaatgcataagatatcttggtcctaaagaacgtgagctctatgaatacattattaacgagggaaaggttatccataagcaatctggagaaccacttgatacaagcaagggtcctaaagatgcttattggatttttgtcatgagcacagcaagaagactttatgctggcaagaaggagaaaggtgtatttcaacactccagctttctgtcaggaggtgcaaccatagcggctgggaagtttactgtaaaagctggagtaatcaagtctatctgggcatatagtggtcactacaaaccaagcacagaggatctcaataatttcatgaaatttctagaagaaaatggagttaatctcaaagaaattgagatgcgaccattcaagaaaggagactaccataatgattcaatgcctaatgaaacacaaaacatcattgttggtaccaatcctccacaattgattctctcttcagacacaaaggaaggcgatgaaggaaaggatgctccaatagaacgagcaaaggtaacatatcatagaaccttatcaggtggtctgcacaaccccaaaggcactgatgtcccccagaaggcaattcttgagaggattaaatccaagagtgagactgaatcttatcagcttggcctcaagttatccctcaaatggagcactggagctgggcccagaattggatgtgtgaaggattatccaacaaagcttagaatgcaagctcttgaaatggtacacttgttaacaggggcatcaacgataccacattcatcgttgctcgcagaagctcaagaatgtcacgacccagataggaggctagaagatcttgtgaaacgtgcacaggccaactaatgcacttgataacatgaaacctatgcagttcggctattggataattgtagtggtaatgttgcattgtcattgtgttgtgtactgaaaaacttatgttgttagcttgttcggttcttttcctttttagtgtggcgaagtccaccaaatatgacaacttatcaatttaggacccaattggaatgcagggtttcttcataatcctgtacttttcttgtg

SEQ ID NO: 133635 - DNA, 1382 bp, Zea Mays
ataactcaccccaaatcaacaacatggtatatggagctagggttcgcaggcgccgccactcgagctccgccttgcgcgtgtgaggaagaaggcggtcacccagccgagcccggagccggagcaggaaaccgtggtggagaagcgcgtggaggaggcggatccatggagcgcagctcggcgggcggccccctggcagctggcgtggcgagctcatccgcgcgtcctcgactcgtccgcgccggtgccggccgccgtccccgtcctgtgcgacggcgagctcgtcggcgtgggctcccgcccctatgcgcaccagctgcgcactcccccctgctcgacccctcagttcctggtggtcgccctcgggcccctccgctggtgtggctgctgggattgctgctacggacgctggtgctgtagctgctcccaaggaagaagagaaggccgagtacctcaaggaccgagcaagtttgctgttgctgctcctgcagctgagaaagggggaagaggaggaagcctctactgctgcgatgtgcgagctcatggaggagctgctggagcatagcctggaggcgtctgctaatcccatgaaggtggtggagtacgtgcagaaggagtcgccgctgatcgccgtggtgctgaaggcacacatgcactgcgaggcctgcgccgaggggatcaggaagaggatcctcaatatgaaaggcgtccagtccgtagaaccagacctcaaggcatcggaggtggctgtcatgtccaaaaaggtccggagagtggaggcggtggtggcggaactggagtgtaggaactctgagctgtttggcgagaagggtgaactggaggagaaattggtggctgccaaggaggtgttggcgaggctgacggcgatgacgagggaacaggaggctagggtgtttgctagaaggagagagtctgatttggtgaaggagaaagaggctgttgctaaggctcttgatgctgagaaggctgaagtagcaaggttgaggttgaaaattgaggagctagagaaatgtagcggtgagaaggatggtgacatcaggaagatgaaaccagcctactttgccaactatgcccacatgggtgaaggaggggtgattgttggaggtatggttccaccagaaatgagggaagtgataaccacagagatagtgagtaatgatgaaagaagtggtggtggagatcaggatgatccaactgtcaatagtcaggaggagataaaggatgatgaagctgtgattgttgggacaatcccgtgttctattggggcagaggtgaataagaagcagggggagcaacgacctatagtgtactatcgaagacgggctaagaagcagggggagcaacctctacctgaacagacataa

SEQ ID NO: 133636 - DNA, 706 bp, Zea Mays
ctgcagccacccgcgcacgcccgagccccatccgtggggacctcctgccgttgccaccgccgccgttctactctgcctcggtggaggagtctcccacgatgcaaaagtcatggtggtgggaagccggtcgtcacagacactgtcgacgaggtgacacccgataaggggccagagactgagattaagggagaggaagagaatgaggccgtcgcgaggcgtggggctccggggtggctgaggcttgacggggttgcggcggacatcctcgccatcgccgcgcccgccgtgctcgcgctcgccgcggaccccatcacggcgctcgtcgacaccgccttcgtcggacatatcggttcggctcagcttgaggctgttggtgcatcgacttccatattcaatttggtatccaagctgtttaatgtgccgctacttaatgtcaccacatcctttgttgctgagcagcaggcaatggatggcaattctaacaccacaagggaaagagatgaatttttgacaccaatagagaaggtaaggcaacaaaagaaggttcttccggctgtatcaacatccttggctctagctactggtattggactgttggaaatggtagctctgattgttggatctgggaccctgataaacatcattggtatacccgtcgattcaccaatgcgagcaccagcagaacagtttctgacactgagggcac

SEQ ID NO: 133637 - DNA, 344 bp, Zea Mays
aatcgaaacaaagcgagagatctcaacgccaccgctgcagagcaaaatcggggagagcgaagagagagattgtgagccgcagcgcctgggatcccctcagcgccgtttctccaccctcggtgagcggccgcggtgcttcactgtggtgcggggaggatatccgaggcttcggtatgaagggtgggacatcggtgctggccagattgcttgccggagtcgctgggttgccgcggatccgccctgcgtcaaggatagcagtccctacggcatcatcaccaaagcgaggttgcgagaaacctggatcttgcattggagaagtacttggaatcgcaagtaaaaggcaa

SEQ ID NO: 133638 - DNA, 510 bp, Zea Mays
ggtgcttcactgtggtgcggggaggatatccgaggcttcggtatgaagggtgggacatcggtgctggccagattgcttgccggagtcgctgggttgccgcggatccgccctgcgtcaaggatagcagtccctacggcatcatcaccagtaagaaacccctccgtgccctcgccttcatctatacgttgtatagcaccgagaaccatggagaattgcccacctatgcatcggggattgttcgtcgatgtcgtggcgccgccgcggagtagtatcgcaccgaggacgcccccaacttcgtcgttgccttcggcaacaccaccactcctttgttcgccgtggtccctgcattgtttttctcggaggtgctctgggtttgcagacgtctgccgccgtggtgctgtgcgtcggcgagacgccaccgtggaccgaccctgccctattccaatcgccgtcgtcgcagggaagtagggctgggaaccgttggatctcagggaactgtgtggattatat

SEQ ID NO: 133639 - DNA, 898 bp, Zea Mays
ttggtgctccaccgatcatagtggcacttgtagccaagggtacatttcgtggattcctggacacgaggacaccattatatgctgtgggtgctggcaacctattaaatgcagtacttgatgcattacttatttttccaattggtctaggagtaagcggtgctgcactggccactgtgacctcggagtacctgacagcattcatcctcctttggaagctgaataatgaagtagatctgttctcatggaatataattgaggatggaggagtcatccgctacctgaaatctggtggtctactaattggcaggacaattgcagtattcttgacactgacactgtctacatctctggctacaagggaagggcctattccaatggtgggctatgagatatgcttgcaattgtggttaacaatttctctactcaatgatgctctagcccttgctggccaggctctacttgctagcgaatatgcaaaagggaactacaagccagcccgcgtggttttatacaaagtcctgcaggttggaggtgtgattggttttctccttgctgcttccttgtttgttgggtttggatctttgtctttgctgtttacagatgatccagcagttttagacgtagcgcactctagagcctggtttgtcactatttctcagccggtgaatgctattgcatttgtggctgatgggctctactatggtgtttctgactttgcctatgctgcatattccacgttttttgtaggagctgtctcatcaatattcctactagtagctgctcctaagtttggtctcgatggcatatgggctggtcttactctgttcatgagtttgcgtgcagttgctggattctagaggtagtaattgatgatccatttgttcttctcccgatttgt

SEQ ID NO: 133640 - DNA, 555 bp, Zea Mays
attgtaatgccgaaattatctaatttcaaagtatatcatccatccaaaaaaatctagcacaagtatttcaacaaaaaacaaatttggactccaataacataaatcctaataatcatgtagcttaggctcatataactttaatcctccatctggtatgtgatgtatcttgacaccatcaagttggtaggcatatttaaggaggcacttggctacaatttatgcttaaaatctgacgaaggaggctactattttctgctatggacttcttcacttagcaatggtctcatcagatgcctgtgtcttagccttcaagctttggacttcatctcgtagtccatctttttcttgcctctcaatttgtaattgagactcaagttgctgcacctttgctgaaacagtcatttaagagcttttgttggtgggggctaggcctacattctgaaggaataaacttgatttaggtagcacttgggaaactacttctattgaagactttacgtggtgtccatcttcaactggtgctgccgccattgattccatatcaacctagcatat

SEQ ID NO: 133641 - DNA, 612 bp, Zea Mays
atggcgtgcaaggtgaaagggatcttcaagggcctcaatgccttctcccagatcttcgcggtgaaggagcacgagatggagatcggttgtccgactgacgtgaagcacgtcgtgcacatcggctgggacagcgcggcgggcggcgcgtctccgagctggatgaacgacatcatggcgtcctcagacttgtcgtccctgggaaacttcgcagcgctcactggtacctcctgggtttctcaaggtgacattttcaaagagttagttgacgatcttgccctgcaaattgctgcttgccctcaagtgcagtacatctctattgatgacgtccctgaggaggttgtgaagaaggagaccgagctggagatgcagagggaggaccttttgacgaagcctaagcaggtccaggctaagattgtcgaagggcatgtaaagaagaggcttggagaactcatgttgttcgaacaaccattcatcaagaatgacaaggtcacaataagtgagtggctaaagcaaactataggtacaactggagagaatatgaaggtcaggagatttgcccgatacaacctaggtgaagggctggagaagaaaagccaggattttgctgcttaa

SEQ ID NO: 133642 - DNA, 275 bp, Zea Mays
ggatggcgggttttgctgagtttgggcctcaaaactcagcggcggcggttccggagggaaccggtggcggcacgtggcatgatcgcggagggtgcgtcaaggcgaagcaactccgtgagaaagacgtggccgtcggatcaattatccaggagttggtccagttcgccctcagtggagtggatagactctatgtaaatagggttagtttaggaaatagaaataaccctctatggtctataaatagaggggtagggctgattatttcagcatctctt

SEQ ID NO: 133643 - DNA, 560 bp, Zea Mays
aattcttgtgtgagcactacagaggatcgaagccactagatgtatcttcgaaaccatacttgtgatgactacttagatggtcttaaatctttcctaactgttgcagaggcagatatgttgaatggacaaaagttatccatgtggtgcccatgtgctgactgtgagaatgaaaagcaatactcaaattcgttgactgtccatgcccacctaatcattcgaggattcatggatgactaaagatgttggaacaaacatggagaagaagatgtcaatgatcgagaccaggcgcaggctgctggtcaatacgatggcgaggaagcactccatgaaacttaggaagcactccatgaatcttatgccggtggtgaggaagcacactttggcaatcaggatctctctgatgataatgtagcagatattgctaccagctatgatgcagtccatctgacagagaatctagaggataaggtgcatgataccttgggctttgaggagtatactgatttggagttgtaatacccaaatttagtggataaaaaaaaatatatagaattatttgg

SEQ ID NO: 133644 - DNA, 427 bp, Zea Mays
ccctaggactatactcaccgagagcctcgcgggtcatacaccgccgagagtacgagagagagaagcaccggccgccaccgtcgccgcccgcctacaccgccgctcgggagccatatggtggctgaggaagttcgccagtacgtgagggacctgtacgcagagccgctggggtttggggacaacagggacgacggaaattgctcatcggagtttcttctctcgctgttgatccgctccgcgcgtggaccgcccaatcccgtctccatcccgacgagcaagtgaccgaggaacccgaagcaacccaagttggagattctgagcaggagctcgcagaaggcaagttgtgtccttgatcaccttctttaacccaataatgtttatgatctcaccaatgcatgcactgttaggttaaattgatgggacctaa

SEQ ID NO: 133645 - DNA, 1144 bp, Zea Mays
acaccaacacataccaagctctctctactctctcaagatgtagctctagtagtagttagtcttggtgggagctctgctaggagtctggagtagtcttcaagagtctgaattatctacatgagcataagaaatatcaacagaaagcaggccctaaaagataccaaacctatagttgactcgaaagcaatgtctttggaaaatgaaagcgcactacagacggtgcacgtaagaagaggtggaagaaaatgtcaatcctatgggagctatcttactggaaagacttagaggtccaccacaacatcgatgtcattcacgtgaaaaagaatgtttgtgggagtttgcttgggacactcatgagtgatagatggaaaaccaaggaccatgcaaaagcacgagctaaccttgaagaattggacataaggcccgagctctatcctgacagtaccagtgcccaaccacctttatccagaatatattgccagaaaaaacccgaatggcaatcatgaacctctacttatttaatgtaatctctcagaaggtccttgatgaaggatcactggatgatcatgaaatgaacatgtgtgagatgatgtgtcttcccgagcttacttctcgctgactttctttgacatatccatcctatatttggttaaggagatcaggtttcttgcaccgatgttcctccaccacatgtatctgtacgagagatttatgagtactctgaatatccaaacaaaagaagacttttgataatcagagtacaaacccctttgttcagttgtgtgctaacaaacttagagagtgatctctacccttttgctcttgtgttttccttcgtggagattacagaagcgaccgcatcatcgccacccaatcagtgctcctgatccattgattctaggttgcgtaggttggttctttgagagtgtgattgggtgaatccttggttcaggctgctatatagacatagtgattggctccttgtgcatgtactcaagttgcactagttgtcgctgcttgcagcaagttattggttcttctttagctagttataaacatcagaatcctatgtctgtattttagcgtacttattgtactcatcaacatcatccatgacatcaactctgataatactttgtttccc

SEQ ID NO: 133646 - DNA, 1368 bp, Zea Mays
atggtgtgctctgctgtcgttagcgaaacagtgagtaagatcgtctcaagcctcctcgctaaggatgatggcaagtccagtgcagcagaaaacatagaaaggctggagatggcacacatcaagatggagtccgcgctgcacatggctgaaaaatggcaggtcactgatgtgccgctgctaaggtggcggagcaagctgaagcgcgccgcagaggagtgtgacggcgctctgcggaggtgcaagcagcgcgccctggaagaggaagagatccggcagtcctcgtttcccaaacggattgctcatgctaccaagtcatttatctcgtctttccccgccgccggcgctagcagagatgagacaagctcaggcagtagcgatgtccggagattcgagaggtttgcagacagttcacatgaattcctcaagttcgtcgaggtcggtggaaccccctggaagtacacgttcttcaaccctctcatcggccatcttcttgcagggaaatctatgaagtaccacgcagttcacatgaattcctcaaggggtttatatcttggcttcatgctgcggctctctgaaagcactgacatactcggcgtcatcatcaggtgcttgcagtcagtcacgccgcggttgaagcctaccgcagaatgtgtcaagagagagctcattcagctgcctacgcaagatttctcctggttgccgtatggtctccataccaaaaatgagtactggaacaacgtccactgcagtttgactcagtggtatcgtccaaaccctctttgttgcaacgagcacaagaacaacaacaacttgatcacctcctctgttattggtagcacatttccggaggaggacaaaactaatctgagttctgcagctcaacatggaggaactggttttcaggattcagattttccgccagtgaaagtaggagttttgatcatacctcacgactctccagaggacatggagcctggagctgagacctatgctctagaggtgattgctgaaaaggagaagggaatggtggtacacaccaatgcatgcctgcaagacctagatgagaagttactacccaaggcgataaattacctgaatcagaatcctgaatcgaaggaataccaaatgtgtttcaagtctagacatggcacggcgcacctttacctggagaagacgagtgcacaaatgcaaaaaggacgtacaagtaaaagcaaaaccacaaagctgcaggctcggaagaaaagggtaattccattcgacagcgtagagatatggaagcaggcctcccgggactatctcaagttatgggttgttcgtgcatcgagcacactacgaagtttattcaggtcttgggctggccatacttag

SEQ ID NO: 133647 - DNA, 76 bp, Zea Mays
ttcagatttaaatttccagatttggtttctttcaaatttcaagttcaaatcttggttttcaaaactcaaattaaat

SEQ ID NO: 133648 - DNA, 309 bp, Zea Mays
cccctcattcccggggcccagccatttcaagtacgaccacatcgctatgctcccgcactcaaatctaaaatagagaagcaagtggatgagatgctgcagtctagcattattgaccttagcaagagtgaattttcttctccggtcattctcgtcaagaaaaaagatggaacctacagattttgtgtggactaccgtcatctaaatgctctgactgcgaagaacaagtttcctgtccccataattgacgagttcttggacgaactccacggagcagcatggttctccactttggacttaagggcagggttc

SEQ ID NO: 133649 - DNA, 80 bp, Zea Mays
agcactgctttagtctgtggaaacatagcctttggcgcaaatgacagaatcgatgtgttctctagactatatttgttatc

SEQ ID NO: 133650 - DNA, 314 bp, Zea Mays
ctgtttggctgtattcagattggtcttgtaatgtctctgttaagtaacaaatcattatttgctgacaaccaccggaaccctttcccaacatttttcttaagatgtctttacctgtctttttcaactgacgaccctttacaaattcaccagacaaaggaactgctggttgaagaataaagtattgcggcttcagtaatgaccatccatccatccctctgtttctgttatctatttttccactcagatgtttcttagttttgattgcttgttgctcttgacagcttttctaccagtccagtttctctcacacgctg

SEQ ID NO: 133651 - DNA, 675 bp, Zea Mays
acaagtccattatgcagtccgcactccgcactctaaccctaggccatcgctcattcgctcctcagtctccacggtccccagtctcacccggtggccgaccaaccccagtccgccgtccaccctcacagccgccagccgccaccctgccagccgccgccagccaccacctaggcacccacggtccacggacgcacatgcacggcacggacaggccacactgctcacccgcgagcggcgcgcgcgagtctctggctctctgcacgtgcgcgaccagaggtccagagcaggcagcaggtagccaggtacaggcgactaaccgagtagccggccaatcggccatccctgcgaccagagcaggcaccgggcagcaggttgtcctcaactccatccatggcgcctgtgttttctttgcttcgctgtgttcctggccgtgtccctatgttgcctgttggctgctgtctgttgaagactttgaacactgaaaactgaagtgcaagtgttgcagacttgcagtttgtttatttgtgtgaagtgtctttgtgggagtgtttttttatccacgtctcatgtatgtgttgttgtcaacagagagttatgtattcataatattgcttgattctgtaacagtaatcaggtttattatgtctaggttttttcttttgttctacctcgtca

SEQ ID NO: 133652 - DNA, 693 bp, Zea Mays
atggggcccacccgtcatactcacacactgcttcttctttcttcttcacgtgaacagcaggaagctggtagggaggggcgcctggatgtaggagatggcggctgtgtgcatgggggtagcaggtactgcggggccgacggctatagacgcggcttggagtcgaggctgagcaagagacagcgccggcgaggggagcccatggccgagcagcgcggggaggaggccggagtcctgggaccagggagcgtgcgtggcatccaagggtggtcggcgccctgcatctggtggagagggagaccgccgtggagagatgccaggggagggagagggagcagggaagccgagcagggggctgctcgccatgggagggagaagggagggggtgggctaccatttatagggagaagctccagagcacggttgccacgtttcctctttgcagcatttcgtcgaacacgtggcgggtgctacagcagcgactttgggcggtcgtttttggctgtttctgtttggaatcggaccttggtcactgtagcaaagttgcttcccgcgcaatgctcttcaaaattgatagaggatgctcagccattaggttcacggtttaggagatatttagcttcgaatttggtgctgtcagagggtaaattttacctaaagaatggatgtcaaaccttgtcaaatggggtcggatga

SEQ ID NO: 133653 - DNA, 887 bp, Zea Mays
gcatcgaaccccgtgagtgttcgccgacgtggcccggcgtcagcgtcgcgtcgatctctctgccgaggacctcgctctccaccaagaggcggtcagcgctgcccgacggcaccgtcgcctctagggcatcgaacaccgtcgagtagtagcccatcgccgcggtcacccgctatggcaggtcatcggagcagtcgtcgctgccggtgctgttggcttccttctcaacgatggtcaccacggcggggttcatggatttaacccacttcaggaatgtaccttgacttcgtccgggagaagcagaaactggcactacaagctgtgcgttggccgttggctcgtcctccccgcctccccggcgacgtcgcgggggcagcaaccgtactaccacggcgcatatgcggagtccgggtccgaccgcttccactatgcgtaccagcgcgctggtagctccacagcatcggcgctgaggctgcgcatgaggggcgcgatgtccaaccgtaacatcacgctgtcagtcagcgcgcacaccaacctccttgccggcaacgaggaagggaacggtgaagtggaaatagtggctggcagcagtgaggaggatgaggcaaaggagtggagacggcgtacatcctccttgtcgggtgccatgcgagggtgaaatgggatctgcaagcctacatgggccctgattgttctttccttcttcttttttcaagtacatcggttcgattcaatctcagtaccaagaaatgaatttgcgaatctgatgagccatcatgtggttttccctacctgtcgtgacatggtctctgcagaatctgacattcctgtttacagtacatgtacttactgatcgactctggttcagatggcttgatatttttaacgct

SEQ ID NO: 133654 - DNA, 2168 bp, Zea Mays
gcatcgaaccccgtgagtgttcgccgacgtggcccggcgtcagcgtcgcgtcgatctctctgccgaggacctcgctctccaccaagaggcggtcagcgctgcccgacggcaccgtcgcctctagggcatcgaacaccgtcgagtagtagcccatcgccgcggtcacccgctatggcaggtcatcggagcagtcgtcgctgccggtgctgttggcttccttctcaacgatggtcaccacggcggggttcatggatttaacccacttcaggaatgtaccttgacttcgtccgggagaagcagaaactggcactacaagctgtgcgttggccgttggctcgtcctccccgcctccccggcgacgtcgcgggggcagcaaccgtactaccacggcgcatatgcggagtccgggtccgaccgcttccactatgcgtaccagcgcgctggtagctccacagcatcggcgctgaggctgcgcatgaggggcgcgatgtccaaccgtaacatcacgctgtcagtcagcgcgcacaccaacctccttgccggcaacgaggaagggaacggtgaagtggaaatagtggctggcagcagtgaggaggatgaggcaaaggagtggagacggcgtacatcctccttgtcgggtgccatgcgagggtgaaatgggatctgcaagcctacatgggccctgattgttctttccttcttcttttttcaagtacatcggttcgattcaatctcagtaccaagaaatgaatttgcgaatctgatgagccatcatgtggttttccctacctgtcgtgacatggtctcgtgaatccttctaagctcctgaccagcattgacgaacagatagcggaaagccagggaggagccgtccaggagagaaatcatggagaagataaacaagtggctgctggcttgcgaggaagagaaatggctggatgagtacaatatggtaggtccaaaatgtgggtttggatacatcgaacactgatttcaaatgtggaagacagataaagaccaggcaaactatattgaatgggagaggataaagccaatcaacatatgagaggtcgccgtcgcaggctgcgcagcaggtgtcgccccagcagcaatataggcggtggtggctgtgcgggcccaggcactggcccaggtgacgcgggcaagccaaagaggtcgggctgcaggctgtagctgccgccgagctgctcctggcgcttctggttccagtcgccaactcatcagatgtactatatagatatagaccgtgaactttgtattgatgattttctttgtggtgatgattacaaaataaatatttctgaactaatgaagatcagttcaataacctgcatgggattagccaattggaacatcaaaagtctgatgccctcgccttgtaccgtcttgagtacaagtcctctagctccaaaagaagcgtcaggtcaaaactgtccagtagtccactgaatgaaatccagcagcaaatgggcaggctgactgcagacagtcctgtggagaacaaacggactgctaggagcaagccaaaggctaaccagaaggataccaatgcaaatattcatccccatgttaacgcccccaatcaagttaatgctccaaatgcttatcaagcaacaccgcaggtgaaccaaatgacacttatgaatgggaacgttgtttatggacctcatctcccacattctgaagacgtcatctatggacctcatcttccacatggatactcagctgaaggaagcagcttcttttggaacacaagtgactatcaatatacataaaagttgctaacaaaaactatcacatttttctcaaagatcagttcaaattaaagtgctcttattctgtgtttaagcgacttatttctgtatattgcggaatgtctgaagcttatgttcactgtttgatctgctgctgctgaataatgttgccagcctagggttcatgtcacttttcatctgcatttttactacaagcatcctagaaatgagatggagtggtgttggaattgatgacacatgtgtgcgatttgaaaaacacctgttttgtgttgtgcttccttgcattctctacaacaatgtaatagattactatgccttttctgtaatactttttatctgaatttttttataatatttatatcttacaacaaa

SEQ ID NO: 133655 - DNA, 577 bp, Zea Mays
acagcgattagagttggtcctgcttcgagctgacgcgggcctggagaccattgagcggatgctcagtggtttcggggaggcgatctcgattgccgaggcatcggtgacggcggacttcattccctttggtcggcgccttcttgtgcgatcggaggctcgggcggaggcgctgcaggccctttcttgcgcctcgtcggagtctgacagtgtggctcgagccgtcctcgaggaggtcgaggacggatgcaggccggcgaccgacgacggccaccatagtcgatggtggatgacttccgcttgctgcctagcggcagcggcgagtttgttgaggcgccgcttttgagcggtggcgcgccttctgaggcgctgcttctccgccttggttttggtggaatgcctgggccccgggccagtggcactagccatgctagggctgacgagacggagctctccggtcttctcggcgaggaagtcgagagagccgaaggtgatcttgcttctgggagcgaaagactcacccccggtgaacgctgaatagccggccatcggagtaaaaaaaagtcgctttggcacgctt

SEQ ID NO: 133656 - DNA, 183 bp, Zea Mays
atgcatgggaccatacactctttgcgaggaggcattttcaacacacatccaatacaaccacaatcctctgaaaacctaagaaacatccgggttcttttctacttcgctttcttctccttccctaactcgaatccatacaaacatattcacacacatatatatgcgacatcgaccaaagcgtaa

SEQ ID NO: 133657 - DNA, 237 bp, Zea Mays
tattttctaagattctagttgttgagataggagggcctctgcgtcgccctcaagggcgactcgggggcgacccgctcgcaccgccgccgccaaccccaaaagcagtacagcccggccgccgccgcctctcctccggctaccggcggtggcagccagcggcggcgccccaaaaagggcctgccccgcaccccttcctctcctccctctctctcccacccacccctccccccccccccc

SEQ ID NO: 133658 - DNA, 1249 bp, Zea Mays
atgccgccaccagctgcacaggcagcaacccgctctaggccactgctcccccgccggtctacatggggctgccccgcaggtcgagagtttcgtgctccctccggtggctccgatgacctggcgtccagaaccggcttacccctggccggatctggccgttgtgttgccggcgccccgtggtggttgctagccgggcccgtacaggccctcggcggccaggcgggcgtggctggggtccgcgtacacccacccccactgtgttgtgctctgcttcgtccaactacagtgcgtccgcgtgtctgctccttcctgtgcagctcaccgccggtggatccggtatgcctgtgcctggatctaacccctacgaagcggacgaggatagccattgccgaaatgcagcggggccctctccggcggtctctgccagctgggtcggggcaggacgcccgatctgttggtgctccgccgaagcccaccattggcggcgccctatcgtggatgtggtggcagtcctgagcagcgaaagctctgtgcccggtgcgcggggggtcctatcaccttcgctcggtctgctccaatgcccattctcggcggtgccatgaccttggcgggactgggctccatggcggtctccttgcagcgaaagctccatgtcagtacgtggaaggtgcccacctttgcaaggcccacgtcatggcttggtcgtcagggttttctttgcaggtctctttgtccctattggcacctctgctccgtcaacgctcttctgtcaacaagggacacatagatcttatgtcgggtcggtgttttccgcctctcctgctctcgtacggcgctggatggtggcatgcggagcccggatgcgctgtcgggtgttgctgccggcttgaagggagatcatcgtctctgggatcggctcacgcttgcgcggtccctcacctagagggccgcacggcagtggagcgacgttgctacgaggggccatgtggatgcgcaatggtcctcatgtgctggcgagtatgttgttctctggtggtgctagtcgtcgatcggctgttgtcgtcctagccgttatagcctgcgtcatgtttgtgtaatccgaccgggctgtgttgggccattggtattgttctccccttttgtaatctccgttctgctttgtgtaatcctacggcccattttgagccattgatctaatgaaatcaggtggggatgctccccccgttgaccgtcaaaaaaaaaaaaaaga

SEQ ID NO: 133659 - DNA, 1831 bp, Zea Mays
gccttctcgtcctcgcggacttgtgacttgtgactccagtcccttccaatcaacaagttgctatagtagtcccttccaaaatccacactggaaccggaacctccatctccaatccaatccaactccagatccgcctccctgctgcatccccatcccgcacgagcaccaccccttgtcctctccgcctctacatctcatcggctggtgcacctcctccctcctctgctcggcccctccctcccttctcgtgctacggcagcgtggatgcacgagactacagctgtggcaaagcggagatccggcgggagtgcagcggccggcgtgcctctacgtggtatggtgacatgaagatgcgaggcgaggcgagcaaggccagctccggctccggctctggctccagcgaggatggtgagcgaaccggccccgtgccttcccccgctcgtcgcgcgccgcccatccgcatcgacgtcgccatgggctccttctccgcatgtcgccgccacgagatctgcccgcgcgtctccttcggcagccgatgcccgacggccgtccgacctccgacgcatcgtcgccggtccggtcctcttcgccccctctccgctgcgtggcgccacccgtcgtcacctccgcccccttcaccgacctctcctgggtcctccacacactgctcgtcaccatcgtcatgcgcgaggcgctcaaggtagttgaatttgatggcaaaatcgactgcttgctaggactggtgattgcggtgtgttggttgaggatgccagagatgagctgaagcttctagcattatgtacaaaaggggattgacatgctatcatttgtatcaattaaaactagagctgttctcttgatataagggttttctccatatttgagatggattgaacactgtatcctttacctgcagcattttttctgtatctcgtgataatttttcagtcactctaatctctctctccatgcagctgataggttttctccatatgttgcttgggaatgcttgattttttttctagctgcataaagctttgtatcatcaaacaattcataaaagaggctgacctgttctagttattggtgtcagatttgactgcagtcccatgattttttgcttcagatgggactggactttggtaatccatttcacaattattttccaatgctgttagtatttcctttccttttgttctcaagtctttctaagaatgtcactcataactagtaatagtatttcttttccttttgttctcaagtctttctaagaatgtcactcataattggtaatagtatttcctttccttttgttcataagtcttctaagaatgtcagtcatagctggtaatggtaatcatggttgtaacctgatttgtagtgagagaccagtaaccatataatgagctatgttcttatgagataaaagctggagacttttttttgacatggttcttccttttagaatgataagaaaataatcttgatgtctatatgcacttattgagaccatgtaaagagaatataatgcaacatttgatatgtttgaaatatctctctgcctatattctaagctagaacaatccatactccatatgcttgaattatcctttcttagatgattgactcagattcgtctttgtacttgtattataaatataaacgaacttcttatttttcttcccttccaggttcagagtttgagataatcaatctgtagtctaaaaattgtatgtgtttgtagttgatgggagcacctctcaggagttaccttagtgctttagatgtaataattgttctgtaactgaataaacatttgcatttgtgatgc

SEQ ID NO: 133660 - DNA, 1794 bp, Zea Mays
gccttctcgtcctcgcggacttgtgacttgtgactccagtcccttccaatcaacaagttgctatagtagtcccttccaaaatccacactggaaccggaacctccatctccaatccaatccaactccagatccgcctccctgctgcatccccatcccgcacgagcaccaccccttgtcctctccgcctctacatctcatcggctggtgcacctcctccctcctctgctcggcccctccctcccttctcgtgctacggcagcgtggatgcacgagactacagctgtggcaaagcggagatccggcgggagtgcagcggccggcgtgcctctacgtggtatggtgacatgaagatgcgaggcgaggcgagcaaggccagctccggctccggctctggctccagcgaggatggtgagcgaaccggccccgtgccttcccccgctcgtcgcgcgccgcccatccgcatcgacgtcgccatgggctccttctccgcatgtcgccgccacgagatctgcccgcgcgtctccttcggcagccgatgcccgacggccgtccgacctccgacgcatcgtcgccggtccggtcctcttcgccccctctccgctgcgtggcgccacccgtcgtcacctccgcccccttcaccgacctctcctgggtcctccacacactgctcgtcaccatcgtcatgcgcgaggcgctcaaggactggtgattgcggtgtgttggttgaggatgccagagatgagctgaagcttctagcattatgtacaaaaggggattgacatgctatcatttgtatcaattaaaactagagctgttctcttgatataagggttttctccatatttgagatggattgaacactgtatcctttacctgcagcattttttctgtatctcgtgataatttttcagtcactctaatctctctctccatgcagctgataggttttctccatatgttgcttgggaatgcttgattttttttctagctgcataaagctttgtatcatcaaacaattcataaaagaggctgacctgttctagttattggtgtcagatttgactgcagtcccatgattttttgcttcagatgggactggactttggtaatccatttcacaattattttccaatgctgttagtatttcctttccttttgttctcaagtctttctaagaatgtcactcataactagtaatagtatttcttttccttttgttctcaagtctttctaagaatgtcactcataattggtaatagtatttcctttccttttgttcataagtcttctaagaatgtcagtcatagctggtaatggtaatcatggttgtaacctgatttgtagtgagagaccagtaaccatataatgagctatgttcttatgagataaaagctggagacttttttttgacatggttcttccttttagaatgataagaaaataatcttgatgtctatatgcacttattgagaccatgtaaagagaatataatgcaacatttgatatgtttgaaatatctctctgcctatattctaagctagaacaatccatactccatatgcttgaattatcctttcttagatgattgactcagattcgtctttgtacttgtattataaatataaacgaacttcttatttttcttcccttccaggttcagagtttgagataatcaatctgtagtctaaaaattgtatgtgtttgtagttgatgggagcacctctcaggagttaccttagtgctttagatgtaataattgttctgtaactgaataaacatttgcatttgtgatgc

SEQ ID NO: 133661 - DNA, 2009 bp, Zea Mays
gccttctcgtcctcgcggacttgtgacttgtgactccagtcccttccaatcaacaagttgctatagtagtcccttccaaaatccacactggaaccggaacctccatctccaatccaatccaactccagatccgcctccctgctgcatccccatcccgcacgagcaccaccccttgtcctctccgcctctacatctcatcggctggtgcacctcctccctcctctgctcggcccctccctcccttctcgtgctacggcagcgtggatgcacgagactacagctgtggcaaagcggagatccggcgggagtgcagcggccggcgtgcctctacgtggtatggtgacatgaagatgcgaggcgaggcgagcaaggccagctccggctccggctctggctccagcgaggatggtgagcgaaccggccccgtgccttcccccgctcgtcgcgcgccgcccatccgcatcgacgtcgccatgggctccttctccgcatgtcgccgccacgagatctgcccgcgcgtctccttcggcagccgatgcccgacggccgtccgacctccgacgcatcgtcgccggtccggtcctcttcgccccctctccgctgcgtggcgccacccgtcgtcacctccgcccccttcaccgacctctcctgggtcctccacacactgctcgtcaccatcgtcatgcgcgaggcgctcaaggtaacaccatcctctccgtccgtccagcatctccctccttgcagatctccctgtttccccttccctaattccatttagtcccgccattatctgatccgtacacaagatgatgttaggtagttgaatttgatggcaaaatcgactgcttgctaggactggtgattgcggtgtgttggttgaggatgccagagatgagctgaagcttctagcattatgtacaaaaggggattgacatgctatcatttgtatcaattaaaactagagctgttctcttgatataagggttttctccatatttgagatggattgaacactgtatcctttacctgcagcattttttctgtatctcgtgataatttttcagtcactctaatctctctctccatgcagctgataggttttctccatatgttgcttgggaatgcttgattttttttctagctgcataaagctttgtatcatcaaacaattcataaaagaggctgacctgttctagttattggtgtcagatttgactgcagtcccatgattttttgcttcagatgggactggactttggtaatccatttcacaattattttccaatgctgttagtatttcctttccttttgttctcaagtctttctaagaatgtcactcataactagtaatagtatttcttttccttttgttctcaagtctttctaagaatgtcactcataattggtaatagtatttcctttccttttgttcataagtcttctaagaatgtcagtcatagctggtaatggtaatcatggttgtaacctgatttgtagtgagagaccagtaaccatataatgagctatgttcttatgagataaaagctggagacttttttttgacatggttcttccttttagaatgataagaaaataatcttgatgtctatatgcacttattgagaccatgtaaagagaatataatgcaacatttgatatgtttgaaatatctctctgcctatattctaagctagaacaatccatactccatatgcttgaattatcctttcttagatgattgactcagattcgtctttgtacttgtattataaatataaacgaacttcttatttttcttcccttccaggttcagagtttgagataatcaatctgtagtctaaaaattgtatgtgtttgtagttgatgggagcacctctcaggagttaccttagtgctttagatgtaataattgttctgtaactgaataaacatttgcatttgtgatgcattttgactatatatgtgagatgtttataaaaacacgtgcaatatatataatattggctttc

SEQ ID NO: 133662 - DNA, 1294 bp, Zea Mays
ctcgtcctcgcggacttgtgacttgtgactccagtcccttccaatcaacaagttgctatagtagtcccttccaaaatccacactggaaccggaacctccatctccaatccaatccaactccagatccgcctccctgctgcatccccatcccgcacgagcaccaccccttgtcctctccgcctctacatctcatcggctggtgcacctcctccctcctctgctcggcccctccctcccttctcgtgctacggcagcgtggatgcacgagactacagctgtggcaaagcggagatccggcgggagtgcagcggccggcgtgcctctacgtggtatggtgacatgaagatgcgaggcgaggcgagcaaggccagctccggctccggctctggctccagcgaggatggtgagcgaaccggccccgtgccttcccccgctcgtcgcgcgccgcccatccgcatcgacgtcgccatgggctccttctccgcatgtcgccgccacgagatctgcccgcgcgtctccttcggcagccgatgcccgacggccgtccgacctccgacgcatcgtcgccggtccggtcctcttcgccccctctccgctgcgtggcgccacccgtcgtcacctccgcccccttcaccgacctctcctgggtcctccacacactgctcgtcaccatcgtcatgcgcgaggcgctcaaggtaacaccatcctctccgtccgtccagcatctccctccttgcagatctccctgtttccccttccctaattccatttagtcccgccattatctgatccgtacacaagatgatgttaggtagttgaatttgatggcaaaatcgactgcttgctaggactggtgattgcggtgtgttggttgaggatgccagagatgagctgaagcttctagcattatgtacaaaagctgataggttttctccatatgttgcttgggaatgcttgattttttttctagctgcataaagctttgtatcatcaaacaattcataaaagaggctgacctgttctagttattggtgtcagatttgactgcagtcccatgattttttgcttcagatgggactggactttggttcagagtttgagataatcaatctgtagtctaaaaattgtatgtgtttgtagttgatgggagcacctctcaggagttaccttagtgctttagatgtaataattgttctgtaactgaataaacatttgcatttgtgatgcattttgactatatatgtgagatgtttataaaaacacgtgcaatatatataatattggctttcctcca

SEQ ID NO: 133663 - DNA, 344 bp, Zea Mays
cacctctcaccccctgtcatccaaaaaccctatcccgcgtccggccaccgccgccgcccgcgcgtggtcgctggccgcgtgcgccgacccaactgacggcgcggcctccctcaccgacgtggatcccctgattacccctctcctccccccaccttcctccgctccaccctccctctcctcgcctccctcgtcgacgtcaaccacacctccctctcctcgcctccctcggctggccgctctactgcaccgccgccactgtcacaaccaccacgcggaggaggacccacgtcgtctaggccgacgtcccgtcgccggagacttggcgcaggcccgtcgactaccac

SEQ ID NO: 133664 - DNA, 542 bp, Zea Mays
ttctaaattttcactaccatattaatacaaatttcccaaaccgtatttatacatattagaagaagtttgtttattcgtacgaataaatatttctagccttgctcaaagtggggaaaatggattttttttccagttcgtacagcgctcgtccagccagttggagcagcgactccgccgccgccgagcgattccgcgcgactgcgccagccgagtttcagagcaccgccgtcgaccttctccacacctccgccgacaagcgctgccgcagcaccgcagcagagcgcctgcgcgcgtactccccgaccgagatccacagcacagccgccgagcttctccacgccgctgccgccaagcgagtccgcgcctaccgctctcgtggtcgtctccggccgagctcctccacgcagtgagcttctccgagccgtcgcagccgagtcccgatggcgtgttctccgtcgaagtcgccccacgtgctgccttcaccacgagcgcgcggacgtatagcggacaaacaggaaaactctagaattagcgttcgtcgg

SEQ ID NO: 133665 - DNA, 618 bp, Zea Mays
ctatgacagctctgctagagaagaatgccaagtttgtgtggtcagataagtgtcaagcaaacttcgaggagtcaaagaagagattgactacagcacccgtgttgattttgcctgatctaagcaagaactctatctattgtgatgcatctcgactgggtatatccgctaggtcttcgttggcaccttccctgacgacgagcacccacatggtgtgacttgaaggtggtgagcgatgcaaacgtcttcttccccaattgagactgtcctggcacacctcggcatgcatggctgcttctccgagatcaccaccaacctggcgagcgtcgacaccgatggtggtgtttagatctcaccgttctgtggccacgccccacaggtgcaagctctgctctgacaacatgtgcaagcgttaggctgatcatttaattgtgcatatgtgggctctttaattgtttgtgactacatatgtgtattgtaggaaaaaaaatccatattttgtacattgttaaatgcctgtcatttctatattatattgtactacataattaatatctgcatttctatttacagccataatgtagaaagtgcattgactgaatattatattcttaacaaaaa

SEQ ID NO: 133666 - DNA, 784 bp, Zea Mays
taccctgctatgcttaaggaagatgaaagtgacatgtaagattactcagtgcacttcatttttgctcttagttgacctgtacatgtctgatgtttatgctgttttgtcttctctactttaagtgcctactagattcaaaaaaatactttaagtgcctactaggtgcaattttaaattagtattttgtagtcaacagatagagcacactgctctgattgtagtcaacaaagatggcattgaagaacccagccagacatactaggattaagtgaatttgccaatatgagatgacccaaatggtttaagtgaatatctctatctcgagttggaggttgctatcagacactacctgtttttaactcttagtttgagcttacatctcaaaccaaactattatcttgcaatctgcatgaagaattgcagtgcttgttgcttcacttcagtttttactctcattttgcacgaaactatgtgttatttattacagatttcactcatttcttttgtttactgtgtagcaaaatatggagataatcaaactgccgactgaatttgatatcactaaaaaagacatggtactgctgagacaccaaacaaagaatgaggttgtaaagggtcaaacaacaatgcttaaatatgcctcgatgattctaggacctggagtagttgcaggactgttggctgattggctttcttaaaatttaagatctgctgctgcttagatgtttgtttagctgttattgttttatttctcttaataattctggtcatgatacaacttcct

SEQ ID NO: 133667 - DNA, 1181 bp, Zea Mays
ctagtttcttctttatcatgaggtactacttggcccaacagtcatggaatttctgggatctttagtcaccaagatacaattcatggtcatgcggttgtttggggacaagcaaccatttgtgggggtggaaaggatatatggcaacacaggttaaagtcgtgttttaaaatggaaatgcatgctacagtcctgggtgtcaatgatgtattgcagcatatcagtgcttgttctctattcctgcagcttggtcgcagaaaactatatagggtggtgatgacttctgttctaaggcccagagatttgctgctgaagagctatacaacattcttgaccaagtcgatgaactattgttgcttcctgaccaaaagctcgggagaccatggtgtgacactgatctaatatgtgaaccgattctgtcttggagactcaatggtggcagcccaagcaaatgtttgttgcaactcaagacatacatagtcagacagtgggatccaggaatttctgggatctttagtcatcgagatacaattcaaggtcatgcggttgcttggggacaagcaacattttgtgagggtggaaatgtaacatccatgaatagcaacatgtccagggctttagctgacaagcgggccacccacccatgggacccaggtggaagaccagatgctgggtataagttccaagagtctctattggcgattggatcacctactggaagcgtagctcgttcgggcaaaagctgttgcagtgcgcgcgcccagaaccagtatcagaagctcagggaccttggagagaagctgcagaagtgcgctcaggatctggatctgaagttttgggaccttgtagctaagctacagcagtgcgcccagaacctgaatcacatgttctgggactttcaagctaagttcttgcagtgcacccaaagcctgccactgtatatccatcagggagcagctgggcaaccaccaatgcggcaatgcctgattcacccgccgcaagatccactgcagaattcagggatgacattgaacaaggaccatcgacgcctgatgatgcaccctcgaatccaccgtcgcctaatgccctcccgaatgctgctggctccaccactggcaatcaacacggatcagctgaggaggcaccgacgcctgatgcaccctcgaattccctggtgcagatga

SEQ ID NO: 133668 - DNA, 1462 bp, Zea Mays
cagcggtagagcctaccgtctgtaaccggaaggtcccgggttcgaaccccagcctctgcatattatgcgggtaaggcttggcgcttaaagatacccttccccagaccccgcacagtgcgggaagcctacggcactgggtacaaatgtagataatttagatttttgttttcaataatagcaggttggaaaatttagatttaaattacgtgggttctttttgtgccttgtgttagtctttcctataacaatgatggaagtgagtacattaaaatcatatatagaagtaccttaagattttatccataatggcagatgtagtgatgtataatgatggtggtactgcaacagattgggaccttcctactaatgagataatcagcttgaggaaaaggataaagaacatagaatatattgtcagtgagacaaataaatcacctctgtcgaaacatagtagcagcagcacaaagaatgaaattgatgacaaggaaagcagcagcaccaagaacagcggcaatgtaaggagcaccaaacagaaggaaattgactacgtatacagaagcattgaaaagaaagttaaagttttcggtcgagacaaggtccatgaagatataaggtgcttcataatggaccggctaccgatgcaccaagctccgactccagtaaaccttattctgtgattggcatatatggaattacaggttctgggaagactactctggcacaatatgtttgtgagtatgagaagggtgaggtttcaatcctatcatgttcatccatgtgggaactacattcagtgccggtgaaatattttgtgatatgctggaccagatcacgcaacagcggccctctgatgccaacggtcctaaaagcctaaaaacagagttaaaagatctaacactacagcaaacgccaaaatatacagctactcttgttgactgtccaaattcaaaatacacagcttataagcaaggctgtatatgtttgctactaactcatacctataggcagctaagaccggtgttatgccaagtgacattgaagtgtacatagctgaccataagggaccagacccttccaaacctgaggagttgtgcagtcaggcttgcacagatcggctgaatatggtcaagaaatggtgaggcgccatgaaaaggactacgaccggagaaaagcaccaatcgatcccatggtggtgtatgctactggaggcagaaagagtcatgggcggtactccatgtttaatggagtgattgactccagagaggttagatctcagaggtcggggtcttcctccgaacgatcaggggctagaactcatcgccaatcagagcatgagttggaggttgcaagggtgcaagaggagataaggcaacgtgatgcattccaaaggcacaacatgagtactttgcctcattcttggcgcagcagcagaccgtgcttcaagaatactcaggacatttga

SEQ ID NO: 133669 - DNA, 1953 bp, Zea Mays
cagcggtagagcctaccgtctgtaaccggaaggtcccgggttcgaaccccagcctctgcatattatgcgggtaaggcttggcgcttaaagatacccttccccagaccccgcacagtgcgggaagcctacggcactgggtacaaatgtagataatttagatttttgttttcaataatagcaggttggaaaatttagatttaaattacgtgggttctttttgtgccttgtgttagtctttcctataacaatgatggaagtgagtacattaaaatcatatatagaagtaccttaagattttatccataatggcagatgtagtgatgtataatgatggtggtactgcaacagattgggaccttcctactaatgagataatcagcttgaggaaaaggataaagaacatagaatatattgtcagtgagacaaataaatcacctctgtcgaaacatagtagcagcagcacaaagaatgaaattgatgacaaggaaagcagcagcaccaagaacagcggcaatgtaaggagcaccaaacagaaggaaattgactacgtatacagaagcattgaaaagaaagttaaagttttcggtcgagacaaggtccatgaagatataaggtgcttcataatggaccggctaccgatgcaccaagctccgactccagtaaaccttattctgtgattggcatatatggaattacaggttctgggaagactactctggcacaatatgtttgtgagtatgagaagggtgaggtttcaatcctatcatgttcatccatgtgggaactacattcagtgccggtgaaatattttgtgatatgctggaccagatcacgcaacagcggccctctgatgccaacggtcctaaaagcctaaaaacagagttaaaagatctaacactacagcaaacgccaaaatatacagctactcttgttgactgtccaaattcaaaatacacagcttataagcaaggctgtatatgtttgctactaactcatacctataggcagctaagaccggtgttatgccaagtgacattgaagtgtacatagctgaccataagggaccagacccttccaaacctgaggagttgtgcagtcaggcttgcacagatcggctggcagaatatggtcaagaaatggtgaggcgccatgaaaaggactacgaccggagaaaagcaccaatcgatcccatggtggtgtatgctactggaggcagaaagagtcatgggcggtactccatgtttaatggagtgattgactccagagaggttagatctcagaggtcggggtcttcctccgaacgatcaggggctagaactcatcgccaatcagagcatgagttggaggttgcaagggtgcaagaggagataaggcaacgtgatgcattccaaaggcacaacatgagtactttgcctcattcttggcgcagcagcagaccgtgcttcaagcaactttccaacagcaggggataaacgtagtccttccacaatttcaacctccaccactgccaccaatatggggatcgggtacccaataccttctgcaagtcaaggatcggcggcacaagggccccagatttaccatactccacctgcatagatactagcacctggagaccagttctgttaagttctcgttatattcctgacaattcttactcatattttcatctcaatgactaatttttcactaattccatatttttctgcatttagacggccgatgctggaactacatttgtaaatgcaatcttcggtccaccctctggaggcagcggccaaaactccaatcatctgagaggtggcttgtcacactcggatttaagggcaaactcgggcgcatctcaaatgtgtgctaggatcaagtctcacacatatgatggctcatggtacagaaatcaatgtcatatctttattaaataatcggagtttttttacaaaataactaaataca

SEQ ID NO: 133670 - DNA, 330 bp, Zea Mays
acttagggatcggcggcacaagggccccagatttaccatactccacctgcatagatactagcacctggagaccagttctacggccgatgctggaactacatttgtaaatgcaatcttcggtccaccctctggaggcagcggccaaaactccaatcatctgagaggtggcttgtcacactcggatttaagggcaaactcgggcgcatctcaaatgtgtgctaggatcaagtctcacacatatgatggctcatggtacagaaatcaatgtcatatctttattaaataatcggagtttttttacaaaataactaaatacaatacaccatatgg

SEQ ID NO: 133671 - DNA, 759 bp, Zea Mays
atggacgtgaactcatgcacgtcttcatcatgttgtggtggtcgtcgtcctcgtctgcagcttccgcttccggcagccgcccgtatattacctccccatccccagctggatactttttgcacacgtggacgtaaagcccgagcacgaacagcgtcacgaggaccatacaccatccgaactgctgtcgtcgtcgccgtcgcagcggaggttgaccccaccatcctcgagggagcaacccttgggaaccacaatccaggtgacgccgatgacgacgcctcacagcccctggaacgcgagggacgcggaccggacgaggctcactgcgaactgaagctccgcgggaagccggccggcgccaaggagcacggtggcgaggcaggtcgcggcggcggcctgcaggaaccagtggagccggccctcgacgccggcgtggtcggtggagtggacgtggaacacgaacagctcctgcgcgaagagcgccgccaggaggagcatgcagagcgtgtcgtggcggtggcggccgtggcggcggtcaagggagatggcggagccggcgtagacgaggagcgaggcgtacatgatggcgtgctcgtggttgggcaggcgttccggcgggatggagccgtcggcgttgaacggcatcggcgagtaggcgagcatctgggtggcgagcccgcagacgccgccggcaagcatgacgatgagctcgaggtcgcggacccgtggcgccgggaaccacgccggcgcgacatacgatga

SEQ ID NO: 133672 - DNA, 814 bp, Zea Mays
cagcaggggcgcgggtcttccgggctggtgctcctggacggcacggggtcgacgggcgcgagcaggacgggcgcggggcgccggtgcagggcgctgggcgcggctcctggagcacgcgcgcgtcgcgcggcgttggtgcgggcgcagccgcggtagcccgaccacagcagcgcagggcgcggccccagcgactcggcgcgagcgaggccgcccggcgtgggcgcgcgtcccccccgatggcagtgcaggctgcactggcgcgcgggcagcgtccctgcaccggcgcagggcttccgcttgtggccggacagcggcggcttgccggaggacaccaggctgcggcccttggacacgctgccctcaccggccgtgaccgaggagaagaaggacgtggaggtgacggaggtgacgccggccgacacggccaggttcggcttggtgaagtccagggtcaggctctggggctacgccgcgccgacgggagccaccacgtgcgccacggggagagcgggggccggagcgggagcggagacgaccggaggaggcaccggtggcggctcgacgacgggcccgcggcggaagcgggcgtggccggtgcggtccaggatggagatgaccttgcggaacctggacacggcctggtcggcgatctcgccgaacggcggctgcggcggcggggctccgcagcctggagctcctcgtgtctcggggcgcagggtgctgctggcaggtggcggcggccagggagagaagggggagggagaaggaaccaggggcggcggctgcgcagggaaggagagagccgccggcggct

SEQ ID NO: 133673 - DNA, 240 bp, Zea Mays
atgccctgtcccgccgctggcaacgagtgccccgtcccggtgcccactaggtatgaccttcttttccctttccctctcttcttgctgtggaatggtggtggtggtggtggtggcggcgtcggcagcggcggcggtggtggcgatggcggtgtggtggcggtggtggtggtggcgacgtggtggtggtggcgacgtggtggtgctggtggtggtggtgatggtggtggtggcggtgagtag

SEQ ID NO: 133674 - DNA, 699 bp, Zea Mays
gcagggcccggagggcgcgtaggcagcgggtttgggcatgatgaccgtctggccgggcggaggaggcgcggccacggcggggctcggctgttggcatggagcggaagatgcgaggagggcgtgccttgtgctcgtcccctgggcctgatccgctgctagcgctgttcccggctgccactggctgctccaccgatggctgctatggtgcgaaggcggacctgaccatcctttcggggtctccgctggtggtggctgcggcgacggactcctgctgctagttgagaggagctgctggttgggaggagcgggaacctgtacgctttcattattgacatcatctccgacgaggtaggggtagagagaagaggacgacgctgctgctcgttactgttggaaagggctgctgcatatggataggagcatcatgaactaatggtgaacatcatttgcaaattttacttgaccaaggatcattctatacaacggaggaagatcacgagaagtaaaagtgttgtctaagatgtacattctttggctgtggagtctgtagactatacatatacacccattgttctggcgaggctgtgtacactgtacatcaaatgaattttacgatacttcttgttgcgttttacgctacaattatctcaaatcacttgttgtattgtacactacattttttgcctcgcatggaaactt

SEQ ID NO: 133675 - DNA, 224 bp, Zea Mays
caggttacctcaactgttacttacaatcttaacaaaattattgatattaattactatcctgttgagacagcaaagagatcaaatatgcgtcacaggccataggcgtccaaggcctggcagatactttcatattactaggcatgccatttgattcagcagaggctcaacagttgaataaagatatttctgaaactatctactatcatgctctgaaagcttctgct

SEQ ID NO: 133676 - DNA, 1146 bp, Zea Mays
cgcgcgggagccagcgagcgggggcagcgcgagatcttcgtcggaatttggttcgcgggcgcggggatgagctgatggcgtccgcgaatagcggcggttgtgcgcgcggtagccacgcgagcgggcggcggttgtttgtgcgcgcgggagccaaggcggttgcgcgcgcgggagccagcgagcgggggcagtctacaagtgagccttaatagttgtagagatttgactatctgcattgtgtaggttccgtttctccctgaaagttttcggtgaacttatcttgttgttagcttagttaacctcaccaggtaatggtaggataagtttacatagtgccaaacactgcgcactcataggtctaaatttgtttaatatataaatgtgcagagttttgaagctttgaaccccaggccggttgctgttgtgatagaccccatccagagtgcaaaggggaaggtggttattgatgcattccgcctcattaatcctcagaccatgatgcttggccaggagccatggcagacaacatcagacgttgggcacctaaataagccatctattcaggctcttatccatgggctgaacagacactactactcaattgcaatcaacaaccgaaaaaatgagcttgaggagaaaatgttgctgaacttgcacaaaaagaaatggaccgatgggctaattttgaagaggtttgacactcactcgaaaaccaacgagcagactgtccaggaaatgctgaacctagccatcaagtacaacaaagcggtgcaagaggaggacgagctgccacctgagaaacttgcgatagcaaatgtgggccggcaagatgcaaaaaaaagcatttggaagagcatgtgtcgaatttgatgccatcaaacatagttcagaccctaggaaccatgctcgacacagttgtcttttagtctgctaatattgttgttccaaactgaaacatagccactctacttaagcttatccaagcatgacacatgcattgagcttcgcgacagatacattttggtcctaaggtttgtttatgaatggatttgtctacatttcattgttgttaaactcctttccttttctatcaaagcttcagtgtgttctaccagtcacatttaagccaatgtgggtccagatgtc

SEQ ID NO: 133677 - DNA, 1777 bp, Zea Mays
cattccccttcaacaacaggtagccaccccctcgcccaccacatcttcaccgcaatccacgattgagtcggacgcactctgccatgacgaaacgggagaggaaggatccaggtcgcatgacaagcttgggatccctgaccaagcagccgaatctatcatgggttccgcccggcatggaccgtagctccgcttgcagaatcgctattcgggttggtgcttattgggagcaacatagatacgagtaccacatttctagagatgttttgctgattcgggacagggatttgatttgttttatggatctggtagctgatttgcgagcagagattgccttagaaactgcgcgaaagctatcactccattattgggacaagattgaagctagatacaaggaggtagattgcgatgcaacattacttcatgccctttccatgtattgggagtttaggagactcaagctagctgctactgtgttggacgagccatgcattgaaagtcaacatagtgcagtaacatatacacaacagaatgagatgccaatttcccttgtttctaatgctaatgagaatgaggtagcagttccttccagctctattcatgtagaaaaagaacaatttgctgctgggacctctgatcaggttgcttctaacctgattcatgctgcgaactcagaaggtgctgctaacttagaaggtgctgctaactcagaaggtgctgctaactcagaaggtgttgctaactcagaggatgttgctaactcagagggaggtaatgcatggggacaatatgatgaagatgagtatgttggcgcagacgatgagaaggcaacctacaaggagctattttctgatatagaagagagtggatcagagtacatccctgactctgatgatgaagaccacgatgattgtgttgtagatgacaatggagatcctctgtttgtcacaacaactgacttagagaaccctaatattgcagtaggtgttagatttgaggatgggcctactttcaaaaaggctattaggcagtgggctatcttacatgaggttgaaattggggctcactatagtgaatcttctaggtatagaggattctgcaaagcaaagaagtgcaattggaggatccatgcatcacaattgcctgatggtaaaacttggcaggtaaagaagatgtcaaagaggcactactgcaggagcagaagcaagatggagaagaattgcatggccaatcagtattgggttagagacaaggtagtgccgatgcttagggaaaatcctaacctaggtgctggagctctggtgaaaaagctacaagagaaatatctcatccaggtttcatattgtgttgcatggaaaggaaaggagctagcacttgatgagctgatgggcaaatgggaagacagctttgaccatatctatgctttcaaggctgcaatagagaaggagtctcctggtagtgtagtggagatacaaacagagaaggttggggaaaagatcagattctgcaaaatgtttgttgcattcaaggcttgtattgatggttttttgcaagggtgcaggccctatttaggcattgactcaactgtgctcacaggtaggtggaaaggccaacttgcttctgcagttgcaatagatggccacaattggatgtttcctgtggcacttgggctgtttgaatctgaaagtaaggatagttggaaatggttcatggagaagttgcagacagctataggatcaccccatggtctagtaatatccacagatgcaggaaaaggcat

SEQ ID NO: 133678 - DNA, 1064 bp, Zea Mays
ctcacaaacatttgtgggccagatgttatttttctacagcaagcaagtgtgactatgtaaccaataatattgctgaaacgtttaactgttggattaaagatgagaagtctttaccaccagtggagctaattgatagaatcaggcaaaagattttggagaagttttttgtgaggaagaaccttgcagataagttgactggcacaattttaccatctgtcatgaaacaacttcatgatgctggcagaggtttggttggttatgtggttcacaagggtcctgatcatacagctgaagtgtctggtgttcataaggatttgactccatggagacacactattgatctggtaaatagggagtgcagctgcaagaaatggcagctaactggtttgccttgcactcatgcattgagcgttataggttgtttcaggaacctgaaattggaagattatgttgactcctactactctgtggaaaaattcaagactgcttatgttgggaagatacctactttgacagataagactgagtgggagcaaccagaggtaggttacaaggtatggcctcccatactaaagagagctgctggtagccaaggacaagaaggttcattggagtagaatgagggtcggggaaaaagaggcacaaatgcaagagatgtggtcagtttggtcaccaaatgaggacatgtaatgaaccagtatatgactcagatgcaccaccaccaactgctccaaagcctaagagggtgagacagaagaaaaagaaggtggtggtggtagaagatgatcctctgtcattgcctgcaccatcaagtccagtgtagaagaaaaagaaccagaggggaaccaagagcaagtagtgttacttatgttactcattatactacgttctgtaatgtgccatgaagtggtactatgttctgttagtcatgtttcttatgtaagacatgtgcaatttgttttctgttgaacatgtgtaatgtgtcctctgttggacatgtgcaatatgtcattgaactacgttctataatatctaagtttcatggagtttcatctacttcgatc

SEQ ID NO: 133679 - DNA, 1392 bp, Zea Mays
caccccggcgttttcggcttgccaacagagcgcctgcactgcgcgctacatccccgaagcaacaacgccgcggtggatctggctccggccatggcaagcgtgaggcgcgggccaccggcatcagtcgggaaggagaaccagcggcccaagaaccttggccacgggaaggcgacgactgcgacgacgaccgccgagctgacgaagcccacggagccggagccagcgcccgtggggtagcgctaacgccacctccaccgccgctgaggctgtcgtcgctatagctccgcatggaggacgaggcggcggctgcgcaggcgcagacgcaggcgccgcccgtgttcgtcgtcaggcccaggagcagggagctgctcccgccgccgtcctccaactacgaggcgtgggatctctccgacagcgagtccgcaccggcctcctcctgggccacgctccccaacaggtacaccgtggcaccacgcagcgttggagcgcaaggtcaagcgagatcgcggcagccggggcgagcggcgtcggcgtcacgagccacgacgggccgagggatgcctgcgcgctatggccggggctattggcggtggccggcgatggattcggggtctagcggtgacccgattcgaggtgacgtcctagggactgccgccaacgctttgatttcttcctttcagcccaacccggcccaaagccgggagatcacggcactccgtccaaccctcgacgccaccgatccccctttccaccgcctctcatcctcgtcgccggtgaagatgattccgcagagccagagcagctccctgcagcaccttcaacacgtcgagaaggtgccctgtgatgaagatagcagataaaggagttgatcttgttagaataaccgtccagggtaggaaggaagttgatgcctgcctctgagatcaagaatactctggttcagaagaagtaaggatgaagagcctcatcagtagaggaagatgcagaaaaataaatgctatagaataacattaaaacacgagccacgggtgaaaccctcagggccctcgcactgatgcagtcagcgcgcactgccacgagttcatgatcgttatgaaggaaattcaaatgattttgtgtgaggaaatcaaaagtgcttgtgaatatcgtccatttgaaaaatgtgattacagcgcaaggattgctaatgagatatgttgcaagaagctggagtatgtaattgagaagttggataccatgcaacagaaccttgaacagagcactgatgatgtttagcgagctggctacatattagtaagtgtacctttttttgcaataaagtgtaaactacttagcgaataagaggatactttatgatgacagtatccactcaatcaagtgattgtgtcaata

SEQ ID NO: 133680 - DNA, 1456 bp, Zea Mays
caccccggcgttttcggcttgccaacagagcgcctgcactgcgcgctacatccccgaagcaacaacgccgcggtggatctggctccggccatggcaagcgtgaggcgcgggccaccggcatcagtcgggaaggagaaccagcggcccaagaaccttggccacgggaaggcgacgactgcgacgacgaccgccgagctgacgaagcccacggagccggagccagcgcccgtggggtagcgctaacgccacctccaccgccgctgaggctgtcgtcgctatagctccgcatggaggacgaggcggcggctgcgcaggcgcagacgcaggcgccgcccgtgttcgtcgtcaggcccaggagcagggagctgctcccgccgccgtcctccaactacgaggcgtgggatctctccgacagcgagtccgcaccggcctcctcctgggccacgctccccaacaggtacaccgtggcaccacgcagcgttggagcgcaaggtcaagcgagatcgcggcagccggggcgagcggcgtcggcgtcacgagccacgacgggccgagggatgcctgcgcgctatggccggggctattggcggtggccggcgatggattcggggtctagcggtgacccgattcgaggtgacgtcctagggactgccgccaacgctttgatttcttcctttcagcccaacccggcccaaagccgggagatcacggcactccgtccaaccctcgacgccaccgatccccctttccaccgcctctcatcctcgtcgccggtgaagatgattccgcagagccagagcagctccctgcagcaccttcaacacgtcgagaaggtgccctgtgatgaagatagcagataaaggagttgatcttgttagaataaccgtccagggtaggaaggaagttgatgcctgcctctgagatcaagaatactctggttcagaagaagatgaagagcctcatcagtagaggaagatgcagaaaaataaatgctatagaataacattaaaacacgagccacgggtgaaaccctcagggccctcgcactgatgcagtcagcgcgcactgccacgagttcatgatcgttatgaaggaaattcaaatgattttgtgtgaggaaatcaaaagtgcttgtgaatatcgtccatttgaaaaatgtgattacagcgcaaggattgctaatgagatatgttgcaagaagctggagtatgtaattgagaagttggataccatgcaacagaaccttgaacagagcactgatgatgtttagcgagctggctacatattagtaagtgtacctttttttgcaataaagtgtaaactacttagcgaataagaggatactttatgatgacagtatccactcaatcaagtgattgtgtcaatactttgccgtagcgttagcatgattttagagcttaggataagaaataaagtttcaaattttttgctctcc

SEQ ID NO: 133681 - DNA, 1918 bp, Zea Mays
caccccggcgttttcggcttgccaacagagcgcctgcactgcgcgctacatccccgaagcaacaacgccgcggtggatctggctccggccatggcaagcgtgaggcgcgggccaccggcatcagtcgggaaggagaaccagcggcccaagaaccttggccacgggaaggcgacgactgcgacgacgaccgccgagctgacgaagcccacggagccggagccagcgcccgtggggtagcgctaacgccacctccaccgccgctgaggctgtcgtcgctatagctccgcatggaggacgaggcggcggctgcgcaggcgcagacgcaggcgccgcccgtgttcgtcgtcaggcccaggagcagggagctgctcccgccgccgtcctccaactacgaggcgtgggatctctccgacagcgagtccgcaccggcctcctcctgggccacgctccccaacaggtacaccgtggcaccacgcagcgttggagcgcaaggtcaagcgagatcgcggcagccggggcgagcggcgtcggcgtcacgagccacgacgggccgagggatgcctgcgcgctatggccggggctattggcggtggccggcgatggattcggggtctagcggtgacccgattcgaggtgacgtcctagggactgccgccaacgctttgatttcttcctttcagcccaacccggcccaaagccgggagatcacggcactccgtccaaccctcgacgccaccgatccccctttccaccgcctctcatcctcgtcgccggtgaagatgattccgcagagccagagcagctccctgcagcaccttcaacacgtcgagaaggtgccctgtgatgaagatagcagataaaggagttgatcttgttagaataaccgtccagggtaggaaggaagttgatgcctgcctctgagatcaagaatactctggttcagaagaagtaaggatgaagagcctcatcagtagaggaagatgcagaaaaataaatgctatagaataacattaaaacacgagccacgggtgaaaccctcagggccctcgcactgatgcagtcagcgcgcactgccacgagttcatgatcgttatgaaggtaaccaacccactgcctgccctcatatcgtcaggctgtgggttcctgttgttaccagttatgcgccacaatcctcactaatcccatgctggagagacttttggaaaatcaacatctgttttagaatgctgtgtgcagaattttgctgtccaatgttactttgtttccatcaaattaactgtaaatatatgtatatgctctcaattggtttttatttgaagcagtatacatgccactaataattcatgataactcactgcttaattatgttttggttggagtaggaaattcaaatgattttgtgtgaggaaatcaaaagtgcttgtgaatatcgtccatttgaaaaatgtgattacagcgcaaggattgctaatgagatatgttgcaagaagctggagtatgtaattgagaagttggataccatgcaacagaaccttgaacagagcactgatgatgtttagcgagctggctacatattagtaagtgtacctttttttgcaataaagtgtaaactacttagcgaataagaggatactttatgatgacagtatccactcaatcaagtgattgtgtcaatactttgccgtagcgttagcatgattttagagcttaggataagaaataaagtttcaaattttttgctctcccttgttatctcaatcacttttgccacgattcttaacgtgtattcacttcattgccttttagatttatggtatcattagcacgggcaccttactagtagttcataatccacagcatcgagaaacaaatcaggtttcacactgcatgatacatggtgagggagtaatgcatgaac

SEQ ID NO: 133682 - DNA, 284 bp, Zea Mays
cttcaaatagtaaaagtttgcaagcactatcggcaaggtgttttggcaaaataggaagcattcctagaccagcaaccacaagtatttgaaacacaatatttcagtcatacccataggtaatgatgccaaaaacaacaaacaaaactactatgcagaaaagtaatatgatacgcagatgtgttagctatagagaacaaagagagcttttcaatgccatgccatatagcagtaaattaggacactacgttcacgttgtgcctgtttcaagaaaaaaaagaaaaaca

SEQ ID NO: 133683 - DNA, 266 bp, Zea Mays
gtgaaccaaagtaagcatgagcataaaattaacttaagagtaaagaatccaccaagcatatacttaaaagtatcatgatcaaaacaaatgggtctttcaaaaaggtaataatgttgcaaccctaataaaaaccctaagtgagccccatgagcaaaattcaagaaaataaggaaaagggtatgaaaaatttaaaatcatggcttgagccaattataaacattgaagtatattcattaagcaacaagaaaggttgagaaagcttggcc

SEQ ID NO: 133684 - DNA, 888 bp, Zea Mays
cacgacacgatcagtgcgcagcgaactgcgcatggcggtgcacccaatccacctgttcccgtgacaagcagcactcaagacacacacgcgcgcgaacacgaacagggacacgagacagcggcggccatggcgagaggcggcggcgatcggagtcgggaggatgaccccttctccgacggcggcaccaccggaaccgactcggacgagtcctctccgcgtggggtgggggcccgcggccccggctccacctccaacccgatcctgacacgcctcgcggtgtcgcggaacccgagcccgctggctgcggccaccgcggccccaggggtctgcctcctccgcttcgcctgggagtccgccgcgggctccctcgtcggcgccgccgttggctacggtaaaggtttggttacgatgaaggggattaaaggctcatttgctgatgctgcgtcatctgctaagatatttgctgttcttgctggtgttcaaagtttagtagcctgctctttgagaaaactacgtggaaaagatgatggaatcaatgcaggagtcgcaggctgttgcactggccttgctctgagctttccaggtgcaccacaaactctgattcagagctgcctgacctttgggactttctcttacatcattgagaagctaaacaagcagcaacctgcgctggcgctcccacctgcgacaggtgtgatggatccgaaggctggacaaagcgttcttcctcccttcacacttcctcctctggatgccatggacgaattttgtagtgttttggtagtgttgatgattctaccttgacatatccaacacaaggcgagcagcttgtcctttgttcaactgattggatcttcggagttttacccacagaccatgccccgtaac

SEQ ID NO: 133685 - DNA, 7705 bp, Zea Mays
ctctgaacatggcaaggaaaactgaacttggtcacttctagcagccaaaatatccactctctttgctcagcaaaacagataggggagggagcagataaggcctccacggagggtatacactatggtccaaggttgatatttcttacagcgtgagaccactaaatttgctgttgtccagctcatcccatcgcaggaccaacagataaagcctcccagctcactcgtccccaaaacagtccacacttgattttcttttcagtagagctgaggagaatctagatccttcactgtgtacctcgtccataattccctttacacacacaagtgagatcagcagggagaggatcttcttcagttactcaaacccaacactgaatcagctttatcaaccatttctgccctattgcacagctctttgtttgatcccctttatctcacaaattcacttagcaacaaactcatcatccttaactaaatttagtcaccaactacagccctaccaacttggtatagcaccccaaggctgcaactataaagaacacaagttatgggcaccaaactagagcccaaaagcactgaaaagtgcagtttcagcttaactgaaacaacccaaaacagtctgtcagagggagtttagatgcattctactccacagtttgcaaggcactaggtccatctcacttaaggaaacttttacctttttatttggtctctaatttcactatatgattctcagcccaaatcttaatagaatggtcacactagcgccacaaactaggtatcaagcactgaaattttggtttcagttgactgttcagtcacaaccactctgacagagaagattgggagatactttactcctaggtttatgtagaaccaagtctaactctctttatgaaacttgttctctgtactatgggctccaactttgctatggaaaatttagtcccaagccacttggattgatcacaaatgagctccaaagttgagccaaacacacaatgtctgtgtgcataaataagactaagtctgaattcagatttagcacattgaatctttgaactactgttactgtctgttccaactggttttagtggcattacccttaatcaaatctgcacaccgaagtatgggcttccactttggtacagcactcatagcccagaattacatggatcatcccttaaggagtatcccaaatctgcttcagactgaaaaatcagcaggactgaatttttatctaagtctgattttccaaactgaacactgcatctttaggctcctttttctacaagttccatatagatttagagcttcaatacttaataaaagttgttctcctatagttaatctacaagtttactatagcaaccttttgccaaaagctcccagattaaaacatacaggggtccagaaataggtagagcaaactgtttttagttgaaccaaaactgtattaaatctgaaatctgcaaattactccaaatttctcttcaaaacttgaaaatctcaacacatgaaaattgttcacttttctaagctccataactttggtatatggacttttagcaaaacatagctagatcttaaaatccacttttgggctagtttagagttgaaattggacttgacctgcttcaagtgtttcatcaatttattgcatcctactaaaaacaaggttaaccttaagctcaaacccaactttggtgtatgtagctcatgtccaaatttccattggtttaaaagtggtgcacttaaacttgattgcaaacagggtttttaatcttccctggctcccaacaacataacacaccatatttgagttgaatttttgacctagtaaaatgcattctagggatatcaagcaagatgatgcggatgcgtatgatgtcatgccaaagttttagttctcgtaacactaggggtgttacactaccagagatggtctgtgatgacatgccctcgctctctgccctctgctttgcgcgcttggttggatgctcacttgattcctactgaccacggggatggtgatcgactgatcgttaacatcacttgattcctctatttttatattgattcctactgaagatggacaatataaaaacctaaaatggaccaattctttctttgagggctacagccctactctggtgtaacttatacttgttctagcacttggccctctgatctggtgaataagttatgcagaagaaaatttatgttttattttatatttaactgtactttgttgcagcttgtaggtactgatcagagggccaggtgctatccacgaacgatagtgtaatgtctaggaacgatagctgatttggaaaacctgcaaagtctattcacaacaggtacactgccttcccaattaaggaaaaactgacactcatatcctattgaatttgctggctatgcatacctgtttagttcacaatgatgtaaccacttactttatgaaatgtgaatacttttattaaaatagttatgatcggcatatccttccttaatcgacatattttttttcttctatgtaccttctattcaggttacgaatactgtaaagataatttagaatttctcatacaaatccttaaccaccgtaaatatatggggaatttctaaaatgtgtttagattcatacatgtacaagtttgtattatgtttttatgcgtatttatgaatctaccttatcatcgattttatattgttatcttacttattcctctttaaaacacacacttgctgttttcaaatttcaagtcactaattgttactattcttcctcaacaaaataccactgtaattaagttgccgatgcagtgatatataatggtcacctattatgaagaaatagtgaatgggagaagggttgagttttggagccggtgcatgcaaatcatataccaggtttatgctataatgttttccttatgaagaattaaatatttgtgtgtttgcacagcgaggtcatattttcatattgattttctgtacctgggactttggagaggggaacacgttccaaaaccggagcgtttcatcactagcaccagtaactatggtctgttggtatcagcagtgagaacaaatatgccaggtatgtgtgtctgtgagtgtgcgtgtaacagaactcagaaacagatcaccaaaactcacctagccatcaggggaaatagctaagtacaatactctgtatgtatgccatgtcaaagtggcaagctgcaaataccaaaggagacttgaactaacacaagcaagtatagcataatatttcagaataataatcattcatcatacatgtatgaatcttgaacgttttttttcaatttttctaatttagcatttgcgaccatttgcccagtgagtgtataatgtaatttaattcaacaaataatcactaatataacatgaaaattaatagttttttgttcggtttctctgtacacattacgccattgttgccccagttcatactattttctatcttctctttaccttctcactatcatatcatccgattgcaattagacaatcaaacctaatcatttaatctatattgtctaaaatacatgttgcaagcatggcatgaagtagtatcacattctatagagttacaggttcaattcatcattgctgaggatatgcatcagtatttatgaactcgacattaatatatatttagcctttattactgtatctgaggtctggtctgtttccatgaaggtctgaacaagtgaacatgaattcgttgggttccttaagtaccctgttttggtcattattttttccttttcgatgaaattgtcggtacaacaggctgtggccaacagttaagcatttgtgtcatcgcgatttatcaggtggaacgtgacaaggatgggtgtggctggattacaacgggattgaagtcgattggcaggagatgatgctactcagcaattgttcccttactgtaactgcttacaaaggtattgatatggtgagatattgttacttttgaatacctcactgtgttacttctgaaagccaagtgaggaggaatctataccttattgtgttcccttttttctttgtattttatttggtttttgcaagttgtgcaattgtggtgtcgcatttttttagttaacggaagaaatcttgcatctaattgtgcatacgtggactctcaattgtccttgatgatccggatggtgtttctgttactatattacaactaaaaaagttaaatcaagtttactccaatttaattctaatctttatatttccatagttatgtgatgtagtgtctatctaactttaagatcttctaatatggtttatcctagactctgaaccatgagatatgtatatgtttttcttaatcgtgtgcaacgtttccttttgtttggccaatgctgaggcccaacactgtgtactatgttgtggatctcgaggggataatatgattatatgtcgttgcaacacacaaacattgcactattaaaatatatgagagaaattaaactcctcccgtgtgtctcatacaaaaaaaatcatctgttataggtcgttgcctcactgattaagtttttgtttcctttatttgcttgagttgatcagtctacagtttgtcctttgcctaatattttggttccacagttgttttgtgcatccaaaagcagtacatcgatttttaggattgctgcatgcatcctaacataaccactgtgaaaagtagtccacttgtttattggtaactggtttgctacttttgattaccctacaaagggataaaattgattatgatgattataagtgtatgggattgtagataatgttgataagaaaagatgagggataccacatacttgttttttagtgttggtcttttccttttgcatgatcatctaactatgttagtcgtctactgctcgtgggagccggcgaggtgcttgctagactcggtggaagtggagtttagttacgatgccgatatcagcctcgtgtccgtcgacctgctcatgccggactaggagttgtactgatggaggatggagattatggtgtaggccgtgacacgcgtgcgcaggagtcggtgtcggtgcttttctttggactgattaattctgagctggacgaccattgacatttgtgatgtgtacgagatgtattgtggcgtctcgttgtataattggtactgggagtatgttttgctatgtccgtatttatatatcatgtgtgctatgaatgttgtataatactagataataagaccaactccagcagcttacccatatccatattcaaactatacaaacaatacaatctacagtgcaaaaggtgtttttgtgaccatatgggtgaactattgtacattgcacctatatgatcactaaaaaacactgttttgcatcgttttatattgtagattgcattatttatagagtgttgtttgaatatgggtatgagtataggtaagctggtggagatgatctaaaggatgatctccttcaataggaatctcttttctaaataataaatgtttttaataggaatctcttattcatttcgatcttgtattattaactttggagttgcctatttcgattaatagtgacaatgagccaaattttggttgttcgaaatggtagacttcgatatttattatgattgttatgttgatgcttgatagcatcactaaataatgacatgtgcgtgcacaagtgccctctgttgcaacgcacgggcatatacctagtattggtcatatgcttcttgttgtattatgtggtgataatacataattagtgtgtgcttccgatgatatgaatcaattggtatctattgtgtttgtcctgtaatagattttcatgtggttctggtgctttaaattggtatcttaatggtgaatagtggtaggttgatattcctgtggtatatccatttaattggtttttaactctgattctgtgcatttgtgtgttatacgcatcacggtttaattattgacacaatgtatcccatgggtgctaaggtgtagttatgcttcgaattagcctaagtatgtgcaatttggcatataaggccaaagttaagattttaatgtaagcacatatttagggggaacattctataaacttagaattcaaaatttgtgctttaaatcttattcttgtgtaagctttaattgtgttgtcatcgatcccaaaaggggggagattgaaagctctcttgtgggttttggtgtttagatgacaacccaattaaaggaccaacaagtgtgctaagtgttgaacaggtgcttaatgcaaagctaacaaggttcaacacaagtgaacggtataatggacatcacaggtaagatggacagactctatgtgtgtaactcagagacaaccgatcaagccaaggatggaggcaagaagagcttcgaggtaccgagtgcacgggagaaggtcaaggagacgaggaacccaaagccaggggtgaagaagaagacttgcaaagtcaaggttgatcgagttaagaagagttatggtgcatcaaggatcactacataaggacatgacttacaaccaatgaggtaacatctacagttatgtggtgtaagtcataaggctcaagatcaagctcgggaagtgaacaagggggttggagctcagatatgttaatctagatcaagtcaagttgacttgatggtttagagtccaacatcgacctcaaacatgccaaattgggtaaaacgatgaaaaaggttaagtatgtaaggtttgagtgttcaaccattttgcatacacctcttactgcaagtttagtgctttggtttgctctctaactctttctgtggagaaagtgtcattctgatctctgcttgaggagaaacataaaagctaggagaagaacaagaaagaggtaagtttctaggactaaatcaattggattatactctaaatgtgtttgtttaagtctcagaaaaatactcccaaaagttgaagtcaaacggagaaagaatggaggaaaaagcacttagtgtgttgttggctggtgcacaggacagtgaatagtaacatgtccggtgcacaggacagtgaatagtaacatgtccggtgcacaggacagtgaatagttactttgtccattgtgcaaggcagtgtcctaagaataatggggcaaaacaacaatggcaagcagagacaagataccccctagatcgaaaagaatggcaatttcacctagacaacatctagatgcgaccagcagagctacacgcgtgaggtgaaccatgttctataaagatggctcaagaagctccacgtcttgctaggcatgttcttagtcaggtacaacatccagacgctagcaacagagctacacgtgtagcgtgaggtgaaccatgttctatagagatggctcaagaagctccacatgtcttgctaggtatgttcctaatgaactcacaccctgcttcagtcgcttcaattttgtttgattcttgtgcatcacattctttaattgcttaacaaaatgttactaaatatgggttacatattgttccattgagaaatactattagcatgtttgatttgaggaataagttagtccatcatcttcccactcactttcttgtctggtttgtgtaatggaacgagttgatctatcactatttcattccttatagactaaaaattagtaataatatgataaatgagttcat

SEQ ID NO: 133686 - DNA, 1653 bp, Zea Mays
gccactacgctacgtacctccgccagcttctttcaaccgccccccgcaggaatagtagcacacctaatccaagaagaagcgcatcgggttcgggtcctccagccgacgtacggtctccgtttatcctgccgccggatcggagcgatgctccacggcgccaggttcctgtgctctgccgtcgcccgcctcgcgcacgcgctcatccgcagcatcctcctcctcatgcccctctgctccccgacgtcgacctcagcgatccccgcgccaacatggcagcagccggcgagggcggcgccctacatgaaggtgcacccggcgggcccgctgatggctctcgacgaccccaaggaccagctgacagcgctgtcgtcgtcggcgcagccagcggtcgtcgtcgttgtcccggcgctcaagcatcagcagcctgccgagagagttgcggagacgaagacggccaaggcggcgaggggaaggccgaccagacttgccataccgccgcccttgccctgcgctcccggggtcgacccgttcggcgcggtggaggcagagttggccaccgaactggaagtgcagggcgagggcttctgcctggcgagcaggagaggggtcaggcacgccatggaggatggctatggggttgtcatcactgatcacggagcctcccaattggcgttctacggtgtttacgacgggcacggtggccgggccgccgtggatttcgttgccgacaagctgggcaagaacgtcgttgccgtgctcgccgccgccgccactgtgacgagccagcaccaacggcccgaggcggcatcgtcgtcaacgacgcagccggccaaaacaagtggtgacgagcaggttgacgcggtcgcggcggcgatcagagcggcctacctgacgacagaccgcgagttcttgacccagggtgtacgcggtggcgcatgcgcggcgacggcgctggtaaaggacggcgagctcttcgtggccaacgtgggcgactgccgcgccgtcctcgggagccacagcggcatcgcgaccgcgctgacgagcgaccacaccgccgcccgcgaggacgagaggcgtcgcatcgagagctcgggagggtacgtgagctgcggcagcagtggcgtgtggcgcgtgcaggactgcctggccgtgtcgcgcgcgttcggcgacgcgtccatgaaggcctgggtcacctgtgagccggaggtctcgcggcgccgcctcaccccggactgccgcttcctcgtcgtcgcgtccgacggcctctggaacaaggtgtcctgccaggaggcagtcgacgtcgtcgtctccgccccgccaggtggagctggagcatcgtcctccgtggaatcgtgcaaggacctggtcgccttggccaggaaaagggggagccgggacgacatcaccgtcatgctcgttgatctgcagcgattcatttgacagtcacaggacgcggaggccaccgttcatcaatgctgccaagcaaaacattcgtacgtgatcaaattaatgttctttttatagtgtatatttttctctttttttttctttcacttttattattggatactctagctagatgatttcccaagagattatattgtacgtagtagtgtagagagggctgccttccgaagagatttgaattcaaac

SEQ ID NO: 133687 - DNA, 612 bp, Zea Mays
gcgtccacactcaatctggtgcacggttctgcctatcgcgccgccgatcccccaccctccttccctctgctccccgccatcaacggcgagagcgacgcattcgacaagatgttccgccgcgaggtccgctgcctcgaggcgtgccgcggccacccctgcctcgtggagctccacgccgcgcaccacgtctcccactcctccccgtcctgcccctccctccgtctctgcgctcggatctgcgctcggcctcctcccttcctccgtctctgcgctcggcgccctcaccgcctctccctccgcctctgctccacctccccagccgcccacaaccacgcgtcctcgcctccccgaccagcctccaccgtgacatggttgccgcctcctctcacctcctcatctcccactcctcctagcgcaaccgacggtgacagggatgaggttgggtgcggtgtggtgccgctcgatgcgctctgctcctcgcccacgctcgcgcaacgcaggaccttccccaaccgcgacgacagatcctcatccacacacccgcgggcgcctccacctccctgggttcccctctgctcctcgtgccccgcagtagagcagccacataattag

SEQ ID NO: 133688 - DNA, 2246 bp, Zea Mays
accactcaccacagtctccagtctccactgcatctaaaaaaaaacgtaaaacccccaccacgccgtagcggagagaagagaagagaggagcgcgcgatcgatgtcgggctccggcgatcgtcgcggcggcggtcctccgggttcccatagtggctgggaaaccatggggaagaagtcgaagaaacccgggcaagccggggggagacagtgggcaccatggagttccacaaatgtgacacctaacacagcaaggccagcatggggtggcagtggttcctcgcacccttctggaaccagctgggctcaagctccagatcatggtgctgctaccagaggcaatcctagaccgccatcacaaacatcgcgccctgttctggctccacctctggcaaatggttggcagtggcaatccaggcctcgcccatctggatctgaagtcaagaaggatgatgctcctccatctggttctgtccctgaggtggagaatgttgatggcaacaatacatcagatgatgatgatgatgatgacgatgatttgagtgatgatatcagtgatgactatgattctgacgcaagtgagaaaagttttgagactcgaaaaacgaacaagtggttcaaagagttctttgaagtattgaatacattgagtttggaacaaattaatgaacaaactcggcaatggcattgcccggcatgcaaaaatggacctggggcgattgactggtacaaagggctgcagcctttagtgagtcatgctagaacaaagggttctacaagggttaaacttcacagggaattggctgcattgctggaagaggagctttctcgcaggggaacttcagtgttaccagcgggtgaacaatttgggaaatggaaaggactgcaagaaagcactgatcgtgagatagtgtggccaccaatggttattgttatgaataccttcttggaaaaagatgaagatgataagtggaagggcatgggaaaccaagagctccttgattattttggagaatatgaagcaagtaaagcacgtcatgcctatggtccctctgggcaccgtggtatgagcgtgttaatatttgaaagctcagctgtgggctacatggaagctgaacgtctgcataaacactttgttaatcaaggtacagacaggaattcatggcacctacgcaaggttcgatttgtgcctggtgggaaaaggcaactatatggtttcttagcaaacaaagaggatatggaggcatttaacaagcattgccatggtaaaagccgtctgaagtatgagatgaggtcttacaatgagatggtggtgattcaaatgaaacagatgagtgaagacaaccaacaactgaattacctgaagaacaagatggttaagacagagcagcgatctaaagcagtagaagaatcattgggtgttgttacccagaagctacgtgagactattgaagaaaatatatttgttaggagtaaagcaaaagagaagcacatggagtacgaggaagagatgaagtcccaggaggaaatttttcatggtctaattgaggatattcacaaggccacagaggataaagaaaagcagtttgagaagttgttgcaggaagagcgctcaaaggccagacgctttgatgttgattctggaactatgaaagatcgtcagctaaggaaggaatatgtgcagaagttcattgattgccaagtcaaggatgtggcagagtttgaagttgagcgagatgagctgatcaaagtccacgaggacaagaagttgaagctcaagaaagaatacatggatctggagctggagctggagaaggagtttgacgcagccctgacgggcctgatggagaagcataagccagataccttcgaggcctccagctcgtaagggggcttcagcggctaagcgctttccttaggccccagctaagcttggagcagtctcgtacatgctcctgcttgcttatccatgaaataatgcctggacagtctgtagatgttgcgaaaacatggtgccccctgtggttgccgcgtgtgtagtaagtatctctcagtcgtagtgtggttgaagcatctgaactcttgagcggtttgcctgtgatggcatatgggtcaaactacaactggagtgtgatatctagtttatatggtccagcgctcttgttgactgcgggtggtggtttgccccggataatttactgattatgtctgctccgatcgtcaaagtgcctctttctgttttttttctt

SEQ ID NO: 133689 - DNA, 488 bp, Zea Mays
ctctaacctgtttattgaaatatgaagccttccaagtccaagtggagtgtctttgaaatacagacatcaagctgtagtagttatgttgcatctaccgagcaggacgccgagcattttaatagctaactatatttttatcttcactataatttcaggtaaaagccgtctgaagtatgagatgaggtcttacaatgagatggtggtgattcaaatgaaacagatgagtgaagacaaccaacaactgaattacctgaagaacaagatggttaagacagagcagcgatctaaagcagtagaagaatcattgggtgttgttacccagaagctacgtgagactattgaagaaaatatatttgttaggagtaaagcaaaagagaagcacatggagtacgaggaagaggtaataaggttacccaagtggttatattttctactaatgaacatgcgtggatcaacaattttcatctgtgccaatgatagagtttgct

SEQ ID NO: 133690 - DNA, 154 bp, Zea Mays
atttttttttttttttttttttttttttttttttttttttttttttttttttttttttttttttttttattttttttttttttttttttttattttttttttttttttttttttttttttttttttttttttttttttttttttttattttttt

SEQ ID NO: 133691 - DNA, 133 bp, Zea Mays
ttttaatacaaataataatgtaaaatctatttttacatgcgcaagtattatgtgcatatttggacgcatgtgtcggtgctgtgtttcaaaaaatactttaaaaaacaaaaaaataaaaataaaaaacacctag

SEQ ID NO: 133692 - DNA, 1129 bp, Zea Mays
ggacgtcctcgcataacctccctacacatatcttcttcacctgacctctcttccttaccctccctcatagcagtcggctgccgtggtccggtgacctccccacgatgcctcccgggaagagatccacacagccctcacggaattccgaagaagaccctcttactgaatacgagaaaatgagggctgtgaatatgatgaagaacaatcaattgtttcaacggctaggccttggacaattaaaaacaatgatcaccgcaacaactacaaacaacaatcaaggcggtcctcaggaatcaggttctttatatgatggtgagaacgttgaggattctggtgaagaggatgttggcatggaattccaagctcgtaagggtgtccctacccacatctccaatgatggtgaacatatgtcaacaaaagtaacaagaggaaataaaagaattatggcacctgtgcaggaacggccagttagagtcactagacaaagagttgctgaagtaaaccaaatgtctacccatagcctaaatgtttctacacaacccagttcaagtgccgccacaaaccatgatttgacccacaaccttattgttcctacacatcctagttccaatactgccacaaaccatgagcccatccaagacatggatactattgcacaacctactttccagatacaggagggtgataaccacactgggaatcaagaaatcataccaaggagaaaaagtatgggcaggcaacttgaatcgttaagcagaggactgggaatcaatattccaatccaaatcactgaagggaacaaaaggccagagccacctattcaagctgctaagtttgcatcagagggtggaatcacattgaggcagcacattccaatatttaaccattggaaggaatacaagaagagagagaatgaacctataataagaaactacattggcaaagttactgctaatttcacggtggacagtgagagcaagacagtggaagatgcatgtctagacatgctaaagagtggacaacgccaaatgaggtatagactgaaacagaagtacttcaatgggatacctgctaatcaagtgaggactacatcacctattccaagcatgtctgacaacgactggagaaa

SEQ ID NO: 133693 - DNA, 1797 bp, Zea Mays
gctatgccatcaccgtctccaccaaaacatcgttgtcgttccaccagtccatcgtccgtcgtgctgttacgatcacatttcaactgcggcatcctctcacaagaattccagagttcttccctccccttccctcaaacgcttcccaacccacgacggaggcacgcgcgttaacatctaccttttgagcgacactccccatgtgcgacatcctctgcctgccgctaagtccccacaccaccgcccccacgccgagcaatccatgcccatcccggctcttcttgattttcgtaactacgcgcctctggctcgctcttctcaattcctgctgcatgtccgtcgtgccgccgttgcgcgggcgcagggccaagcgtcactaaaaggcatcaacagagaagaaggcgaccgtggccgcaaggggtaagcaggtatgacatccacgctcatcctttcttttttctctcagtttgctgctattgttctacgagatccggaatgattatgtctttgaattatcaccatccgcttgcatcccccgtagtttgattcattgttcgttggactgacctgcgatctatttttttccctctttctttcttagtttgctgctattgttctgctagattaggatatgattaggcgttggaataaccaacatacacatgcaacccctcgcagttcagttcgtgttcgtttgatgagcctcagctacctgttgcttggacttcattcttcagattgcacaaatcagcacctaacccgctaatgttcagttacattcaggcgtattttaagctcgacactttgaagcaataccttaaatttcgagtctgcaaattctcaaactaatccagcattcctaactagaagctccctccgcccctagacgaggggaagcaagctacataaggaacagatctggccttcaagtatttatttcaacctcaatcaggccttgaaatttgaatgtgtaaggatctgttgctaaactattttactgctagcaagaccacaaattgtgaattttattcagaacaggtatgttttttcaagtaaacaaaattgttacctatctatttccatagtcatgagataataactttggataccgttaatcaggacgatattggttatattcgcataaacatcatgcacattatcttccatgtatagctcgacatgatgtcccttcatacttatgtatcaatgcaccgttgtacaccaatgcatcattcttttactgttatttacattcttaatcggcttacgtaccacaaaatttcattttttttctctactccatttgtgcatgttcacattccaatttgaatcttggacaacttatttcaataatttcagactttcattcagaacaagtatgtttttcaagtaaataaaattgttacctatcgtcgtaaacatctctgttataaatctcatttgttgatttctgtttttccgcatcatcacctaatgacctactattttggaatcgaaagaaggcgcattgagcattctaatagtctgcaactttcattcagaacaggtatggttttacctctatgtacatgtaaatacgtgctttaaataggtgctcaagtacatacgttcgataccgtgctgtaatatatttcaatttaatttgatacctacgtatttatttgcccttaatatacttaaatttgctttcatacttacatacttatgtgacaaaaaaacaactccatgcatgtacacatgttcatgacataatacaagattatacatgtttattttataattaaaattcttacaacatag

SEQ ID NO: 133694 - DNA, 109 bp, Zea Mays
ggttgtggaatgtggtgatcatgacacaaaataacatatactcagaaataaaagaacatttaactagtaaagattggtttgaggcgaaaattgattaacggaagtagag

SEQ ID NO: 133695 - DNA, 367 bp, Zea Mays
gaattttagctttttcctttttgacataatatgacgtgagtcatgaatacagaataaaaggcatcatgctgctactagtctcattcctcctcaacatgcatatatgcgtgacaatggactctaaattttactctataaaatttaaactataagatttaaggatcggatcagattaggatcggtcatatttctattcatttttgaactaacatttatttagagccttaccattttgtaaagaatcatttggatcacggtccattatcactcctacatacatacaacaaatccaatttcatttcttcttgattaccgcatgatcactgactgtttacagtcgtcaacagctgattcatttcacacagac

SEQ ID NO: 133696 - DNA, 329 bp, Zea Mays
ctctctttttttgtttcttactctttaaaacatggtcactaactattctgaaacatcaacaattcattttgacaccctgcaaattctatccataataggtatgccttccaaaaaaaaagaaacaaacatgtgcaacagcattcatgtcttattgaacttaccaactatgcatacctgtttcttttacatttacgtaaccacttcctctataaacgtcactacttcaattattttttttcgaaagcacagtagaactgcgcatcattttaattagagaagaaaaaaggtccaaaatggaccaaggtacaaagccctaagcaggcttactc

SEQ ID NO: 133697 - DNA, 603 bp, Zea Mays
atcaaatgctctaaccaagttaagtgttcatgacaaaatatctcatgaatgtagcctaagcactccataatgttaccttgctgcccttcacgtccaaaaagaaaaaaaatgtttgcttgctaattgatgccttggcgctggttagaaaagtggaatgtctgtgttaggcattgtccagtttgtcgatttgatttcaatattattaatacattatttattatcaagtttcaggtttgaccctatctatatggatgatgacgtacatgttgccagggacataagagatttaatagttgagcatatgctccatattcttggaatgggtagtttctgaagtccaaagctgaccaaaagaacgtttggagaaccttatgcattcccagccaaatattcatgtcttactattatggttcagtaagtctgattcgtgttgtacgtgtacttgtttcgtagtagctaattgccactaacattttcaaatccatttgtgttgtagttgaaggacatttctagtactttttttttcgaaaaacgcaggagagctgcgcatcattgtattaataagaagaggaaattaaggtccaagaggaccagtacaaaaaa

SEQ ID NO: 133698 - DNA, 106 bp, Zea Mays
ctcttcttttattttatgttttcgaatttagtttaaacttcaaatttctttcatgcgtttggcacatcaaatgtatcaactaataataccaacatgatgcacattc

SEQ ID NO: 133699 - DNA, 637 bp, Zea Mays
attaggacgaaagtgtatacctgcatcataatcggaatactggttgggtcaacaccttcctctggagccggcagcagctcttcctcggagaccataagcgggtagtcgaggccgttcacgtcctcgaggctgcaatctgtgacagcgtccacgaaccacgcaccgtcgtcggtgcactcaacgctcgcctccccggcgtacagtgagccgacgaaacggccggcgaacgggcggtagtccaccagcgcgcgggacagcgccgcgcggatcacctcggccggcctgccggcggcagcagcatcgtagtgggcggcggaggcggcggcgtccttgcggcggaacacgtgcagggatcgcaccgtgtggcgcaggcctggaacgcggtcgatgggcgacaactcgagcgtctcggtcgtcggagttggcgtggacgatggcacgacgaaggattgggatttccttgtcacggtgatgctcgccatggtggcaagctgctatgacatacgtattagctttgctaagtgaggtgacagcagtactggctgtaatgtgtaggtgtaggtgtgggtgtaggtgtggtgcacaagatgtctatttatagacgagatagatgactaaagtaatttttagtgccaaa

SEQ ID NO: 133700 - DNA, 1455 bp, Zea Mays
atggccgacagcaggagaagtgtagtgtacgatgctgaaggcggcgacgatcatgagaggcaagggacggcgtggacggcgacgtcgcacatcgtggcggcggtggtgggctccggcgtgctggcgctggcgtggacggtggcgcagctggggtgggtggtgggtcccctcgtgctggtgggcttctcttgcgtgacctactacacgtcggcgctgctcgcagactgctaccgctacccggaccccgtccacggcgccgtcaaccgcgagtacatcgacgccgtccgatgctacctggaccggaagaacgtggtgctgtgcgggtgcgcccagtacgtgaacctgtggggcactctcgtcggctacaccatcaccgccagcgcaagcatgatcgcgattaagcgcgtcaactgcttccaccgggacggctacggcgccgccggctgcaacccgtcggggagcacgtacatggtggtgttcgggctcttccagctcctgctgtcgcagctgcccagcctccacaacatcgcctggctgtccgtggtggccgtggccacctccctgggctactccttcatcagcctgggcctgtgctccgccaagtgggcctcgcacggcggccacgtgcgcggcacgctggcgggcgccgccgccgtggccggccgggccgacgacgacaagcaggcggccttcaacgtgctcctcgcgctcggcaacatcgccttctcctacaccttcgccgacgtgctcatcgagatccaggacacgctgcgctcgccgcccgccgaaaaccgcaccatgaagcgggcctccgcctacggcctcgccatcaccaccgtcttctacctcgcgctcggctgcaccggctacgccgccttcggcgaccacgcgccggggaacatcctcacgggcttcgccttctacgagcccttctggctcgtcgacgccgccaacgtctgcgtcgtcctgcacctcgtcggcgcctaccaggtcttcgcgcagcccatcttcgcgaggctcgagtcctgcgtcgcctgccgctggcccgacgccaagctcatcaacgccacctactacgtgcgcgtgccgccatgcctcctcctcctccgcacgtcgtcgtcctcgtcgccgccgcccaccctcgccgtcgcgccgctcaagctcgtcctgcgcaccatcgtcatcatgttcacaacgctcgtcgccatgctggtgcccttcttcaacgccgtgctgggcctcatcggcgcgctcggcttctggccgctctccgtctacttccccgtcagcatgcacatggcaaggctcaacatccgacgcggagagatccgctggtggatgctgcaggccatgagcttcgtctgcctcctcatctccgtcgcagccagcatcggatccgtgcacgacatcgtgcacaacctcaaggccgccgcgccattcaacactgcaaactga

SEQ ID NO: 133701 - DNA, 1475 bp, Zea Mays
aggaaccatccatatatacatgctccggtgagctttgctcgacgacagtcatcatgcatggcgcgcggcgagtgaagtgaatcggagcagtttgggtgccgatttactcaacctgttcttgacggaaccaagccaagatctcgatcgacctggtccactccagtccagaccagaaatggaggtacagatggcagcacaaggccctaaatcgatgggacgacgacgcagcagcacgccgtgtgactctcagcacggcggcggtgccgacaccaagcccgtccccggctacctcaggccgtcggccggctcctgccaccacgtctgcaagtacggcggcacgcacaccttcgaggaccacaacaggccccagcctaggccgcctcggaagcagcagcagccggcggcggagagccacagccacaacagggtgctcgtcaaggtgcggtcggtgttccggaggccttccaaggcggccgccgacaagtccagtggggtcgagagcgtggagtggaaggacattgtggcctatgatacggttccacttccaccccatggatcgtcctccccgaagcatgatggaacctcagctcagttcaccggcggctccaagaagaaggatgtaatgaaggggaagaggtcgcatggcaaggccaagacccatgaacaagtggaagggcagaaacctagggcggctgctttgctcgtggaaaacatgggtaccaattatcaggaaatgcttcaagggtaccaaattctgcccccttctctgctgcagagtcgcgcaagccttttgcgcgacctcgagaaggagatgatggttcaccacgacgctgccgatgccggggaaggaagagcaacgccaacgtactctccggacccagaacagtgcgctgctgccgctgaatcaagcaggcccatccctgcgcaccggagggtgcagagcatgagcatcagcagcaggtccgcgcggcacccgttcgcgcgacaagcgagcaggaactcgggcgccttcaagctgcggtccaggagcaccagagcgcccgcagtgcttccaccgcccgacgaggagaagcccgcgaggctgaggtccaggaggggcggcgagaatccttcggtgaccaccgaaagaggcatccatctcaggatccgaagcctccggaagcgaggcgtcggtgcttccgccgccggcactgctggtttcgtcgtgccggcggtggcgctcaggcaccagaagacgctggagaagaacaagagccagaggctgtacaacaacctcatcgaggagacggcgaccaggctcgtcaagacgaggaagagcagggtgaaggccctggtcggggccttcgagaccgtcatctccaagatcgcaaagtaggaatcagcaagcgtattttggttgctctctcagtgagtgagtgcttcctgtcaaaactgtttgcaccgtttatctatcaaaatggcccatcctatttcat

SEQ ID NO: 133702 - DNA, 205 bp, Zea Mays
gtttttttttttttttcttttttttttttttttttcttctagttttttttttttttattttttgttctagtgatggttatttttttgttgtgtttattttattttttttctattttggtttaattttatgtttctttttgggatttatttctatttttaggttgttgttttttttgttttgttttttattatttttttttttttt

SEQ ID NO: 133703 - DNA, 1027 bp, Zea Mays
gttggaaactttctggaaggctgcatcaatgattgggattttggcaaagacagccttgtgccgttcttcctgattagaacaattcaggaagtagtcgttcgagtccagcacatcaatacgcttatggataaaattgaagcaatatacaaaatagtgagcaccatctttgatagggacaaaaacctggtgcaaggaaggagtagaaaactaattactaaaaatggaaaacatatatgaaaaaaaagttgcaagaaaaaagtatagacagttgcaaagtatgtgtcctggtgattgcaactgtaaatgatggaaagtaaaaaattgtaggtatgaaaaaagtgggttggggaaaaggtctgctaaccaattttgctcttgacaaatcatagttttcgcactcagacatcagattattccatacatatatgaattcttccgtctcagatttatcagcgttgagtactgcttcacacgttgatacattgaactgtatgtgttttccagtttggagaataaataaaaaagagaaatgataaatgattaaattagtttaaacacataaatgcaagacagtatacaaaaaatacatggttttggagaagaaacttacataaaaaccagtggtcagaaacactctgtatccacaagaatcaaccttgtgcacaatatcatcatgtcgcatgcagtgcacgaaaaagtctatgattcctgactcaccaagggtgtcattagaaaaagatgttaaaatttcctcgctagttagtccaacaagaagtccaaactccaacaaaattctcctgcatcatcaaaaaaaaaagaaaaaaacatatggattagtgagaagaacagtagaatgtgcaactgctggtgtgctgtaattgcaactgttggtctagtgtgatttcaaagtactgaataactctgggaaattctgttacacaaatatgattgcaaactactggtgtagtaaaattgcaactagtgtgttgtaattgcatgtactatataactctgtgaaattcttttt

SEQ ID NO: 133704 - DNA, 1001 bp, Zea Mays
ccatttccagctccaccatggcaccaaccatccccgccgacgccatcaccatctcctcctctttatccgaacaacccgttagcaacaccctcgtcatcgtgtcctcctctggatccgatcaacctgttagcaacaccctcgtcgacctgtcctcggcgaccttctcctctcgctccgtcgccatcctcccagacccatgcgccagccgtggcggcggcgaccaggccagggacgcgccgcggaaccggcgcccacactcgacggcgccatccgtcgtgcccgtcctttcgtcgaccgtcgtcacggctgcttcattcgccgacggcagcggagccgaggccacgagccggcggaggccgacggcggctgcgcggcagcagtgcccgtcaccgcgctctgttttgtccgtccgcgcaccaggcggcgtcgccccagccccagcccctccctccagcggcggcggcgatgacgaggccacgagccggcccaagaggaaggcgcggtaccgaaagtggggcatcgacgacgagcgcaaggtcctcgctaccctagccgagctccgcagggacaacatgggcgtgctcccccagatctccgtgcttctcaagaagctctgcgcgaacggcggcctcgtccgccgcggcgtggatgccatcgagctttctgataaggtgtacaagctcaagaaaaagtacgtgaaggccgctgccaagttcgctgccagcggcggcaggcgcattcgcaaataccgcaaccaggagctctacgagatatccatggaggtgtggccggagctgatgagaggcgaaaaccaagacgtcagggtcggccactgatcatcgtctacgttcacgacgtgtcgtccacttcaaaatgaccagcagtccagtggctattgtatgaatctacctagctagacatgctgttcctgatgtgcatgtatgaactaccagtctagctagctagtactgtcttttggatatgaacgaagaatcttttgc

SEQ ID NO: 133705 - DNA, 3025 bp, Zea Mays
gtattttggcggcaacatcagggagtttcccgcgaaaaataattgtggctgtccttgccttggccgcttggcttccatctatctattcctccattttcactgcgttcggacccacattcgttcacttcccaatactggagtggatggtagaaaggagagagagaccacactatgtcgatcgcttggcttccatctacaaatcccgccgccggcccgctggcgatcgctgaggcggtccccatctcgatctcccttgtccagttcttttcgccggagtgcactatgtcggcactgccgccggcagaggaattggatgcgtcgcatcagaagaagcggcggaggaggaaaaagcacagggagcaggtggaggctatagcggcatcctcggagcctcctccacctccggcaagcccggagtccaagcccaagtcaacaattccagtcgctcccgaaaccctaacctcagcggcggtgagggagtctccccgacctctgggaaacccggaatctaagtccgagtcgccgctactagtcgctcccgaaaccctagcctcggcggtgatggcagcggcggcagtgaggctggttaaggagcgcgagaggaagaatcaggtggtgccaccggcatctccgttaatggaggagcccgtgtggaaggaggaaaagcagcgtaagaaaaggaaacacgtgggcgccgcactggtggttccatcgccgccgactcctgatgcggcccaaaacttgcggatggaagccaagatgatggctgagggggcgacggtgaggaagaagcagaggcggctgaaggcggggcaggagcaatccggcgagccaccattttcaattgatgtccatccacaaggaggggaagaagctactgctgctgctggtggcgtcatgggcagtcagtgtgtcaagaggatcgaccgcagcaagaattccaaggttttgaagaagcagcagacactgccccaaggctttttccctcccatagccaatcccgatttcattgatcaggaccccaattattgttctccttttggtgcattttttgcccaattcgcctacaaacctgagcgccggcaagatgggaatggttcgccacttcctagtaccactggtcgcacagcgaggctgcctcctcgaggccacccgttatctgggtcttctctgcttactgcaaaagaggtctccaaggctgcccggacaacaaccttgaacaccaagcaaccatgcccagcctcagaatcaacctcagattcacaagaagaggcaaggatcgaagggaaagaaaagcctgagaagaagatgacaagggagatggcagcgagggagtctccccgacatttggcaatactggaatccatgtctgcttcctcagtcccagtcgctcccgaaaccctaacctcggcgatgacagcagcgacagtgatgcaggataaggagcgcaagagggagaatcaggaggcgctgccggcagctccattaattgaggaccctgtgccgaaggtagaaaagaggcacaagaaaaggaaggatagggaggctgcaatgattataccatcggtgcccactgctgctgtggcacaaatcacgcagatggaaaagaaggtgatgacagagggtgcgacggtaaggaagaaacataggcggcggaaggtggagcaggagcaatctggcgaaacaccatttctcaatgatgtctattcaagggcaggggaagaagctgctgctggtggcgtcatgggcagacagtgtgtcaagaggatcaaccgcagcaagaattccaaggttttgaagaagcagcagacactgccccaaggctttttccctcccatagctaatcccgatttcattgatcaggaccccaattattgttcaccttttggtgcattttttgcccaattcgcctacaaacctgagcgccggcaagatgggaatggttcgccacttcctagtaccactggtcgcacagcgaggctgcctcctcgaggccacccgtcatctgggtcttctctgcttactgcaaaagaggtctccaaggctgcccggacaacaaccttgaacaccaagcaagcatgcccagcctcagcatcaatctcaagttcacaagaaggtgtaagggtcaagggaaagaaaaaacctgaggagaaaacgacaatggagaaaaagccgaggaaaccaccgatattacttagtcctgccgagaagtggtcagataaataccgccgcctgccgctggatcagctggtgcccccaccacgctccccccataagctattgcaggagaagtatgcttctgacccctggaaggtcatcgtaatatgcatgctcctcaacttaacacagggaaaacaggtcaggaagaaagtgaagggcttcttcaagcgctatcctgatgctcagactgcatatacagctgatcccgaaaagatggcagagtatctagcacctcttggactgcagcgtgtgaaaacaaacagaattcagaaattctctaaggcttacgttggagaagaatggacctatatcactgagctttgtggtgttggcaagtatgctgctgatgcttacgcaatcttctgtgctggaagggcaaacgaagtggttccaaaagatcacaagttagtagattactggaattatgtctgttttgagttaccctcgattcagaaatcgcaggaggctggagtgacggagctgggaaaccttgtcgctaaggtgcaggaagttgctgtcagctgttgacatgggaaaacagtaacgcggtggcaagcgcttttggtgtttctgcttgcagcttaataatgttattcgctccgttctttttttatctgtcatgttttagttcaaaaatattcgaggactgaggtagtataatatatggggtatttatctagttattggggtagcctatgtttcaatgctggttttgagacaaaaattgaaggtaactagccaaaaggaagaaagaaaagtgctgattttgtgtgcatcctgcatgcccaagaatcctatctttaaa

SEQ ID NO: 133706 - DNA, 105 bp, Zea Mays
ctcatggggctcacttagggttttcattagggttgcacattcttacctttttagaagactcaattgtttgatcatgatacttttaagtatatgcttggtgaattc

SEQ ID NO: 133707 - DNA, 492 bp, Zea Mays
atggcgtctcctgtcgacgcgcagctcatgcaggcgctggaacaacagacccgcgccattctcgctgagctcgacaaacggttcacggcgatcgactccaagtgggaactccacgtcggcgcactggagtcccaggcggcggacttcgctcgccactccgacgagtttgcttccgccatccgcgcggacgtcgaagctcacctttcggcggccgatgcggatctcaccgatcgggtccgctactgggaggccactaccggagcgcgcgtcacctccctcgagtccgccctgcacgggttcgaggcttggcgcccctggatggaatcctcagtcgaagccctccaaaccaccatggattcagttcgcgccgagctgtccaaagtggagatccggtggtcacagggggcgcgcgtcgagggcttctccaagaccggcatcctcggcgtgcctctttgtttggaagatttcatgttccaagttctgagaacataa

SEQ ID NO: 133708 - DNA, 230 bp, Zea Mays
ttgattctgcccagcatcgtctacatttcttgctgggtatgtcttgccgcatctcattttggtccaagctgcaccatgatccagcacagcagtatgtatggctcgaactgttctgggtctcataagactaccgcaccctgtaaatatagtagtgggtctatattttggtgaaatgtctgcaaaaaaggttatctagatgttgcagatgtcctgtcaaactgatgacatta

SEQ ID NO: 133709 - DNA, 101 bp, Zea Mays
ggattactatattctgttgtcaatcaaaaccaatacaagcaatcttaggagcagatctaaactggaattctcaaataaaggtgccaagagactcaggtttc

SEQ ID NO: 133710 - DNA, 391 bp, Zea Mays
gcgcagccccatccgtgacaccgtcgaaaaccgtgctagtggtcgacgccgcgcttcgcgccttgcccgttcgacgaaatgccaagccatgtggacaacccatgcatctagtcccgactcgttcaggttgattgatttatagtttataatacatatgctttggttgatgtcggacaatgcatgtatatatgtggatgtgtgtaatatgtttcggcaatacacgttagtaggatcgcatttgcggttaaagaataagcgggtgttgaggtgtgcgatttgtagtttgtctaattacgttttgggtcgatgtggtgtatagtggtgtttgattagatgtgggcataaaatgtttggattatatgccgtggcaaggtcgcattcacgttttggt

SEQ ID NO: 133711 - DNA, 473 bp, Zea Mays
ttctctccggttccagagatttatacgcactatataaaaaacatcgtcctacataggtaccttgctgcgcctctcgatctctagctgtagcccgtagctagccctcctggcgaatcggccgatcagccggtcgggaacgatgaagaaagatgatgacctcgagtcggcgctgctggccgccaaagagccggcgccggcgcccgccaagggctacgcgtacgcgctcatctgcgcgctcctagctggcttccctcacctctatcatctacggctacaaccgcggggtgatgagcggggcgcagaagttcgtgcaagccgacctcggcgtcacggacacgcagctggaggtgctcatcggcgccaccagcgtctactccctcgtcggctcgctggcggcgggctgagcgtgcgaccacgcgggccggcgctgcaccatcgcgctgtcggcggccttgttcctcgccggctcagcc

SEQ ID NO: 133712 - DNA, 771 bp, Zea Mays
atgccaacatcgcgagaggaaggacaagcagaacccgacgagcaccaccccaccatcctacaccgtggcgggggtggcgacgccgccggcggcagcggcggcaggcccaggcaggtgtgggttcctggccccgtcatcgtgggcgccgggccgtcggggctggccacggcggcgtgcctcaaggcgcgcggcgtgccgtcgctgatgctggagaaggactcgtgcgtggccgcgtcgtggcgccaccgcacgtatgagcggctccggctgcacctgccgcggtgcttctgcgagctcccgctcgcgccgttccctcccggcacgccgccgtaccctacccgggaccagttcatcgcctacctcgacgactacgcccgcgtcttcggcattcagcctcacctcaacgcgcgcgtccacagggctgcctacgacgcggccatcggtttctggagggtgaccgtcaaggaggacagcggcggcgatggtgccacggcggccaacaccgagttcttgtcacggtggctcgtagtggccaccggcgagaatgcggagccggcgtggccggagggcgtggaggggatggacacgtaccgcggcgtggccatgcacacgagcagctacaagaagggggacgaattcaggggcaagaatgtgctcgtggtcggctgtgggcaactccggcatggaggtcagcctcgacctctgcaacaatggcgccaaagcctccatggttgtcagggacaaggtgagtgcccgctccacgttcgttaa

SEQ ID NO: 133713 - DNA, 210 bp, Zea Mays
tcacgtgttgccgagggagatactaggcgtctccacgttcgggctctccgtgttccttctcaggtggtcccggcaatccagcggttcacagagaacggggtggaattcgtagatggccaccaagaggacttcgatgccgtcatcttcgcaaccgggtacaagagcaacgtgccttcatggctcaaggcttcaaagtgtacaagccaataa

SEQ ID NO: 133714 - DNA, 741 bp, Zea Mays
accggcatgctcttgctgtgccatcttctcctcttgctcctcttcacgggcggcgtgctcgtcctgtggcagtgaggtgttgctctgctcttgctctgccatcaccgtgtcatggtcctcgtcttcttggatcccgcagcacgcttctccgggcgctcttcctcctgctgcggcgtcggggagctcttcttgcccggcttcagcgtcgcgggcatcttgttgtcgccggcgtcaacgatgttgtcgggtagcgggtcgctcgccggtgacaaatcacccgagtcccccgcctcatattccttctccgacgccggagagggtttcttgacccgcttggaggtcgtcgtcttggtcttcatagcaacccaaccgcgcggcttgctcctctgcggagaggcctcgccggatctctcggcctcagcatcctccggcgacggcggcgagggttgctcggctcgcttcagcgcgtcggacttgctgctctcctcctcctcctcgtcggaaccttcgttgcccccattgaggcccaactccttggaatcttcggttcttggctgccgggcgcggcgcttggcggccatggaagcccgatcgatggtggagggaagggatttgcgattttttcagacaattccttggaagccattataaaagatctgaattgcagacgaactactcaaaaagttgtcacggcttcggtgtcattagaaaataattttttattcttattcttaaatacaa

SEQ ID NO: 133715 - DNA, 884 bp, Zea Mays
ctagccgccatttcttctctccctggcttctcccccacgcgcagcaggcaaagcgcagggagcaaggccagccatggcgcggcaccctccctgcttctcctggcgagcggctgggacagggggccttcttccccaacgccacccctgctccatccaacgcgcggcatctcctctggtccgagctcgagcagcgagctcgccggcatccatggcgtggcacctctgcaccttcacctccagcagccatggcgctcttccctgttctccagcgcccttcctccctccctttttctgtccatggcgagcaggagcttttccctcccatggcgagcagctttcctgcccatggcgcgacgccgctgctctctttttttttccatctcgctgtgctctcttggctgccagcagccatggcgtggactcctttttttttcctggcgcagcagcaagctcccccatggcaggcgcccaggcaagcttccccaatggcgccagcagcagggatctcttccccctccccatggcgcccagaaaattccagccggctcccccttcttcttcctccagccagcagctcgtccacctctctcccatggcatttccccctgcgagcagcgctttctccattgtcttcaacctccggtcgctcccatctcgctgcagcaccctgtccatttttttttcacccagccgattccctctactgtccaaggcgcgggcgctatttttcccatggccgagcaggccccttgcagcgagcttctccttttcccagcgctgcgcagctcctccatggtgaaacgccgttgttcctgcagccccgacacctccccttgcttcctcgctgccagcgctgcgcgcgtgccacgtgctcggcaaactgt

SEQ ID NO: 133716 - DNA, 1379 bp, Zea Mays
ctaatcataaaaatcgaagacgtttgattcccgcaccacgagtccacggcacaaggaaatgaaacaatccacgcggaacgccgccgccgccattcccatggttttccatgctcggttgcgagccagcaattccatttcagtgtcctccctcgtctcgagaccttgccccatccagcccaacgctccgtccatcaactgaatagcttggcggtgtaaccctgtcgtgtgcgatgagctcctcgccgttgatcaccgccgcggcgtcggctgccgtggtggcgctggctgtcgccaaccgcgtgctctacaagctcgcgcttgtgcctctcaaggcgtaccctttcttcctcgcccagctcaccaccttcgggtacgttgccgtgtacttctcgatgctctacacgaggtaccgcactgggttggtgactagagacatgctggcgctccccaagcaccggttcgtcgctatcggtttgctggaggcacttggagtctttgctggcatgtctgctggagctatgctaccagggcctgcgattcctatactgtcccagtcattcttggtctggcagcttatcttctctgccctgcttttagggaggacatattcggccagacaagtcattggttgcttcctagtagtttctggtgtgattcttgctgttgcaagtggagcggatgatggccagcttctttcagatgtaaagttaatttggccagcactcatgatcgcttcatcagcatttcacgctggtgcatctattctgaaggaagctgttttcattgatggtgcaaaacgtcttaaggttgatgcatcttttctccatggtgcttttatttgttcatcagtaaacattaatctatgaactcatggtctaatgttcataagacaaaatatttatgcaggggaagcggccagacatatttgtggtcaattcatttggatctggatttcaggctgtttttgtctttcttcttcttccattcctttctaatttgaggggaattaagtttgctgagcttcctgcttatttaaatggtggtgctgagtgcttcttaaatgtcgcagaaagtccaatcgactgcggaggagctccattcctgcctttgctgtttatagtggtgaatatggcattcaatgtctctctcctcaatttggtgaagatgtcatctgccattgtggcttcacttacagcaacatcagcaggtcctttattgttttttgacccttgattaccccgcctgcattttcatcttctttcttggtgttattgctggtgggtagaccgaatggaggaatataaccatacaatactaattatgcttgttttgaattttagtgccaatatcgatctatattctttcacttcctttgccct

SEQ ID NO: 133717 - DNA, 1386 bp, Zea Mays
ctaatcataaaaatcgaagacgtttgattcccgcaccacgagtccacggcacaaggaaatgaaacaatccacgcggaacgccgccgccgccattcccatggttttccatgctcggttgcgagccagcaattccatttcagtgtcctccctcgtctcgagaccttgccccatccagcccaacgctccgtccatcaactgaatagcttggcggtgtaaccctgtcgtgtgcgatgagctcctcgccgttgatcaccgccgcggcgtcggctgccgtggtggcgctggctgtcgccaaccgcgtgctctacaagctcgcgcttgtgcctctcaaggcgtaccctttcttcctcgcccagctcaccaccttcgggtacgttgccgtgtacttctcgatgctctacacgaggtaccgcactgggttggtgactagagacatgctggcgctccccaagcaccggttcgtcgctatcggtttgctggaggcacttggagtctttgctggcatgtctgctggagctatgctaccagggcctgcgattcctatactgtcccagtcattcttggtctggcagcttatcttctctgccctgcttttagggaggacatattcggccagacaagtcattggttgcttcctagtagtttctggtgtgattcttgctgttgcaagtggagcggatgatggccagcttctttcagatgtaaagttaatttggccagcactcatgatcgcttcatcagcatttcacgctggtgcatctattctgaaggaagctgttttcattgatggtgcaaaacgtcttaaggggaagcggccagacatatttgtggtcaattcatttggatctggatttcagactgcggaggagctccattcctgcctttgctgtttatagtggtgaatatggcattcaatgtctctctcctcaatttggtgaagatgtcatctgccattgtggcttcacttacagcaacatcagcagtgccaatatcgatctatattctttcacttcctttgccctacatccctcatggcacggaattaagcacgtctttcatcattggtgccgtgatattgctgatgggcctgattctgtataaccttcctcaatcgtcactgaaacaattgaaggctgattgaaggtaaagtgacacactgccacatgccttgtaacagagagtttactgattgatattttatggtgaaattgatttccacactgaactatacgaagcatgtgactcattcagattttgtattatgaatgttatcgaaattaagattttctaaaacgcaagcaacatgtgtatgtagtagggacatttttaatacttaccctatagtctggaagtgtgatctaaatgcaagttcagtgagcttggtgc

SEQ ID NO: 133718 - DNA, 1516 bp, Zea Mays
ctaatcataaaaatcgaagacgtttgattcccgcaccacgagtccacggcacaaggaaatgaaacaatccacgcggaacgccgccgccgccattcccatggttttccatgctcggttgcgagccagcaattccatttcagtgtcctccctcgtctcgagaccttgccccatccagcccaacgctccgtccatcaactgaatagcttggcggtgtaaccctgtcgtgtgcgatgagctcctcgccgttgatcaccgccgcggcgtcggctgccgtggtggcgctggctgtcgccaaccgcgtgctctacaagctcgcgcttgtgcctctcaaggcgtaccctttcttcctcgcccagctcaccaccttcgggtacgttgccgtgtacttctcgatgctctacacgaggtaccgcactgggttggtgactagagacatgctggcgctccccaagcaccggttcgtcgctatcggtttgctggaggcacttggagtctttgctggcatgtctgctggagctatgctaccagggcctgcgattcctatactgtcccagtcattcttggtctggcagcttatcttctctgccctgcttttagggaggacatattcggccagacaagtcattggttgcttcctagtagtttctggtgtgattcttgctgttgcaagtggagcggatgatggccagcttctttcagatgtaaagttaatttggccagcactcatgatcgcttcatcagcatttcacgctggtgcatctattctgaaggaagctgttttcattgatggtgcaaaacgtcttaaggggaagcggccagacatatttgtggtcaattcatttggatctggatttcaggctgtttttgtctttcttcttcttccattcctttctaatttgaggggaattaagtttgctgagcttcctgcttatttaaatggtggtgctgagtgcttcttaaatgtcgcagaaagtccaatcgactgcggaggagctccattcctgcctttgctgtttatagtggtgaatatggcattcaatgtctctctcctcaatttggtgaagatgtcatctgccattgtggcttcacttacagcaacatcagcagtgccaatatcgatctatattctttcacttcctttgccctacatccctcatggcacggaattaagcacgtctttcatcattggtgccgtgatattgctgatgggcctgattctgtataaccttcctcaatcgtcactgaaacaattgaaggctgattgaaggtaaagtgacacactgccacatgccttgtaacagagagtttactgattgatattttatggtgaaattgatttccacactgaactatacgaagcatgtgactcattcagattttgtattatgaatgttatcgaaattaagattttctaaaacgcaagcaacatgtgtatgtagtagggacatttttaatacttaccctatagtctggaagtgtgatctaaatgcaagttcagtgagcttggtgcttagaa

SEQ ID NO: 133719 - DNA, 621 bp, Zea Mays
agcaatagaatgttgctctacaggtgctctgacattagctagtgttttgctttatctgaagaagttaggtggaggagtagtgttcagtgggtgggtgcctttcagttcatcagtcactgagaggatttcacctgaagcgaggaagaccccgtttctttggtcacatggaatggctgacaaagtagtattgtttgaagctggctaggctggtccaccgtttttgcaaagcgcgggtgttaactgtgaattcaaggcatatccagatctgggccattcgctttcgcaggaagagctactttatcttgagtcgtggatcaagagtcgtctaaatgcctctcaagagaaggacggttaactgattccatcatgcttaagtggcatttatttagtatttttattatacgatacacaaatcaactactggtcctggaatttgttattggaatttccgatgggttatcgttgtcgggtgaataagggcacatagaaccgggatcttttgctggccatggatgttctcaatgcacttgtaacggccctggtatctgacactctcctacaatacaagggctgcagctctagcttgaatgcctggtcaactaaactgtctttgccatggat

SEQ ID NO: 133720 - DNA, 1257 bp, Zea Mays
ggttctcccaaagtctccggccaccgcccattcccgaaattcccaagcacgcatcgagatctcttgaggcccctgctcctcgcctttgacgtgcacaacccccagtctcagatcacaccaccaccatggggagcataccggcggcggcggcggggccgggcacggagctggaggacctgccggaggacgcgctgctgtgcatcctcgtcctcctcgcgccgcccgacgccgccgccgccgcatgctcctgccgccgcctcgccgccgccgcatcctctccggcgctcccgctcgccctcgcgctccgcctcggcctgccaccgccaccgccgtctcacccgctgctccccgccgccccctgccccgccgacgctcgcaggctcctccgatcgctccaccgcctccgccgcctcctcgggctctggcgccgcctcccatccggctccggctacgcttcctcgtccctgtcctccccgtccctcgccgcgttcgagtgggccccgcgcgccactctcgcggcgtcattcctcgccccctccgcgcacggggacgttggcgtctccaagtcccccttcgtgacgctttccatcgaggagtccggcgacacggtggcggtcgttggggaagtgtcggtctgcgtcaattttgtcgggaacaaccacattgtggtggaggcggtggtgggtgaagatgaggagtttgaaatggtgagcggttctccgccggaggagatctacgcgcactttgccaataggaggagccctggggcaggtaggaggaggaggggcaagcaggggaggaaaggaggcgggatggaggcagagcacttcgtgaggattgcggacactgagccgacgaaggcacggccactgcaagggctgtggaaggtgcttcttctgtacacctgttgtatacgatctcctagcactatgctgttttcaattggaaagttctattgtttgcatatttagctgcaacacgctgttgaacgccattgcagcattgctggtttgtgtaattacccataaactagatgcctggcactgcactcattcccatgaagatgcctcattcactcagggaaccttacagccttgggatgggatggaatagaggatcaaaatttaccctgcatcctctaaatgttgaagcggaaagtgccttccgggttgacagcttctcctttttgaagattttggttcacaattgttgtcacacactactagaaccattgttggagattgaactaaaaaccgt

SEQ ID NO: 133721 - DNA, 1490 bp, Zea Mays
caaagtctccggccaccgcccattcccgaaattcccaagcacgcatcgagatctcttgaggcccctgctcctcgcctttgacgtgcacaacccccagtctcagatcacaccaccaccatggggagcataccgccgccgcatgctcctgccgccgcctcgccgccgccgcatcctctccggcgctcccgctcgccctcgcgctccgcctcggcctgccaccgccaccgccgtctcacccgctgctccccgccgccccctgccccgccgacgctcgcaggctcctccgatcgctccaccgcctccgccgcctcctcgggctctggcgccgcctcccatccggctccggctacgcttcctcgtccctgtcctccccgtccctcgccgcgttcgagtgggccccgcgcgccactctcgcggcgtcattcctcgccccctccgcgcacggggacgttggcgtctccaagtcccccttcgtgacgctttccatcgaggagtccggcgacacggtggcggtcgttggggaagtgtcggtctgcgtcaattttgtcgggaacaaccacattgtggtggaggcggtggtgggtgaagatgaggagtttgaaatggtgagcggttctccgccggaggagatctacgcgcactttgccaataggaggagccctggggcaggtaggaggaggaggggcaagcaggggaggaaaggaggcgggatggaggcagagcacttcgtgaggattgcggacactgagccgacgaaggcacggccactgcaagggctgtggaagggtatatgcgaggataggactttggaattttaccttgtcacctatgatgacattggtggagtaacttgtcgacgatttagggatacacagagccaaaactctggctactctcctgttttttggacaacagatactacatttcttgaaccaccattctctgagcaagagctggttaattatgccagccgcgatcatatccaaggtgttacttccaatcatgcaggcgctgagaacagggttgtctcaaggatattacgcatcaattccagttatgatgtggttgatactcatctctcaactcccttggatgatgggaggagcgtggagggaaggatttggctatatgaggatggaaccttcggttttggatttgttggcagtaattcaattatagatctgaggcatgtctcctcggctggctgtattcttgatacttaacattagatgatctggatcttgctggcacataatttttgccagcgagccccttgtacagtacttggtgtgaggcatgttgcctccgatttgttgtactctcgatgataaggtcactgaatactggtcccttctggcacttagctgttgctagaatgcccttgtaaaccgaaccttggttcctttgggcatgtacttgttgacataataccgatgtatattacagtactatttgttcattgaattccaataaactgcaactgttacttc

SEQ ID NO: 133722 - DNA, 1558 bp, Zea Mays
cgaaattcccaagcacgcatcgagatctcttgaggcccctgctcctcgcctttgacgtgcacaacccccagtctcagatcacaccaccaccatggggagcataccggcggcggcggcggggccgggcacggagctggaggacctgccggaggacgcgctgctgtgcatcctcgtcctcctcgcgccgcccgacgccgccgccgccgcatgctcctgccgccgcctcgccgccgccgcatcctctccggcgctcccgctcgccctcgcgctccgcctcggcctgccaccgccaccgccgtctcacccgctgctccccgccgccccctgccccgccgacgctcgcaggctcctccgatcgctccaccgcctccgccgcctcctcgggctctggcgccgcctcccatccggctccggctacgcttcctcgtccctgtcctccccgtccctcgccgcgttcgagtgggccccgcgcgccactctcgcggcgtcattcctcgccccctccgcgcacggggacgttggcgtctccaagtcccccttcgtgacgctttccatcgaggagtccggcgacacggtggcggtcgttggggaagtgtcggtctgcgtcaattttgtcgggaacaaccacattgtggtggaggcggtggtgggtgaagatgaggagtttgaaatggtgagcggttctccgccggaggagatctacgcgcactttgccaataggaggagccctggggcaggtaggaggaggaggggcaagcaggggaggaaaggaggcgggatggaggcagagcacttcgtgaggattgcggacactgagccgacgaaggcacggccactgcaagggctgtggaagggtatatgcgaggataggactttggaattttaccttgtcacctatgatgacattggtggagtaacttgtcgacgatttagggatacacagagccaaaactctggctactctcctgttttttggacaacagatactacatttcttgaaccaccattctctgagcaagagctggttaattatgccagccgcgatcatatccaaggtgttacttccaatcatgcaggcgctgagaacagggttgtctcaaggatattacgcatcaattccagttatgatgtggttgatactcatctctcaactcccttggatgatgggaggagcgtggagggaaggatttggctatatgaggatggaaccttcggttttggatttgttggcagtaattcaattatagatctgaggcatgtctcctcggctggctgtattcttgatacttaacattagatgatctggatcttgctggcacataatttttgccagcgagccccttgtacagtacttggtgtgaggcatgttgcctccgatttgttgtactctcgatgataaggtcactgaatactggtcccttctggcacttagctgttgctagaatgcccttgtaaaccgaaccttggttcctttgggcatgtacttgttgacataataccgatgtatattacagtactatttgttcattgaattccaataaactgcaactgttacttc

SEQ ID NO: 133723 - DNA, 1091 bp, Zea Mays
tttttccttttatttttgtttgtttggattctctatatttttttttctattgttatgcatcctttagccaaatatcatcttaaacaaaagatggaccaagccaagagctaacagttctgtgtcttgtaggtgcagaggcatcttctgaccaatgaaaatggtgaaaccaggtagagtatctgactcaaagataacaacgtttacatgcagatacaagacaacaatatcattgttctctgaacacacatgacctccattggtaaaactgaaatcgaaccacgccacagaaatacatagtgctctaggcaaatgcaagaggattcattattcatctgtggttgtgctcagtgatcaatactcttgttcatcctcctccagtgacccagcctgtgatgtcttctcgtggtcattctcaagctggctgaagttccccttctccttgatcagctggatgtggtggtgcttgcagtacagcttcccctcgtgcgcaatgtagttagaagggctgatggtgcaccctccatggcagcacttgaagcagctcttgtggtacatagtgttattaacagtgacctggatgcttaaccggtgagttgcaatcagcatactgatattcatgtacagtattcctgtcacctttccttatctttaggcaaaaatatcaataattgaaactttcagcttagaaatgcagcagttgctgtcttcatggatataacgatttatttaatctgggaatcttgtatttatgtgattcttgagtgagagatttctgtgacaggttgtcaagtgaagaaggctcaaactaccggaagaatgattgagatggttgaacacagaatcttaccctctcagttggatagactgtcttgctgcatccaacacatttctctctggtgccagcaaaggcgcttgagactttagtagcattctgccaaataatatgcaatcatgatgagcatcatctagtgccagttgttcataaagaacaaaacatgaatggtgtcaactggatgggtgatatgaaacatgtttaaaaccatatacagcactgatctagtcatatacctcatgaatatcaagtttttttt

SEQ ID NO: 133724 - DNA, 1937 bp, Zea Mays
tttttccttttatttttgtttgtttggattctctatatttttttttctattgttatgcatcctttagccaaatatcatcttaaacaaaagatggaccaagccaagagctaacagttctgtgtcttgtaggtgcagaggcatcttctgaccaatgaaaatggtgaaaccaggtagagtatctgactcaaagataacaacgtttacatgcagatacaagacaacaatatcattgttctctgaacacacatgacctccattggtaaaactgaaatcgaaccacgccacagaaatacatagtgctctaggcaaatgcaagaggattcattattcatctgtggttgtgctcagtgatcaatactcttgttcatcctcctccagtgacccagcctgtgatgtcttctcgtggtcattctcaagctggctgaagttccccttctccttgatcagctggatgtggtggtgcttgcagtacagcttcccctcgtgcgcaatgtagttagaagggctgatggtgcaccctccatggcagcacttgaagcagctcttgtggtacatagtgttattaacagtgacctggatgcttaaccggttgtcaagtgaagaaggctcaaactaccggaagaatgattgagatggttgaacacagaatcttaccctctcagttggatagactgtcttgctgcatccaacacatttctctctggtgccagcaaaggcgcttgagactttagtagcattctgccaaataatatgcaatcatgatgagcatcatctagtgccagttgttcataaagaacaaaacatgaatggtgtcaactggatgggtgatatgaaacatgtttaaaaccatatacagcactgatctagtcatatacctcatgaatatcaagttttttttttgtgatctgttaaatatctggtgttctgatctttttattggacaagatttactctgttctgatccaagcataacagttaggttttgagtggatctttctctctctaaccattgggattgctgtgcattcaagatccaagcatctcacatcatgtttaaggagttgtttgtgcatcaatgattgaatgtatttgtttcctgtgctactctggactgaaaaagtgaaggaaaaaaatgcaaactttgtaggcactgagaaaaacacataaacacatgaatattaaggcgttgcatatacctcattcccaacgtttctttctggcttgacaaccttcggagttcctgaagccatttgtaggtgaggagacacgcaagaacaccactggatctatttcgtactgcaaagggaaggggggaaaacgatgataccttcgaagctcttgtccaagctccctgtcctcttgaacagctggtcgaagtgaggcctgcagtagagcactccctcgaaggagttgtagttggcgagctgcggcggagaacatacatcctcagacgcacacacaaaccaatgctggtctcagctttgcagatgaagcatgcaggtcgtggtaccttgagggtgcccttgcagtggtggcagcggaagcaggccttgtggtagatgcggttgtcggcggtgagcttgtccacaaggtacaccgtcttgtcgcaggcggtgcacttggtggtcgtcccctggaaggaggtcgccatggccgccgtcgtctctcttccaacgacacactctgcttacggaggcgaggctgtgtagccgatggctgcctatatgggaactgtgggttggttggttggtggtggtggtgagctgcagccgggtattgataccgctaggtaggcaggacacagctagctagtgagggagaatgttgggggtgtcaccgtgtcaggcatcagccatgggaaggagagagagagagagagagcatacgaggtggaggtgggggtcggtcctgcacgaatgccgccataccaccatgat

SEQ ID NO: 133725 - DNA, 1092 bp, Zea Mays
ctgttcttcactcgcctgcaggctgcagcggaccacgcgctcgacatgctcacgcggaggcggagctgcagagaccagtagcaggcagatgcgtcacagcacgaccttgcctcgctcactttcacttccacttcagctattatttgggcagacgagcagcggcgctgtcgcagacgcatagcatcccacgggttgtcactcactcggcccagcgctcacgagtcacgacccacaactgacgatcgtccatgttcggcggcgacgatggcgctagggtgctgcggcgagccggcagtttcccacgggcaccgcccccgccggcgacggcgaggcacatcctctccaggagcgagtcaatcaagaagaagagcggagccgcgaagcgggcacgcgtgcgcgcggggctcgccgccgcgctgcaggagctcaggctcgccggccggaagcacggggccagaagccggggaggcggggcgttgtcagaagctgtcagcgccggcgccggagccggagccgccgcggggccgcgggctagcgatgacgtccaaggaggaggctgctgcgccgctgctcccctgcacgtgtccgacgttgccgaggcgcaggcgagcagaggagcagcagccaccgctggtcgtcgtcgcgtgaacgcagcaggcggctggacgacgccgctgctgcttgtagcggtgctagccctggcgtgcgtggtggcgctcggcaggacgccggccgtttgctgctgcacctgtgcggcatggctgtgccgcggcccttgtgcggttcggcctcgacggacgggcgccaccggagcagcgagccctctgctgcagcgcggtgcagcgtcagatgcctgtggctgtgagcttaacattggacatgtacgagcaggtgattagcatcagacgtgttgtttgtcactcatggaccgtccgtgtattgttattactccctctttccatgcatgaggccttatttcgttgtagtacatgtatcgggatcggacaggattgaaagaaattattttcctttatattcaatttgattagaaatggatcaattccctttcaacttatatattatatcacatct

SEQ ID NO: 133726 - DNA, 396 bp, Zea Mays
atggaggcaacatttggtggtgtcggtgctggcggcaggcacaacgtggctcttgcggcgtggggacgcggacggacacagagctgcatctcagccggtcagggggcggcggtgactgttgcaggtcccgggcatctcagggtgaggcgaaggcgcgttggtggggagtgggaggttgctcacggctcccggatgaggctggcggtgttggacatgtgtggcatgtggcgggtgcggatggggcgggaggtcggcctgcgcggcattcggctgctggcggcggatgcagatggggcgagaggacggatgaggctggtggcgctgatgccgctgggggtttcgggcggggtgcgtcggatggggctggttgcggacggtgtagatttgatgatatag

SEQ ID NO: 133727 - DNA, 495 bp, Zea Mays
atggcgcctacctcgtcgccaagatctacggcgccgaggatgtctaggcatggtaaaattgctaaacaaaggaagggtcctttgaccggaactgcctttgacccgctacctttgctaactgatgttccagtgcctatgtgtttttgtggtgatccttgcaaggttgacaagtctgaggatcatgacacctatcaacagagactcctccaccgctttgtgattttgagtagtggattgacacaaatctcacagaaagacaagaagtggttggaaaatgttaaaaagtgggatgcagaggacaaagagaggatggagaaaagacgagaggagcttgctgccgagcaacaacgggaagacgagcaagaaatgaggcgtgttgctgaatgcagggaagagaaggagaagaagcttgagcatgcatgtcgtgcaaaggaagcaatggaggagaaccctgatgcatttcgcaagggcaaatggccccattgcactcagtag

SEQ ID NO: 133728 - DNA, 360 bp, Zea Mays
atgatcaatatgaccaacatggctaagttcttcatcataaacgtagcagtctttactagcagacttctgaacaaaacatctaaattactggaaataaaactacagcctcgcctctaccacatggtccattcccacctgatttcagcggtacttgatgaagccaatgtccttggcattgctgcggaagcactgcctgcagcacatcagcccgtacttcctgatcagtccatgagggttcgcacagacacggctgacgcgggatccgggcccgtagttcttggggtgcgagttccagacgttggagtgccccatcgcctcctaattccgccgccgccgcaagcgttcgtggggaagagatag

SEQ ID NO: 133729 - DNA, 557 bp, Zea Mays
tccgttggttgattctgattcgtctcctgttggctgttgccttcgaccgcctccacctcgtctccgacgatgtcctccgtcgccggtgagggggaaggagagggaggaggacggcgccgacgggaggagccaaggagccaacaacatgaggacggggtcgaggtggccgacggaaaactggatttgggtgacctttacggcgcggcggcggggtgggtagaggcgcggaccagctgcccgcacctcggcaccatgccgcccgctggtgctgaattgctgatgaccttgctcgcgtgcctccgcccgactctccgtgctccaggttcggggcacctccttcctgctcgaattctctgtagattctttggaattccccgcagttcaattttccggaacaacactgagatgatcagtttaacatgtagaagaacaaagtttttttagttgctgacaaggtgattactgattgtggattgtcactgaaaatgttgtggccacacaattgcatgttcagaatctatcgattgtttctttggttcaaccaaaagtattatgtt

SEQ ID NO: 133730 - DNA, 804 bp, Zea Mays
ggggaaggagagggaggaggacggcgccgacgggaggagccaaggagccaacaacatgaggacggggtcgaggtggccgacggaaaactggatttgggtgacctttacggcgcggcggcggggtgggtagaggcgcggaccagctgcccgcacctcggcaccatgccgcccgctggtgctgaattgctgatgaccttgctcgcgtgcctccgcccgactctccgtgctccagatgtcatgaccctgctgaaaactgattatgcttgatatgcaaagatgtgatgtgcagtcgttttatcaacaaacatatgttgtgccatcatgaagaagaaactggtcactgtcttgctttgagcttcagtgatctttcagtttggtgtttctcatgtgactcgtacctagatgttcaagccattttagaattgcgcccaagttgcacatttgttgaagtttggagaacaccttttcaatcacttgaagtactggatttcagcactggtgaaagtggaagttcatcaaggacttagttgtttgtattcaagtgatgagtttcttttcatgatgcttcaatcagatcaagacagacagttgtgtagtatcctggcactttttaagcttcagtgcgatataattcatttgagaagcccttgttcttttcctttttaccttcagttagtatatttcaataacccaaagcttccttagatagttatcacgacaggtgtaaatccctgtgcaccataggagatttgaaggcattattattgctttgatatggacatccagaaaaaatattcaacttcg

SEQ ID NO: 133731 - DNA, 458 bp, Zea Mays
gcggatcaatgcggaggtcagcgagtgggagcagagggaatcccatgtgtccgcccctcgctggagtagatcctcggcgagccggcgtggagctgtcgcggtagaaagccagctgagcctgatccgcccgcagcccgatcgggatcgatgggtggggaggcgccggagccgcgatggctgacccgcgctttgagcatcggtggcggtgacggcggctgggttcccgaatcccgatgagatgctgcaacttgagatgggggtttgttgaggacccgcgcgaccgggaggtcgcgtcgctggtgtgtcgccggtggcaccgcgtcgacgcgctctcgcggaagcacgtgacgctgcccttctgctatgccgtgtccccgaaacgcctgctcgcgcggttcccgcggcccgagtggctcgcggtgaaggggaagccccgcgcggccatgtaggggctcatc

SEQ ID NO: 133732 - DNA, 1277 bp, Zea Mays
gtagctactgtcagtccagtcgttgattccccgaaatatatatgttttaatatgtcatgccgctactttatatatttgtgccctaattcatttgaatccctgtttttttgttttaaaatgaaaggtgactattaccgttacttggctgaatttagcactggaactgaaaagaaagctgcctctgatcagtcacttatggcctatcagcatgccatggttgtcgcctccagtgagctctcacctgctcatcaaatccggcttggccttgccctcaatttgtcagtcttcttttatgagataatgaactcccatgagagagcttgctaagtggcaaaacaagcatttgatgaggctcttactgagataaattctggtgagggagtttacaaggatagcacacttatgatgcaacttctgaaggacaacttagcaatgtggacatcagaactaactggaggtgaagcatccaagggtaacgacgatgtcgacatggagggttgattgattggtatatatatgctctcaagtaaggaaacacagaacgcacgcaaaaatatccaggctgtgatgctagcgaacctgggtcaggttcctcaagttttttctgcatcggaactcagaagagccttgtgtatttttttggaggtctgttcctctcttttggccatcgtttggtcctggagtcagtcactcactaccaagtgtttcaaaggtctgaactggtcagcatccagatctgttgttgctttttttctactgtgctttagaggcatctttgtacaccgttggaaaactgtttctcttatcaacgcatagactgtcagtgctggtactaatcatgtttggtgactgaatttatttctgtgtctcagtcctttgcgaatatcaaatggtactttgctacaggtccttgatagattttgtttcttttttccttatcgtgcagtggcaaaggttattttcagggggcaaaactaatggttataattttttttccatagttggcaggtgtattttcaggggatgttgcttgagcccaaatggatgacagcagaagtgtgatctgacgtgcgctcagcttcaccaacacactgattcttgaatgcattaagcatagtgcacaagcagttattcatgataagaaatcttttgctcaaatgtagctaattagcacttcatacattctggtacaatctcccaattcttgtgaacttatgtatttggactgtcaatttgtgatatgaatatatatcaatgtgtttgaaatttgtattgta

SEQ ID NO: 133733 - DNA, 929 bp, Zea Mays
cagatttgatacacatgcaaatcctgctggctgttgcttctcagcagggccaaaatccgttcctttggcctagcagtagctaccactaccaggagatcttcttcttccccccccccccccccccccccctcccctcctgtgagaggtgcccaacagcttcgtcagaggaatcagcacttcagcggagacacacagtccaggccatcgaactgatacttgtgtggtggcgcgggcagagatcaagatggagaaggaacacatcaagatggccatgctgaggcaagaacagacattcagacagcaggttcacgagctgcaccgcgtgtaccaggttcagaagcagctgatgatgcagatgcagattgccaagacaaacagctacggaaacgaagctgctgaaaggcaaaccaaaccgacagaaaaactcgagcaccgacagtggtgtggtagctcaggcaagacggaggccaagctggccgaagacttcagcctggagctgacactggcaactggggctggaaggaggggggaggaggagaagccatccaactcagactccgaagcaacaatgtcgtcatcgacatctgcagagtcagagccagggcaggggttcgcgcccaagtccgatgtaacaaacctaaggttccagaatgagagcagtaggcatgatgctcaggtcttgcagtctccttggcgataccaatgtttaagtctcaagatggcgtgaaggggttaggttgggttggcatggcatgggtgtaccccaaggctcaaacaaaagcaagtgcattgctgcatgcatgtatgtatgtatattacgatttcactgcaactgtaggagcgagctcaaaagaagcaaatggagcatttatggggaaacaaaaaatgaaccaaatgagaagaaaaggatgagatagattgtgtctgtt

SEQ ID NO: 133734 - DNA, 396 bp, Zea Mays
ctaggcacctgctcgcccagacaccgtcggcctccgtgcatcccgccctgcgcgcgctcctccgccgtgcagcgaccgcgacaccgaccccgagcagcgccccagccgcgacgcccctgctccctcgcgtccccgaccacacgcgtcgccagctgccgagcaccccgcgcaggaccgccccgagcccctgcaacccgactacgcagcgccccagccaagcccgacgcgtccaggcgcgccctgactgccccgacgcgccaggacgccagcgccgaccgagcagctgcccagtctcgacgccaggccgagccaagctccgcgcccagcaacccgtctgagccacgaccatgcacccacactgtcagtttattccgcgttaatgatcttcatttcgtc

SEQ ID NO: 133735 - DNA, 738 bp, Zea Mays
accaaacaagaaggaactgctatcagctggttgctaccaaggataaccaccagtggcatcttagcaaacgccccagcctgcattcgatgggccgccatgcgcttgcgaaatcggcagctctgctccgggaagtcaagaacaagcaaaggactactaaccttgtgaagcgactggagcctactgaagtgaagtccccagaaacatcattgtgggtcccacatccaatgacagggatctactaccccaagggctttgaatgggtcatggaggatgtccccacaagcgcagcttcattccagcagtcatactggttcaggactggggaggcagagccagcaagctctactacatcaaagaacgattctgcttcctttgaccatccatttgcttgatgtatgagaggctttgcactggaaaaaaacactgaaagacacagttgtgtgttttcaggaagaaaagagatacagttgtgcaagtcattcaccatcatgccaggtccatggatgcttcatgctatgacgaagttaccagttgttctgattcccggtatgcagtcacagcacccaccaacagatcagaaacaacgtccgcctttgttttgtactttttcttaaccttctggtggttcaacttaaaagaccttccctaaactgtaactttatagcagcagttattttgttttgtttttaagcttgtcctgagaaaagaaactaatcaaagctttagttctcatactgt

SEQ ID NO: 133736 - DNA, 2046 bp, Zea Mays
aagaagagatccaaagtcagagcctgctcacccgaccccgaaaaaccttcacaaaccaccaaagtcaacgtcggaaaccaagaagaaggcaagaagcagaggggaattctttctctcccttcctatctctctccctctctattgcatcccgcgaccatgtccgcgcgtccgccgcctcaaccgcgaccgcgcctggcgctgccgccgcgctcgacggcggaatcgctcttcacgggcgccggggacaccagccccggcccgctcacgctcgcctcagcgctcttcccctctgacgccgacggcggcggtggccccggaggcgcgtcctcctccgccgccggggccgcgaccttcacgcagctcctcaccggctcccttgcgcctcctcctcctccgcagcagcggcatgacgcggagaggggacgaggcggcggggtcgccagggccgggccggcgctctcggtggcgccgccggcatcggcgtccgctggcgcgtccgtgttcacggtgccgcccggcctcagcccctccggtttgttcgactcccctgggctgctcttctcgcccgccatgggcggttttggaatgtcgcaccagcaggctttggctcaagttacagcccaagcaacccattctccactcagaatgtttgatcaccttgaacagccatctttctccacagctgcaacaatgtctggagctctacagcacatgaattctgcagccagtatggcaggaatttcagatatgacaatggcaacagcaaacaatgagaacacgtcctttcagtctgctgaggcgtctcagaggtatcaagttaatgcccctgttgataagcctgctgatgatggctataactggcggaaatatggtcagaaggtggtaaagggcagtgattgtccaaggagctactacaaatgcactcatcccaattgcccggtcaagaaaaaggtagagcatgcagaggatggtcagatatctgagatcatatacaaaggcaaacacaatcaccaacgtccaccaaataagcgggcaaaagacggcaactcttcagcagctgatcacaatgaacaatctaatgataccgcatctggcttgtcagctgccaagagagatcaggacaatatatatgggatgtctgagcaagcatctggtttaagtgacggagatgatatggatgatggtgaatcaaggccacatgaagtggatgacgctgataatgagagcaaaagaaggaatatacacatttcttcacaaaggaccttgtcagagcctaagattattgtgcaaacaaccagtgaggttgatcttctggatgatggttatagatggcgcaagtatgggcagaaggtagtcaaagggaatccacatccaaggagctactacaagtgcacgtttgctggatgcaatgttaggaagcacattgagaggtgttcatcagaccctaaggctgtcataacaacctatgaaggaaaacataaccatgaaccaccggttggtcggggcggcaaccagaacgcaggaatgtcatcacaacagaaagggcagaacaacgtatccagcaatcaagcttcattctcgagaccagacttgagcaacgctaaccagatgccaattggaatcttacagttcaagagcgagcaatagtaacatgtatttggatgacgttcttttggcaaatacaagatgcctgcaattcgtacagccatatggcatcaaaagtttcttaaagcctgataatttcaaatggtatcagtttgcagtttttccccgtagatacacaggatatatagctgatacggcctcatcgtttctagtttgtacatgctattaagttggggcatgagggatgcaatactagctaggtgaggttacttatatgtggttatggtgttctatagatggatcgatggtatacatgttctgattttgttcccaacacccgacaagattttgtatgtatttgtacagatgtttttgagttacattttgccttttgtaactttgaagatgttctagtttgctatgtcatttccttttttttct

SEQ ID NO: 133737 - DNA, 228 bp, Zea Mays
aaaagctatattactttacaatgcaaggatttctacaagagggtgcttgggctacataaaatattttgatgcacatttcacaaacttcactggtggtgtggagacaattgagaactgtgtttgtttgcatgaggaggatcatgggatcctttggaaacaccaagactggagaactggtttagcagatgtaaggcggtcaaggaggctcactgtttcatttatctgtat

SEQ ID NO: 133738 - DNA, 1213 bp, Zea Mays
aactgcaggaaaaaaaatcttgtttttttcagcgaccatttgagatcgagaccgaccacaccaaaaatccatctcgcaaccagctccgacaccggccagcgaagatccacctcgcaaccagctccgctgctccgcagctccggcacagactagcgaggatgaacgacctcatgaccgactccttcgtcgccgccgcggccaaggcgcaacagggcggcgcggtcgcccctgccggcggcgacgacccggagctcggcgcgttcctggccgaggtagacgccgcaaagaccgagatgatcgcgttgcgcgacgagctgtcccacctccgatccgcgcatgaggcgtccaagaacgccgtggtgggctccggtgagggccgcgccgccacgcaggccgcgctcgtccgcctcctcgtgtccgcgcggcgcctccgcgcgcgcctcgcctccatggaccgccgcgctccggcccccgcggcgcagaccgcagcggggctccgcggccgcgtgcgcgacctcaccgcggacgtgcaggccctccggcggcaggtctccgaggagcgccggagcgacgcggcccgccggtacctggccgtggccggggacgcgccgaccgaggagcagctggaccgcctcctggccagcaccgacggttcctccgacgcggcgatgcgggcggcgctgttgtccgccgcaggggcggagcaggatgaggccgcgaaggaggtggcggaggtggagcgcggcctcctggagcttcagcagctgttcctggatatggccgcgctcgtggaggttcagggcgcgccgctggacgatatcgagcagcaggtgggcacggccgcgggccacgtgggcgcggccgaggcggagctgcgggaggcccggcggctgcagggcgcagcgcgtcggaggcgggtttgcctggccggcggaatcaccgcgctgctgctcgtcggcgttgcagtcgccgtcctggtggccctcatgctcgcgcgcagaggcgccggtgggaagcttgtgctgcagctcgccatggacttgcccgcgcggtgaaatttgcttcccctagggatcccgcggttttttagtgtggtttaccggcgactgtgctccctgattaacctatgtgaatctggatgggatcacataatttttatctacatcttttattttaattctatgaataatatagtttataatataaaacaata

SEQ ID NO: 133739 - DNA, 2113 bp, Zea Mays
atgcggcacgatctcgttgccctgttactccgcgccagctccatctccgtctccggcggcgctcgcgcagcacagacgctccacccgctggcgctcaagtccgggcgcgcctcggaggctcgcgtggcgaccgcgctggccgtggcgtacgcgcggtggggcctcgtcgcgcacgcacgccgcgtgttcgacgaagcgccgcgcagggacctggtcctctacaacgccatggtctcctgctatgcctcccacggtctcgcgcgcgaggcctgggcgctctttgccgccgcgcggcgctccgggatcgcccccgacgggttcaccttcagcgccctgctccgtccgccgccgcgccgtggccgccacccaaccgccggcgccgtcgatgacgggctgctgctcaggatgggagccctggcgcacagcctcgtgctcaggctgggtctcctcgcagacgtggtggttgccaccgcgctgctcgacatgtacgccaagtgcggccgggttgacgaggcgcgctgggtgttcgacgctatggcggtcaggaacgtcgtctcatggaacgcgatcgtagtctgctatggtcgggttggtggaggcaaggacgctgttgagctgttccggtggatgctgagagacgggagctgctgcccggatgagctcacgcttgccagtgtgctaagctcgtgcgccagcgtggcggcagcaaacgaggctactcaggttcatgcttatgccataaagagggggtttcacaggtttctgcaggtggccaatgctgttatcacagcgtacggcaagaccggttttgctcgagaggcggggcaaatgtttgctatgatctgcgacccagatgtagttacgtggtcctgtatggtttcgtctttggcgtaccttggactatgcaaggatgcagttcatgtgtttgagagaatgctccaacaaggcgtacagcctgacagcgtcgccttccttggggttctttctgcctgcagccatgccgggctcgttgaagaaggcctgcactatttccttatgatggcgaggggctacaacatcgatccaaattcacagcaccttgcttgtctggttgatctcttggggagagctggtaggattcaagatgcttacaacattgttatcaagctttcttgcgagaacaatgctgatatcgttggagctttccttggtgcctgtaagctgcggggcaaaattgagttggcaaagtgggctgccgataggcttttatgcctggaaccaagtgaggcagtaaattatctgcttatgtctaacgcatttgctgctgcaggagcttggaacgagcttgcagaagtaagaagtgtgatgagacataggtgtggcagcaaggttcctggttgtagttggatagaggtaggtggaacagttcagacatttgtctccaacgatgtggtgctccatcagtcgattgaaatgcaacaaatggtgcaacttactatttcggaagcacaaaaagagtgcaacgaagacacaacttgtggtgatccaattttggttcaagaatgattagtttggcatctacaatcgtcccagagcttaccaatgtgatgtttctcatgtaagtggtgcctagactcataaaggaatacgttgaggaagtatctactcaactgaaaatggtctgtgattctgattcagacgagttgcctcttgaagagaaactcgcatttatgcatgagacaagacatgcctttggtagaacagccttgctgctaagtggaggtgcttcattatgatcctttaatgtgggtgttgttaaaacattggtagaacataaacttttgccaaggataatttcaggatcaagtgttagctaaataatgtgttctatagtagcaacaagatcatggcctgagctggagagctttttttgaagaatggcattccttgagatcagggcttctggaggcagctttgctgtcatctgccaaggtatgtcaaataatttctcgttgtattctttttattaagtttggcttatttccacttagaatggtgatacactttttattggacatgcttccagtccatgtaaaacataaatatatttcttatttttgcctacagttgtcat

SEQ ID NO: 133740 - DNA, 238 bp, Zea Mays
ggatgaagaactatcggaaagagagaatttgcagccaagacttacaattgcaattggagtaaggaccggtgaaaagaaagtactccagcacatttttggtatttttaaaaacaaaaaggaggaattagacgacctagagtactaccaggaaagaagactcaaggatcttggtttagaaggaaggtagagtttattttttggtaaaaatataagattgtgcttgtattttatcctcatt

SEQ ID NO: 133741 - DNA, 360 bp, Zea Mays
atgttagaggtcagcccgtcgcgccgccccgtgggcacgtcgaacgacggcccgcccgtcatggcgacggcgtcgcgcgcggcgagcgcgatgatgtcggcgcaggagacgacgccggggcactggtcctcgagctgcgccttggcggcgtccaccacgttctggccgcgcaggccctggttcttgccgttgtccacctccgcgtcgttgctggcgctcctgatgagcaccgacgcgtcgcaccccttgacgaagcagtcgtggaactggaggcggagcagcgcggggaggatggtggggtcgttgccggcggcgtcctggacggcggcggtgaccgtgtcctcggcgtccgggcagtag

SEQ ID NO: 133742 - DNA, 120 bp, Zea Mays
caattcgttttgtgttgcataatatttatcccctatttcttcatattgttctcaattccctaaagtgcacctttgttttaatttcaaatttccttctcaatattttctattctctattcc

SEQ ID NO: 133743 - DNA, 870 bp, Zea Mays
ctccctttatttggtcggaaattcacttggtctagtcagcagaatcccccaaccctagtgaaacttgacaaagtattatgcacattagactgggtggatttgtttccaaattccttgcttcatagttctgcctcaaatgactcagaccattgccccctccttttgggcctgaatgacaatagaatggcaggaaggcgctggttccattttgagtccttttggcctatgtttgatggatttctggaggctgtttcattggcttggcattctgttccagctgtgcagtgtccttttacaactttgaactctaaactgaaatctactactcgtgggctgtaggcttggagtgctaaaaaggttgggcatatttcagcctctttagcccttgctcgtgtgctcctgcaccagttggaaattgctcaagacagtcatggtctatccctagctgagctatggtttttattaagccttaagaaacactcccttgctctatcttcacttcaaaggacaattgccaggcttcgttccagaattgggtggctgcgtgagggtgatgccaatactaaattattccacatgcattcaagattccgcaagaagaagaattttgttcctaaattggtctctaatggtgctgtccttatcaaccatgatgccaaagctgatctggtcaacaaattctatggcaatcttttgggacactgcagcgatatggagcaaactatctctctggaaagtttgggaattccttgccatgatctgtcagccttagatgcaccattcactgagaaggaggtatgggacacaattttacaccttcctttggacaaggctccagggccggatgggttcacagccaaactttataga

SEQ ID NO: 133744 - DNA, 120 bp, Zea Mays
ttttttttaaaaaaactatgtttatatattttataaaacaactagtagacctatggagtagacagctagtcctctactacatattatatattatttcagaagaaataagacattattatc

SEQ ID NO: 133745 - DNA, 1604 bp, Zea Mays
cactgcctccatcatcctctgactcagagagagagagagcagccgagccggttcaaccccatgaataccgctgctgcagagatcacggcctgcttctgcgtctgcagctccagcagtagcaacagcaggggctgcagtgcaaacgactgctagttcccctttccccgcatgatctctgccccttcccctaccttctcttgttcttgcttgcacgacccttttccttgtgcgctagctgccgcttcttcttcgtcttcctggagctccccgcatccacacatgccccaagaaccagacaataaaacaacacggaaccatcggagtctttttctactactatttccagcgatttgattatatggatgtgtgcacaggtgcacgtagataggtagaatagaagggagattatagctagctagaggcagcgagcagctcggttgctgggacacgcgatcgagctacagcaaagaagactgcagggtggcgcggcgggcatggaggatctgtacagcatccacccggggatctcgcgccacggggcggcggcgactagcgaggcgtccggggtcgccggtggaccgggctcacccccgcccccgcccccgccggcggcggatctgacggagctggtcaaggcgcagatcgccgggcacccacgctacccgtccctcctctccgcctacatcgactgccgcaaggtgggcgcgccgtcggaggtggccacgctgctggaggagatcggccgggagaggtgcgccgccgcctccgccggcggggaggtcgtcggcatggaccccgagctcgacgagttcatggagacgtactgccggttgctggagcggtacaaggaggagctgtcgcggccgttcgacgaggcggcgtccttcctcagcagcgtcaggacgcagctcagctccctctgcggcggcgccgcctcgctctccgatgaaatggtggagtcctctgaggacgagccatgctcaggcgacacagacgcgacgacagacccagggcaggagcacagctcgcgcctggccgaccgcgagctcaaggagatgctgctgaagaagtacagcggctgcctgagccggctgcggtccgagttcctgaagaagaggaagaaagggaagctgcccaaggacgctcggtcggcgctgatggactggtggaacacgcactaccgctggccgtaccctacggaggaggataaggtgaggctggcggccatgactgggctggacccgaagcagatcaacaactggttcatcaaccagcggaagcggcattggaagccgtcggaggacatgcggttcgcgctcatggagggcggcgtctccggatcctcctccgggacgacgctctacttcgacacgggcaccatcgggccgtgatcgatgcgatagatacctctgacgaattgggggcaaattgttggttgatactgagattagttacatgaagcaatatccgctgtcattttgtcggattcattgtgtatatgcatgggcgacaacgtgtattgtcgggtacacagtatgtagtggcatgtaaagacaccgtaacaatataacatgaattgttcaattgcctgttgcattttgatc

SEQ ID NO: 133746 - DNA, 821 bp, Zea Mays
atatatatataggcatattcgatttcataagcaagataagatattacaactccaaacaagatattacaactacaaacacatcctttccgatggccaaatttataacactaacaagaagcaaatttataacactgacaagaagagcaaaccatgacaaggatgatttatgaatagatataccaatacgagatagacagcggcacgacgacagaaattggctctctcccgccggctgaggctcagattctcagaacccgatgggctgcatcggggggaaggacggctgccaggggcggagcatggggtcgtcggtgaccatctccgggatgtcgacggcggcgccggccatctggagcacctcgaggacgccgcccagcgactgcaggcggccggccagctcggcgtggcgggcgcgcagcaccgcgttgtcgccgtccaccctgcccaggtcgcgctccagcgccgcggtgcgggcctgcgtcgccgcgttctccgcctgcaggcgggccacctccgccaccagctcctccagccgctgctgcttccgcgcgcgcgaccgccgcgccgactccctgttggacagcatccgcttccgcttgcgctcgtccgtcgtgtcgttgctgtcggggctcgagctccggcgtgacgacgacatggatgcttgtcttgtcggattgaatctgtttggtggggggtggggtggggggaggatggggagaaacaggagccctagagatggattcgaaagactatctcagagagaaagagagagggagagacggcgaaggatcagcagttggagaggggcgatgcgttcatga

SEQ ID NO: 133747 - DNA, 1197 bp, Zea Mays
atggcgttcaccgtgacgatgctggcgtggagcgtggtggagcacgaggccccgctcgcggcggccggggagctccggaacgcgctggccgccgtgcgctggggcgccgactacctggcccgggcgcacgcggccgccgagacgctgtacgtgcaggtcggcgacggcgactccgaccactcgtgctggcagcggcctgaggacatggacactccccgcaccgcctacagcgtcgacgcctcccgccccgggtccgacgtcgccgccgagacggctgccgcgctggccgccgcctccgtcgcgttccgccagctcgacgctgcctacagcgccatgctcctcggccacgccgagcagctgttcagtttcgccaagaaccaccgcggcctctaccagaacagcgtgccaggcgctgcaaaattctatgccagcagcggcgatgaggacgagatgctctgggctgcagtctggctcttcatcgccaccggtggtgaggactacaaggccttcatcgccggcgacggcaacgtcggcggagcgcagaccttcttctcatgggacaacaagttcgtcggcgcgcaagcactcctcgtcctccaagggaagctggccgacgccggcaacgcggcggcactgaagagccagctggagcagttcctctgcggcgtgctgcagcacaacgccagcgacggcaggctcagccccggcggcgtgctgtggttggagccctggaacaacctgcagttcgtgacgtcggcggcgttcgtggtcgccgcgcactccgaccacctggcgggcgcggcggcatcctcgctccggtgcggcgcggcgacgctgccgccgtcgcagctgctcgcgttcgcgcggtcccaggcggactacatcctcggcgccaacccggagaggatgagctacatggtcgggtacggcgccaggttcccggagcaggtgcaccaccgcggcgcgtcggtgccgtccatcaagtccagccccggcaagatcacctgcaagggagggttcgcgtactacagcagggacacgcccaaccccaacgtcctcgtcggcgccatcgtcgggggccccgatggcaacgaccggtacgacgattcccggccgaactataagcagaccgagccatccaccgtcaccgtcgcccccatggtcggagtgcttgcgaggctttcgaagcagaactga

SEQ ID NO: 133748 - DNA, 2459 bp, Zea Mays
gaaaatttctttgcatgggtagtgtgtttggctaattctctcccaaaatgtggaagaaaataaagggaatactgtgcttgaattgcagcaaagatctatagaattcagttccattatacgaagacatcaatcgatgaaatcatctttgcttgaacggatgcctgtattggatgaagctaattatttggtgaagagagctgcttctatacaggctgcagttccatctgtaaattctgctccagcagtcacttctggaggcccatttaagcttcctaatggtgttggaaagcctgcagctcctttagctgatttgcttgatttgagttctgatgatgctccggtgactacctcggcccctacaacagcacctaatgattttctacaggatctgttgggcattggcttgactgattcgtctcctataggcagagctccgtctacaagcactgacattctgatggatcttctatctattggttcatcttctgtacaaaatggaccaccaacggcaaggtgctagatactaatttcaggatcggagaacatccgccgcgactccatgctccaggagatcaagtctgcctaccagattcttgcccacaagtaccatcctgatatgaataagagtcccgaagcagaagaaaagttcaaggagatcagtgctgcatatgaggtaatcttcagccttgtggcttcagctgaagtgctgaaggagaatagcactagaacgcgctgagtattatattagtttagcaacatgtgtttatttcctattagattagtttaattctaacatgattgattcaatcccgattcgtccacccgttgccgtgaattcctccgccaagcttggatctgaccgctgtactttgtgtcgccgcttgaatctacggttctcttcttccttgttcatcccgtggatctgtcccgtggtggtccaagcattcgatttctgctattataacatccaacgttggcggtgaagagcaaggggacagataagcccaaaggcagcaaggggaacgtcgacaaggaccccaacaagcctgactcccaacattttttgtccgccggtgctgtagcggaagcccaaaggcagcaaggggaacgtcgacaaggaccccaacaaggctgactcccaacattttttgtccgccggtgctgtagcggcggcgctggtgagctcccccatgctgggctctgggatgctcccaggcgccgggttcggcgagacggggactgatctggtgctgggctctgggatgctcccaggcgccgctgccttgcagttcctcggtcgattcaagggaatattatcagtggaagagactggtgaatcaaaggccgtcaacgctagatggaggcaaagtgcctgctgcattgggccaccatgtttttggtgcgggctgttcctcacggaaccaacatatctacatatatttttcatcttctcatcaagggagtatatgggtcgggagcaaggttctacatgacctactagggtatgtaaaaattatggaagtagggccacgagatggtctacagaatgagaaggacatcgtgccaacacctgtaaaggttgagcttatacgaagattggccacatccggattacctgttgtggaggcaacgagttttgtatctccaaaacgggtacctcaggcaggactgaggctgtttcatcctcctctgctgcggggtgggctaggtcgtcaccatggcgtcactcgtggcgtcttgtgcagtagggacgacagcagggagctgtcaagatgggttacctcaagatggacgaggagttcctcaagaggggcgagagcgggggcacgtgctgcgtcatagcccttctccgaaagggtagactagtcgtctccaatattggagactgtcatgtggtgctcagccgagcagggaaggcaaaggtgctcacctctgaccatcgggcctcccaggaggatgagaagcaaagaattgagaatttgggtggatttgtggtgaattaccatgggacatggagagtccagggctccctggcagtgtctaggggcaatggggatggacacctaaagcagtgggttgtggctgaccgagagactagaacgctcctcatcgaccaccagtgcgagttcttgatacttgcttctgatggcctatggggtaagattgataatcaggatgcagttgaccaaaactctaggcattagcactaacagagaccggtggaaggcaggactttgctgcctaaagtttccatgagtcagcgctatttttgggtgtttaacattcattctttgtcatagaaccatttgttatattattagatgtaattagatctatttgattcattcttcggaaatatttattgagataatgcggggtgatctctcgcttcatgatccattgactgtaaaaggcgatttgcctatgttaatacaatgatatattctattcagagaaaa

SEQ ID NO: 133749 - DNA, 2196 bp, Zea Mays
gtcttcaacgatcacagacagctcttcttgtatggttacttgtcaagtaccgtaccgtttgttacgaagggacggcagcgcccgcacatgcattttgggattacaacctgcttttcaaccgaaagacaagtaaccgcagacatggtttggttttggttgcattgcatgacgagatttggatcacagctggttcgtttttttaattaaaaattaaattataaattataaagactaccacgtcaattgacacgcggagtcgcggacactctctgatccgaacggccaagtaataaattataaagactgccctccctcctcaaggctccagctttgcgtctgtggccaaccaggcgcctccctcccaccacccggctctccacgccgccgccgccgccgccacaagcgaccgcgcatccgctcttctccctcccttcgctctcggcggccggcgatgggggagaccgtacgggcgggcgacgttgcaatcacgactcacgagatggagagccacaacccatcgcactctcagatcgccgaagtgacgatggacatcgcagcgtcagcttctggagcggcagggagcaagttctgcaagggcgcagcctgcgacttctccgacgccagcaactcctcgaaggacgccagggagaggtcggcgtcgatgaggaagctgatagtcgcggtggtcctctgcgtcgtattcatggcggtggaggtggtggggggcatcaaggcgaacagcctggccatcctgaccgacgcggcgcacctcctgtcggacgtggcggcgttcgccatctcgctgttctcgctctgggccgccgggtgggaggcgacgccgcggcagtcgtacgggttcttccgggtggagatcctcggcgccctcgtctccatccagctcatctggctgctcgccggcatactggtgtacgaggccgtcgtgaggctcgtcggcgagagcggcgacgtgcgggggtcgctcatgttcgccgtgtcggcgttcgggctggccgtcaacgttctcatggccgtgttgctgggccatgaccacgggcacggccacggccatggacatggacattcgcatgaccatggccacggccatggggattcggacgatggccattcccaccacgacgacgaggagcaagaacagggccgtgtccatcaccacgagcacggccatggaggcgctatcactgtcacaacccaccaccaccaccatcatcacgatcacgatgttgaggaggcgctgatcaagcatgagggtacccagtctgctggcagagctggtaagaagcctcggcggaacatcaacgtgcacagcgcatacctccacgtgctcggggactccgtccagagcgtcggggtcatggtgggcggggcgatcatctggtacaagccggagtggaaggtcatcgacctcatctgcacgctcgtcttctcggtggtggtgctgttcaccacgatccggatgctgcgcagcatcctcgaagtgttgatggagagcacgccccgcgagatcgacgccaccaggctggagagcgggctctgcgggatggagggcgtggtggccgtccacgagctgcacatctgggccatcacggtgggcaaggtgctgctggcgtgccatgtgaccatcgccagggatgcggacgctgatgagatccttgacaaggtgatcgggtacatcaagacggagtacaacatcagccatgtgaccatccaggtcgagcgcgagtagggagctctgtctttggctgctgtcttgggcataaatggctggcgccattcgagctctggtgtgctcggtggtgttgtctattgctagtctattaggcaggccgggggaattatttgcgtggtggtcgtcagtcagtcagtcggtgcataaacaaggatgaaattttcggtaatgctattgacagcatcgtggttcatcgaactgcatattctagtacgctgtgccgtcacatcttgtgtaaggtcacgtttctgtgctgcggtatggaagatgtgaagttcgtggttggcatgttgctatttgttctgagcatgccttgtcgtttcagtcgaatggacttgtgggaaaaaaaactcggccagatggtggcgtggaggtacgcctgtggatgggttatatctatatttattacttttattattaagggcctgtttggttggagtgtgagtgtg

SEQ ID NO: 133750 - DNA, 2186 bp, Zea Mays
gttcgtttccgccgtcgggtttattcgccgggaccgcggttccattgctctctgcttctctagacaccggcggccgtcgccgtcctcgccagccagtcctactcctaccactcgcccgctcgtccgcgagcgagctgatgggttgcgtcggtcggctcggctgattgggttccgtcttccgtcctctcaatcattcggttccgcgacctggggtcctaagacctaagcgtcgcgtccgtccaaggccacggagagtcctggtggccgtgcgggcactgtgcgcccgtggaggtgtcgtgtctcggtgcccacacgacaacgacgctcctctgcacccccgtctctacaagtaccacctggctgactccagtttcccgacgccattccacgtatctcttgtttaggccgggctcgagagagttgggctccgaatcctgggtgggtttggagttggagaatcgccttcgtcgctcgacccagaaagattcgatggagagccacaacccatcgcactctcagatcgccgaagtgacgatggacatcgcagcgtcagcttctggagcggcagggagcaagttctgcaagggcgcagcctgcgacttctccgacgccagcaactcctcgaaggacgccagggagaggtcggcgtcgatgaggaagctgatagtcgcggtggtcctctgcgtcgtattcatggcggtggaggtggtggggggcatcaaggcgaacagcctggccatcctgaccgacgcggcgcacctcctgtcggacgtggcggcgttcgccatctcgctgttctcgctctgggccgccgggtgggaggcgacgccgcggcagtcgtacgggttcttccgggtggagatcctcggcgccctcgtctccatccagctcatctggctgctcgccggcatactggtgtacgaggccgtcgtgaggctcgtcggcgagagcggcgacgtgcgggggtcgctcatgttcgccgtgtcggcgttcgggctggccgtcaacgttctcatggccgtgttgctgggccatgaccacgggcacggccacggccatggacatggacattcgcatgaccatggccacggccatggggattcggacgatggccattcccaccacgacgacgaggagcaagaacagggccgtgtccatcaccacgagcacggccatggaggcgctatcactgtcacaacccaccaccaccaccatcatcacgatcacgatgttgaggaggcgctgatcaagcatgagggtacccagtctgctggcagagctggtaagaagcctcggcggaacatcaacgtgcacagcgcatacctccacgtgctcggggactccgtccagagcgtcggggtcatggtgggcggggcgatcatctggtacaagccggagtggaaggtcatcgacctcatctgcacgctcgtcttctcggtggtggtgctgttcaccacgatccggatgctgcgcagcatcctcgaagtgttgatggagagcacgccccgcgagatcgacgccaccaggctggagagcgggctctgcgggatggagggcgtggtggccgtccacgagctgcacatctgggccatcacggtgggcaaggtgctgctggcgtgccatgtgaccatcgccagggatgcggacgctgatgagatccttgacaaggtgatcgggtacatcaagacggagtacaacatcagccatgtgaccatccaggtcgagcgcgagtagggagctctgtctttggctgctgtcttgggcataaatggctggcgccattcgagctctggtgtgctcggtggtgttgtctattgctagtctattaggcaggccgggggaattatttgcgtggtggtcgtcagtcagtcagtcggtgcataaacaaggatgaaattttcggtaatgctattgacagcatcgtggttcatcgaactgcatattctagtacgctgtgccgtcacatcttgtgtaaggtcacgtttctgtgctgcggtatggaagatgtgaagttcgtggttggcatgttgctatttgttctgagcatgccttgtcgtttcagtcgaatggacttgtgggaaaaaaaactcggccagatggtggcgtggaggtacgcctgtggatgggttatatctatatttattacttttattattaagggcctgtttggttggagtgtgagtgtg

SEQ ID NO: 133751 - DNA, 2019 bp, Zea Mays
acggagagtcctggtggccgtgcgggcactgtgcgcccgtggaggtgtcgtgtctcggtgcccacacgacaacgacgctcctctgcacccccgtctctacaagtaccacctggctgactccagtttcccgacgccattccacgtatctcttgtttaggccgggctcgagagagttgggctccgaatcctgggtgggtttggagttggagaatcgccttcgtcgctcgacccagaaagattcggtaccgcatcctcttttcccataccgaccttcagatgccttcagccatcttgatcctgcctgcctgcgcgtgcctatctgatggagagccacaacccatcgcactctcagatcgccgaagtgacgatggacatcgcagcgtcagcttctggagcggcagggagcaagttctgcaagggcgcagcctgcgacttctccgacgccagcaactcctcgaaggacgccagggagaggtcggcgtcgatgaggaagctgatagtcgcggtggtcctctgcgtcgtattcatggcggtggaggtggtggggggcatcaaggcgaacagcctggccatcctgaccgacgcggcgcacctcctgtcggacgtggcggcgttcgccatctcgctgttctcgctctgggccgccgggtgggaggcgacgccgcggcagtcgtacgggttcttccgggtggagatcctcggcgccctcgtctccatccagctcatctggctgctcgccggcatactggtgtacgaggccgtcgtgaggctcgtcggcgagagcggcgacgtgcgggggtcgctcatgttcgccgtgtcggcgttcgggctggccgtcaacgttctcatggccgtgttgctgggccatgaccacgggcacggccacggccatggacatggacattcgcatgaccatggccacggccatggggattcggacgatggccattcccaccacgacgacgaggagcaagaacagggccgtgtccatcaccacgagcacggccatggaggcgctatcactgtcacaacccaccaccaccaccatcatcacgatcacgatgttgaggaggcgctgatcaagcatgagggtacccagtctgctggcagagctggtaagaagcctcggcggaacatcaacgtgcacagcgcatacctccacgtgctcggggactccgtccagagcgtcggggtcatggtgggcggggcgatcatctggtacaagccggagtggaaggtcatcgacctcatctgcacgctcgtcttctcggtggtggtgctgttcaccacgatccggatgctgcgcagcatcctcgaagtgttgatggagagcacgccccgcgagatcgacgccaccaggctggagagcgggctctgcgggatggagggcgtggtggccgtccacgagctgcacatctgggccatcacggtgggcaaggtgctgctggcgtgccatgtgaccatcgccagggatgcggacgctgatgagatccttgacaaggtgatcgggtacatcaagacggagtacaacatcagccatgtgaccatccaggtcgagcgcgagtagggagctctgtctttggctgctgtcttgggcataaatggctggcgccattcgagctctggtgtgctcggtggtgttgtctattgctagtctattaggcaggccgggggaattatttgcgtggtggtcgtcagtcagtcagtcggtgcataaacaaggatgaaattttcggtaatgctattgacagcatcgtggttcatcgaactgcatattctagtacgctgtgccgtcacatcttgtgtaaggtcacgtttctgtgctgcggtatggaagatgtgaagttcgtggttggcatgttgctatttgttctgagcatgccttgtcgtttcagtcgaatggacttgtgggaaaaaaaactcggccagatggtggcgtggaggtacgcctgtggatgggttatatctatatttattacttttattattaagggcctgtttggttggagtgtgagtgtg

SEQ ID NO: 133752 - DNA, 1991 bp, Zea Mays
acggagagtcctggtggccgtgcgggcactgtgcgcccgtggaggtgtcgtgtctcggtgcccacacgacaacgacgctcctctgcacccccgtctctacaagtaccacctggctgactccagtttcccgacgccattccacgtatctcttgtttaggccgggctcgagagagttgggctccgaatcctgggtgggtttggagttggagaatcgccttcgtcgctcgacccagaaagattcgatgccttcagccatcttgatcctgcctgcctgcgcgtgcctatctggtgatgatggagagccacaacccatcgcactctcagatcgccgaagtgacgatggacatcgcagcgtcagcttctggagcggcagggagcaagttctgcaagggcgcagcctgcgacttctccgacgccagcaactcctcgaaggacgccagggagaggtcggcgtcgatgaggaagctgatagtcgcggtggtcctctgcgtcgtattcatggcggtggaggtggtggggggcatcaaggcgaacagcctggccatcctgaccgacgcggcgcacctcctgtcggacgtggcggcgttcgccatctcgctgttctcgctctgggccgccgggtgggaggcgacgccgcggcagtcgtacgggttcttccgggtggagatcctcggcgccctcgtctccatccagctcatctggctgctcgccggcatactggtgtacgaggccgtcgtgaggctcgtcggcgagagcggcgacgtgcgggggtcgctcatgttcgccgtgtcggcgttcgggctggccgtcaacgttctcatggccgtgttgctgggccatgaccacgggcacggccacggccatggacatggacattcgcatgaccatggccacggccatggggattcggacgatggccattcccaccacgacgacgaggagcaagaacagggccgtgtccatcaccacgagcacggccatggaggcgctatcactgtcacaacccaccaccaccaccatcatcacgatcacgatgttgaggaggcgctgatcaagcatgagggtacccagtctgctggcagagctggtaagaagcctcggcggaacatcaacgtgcacagcgcatacctccacgtgctcggggactccgtccagagcgtcggggtcatggtgggcggggcgatcatctggtacaagccggagtggaaggtcatcgacctcatctgcacgctcgtcttctcggtggtggtgctgttcaccacgatccggatgctgcgcagcatcctcgaagtgttgatggagagcacgccccgcgagatcgacgccaccaggctggagagcgggctctgcgggatggagggcgtggtggccgtccacgagctgcacatctgggccatcacggtgggcaaggtgctgctggcgtgccatgtgaccatcgccagggatgcggacgctgatgagatccttgacaaggtgatcgggtacatcaagacggagtacaacatcagccatgtgaccatccaggtcgagcgcgagtagggagctctgtctttggctgctgtcttgggcataaatggctggcgccattcgagctctggtgtgctcggtggtgttgtctattgctagtctattaggcaggccgggggaattatttgcgtggtggtcgtcagtcagtcagtcggtgcataaacaaggatgaaattttcggtaatgctattgacagcatcgtggttcatcgaactgcatattctagtacgctgtgccgtcacatcttgtgtaaggtcacgtttctgtgctgcggtatggaagatgtgaagttcgtggttggcatgttgctatttgttctgagcatgccttgtcgtttcagtcgaatggacttgtgggaaaaaaaactcggccagatggtggcgtggaggtacgcctgtggatgggttatatctatatttattacttttattattaagggcctgtttggttggagtgtgagtgtg

SEQ ID NO: 133753 - DNA, 1817 bp, Zea Mays
gtttgtgcgctttcgggataacagacgatgcctgaggaatctactttgttgttcttgtgccttcgggataacagatgccttcagccatcttgatcctgcctgcctgcgcgtgcctatctgatggagagccacaacccatcgcactctcagatcgccgaagtgacgatggacatcgcagcgtcagcttctggagcggcagggagcaagttctgcaagggcgcagcctgcgacttctccgacgccagcaactcctcgaaggacgccagggagaggtcggcgtcgatgaggaagctgatagtcgcggtggtcctctgcgtcgtattcatggcggtggaggtggtggggggcatcaaggcgaacagcctggccatcctgaccgacgcggcgcacctcctgtcggacgtggcggcgttcgccatctcgctgttctcgctctgggccgccgggtgggaggcgacgccgcggcagtcgtacgggttcttccgggtggagatcctcggcgccctcgtctccatccagctcatctggctgctcgccggcatactggtgtacgaggccgtcgtgaggctcgtcggcgagagcggcgacgtgcgggggtcgctcatgttcgccgtgtcggcgttcgggctggccgtcaacgttctcatggccgtgttgctgggccatgaccacgggcacggccacggccatggacatggacattcgcatgaccatggccacggccatggggattcggacgatggccattcccaccacgacgacgaggagcaagaacagggccgtgtccatcaccacgagcacggccatggaggcgctatcactgtcacaacccaccaccaccaccatcatcacgatcacgatgttgaggaggcgctgatcaagcatgagggtacccagtctgctggcagagctggtaagaagcctcggcggaacatcaacgtgcacagcgcatacctccacgtgctcggggactccgtccagagcgtcggggtcatggtgggcggggcgatcatctggtacaagccggagtggaaggtcatcgacctcatctgcacgctcgtcttctcggtggtggtgctgttcaccacgatccggatgctgcgcagcatcctcgaagtgttgatggagagcacgccccgcgagatcgacgccaccaggctggagagcgggctctgcgggatggagggcgtggtggccgtccacgagctgcacatctgggccatcacggtgggcaaggtgctgctggcgtgccatgtgaccatcgccagggatgcggacgctgatgagatccttgacaaggtgatcgggtacatcaagacggagtacaacatcagccatgtgaccatccaggtcgagcgcgagtagggagctctgtctttggctgctgtcttgggcataaatggctggcgccattcgagctctggtgtgctcggtggtgttgtctattgctagtctattaggcaggccgggggaattatttgcgtggtggtcgtcagtcagtcagtcggtgcataaacaaggatgaaattttcggtaatgctattgacagcatcgtggttcatcgaactgcatattctagtacgctgtgccgtcacatcttgtgtaaggtcacgtttctgtgctgcggtatggaagatgtgaagttcgtggttggcatgttgctatttgttctgagcatgccttgtcgtttcagtcgaatggacttgtgggaaaaaaaactcggccagatggtggcgtggaggtacgcctgtggatgggttatatctatatttattacttttattattaagggcctgtttggttggagtgtgagtgtg

SEQ ID NO: 133754 - DNA, 1834 bp, Zea Mays
acttgtctgctgttctgctatcttctgaactccctcacttgaatactcttcttttttttagttttgttcctttagtgacacacatattgctcgcctgatcttcattcccacactagctttgggaggaactggaacgcatggagagccacaacccatcgcactctcagatcgccgaagtgacgatggacatcgcagcgtcagcttctggagcggcagggagcaagttctgcaagggcgcagcctgcgacttctccgacgccagcaactcctcgaaggacgccagggagaggtcggcgtcgatgaggaagctgatagtcgcggtggtcctctgcgtcgtattcatggcggtggaggtggtggggggcatcaaggcgaacagcctggccatcctgaccgacgcggcgcacctcctgtcggacgtggcggcgttcgccatctcgctgttctcgctctgggccgccgggtgggaggcgacgccgcggcagtcgtacgggttcttccgggtggagatcctcggcgccctcgtctccatccagctcatctggctgctcgccggcatactggtgtacgaggccgtcgtgaggctcgtcggcgagagcggcgacgtgcgggggtcgctcatgttcgccgtgtcggcgttcgggctggccgtcaacgttctcatggccgtgttgctgggccatgaccacgggcacggccacggccatggacatggacattcgcatgaccatggccacggccatggggattcggacgatggccattcccaccacgacgacgaggagcaagaacagggccgtgtccatcaccacgagcacggccatggaggcgctatcactgtcacaacccaccaccaccaccatcatcacgatcacgatgttgaggaggcgctgatcaagcatgagggtacccagtctgctggcagagctggtaagaagcctcggcggaacatcaacgtgcacagcgcatacctccacgtgctcggggactccgtccagagcgtcggggtcatggtgggcggggcgatcatctggtacaagccggagtggaaggtcatcgacctcatctgcacgctcgtcttctcggtggtggtgctgttcaccacgatccggatgctgcgcagcatcctcgaagtgttgatggagagcacgccccgcgagatcgacgccaccaggctggagagcgggctctgcgggatggagggcgtggtggccgtccacgagctgcacatctgggccatcacggtgggcaaggtgctgctggcgtgccatgtgaccatcgccagggatgcggacgctgatgagatccttgacaaggtgatcgggtacatcaagacggagtacaacatcagccatgtgaccatccaggtcgagcgcgagtagggagctctgtctttggctgctgtcttgggcataaatggctggcgccattcgagctctggtgtgctcggtggtgttgtctattgctagtctattaggcaggccgggggaattatttgcgtggtggtcgtcagtcagtcagtcggtgcataaacaaggatgaaattttcggtaatgctattgacagcatcgtggttcatcgaactgcatattctagtacgctgtgccgtcacatcttgtgtaaggtcacgtttctgtgctgcggtatggaagatgtgaagttcgtggttggcatgttgctatttgttctgagcatgccttgtcgtttcagtcgaatggacttgtgggaaaaaaaactcggccagatggtggcgtggaggtacgcctgtggatgggttatatctatatttattacttttattattaagggcctgtttggttggagtgtgagtgtg

SEQ ID NO: 133755 - DNA, 768 bp, Zea Mays
atggccagggttcgtggagattgtctcggccgtgttgtgcccgttccttgtttctcacagggggcctcgtggcgctgctcctcggtggcgccggccaagctgggctccaagaggccgtgctcgagcgggtccggaggcggaccgctctcggtggctggaggcaaggaggtggccgccgacgagtcaaagatccaaggagcgggtgcgaccgtcggtgttcgtcgctgtcgaaccgccatcgccaagaagctgagaagatccacggcgccgacgaaggaaggtgcggagaaacgcaagcgcatctcgacgccaccatcgtcatcgtcttccatttggtcgggtggtccagatccgaagagaaaaaggaaatttctttgtgctagaagctttgttcatatagaaatcgagaccatggattcggagaacgcaaagctccgaagagcactcgctcatttaatcagagtagtggagcagcgttgtgccgacatcgtcgatgtcgtccacggtgccttccaaccagttagcggaccagtcctcaatgaaatgaatcgtgctttagttcagatcgaggacctcgccaaggaccttgatcaccttgcactggaaaaacactgggagatggagcacatggccccttctccaattgttgaatcatcagaaacagaggatgaacttctgcttgattatgattcagagttgaatcctgacgatatcatcggctacgacgatggacgcgactactccaccgacgacacctatccctactag

SEQ ID NO: 133756 - DNA, 580 bp, Zea Mays
ctaagaaaaaaaatacaaaactgtaagcacaccaatgcaaacaggacacattggaagtttagtggatccaaccggtggagttgtggcaacctgtaagcaaggtgtatactgcacaatagctataaacatacaacgtcacacatctcgctatccatggaaacaagggttaatcgtcaatttagcaacaattttgaatatgatcagcaatttcagcgaatgcttgaacattacaaaaaaaaacaagttgactattaggcaaactggaattaccaagagcattggcaggttgaaataaagatcatactcgattaaccttcttttttctatcacactgaatattttacattgaatatcagttctgcattctcaataaaacaatgaatttttacattgcaagatttcctagaaaggtcagtacaaacaccagggaagagtaaagcagcatattagtaagtagaacaaaaaatcattaaagaaggtgactgttgtaccatggttcggtcgcccaatctaatggtgacaggacatatgttccactaacctacttattatagatgttgagtaggtaccaaacactaaa

SEQ ID NO: 133757 - DNA, 2072 bp, Zea Mays
gatggatcggggtggcaggctcaggcccaccagtacaaggcttgcccgccttttcctcaaacccgtaacaggccgcagcaggacggtaacctcggcgcgttttcaaacggagtgcccgcccacgaaagcagcacggcacggtgctcctcctttccgctgtcctcctcctcgaaggctcgaacgctttttttttgtctcctcctccgcccgttgcaaaaggtaagcccgaccaaaatttttctttaactaaagatggcttatttttgccctccgaataatttaggttataggaaaacaaaaataaaaatacggtgatcgttaaggtcccattccattccgttccgttccatctcgcagtgcagcgtcttccttcaatgcttcctctgtttcccttccctccgcccccggttcaaagaggccacaggccagcacaccttcttgagggacccttctcggtcgtttctgcccattccactccactccactctcccgtgccgagcaccttcttgaggggacccttcacgagcagcccgcgcgcatggcgtcgtcctccgcgttcgcgctcgacttcctgcggcgcctcctctgcgcgcgcagcgccggcgaccgtccagacgccgccgcacgccacacgtgcgcgccggagacggacgacgagcccacgaggagcccctgcattgtggccaggctcatgggcctggacgcgatgccgccggaggcttcgcacgcccagcccccgcggacgccgctgctgcggcgcagccgctccgcggagggctcgccgcgtcagtgcgagtgggaccgggacaacacgcagccgccgctggcggtccgggcgtccgcgtcgctgcgggagaggccggcgtacctgcggcaggagagcgacgagttcctgctcctcagcttcagccccgatgacccggacccggacccggaccgggagcgcgacgtccgggaggagctcgagttcctgctcgccgccacggcggccacgaggcgcggcgggcgggcgaggtcgggcgcgccggggggtaagcgggggcggaacgggcgccgccgcaggctgcggttcgccggcgacgacgaggcggagtcgctgtccccggcctgcgccggcctccgcaggtgggcggactgcgacgcgcactactccagccccgtgtctgtgctggaggcgcacgacgagtcgtccaccaccaccaccacatcgtcttccttggatgaggtggagcacgcggagccctgctccgctgcctcagatgaacctcagacaacactggaacatcagaactcaagcaggaagctgcacctgcaccccccggacctcgaccagccgggcacgccgtcgccaccgcgaagctcctgccacgtctcgagatgctcagacagcgagaggaggaggaggagcaggagagcggtgagcgaggacgaggaggtggtcacgccggacgtgtccgtcgcctggcagccggtctgcaggctggtcgaggaaggtctgaggagcacggagtggccgtcgacgcgggacggcgcggacgtcgtcgtcgtcgccgagatagagtgcggcgtcctggaccacctcgtgcgtgagaccgtggacgaactcctccggggagcgtctggaaccgcacgggcgcagcgtcctctcccactccgacccgtctcgaagacacagctgggtgggtggcaagaacgttcggacaggacgagcgatcggatgatgctactgaacgagcgagaggttagattcgtatgctgtgaaactctcaaatgcgaccgtagtctggtctaggtttttttcatcaagatcgctgaaacaagtggatatgatgcaaaacatagcagccggcgtaggtacagtacagactacagatattgctgaacctggagaagtacaccaggatccgcactctctgtactgccaagctccgaactctgaaactgtacatgaagatgagactccttgtactagcacctgaatctgaatgaagttaaaaccaagtttctgtgacgaaaataagcaacctgtatactttgatgtatttctttcttcaataaaaaaaatgttcggc

SEQ ID NO: 133758 - DNA, 127 bp, Zea Mays
aggttttgttctagggatttatttgtggcctagtttagttaaagttttagaattcctaattcaccccctcttaggtgtcacccgtttccttcaggttgaaaggaaatatattggcatgagtggaaac

SEQ ID NO: 133759 - DNA, 88 bp, Zea Mays
gaagctccttcacatgtgacatgtgcgagttgtttgattgatctcgcgttaaactcagtctcaggacctgagtccacatttttgcacc

SEQ ID NO: 133760 - DNA, 276 bp, Zea Mays
gttctgatggcggatttcttcatggctaaccagctaaccagccagatcccactgctaagacacctcgagttcacggggtgctacttcatggctgaaactttcagaactcacgcgtatggaagctgtaccagcagctcccaattcaagaacctgacatacgtgctctctttcctgccatactactggtgagcaatgcagtgtctaagaaggtacttggaagaaggccacgacatgaaccagcttgctaatgccggcaagtacgtatcagcgatggtg

SEQ ID NO: 133761 - DNA, 96 bp, Zea Mays
cttattcccttttcaatttaaattcgagtatagttttaagtttgcaaggtataaatgcacaagtaataaaatcccaacatgatgcaagatttatcc

SEQ ID NO: 133762 - DNA, 906 bp, Zea Mays
atcggtaacctggctgtcgcgtgggccctccactcgctcctattcctcttcctggccgaggaccgcggtgcgggttgttgcgcccgcccggcaatcgcgctatccgcggctccagctcgtcgtagcttcaaaagcggaccatacgcccacgtgctcccttcccttcgcctcgtccaaccgacccgattaaccaagtgagtgtgaattcgccgtccgcgggggagaagagaagggctgaggccgccgctcttgacatctcgcctggccattggtcagtgctcggtgtagagtcgcggggactcgccatcgggttggaatcgtgcgcgtgcgaagcatcagacgcaagtgcaacggaattccgggggattgttcgtcggagtaccgagggccgccatgtgctcgttcttccgtcgacagtgctctgtgccgcgccatttctgtgcgcctgggttgaggaatcgcctcgtcagcgatgtcgctcgccgtcaccactgcgcgggtgtcgtcctttgttgagcgatgttggctggattggggaagacgactctcggccgttcaacctggaattcacggtcagtattaaatcgaaacttaccagttcctgtaattagatctggatcgtcgatgcgttggtgaatggcttagatcaaggccgaggcgtggttgtatctcatctgttgatgtcggatctggcgatcggggatgatggtcgattcatctatgaccctgatttaatctagagggttggctattgtaacacctcaaaatctcattttgagaagtatgtaaattttttttccaaagatcttgaattagattttttttagaattcccataacctttgaagtcacatctcctaaaataaaaattttataataaaggttcaataaaagattcttctataaa

SEQ ID NO: 133763 - DNA, 191 bp, Zea Mays
gacaattttatcgaaaccaaacaggccataggcgagtttggttagcctcagaatggcatcaccaagctcctgtaaaaaattcagattttttggacaaccgagcgaaaagttatgcccgttttaaggaaggtacctcaagttatgttttttgggaggcacgactagaaagcggcggttagggcaaaactcaa

SEQ ID NO: 133764 - DNA, 396 bp, Zea Mays
atggcgatggtaatgatgccgacaggtttcatgtatttgggacagatgggtcagtcggctggtggtgttgcatgccgtacgtcgtcccgaccagcgcatgcacacgtgctgacgaacgcgacgtaccgcagcgtggagcaccgggtggtggtgaacgccgccgacgagcgcctgtcggtggcgctcttctacaaccctaggagcgacctgccgctggcgcccatgccggagctcgtctcgccggaccgccccgcgctctactgccccatgaccttcgacgactaccgcatgtacatccgccgcaaggggcctcgcgggaagagccaggtcgactccctcaaggtcgccgacgcagtcgacgccgacgccgacgccgacggcagacggtgctactag

SEQ ID NO: 133765 - DNA, 413 bp, Zea Mays
acacacacagcacagcaaaagaacctgtgtgctagctgtggctgtgatcctgtcctcctctctagctagtagctatctccatgcatcttctttaattttgttctcatctccgattctcagatatcctcttctctggtctctttatatatatctatctatctctgctccagctccagatgatgagatgagatgctggcatcatatctatcttttgttgatctgatcccttagcttgctgttgatatacatgcatgcataatattattattagtagtaattccgtcgtcaggccagcgttcgttgttcacgcttggttcgccgtcgttgacaaatatcggcgaattgaagctttaggctgtgctcagcagaattagcaagtgcaacgcgcagtgtccaagagcatcccaacaagg

SEQ ID NO: 133766 - DNA, 8359 bp, Zea Mays
tgatattatattgaatacaaaatgatttagtatcctcaaagagatcttcccatccatgttgtctaatttcatcaatttgttggttgagaattgatgtttgatcttggctgcacattaggcacaacgggtgtgagagctggagaaaaaaatgattgcaatattctatgtctcttcttcattttgattgttactgccttacactctgagggctattccttgcacacaaacagtgggaagcacggttagcacaactgcacaagcacaagcacaaggcacgagcagcgacgacgaggagctacatacctactagtctgcactctgcagggtctgaactctgaagccgagaaagcgaactagcgaagccgagcgagcaggctgcagggactgccggactgggctggggcgcggcggagaggcgcccagtcgccaggcgcgcgcggcggattgggcggcgccggctcaacgctcgacggtctaggctgggggctggggcgctgtcgcgctgggcgagcgctcggcggacgggctggactggcgtctgggtggcgcggcggcgggttggggtctgggtggcgcggcgacgggttggggtctgggcgcgcggcggcggcggactggggtctgagcgcgcggtggcggcggactgcggtctggggcgcgggactgcgggagtacgggacgcggacgcggcgctcggcgagtcggcgttctggcccagtatgagtatcttctaaaaaaataaatgggcctgcgccccgggccgtggcccaggcggccatgggcctgggtctgcccctggtttgaacaacacaaacttcatttcaggcatcagattcttctcgcaccctcccaaaaaaatcaactatagatgacattaaggaagcgtttgaatgcactagagctaatatttaattggttacaaattaattagccagctaactattatctaatttgctaaaattagctaataaacaaactattagcaagactatttggatgtctcaactaattttagcaactaactattagtttcagtgcatttaaacatcccctaactcaaatgatttaaagtttacttactccaagtctaacttataatccgtttaggccaacgacaggtctctaaagtatagctttgacccatgttttttttgttaaaatacaaatgaatgctttttcgttaaaaatacaaatgaactcttaataaatttatactcttgtagaagtaccatttaagacaaaatcggtgcgtatgactgcttaggtttcaaaactaactagacaacaaaatggttattcgtagaaccacatataatttaaacctagagtgagcacatcattttttcgctcctcgttaatttttcacacgcctaaatctaaaacgtcatctagtataggtagggccgaggaagtaattcctatagaattcgtcagacttaaaaaaaaatgtgttgactttggtcagacctagaattgtgttcgttctttaattttagaacggagatagtactgttgtactctagttggattgagccaagtagccaacagccagtgagtcacgacgtgtcgagttgtctttctttgagtgaagtttttctctctctcagcaaagaggggggacccacacctgccccatgcccccatcataaaaaaaaaactctcccaaggaaatgcaatgtatatggctatacatgtccaaacgggtcgggccttacgggtagcccgaagcacggcacgggttaggcccgacccgtacccggcacggcacggaaggcgacgggctcgggccggcccggcacgacacccgggccgtgcttgggcctgagtcggggcacgtcgggcggagcccgagcacggcccgtttaagcttacggcccgttccaagcccggctcacatcaaaatatccctccccgactccccgtccgccgcacgcgcacacattccagtcttccacattttcgtctcctctctcgccctcgccctctccgtctccgtcacactcgcggactcgccctctctggatctccttcgtggagtggctccgtggatccgtgctttgcgctcgtcggccgtcgactgtcgtgttcctcttgctccggtgagccgacatagcccctgccccctgtctgtaagttcgactacttctcggcttctcctaaccctaaacctaaactggtgagtggtggtcgtcggtgacttttcggtgctcttgctcttctgatttgttcttagatctcttgtttcctctcgccttctccgtctcgcttcttcgcttagggtttagggtttgtgcctccctgattctgtgcgactgtgcgtgcctctccggctctccgtctcgtttctttgttctaatctgctctgcctacactcgtccaatcctccttgacctcaagcaacatcagctctgcccctctggttgcccctcgtcgacgactccggtgctccggccactcaggtgaagttctattttcctagatctactacctttgtgctcttgattttgatattttgtattttatttatacgatttgaaggtcgttgaggaaccggtgacgtcgttgaggagacggtcaagtatccctccatctccatggatcttgatcaggacgccgaggcggcagagcgtgagcttgaggatcacaacgagcgtttggatgagttggccttgtttgggattggcactgccactggcagcaatgttgatcccgtagatgttgatgcggcgcctgtgactgcctcctcgagccccactgccactggtggtagcactgccaatgacaaccggccgaggaagaggctagcgacatctagggtttgggctgacttcgaggaagtaactgggctcgacgacaaaggtaagaagattgcagaccagtgcgcaagagcatgggccaaaccggccaagcatggcattgggctgcaggcactcgtctccacagcaacctcccccgccagtccgcaacggccaatgccaccgtcatcttctccgctatcaacatcatcacatgcaggagctatggcaaagggaaggggtgcggtgcgggggtgtcgtctgggtggcaactggcaaagagaggaaaggaagggtgcgagcatgctttatcgtgaaccacagtgctgttgtgcctctgtgggcatcggcatcggcatcggcactttgatggtggaggtggagggcaagttatggctcactgaatatggatagtatggtcgcaatgggcctgctgccaagtccttgcaggttgcagctgctctcgctagtcccgctctcgcccagacacacacaactctgacagcatgcatgccttgcacaacttgaggcagaacctcaaactgctgcgaaagcaaaatattcttcttgtcttgaggaataatagcatgcgacttcagatcgtcttcatgctgtttcggggggggggggggggggggggggggggggggattgacatgatgcttgaatgcaacgcgtgcttgattgatgagctcaaagacgaccaagctgatgttggcggaacagatatctgaaatgacaacacaggtttatagcttaaacaatgcttcattgcttctggagaatcaagaggaagtcgtcagaaataataataatgtgtgtggttcaacaaaccttcctcgtcacgccgcgccatgtaaatactcaactacagtgatgatgatacatcgaaatgggtaactagactcttgcctctgactcctatatagagttccaagtctcagagacgatctattctcattctcaatagtgcaagtgactgccagttaaggattggaatgaacaaaggaagcctttattctgggcctcagtgatcctgactggcataagaacagttcagtgtccatccaattacttcacacatagaattgtcacacggttgctacctacaagtgaatgccaggagtccagggctgaggcaaaggccagtgaatgcctctttttatttatatgatgaaaaaattatgtgttctttagacactggacagtattagtgacgatgaaaagatcttatgaaaaaattttggaagctatcatcaaatcaaactacatacaagtatgcaacagcccatcacactttaaaattacctgaaatttttcatattttaggacatgtaccagatgttgtattggctacacccacttctatttactttctggtggggactacatgcttaccaaacgttaggtaattgccggctaatgggtacagtacagtcagttcacctcaagatcctaatgaaggacctcattagaacgaatccaacaaactatagatcaaagaaaatgcttatggtacatgctctgagttacctcttgacagataccagtttcatgggaacttttttcagcttgctgtcaacattcttatgtagactagattatgctgaaatgtgttcttctacatgtttaatagcagacatagtagtcctttaacacccaatacaaagcaccttctcactttccaaacattttctcggttctggcatatgtcatatcttccattccactgaattctgaaaatcggcagcaatgtcttcaaaatatgaaataatctttgcaaccaaagctcgattaaatggccagccaaaattttgtatgatccatttgatttgtgatatgagaagcaggaaaggaaaagcaaggtcgttctaggctactccctttgttccaaattataagtcactttgactcttttttttggtacataaattttgctatgtatctagacataacatagcaaaatctatgtaccaaaaaagtcaaagtgactttgaatttagaacggagggagtaccataccatgtacttaaagaagcatgctcccttcatgtacaaaaacaatatcagacacgcaatattcatggctatcagaaaatttgtggcattctgaagtgtgattctttctatttgtaacgaactacatcagaacataagccataaagttgtcatgaacactgaagatcagtcttgcaggaattctagagctattatgagttatggctgtttatatgtatgtgactatgtgagaaaataagatcaaaacaatgtgtggcaagtattaagataaacaatatgttcaccaatttaaatgcagatcttaggaaacaaacaatagctaagtaattactactccccatttgaaatggatgtcattttggcagccagttttggtctttacatgttttgcatcctcaagacaacattgtcactattgatttcttgttggaggtgatgtcagagaaataagcatgcaactaataaagtccaatcacgataaaaaaaaactaaagcattatgtatatatatggagcaaaagaaataattaaatttggtcagagatggaggattgctgccagtgtcaaaatctaaaaaacttgtcctaacacccatggtaggtctgctagatcattaattttatcagtattacatatatacgctaaaattttaaaaaaatctctcctcataaaccaattatgatttacacccattgaattagccacaatcactacatgagccattaaaaccattgactaatgactattagtcaatccattccatgcaaccatagttaaacatgtcgagagtaattgtgtgtctaggtgcacactagtgtctaggttcatagacttatctttagcttaattttagcatgaaggaatagcagattagcagtaataggctgattaagcgtgtaatattctgcattaattagaaggctatcaaatcttaaaatgtagctcacagctgcctagagaaagagagagagagagagagagagaatcagaaaaggctaagtcagtccagtcaccaaacccactgtgtttgtcttgtgtgtgcgagtttctggttatttatttgagggctatttgcctatcaaaacacctaaaactatgaatgtgtcattcgagaaaaacaatggagttgtacatggtatatgtaggggtgataatgggctctaaattttacactataagatttaagtatcggatcagattaggatcaaactctatttctattcatttttaaactaaaaattatttagaaccttaccattttgtgaagaagcatttagatcatgatccattaccacctctaggtatatgtaagatttattattataggtaacatttacagatctggcgtcatagcaacacaatataacatttgagtcccaagcaaagttgcggtagagatgaaaatcgaaaaccacagcaaagttgtagcaaaaggcacaacaaaaatatactcatatagtagtgtgaatgcatatatacaatgatataactttctcggttcttcaatgaagaagaactacaaaatttcaataggcaaagaagttccagatcagattttacagatagcacgaaatgtctgtgtatgatctactaatcaaccgtggtggaagtcggaatcagaaagttgataaaatcaaacttttactcaaaaagatcatatcacactatcacagtcagaaaagtgatagcaaacacagctctgaagccacagttaacccagactactcactgtgttggaataaatccaaactccgaaaataaaatatattgctaccactcagaagtttatcctaaaacagaatagttttttttcctactacttatttctgggcactattttctacttcatttagcatcctgagcggtgatctccattaagctttaacgtcaactgaaaagaacttctacaccaatcaatcactttctgctaagcatatacagttttcttaatgcgttttacattaagcttgtaaaaagatcacaagtctaatgtatttcaaggatttcagttgaaaacttactttcacactggaccattcaagctccagcttattgttgtagtacttctcatcatcacactataggcttaggcaaaaatattgaaatacttaaactgacaggttcgggccacaagagtaacaaagctaactaatagtgtaaggatagaaagcatatttgtaggtgagataaatccaaccataaattgacctaaatcgggcatgattcactaccattgacaagcaggcatctctttcttcccaaactatgagaaaacagaaaaataaacttccagcttatacaaaacttgacgacattcaattacatataactatatgaagggttgtctggtacgaaggaagacaaagaaattgcacttctccttcgagattattgttaagcggtataataggaattaggaaatgctcactgtgcttgaagaagcatgtggtatataaagtggagactgccgaaggtaatttaccctgacagtgaagaatagatgcctgttgctactcctgccaagctataaatgatttgggacaaccccggagtagcatttagcactccaaggaatccatcatacaatgtgcccccatattcatcatttatgatgcctgcgagaacaaagtgccagattaacagttcaaaatatctagggggagatgtgtcgtttttcagattatttttttatttagcattattttccgtccccagaaaaaaccgagctaggaacagtagctgaaagcaactcccgatgttgactcgtcctacccctagcatatggaattcccaagacccaagtagtacctgctcaacaactcatttggactcgtctaccctacgcctcatgtgaagtaaaaaagaatctccactagcagtaaaaaagtagtcgtgggattcgaccaaaaaaacagacgtgcaaccttggctgatagaccaataacaaaatcaattatcaaatgcacaggcttatactccaatcgaaacaccagcatcatgcatgcagcatccgaatcgaatgactgatgaatcaggtaataacagggtgccaccggtcggatcgtcggaggcgggggatttgcagcctccatccaatccaggggggtcacaatggcgtcggaaacagcaggagacgagaagtcggagcccagcgacccgccgtgcaaaagctagcatctaggcagcggcgcgcgcaccggacctagacccacacggagtggggaacgccggatccgccgcgattgcagggcgaggataggagctcgagcgaagctgagagtaatggccgaaatggaaggcaggatgccgcaccgcaactgaccttgggcggatcggaggcttgaagccaggtgcaggcgcgggtaaccgccaccgcctcccgctccccttcctccgtctcctgctcggtgtcatggtcctcgcggtcgggaacatttctcggcctgccgcgtttttggtgctgcgaggagcggggagccagtgacgcgagacgcgacggcctcacagcctcggcacgcgacaccggacaggcgggacacgcacggg

SEQ ID NO: 133767 - DNA, 615 bp, Zea Mays
atggatcttgatcaggacgccgaggcggcagagcgtgagcttgaggatcacaacgagcgtttggatgagttggccttgtttgggattggcactgccactggcagcaatgttgatcccgtagatgttgatgcggcgcctgtgactgcctcctcgagccccactgccactggtggtagcactgccaatgacaaccggccgaggaagaggctagcgacatctagggtttgggctgacttcgaggaagtaactgggctcgacgacaaaggtaagaagattgcagaccagtgcgcaagagcatgggccaaaccggccaagcatggcattgggctgcaggcactcgtctccacagcaacctcccccgccagtccgcaacggccaatgccaccgtcatcttctccgctatcaacatcatcacatgcaggagctatggcaaagggaaggggtgcggtgcgggggtgtcgtctgggtggcaactggcaaagagaggaaaggaagggtgcgagcatgctttatcgtgaaccacagtgctgttgtgcctctgtgggcatcggcatcggcatcggcactttgatggtggaggtggagggcaagttatggctcactgaatatggatag

SEQ ID NO: 133768 - DNA, 228 bp, Zea Mays
atggtagtaaatcccgctcgccgtggccccggggtgctactcctcgtggcgctccttgtggcgctggtcgtctctgggcactgccctggctgcgttgactctgaccccaaccacggtttcgaggacatccgggagcagatcttcggctccgccgtcacctctgtggtgacgccgcccatgtccggcttcgcccagaacgtgcgcggtatgggcctcggcgagtcgtag

SEQ ID NO: 133769 - DNA, 1749 bp, Zea Mays
tcctctcccatttccttgtcctctctccctctccctcttcctccctcacggcctcacctctccagcctcccgctcacctcttccacctctctacgctccccagagggccccagacgcaccgccgacgacccccggcgcgggcgcagatcagcgtgcgccgtgacctgcccgccctgcctccgctgctttcgaccctgggagcgcctgcccgcgccgccggggcgcttcgtatcgccgcttctctttttgttccgcggctcttcctcgccggcaggcggccggctgctgccccgcccacgccgcgtctacgtgtcctcaaggggctgggcgctcttgcctgtcaaacctggtgccgcctccggttggaaaccgtgagtcctgagctcatgaatccgtctcgccgcggccggcaatctgggcttccttaacctgacgggcgcgtggttccctctgactccgtgcgtgcgcctctgtgtaggtttcttacgggttaggagcaggaggtcagagactccccagagttggcttcgccgcgcgcatgcgatttgcggcggcggccgaagcctcgtacagccgccgctgggacgacgacgacaacggcgacgtggatgcctccgccgccgccggatcgaagggactatctataccgggagggccgcaggcacgacggcggcgtcggcgactcgctcctgccgcctgcccccacgccgccgcgctggcgggactcgccgtaccacccgccgccgccaccgccccttcgggaccccgcgcggccctcgccgcgccgtgcgccgccgttggcctcctcaggtgggcatgccccccgcgaatgctcagatctgaggccgccgccgcctcgccgaccccctctggtgcccctaatttcctccaaccgctctgctatttcagaaggctactaccgacagggtggcggcgcgtacgaccgttcctaccctgatgacccgccgtctgtctacacgccgtcgcgctcggaccggtactggccggaagacgacgacgggggatacaagggtttcggtcggtatggcagcggtggccgcagggacggccgtgacatgaggggttcataccggaagtccccatacaggggcggctacggaagcgacttctccaggaaccactcagagcagccccctccgccaccacccaggaggtctcccttgaggtcagttgccgttccgatctgctatgaccctccgggcaatagaattaacagaggggacagggacaacctcccacgggtgacaccatggcggagaagggagagcagatctgaagtagccgatgctgatggaccgctttctgttggccaaagtactcggctctctgcttcagggaaggaggcttcagctcagcctctggccgcggcaggtcctcacgggacggaagacgaggcaccaaggaagaaggcacgccttggatggggtcagggtttggccaagtatgagaagcagaaggtgcagggtccttcggatcccgctgaagttgttgctgatgtaagttcaggtgatggcgaacagaagacctcccttgcgcctgcgccttctgttgcatctgtatttcctgctgcaccactgcctgagtctgcaccagcacctcctgctgctcttgcactttcgtctgctcctatgcgatgctcatctccagttactgcaccgccatattgttcctcaggtatgcaacccgtattgatttttgatccgtctccttgctagcttgattgatctt

SEQ ID NO: 133770 - DNA, 5941 bp, Zea Mays
tcctctcccatttccttgtcctctctccctctccctcttcctccctcacggcctcacctctccagcctcccgctcacctcttccacctctctacgctccccagagggccccagacgcaccgccgacgacccccggcgcgggcgcagatcagcgtgcgccgtgacctgcccgccctgcctccgctgctttcgaccctgggagcgcctgcccgcgccgccggggcgcttcgtatcgccgcttctctttttgttccgcggctcttcctcgccggcaggcggccggctgctgccccgcccacgccgcgtctacgtgtcctcaaggggctgggcgctcttgcctgtcaaacctggtgccgcctccggttggaaaccgtgagtcctgagctcatgaatccgtctcgccgcggccggcaatctgggcttccttaacctgacgggcgcgtggttccctctgactccgtgcgtgcgcctctgtgtaggtttcttacgggttaggagcaggaggtcagagactccccagagttggcttcgccgcgcgcatgcgatttgcggcggcggccgaagcctcgtacagccgccgctgggacgacgacgacaacggcgacgtggatgcctccgccgccgccggatcgaagggactatctataccgggagggccgcaggcacgacggcggcgtcggcgactcgctcctgccgcctgcccccacgccgccgcgctggcgggactcgccgtaccacccgccgccgccaccgccccttcgggaccccgcgcggccctcgccgcgccgtgcgccgccgttggcctcctcaggtgggcatgccccccgcgaatgctcagatctgaggccgccgccgcctcgccgaccccctctggtgcccctaatttcctccaaccgctctgctatttcagaaggctactaccgacagggtggcggcgcgtacgaccgttcctaccctgatgacccgccgtctgtctacacgccgtcgcgctcggaccggtactggccggaagacgacgacgggggatacaagggtttcggtcggtatggcagcggtggccgcagggacggccgtgacatgaggggttcataccggaagtccccatacaggggcggctacggaagcgacttctccaggaaccactcagagcagccccctccgccaccacccaggaggtctcccttgaggtcagttgccgttccgatctgctatgaccctccgggcaatagaattaacagaggggacagggacaacctcccacgggtgacaccatggcggagaagggagagcagatctgaagtagccgatgctgatggaccgctttctgttggccaaagtactcggctctctgcttcagggaaggaggcttcagctcagcctctggccgcggcaggtcctcacgggacggaagacgaggcaccaaggaagaaggcacgccttggatggggtcagggtttggccaagtatgagaagcagaaggtgcagggtccttcggatcccgctgaagttgttgctgatgtaagttcaggtgatggcgaacagaagacctcccttgcgcctgcgccttctgttgcatctgtatttcctgctgcaccactgcctgagtctgcaccagcacctcctgctgctcttgcactttcgtctgctcctatgcgatgctcatctccagttactgcaccgccatattgttcctcagcacctgaagataaatcatgtgaaatgacaccaaatacggtcactaactctactaaagatgtcttggaagctgatggtaaaactttcaataatgaattttccatcaagttagatcagctcggtgatgatcctattaatggccttacaaacattctcgttgaacttatgcaacataatgattcttgttctggggattcaaacggcccgaccagtacatgtaagctgctccaactgaaggaaagcatttccaaggagattgaaaagactgaactccagattgattcattggaaggcgaacttaaatctgtgaatactgaggctgtaactactcttgaaagttctcccacaggggtgacacatacagaaaatctgtcaccttctggtgggacatcaaaggttcctggaagtgccgagatctgtgatacatttgatatgataaaagaaccgggggagctcattgtttctcctaaggtacctgtggtgcaggatgctgatgtcaaaggggtcgatatgatggaggttgaaacagctccagttcgcaatgcaaaaacagttccttcagaagagagtgctgtaactcctggagttgctgagggtaaggcatgtgcagctgctgatcttagctcattgatagcttctgaagaagctgggtctcaaaatgatattgacaatgacaggccgaaaacttctttgtgccatgctgattccatgaaaattaaagttagtgatgaactaccagtgaagcaatggacatactgtgatcatatgtctgatttacacagttctttcacatctgcaaataatgatatagccaaagaaatgaatgaggtgctatttaaatcattgcctgctggtacatctgcccttgatttgttggcatcaagtgatcttcttagccaacggaagattgatttgattgtcaaagaaagacttggagtacgtaaaaccaggctgaggttgaaagagcagattcttacaatgaagttcaaggcatatcgtcacttgtggaaagaggatgtacggctactttctgcaaagaaacagcgattgaagtctaataagcgcattgatcagaataaccgaacatctcaaattggatctcagaggcaacgcttttctaaccgctcacgattagccatgcctgctgggaatttaagtacattctcaactccggaaatgtcagatgttgcaagaaagttgttttcagaatctcaaattaagcgctgcagaaactacttgaaaatgcctgcactgattattgatgagaaagagaaggaacacctgaggtttctgaccaagaatggactggttgtggatcctgttttagttgagaaggaacggatcatgataaatccgtggactcaagacgaaaaggaaatttttatggagatgcttgctaaatttggcaaggatttctccaaaatttccagtttcatcacacataaaactactgcagactgtgtggagttctactacaagcatcataaatcagacagcttccgagaagtgaagaaactgttggaccttcatcaacagctgcctgccagcaattaccttggagcgaaatcaggacagaaatggaatcctgagtcaaatgctgcttctcttgatatgcttggggtagcatcagctgaagcagcccatgaccttgaatatgcaaacaaagtggagaaaatttctgtgaaatccctcatccggactgcatatgggtccaatgtttcatttgtgaccaaaaaatcttctgataaggagtgcattgacaatgtgcctttgcatgagagagaatctgtagcagctgatgtactagcaggcatatgcggcactccttctcctgatggaatgggctcatgcattactagttctgctgatcctggcctgaagatcagcatgaaaagagtggagcatgtcttatcccaagaaaatgacaaaaatgttaatgaggaagaatctctctctgatcaagagtgtgaatttgatccagttgattggaatgatgatgagaagtcaattttcattgaggcaatgaataactacggaaaggatttttctcggatctcgtcttgtgtgaagagcaagtcatatgaacaatgcaaagtgttctttagtaaggctcggaaatcacttggtttggatttgatccatcaaggggcagccgatgttagtatgccagctagtgataccaatggagggaggagcgatactgacgaggcctgtgctgtggaaatggattcagctatctgtaggaagcagtcttgttcaaagattgtgcaagatgtttgtcctactgaaggagccattttagggcctgactctgttttaatctctaagcagacagaaggagatatatcaaataggtgcattgttgatgttaaaattgaggaagatgataaggaagctgataaaaattgcagcaatgttgatgataagaggtccagtgatagtactcatcaagctggccctatcaacatcaattgcccagaaagtacagataagctgcaaggaactgatgatgccgttgaccaagtaaacatgcatagtagtgtcctcaactcttcaaatgagcatgcaatggccatgcactcagaagtgagatccagtttacactctgtagatgtacttcaaacagacaaagctgaaggtactggtactgatcctagccaggtggaagaatgttcacatcatgctgtctacacaccgatgacagctgggaattctggttcctcagctttcttaacttcagatagtggtatcaaggacaatgttcacatctcaaacatgtctggtgcctccactgttagtcctgcattcacttcaaactatcaacattctctgccaggagatatgcccctgtcgaaaccaaagccactagtaacctcccttaccccaaaggatttaatgcctgtgcagttcagttcagttcttcctgatcccactgcatttcgttttgagggcataaagcccaactttgaggacagcagtggcaacaaagtcagcagtgccctaggagctaaagacatttgcaagtacccagcttttaaagacccatctgataatgagcatgacacattgtttcgtaatattgatggttatatgaataatcatctgacaactgaattgccagttttttctcaaagaactgcaagtggcactgtgagtacttcgcagacaaaattccagaatggcaggtccagcagcgtgtgccttccaaacagttctgaggggattcaatggcccaggaaacctgaagaagtaccggaagattctttgaggccttgcgctcgcaatgcaaaaactgagggtggtgagaaacaaaagcgacctggtgatgtcaagttatttgggcagattctcagccatcagccaaccttgccaagttctggctcgttgtgtaatggtagccagagcaagcctccctcaccaaagattgacaaaacatctgtgagattgaccaacaatccaagggatcttgtagttttttcttccaggcctggtgtcagtccacatgtgggtctggaggaaagatcagtgaggagctacggccatctggatggaagcacgatacagcctgagcctctgctggtgatggcgaagtgccagagatccttggccagtgtaccattttactcggctaagaacagcacggttggcgtgtttccagattatcaacaaccttcaatgcagccacatcaattagatcccaagccgctggaaatgttttctgattcgcagaagaggaatgggctggaactcgtctcgggtttcggcggtgctggtatccttgttagcaacgtctcagaccatgtggctgctctcaaggctcggtatggtcccggttctaagataatgggcagtgacgcggatccttggaaagacataggaagcaggtagcaccgatagcggtagccagttctagtgcttgttttgttgctcgctgtatcatatttagttcttttttttttctgtaacttgaatgaaatcgtcaaatgaaggaaagtgaatggctttcctgcccatactatttgtaagctttgcagtagttgccgggttatgttatttactggcattaacatttttacctttattgcagcaccataccctttggtagcttgacatgtcaacagcggcccagcgccaccgtgggctcgttagaggtgattaccaggtgttttgtcagcagggtttgatgttgtcagtctatggaaattccttattctcagtatcctagtatgatggatggagttttggtt

SEQ ID NO: 133771 - DNA, 1075 bp, Zea Mays
cgcctttggtacaccgtttgcgtagaaccaaaaatacacaatttgaacgcagcagcacactcgcccggtcgcccctgagcagcgtcgcacaccattccctgctaaaaaccctagcccatcagggcagcgaccttctagaaccgtctccaatggcgctactccgagcgctccggcgagcccttccggcgctctcctcgccggcggcggttctcccccgtcgcgccccgcacccactacctcctccgcccgctcctcgtcggttcctggacccgatcgggctccgctccttctccgccgccgccgccaccgcgtcgcaggcgccgcccatgggggccaccctgttcggcgggctcatggacacccggttcccgaagcgccggccgggcttcgccaaccgccggaagagggctagcttgcgccccaaaggtccgtactactgggtgaagtgcaagcctgacgagcccataccagttagtcagccgaaccaagggagcgtacgagggaggaaggagaagaagcggatcaagcagcgcaaggactttatcatggctgagaagaagaagcgcagagctcagtattctgctgctgttaagagaaaggaggcagaacgaacagaaaggaagatggctgctgtggcaagagagcgggcatgggcagcaaggttgatagagctaaaacagattgaggaagacgttaaagctgtaatggcataagggcctgctctggaaaatggcaaggcgtctaacctgtttctgctgctctattttctcctcctttgttcctacatagtttaaattgtcacaattctttgtgatggaatggaagaccagtaccacttctttcaacagtaatatcaaatgccggaactgtttttttaatacagactctcattagaccatgtttggagtttgtttacttttgatgtaatttagaataagtgatgcgatggtatctgtgtgcttgacatctgagatggctgttgtctgcaatatatagttttggtacacttgttctatgatacataatttgtactgtcagtattcaagcaactaatgcttgctagtcttttgatcta

SEQ ID NO: 133772 - DNA, 2176 bp, Zea Mays
aatcccatgcagtccggtcggtggatccaatgcgatcaggccggcagctccctggccggctcccagcccgagcccatcattgcgccgccgcctccagctccagctcatccggatgagggggaaggaagacgataccagacgctactcctacaactcaccaccactacactatcccctccgctctctctccgcactactgcgtattaggtagcctctcgcattgacaagccagccggtggtttggttcgctttgctttgcttacgtgctgcgctgcgcgctccgaccaggcccgccccgaccggcgatgcagcggtggctcccggcgctcctccgccgcgcggcgcccggcggcggcgcggcgcggctcctcgccacgtcctccctcctcttcgacgacacgcaggagcagttcaaggagagcgtgcgcaagttcgcgcaggaggccatcgcgccgcgcgccgcggccatcgacgcctccaaccacttcccgcgggacgtggacctgtggaggctcatgggagacttcaacctccacggcctcaccgcgcccgaggagtacggcgggatggggctcgggtacatgtaccactgcatcgccatggaggagatcaccagggcatccggcgccgtcggcctctcctacggcgcgcactccaacctctgcatcaaccagctcgtccggcacggaaacccggagcagaagctcaagtatctgcccaagctgatcagtggggagcatatcggggcactggcgatgagtgaacccaactctggctctgatgtcgtcagcatgaagtgcaaagctgagaaagtggacggtggctatgtccttaatgggaataagatgtggtgcaccaatggcccgtctgctcagacactggttgtttacgcaaaaacagatctagctgcagggtcaaaaggaataactgcattcataatcgagaaagggatgcccgggttcagtactgctcagaagttggacaaacttggcatgagaggaagcgacacgtgtgagcttgtttttgagaactgctttgtgccatgcgaaaatgtcctcggtgaagaaggcaaaggtgtttatgtcatgatgtcagggcttgatctggaaaggcttgtattagctgcgggccctattggccttatgcaggcatgccttgatgttgtacttccatatgttcgccagagggagcaattcggccgtccaattggtgaatttcagttcatacaggggaaaatggctgatatgtacacttcgttgcagtcgtcaagatcatttgtatactcagttgctagggactgcgataatggcaaagttgatcgcaaggattgtgcaggagtaattctctttgctgctgaaaatgcaacccaagttgcacttcaggcaatccagtgtcttggtggaaatgggtacataaatgagtacccaactggtcgtctcctgagagatgcaaaattgtttgagattggtgccggtactagtgaggtaagaagaatgataattggccgtgagctcttcaaagaggactgaaacttctattttgcaagccagatatcagagcatattgttagctggaggaggtgagggcgatttagatatttagcaaatcacccctgtggttcaatgcttttgtataaccgcagacatacatcaaataaagttcacttgtacttgctgcttgcagtggctctatttttctgtcaataaagttttttatgtctctgacttatgcaatgttgttcagttgcattttactatattagtgtagacaagacagtaatataaatgtttcaatgagtgcagaatagaggtattgcttaaggaatctttacatcaagaatattttagtagcttctccacttttgatgaataataacattggcacaaactagttgaggtggtgaatttgatattcaggatttttttccataactggtttcaaagttaagtttacattgatagccatgataatatatgatacacaactctcctgcatgttcgagaaataaaatagttatgatgatatgaatctctcttttggggaagaaaacatgaaagtacaaaattagaatacagctattgatcagaatattctgaaaacacaattaagaagtgcacactgcttctcttaatgaaatgacatgtagctctcctgcatcattcaagaaaaagaagaa

SEQ ID NO: 133773 - DNA, 1869 bp, Zea Mays
cctggccggctcccagcccgagcccatcattgcgccgccgcctccagctccagctcatccggatgagggggaaggaagacgataccagacgctactcctacaactcaccaccactacactatcccctccgctctctctccgcactactgcgtattaggtagcctctcgcattgacaagccagccggtggtttggttcgctttgctttgcttacgtgctgcgctgcgcgctccgaccaggcccgccccgaccggcgatgcagcggtggctcccggcgctcctccgccgcgcggcgcccggcggcggcgcggcgcggctcctcgccacgtcctccctcctcttcgacgacacgcaggagcaggtgcgtcatgcgctcgctctctccacttcccactcggcgggcccgccgccattgcgcctcgccccatgcctgatcgacccaattcctcgcccgcccgcccccttgcaccccgccgccagttcaaggagagcgtgcgcaagttcgcgcaggaggccatcgcgccgcgcgccgcggccatcgacgcctccaaccacttcccgcgggacgtggacctgtggaggctcatgggagacttcaacctccacggcctcaccgcgcccgaggagtacggcgggatggggctcgggtacatgtaccactgcatcgccatggaggagatcaccagggcatccggcgccgtcggcctctcctacggcgcgcactccaacctctgcatcaaccagctcgtccggcacggaaacccggagcagaagctcaagtatctgcccaagctgatcagtggggagcatatcggggcactggcgatgagtgaacccaactctggctctgatgtcgtcagcatgaagtgcaaagctgagaaagtggacggtggctatgtccttaatgggaataagatgtggtgcaccaatggcccgtctgctcagacactggttgtttacgcaaaaacagatctagctgcagggtcaaaaggaataactgcattcataatcgagaaagggatgcccgggttcagtactgctcagaagttggacaaacttggcatgagaggaagcgacacgtgtgagcttgtttttgagaactgctttgtgccatgcgaaaatgtcctcggtgaagaaggcaaaggtgtttatgtcatgatgtcagggcttgatctggaaaggcttgtattagctgcgggccctattggccttatgcaggcatgccttgatgttgtacttccatatgttcgccagagggagcaattcggccgtccaattggtgaatttcagttcatacaggggaaaatggctgatatgtacacttcgttgcagtcgtcaagatcatttgtatactcagttgctagggactgcgataatggcaaagttgatcgcaaggattgtgcaggagtaattctctttgctgctgaaaatgcaacccaagttgcacttcaggcaatccagtgtcttggtggaaatgggtacataaatgagtacccaactggtcgtctcctgagagatgcaaaattgtttgagattggtgccggtactagtgaggtaagaagaatgataattggccgtgagctcttcaaagaggactgaaacttctattttgcaagccagatatcagagcatattgttagctggaggaggtgagggcgatttagatatttagcaaatcacccctgtggttcaatgcttttgtataaccgcagacatacatcaaataaagttcacttgtacttgctgcttgcagtggctctatttttctgtcaataaagttttttatgtctctgacttatgcaatgttgttcagttgcattttactatattagtgtagacaagacagtaatataaatgtttcaatgagtgc

SEQ ID NO: 133774 - DNA, 2024 bp, Zea Mays
gcccatcattgcgccgccgcctccagctccagctcatccggatgagggggaaggaagacgataccagacgctactcctacaactcaccaccactacactatcccctccgctctctctccgcactactgcgtattaggcccgccccgaccggcgatgcagcggtggctcccggcgctcctccgccgcgcggcgcccggcggcggcgcggcgcggctcctcgccacgtcctccctcctcttcgacgacacgcaggagcagttcaaggagagcgtgcgcaagttcgcgcaggaggccatcgcgccgcgcgccgcggccatcgacgcctccaaccacttcccgcgggacgtggacctgtggaggctcatgggagacttcaacctccacggcctcaccgcgcccgaggagtacggcgggatggggctcgggtacatgtaccactgcatcgccatggaggagatcaccagggcatccggcgccgtcggcctctcctacggcgcgcactccaacctctgcatcaaccagctcgtccggcacggaaacccggagcagaagctcaagtatctgcccaagctgatcagtggggagcatatcggggcactggcgatgagtgaacccaactctggctctgatgtcgtcagcatgaagtgcaaagctgagaaagtggacggtggctatgtccttaatgggaataagatgtggtgcaccaatggcccgtctgctcagacactggttgtttacgcaaaaacagatctagctgcagggtcaaaaggaataactgcattcataatcgagaaagggatgcccgggttcagtactgctcagaagttggacaaacttggcatgagaggaagcgacacgtgtgagcttgtttttgagaactgctttgtgccatgcgaaaatgtcctcggtgaagaaggcaaaggtgtttatgtcatgatgtcagggcttgatctggaaaggcttgtattagctgcgggccctattggccttatgcaggcatgccttgatgttgtacttccatatgttcgccagagggagcaattcggccgtccaattggtgaatttcagttcatacaggggaaaatggctgatatgtacacttcgttgcagtcgtcaagatcatttgtatactcagttgctagggactgcgataatggcaaagttgatcgcaaggattgtgcaggagtaattctctttgctgctgaaaatgcaacccaagttgcacttcaggcaatccagtgtcttggtggaaatgggtacataaatgagtacccaactggtcgtctcctgagagatgcaaaattgtttgagattggtgccggtactagtgaggtaagaagaatgataattggccgtgagctcttcaaagaggactgaaacttctattttgcaagccagatatcagagcatattgttagctggaggaggtgagggcgatttagatatttagcaaatcacccctgtggttcaatgcttttgtataaccgcagacatacatcaaataaagttcacttgtacttgctgcttgcagtggctctatttttctgtcaataaagttttttatgtctctgacttatgcaatgttgttcagttgcattttactatattagtgtagacaagacagtaatataaatgtttcaatgagtgcagaatagaggtattgcttaaggaatctttacatcaagaatattttagtagcttctccacttttgatgaataataacattggcacaaactagttgaggtggtgaatttgatattcaggatttttttccataactggtttcaaagttaagtttacattgatagccatgataatatatgatacacaactctcctgcatgttcgagaaataaaatagttatgatgatatgaatctctcttttggggaagaaaacatgaaagtacaaaattagaatacagctattgatcagaatattctgaaaacacaattaagaagtgcacactgcttctcttaatgaaatgacatgtagctctcctgcatcattcaagaaaaagaagaa

SEQ ID NO: 133775 - DNA, 1540 bp, Zea Mays
aaatcatttgattactcacccaagcggcaatgctacttgttgtgtgcaggtccggcacggaaacccggagcagaagctcaagtatctgcccaagtggggagcatatcggggcactggcgatgagtgaacccaactctggctctgatgtcgtcagcatgaagtgcaaagctgagaaagtggacggtggctatgtccttaatgggaataagatgtggtgcaccaatggcccgtctgctcagacactggttgtttacgcaaaaacagatctagctgcagggtcaaaaggaataactgcattcataatcgagaaagggatgcccgggttcagtactgctcagaagttggacaaacttggcatgagaggaagcgacacgtgtgagcttgtttttgagaactgctttgtgccatgcgaaaatgtcctcggtgaagaaggcaaaggtgtttatgtcatgatgtcagggcttgatctggaaaggcttgtattagctgcgggccctattggccttatgcaggcatgccttgatgttgtacttccatatgttcgccagagggagcaattcggccgtccaattggtgaatttcagttcatacaggggaaaatggctgatatgtacacttcgttgcagtcgtcaagatcatttgtatactcagttgctagggactgcgataatggcaaagttgatcgcaaggattgtgcaggagtaattctctttgctgctgaaaatgcaacccaagttgcacttcaggcaatccagtgtcttggtggaaatgggtacataaatgagtacccaactggtcgtctcctgagagatgcaaaattgtttgagattggtgccggtactagtgaggtaagaagaatgataattggccgtgagctcttcaaagaggactgaaacttctattttgcaagccagatatcagagcatattgttagctggaggaggtgagggcgatttagatatttagcaaatcacccctgtggttcaatgcttttgtataaccgcagacatacatcaaataaagttcacttgtacttgctgcttgcagtggctctatttttctgtcaataaagttttttatgtctctgacttatgcaatgttgttcagttgcattttactatattagtgtagacaagacagtaatataaatgtttcaatgagtgcagaatagaggtattgcttaaggaatctttacatcaagaatattttagtagcttctccacttttgatgaataataacattggcacaaactagttgaggtggtgaatttgatattcaggatttttttccataactggtttcaaagttaagtttacattgatagccatgataatatatgatacacaactctcctgcatgttcgagaaataaaatagttatgatgatatgaatctctcttttggggaagaaaacatgaaagtacaaaattagaatacagctattgatcagaatattctgaaaacacaattaagaagtgcacactgcttctcttaatgaaatgacatgtagctctcctgcatcattcaagaaaaagaagaa

SEQ ID NO: 133776 - DNA, 258 bp, Zea Mays
gtcgccgggatcttggccgtcccgttcccgctggcgctggcgctggcgcgctacgcctgaggagccgcgttgtaacgttcggccgtttctggcgggcgcacactacactgcactgctggcgctggtgtcagctcagctggtgcgcgacgccctgctgaagcctcgctctacattggcgcggaaaaggagtactgacgatgtttctctttctcacacagaatcatcgttaaaaagaatcaaaataataataataatagt

SEQ ID NO: 133777 - DNA, 468 bp, Zea Mays
atgccgttaacgaaacaccttagagtcgctattatcgatagcaatccagcgctggcgtcaagaagttacctgggcaaaaacattatacctgattctagggtcagcaccgttacccctgcaaccatttccttcttcaaggctgtatttcaactttcaacggtatttggatttaactttgagcttgtatgttcatgtgtcatatcgtcttcaaggctggtgctacccatcttcaacggcgcagcctacatctacgaggcgcacgtccggcgctacttcaagatcggctgctacgtgagccccagctacagcgagcaccaccgccgggtgctgcagatgacgagccttgacgcgtgcaggtccgtcgagcgcttcatcgacacacacgggcccgacgcgctcgataggatcatccgagctgctgagcaggaagccaagaggacctagcagcttagcgtgcgctgtaactta

SEQ ID NO: 133778 - DNA, 194 bp, Zea Mays
cgaagctccacagagacctgctacacagctgtaccacccgttgaagcacaattcaaggcatgattctatttatatattttttgtcatagaatttcaacataatattcagtgatatgctatatatttacttaataattttcaatttacaacagcataagaccaggacaaacacttttgatgtacctcgtcctgac

SEQ ID NO: 133779 - DNA, 168 bp, Zea Mays
atgtgcactgctcttggaatacattctaagagttttgaaaagccttttcttgagtgcatttctgaatttgatggtacagaaggtgttaaatatatacaacaatctgatattctagactacctgaagcatgtagaatcaaggttgcaagaacatgaaaggtgtacgtga

SEQ ID NO: 133780 - DNA, 1522 bp, Zea Mays
gtccccccactgtgtccgcgccgcctcattaattaacctcgctaccgcgcgcggcggcatccacctccctccctccgctgcggccagccagccatgaagccgccggcggcgagcccgggccgcgcggagaagccgcagctggcggcgccgggcctggcgcgcctgctgctcagcaagagccgccggggcgcgcggtcgcgccgggcgccgccggccacgtcgcccatgttcgtgtcgcgcggcgcgcgcacccgcgccgccaacgacggggagccctcgtcgcccaaggtcacctgcattggccaggtgcggatgcgcaaggggaagaagcctgcgactgcgacggcgccggcggtggggaaggcggccgcgcgggacaagggcgccgccaggggcggctactactactactgccgctgcctcaagagggcgttcctgtgcggcgggctgttcgcgtccgacgcgcggaagcggaggcacgagccgccggcggagcgcgggcgccgctcgccctgggtgttcagcagccgggacgtcgctgttgctgccgcgcccaagccgcccgcggacccgagcagcgggcgccgggccgaggacgaggtgcagctcggcgtcggggacgtcgacttggggtcgaccggccgggacggagaacaggaggtggggatcggcgacggcgacggcgaccgggacgcgccgctggccgtgtcgtccgccaccactacgccgcccaagaacgcgctcctgctgatgcgctgccggtccgcgccgcagaaccgcacgtcgccactcacctcccggttcccctccaccgccacggcgccaacgccggcgccggccagggacgccctcgccgccgcggcgtccccgttagcatccccatccccttcgccttctccttctccccggaaggcgccagcttcggcgaacgaggacggcgtggcaacgcaacaaacaggagcggtggcagcgccagcgcgtgagccgcagctggtattgagcggagaaggagaagaggaggaggaggaggaagtagaagtagaagacgacgacgagttcgatgagtacgacgaggaagaggaagaggaggacgagacggtgcggtgctcatcggcgcggccgctggtgctgcagcggtgcaagtcggagccggcgacgaccgcggccgcgaagatggcggcgggacccgcgacgagcgccgggtgcttctgggcccacggagggagcggcggccggaggaggcacgctccgccgccgcccggcgcggcgccggcggcggtggctttgaccggccactgagacgcagaggcgatgggggactgtgggtggtggtggacttgtgatggtggcgggccccgttcttttgttttcttatgctgttgaatctggattccttggtaagttgtgtagtagtaaatatgtgcgctcacttaaaaaaatcctgtaaatttcttcactctggtttattttgtagtagtgcactagtactcctgtctcctactatctgttagcagttcattag

SEQ ID NO: 133781 - DNA, 660 bp, Zea Mays
aaaaacggttgcaacggtgtatgccctgaaaaatttgacaatagcatcgacggtgtatgccctatcaccggcaagaatcatggtagcaacatcaaggaaagtcgtgatcatggtgaaaaaaaggcaaggatcctcatgtggtaccagcaaaacgcccagttggttatgactccaacacttccaagctaggtctgcttagctccattgcctgccagacactgctccatgaatgtagaaaatgtaagttgtgtacccataaattctgcaaggcatgtatattatgctttaaagacagcccactatgtggtgccaatatagaattcaagctcttgttcaccgattcattgatggtcatgccagaatcaagcgatcacatgctacaggggatgtggaagcagcaggtggcaagaataaagtcatatatgaggatgttttcatggagagatggacttttgtggcgcaacaagctgtgagggctttttgtgtctaagacattggaagtgcaaagtcaaggctcactatgtgtagacgatatcaaggagttaaaatgttcagaagatagacctatgttcataacttggagctgtgttaggaatgcttggggactgttggtatgtctgttggtccttaactatttcccctcaatagttgttttcactt

SEQ ID NO: 133782 - DNA, 104 bp, Zea Mays
atttgtttgtttttgttcgagtgcaagagagatattttaggacctggtgatcaccttgttttggtgctctgcacaatcaacattccttttaccgtgaaggatct

SEQ ID NO: 133783 - DNA, 825 bp, Zea Mays
aacagttcttcaaacgaggaacaggggcggtccacatctggccgtacccttcccggctccctccgtctccgatatgcaccagcaccacgcctcccgctcccgctccccctgcccctcctcgtccgccgcggcgcgtcccaggaccgaggacttccccgtggacatcgtcagcgacgaggagatggcgctcatcgacgccgcgctcgccgccgccgcggcgggggcgcgcccgctcctctccgcagcggcccgccgcgccgccgtcccgctctcccgtgcggcgtgctcggccaccgacgggctcgccgccggcgacatcgaggacgcgcctccgcggtctcggctcgctcggttccgggagcgccgcgcgctcgccgtcaccgacatcaccgccacggaatggtgcgagaagcagatggagttcgtgctcgaacggggcaagccggaaaagaccgcggccatgagggtcggatcggaccgccatgcccagctcgagcaagaggttgttgagagagtggacgtcgccattagatctgcggaagagctatgggcagtaaaattcatgaacttcatcgtgggaacaaaccagctactgttcgagggcataacgcgggaaattccagtgatcggggttgtggaaggttcatggatatcaggaatcatagacgaaatccaaatggccacggttggcgtttcattgcaacccatgctggtggatacaaagacacggtccacacgaacagttccatcagaagcacaaaaaagaaatggaaggtttgctccttacatttgctttcctaaccatttcacagtatgttcccctga

SEQ ID NO: 133784 - DNA, 2295 bp, Zea Mays
aacagttcttcaaacgaggaacaggggcggtccacatctggccgtacccttcccggctccctccgtctccgatatgcaccagcaccacgcctcccgctcccgctccccctgcccctcctcgtccgccgcggcgcgtcccaggaccgaggacttccccgtggacatcgtcagcgacgaggagatggcgctcatcgacgccgcgctcgccgccgccgcggcgggggcgcgcccgctcctctccgcagcggcccgccgcgccgccgtcccgctctcccgtgcggcgtgctcggccaccgacgggctcgccgccggcgacatcgaggacgcgcctccgcggtctcggctcgctcggttccgggagcgccgcgcgctcgccgtcaccgacatcaccgccacggaatggtgcgagaagcagatggagttcgtgctcgaacggggcaagccggaaaagaccgcggccatgagggtcggatcggaccgccatgcccagctcgagcaagaggttgttgagagagtggacgtcgccattagatctgcggaagagctatgggcagtaaaattcatgaacttcatcgtgggaacaaaccagctactgttcgagggcataacgcgggaaattccagtgatcggggttgtggaaggttcatggatatcaggaatcatagacgaaatccaaatggccacggttggcgtttcattgcaacccatgctggtggatacaaagacacggtccacacgaacagttccatcagaagcacaaaaaagaaatggaaggcttcaactaatgtgttacaagtatctatgggacaatttgatcgcagagaaattcccagcagataatttcttcagccattttaacctggaccccaactacttgttatcagatgatgtcaaggggtatattagctcattggggttcgatgcaaagacctttgaagatgtattgaaatatttcaaggttacctgtcacacgctaccacggtctcaagaacagctgctcttgagatacgagctacaggaagatcattcccttcttgaagaataccggttcacttatgatgctaggtggttcagggatcaaatccaggacgtcctcagcttctggacaggatcacacgagcctaaacttgtagctgaagaggagatgtggaagtgccgtttctgcaaatttgtgtcaagttgcccaatgaatgcttccatgccaaggtgttgacgctaacaaaaaattgctccgaattggtgtcttggtgaaatatttgatgctgacctgaaaaacaaaccgtaccgatgaatttgaaatgtagctcattgttatttgacttcatattcagttttgtaactcacatagtattgatttgcggattctattcttgttatacataccatactgaagaaatcacttaatatcactccttgcgtccaagagtctcccaccatcgtttaaaccttgcgcgctgagacgaaaatttggcagccaaagtttcattagcatcactcaaatttattttcaatttaccatggcttatatataatatacggagtaagtcgcaaggaggatgaaaacatcctgagggtagcacaaggaatcttctgaaaatgaaatatatggctcacataaatagaggacctgtttacatacaagcatcacagattctagtgacaaattgatgtttgttttacagaaaacaacaaatggaaccaactggcaggtacagtgaatcttatacagcaaacaatgtggttgtaacgggaaaacaattcaaaccattcgtagatccggcaccactcttaacttctgttcacggatgaaacatgtccctccataagaccataacccgctcccccatcctggaacttgtcaatacaagtcacttgcttccaccaccattggctaccaaggcctcaggctgtggtggcgcagcaatgtccttcacagcgctctccaccttgggagggccagaatgccgtcgcatcggtgaggcagccgcagctccaccttggaaagacaacctcttcttgactggtccagcagagcctcctttctcaggcgtctctgcgccattggccgttgctgtgcgagatttggccctcgcagattctgtgggaaccatgtagctcgggagcgacggggagctcgcgaggctctcatcgtcccgcatggtcgacgtcgtggctatgctgtgcctccttggtcgctcagactgcacactgagcacgctcctcacgtcatcgtccacctgtgaaagcccattctttggcgtgctggatttcctcctcgcaggtattggggccact

SEQ ID NO: 133785 - DNA, 1621 bp, Zea Mays
tttgcatcacagtaataagatggtagaatgctcttcaagacatgggaaaacaatagcatctatgaagtttgtatgatagctgaatatctgatgacgacaggcttcaactaatgtgttacaagtatctatgggacaatttgatcgcagagaaattcccagcagataatttcttcagccattttaacctggaccccaactacttgttatcagatgatgtcaaggggtatattagctcattggggttcgatgcaaagacctttgaagatgtattgaaatatttcaaggttacctgtcacacgctaccacggtctcaagaacagctgctcttgagatacgagctacaggaagatcattcccttcttgaagaataccggttcacttatgatgctaggtggttcagggatcaaatccaggacgtcctcagcttctggacaggatcacacgagcctaaacttgtagctgaagaggagatgtggaagtgccgtttctgcaaatttgtgtcaagttgcccaatgaatgcttccatgccaaggtgttgacgctaacaaaaaattgctccgaattggtgtcttggtgaaatatttgatgctgacctgaaaaacaaaccgtaccgatgaatttgaaatgtagctcattgttatttgacttcatattcagttttgtaactcacatagtattgatttgcggattctattcttgttatacataccatactgaagaaatcacttaatatcactccttgcgtccaagagtctcccaccatcgtttaaaccttgcgcgctgagacgaaaatttggcagccaaagtttcattagcatcactcaaatttattttcaatttaccatggcttatatataatatacggagtaagtcgcaaggaggatgaaaacatcctgagggtagcacaaggaatcttctgaaaatgaaatatatggctcacataaatagaggacctgtttacatacaagcatcacagattctagtgacaaattgatgtttgttttacagaaaacaacaaatggaaccaactggcaggtacagtgaatcttatacagcaaacaatgtggttgtaacgggaaaacaattcaaaccattcgtagatccggcaccactcttaacttctgttcacggatgaaacatgtccctccataagaccataacccgctcccccatcctggaacttgtcaatacaagtcacttgcttccaccaccattggctaccaaggcctcaggctgtggtggcgcagcaatgtccttcacagcgctctccaccttgggagggccagaatgccgtcgcatcggtgaggcagccgcagctccaccttggaaagacaacctcttcttgactggtccagcagagcctcctttctcaggcgtctctgcgccattggccgttgctgtgcgagatttggccctcgcagattctgtgggaaccatgtagctcgggagcgacggggagctcgcgaggctctcatcgtcccgcatggtcgacgtcgtggctatgctgtgcctccttggtcgctcagactgcacactgagcacgctcctcacgtcatcgtccacctgtgaaagcccattctttggcgtgctggatttcctcctcgcaggtattggggccact

SEQ ID NO: 133786 - DNA, 92 bp, Zea Mays
ccgcaatcaacggtctcttgccccaccgcgacgaccttgccctggctggaaggccgtgtaaggtgcgaccgagccccagctcaacatggaag

SEQ ID NO: 133787 - DNA, 349 bp, Zea Mays
aattgctggatctataccgaaatctgaaaagtgtaggccatacagagaattaagaagttgtcttgacctcactggacccagagactactcatcaccagaggaaatggtacaaagactaacaacagcttctactgtactaaggagggtgttggataatccagcactccaggactgtcaagagaataatggatttggagacatgatggatgaagatgttataagcaatatttcagttcgcttgaagttaagtcttactgtttaggacttcactctcccagtgacacctactttacctgctgtttttggtgtatcctggcaatattcctttttactgtgttccatttccatt

SEQ ID NO: 133788 - DNA, 198 bp, Zea Mays
gccggcggtggcggcggttcccaggccgacggtggcggtcctcgatccagagggcgagcggcggcggcagcgcccttatgcggtggcggcggtttccaggccggcggtggcggcccccgatccagagggcgagcggcggcggcgtccttgtgcggtggcggcgattcccaggccggtggccgcaactccattacctcg

SEQ ID NO: 133789 - DNA, 812 bp, Zea Mays
atatctgtacaccctgtcattgccggctccgtcggccgtcttcccgaggatgctgcggctgcgctggcgtgccgtcctccccccactcccactccctccgctgcctggcttgcttcgccgcctgcctccgcaccggcgcgccctctcgtcctcttccggctctatcccgcttccaccgccggtgatggaggcttcctacaagtttgggccctacaaaatcgacgccagggaggtcttccacgccacgcccctctcctacgccatggtgaatctccgcccgctgctcccggcgtgaagtgaaaagattcgccgatctaagttctgatgagattagtgacttatgggttactgcaaaggaagttggtgcacgtcttgagcagtaccacaaagcatcttcacttacctttgctatccaggatggtcctcaagctggccaaacagttgcacatgtccacatccacctcatcccaaggaagaaaggggattttgagaaaaatgatgaaatatatgatgcgattgatgtgaaggagaaagaattgaaggagaagcttgacctggacatcgagaggaaagataggagcatggaagagatggctaatgaggccaatgagtaccgtgctctttttagttagtttctaagctgagctgactgtttgctagaaataaggtttgctacctgttcttcattgttgcagttcagttatggttgcgcactgacattgtgatgatgtcccgttctgtaccgtggagaattaataatttgttgcaaggaatgcattcttagtgacaaaccttttagatttgcaaccacc

SEQ ID NO: 133790 - DNA, 850 bp, Zea Mays
atatctgtacaccctgtcattgccggctccgtcggccgtcttcccgaggatgctgcggctgcgctggcgtgccgtcctccccccactcccactccctccgctgcctggcttgcttcgccgcctgcctccgcaccggcgcgccctctcgtcctcttccggctctatcccgcttccaccgccggtgatggaggcttcctacaagtttgggccctacaaaatcgacgccagggaggtcttccacgccacgcccctctcctacgccatggtgaatctccgcccgctgctcccgggtcatgttcttgtgtgccccaagcgtgaagtgaaaagattcgccgatctaagttctgatgagattagtgacttatgggttactgcaaaggaagttggtgcacgtcttgagcagtaccacaaagcatcttcacttacctttgctatccaggatggtcctcaagctggccaaacagttgcacatgtccacatccacctcatcccaaggaagaaaggggattttgagaaaaatgatgaaatatatgatgcgattgatgtgaaggagaaagaattgaaggagaagcttgacctggacatcgagaggaaagataggagcatggaagagatggctaatgaggccaatgagtaccgtgctctttttagttagtttctaagctgagctgactgtttgctagaaataaggtttgctacctgttcttcattgttgcagttcagttatggttgcgcactgacattgtgatgatgtcccgttctgtaccgtggagaattaataatttgttgcaaggaatgcattcttagtgacaaaccttttagatttgcaaccaccatcagggttctcaac

SEQ ID NO: 133791 - DNA, 1395 bp, Zea Mays
atatctgtacaccctgtcattgccggctccgtcggccgtcttcccgaggatgctgcggctgcgctggcgtgccgtcctccccccactcccactccctccgctgcctggcttgcttcgccgcctgcctccgcaccggcgcgccctctcgtcctcttccggctctatcccgcttccaccgccggtgatggaggcttcctacaagtttgggccctacaaaatcgacgccagggaggtcttccacgccacgcccctctcctacgccatggtgaatctccgcccgctgctcccgggtcatatcctttgatttcagcgaacctagagctgtaatttctttgaagctagttttgcagtttttaccactgttgtgcctgcgcaaccattttcttctgcaggccactgtctattgattgctcactgcagtatagttcatgaaactttacttacctttgtgttggttctcttctttttagacctggttatcttgtctgtctaggggggatcaagtttgctttaggtactcatttagtgagggttctgttttgttgagccactgacttcacttcatatttggttcatctttccatggagaccatcaacaattctatgacatgattatttctttttcacatcatgcaacagttccacttccagaatgattgtatgcctgcaactcaagttgactttatgaatcaatttctactgtgttgtcattcggggcaaagctgtcataactcatagacccacccggatatatttatttgactcgaagtttgatacatcatgtgtttaggaaactgtgttcttctatatgcaccggtttttccttgacaatacctacatgttcttgtgtgccccaagcgtgaagtgaaaagattcgccgatctaagttctgatgagattagtgacttatgggttactgcaaaggaagttggtgcacgtcttgagcagtaccacaaagcatcttcacttacctttgctatccaggatggtcctcaagctggccaaacagttgcacatgtccacatccacctcatcccaaggaagaaaggggattttgagaaaaatgatgaaatatatgatgcgattgatgtgaaggagaaagaattgaaggagaagcttgacctggacatcgagaggaaagataggagcatggaagagatggctaatgaggccaatgagtaccgtgctctttttagttagtttctaagctgagctgactgtttgctagaaataaggtttgctacctgttcttcattgttgcagttcagttatggttgcgcactgacattgtgatgatgtcccgttctgtaccgtggagaattaataatttgttgcaaggaatgcattcttagtgacaaaccttttagatttgcaaccaccatcagggttctcaac

SEQ ID NO: 133792 - DNA, 2809 bp, Zea Mays
atatctgtacaccctgtcattgccggctccgtcggccgtcttcccgaggatgctgcggctgcgctggcgtgccgtcctccccccactcccactccctccgctgcctggcttgcttcgccgcctgcctccgcaccggcgcgccctctcgtcctcttccggctctatcccgcttccaccgccggtgatggaggcttcctacaagtttgggccctacaaaatcgacgccagggaggtcttccacgccacgcccctctcctacgccatggtgaatctccgcccgctgctcccgggtgggtaacacacacacacacacacccttgttccctccctttccagttcgccttccatgatccatgcttgcttcgttactgtagacgcaaccactcccgaactcactgcaccatagcatttttttagcttgggagtgggagttgctggaactgggagactagtcatcgcgacaaaaaaaaaaagctttctcggaaacgtggttgatggaaattagattcatctaacgttgggtcccagaatgctaaaataaaactttgtattcagaatcatgcgctgctcgtaacaaattcggcaagacaacagtgtaccgccacacccattgctcccgtagggattgttccaataggcaaggatcacaggcattgcccttctgggttggctggtaatcccaacccagttcctgcaatctcgtcgtacttaatataatccctccctatagaacaacagtcccattcaagattttctcctgatgaaacctgagactactcacaagtgcttcctgtagacattgcatttaagctttgcatatctctaaaccaccgcatcgcattgttttttttttctaatagacattgcatctgacaatgcgaaccttttcttatgcaggtcatatcctttgatttcagcgaacctagagctgtaatttctttgaagctagttttgcagtttttaccactgttgtgcctgcgcaaccattttcttctgcaggccactgtctattgattgctcactgcagtatagttcatgaaactttacttacctttgtgttggttctcttctttttagacctggttatcttgtctgtctaggggggatcaagtttgctttaggtactcatttagtgagggttctgttttgttgagccactgacttcacttcatatttggttcatctttccatggagaccatcaacaattctatgacatgattatttctttttcacatcatgcaacagttccacttccagaatgattgtatgcctgcaactcaagttgactttatgaatcaatttctactgtgttgtcattcggggcaaagctgtcataactcatagacccacccggatatatttatttgactcgaagtttgatacatcatgtgtttaggaaactgtgttcttctatatgcaccggtttttccttgacaatacctacatgttcttgtgtgccccaagcgtgaagtgaaaagattcgccgatctaagttctgatgagattagtgacttatgggttactgcaaaggaagttggtgcacgtcttgagcagtaccacaaagcatcttcacttacctttgctatccaggatggtcctcaagctggccaaacagttgcacatgtccacatccacctcatcccaaggaagaaaggggattttgagaaaaatgatgaaatatatgatgcgattgatgtgaaggagaaagaattgaaggagaagcttgacctggacatcgagaggaaagataggagcatggaagagatggctaatgaggccaatgagtaccgtgctctttttagttagtttctaagctgagctgactgtttgctagaaataaggtttgctacctgttcttcattgttgcagttcagttatggttgcgcactgacattgtgatgatgtcccgttctgtaccgtggagaattaataatttgttgcaaggaatgcattcttagtgacaaaccttttagatttgcaaccaccatcagggttctcaacatagtatcttacaaagctgaagcaaatatgcttgtcagtaacttgagcagtgaacaatttgtgaagaaacaaaaagtgaagaaccctaatattcccatacagtgagaaattcagaaaatattccatcatggctggcaccatcatacaaatatcccccagattttttttaaaaaaaaaatctccaatacagaacagttcctagatgatttatcttctcttgtttcttgcagatcccatattgtaccccctaccacataacatacctaccctaaacactaaatcaaaccacactgaacttccccttttcacccccaaatgcagtacaatccacatctcagtaaagatatagcaaagcccaagccttagcaccacccactggccatcatctgtacaaggcagaagcttccgaacccacggcagcagctgcctgcctagaactggaacctgcttggatgggacttggtcatccgcgccatgcccaccggctcgtcgttgtcgatcctcttggcgttgcggaacgcggcgcagcccgcgacatagacaatcacaaggatgatcaacaccacgatgttcaggacggccaccttgcgccagctcttcttgatgcccgcgaggacgccggccttgcacgagtcgcactggaagcacagcatctgctggtcgttgctccacctgctgcagtcagggtcattggtcacggtcgggacaccggggttttgttcccagtacgtctcgttcatgtaggtgaatgcgcatgacgtcggtggcttgcagcatccagactgcagtagtcagtcacagaaatgg

SEQ ID NO: 133793 - DNA, 145 bp, Zea Mays
gcagtttggtacgtgccagtattttagggttttgtcgtggaggttgcttcctggctctttgctggattccctccacaggcgtccttggattgggggtccttgctgcctcacaggcaggcggtcaggcctcaggggtatagggcat

SEQ ID NO: 133794 - DNA, 2232 bp, Zea Mays
gaaccagcagtttggtgactgcagaaggattcggtgaggaatctcgtcatgcagacttcaaaaccaaggagtgggtcttcagatgccccgcagaggacttctccaaggacaccgcgggcatctcgtgtggccaaaaccggagggaatgaaaccgattctacaggagttaccccgacaagaacgcctacggagaggagccctaaggttactgagaggcggtctccacggagcccaattactgagaagaagcgcccaagcaggctatcggaactggagtccaaggtcagccagctgcaagatgaactgaagaaggccaaggagcaacttagctcgtcagaggcacggaggcgccatgcgcagcaggaagccgaggaagcaaagacgcaagagcaggctgcagccgcctcgaagctggaggagttgcagcgccagcttgacgagttctcagctgcggaggaatcccgtctccaggaactgcgcaagatctcgcaggaacgtgaccgtgcctgggagtcggaactcgaggcagtgcagaggcagaaatcagcggacgcagccgcgctcggctcggccatgtccgagatccagcggctgaagcagcagctggaagcttcagcagagtctgacgcggcccgcgcgaagcagtgcgagtacgtggaagctgagatcgagggcttgaagcaggagatggagatccgcctagcgaccattgagggcctgaaggtgaatgtcagcgagagtgacagggctgcggctgaggcaaatgccacggtaaatgagaccaagcagcagctggagacagcgaaggccaccattgactcacttgtagctgagggcgtccgcatgcaggaatgcctgaggtcgaaggacatggagctcaatgagtccaaggctctcgtggcatcgctccaggaagatatgaagaagtcacatgacacggacaatgccaaggccaaggccaatactgatgtccgctctgagactgaggctctgcagaaggtgctggtgaccacaagtgccgccgacgccaatgggagctgtggaagctatgacccagagatcgaacagttgcggactgctcttgaggtcgctgagatcaggtaccaggagcagcaaactcggatgactatcgagactggaggcttgtacgagacattggagagtgtgagggccgagtgcgcccgcgaactgtgcgagctcaggctggagctgaagaacaagaacgatgcactcatggaggcaatggcaggagccgccgcagatcctcacaggccagacgcgatgcagcagccggagctggaggcgaagctgatgaggtccatcaccgacgcggcggagctgaaggcatgcctgatggacaaggagaacgcgctgcagagcctggcggaggagaacgaggcgctgaaggcgggggcgggcagggcggaggcggagctgcggcgcaagtacgaggcggcggtggcggagctggagctggccaaggccgcggagcaggacgtgcggatgcggctggggctggtgacggacgaggcggacaggagcagccggcgcgctgcgcgggcgtcggagcagctggacgcggcccaggcggccggcgcggagatggaggcggagctgcggcgcctgcgcgtgcagtccgaccagtggcgcaaggccgcggaggcggctgcagccgcgctcggtgggggtggggggaaggacggcaacggcggcacggtggagaggaccgggtcgctggggcccgagtacggcagctccatcggcgggaagctgatgagctcgccattctcggacgacgtggacgaggagtcacccaagcggcgcaacggcggcggcggcggcggcggcggcgtgctgcgcaggatgagcgggctctggaagaagagccccaagtgagtgagactgagatggggtggacggggtccgggatagccgtaggtgcgaggtgatgcaatagcagcagtatgagtaggagggatactggtgaatgctgcagggaagacgacgacgctctttctggacaagacacggagacacagctctagtctaggtggtaggaagcatgatcgtctctgtctgataacatttggctggtacttgagtgaacctcgtgtcgaggagcagctgcttttggctgcctgttctgtaccttactatgcttcattcagtcaaaaaaattcccacatgtgacatgttcttggttcttttttctttttgaagcgtttttatttc

SEQ ID NO: 133795 - DNA, 2103 bp, Zea Mays
gttatgattatttcaacatttctgtattgttcagcatagaaactacatatttgtctgtgacatggtttgcgtcatgttgaatcgtttggtcacataatttacgctccgtttcagaagaagcgcccaagcaggctatcggaactggagtccaaggtcagccagctgcaagatgaactgaagaaggccaaggagcaacttagctcgtcagaggcacggaggcgccatgcgcagcaggaagccgaggaagcaaagacgcaagagcaggctgcagccgcctcgaagctggaggagttgcagcgccagcttgacgagttctcagctgcggaggaatcccgtctccaggaactgcgcaagatctcgcaggaacgtgaccgtgcctgggagtcggaactcgaggcagtgcagaggcagaaatcagcggacgcagccgcgctcggctcggccatgtccgagatccagcggctgaagcagcagctggaagcttcagcagagtctgacgcggcccgcgcgaagcagtgcgagtacgtggaagctgagatcgagggcttgaagcaggagatggagatccgcctagcgaccattgagggcctgaaggtgaatgtcagcgagagtgacagggctgcggctgaggcaaatgccacggtaaatgagaccaagcagcagctggagacagcgaaggccaccattgactcacttgtagctgagggcgtccgcatgcaggaatgcctgaggtcgaaggacatggagctcaatgagtccaaggctctcgtggcatcgctccaggaagatatgaagaagtcacatgacacggacaatgccaaggccaaggccaatactgatgtccgctctgagactgaggctctgcagaaggtgctggtgaccacaagtgccgccgacgccaatgggagctgtggaagctatgacccagagatcgaacagttgcggactgctcttgaggtcgctgagatcaggtaccaggagcagcaaactcggatgactatcgagactggaggcttgtacgagacattggagagtgtgagggccgagtgcgcccgcgaactgtgcgagctcaggctggagctgaagaacaagaacgatgcactcatggaggcaatggcaggagccgccgcagatcctcacaggccagacgcgatgcagcagccggagctggaggcgaagctgatgaggtccatcaccgacgcggcggagctgaaggcatgcctgatggacaaggagaacgcgctgcagagcctggcggaggagaacgaggcgctgaaggcgggggcgggcagggcggaggcggagctgcggcgcaagtacgaggcggcggtggcggagctggagctggccaaggccgcggagcaggacgtgcggatgcggctggggctggtgacggacgaggcggacaggagcagccggcgcgctgcgcgggcgtcggagcagctggacgcggcccaggcggccggcgcggagatggaggcggagctgcggcgcctgcgcgtgcagtccgaccagtggcgcaaggccgcggaggcggctgcagccgcgctcggtgggggtggggggaaggacggcaacggcggcacggtggagaggaccgggtcgctggggcccgagtacggcagctccatcggcgggaagctgatgagctcgccattctcggacgacgtggacgaggagtcacccaagcggcgcaacggcggcggcggcggcggcggcggcgtgctgcgcaggatgagcgggctctggaagaagagccccaagtgagtgagactgagatggggtggacggggtccgggatagccgtaggtgcgaggtgatgcaatagcagcagtatgagtaggagggatactggtgaatgctgcagggaagacgacgacgctctttctggacaagacacggagacacagctctagtctaggtggtaggaagcatgatcgtctctgtctgataacatttggctggtacttgagtgaacctcgtgtcgaggagcagctgcttttggctgcctgttctgtaccttactatgcttcattcagtcaaaaaaattcccacatgtgacatgttcttggttcttttttctttttgaagcgtttttatttc

SEQ ID NO: 133796 - DNA, 501 bp, Zea Mays
ggctctagcctcgcactcgccatggaggggttcccgtgcaaggtcaccgccgccactgtgtttgtggacgccgcgttgccatgggtcggcaagcacataggcatctccactatgggggcaagaggctctagcggatgctggacaccgacgccatcctcttccctaccattaacatcaactactctgtcaccaagagcaaggtgaagagaatgttatttattcctcctaggacaccccaccaattccgataatttatgctgcaaagcttgtgggtctacccctaaccatcgattctagcctggctgctcgctcgacacccgccctacagtttgcttccaggaagcttagggtctcctgatgtgctcatacatggggcaacaagaacatggggtgtctgatgcttgtacacttataggcatcaccatgagggtggagctgacatccataccatctttataaagaagagcaaatttaggattctgctgtcatgttctcgaaggt

SEQ ID NO: 133797 - DNA, 774 bp, Zea Mays
atggcaattttgcccgcgggcacgtatatccgcgggtttcgtacccgatgggcatggatacggtttgaactatgttccttgccattatattatgtctgtcaagttgttgatgttcttggtgaaataaacatgaccacatactcgaatggtattttctggcgggtaatgggttgcccgatatccgcggatatcctgtgggtacgggtcgaaaattttacccacaagctctcgcgggcacggagatgctatcgtgtggaacctgtggctcaagagcatgcagatcgagcattagagaaaatacaaagaagcgtcgagagcattctacaacaactttcaacaatattgggatgtctacttgattgtggaccagtacatggagaagacttacgggcaggagatggtaggaagtatggagaagactatgattggcaaggagcgcctaccatcgacgctgaaattgtgcattctgttagaggaaaggtccatggacgatattctatatttaccggtgtgatcgatttgacggagttgcgttctcgtggcgactcttcgtcgcaggcgggttgtggtagtagtcgtagtcggcgctcgagcatggaggaggctatgagggagcagcaagaaaggttttgtgaagagctacgacaggagaaaatggcattcgtccaacaacaatcagagtacatggctgcttacaacgcacagacgcaacaagcaatgaacgtgaatgtcttatttattctcaacacggtcatatatttgtgttgtaactaa

SEQ ID NO: 133798 - DNA, 2165 bp, Zea Mays
ccttctcctattctatctatatatcacccgcctcttttttctccctcactccgccacaccttccctcttcttcctcagctccgtcgcccaccgccggagctccgaaaggccccgcgcccgccgcctttcctgtaaaaaacccaacctttagctagctaaccgctcctcttctccccctactccccttgcccaaatcagagaagatatttaacggaggaggggaaggagaggatatttagctgattgttgattggtggtccggggtacggtgttcttgagtcgtgaagcgaccgtacagtggctagggccgtctccgggttgcgtgcaggatggtcgtcagagatcgggagtgaggaggcagctcgtggtcgtggaggctaaatgtaccgcaagaacgactcggcactctcctgtttctacctcttcctcctctggttcttcttcttgaaatagaccagcgccagccaccaggtagctacctactagctagcagcccagttgcgactggggacgggctgctgcttgcaagttggaatcttggagcaggagcagaggagcgggagatggagctggatctgaacgtggccgaggtggcgccggagaagccatcggcggcgctggaggcgagcgactcggggtcctcgggctcgtcggtgctgaacgcggaggcggcatcggcgggcggcggggggcccgcgccgggggaggaggggtcaagctcgacgccggccgtgctcgagttcagcatcctcaggagcgacagcgacgcggccggcgcggacgccgacgacggcgacgccacgccgtcgccacctcgccaccaccagcagcagctcgtcacccgggagctcttcccggcgccgcagcattgggccgagctcggcttcttccgcgccggcccgcagcagcagccggacatcagggtcctgccgcacccgcacccgtacccgcccccgccgccgcccgcgcagccgcagcaggccaagaagagccgccgcggcccgcgctcccgcagctcgcagtaccgcggcgtcaccttctaccgccgcaccggccgctgggagtcccacatctgggattgcgggaagcaggtgtacttaggtggattcgacactgctcatgccgctgcaagggcgtacgaccgagcggcgatcaagttccgcggcgtcgacgccgacataaacttcaacctcagcgactacgacgacgatatgaagcagatgaagagcctgtccaaggaggagttcgttcacgccctgcggcggcagagcaccggcttctcccgcggcagctccaagtacaggggcgtcaccctgcacaagtgcggccgctgggaggcgcgcatggggcagttcctcggcaagaagtacatatatcttgggctattcgacagcgaagtagaggctgcaagggttgagtaccgactcgatattcgattctccctgccgtttcgtgaccccagggcgtacgacaaggccgcgatcaaatgcaacggtagagaggccgtgacgaacttcgagcccagcacgtacgacggggagctgctgctgactgctgaagctagcgcagaagttgctgacgacgttgatctgaacttgagcatctcgcaaccggcatcgtcccagagccccaaaagagacaagaactgccttggtccgcagctccaccaccaccatgggcggccgtttgacggctccgccgttctgaagaaaaccaagatcgatgctccgtctgagctgtcgtcggcgggccgccctcaccggtcgttcctccctcatctcgtggctgccgagcatctaccgcctcggtctcaccccttcttcatcacacaccatgaggttagacgacactatacagtactgaatcatttgcaaaggtttgtcaagctagctagattggcatcataatacacggatcaggtgtcagattgttcatgcagtgcagtatgcagcctgaaggtgtatgcagtttcagatagcagatttttagcagctggttaatttctctcttgcgtgcggctgtcagtcagtgtagctctcgtcgtcgcccgctttatttccttggattctagctagagtccgcctgtcgcccgtcgatttcagtgaagttaatgggatgcgcgaattttttttctcccccgtataggccggctgttgaatatatgt

SEQ ID NO: 133799 - DNA, 2191 bp, Zea Mays
ccttctcctattctatctatatatcacccgcctcttttttctccctcactccgccacaccttccctcttcttcctcagctccgtcgcccaccgccggagctccgaaaggccccgcgcccgccgcctttcctgtaaaaaacccaacctttagctagctaaccgctcctcttctccccctactccccttgcccaaatcagagaagatatttaacggaggaggggaaggagaggatatttagctgattgttgattggtggtccggggtacggtgttcttgagtcgtgaagcgaccgtacagtggctagggccgtctccgggttgcgtgcaggatggtcgtcagagatcgggagtgaggaggcagctcgtggtcgtggaggctaaatgtaccgcaagaacgactcggcactctcctgtttctacctcttcctcctctggttcttcttcttgaaatagaccagcgccagccaccaggtagctacctactagctagcagcccagttgcgactggggacgggctgctgcttgcaagttggaatcttggagcaggagcagaggagcgggagatggagctggatctgaacgtggccgaggtggcgccggagaagccatcggcggcgctggaggcgagcgactcggggtcctcgggctcgtcggtgctgaacgcggaggcggcatcggcgggcggcggggggcccgcgccgggggaggaggggtcaagctcgacgccggccgtgctcgagttcagcatcctcaggagcgacagcgacgcggccggcgcggacgccgacgacggcgacgccacgccgtcgccacctcgccaccaccagcagcagctcgtcacccgggagctcttcccggcgccgcagcattgggccgagctcggcttcttccgcgccggcccgcagcagcagccggacatcagggtcctgccgcacccgcacccgtacccgcccccgccgccgcccgcgcagccgcagcaggccaagaagagccgccgcggcccgcgctcccgcagctcgcagtaccgcggcgtcaccttctaccgccgcaccggccgctgggagtcccacatctgggattgcgggaagcaggtgtacttaggtggattcgacactgctcatgccgctgcaagggcgtacgaccgagcggcgatcaagttccgcggcgtcgacgccgacataaacttcaacctcagcgactacgacgacgatatgaagcaggtacatacacgagtgttcttgcagctagcaccgactgaaacatctgctgaacgtacacgcatggccctgtgcaccagatgaagagcctgtccaaggaggagttcgttcacgccctgcggcggcagagcaccggcttctcccgcggcagctccaagtacaggggcgtcaccctgcacaagtgcggccgctgggaggcgcgcatggggcagttcctcggcaagaagtacatatatcttgggctattcgacagcgaagtagaggctgcaagggcgtacgacaaggccgcgatcaaatgcaacggtagagaggccgtgacgaacttcgagcccagcacgtacgacggggagctgctgctgactgctgaagctagcgcagaagttgctgacgacgttgatctgaacttgagcatctcgcaaccggcatcgtcccagagccccaaaagagacaagaactgccttggtccgcagctccaccaccaccatgggcggccgtttgacggctccgccgttctgaagaaaaccaagatcgatgctccgtctgagctgtcgtcggcgggccgccctcaccggtcgttcctccctcatctcgtggctgccgagcatctaccgcctcggtctcaccccttcttcatcacacaccatgaggttagacgacactatacagtactgaatcatttgcaaaggtttgtcaagctagctagattggcatcataatacacggatcaggtgtcagattgttcatgcagtgcagtatgcagcctgaaggtgtatgcagtttcagatagcagatttttagcagctggttaatttctctcttgcgtgcggctgtcagtcagtgtagctctcgtcgtcgcccgctttatttccttggattctagctagagtccgcctgtcgcccgtcgatttcagtgaagttaatgggatgcgcgaattttttttctcccccgtataggccggctgttgaatatatgt

SEQ ID NO: 133800 - DNA, 748 bp, Zea Mays
tgtcgctttctgattgtattgtattggacgggaagagctgaggtcgacgcttttctgcccccagctgaactgatgggaaacgctaagctaattatattggtggaacgagtctcctgccgtttgctctcttttttgttttgtttctcttaaaaaaaacatgcttccatgcatcagaaagcgttattacttaggatgattaatttgaactgttcatcagttcgttgaattggtcctagggtgaatgaactttcagtttatttgttgaccatgcatgcagagtgatgcatcaagaagagatcccagctgggcagcagcagcagcatggaaggtgaccgcagctgcacctcctcctcctaccaccaccctgttgccgttgccgctgccgtcgacgtcgtccgctgcagcatcatcaggattctccaataccgccacgacagctgccgccgccccatcggccgcctcctcccgccggttcgacccgccgccaccgtcgtcgtcctcctcctcgagccatcaccaccaccaccaccgccgctgagaatcgaagaagccacactgtaaatctgccgggaagcggctggtggcatccggcccgctcctccctccgggcgccgcaacttttttcgatcggttttgcgccgcccgggacgggttgtagttgatcgattggattcttcataactgtatttgcgtactgcttacactacccaagtgaaatcgaaaatggcgccttctctcgttgaataaa

SEQ ID NO: 133801 - DNA, 1538 bp, Zea Mays
gacgctgaagtgtgctccgctccgcctccgcccgcggccgtacgctcccgagctccacccgtcgcgccccgaccgagatcgtccccggcgatggcttccgcggtggccgcttcgaccgctacgcggttcctgccgcggcttccggacccgtggtggacgcgtcgtgcgcgagcggcgctcccgccgccgccgctcacgtggcggcctctcccgttcacggtgtccgccgcgtcgtcccgccctggggaagcggaaggaggacggcgcgggaggatgcggaggcggcgcgccaggagggcggaacaggaggaaggcgtctcgctaagctctgaaaaggagacggtaaattctactccacgtgctcaacccaaaaagggtgcagaacccgtagcggtgtccagcacgagtgggaaaggctctgccattagaagggtgacacttgtgattcttgctgccgtgctttttggagttagcattgccttgaaggacggggccgagaaggcatcggagtattttgctgggtatttattggaacagagtttgtcggtggacaatctctttgtttttgttctggtctttaagtatttcaaagtgccaaatgaataccagaatcgagtactttcttatggtattgctggagctgtggtcttccgggctgtgatgatcatcctaggaacagctaccatccagaaatttgaggcggtgaatttgttgttggctttgatcctgttattcacttcttacaagctctttgctgaagaagaagaagaatctgatctatctgataacttcattgtgaaaacatgccaaaagttcattccagtcactgattattatgatgataatcgttttttcacaaatcaagatggtgtatggaaagctacaccattgctcttgactttggcagtgattgagctgagtgatattgcctttgctattgactcaataccagcagtttttggcgtcacaagggatccacttataatactatcatcaaatatttttgctatttctggtttgcggtcgctctatgtgctcgtttctgaaagcatgggtgaattggagtatctacagcctgccattggtattgtgttgggcttcattgggacaaagatgatctttgacttttttggttatcatataccaacagaagcttcgcttgcaattgtaactacatgtcttagtggaggcgtcatattaagtcttaggaaagcatcaaaagagaagggggacaagtagactgatgcaacaacacatgcaggcataggaatccagcttgctccatatttttggcagatagtcaagttacaaaaataattataataaacacttaaaagccaggtaaacatagtgttttcactaaactaattacttgtataaaaaaatctaacctgacagaatatcttttgatcagtatatgtagtcttagctaatgccttgttcatttaaaaatagattcaatagcttctttatgttctacatctgaggtgaatttagaagtcaccataacgaggataaaagtacgctggtgctacttc

SEQ ID NO: 133802 - DNA, 2946 bp, Zea Mays
gctgttgttcaaagaattggagatggacaggaagaattgtcctccatcgccatcgccaagatcgaccgagaagtctggaagagaattgagatctggggaggccaatgtcagcacaaataccaatagcaacctcatcgcaaaaggtgacaaggagaaaggagtcaatgtgcaagtcattctaagatgcaggccgttgagtgatgaagaaacaaagtcgaatactcctgtggttatttcgtgcaatgaccgtcgccgggaagttgccgccactcaaattattgccaataagcagattgatcgcacatttgccttcgacaaggtttttggcccatcgtccaagcagaaagatttgtttgaacaatccatctcgccgatagtaaatgaggtccttgaaggttacaattgcactattttcgcttatgggcaaactggtaccgggaagacttacacaatggagggaggtgggactagaaagaccaagaatggtgaactcccaactgatgctggtgttatcccaagggctgtaaggcaaatctttgacattctcgagtctcagtgcgcagagtatagcatgaaagtcacctttcttgagctttacaatgaagaaatcactgatctgttggcacctgaagaaccaaaattccctgttcttgaagacaagacgaaaaaacctattgcccttatggaagatggaaagggatttgtttttgtgagaggtcttgaagaagaagttgtgtactcagctggcgaaatctacaagattcttgacaagggttctgcaaagaggcgtactgcagaaacattgctgaacaagcaaagtagtaggtcacactctatattctcaatcacaattcacattaaggaactcactcatgagggtgaggagatgatcaagattggaaagctcaatcttgtcgatctagctggttcagaaaatatatcacgctcaggtgctagagatggcagagcgagagaggctggagagatcaacaagagtttgctcacgcttggtcgtgttattaatgctctagtagagcactctggacatgtaccatacagagatagtaaactgacaaggttgctgagggattcattgggagggaaaacaaagacttgcattattgctacaatatcaccttcagtatattgtttggaagagacattgagcacacttgattatgcacaccgtgcaaaaaatatcaagaacaaaccagaggtaaatcaaaggatgatgaagtctgctgtgatcaaggacttgtactatgaaattgaccgcctcaaacaagaggtgtttgctgcaagagagaagaacggtatctatattccaagagagcgctacctccaagaagaagctgagaaaaaggccatgacagagaaaattgaacgactaggagctgatatggaggctagggataagcaattggttgaattaaaagagctttatgatgctgaacaacgtctgagtgcagagttgggtgaagaacttggaaagactcggaaagatctggaggacaccaagagagctctgcatgatctagaagaacaatacaaagaagcaaagtctactattaaagaaaaggaatatgtcatatttaatcttctgaaatcagaaaaatcattagtggactgtgcatataaccttcgtgcggagctagaaaatgcagcagcagatgtttctgggctattctccaaaatagagcgcaaagacaggatagaagatgggaacaggtcgatggtgcagagatttaggtctcaactgacccatcagctggatgcattgcataaaactgtatccagttctgtcatgcaacaggaggaccaccttaatgaaatggaacatgatatgcaatcctttgtttcttcaaaagatgaggctgcacaagggctaagagagggtgtgcaaaagctcaaagtcttgcatggttccggtatcactgctctggatgaattagcaggtgaaatcgacatgaactcgcggacaacatttgagagattaaattcacagatacagtcacacacatcagcccttgagaactgtttcggaggaatcgcttcggaagcagataacttgttagatgagcttcagcgcagcctatcgaaacaagaagagaggctagcccatttcgcagtgaagcagagggagggacacctgagagctgtggaagcgtcacgttccatctcaaagatcactgctgggttcttccactcgctagatgtccatgcatctaggctcaccagtattctggaagacacacacagcgtgcaagaccaacaacttcttgaccttgaaaagaaattcgaggagtgcgcagctaatgaagaaaaacagcttctagagaaggtggcggagatgctggcaagttccaacgcacggaagaagaagctggtgagcgtttttttttcagttgtttcaacagcttaaacttgtttcgtacccatctgactaaaacacaccaagtaaacgacgtgctataaaaaagaagtgatgctctcacacctctctgctatgccaacgtttcatcatgagcacgcattgcaggtccaaacagcagtgggcagcctccgggagagcgccgtgaacagaacgagccacctgcagaaagaaatctcgacggcccaggacttgacctcgtccgtgcgcgagaagtggggcttttacatggaagagaccgagaagaattacgctgaggataccaaagcagtcgacagcggaaggtcttgcctggccgaagtgcttgtagaatggtcagttcacttcagcgtcatgccatgtgatggtggttattccttctggttcgaagacgcggatgttcttaacttttttttttttacattcacccggaaatttgttgcagcaaggcgaaggccaccgtgggtgcacagcaatggaagaacgcggaggattctctgttcagcctcggcaaaggaaacgtggagtcagtggat

SEQ ID NO: 133803 - DNA, 3466 bp, Zea Mays
gctgttgttcaaagaattggagatggacaggaagaattgtcctccatcgccatcgccaagatcgaccgagaagtctggaagagaattgagatctggggaggccaatgtcagcacaaataccaatagcaacctcatcgcaaaaggtgacaaggagaaaggagtcaatgtgcaagtcattctaagatgcaggccgttgagtgatgaagaaacaaagtcgaatactcctgtggttatttcgtgcaatgaccgtcgccgggaagttgccgccactcaaattattgccaataagcagattgatcgcacatttgccttcgacaaggtttttggcccatcgtccaagcagaaagatttgtttgaacaatccatctcgccgatagtaaatgaggtccttgaaggttacaattgcactattttcgcttatgggcaaactggtaccgggaagacttacacaatggagggaggtgggactagaaagaccaagaatggtgaactcccaactgatgctggtgttatcccaagggctgtaaggcaaatctttgacattctcgagtctcagtgcgcagagtatagcatgaaagtcacctttcttgagctttacaatgaagaaatcactgatctgttggcacctgaagaaccaaaattccctgttcttgaagacaagacgaaaaaacctattgcccttatggaagatggaaagggatttgtttttgtgagaggtcttgaagaagaagttgtgtactcagctggcgaaatctacaagattcttgacaagggttctgcaaagaggcgtactgcagaaacattgctgaacaagcaaagtagtaggtcacactctatattctcaatcacaattcacattaaggaactcactcatgagggtgaggagatgatcaagattggaaagctcaatcttgtcgatctagctggttcagaaaatatatcacgctcaggtgctagagatggcagagcgagagaggctggagagatcaacaagagtttgctcacgcttggtcgtgttattaatgctctagtagagcactctggacatgtaccatacagagatagtaaactgacaaggttgctgagggattcattgggagggaaaacaaagacttgcattattgctacaatatcaccttcagtatattgtttggaagagacattgagcacacttgattatgcacaccgtgcaaaaaatatcaagaacaaaccagaggtaaatcaaaggatgatgaagtctgctgtgatcaaggacttgtactatgaaattgaccgcctcaaacaagaggtgtttgctgcaagagagaagaacggtatctatattccaagagagcgctacctccaagaagaagctgagaaaaaggccatgacagagaaaattgaacgactaggagctgatatggaggctagggataagcaattggttgaattaaaagagctttatgatgctgaacaacgtctgagtgcagagttgggtgaagaacttggaaagactcggaaagatctggaggacaccaagagagctctgcatgatctagaagaacaatacaaagaagcaaagtctactattaaagaaaaggaatatgtcatatttaatcttctgaaatcagaaaaatcattagtggactgtgcatataaccttcgtgcggagctagaaaatgcagcagcagatgtttctgggctattctccaaaatagagcgcaaagacaggatagaagatgggaacaggtcgatggtgcagagatttaggtctcaactgacccatcagctggatgcattgcataaaactgtatccagttctgtcatgcaacaggaggaccaccttaatgaaatggaacatgatatgcaatcctttgtttcttcaaaagatgaggctgcacaagggctaagagagggtgtgcaaaagctcaaagtcttgcatggttccggtatcactgctctggatgaattagcaggtgaaatcgacatgaactcgcggacaacatttgagagattaaattcacagatacagtcacacacatcagcccttgagaactgtttcggaggaatcgcttcggaagcagataacttgttagatgagcttcagcgcagcctatcgaaacaagaagagaggctagcccatttcgcagtgaagcagagggagggacacctgagagctgtggaagcgtcacgttccatctcaaagatcactgctgggttcttccactcgctagatgtccatgcatctaggctcaccagtattctggaagacacacacagcgtgcaagaccaacaacttcttgaccttgaaaagaaattcgaggagtgcgcagctaatgaagaaaaacagcttctagagaaggtggcggagatgctggcaagttccaacgcacggaagaagaagctggtccaaacagcagtgggcagcctccgggagagcgccgtgaacagaacgagccacctgcagaaagaaatctcgacggcccaggacttgacctcgtccgtgcgcgagaagtggggcttttacatggaagagaccgagaagaattacgctgaggataccaaagcagtcgacagcggaaggtcttgcctggccgaagtgcttgtagaatgcaaggcgaaggccaccgtgggtgcacagcaatggaagaacgcggaggattctctgttcagcctcggcaaaggaaacgtggagtcagtggattctatagtcaggaccgggacagaggccaacgaattgctgcgttccaaactgtcgtctgcggcatcggcaactcttgaagatatcgacgttgcaaacgaggctctcctttcttcaattgacagctcgctgaagcttgaccgcgacgcgtgcgcgaacatcggggcggtcctcacgccgtgccacggggagatgagggagctgaagggggagcatcaccacaaggtcgtggagatcagcgaaagcgccgggaagtgcctggaggaagagtatctggtggacgagccgtcgtgttcgacgcccaggagaaggcggatcgacctgccgggcgtggagtcgatagaggagctgcggaccccgggctacgccgagcttctcaagtcgttccgggaggcgagggggagctggaagctggcgaatggagacgtcacagggcatttgccagaggcggctcaggatccggcatcatcgccgccgccggccgtgggttcaagaacccctctcgtaggaagaaactagatttaccgaaaccatgtagaaagaaaaaggaaaaaaaaaggaggaagaagaggaaggcatgtgtctactagagtacctttttcgtattggtgttgatagtggtgttggttaactactgctgctgcttggttgattgtttgttcgttcttaggtggtctccttgtatagtgattagtgagtcatatatacttgccgtcacacatatgccggtgtacatcaggtgtgctcagcatgtctattctaaagcactagtgtttgtctctctct

SEQ ID NO: 133804 - DNA, 147 bp, Zea Mays
ggaagggtaggcagcagatgtcgcactccaacgcgtccttctccacggatagtgtcacagtcgcctcttcctcatcctccaaccccgcctcttcctcatcctccaccaccaccttggctttctttggagtgccgccgtcagaggaag

SEQ ID NO: 133805 - DNA, 774 bp, Zea Mays
gatggtggtggtggtgggcatcagggccagcaggtggcggcggggtcgacgcggtggtgcccgacgccggagcagctgatgatcctggaggacatgtaccgcggcggcctgcgcacgcccaacgcgtcgcagatccagcagatcacggcgcacctcgcctgctacggccgcatcgagggcaagaacgtcttctactggttccagaaccacaaggcccgggaccgccagaagatgcgccgcaggctctgcatgagccaccacctcctctcctgcgcgcagtactacgccgcggcggcgcaccacggccacgccgccttcctcgccgcgccgccgccgtacgggcaccagctgctctccccgtccacgacgtcgcccaccccggctgctgctgctgctgccgccgctgcagcgtacggctactactaccccgccacggccgccttcgctgcaccggcgagccggtgcgccggcaacgccactcccccgtcgccgaccacccagctgttccactatcagggtggcggagggcttgtgccgacggaggcgctcggccggccggagtactcgctggggaagctggacaacttcggcgtggcgcttgacgacgtcgtggtgagctcgacctccggtgctgtcgtcgacacgatgggggcgcctccggttgcagggttcgaggtggcgccgccgctgccggctgccttcagctgccggccgctcaagacgctagacctcttccccggcggtctcgaggaagagcagcacgacgtggcctga

SEQ ID NO: 133806 - DNA, 1544 bp, Zea Mays
gatggtggtggtggtgggcatcagggccagcaggtggcggcggggtcgacgcggtggtgcccgacgccggagcagctgatgatcctggaggacatgtaccgcggcggcctgcgcacgcccaacgcgtcgcagatccagcagatcacggcgcacctcgcctgctacggccgcatcgagggcaagaacgtcttctactggttccagaaccacaaggcccgggaccgccagaagatgcgccgcaggctctgcatgagccaccacctcctctcctgcgcgcagtactacgccgcggcggcgcaccacggccacgccgccttcctcgccgcgccgccgccgtacgggcaccagctgctctccccgtccacgacgtcgcccaccccggctgctgctgctgctgccgccgctgcagcgtacggctactactaccccgccacggccgccttcgctgcaccggcgagccggtgcgccggcaacgccactcccccgtcgccgaccacccagctgttccactatcagggtggcggagggcttgtgccgacggaggcgctcggccggccggagtactcgctggggaagctggacaacttcggcgtggcgcttgacgacgtcgtggtgagctcgacctccggtgctgtcgtcgacacgatgggggcgcctccggttgcagggttcgaggtggcgccgccgctgccggctgccttcagctgccggccgctcaagacgctagacctcttccccggcggtctcgaggaagagcagcacgacgtggcctgatcggcgcatatatgccgttgttaccattaattactacttagctagtcgtcgccatcagtcgttgatgcatgtcaatgtcatgcagtagtacgtagtacacacacgctgacatgatctcagctcgtccccctcccgatcaatttagctggagctacgacagctagagctagcttcgttctgatctctctccgatccatggctacaatctagtgtgtcgtcgtcgtgttgttctttctgatgcatgtgtttggttagagggtgtacttactcgtttctagagattagtgcgctctggctagcagctagctagagaggagagggagtgggcgctgagcagcaagagctagctaggagtacagtagtacgtgctactagagtagaagaggcccaccggggaggcacaggcacagagcagtctgcgatgcattcattccttgttgagttattatgggatgtgaccgtgcgtacagtgcgtgtttagtgtagctaaaacaggcatgcatgcagtgtgaagctactatagctggtggggggtacggtacctactaactaggctttatttgcagagctcattactggtgggagaggagatcaaacttaggttcatgaatatcatgtaatggaatgttccttgcttgccggtcccccaactcccaacctccaccaattcctctctctcactctctctctctctcgcatctagatcaagatccctcctgctccacaccctgtgtcgctccgtgtgtatggacttttcttttgcctgcctt

SEQ ID NO: 133807 - DNA, 1898 bp, Zea Mays
agtggccggcctctccccactacatgcttcttcgtcgtctcatcctcttcttccaatccagacctccgtccacacccacccatctgctcctcctcctcctccctccctagtacccattttgtctctctcaacagtccctctctctccagtctccacacacccaaccaaccaaaccaaaccaaaccaaaacctttttgctagcttattcacagacagcagcttccaaccaatcaaactcatcgaccgatcgagtgctcgtacaccaatagctcagccagccatcaaatcctagctggaggtgcgtacgtacttggctagaggaggtagacgacgacggcgacgacgaccgacatgccgtcgcagcagcagcagcagcagggccagcaggtggcggcggggtcgacgcggtggtgcccgacgccggagcagctgatgatcctggaggacatgtaccgcggcggcctgcgcacgcccaacgcgtcgcagatccagcagatcacggcgcacctcgcctgctacggccgcatcgagggcaagaacgtcttctactggttccagaaccacaaggcccgggaccgccagaagatgcgccgcaggctctgcatgagccaccacctcctctcctgcgcgcagtactacgccgcggcggcgcaccacggccacgccgccttcctcgccgcgccgccgccgtacgggcaccagctgctctccccgtccacgacgtcgcccaccccggctgctgctgctgctgccgccgctgcagcgtacggctactactaccccgccacggccgccttcgctgcaccggcgagccggtgcgccggcaacgccactcccccgtcgccgaccacccagctgttccactatcagggtggcggagggcttgtgccgacggaggcgctcggccggccggagtactcgctggggaagctggacaacttcggcgtggcgcttgacgacgtcgtggtgagctcgacctccggtgctgtcgtcgacacgatgggggcgcctccggttgcagggttcgaggtggcgccgccgctgccggctgccttcagctgccggccgctcaagacgctagacctcttccccggcggtctcgaggaagagcagcacgacgtggcctgatcggcgcatatatgccgttgttaccattaattactacttagctagtcgtcgccatcagtcgttgatgcatgtcaatgtcatgcagtagtacgtagtacacacacgctgacatgatctcagctcgtccccctcccgatcaatttagctggagctacgacagctagagctagcttcgttctgatctctctccgatccatggctacaatctagtgtgtcgtcgtcgtgttgttctttctgatgcatgtgtttggttagagggtgtacttactcgtttctagagattagtgcgctctggctagcagctagctagagaggagagggagtgggcgctgagcagcaagagctagctaggagtacagtagtacgtgctactagagtagaagaggcccaccggggaggcacaggcacagagcagtctgcgatgcattcattccttgttgagttattatgggatgtgaccgtgcgtacagtgcgtgtttagtgtagctaaaacaggcatgcatgcagtgtgaagctactatagctggtggggggtacggtacctactaactaggctttatttgcagagctcattactggtgggagaggagatcaaacttaggttcatgaatatcatgtaatggaatgttccttgcttgccggtcccccaactcccaacctccaccaattcctctctctcactctctctctctctcgcatctagatcaagatccctcctgctccacaccctgtgtcgctccgtgtgtatggacttttcttttgcctgcctt

SEQ ID NO: 133808 - DNA, 105 bp, Zea Mays
cgatattcaaatttatcaaattcgaaaataaaaattacttcgtttttgcattacttatgtaagtataaattgtatgaatatgaatattacaaaaaaaatatatag

SEQ ID NO: 133809 - DNA, 797 bp, Zea Mays
ggagcatgattttaattttatttccgaagatctctgtacacgtttagttaacaatcgtacataacacttgctcgtttacaaggtcagcagagccttttgctgccgctgaacccctttgcacgaccatggtttggcgaacggcatgggccaacatacaggatgcttactaagctcactaccacactgctgctatcagctgtaactgcgagaatgttctcagctacgtacaggactggcactcgacagtcataactactacagggacatgtacaacgtattcacaaggttgctagtgacctatttatttatctacatggagggacatgtacaacgtattcacaaggttgctagtgacctatttatttatctacatggagcaggcaagtagcttacgcgacagcttcatcccactctttcctgttagagagacctacaagagaagatttgtatgaaacgccagtgcaccaccactggtttggacagcactacaagtcttaaaaccacatagcatgatgcggctaaaatgtaagcagcaaatcgtagcgcaaatcctaccaagagaatgtcctcgtctttcccaaaggatttctgggcctcgtccaagctcttcattgtcacccgttcgcgtttcctggtatagtaaaaacaaaaaacaaaaaaacagcctttatgtttctgattcagatttttctgttgttgcccacgaccaagtaatatgaacaggaatcctggtacagatgggtggtgccatgaggcattgcctcaaatcagaaattggaattccataatttaacatt

SEQ ID NO: 133810 - DNA, 628 bp, Zea Mays
atatcgccggggcattgtgctatgccaaactgctcgcctcgctaaatccgctccattccctcgccctcgccgatcgccggatctctccctccgcctcgcttccgccgcacgccagggcgcacggcttcttcctccgctccctcgcctcaggtaaacctcgccgctccgctctcctcgtggcgctgcgatccctgaatccatccgggcgcggtttagctgttcggagaggggccttgcttgctcggtcgggatcggaacagcctagctggagtcctgattcacatatgcttctagttcaaaatctagtggatattctcttcagtataagagcagggagcacccgagttgtttcacatctggctggacagcgtgaatatttctgttattcctgatcacgcttcacagtaaggaataggagctggagccgacattgaaaattggaggcactagcagtagtttttgcgagacattcagcgctggggttaatgaggtcaatttgattgtgtgtgtgtctgtgaacctcctgcggtttgtttgcgtgtcggtttttcatcatcgcactggaattggaaatgaacgaaaagcttcactgaagaaggcggcgtttatcctgcttctcgtggagttt

SEQ ID NO: 133811 - DNA, 559 bp, Zea Mays
atatcgccggggcattgtgctatgccaaactgctcgcctcgctaaatccgctccattccctcgccctcgccgatcgccggatctctccctccgcctcgcttccgccgcacgccagggcgcacggcttcttcctccgctccctcgcctcagcgcagttcctatggggttcctgcaaagcactttttcgctgttgatcggcaccggctgcggcatctacattgcccagaactacgacgtcccaaacataaagaagctcatgaggagcctggtgggcaaggccaaggaggttgaggagtcatacaagaagacgggcaacagcaagaacaaggataacgaatagcgttgacccgcagtctgcggtccaccatctaggaaagctaattgttgcaagattattctgattattggaggtatactaccttgtacgttgtaccttggttagtaccttctgtctacttatttttttctcttaaagaaaatatgagatggcatactggaactgcggcctactcttgccccggattgaatctgtctagatgtggcaatacaatttttgagg

SEQ ID NO: 133812 - DNA, 408 bp, Zea Mays
atgggggtgggaggcggaggcggagggggaggggaggccacggcggtttcggcgccggcgccagcggatgaggcggggaaggacgcggaggatggcaacgactggaccttgaaggcgaagctgatcgccgtagcggtgctgggggccacggcgctcggggtgttcctgcactcctactttcgccacgcggcgctgcgcaaggcggaggaggggctcgtcagcatgtgcgaggagcgcgcgcgcatgctgcaggaccagttcgccgtctccgtcaaccacgtccacgccctcgccatcctcgtcgccaccttccactacgagaagcacccgcccgcgctagaccacatccacctgtgcgcagctgcacgacaccttcatagcgcgggggaccagagctggagggagtaa

SEQ ID NO: 133813 - DNA, 478 bp, Zea Mays
cctggaagcctgagttcagctacgatcaaccatggagggcacatcacttccacttcttgaacttgccgccgccgaacatgccgtgcccgtgcttgccatgcttgaacttgccgtgcccgtgcttgaacttgccgtggtggccgtgaccatgcttgaacttgccgtggccaccatacccgtggccgtaaccaccgtgaccatagcctccaaaggccccatgtccaccgtgtccgctatggccatgagaaagcttgtgtgctccataagcggcagcggccgcggcagcacctcccgctagcattgcccccgtccccatgtggcccccgtggcccccatcataccctggtgagatgagccggggtagcctgcaggaggatatccaccttgaggtgggtagccacctggctgagggtacccatattgtggtgggtatgccccaggtggaggaggatatgcccctggaggaggaggatacgcc

SEQ ID NO: 133814 - DNA, 336 bp, Zea Mays
agtccctccgtcgcgcccctgctccctgtccctgctccaaatggcattctcctcttccatatggggtcatggtctctcacctgctccagccgcttcccgccgcccaacgatctgtgagctgttatggctaactcagcggcacctggtggtttgaggccgttcctgcgtcccgtgtctgcggtccccggggaggcgcggacaccattacatgtcgtccagatggaaggcctggctgcatagaagatcattaagcgctgcgaggagtttgcgcctgctttagttacaagtcaattgctcaatggagtaaggggcttcgtcgtgcgccgtgccatgtgc

SEQ ID NO: 133815 - DNA, 106 bp, Zea Mays
cttcaaatcaaatggaacacagtccgaaatactgttctgatttgttccgattacgtctcgtgccaatctaaaaatcttggctcaaaatatcagtgattctctattt

SEQ ID NO: 133816 - DNA, 106 bp, Zea Mays
cttcaaatcaaatggaacacagtccgaaatactattctgatttgttccgattacgtctcgtgccaatctaaaaatcttggctcaaaatatcagtgattctctattt

SEQ ID NO: 133817 - DNA, 1873 bp, Zea Mays
accgcctccggcttcagttccccgaggctagaattcggatccctcccaccacatccatccccttcccttcccttccctcgtgccccgccggctctccagcgcgccgtctctgcccagatccaggagatatgcctcgctatgatgatcgctatggaggcacgcgcttgtatgttggcagattggccccccgtactcgttctcgtgatttagaatatctcttcggcaaatatggaaggtttttcggtttttaccgggaggtctttggtggaagggtgcccttggtggacctggtgaccatttggtgaagggtgcccttggtgtaatgttattgactgttttagtggaagttccaagttggtgatgcatttgagtacttgactcatgaaggcttactgtttgtggcaaccctttccgcagaatacgagaagtggagttgaagcgcgactatgcatttatttgaacatcgtgatgccgatgaagctcggtaccaactagatggcagggatgtcgatggaagtcgcattgttgttgagtttgctaaaggggtcccacgtggtccaggtggctcacgtgaatatatgggaagaggccctccaccaggcacaggtcgttgtttcaactgtggaatggatggtcactgggcaagagactgtaaggctggtgactggaaaaataaatgctaccgttgtggagaaagagggcatatagaaagaaattgccagaacagtcctaggagcgtcaggcgtgaaagaagttactcacgctccccatctccacgccgtggaagaggtcgcagtccaagctatagcaggagcaggagccggagccggagccggagctatagccgatcgaggtccctatctggatctcctaggggaggccgccgtgaccgtgatgataggagatcgaggagtcttagctacagcaggagccccatgcggtcgccacctgcaaaggaaaaggagcgcagtcccacacctggcggaagcaggagcccaaggagccgcagcccacaggatcaggtgatgagcccaccacctaaggataacggcgacaggaatggttcagaccgtggcgacagccccagagggagggaaaacagcaggagccgcagccgcagccgcagcccatccggtggtaaccgcagccctgcagctaatgggcgtagcccgagccccagaggtgaccgtaccccgagccccatggctgaccgtagcccgagcccaaagggcaatggtaacaacgatggtggtgatgatgatactggccgtggtggttcccccacaggaagcaagtcaccctgaacgctgcaccgtctcagttcttaggtgcttcgtgatgcagtgggcaaacataccaaagacgtgatagctgtatcgtttccctatctgagacgtggacttatttagcttgctttgatattggtgtcttatttctcttatgaataatgtggacacgcatgttgtgtcgccctatgttggtatttacctgcaatgctatagcgtcagtcttgttgaggcctgagcaaaaacaaccagataccccctttgaaaggtactgctttgttgtgggtgaatcggggactcggggtggcataggttcacggcagagtcgttttccgcgactcgtgctgccggttagccgagtcctgctcgctagtcttcagcctgttttgctttaaatcgtaccggcttttactacttataaagtgtttgttttatctctatggatcccaattgtacctgtccaaacagttggcttccaacagctgccaacacatttacgctgtgcagttgtcacagcacggtacagagcgcccgagttggtcctgcagttcttgctgatcttgctgttcttgctgatcacatggact

SEQ ID NO: 133818 - DNA, 1699 bp, Zea Mays
accgcctccggcttcagttccccgaggctagaattcggatccctcccaccacatccatccccttcccttcccttccctcgtgccccgccggctctccagcgcgccgtctctgcccagatccaggagatatgcctcgctatgatgatcgctatggaggcacgcgcttgtatgttggcagattggccccccgtactcgttctcgtgatttagaatatctcttcggcaaatatggaagaatacgagaagtggagttgaagcgcgactatgcatttattgagttcagtgaacatcgtgatgccgatgaagctcggtaccaactagatggcagggatgtcgatggaagtcgcattgttgttgagtttgctaaaggggtcccacgtggtccaggtggctcacgtgaatatatgggaagaggccctccaccaggcacaggtcgttgtttcaactgtggaatggatggtcactgggcaagagactgtaaggctggtgactggaaaaataaatgctaccgttgtggagaaagagggcatatagaaagaaattgccagaacagtcctaggagcgtcaggcgtgaaagaagttactcacgctccccatctccacgccgtggaagaggtcgcagtccaagctatagcaggagcaggagccggagccggagccggagctatagccgatcgaggtccctatctggatctcctaggggaggccgccgtgaccgtgatgataggagatcgaggagtcttagctacagcaggagccccatgcggtcgccacctgcaaaggaaaaggagcgcagtcccacacctggcggaagcaggagcccaaggagccgcagcccacaggatcaggtgatgagcccaccacctaaggataacggcgacaggaatggttcagaccgtggcgacagccccagagggagggaaaacagcaggagccgcagccgcagccgcagcccatccggtggtaaccgcagccctgcagctaatgggcgtagcccgagccccagaggtgaccgtaccccgagccccatggctgaccgtagcccgagcccaaagggcaatggtaacaacgatggtggtgatgatgatactggccgtggtggttcccccacaggaagcaagtcaccctgaacgctgcaccgtctcagttcttaggtgcttcgtgatgcagtgggcaaacataccaaagacgtgatagctgtatcgtttccctatctgagacgtggacttatttagcttgctttgatattggtgtcttatttctcttatgaataatgtggacacgcatgttgtgtcgccctatgttggtatttacctgcaatgctatagcgtcagtcttgttgaggcctgagcaaaaacaaccagataccccctttgaaaggtactgctttgttgtgggtgaatcggggactcggggtggcataggttcacggcagagtcgttttccgcgactcgtgctgccggttagccgagtcctgctcgctagtcttcagcctgttttgctttaaatcgtaccggcttttactacttataaagtgtttgttttatctctatggatcccaattgtacctgtccaaacagttggcttccaacagctgccaacacatttacgctgtgcagttgtcacagcacggtacagagcgcccgagttggtcctgcagttcttgctgatcttgctgttcttgctgatcacatggact

SEQ ID NO: 133819 - DNA, 1696 bp, Zea Mays
accgcctccggcttcagttccccgaggctagaattcggatccctcccaccacatccatccccttcccttcccttccctcgtgccccgccggctctccagcgcgccgtctctgcccagatccagatatgcctcgctatgatgatcgctatggaggcacgcgcttgtatgttggcagattggccccccgtactcgttctcgtgatttagaatatctcttcggcaaatatggaagaatacgagaagtggagttgaagcgcgactatgcatttattgagttcagtgaacatcgtgatgccgatgaagctcggtaccaactagatggcagggatgtcgatggaagtcgcattgttgttgagtttgctaaaggggtcccacgtggtccaggtggctcacgtgaatatatgggaagaggccctccaccaggcacaggtcgttgtttcaactgtggaatggatggtcactgggcaagagactgtaaggctggtgactggaaaaataaatgctaccgttgtggagaaagagggcatatagaaagaaattgccagaacagtcctaggagcgtcaggcgtgaaagaagttactcacgctccccatctccacgccgtggaagaggtcgcagtccaagctatagcaggagcaggagccggagccggagccggagctatagccgatcgaggtccctatctggatctcctaggggaggccgccgtgaccgtgatgataggagatcgaggagtcttagctacagcaggagccccatgcggtcgccacctgcaaaggaaaaggagcgcagtcccacacctggcggaagcaggagcccaaggagccgcagcccacaggatcaggtgatgagcccaccacctaaggataacggcgacaggaatggttcagaccgtggcgacagccccagagggagggaaaacagcaggagccgcagccgcagccgcagcccatccggtggtaaccgcagccctgcagctaatgggcgtagcccgagccccagaggtgaccgtaccccgagccccatggctgaccgtagcccgagcccaaagggcaatggtaacaacgatggtggtgatgatgatactggccgtggtggttcccccacaggaagcaagtcaccctgaacgctgcaccgtctcagttcttaggtgcttcgtgatgcagtgggcaaacataccaaagacgtgatagctgtatcgtttccctatctgagacgtggacttatttagcttgctttgatattggtgtcttatttctcttatgaataatgtggacacgcatgttgtgtcgccctatgttggtatttacctgcaatgctatagcgtcagtcttgttgaggcctgagcaaaaacaaccagataccccctttgaaaggtactgctttgttgtgggtgaatcggggactcggggtggcataggttcacggcagagtcgttttccgcgactcgtgctgccggttagccgagtcctgctcgctagtcttcagcctgttttgctttaaatcgtaccggcttttactacttataaagtgtttgttttatctctatggatcccaattgtacctgtccaaacagttggcttccaacagctgccaacacatttacgctgtgcagttgtcacagcacggtacagagcgcccgagttggtcctgcagttcttgctgatcttgctgttcttgctgatcacatggact

SEQ ID NO: 133820 - DNA, 1881 bp, Zea Mays
accgcctccggcttcagttccccgaggctagaattcggatccctcccaccacatccatccccttcccttcccttccctcgtgccccgccggctctccagcgcgccgtctctgcccagatccaggagatatgcctcgctatgatgatcgctatggaggcacgcgcttgtatgttggcagattggccccccgtactcgttctcgtgatttagaatatctcttcggcaaatatggaaggtttttcggtttttaccgggaggtctttggtggaagggtgcccttggtggacctggtgaccatttggtgaagggtgcccttggtgtaatgttattgactgttttagtggaagttccaagttggtgatgcatttgagtacttgactcatgaaggcttactgtttgtggcaaccctttccgcagaatacgagaagtggagttgaagcgcgactatgcatttattgagttcagtgaacatcgtgatgccgatgaagctcggtaccaactagatggcagggatgtcgatggaagtcgcattgttgttgagtttgctaaaggggtcccacgtggtccaggtggctcacgtgaatatatgggaagaggccctccaccaggcacaggtcgttgtttcaactgtggaatggatggtcactgggcaagagactgtaaggctggtgactggaaaaataaatgctaccgttgtggagaaagagggcatatagaaagaaattgccagaacagtcctaggagcgtcaggcgtgaaagaagttactcacgctccccatctccacgccgtggaagaggtcgcagtccaagctatagcaggagcaggagccggagccggagccggagctatagccgatcgaggtccctatctggatctcctaggggaggccgccgtgaccgtgatgataggagatcgaggagtcttagctacagcaggagccccatgcggtcgccacctgcaaaggaaaaggagcgcagtcccacacctggcggaagcaggagcccaaggagccgcagcccacaggatcaggtgatgagcccaccacctaaggataacggcgacaggaatggttcagaccgtggcgacagccccagagggagggaaaacagcaggagccgcagccgcagccgcagcccatccggtggtaaccgcagccctgcagctaatgggcgtagcccgagccccagaggtgaccgtaccccgagccccatggctgaccgtagcccgagcccaaagggcaatggtaacaacgatggtggtgatgatgatactggccgtggtggttcccccacaggaagcaagtcaccctgaacgctgcaccgtctcagttcttaggtgcttcgtgatgcagtgggcaaacataccaaagacgtgatagctgtatcgtttccctatctgagacgtggacttatttagcttgctttgatattggtgtcttatttctcttatgaataatgtggacacgcatgttgtgtcgccctatgttggtatttacctgcaatgctatagcgtcagtcttgttgaggcctgagcaaaaacaaccagataccccctttgaaaggtactgctttgttgtgggtgaatcggggactcggggtggcataggttcacggcagagtcgttttccgcgactcgtgctgccggttagccgagtcctgctcgctagtcttcagcctgttttgctttaaatcgtaccggcttttactacttataaagtgtttgttttatctctatggatcccaattgtacctgtccaaacagttggcttccaacagctgccaacacatttacgctgtgcagttgtcacagcacggtacagagcgcccgagttggtcctgcagttcttgctgatcttgctgttcttgctgatcacatggact

SEQ ID NO: 133821 - DNA, 1783 bp, Zea Mays
accgcctccggcttcagttccccgaggctagaattcggatccctcccaccacatccatccccttcccttcccttccctcgtgccccgccggctctccagcgcgccgtctctgcccagatccaggagatatgcctcgctatgatgatcgctatggaggcacgcgcttgtatgttggcagattggccccccgtactcgttctcgtgatttagaatatctcttcggcaaatatggaaggtttttcggtttttaccgggaggtctttggtggaagggtgcccttggtggacctggtgaccatttggtgaagggtgcccttggtaatacgagaagtggagttgaagcgcgactatgcatttattgagttcagtgaacatcgtgatgccgatgaagctcggtaccaactagatggcagggatgtcgatggaagtcgcattgttgttgagtttgctaaaggggtcccacgtggtccaggtggctcacgtgaatatatgggaagaggccctccaccaggcacaggtcgttgtttcaactgtggaatggatggtcactgggcaagagactgtaaggctggtgactggaaaaataaatgctaccgttgtggagaaagagggcatatagaaagaaattgccagaacagtcctaggagcgtcaggcgtgaaagaagttactcacgctccccatctccacgccgtggaagaggtcgcagtccaagctatagcaggagcaggagccggagccggagccggagctatagccgatcgaggtccctatctggatctcctaggggaggccgccgtgaccgtgatgataggagatcgaggagtcttagctacagcaggagccccatgcggtcgccacctgcaaaggaaaaggagcgcagtcccacacctggcggaagcaggagcccaaggagccgcagcccacaggatcaggtgatgagcccaccacctaaggataacggcgacaggaatggttcagaccgtggcgacagccccagagggagggaaaacagcaggagccgcagccgcagccgcagcccatccggtggtaaccgcagccctgcagctaatgggcgtagcccgagccccagaggtgaccgtaccccgagccccatggctgaccgtagcccgagcccaaagggcaatggtaacaacgatggtggtgatgatgatactggccgtggtggttcccccacaggaagcaagtcaccctgaacgctgcaccgtctcagttcttaggtgcttcgtgatgcagtgggcaaacataccaaagacgtgatagctgtatcgtttccctatctgagacgtggacttatttagcttgctttgatattggtgtcttatttctcttatgaataatgtggacacgcatgttgtgtcgccctatgttggtatttacctgcaatgctatagcgtcagtcttgttgaggcctgagcaaaaacaaccagataccccctttgaaaggtactgctttgttgtgggtgaatcggggactcggggtggcataggttcacggcagagtcgttttccgcgactcgtgctgccggttagccgagtcctgctcgctagtcttcagcctgttttgctttaaatcgtaccggcttttactacttataaagtgtttgttttatctctatggatcccaattgtacctgtccaaacagttggcttccaacagctgccaacacatttacgctgtgcagttgtcacagcacggtacagagcgcccgagttggtcctgcagttcttgctgatcttgctgttcttgctgatcacatggact

SEQ ID NO: 133822 - DNA, 2412 bp, Zea Mays
cccacgccacgctctcaagtctcaaccgcagcgacacgccaccaccagagcgcgccaacctcgtgctcgtgaacacacacacacacacacgcagctagccaaccgtctagcgcggatggccacctcgggccacgccgccgtggtggtcgacatcgacatcgacgagccagcctcgtgcggcggcaacgccgatgcggcgggcacgcgacagctgctcccaccggttgtgctcccgccggtgacgtacgtgctccgtttcaccgacctgtcgtacagtgtgaagaagcgcggcggcggtctgggctgcctgctgcctcggcggcggcccagcaaccgcctggcgtcctcggacgcgccggcgccggcgccgtccgacaccaccaccaagacccttctcgacggcatctccggggaggcgcgggacggggagctgctggcggtcatgggcgcgagcgggtcgggcaagtcgacgctggtggacgccctggcggggaggatcgcgcgcggcagcctccgcggcggcgtcacgctcaacggggagccgctgcagggccggcgcctgcgcgccatctccgcgcacgtgatgcaggacgacctgctgcacccgatgctgacggtgcgcgagacgctgcggttcgccgccgagttccgcctcccgcgcgcgctgcccgccgaccgcaagcgcgcgcgcgtcgacgcgctcgtcgaccagctcgggctggcccgcgccgccgacaccatcatcggcgacgaggcccgccgcggggtgtcgggcggggagcgccgccgcgtgtccatcggcaccgacatcatccacgaccccatcctgctgttcctcgacgagcccacgtcgggcctcgactccgccagcgcgttcatggtggtgcaggtgctccgccgcatcgcgcgcagcggcagcgtcgtcatcatgaccgtccaccagcccagcgcgcgcatcctcggcatcctcgaccgcctgctcctgctctcgcgcggccgcaccgtgtacgccggcacgcccgcggggctcaaacctttcttcgccgccttcggcgcgcctatcccggacaacgagaacccggccgagttcgcgcttgacaccatccgcgagtacgagagcagccccggcggcgccgccccgctcgccgacttcaacgtcaagtggcagcgcggcggcgacgcgcccgccgagggcaagctcatgccactggagctcgccatcgctgagagcgtgtcccgcgggaagctggtggccgggagcggtcgtcccggcggtggcggtggcggcggcgcggccaccgggtcgtcggtgccgacgttcgccaacccgccgtggacggaggtgtgggtcctcatcaagcgctccttcaccaacacggggcgcatgccggagctcttcctgatgcgcctcgggaccatcatggtcacgggcttcatcctggccaccatcttctggcgcctcgacgacagccccaagggcgtgcaggagcggctgggcttcttcgccatggccatgtccaccacgttctacgtgtgcgccgacgcgctgccggtgttcgtgcaggagcgccacatctacctccgtgagaccgcgcacaacgcctaccgccgcgcctcctacgtgctggccaacgccgtcgtcgcgttcccaccgctggtgctcctgtcgctggcgttcgcggtcaccacgttctgggcggtggggctcgcgggcggcggcccctcgttcctcttcttcgtgctcatcatcctcgcctccttctgggcgggcagcggcttcgtcaccttcctctccgcggtggtgccgcacgtcatgctgggctacacggtggtcgtcgccatcctcgcctacttcctcctcttctcgggcttcttcatcaaccgcgacaggatcccggactactggatctggttccactacttgtcgctggtcaagtacccgtaccaggcggtgctgcagaacgagttcagcgacgcctcgcgctgcttcacgcgcggcgtcgagatgttcgagggcacgccgatagcgcacatgacggaggccgtcaagctcaaggtgatgcaggccatcagcgacaccctgggctccaacctcacggccaacacctgcgtcaccaccggcgccgacgtgctggcgcagcaggccgtcacggacattggaaaatggaactgcctgctggtgaccgtggcgtggggcttcttcttcagggcgctcttctacgtcgtcttgctcgttagcagcaagaataagaggaagtaaattaattaattaattagcaggttgattaaacttatataaaataatgcacgtgtgatattgtgatgtagctagggatgatggagcaaatgcataacaccagatgtaaatttattgtttttgttttttaataagaaatatacacattgtttgtc

SEQ ID NO: 133823 - DNA, 90 bp, Zea Mays
gagatgtattcagtaatctgcctcacgccaaagcacaaggtcgcatacgcatttgtaacattctccaacaacagacgcaaaagagaactc

SEQ ID NO: 133824 - DNA, 1090 bp, Zea Mays
agtatctgggcgatcgactgggacgacggtcgactgggacgccaccattaatcagtaatggccgccgggtgcaactgcaaggcggccatcgggtgcgtggacgcgcgcgcgccggtgcgggccagctatgtgagcctgtacaagtggcccgagtccgacgccgagttcgtcaggtcggtggccatggcgcggcgccagggaggaggaggaggaggagggcaggagagccccggcggcggcgccagcgcgccgtcgtactcgtaccactaccaccactactacaacggcagcggcagcatgcggagtaataacagcggcgagctggcggcggggtactgcagcccccgggtggtggacagctactcgtgccgccagatgtacctccgcagctacaccttctccaagcggaaggagacggtgcccgagcgcaccatggcgtgcctcggccgcgtccgggaccgcggcgccgcggtcttcccgctgttccacccgcagcggcacggcggtgggtcggccgccgccgccgctgcctcggacgccgcctccgtcggcagcgccagccaccgcacggaggacgacggcgtgctggggctccgtcgcggcagcaagcagcagcagaggcggcggcggaggaagaagaacaagaagaaagggtgcgccgtggtgcggaggctgcacgaggcgtcctgcggcgccgtgcgcgccatcttccgccgcctcctcgcttgcaccaccagcgtcgacgtcgccgacggcgtcgcggcggcgccccgcagctagccagctagccgtctccgatcctcgcgcgctgatgaggagaggcgggagagacgtgcgtgctatgctgctgctgccaacgcgaggtgttcttcgccgtgcatgcatgctgtgctctagctttcgccagttttcgtgtgcctgattttgctactagactagtaacagtaactaaattaaattactgcactcctctttccgtccggctgcagtagtacgtacagtagcaggcagtaaaacatgcatgcatggaccgcaaatatatatgtactcaatctgtgcttttgtttgttttatttatttgtttggtaat

SEQ ID NO: 133825 - DNA, 202 bp, Zea Mays
aaactttataattcaccccttttaaaggtaaatgatcataataaaataacgatggttaaaataaatcataatagagattagacattggaaaaatgttcctatcaaaacaaaggggggggacttttgaatatacctttaatccaactacacactcaaataataatgtggtgtgtgtacttcatgttgaaaacctagcctaaat

SEQ ID NO: 133826 - DNA, 703 bp, Zea Mays
cgctcccacccgcgacatctccctcccacacccgcgcatggccgtcgtgccttcgcccccagatctcgcgcatgcccacgcctgaacccagcaccagccatacctccgcagagcccccgcccccggatcccacacatcatggtcgtcgagttctacgccccctggtgtgggcactgcaagaaacttgctccagagtatgagaatgcggccaaggcacttagcaagcatgacccactgattattctcgctaaggttgatgctaacgaggagaagaacatgccacatgctaccaagtacgaggtccaagggttcccaaccatcaagatcttcagggaccaggggaagaacattcaggaatacaagggccctagggaggctgatggcattgtggattacttgaagaagcaggttggccctgcatccaaggagatcaagtcaccggaagatgcgactgcccttatcgatgacaagaagatctacattgttggtatcttcgctcagcgacaccgaatttacaaacttcatggaggtcgcagagaagctgacgtatgactacgactttggccacactttgcatgccaaccacctcccacgtggtgatgcagcggtggaaaggccattggtcaggctgctgaagccatttgatgagcttgttgctgacagcaaggttttactcacattctttattacattttggctatag

SEQ ID NO: 133827 - DNA, 1512 bp, Zea Mays
gagtaggtgcatggtcacgctagctgtagctttttgcagagcgtcgtctgtaaatacgtagcccttccacaagcgaggcaaggggggagagagtatcgtcagctagcagagagagtgcgtagcaactagcaatggcggagaaccctgctccgagttccccgctagtgacttctcccgacgccgctgcgccgcctctgccagcggagttcaccaagctcaccttccgtagcctgtacatccgtcggacaggtccaggcagccgggagatgactgtggacgggaggccgtctgaccagctgggacgacggttcgtgagcgactttcccatatacgatggccgtggctccggcgcccacctcgtcgctcgcttgcagggagtcactgtccaaatcggcagctcgcaccagctagtcagcatcgtcttcgaggccgagaggcttaagggctccacgctgctcaccaacggagtgataacggatgggtcagacgagtgggccatctacggtggcaccggggtgttcgccatggccaccggtgtcatacgaagaaggtttctcgccggtagcaacgacgggaactctgatgagcttaccagcatcgaagttttctgcccggcgtttggctcggcacaacaacagccaaacaagcaggactccgtctctgtcaccaagattggggtatggggtggaggtggagggtcggcgcaggacatcacgacgacggagccaccacagcgtctgcacagcctctccgttcgaactggttttgccgtcgactccatcgagttcacgtatactgatagaggtggccagaggcgcactgctgggcgatggggtggacttggcggcaaccttcgaacgatcgatcttggcgacgccgaggttgtcagggaggtctcaggaacatacggcatgtttgaaggcgccaccacgctgacctcgatcagaattctcaccagcagcagaacctgggggccatgggggatcgaggacgggacacgtttctgcatcaccgcgccgatcggcagcagcatcgtggggttctatggacgctcgaccagcaggctcgtcgctgcgatcggtgtttacctgcgtcaacaactctgatctggtcatctagctatcatcgtcgtccggtgctgtcgtatgtgtgttcatgtcaaataaataaaagtggtcttgtgtctacggctgccatcgccatgtgccaaataaatgccatgcatgcatgtgtctaaatttatatttccgtcgtcaccctgtagtatacgtatttatatcaaatataaaagcctgctgcaattcactaaggaatcgcgttttttgtcgagtgttacactcggtaaagactattttacacttggcaggcttttgccaagtgtaacactcggcaaaacctttgccgagtgtaacactcggcaaatatttcatcggcaaagggttctttgccgaatagactttgccgagtgtcgaaaaacactcagcaaattaagaatcgaaaaatataaaaata

SEQ ID NO: 133828 - DNA, 519 bp, Zea Mays
atggtcacgctagctgtagctttttgcagagcgtcgtctgtaaatacgtagcccttccacaagcgaggcaaggggggagagagtatcgtcagctagcagagagagtgcgtagcaactagcaatggcggagaaccctgctccgagttccccgctagtgacttctcccgacgccgctgcgccgcctctgccagcggagttcaccaagctcaccttccgtagcctgtacatccgtcggacaggtccaggcagccgggagatgactgtggacgggaggccgtctgaccagctgggacgacggttcgtgagcgactttcccatatacgatggccgtggctccggcgcccacctcgtcgctcgcttgcagggagtcactgtccaaatcggcagctcgcaccagctagtcagcatcgtcttcgaggccgagaggtagttcaatgtatgcatgcatgcatgtagtgtgtatatatataatgcatgtgcgattcattcattggttcatcgtcgtcaggcttaagggct

SEQ ID NO: 133829 - DNA, 1505 bp, Zea Mays
atggtcacgctagctgtagctttttgcagagcgtcgtctgtaaatacgtagcccttccacaagcgaggcaaggggggagagagtatcgtcagctagcagagagagtgcgtagcaactagcaatggcggagaaccctgctccgagttccccgctagtgacttctcccgacgccgctgcgccgcctctgccagcggagttcaccaagctcaccttccgtagcctgtacatccgtcggacaggtccaggcagccgggagatgactgtggacgggaggccgtctgaccagctgggacgacggttcgtgagcgactttcccatatacgatggccgtggctccggcgcccacctcgtcgctcgcttgcagggagtcactgtccaaatcggcagctcgcaccagctagtcagcatcgtcttcgaggccgagaggtagttcaatggctccacgctgctcaccaacggagtgataacggatgggtcagacgagtgggccatctacggtggcaccggggtgttcgccatggccaccggtgtcatacgaagaaggtttctcgccggtagcaacgacgggaactctgatgagcttaccagcatcgaagttttctgcccggcgtttggctcggcacaacaacagccaaacaagcaggactccgtctctgtcaccaagattggggtatggggtggaggtggagggtcggcgcaggacatcacgacgacggagccaccacagcgtctgcacagcctctccgttcgaactggttttgccgtcgactccatcgagttcacgtatactgatagaggtggccagaggcgcactgctgggcgatggggtggacttggcggcaaccttcgaacgatcgatcttggcgacgccgaggttgtcagggaggtctcaggaacatacggcatgtttgaaggcgccaccacgctgacctcgatcagaattctcaccagcagcagaacctgggggccatgggggatcgaggacgggacacgtttctgcatcaccgcgccgatcggcagcagcatcgtggggttctatggacgctcgaccagcaggctcgtcgctgcgatcggtgtttacctgcgtcaacaactctgatctggtcatctagctatcatcgtcgtccggtgctgtcgtatgtgtgttcatgtcaaataaataaaagtggtcttgtgtctacggctgccatcgccatgtgccaaataaatgccatgcatgcatgtgtctaaatttatatttccgtcgtcaccctgtagtatacgtatttatatcaaatataaaagcctgctgcaattcactaaggaatcgcgttttttgtcgagtgttacactcggtaaagactattttacacttggcaggcttttgccaagtgtaacactcggcaaaacctttgccgagtgtaacactcggcaaatatttcatcggcaaagggttctttgccgaatagactttgccgagtgtcgaaaaacactcagcaaattaagaatcgaaaaatataaaaata

SEQ ID NO: 133830 - DNA, 1051 bp, Zea Mays
cgagtcgatggggagcactccatcgccgcgcacgtagccatcggcgtaccaggtctagtgtatggggcttggtatctttctagaagccacgccaccaccgtctgcgaccacagccacaaggtgcagggatgtggagcaggagtactacaaggcagtggcgtcggcgaggtcgagatcattgtcaatggcggcagtgctggcttcacagggcaagggagtgctgcggaaccataagcctcgcgctcaccttcgattagcgagatagcgtgagatgaagttgatcatgaggtgtggagcatagggatggtggtcgatggctgaggcgaaggtcatgcgggctcatgctgatggaccgaaagcggtgaagggcgagtgtcgggtcttgactgatggatcggagtagccgggtgaccagacgcggtagctgacacctgggacacgcactcgtgcgaggacgtggtggagtggactgtattgccggcgtggtcaaggactggcgagacacatgtctggtcgtggaggacgcgcacgaggtgcgttactcatggcaggtttggtggtttggacctggaaaccacacagcgctacggatggcgggttttgctgagtttgggcctcaaaactcagcggcagaggttttagagggaactggtggtgacacgtggcgtgatcgcggagggtgcgtaaaggcgaagcgactccatgtgaaggatgtggccctcgaatcgaaaacctaggagttggtccatttcgtgcccggtggagtggataggctctatgtaaatagcagtagtttaggaaatgacaataaccctctataaatagagagaatggctagttcgtctagcatctcttgagtgctatttgtttagagcactcattctagagctcttagttttctctctaggtagactccagttgagccgagaggtccacaacgattttgtacttggactgtgttcttgatcttcaagtttaatcagaggaagggttgtcagtccggcccataacgttctttggcttcaatctcagttttgtatacttgctgaaa

SEQ ID NO: 133831 - DNA, 222 bp, Zea Mays
atgtcctgtgccgaccctcccggtccaccccatagtccaatcttggtgacgctagagccctgcccctgcacctgcatcttatcttgcagctctgactgtgagccaaacggccggcagaagacatccatgttgagctcatcagtgttcccgccggccctgtcggcgagataccttctccttatgacgcccctcgccatggcaaacaccccggttccgccgtag

SEQ ID NO: 133832 - DNA, 1380 bp, Zea Mays
caaaaccaaactgtaagcgcaccgcccaaaaccctataaaccatctcccatctctctggctcgctcgtctagcagatgcacagcagcaggcgtcccctgtcttcgtccttccgaaatcccaatcctccctccgagtcccccatcccaaaactcggagctccgaagctggcactggcatcgcggcaatgccgaggccgcccacaatggtgatccaggacgactacatcgacatggacctgaccccggcagccacaccggagccctcgccagcctcgccccgcttcgagttccagagcgccggcgccggcgccgccggcgacaggcatagggaggcggcgttcgcgtcccccgcggacgagctgttctacaagggcaacctgctgccgctccacctgccgccgcggctgcagctcgtgcagaggctcctccaggaccaggagcagccgccgccgctgcgaggggcgaagcgggatgcggagtcggatgccacggcggcggcggcggcagagcgaggagacgccgacgctgccgctgccgccagcaaggtgtgcgccgccaagaagccgtcttgggccaagaagctcaaggtggttaagcggtgggcgtcgaaggagtacatccggtcgctcttcctggccaggccgccgttgccgagcgacatcgtcgccgccgccggtggcgccagcgccagcggccacggcatcggcagcgtcagcgcgagggggagcgtcctagagcaggaggaggtgtgccagtgccagcaccgcaagtccttctccggcatcatccgccgggtgcgcctcgtggcgaccaaggcgcctgggacctcgccgctgtgctcctcctcgtcctcgtcctcctcgtcgtccacgccgtcgtgccgcaacgcaaacgggttcttcttccggacgccggcgtcggcggcgggggcgacgccggcgctgaagcggagcagcagcgccgggtcgtccgaggagggcgccatccagggcgccatcgcgcactgcaagcgttcccagctgctgcagcccgggatggtggcctcggcggcggcgcggaggagcgtcagcgacgtcatgttctactcggtgaccaacacgcccagagcctcttccgtgaccgccggcgaggtggcgcaggagaggaggcaggagatgtgcaggggctgatgatggccgatgacatgccacccatggatcaaaagcgacattcttttgtttcttttcttttttgtttattttgcttgtgaagatgatgagcaatgtgatgtgggttgctctggtgatgatcaggacgcaatgtgctgtgactgtttccccggttcccttgattctttgcgatcttctccgagccaaggattttctcacttgagctgttcat

SEQ ID NO: 133833 - DNA, 1580 bp, Zea Mays
tccatcaccgtccccacgttctcctccctccgcctctcgctctgcgcacatccccatgcccacgccgagcgcttgcgcctcaccacccccgtcgcagccgcggccgtggcggcgtcgacgacctcccccgactttcccgccgtgggcgccgtcctggggaagcccacagtgctcgtgggtagtggccgagaagatcggagccgcggggttcatgctgaaggaggtggtgcgatgtccagctcccaggtcgtcgtcctcacgctcctggagttttggtcagtgagatgttcgtcttcgtgctcagcctcgtcctcgagtcgtcgcgcaaacagcgagagcagcgtgggtctcatcatcaggatcacaccaacagggacggagatctgtcgtcgaagaccacctgactgtttctcatggcaggcttgcttgcactagcttggcacaataagccacttcaggcttcagtcggttatgtgatcaccggaacattatgggctctagagtaggacttttgaggtattttgatgccaaaatttttagacatgccatcattgaagttgctccggtctttacaagatttacagagcttcaactaagtcaacttgttgagtcgcttgttacatatcttttgcatatgggaaaatagtagataagaaatgctaggcgatggtgcatgcatgatgaagctgctgtccattatattgacatgattgatcagaccacgcttggtcaccggatgatcaagaaacaattcaacaagactccaagagctggctggcaaatcgattgcttggaacagagcttggcttcgattctttgcattttgcaagaatcgattaccaagataagaaaaggcgtaaagctggcaaaggcttgaggttatatggcgtggctcaagaactttcggttcatcttcacagatatttacaaatgtatttcgtgtcgattatagccctccagatggctttggctttgaagttttagatgaaaatatcttgcctgtccaggatgacatgccgatgtttgactataatgttgaagaacaagttaatgattttgttgctgcagccatagaacagaatcttggttccggaatatggacaaacttatctatcgcgtgaacaaggatgcacgtaaaatagaatttttagtaggtaggaggagttccttagggctgttcacgaccagcttggaagacccaatggcaattgcccagcatcatgatgcggtctcaggtatagcaaaacaacacacgacagatgactactcgaaatgccttgctcttggagcatctaagaatgaaagcattaatggtatatagttggatatttcattcagagaggctcaagtgatagctgcaagtagttctaccttgtgcccagttttcttgttcttttaggtcaatgaaagttcccatttttgtggcgttgcttagatggttggtcctttcctcaaaaaaaaaagatggttggtcctgttgactaccaaaatgacttgaacttttggtgcatggacaaatggactagaagctttcctgtaacgtggcacatcataagatgttggttgattctcctgaaagc

SEQ ID NO: 133834 - DNA, 1489 bp, Zea Mays
tccatcaccgtccccacgttctcctccctccgcctctcgctctgcgcacatccccatgcccacgccgagcgcttgcgcctcaccacccccgtcgcagccgcggccgtggcggcgtcgacgacctcccccgactttcccgccgtgggcgccgtcctggggaagcccacagtgctcgtgggtagtggccgagaagatcggagccgcggggttcatgctgaaggaggtggtgcgatgtccagctcccaggtcgtcgtcctcacgctcctggagttttggtcagtgagatgttcgtcttcgtgctcagcctcgtcctcgagtcgtcgcgcaaacagcgagagcagcgtgggtctcatcatcaggatcacaccaacagggacggagatctgtcgtcgaagaccacctgactgtttctcatggcaggcttgcttgcactagcttggcacaataagccacttcaggcttcagtcggttatgtgatcaccggaacattatgggctctagagtaggacttttgagaaatgctaggcgatggtgcatgcatgatgaagctgctgtccattatattgacatgattgatcagaccacgcttggtcaccggatgatcaagaaacaattcaacaagactccaagagctggctggcaaatcgattgcttggaacagagcttggcttcgattctttgcattttgcaagaatcgattaccaagataagaaaaggcgtaaagctggcaaaggcttgaggttatatggcgtggctcaagaactttcggttcatcttcacagatatttacaaatgtatttcgtgtcgattatagccctccagatggctttggctttgaagttttagatgaaaatatcttgcctgtccaggatgacatgccgatgtttgactataatgttgaagaacaagttaatgattttgttgctgcagccatagaacagaatcttggttccggaatatggacaaacttatctatcgcgtgaacaaggatgcacgtaaaatagaatttttagtaggtaggaggagttccttagggctgttcacgaccagcttggaagacccaatggcaattgcccagcatcatgatgcggtctcaggtatagcaaaacaacacacgacagatgactactcgaaatgccttgctcttggagcatctaagaatgaaagcattaatggtatatagttggatatttcattcagagaggctcaagtgatagctgcaagtagttctaccttgtgcccagttttcttgttcttttaggtcaatgaaagttcccatttttgtggcgttgcttagatggttggtcctttcctcaaaaaaaaaagatggttggtcctgttgactaccaaaatgacttgaacttttggtgcatggacaaatggactagaagctttcctgtaacgtggcacatcataagatgttggttgattctcctgaaagcagattttattttactttaaccaaaggagaaccaagttggctgtcgtc

SEQ ID NO: 133835 - DNA, 1330 bp, Zea Mays
gttctcctccctccgcctctcgctctgcgcacatccccatgcccacgccgagcgcttgcgcctcaccacccccgtcgcagccgcggccgtggcggcgtcgacgacctcccccgactttcccgccgtgggcgccgtcctggggaagcccacagtgctcgtgggtagtggccgagaagatcggagccgcggggttcatgctgaaggaggtggtgcgatgtccagctcccaggtcgtcgtcctcacgctcctggagttttggtcagtgagatgttcgtcttcgtgctcagcctcgtcctcgagtcgtcgcgcaaacagcgagagcagcgtgggtctcatcatcaggatcacaccaacaggaaatgctaggcgatggtgcatgcatgatgaagctgctgtccattatattgacatgattgatcagaccacgcttggtcaccggatgatcaagaaacaattcaacaagactccaagagctggctggcaaatcgattgcttggaacagagcttggcttcgattctttgcattttgcaagaatcgattaccaagataagaaaaggcgtaaagctggcaaaggcttgaggttatatggcgtggctcaagaactttcggttcatcttcacagatatttacaaatgtatttcgtgtcgattatagccctccagatggctttggctttgaagttttagatgaaaatatcttgcctgtccaggatgacatgccgatgtttgactataatgttgaagaacaagttaatgattttgttgctgcagccatagaacagaatcttggttccggaatatggacaaacttatctatcgcgtgaacaaggatgcacgtaaaatagaatttttagtaggtaggaggagttccttagggctgttcacgaccagcttggaagacccaatggcaattgcccagcatcatgatgcggtctcaggtatagcaaaacaacacacgacagatgactactcgaaatgccttgctcttggagcatctaagaatgaaagcattaatggtatatagttggatatttcattcagagaggctcaagtgatagctgcaagtagttctaccttgtgcccagttttcttgttcttttaggtcaatgaaagttcccatttttgtggcgttgcttagatggttggtcctttcctcaaaaaaaaaagatggttggtcctgttgactaccaaaatgacttgaacttttggtgcatggacaaatggactagaagctttcctgtaacgtggcacatcataagatgttggttgattctcctgaaagcagattttattttactttaaccaaaggagaaccaagttggctgtcgtc

SEQ ID NO: 133836 - DNA, 1900 bp, Zea Mays
atgaccacgcttggtcaccggatgatcaagaaacaattcaacaagactccaagagctggctggcaaatcgattgcttggaacagagggaatttgactctgtggtggttaaattgcagatatttacaaatgtatttcgtgtcgattatagccctccagatggctttggctttgaagttttagatgaaaatatcttgcctgtccaggatgacatgccgatgtttgactataatgttgaagaacaagttaatgattttgttgctgcagccatagaacaggatgcacgtaaaatagaatttttagtaggtaggaggagttccttagggctgttcacgaccagcttggaagacccaatggcaattgcccagcatcatgatgcggtctcaggtatagcaaaacaacacacgacagatgactactcgaaatgccttgctcttggagcatctaagaatgaaagcattaatggaataaacattgtgtcttgttatccattgcaatatacaacacttaagcccttggctgatagagtgattgtaaagattaactcttccgaggagaagacaactggtggaattttgcttccaacgactgctcagtctagacctcagggtggcaagaaatacgtcaaggaaaaatgtcgaacaactcagaagataaattcaagaactggttgcttcaacaagagtctgtccatgaggatggcatgcaacattacttgcccttcgattgagataggtggctacggtgatgctttgttgaacctgatatacgcatctccatcaagccagttcgaagagctcagtttagaatgtgagctagatgctacaggcaatcattctagagtgaaggatgctcaagttcatggctcacctatacctgagagtaatggaagattatcgacaactgctcagactaaaatgatgtccacagtctcagaagatgcaattcttgttggctcatctttcaggtggaagcgcaagctgacttattttattaccatgaagcctgaagatgtataccaaagtagcctaggtaacaacaataagagggttgggctttttgatatgggtgatggaagtagtgagcctgctgctgaggacaacaatcaaatgcatcaggtctatcatgggttttattctgcatacgataatacaactctactatatgagatcctgaagtctattaaatgggcaagaaaaacatatgtaaatcgacctgtaaatgttgttggacactccattggaggggatctagcttcattttgtgcccttgatctatttgacgttgagctcatgacttttggacagcctcggttaggcaatcctgcatttgttgtatgccttggctaacaagtcccaagaacaatccatgtgacccataaaaacgatattgtgccgcaattaccaccgtattattattacttaagtaaatggacataccaccacttcgctagagaggtttgacttcatgagagcatagatggaaatgtagttgccagaaatgagattgtatgtgatgattctggtgaggacccgacctatagcagaagtgggtcatgggatgagcgtagcagataatcttgagtactacagtgtcacactacatgttgactcaaggggaacctgtcagttcgtgattggtacagccaaccaagtatacaactacattcgtgaagttgatggatccatcatcttgttaagatatatatgcaagaaccatgagctctagaatcaatgtgactttgtatgccacgaaatgcacccttgtacaatatttttattttcaatttgtgtacagctcatgaaatactgttgtgtacaactcatgaaatactgggctctccagagggtaaggactaaggagagactcacctttttaaatgcacccctttgaccaagtgac

SEQ ID NO: 133837 - DNA, 1430 bp, Zea Mays
agagctcagtttagaatgtgagctagatgctacaggcaatcattctagagtgaaggatgctcaagttcatggctcacctatacctgagagtaatggaagattatcgacaactgctcagactaaaatgatgtccacagtctcagaagatgcaattcttgttggctcatctttcagataccaaagtagcctaggtaacaacaataagagggttgggctttttgatatgggtgatggaagtagtgagcctgctgctgaggacaacaatcaaatgcatcaggtctatcatgggttttattctgcatacgataatacaactctactatatgagatcctgaagtctattaaatgggcaagaaaaacatatgtaaatcgacctgtaaatgttgttggacactccattggaggggatctagcttcattttgtgcccttgatctatttgtaagtatttttaatgtacttgatttattataccaaatttcaatatatgctctacaaataacctgtacttgttttgtgataccatcacatgtattgttaatatatcagatggttggcttcattgatatctctacattttttacatatatcagatggttggcttcattgatatctctacattttttacatgttaaattcggatcataggacgttgagctcatgacttttggacagcctcggttaggcaatcctgcatttgttgtatgccttggctaacaagtcccaagaacaatccatgtgacccataaaaacgatattgtgccgcaattaccaccgtattattattacttaagtaaatggacataccaccacttcgctagagaggtttgacttcatgagagcatagatggaaatgtagttgccagaaatgagattgtatgtgatgattctggtgaggacccgacctatagcaggtacatatcagtctatctattttgtacatttatttcctatgtgtgtttcatattatttgtgttttctgaagaagtgggtcatgggatgagcgtagcagataatcttgagtactacagtgtcacactacatgttgactcaaggggaacctgtcagttcgtgattggtacagccaaccaagtatacaactacattcgtgaagttgatggatccatcatcttgttaagatatatatgcaagaaccatgagctctagaatcaatgtgactttgtatgccacgaaatgcacccttgtacaatatttttattttcaatttgtgtacagctcatgaaatactgttgtgtacaactcatgaaatactgggctctccagagggtaaggactaaggagagactcacctttttaaatgcacccctttgaccaagtgacattcgatacattgtaagctccataagattgccgcacaattcaatttgtgtatatcaataacactatgtattaccaagttatgcaagtatta

SEQ ID NO: 133838 - DNA, 208 bp, Zea Mays
cctggccccccatcactagcgggccgtcaccgcccactctgcaacggcccagccggagggtggcgcgcaggacgtaacccgggagcgggcggggcacagcgaggggatttttttaaccaagccagaaattcgcccccgagggggatcgaacccaggacctggaggtgctactcggaagccttaaccattacgctagaggccctttcgc

SEQ ID NO: 133839 - DNA, 198 bp, Zea Mays
atggcttttctgatgatcctcggcggtcaatccagcttcgcctgggcctgcaacagtgagggatcagttgatagtggcaatgcagcgaagccacctttccggggtggtgatcttgcaaatttctcagttccggacatcaacgacggcgttctggagaacggaggatgcgggcgcggtacaattcatatagttccataa

SEQ ID NO: 133840 - DNA, 397 bp, Zea Mays
atcagtttatagcatgcatgattggtgagatagcaagcatggagacaaatttgttggtttatagctatgtagaaaatggtaacatgctcacaaaccttcatggcatctccaggattgattgtggtgagatgtgctgtctggattacgagcaggaaattcggcattcttcagtttcatgttcttctacgaatcaacaccactgagatgatttgcagtactgaaaaacaaaccggatctgaagatgaagcaactgagcggtgtcccgatagggtgcccgtaagggcgccttatgtctgcttgtagaaatgcatcgcgcacttagaggaataatgcccagtttcagtttgaaaaaggtacaacgctcaggaaatgtaaaaaatcaatcgccatattactt

SEQ ID NO: 133841 - DNA, 195 bp, Zea Mays
atggccacttgcttatgtccatcattcttcgggtttgcagatgactgcatcttcgtgtatgaagggctatctattcctgttttgttcagttatgcagggtgtaagatatacatcacaaggccagtacgttctgcatcaattatcttgtccttgagggtcgcccttccgcttcgtggtgcctcggggccaagatga

SEQ ID NO: 133842 - DNA, 543 bp, Zea Mays
catatatatattacacgttacgagtagtccatcaccagggcaccaccacggtacactctcctatacaaaaacaaaggaaggaacagaagccatgactagcaacaagaacactgccgccgccagggcgacggcgacggtggcggtgttggtactagtagcggcgacgctcctggcaacggtggcgaatgcacggccttgcttggacggcgtgctgcctccgtcgacgacgtcacatggcgtggttggggatctgctgccgcgtaagatcatcccgccctctgggcccagcgacttctggagccccgacgacgagccgtcgccgccaccgcctgcggaggcgacagtcgatcgcggtaattgagtgtgaggaggagtggtgatggatgagaaatgctggtgatgtataatgccatttgcgagaacgagcttgaataatcaacaagagcgcagggtcttgatcatttcccttgtgttttatatatcatctcgatctaaatgttctccttcgtttgtttgaaaattatctggatcttaaggtttttg

SEQ ID NO: 133843 - DNA, 1342 bp, Zea Mays
actcaaacccgtaggtttttatccacgtgccgccgcaccggccaaccccgcgcccctcgaccgtctccgtcgccgcgccacccgcaccgggacccagtatggccgcctccggcgcatatccgggcacggcgttcaagatactcctctcctgccccgacggcctccctcgctcccgcgtttcggtgaagtttggtcggtcattcgacaggattccccatcctgatgcagccttggaggaatctataagtgaggtgtgggaccaaagccttcagcggaacccatatctatacagcggtacaaagtttcgggtatgtatttttagctctaccttggtatgctcgtttttttctgctccgttgatacttgaagtcctgaagatgctacaatttactggtaaacacgtatttaactaaagaaaactggaagcttcttgcatgttaagtgatttggtgcatgctttatagaaagacaatctctctgtatatgtatctgttctactgcattcaccagcaggtagtagaatgtaaatactgacaacaatcaagaatttcagtatggaggaaatgccttgcactacaaagatgactcagatcatgatcttgagtactgtgtctcacttcatttgggtctcacagactacaggacatttgtgggaacaaatctcaatccattgtgggaattttttttggttccatctgaagatgattctgtacattgccaacacttgtcagatgcactgggaaatggtgctatagttgaaacatctgacaaaaagattattgtattgcaaaggagctacaatgtggcggactatccaggatactatgttttccctggaggacactcggagccgcaagaaattggaatcatgggtcatcaaactgatgaagaagactttgctagtctcactgaacgagtttcacaagaaatgtttgacggagtcatccgtgaagtggttgaggaaactggagttcctgctagctccctaactgatcctgtcttcattggagtttcccgccgagaagttaacgttaggccgactgcgttcttttttacaaaatgtaacattgattccagtggcgtaagcgagctttattctagagctcaagatggctatgaatctactaaactctacacagtatccgttgaagagctacaaggaatgaggcagcggatgcctggatgccacaacggtggtattgctctgtatgagttgatgaggaatgctgcaaaaaaaagtgaagatgtcattgtatgtatagttaaattaataaattttattcagctgtgtatgttaaacacttgcaaagctgcaaaatttatggccttctttctagtttta

SEQ ID NO: 133844 - DNA, 1803 bp, Zea Mays
actcaaacccgtaggtttttatccacgtgccgccgcaccggccaaccccgcgcccctcgaccgtctccgtcgccgcgccacccgcaccgggacccagtatggccgcctccggcgcatatccgggcacggcgttcaagatactcctctcctgccccgacggcctccctcgctcccgcgtttcggtgaagtttggtcggtcattcgacaggattccccatcctgatgcagccttggaggaatctataagtgaggtgtgggaccaaagccttcagcggaacccatatctatacagcggtacaaagtttcgggtatgtatttttagctctaccttggtatgctcgtttttttctgctccgttgatacttgaagtcctgaagatgctacaatttactggtaaacacgtatttaactaaagaaaactggaagcttcttgcatgttaagtgatttggtgcatgctttatagaaagacaatctctctgtatatgtatctgttctactgcattcaccagcaggtagtagaatgtaaatactgacaacaatcaagaatttcagtatggaggaaatgccttgcactacaaagatgactcagatcatgatcttgagtactgtgtctcacttcatttgggtctcacagactacaggacatttgtgggaacaaatctcaatccattgtgggaattttttttggttccatctgaagatgattctgtacattgccaacacttgtcagatgcactgggaaatggtgctatagttgaaacatctgacaaaaagattattgtattgcaaaggagctacaatgtggcggactatccaggatactatgttttccctggaggacactcggagccgcaagaaattggaatcatgggtcatcaaactgatgaagaagactttgctagtctcactgaacgagtttcacaagaaatgtttgacggagtcatccgtgaagtggttgaggaaactggagttcctgctagctccctaactgatcctgtcttcattggagtttcccgccgagaagttaacgttaggccgactgcgttcttttttacaaaatgtaacattgattccagtggcgtaagcgagctttattctagagctcaagatggctatgaatctactaaactctacacagtatccgttgaagagctacaaggaatgaggcagcggatgcctggatgccacaacggtggtattgctctgtatgagttgatgaggaatgctgcaaaaaaaagtgaagatgtcattgatgaatagttctgatggtgttattacaccacaaacaagtgtggaggtattcgcatctcgtacaaacacccgtgcagaacactgcatgtgacatccatcagattgctgttctttgcagtagatatgtgccatttccatgtttgttgagcctgacataggtctccttagaccgctgcataagtgcccacaaagagcatgaagcttaaagtttcctctgaatactaccggaataaatttcatctccggatgtaccaccaaaggaggcacaccagagcggcatcatgatgctaatctacatggtgagatgacccgtggattgtaatgttctttcaggattgaatttcctgggcaagtgatgcctgaatctgtcagctgttcttctgttggtttctgctgtagcggtgtactaggagtatgtaggaaccgaaggtgaagcttacattactttgctctgagaacgtttatatacttgttacctttggtatggatatactagttcgtgctagggtatggattctacatatttcatcttgacttttatcgcttcacac

SEQ ID NO: 133845 - DNA, 1558 bp, Zea Mays
actcaaacccgtaggtttttatccacgtgccgccgcaccggccaaccccgcgcccctcgaccgtctccgtcgccgcgccacccgcaccgggacccagtatggccgcctccggcgcatatccgggcacggcgttcaagatactcctctcctgccccgacggcctccctcgctcccgcgtttcggtgaagtttggtcggtcattcgacaggattccccatcctgatgcagccttggaggaatctataagtgaggtgtgggaccaaagccttcagcggaacccatatctatacagcggtacaaagtttcggtatggaggaaatgccttgcactacaaagatgactcagatcatgatcttgagtactgtgtctcacttcatttgggtctcacagactacaggacatttgtgggaacaaatctcaatccattgtgggaattttttttggttccatctgaagatgattctgtacattgccaacacttgtcagatgcactgggaaatggtgctatagttgaaacatctgacaaaaagattattgtattgcaaaggagctacaatgtggcggactatccaggatactatgttttccctggaggacactcggagccgcaagaaattggaatcatgggtcatcaaactgatgaagaagactttgctagtctcactgaacgagtttcacaagaaatgtttgacggagtcatccgtgaagtggttgaggaaactggagttcctgctagctccctaactgatcctgtcttcattggagtttcccgccgagaagttaacgttaggccgactgcgttcttttttacaaaatgtaacattgattccagtggcgtaagcgagctttattctagagctcaagatggctatgaatctactaaactctacacagtatccgttgaagagctacaaggaatgaggcagcggatgcctggatgccacaacggtggtattgctctgtatgagttgatgaggaatgctgcaaaaaaaagtgaagatgtcattgatgaatagttctgatggtgttattacaccacaaacaagtgtggaggtattcgcatctcgtacaaacacccgtgcagaacactgcatgtgacatccatcagattgctgttctttgcagtagatatgtgccatttccatgtttgttgagcctgacataggtctccttagaccgctgcataagtgcccacaaagagcatgaagcttaaagtttcctctgaatactaccggaataaatttcatctccggatgtaccaccaaaggaggcacaccagagcggcatcatgatgctaatctacatggtgagatgacccgtggattgtaatgttctttcaggattgaatttcctgggcaagtgatgcctgaatctgtcagctgttcttctgttggtttctgctgtagcggtgtactaggagtatgtaggaaccgaaggtgaagcttacattactttgctctgagaacgtttatatacttgttacctttggtatggatatactagttcgtgctagggtatggattctacatatttcatcttgacttttatcgcttcacac

SEQ ID NO: 133846 - DNA, 291 bp, Zea Mays
atggcagcgcaaaaggcctccacgaggacacccaccatcgcggcactcctgctgttgtcggtgatgacgatgctatcctcgacgacagcgacggcacactggttgggtggaagcatcgtccaacaaccccaaccctttcgtgaccctcctccgtggcattggggtccatggtcagttatcctctgccacagggcaagtgtcgtggtctcctctgccgccctagattcccctaccaccaccatgtgccaccgcgcggagacatactggttatcggcgccgagtaattattga

SEQ ID NO: 133847 - DNA, 502 bp, Zea Mays
tgtgccggtccaggcggtgcggcccgtgcgcccgggccgagatgtcggcccaccaaaaccgcgcccccccgcatcgccacggggataaggatcgacgggcaagaatacacggatcactgtttatccatttatcacaaaccctacccactttccccatttctctcagccgtgcgcctctcgcctgaaaccctaccactctcgtcgcttctgttcaccggcgaggtggaggactgatccggcgtccattgttgcgctgtcgtcgaactccccgccggcgagcgctttcctgcgagggcgccgccgtcggtgagatcctcggcggtgcttctgcacttgcaaggaggtacggcgtcggcctgagggttgcgaactgtgaactaccgacggcaagaccacggtgcgttctcctttcttgctcccttgttctaatccccatctcaagatggctgttgatttccgatttggggattcggggctcgaatctggggatttagggttccat

SEQ ID NO: 133848 - DNA, 105 bp, Zea Mays
gctttcctaaattatgtcgtttggttgcacacagaattgagatttggaaccagagactcaattccctggaatataattaaaggcgcagttcccctgcgctttcga

SEQ ID NO: 133849 - DNA, 288 bp, Zea Mays
ctggggctgctgcagttggctcctcagtcctcagtgtctcggttctcaggttggtggaagagaactgttgctgctgttcctaaggggcttcgtagaggcctcaattctctaattacgttagtggcttgggagatttggaagcaccgcaacaggtgtgtctttgacaattcaagaccatgtgttgtggaagtgctaaaagctgttaatgtggagggggggctttggtgtttggctggagcttccaagctccaggatcttgtttttgggtcggtgcctactggtgcttaa

SEQ ID NO: 133850 - DNA, 477 bp, Zea Mays
atccaaatcgtccatctccctcacaacagccgccctcccattttctcagctcggccacaaccatagcttggtggtcgacgtgcccctgctccagcctggccgcccaccttgggtcctcatctccatctctcagctgttcagctccctggtgctcgccctccccttctctcaggatagcagggagccggcgacctctccaactcggccggccatggcaccgcttccccaagcgtcacaccggagcttgcccaaccctctcccatctccttccccaagcacaagtcccatggtcgagctcacccctgcaggagctccctatagcgcctagattttcaatttcctatgagttctttttcccccacgtgcaatcccggcatcgtcgtcgtgtttagtcacgaggaaccccaggtttttgcgtagagaggaaagtcgtgtggcgcgtgctaggtgtttgatggaatggatgaatcggagatc

SEQ ID NO: 133851 - DNA, 620 bp, Zea Mays
atccaaatcgtccatctccctcacaacagccgccctcccattttctcagctcggccacaaccatagcttggtggtcgacgtgcccctgctccagcctggccgcccaccttgggtcctcatctccatctctcagctgttcagctccctggtgctcgccctccccttctctcaggatagcagggagccggcgacctctccaactcggccggccatggcaccgcttccccaagcgtcacaccggagcttgcccaaccctctcccatctccttccccaagcacaagtcccatggtcgagctcacccctgcaggagctccctatagcgcctagattttcaatttcctatgagttctttttcccccacgtgcaatcccggcatcgtcgtcgtgtttagtcacggtgattctcaatttcctatttttatttcattgaatttttaatgcgagcagaatttttttggtgctatgttaatacgatgttatatgtaatgtgtgtttgtgtgagtaagaggaaccccaggtttttgcgtagagaggaaagtcgtgtggcgcgtgctaggtgtttgatggaatggatgaatcggagatccttgttgctgttgcgaaatccaagtctatttagt

SEQ ID NO: 133852 - DNA, 2064 bp, Zea Mays
atccaaatcgtccatctccctcacaacagccgccctcccattttctcagctcggccacaaccatagcttggtggtcgacgtgcccctgctccagcctggccgcccaccttgggtcctcatctccatctctcagctgttcagctccctggtgctcgccctccccttctctcaggatagcagggagccggcgacctctccaactcggccggccatggcaccgcttccccaagcgtcacaccggagcttgcccaaccctctcccatctccttccccaagcacaagtcccatggtcgagctcacccctgcaggagctccctatagcgcctagattttcaatttcctatgagttctttttcccccacgtgcaatcccggcatcgtcgtcgtgtttagtcacgaggaaccccaggtttttgcgtagagaggaaagtcgtgtggcgcgtgctaggtgtttgatggaatggatgaatcggagatccttgttgctgttgcgaaatccaagtctatttagtgttggtaagctaatttattattactgttgattgaattattagatgaatggaatggatatgtttagtgaatatatatgcatcatgagttagtggtaatacctcttcgtggatagtgacatgattgtattcatgattatggttaaaataagtgatgacggtattgttgttcgaatctgcacgtatagttttgattgtgcaactaattgagtggagtaaatcatgtgttctatagaaatgttatatacaaaagttgtagccaacttctttatcttgtttgtttaaaaatttcatgaccataggtttaatagtttaggagttatgatttttccaagtccagtttcagaatatgtccaaattctgtacaggtttcgaaaattggattgtttggctaagcaaaattgagaatcagcccttagtaattatacaagaattttagtacttttcttaagctttccaaaaaagtcttggatcactttttttggtagtctagagaccaagttacagctgtttgaactataaagtctgaacgttttttggtggtctagagaccaagttacagttgtttgaactatagagtctgaatctgtccaaatatggatagagaagtctgtttgtattaactgactttgatatgcattgaattgacctgatatgtttaccaatgaattgtagaaaattctattagctttctaaaaagtctaggatcacttgatttggacacctgagactccaattatggatttttgaagtgagtagtcgaattctgtccaaatctagacataatttatgtttacttctgtttgacctttctaaaggtcgaatcttgttgtgatggcaatacaaaagttatagaggacttcataagctttccagaaagtcctagtttatcattttaagatgaatatcttgtgagttatgattaaaagaactgactgttgtactcctgtccaaaatcagcaagtattaagttgatttctggagtcattcttgtttggctaggtaggattagttaattcttgattcttgagtgatgaagacttattacatataactgacagtgttgcaagtactaaagaaggttgttgggggccttcggtttctgaaggtcctcaaatacgtgatttaacgatgtttctggagtataatacatgagcaggtaccttcggacttgagtcaaaatcacagtgtgaagaagcacaagggaaacgaaggatggaacagagccgaagctgtgcgcaagggagcttcgacatgatgacaaaaaaaggaaaccgacttaaaggggaaaaggctatctagacctcgatgaattactatagaattattagcaaatgtaaagggcctgggtgtaattttacatgggctgcgtcccgtgcctataaatagatgaacagtactcccgtactgttcacgctgactgggcatttgcttttgcgtcacgcttgtacttttaccttccttcaagccgaaggtacttttgtaacttgttattatttttatttttccttaataatgaaatagaaatgatttgatgataataaataactgttggt

SEQ ID NO: 133853 - DNA, 98 bp, Zea Mays
tttcagatgatgaatctgatgaggaggttccacaggctatttcattattcccaaacgcagatgatgataaaagtgaaggaagtaaatgtggtgtgaag

SEQ ID NO: 133854 - DNA, 907 bp, Zea Mays
aggacttcgttcctatctcgtgctcagcgttatcttctccgtggcgctcatctccctgatattttcactgcgccgcggcttccagcgctcagcctccagctcccacgcgcactccacctcgtccatggccgccgatcgagtccctccccatctcctacaaccggccgccctgctcgttctccctagctgcgatgtggagctcgccctggacgatcgtccttgcccctcctctctgatctgcgtgcaggggtttccctcccatggcgcctggtcttcttcccttgactccatgccgagcgccccagtcgagctcgtcctggctccagcttcttccttggacggcggagccctcccattcctgcagcaggccagcgtccctctctccatcatcttctctgcttggttcctggcgagctccccctgctcttctgctcgccctggccctgtgccatttttccattcctgcggcaagcaccagtccctccccacgccaacatccctttcctacggacgctgcccctctctggtttctggtggccggccacctctgctgctcccatggtgatctataaatccctctgttgttttactagtctggttaataccctgctgatgtgaagttttatgtgtgttgatgtgtacgatatggagtaaaatctctggagaattaggtggaggagaaggttaagttcaacgctccttaggtgttctatgaagtgcttgaactgaagttcgttgtcgttctgttcaccgcgatatgagtaggggagcaagtcttaatgtggcgtccgtcaaatgttcgatgaagtgctcggactagaactcgttatcgatgtatgaaatatgattgtgaacatgcttgtaaagtaattgtgtcatgtgttgaagttcagattttagatacaaa

SEQ ID NO: 133855 - DNA, 1098 bp, Zea Mays
aggacttcgttcctatctcgtgctcagcgttatcttctccgtggcgctcatctccctgatattttcactgcgccgcggcttccagcgctcagcctccagctcccacgcgcactccacctcgtccatggccgccgatcgagtccctccccatctcctacaaccggccgccctgctcgttctccctagctgcgatgtggagctcgccctggacgatcgtccttgcccctcctctctgatctgcgtgcaggggtttccctcccatggcgcctggtcttcttcccttgactccatgccgagcgccccagtcgagctcgtcctggctccagcttcttccttggacggcggagccctcccattcctgcagcaggccagcgtccctctctccatcatcttctctgcttggttcctggcgagctccccctgctcttctgctcgccctggccctgtgccatttttccattcctgcggcaagcaccagtccctccccacgccaacatccctttcctacggacgctgcccctctctggtttctggtggccggccacctctgctgctcccatggtgatctataaatccctctgttgttttactagtctggttaataccctgctgatgtgaagttttatgtgtgttgatgtgtacgatatggagtaaaatctctggagaattaggtggaggagaaggttaagttcaacgctccttaggtgttctatgaagtgcttgaactgaagttcgttgtcgttctgttcaccgcggtgagacatgttaattatgcgctattcattttcgttgatgtgtatgcctggatgtttaattaaacgtatttgtatgattggaggagaaatctctagatatgagtaggggagcaagtcttaatgtggcgtccgtcaaatgttcgatgaagtgctcggactagaactcgttatcgatgtatgaaatatgattgtgaacatgcttgtaaagtaattgtgtcatgtgttgaagttcagattttagatacaaattgtgtgaataatgttggatgaatgtataggcgtagtgtcaatttagtggttcttcattgcgatgtaaactttaggtttgaaatacaagttcata

SEQ ID NO: 133856 - DNA, 1453 bp, Zea Mays
gtaattatagaagaattgtagtacttttcttaaactttccaacgaaatttggatcaccctttttggtgatctataaattaagttacagctgtttgagttaggatctctgaatctgtcccaatttggacagcggagcctttctcatattttctgaccttgatatatattgaattaacctaggatgtttataaatgaattgtagacaattctattagatttctaaaaagtctaggatcacctgatttggatttctaaaactccagttatggatttttgaagtgaagagccgaattctgtctaaatctggacagaaataaagtttagcactgtttgaccttttaaactgtcggatcatgttgtgatgataatataagagttatagaggactttctaagctttccagaaagtcctagtttatcatttttggatgaatattgtgtgagttatgaactaaacaagtagtttctgttctgctgtccaaattcagcaagtatgaaatgattacttggatttcttttgtgaggatacctatatttggttagttcttgtcttgattaatgaagtcttgtagtggcaaatggttgtttattttctttcttaatgcttgctttagactttagcatttttgagaaggaagtaaatgccttggtgaatgtatttgagttagtgactatttaggccttgtatgtgcataatgaaatagtaatgcaagtagtaaaatttagcacttctctcatccatccgtggtgttaccctttattgcttagtcttacaaatgtctatgatcttgataatgattagttgcttgatcgaatggtgtaataatttgtttggttgatgtgttatgcctaataggttagattggtagttctaaggactagttgaaatacttctatttataaacctaagttaagtatccgaaattgataagtctacgagtagtaacctatcgatgttatgctttagcttaaggcttgtgtttagttacgttgcctaatgtttgaattaggtccgattaactcgaggatcatgattgtgtagattttctctcatgtttgattttgtatattggtgaggtcttgcctttaatattgagttttcttccttgtgacattgtttagccttattattccttcctatgttcatacatgtgcattatgcatatcattcaggttcgttaattgatcacgtgatgcggacgacaagagccgagttgatcccaaaatgatgctggtgaacgaacctgaagcttggatgatctggtcaagtaccaggacgagagatgctccccaagcggacatcatctaacaacactgacttagtgttatctcagacaagccccggtgtatttgccacctccttctgttttaaaaacttttatcacttacctgctgtattaggtgataggagttgtgtgaataaacaattgatgcattatcattccttggaattt

SEQ ID NO: 133857 - DNA, 251 bp, Zea Mays
cagattccagaggtgggaaagcttgtaagaataagaaaaggaataaaataaggaaagatcaagctaagaatcccacaaaagcatactccggacctgtaaataaggagggagcttcctgtgtgcagtggttccgtgcaaaacagatagtggtaacatttctaggcatccttgccaaagctcaaatttgtaagatgatgctgatgaccccttggacaatgctaaccttgatgatggagctgatcctgcagttc

SEQ ID NO: 133858 - DNA, 312 bp, Zea Mays
atgggaggggctatccatggcaacaagagagggggctggcgtccacaccatgggaaggagcagggagggcgctggacagagggcaggggcgagctccagggagtggcgtcggccaccaggaaacagaagcaggggtgcgcgctgggatggatgctgagcagatcttggaagccatggaaggagaggccgtcggccatggggagggatgagggagggacggccatgggggaggagcagaagatgaccggcaagctggagcacctcgtgcgcagagacagggaaaaggggcagcgcgccaggctgaggaattga

SEQ ID NO: 133859 - DNA, 1205 bp, Zea Mays
ctttacttttatggagaagatggggttgagagtaacgtaatagaagccagaaaaaactcaccgggaagaaggaaccagaagctaaccggcacgtcgtgaagctaaccgggattccgggaagcagagacgtccgcccgtcgcccgtcgtccgtcgtcatggccgccgtggaggtgtgcgtgaaggccgccacggggaagcccgacacgctcggcgactgcccgttctcgcagagggtgctgctcacgctggaggagaagaaggtcccctacgaggtgaagctcgtcgacctcgacaacaagcccgaatggtttctgaagatcagcccagagggtaaggtgcctgtgttcaacggtggtgatggcgaatgcattgctgattctgatgtaatcacccaaaccattgaggagaagttcccaactccatctctggtcactcctgtagaatatgcatcagtgggatcaaagattttcccagccttcatcacattcttgaagagcaaggatgctagtgatggttccgagaaggcgcttctggatgagctgcaggcactggatgagcatctcaaagctcatggcccctacatcaacggggagaacgtatcagcagctgatcttagcctggggccaaagctcttccacctccaggtcgcactggagcatttcaaaggctggaagatcccagaaaacctaaccaacgtccacgcctacaccaaggctcttttcagccgtgaatcttttgtcaagactaagccatccgaggagcacgtgattgcgggatgggcgcccaaggtgaacgcgtaagcacatcgtgatttggtgctaactggtggactccatccatttatctgatcagtcgttgtcagtggtgtgtgtaggtgtcacatctgtagcctagacacatgattcagttggaataaatgcagtgtcgtgtgatcgtgtctcgagtactcagttctggctgttgcaattgtgcgtgtctgttgccggtttcgttcgagaccatgggcatctcttgatctgctatgagagcatgcatatagtgtaacgtgggctccaaataatggaactgcttttatgcttgcggtgagccttgctttcatgattttctgttctctggtgaattggtggtagcctgagcatcaggttatcttctcttatggtcatatttctgacctggattttttcaagcgcatgttaatcgaaat

SEQ ID NO: 133860 - DNA, 88 bp, Zea Mays
tttcgctccaattgttttggggtcagatattgctctgctgtctttacttcgtttttctgaggttcagtttggtagactggtattggag

SEQ ID NO: 133861 - DNA, 1675 bp, Zea Mays
gcagcagctgcggcctgcggggtagatcagaggagaagataagcccacggccgcagttaacccctatcctctcaccagctacagctacaaatagccgccctgagccctccgccgcatcacaaacacctccgatccgtccccgatcatcgcaccacctgtagcccacctcgctctcgagtctcgacccagcgacgagatggccgcggtggatctgaccccaaggacgcccaagaaggcctacggcggcgacggcggcgcctactacgagtggagccccgccgacctgcccatgctcgccgtcgcctccatcggcgccgccaagctctcgctcgccgccggcggcctctccctccccagctactccgactccgccaaggtcgcctacgtcctacaaggcgtcggtacctgcggcctcgtcctccccgaggcgacgaaggagaaggtggtggcggtgaaggagggcgacgcgctggcgctgcccttcggcgcggtgacgtggtggcacaacggccccgccgcgcaggccgacctcacggtgctcttcctcggcgacacctccaagggccacaagcgggggcagttcaccaacttccagctcacggggtccgcgggcatcttcacgggcctgtccaccgagttcgtgtcgcgcgcgtgggatctgccggagcccgacgccgcgaggctggtgtcgagccagccggcctcgggcatcgtcaagctgcccgcctccgccgccgcgctcccggcgccctcgccgcaggaccgcgccggggtggcgctcaactgcctggaggcgccgctggacgtggacatccccggcgggggccgcgtcgtggtgctcaacacggccaacctgccgctggtgcgcgaggtcgggctcggcgccgacctggtccgcatcgacgcccactccatgtgctccccgggcttctcgtgcgactcggcgtaccaggtcacgtacatcgtgcgcggcagcggccgggtgcaggtggtcgggcccgacgggaggcgcgtgctggagacccgcatcgagggcgggtccctcttcatcgtgccccgcttccatgtcgtgtccaagatcgccgacgcgtccgggatggagtggttctccatcatcaccaccccgaacccggtgttcagccacctggcggggaagacgtcggtgtggaaggccatctcgccggaggtgctgcaggcgtccttcaacaccactccggagatggagaagctgttccgctccaagaggctcgactcggagatctttttcgcgcctcccagctccaactgaagcaccagctctccaagacgggggagaggagatcgttctcgattgtcgtcaaggtcatggttattaataattaagttagtgtcgtcgtcttaagttagcgtcgcgtcgtcgtcttaagttagcgtcgtcgaagtcagggtagagcgagaggtagaggtcgtctgtcatccgccattgaactggaactgctttttcaagatgaatactacccctctttcttaatcatcgttattactgctgcgaagttgtgtctgggatgttcgattgtttggccctttaggcgcatgatgattaaatcttgatcttggtgctaactgtgtgtcctcttgttttagaccatctctagcaggtcgtataaacggtcgtataaaatactattttgtattt

SEQ ID NO: 133862 - DNA, 1833 bp, Zea Mays
aagataagcccacggccgcagttaacccctatcctctcaccagctacagctacaaatagccgccctgagccctccgccgcatcacaaacacctccgatccgtccccgatcatcgcaccacctgtagcccacctcgctctcgagtctcgacccagcgacgagatggccgcggtggatctgaccccaaggacgcccaagaaggcctacggcggcgacggcggcgcctactacgagtggagccccgccgacctgcccatgctcgccgtcgcctccatcggcgccgccaagctctcgctcgccgccggcggcctctccctccccagctactccgactccgccaaggtcgcctacgtcctacaaggtacacgccattcgttccggtttgcatggtctgatccgttcaactttgcatgatgatccgatctggtctgcatactgctgaaccgatctgctgatccgatctggtttgcatggctactgcatgcggtgttcctccctccctatttctgatcgatgcgtgcttacatcgttatccgggcgacaacgaacgacaggcgtcggtacctgcggcctcgtcctccccgaggcgacgaaggagaaggtggtggcggtgaaggagggcgacgcgctggcgctgcccttcggcgcggtgacgtggtggcacaacggccccgccgcgcaggccgacctcacggtgctcttcctcggcgacacctccaagggccacaagcgggggcagttcaccaacttccagctcacggggtccgcgggcatcttcacgggcctgtccaccgagttcgtgtcgcgcgcgtgggatctgccggagcccgacgccgcgaggctggtgtcgagccagccggcctcgggcatcgtcaagctgcccgcctccgccgccgcgctcccggcgccctcgccgcaggaccgcgccggggtggcgctcaactgcctggaggcgccgctggacgtggacatccccggcgggggccgcgtcgtggtgctcaacacggccaacctgccgctggtgcgcgaggtcgggctcggcgccgacctggtccgcatcgacgcccactccatgtgctccccgggcttctcgtgcgactcggcgtaccaggtcacgtacatcgtgcgcggcagcggccgggtgcaggtggtcgggcccgacgggaggcgcgtgctggagacccgcatcgagggcgggtccctcttcatcgtgccccgcttccatgtcgtgtccaagatcgccgacgcgtccgggatggagtggttctccatcatcaccaccccgaacccggtgttcagccacctggcggggaagacgtcggtgtggaaggccatctcgccggaggtgctgcaggcgtccttcaacaccactccggagatggagaagctgttccgctccaagaggctcgactcggagatctttttcgcgcctcccagctccaactgaagcaccagctctccaagacgggggagaggagatcgttctcgattgtcgtcaaggtcatggttattaataattaagttagtgtcgtcgtcttaagttagcgtcgcgtcgtcgtcttaagttagcgtcgtcgaagtcagggtagagcgagaggtagaggtcgtctgtcatccgccattgaactggaactgctttttcaagatgaatactacccctctttcttaatcatcgttattactgctgcgaagttgtgtctgggatgttcgattgtttggccctttaggcgcatgatgattaaatcttgatcttggtgctaactgtgtgtcctcttgttttagaccatctctagcaggtcgtataaacggtcgtataaaatactattttgtattt

SEQ ID NO: 133863 - DNA, 1547 bp, Zea Mays
acccctatcctctcaccagctacagctacaaatagccgccctgagccctccgccgcatcacaaacacctccgatccgtccccgatcatcgcaccacctgtagcccacctcgctctcgagtctcgacccagcgacgagatggccgcggtggatctgaccccaaggacgcccaagaaggcctacggcggcgacggcggcgcctactacgagtggagccccgccgacctgcccatgctcgccgtcgcctccatcggcgccgccaagctctcgctcgccgccggcggcctctccctccccagctactccgactccgccaaggtcgcctacgtcctacaaggcgtcggtacctgcggcctcgtcctccccgaggcgacgaaggagaaggtggtggcggtgaaggagggcgacgcgctggcgctgcccttcggcgcggtgacgtggtggcacaacggccccgccgcgcaggccgacctcacggtgctcttcctcggcgacacctccaagggccacaagcgggggcagttcaccaacttccagctcacggggtccgcgggcatcttcacgggcctgtccaccgagttcgtgtcgcgcgcgtgggatctgccggagcccgacgccgcgaggctggtgtcgagccagccggcctcgggcatcgtcaagctgcccgcctccgccgccgcgctcccggcgccctcgccgcaggaccgcgccggggtggcgctcaactgcctggaggcgccgctggacgtggacatccccggcgggggccgcgtcgtggtgctcaacacggccaacctgccgctggtgcgcgaggtcgggctcggcgccgacctggtccgcatcgacgcccactccatgtgctccccgggcttctcgtgcgactcggcgtaccaggtcacgtacatcgtgcgcggcagcggccgggtgcaggtggtcgggcccgacgggaggcgcgtgctggagacccgcatcgagggcgggtccctcttcatcgtgccccgcttccatgtcgtgtccaagatcgccgacgcgtccgggatggagtggttctccatcatcaccaccccgaagtaaggcgtctctgctcctttttgcctgactgtgctttgtttgcctgctcgcgaatagaaatggattgactgtgctttgtttggaaaaaaaaatgcagcccggtgttcagccacctggcggggaagacgtcggtgtggaaggccatctcgccggaggtgctgcaggcgtccttcaacaccactccggagatggagaagctgttccgctccaagaggctcgactcggagatctttttcgcgcctcccagctccaactgaagcaccagctctccaagacgggggagaggagatcgttctcgattgtcgtcaaggtcatggttattaataattaagttagtgtcgtcgtcttaagttagcgtcgcgtcgtcgtcttaagttagcgtcgtcgaagtcagggtagagcgagaggtagaggtcgtctgtcatccgccattgaactggaactgctttttcaagatgaatactacccctctttctt

SEQ ID NO: 133864 - DNA, 2104 bp, Zea Mays
ctctctcgtccaaatcaccgaagacaaccagcacattaaaattcttcccaaccttcccaaaatgccccccaaccgccccgcttacctgctctccgccctcctcctcgccgccgccgccgcggccgtcggcgcgcgtcgccacgcgtcgccggccgcgaacgctaccttcgccggagagcccgtctacctctggccgctgcccaagagcgtctcgtccggatcccggacgctgacggtggacccggacctcgcgctcgacccgcagggcctcggcggccgctccccggccgtggccgaggcgttccagcggtaccggggcctcgtgttcgcgccgtgggcgcacgccgcgcgcgcgggccgcgcgcggtacgacgtcaccaggctcaccgtcgtcgttgcctccgccaacgacacgctggcgctgggggtggacgagagctacgccatctacgtggcggcggccgggggcgtcgattccatcgtcggaggagcaatcattgaggcaaacacaatatatggagctattcgaggactggagacattcagtcaactttgtgttttcaactatgacaccaaaaatgttgaagtgcacaatgctccatggcatatccaagatgagccccgctttgcttttcgtgggctgctcctagacacctcaaggcattatcttccagttgatgttattaagcaagtgatcgactctatgtcatttgctaagctgaacgttcttcattggcatatcatcgatgagcaatcctttccattggaggtgccaacatatccaaacctttggaaaggttcatactccaaatgggagcgctacaccgtggaagatgcacatgatattgtcaactacgctaagaaaagaggtatcaatgtgatggcagaaattgacgtgcctggtcatgcagaatcatggggaaatggatacccaaagctctggccttctcccatttgtacagagccattagatgtctctagtgatttcacatttgaagtaatttttggaattttgtctgatatgaggaaaatctttccattcgggctgtttcacttgggtggtgatgaagtatacacagggtgctggaacacaacgcctcacgtgcggcagtggatggacgagcgcaaaatgaccacgaaggacgcttacaaatacttcgttctgaaggcccaggagctggcgatcaagctgaactggactcccgtgaactgggaagaaaccttcaactcgttcgaagaaaacctcaatccactgacggttgtgcacaactggctggggcccggagtctgcccaaaggttgtggccaagggtttcagatgcataatgagcaaccaaggcgtctggtacctggaccacctcgacgtcccctgggaggacgtctacagcggcgagccgctcgccgggatcagcgacagagagcagcagaagctggtgctcggcggggaggtctgcatgtggggcgagacggccgacacgtccgacgtcctgcagacaatctggccccgagccgccgcagcggcagagcgtctgtggagccagctggaggccatatccgcccaggacgtcgagacgaccgtgctgtcacggctacaccgcttcaggtgcctgctgaaccaccgtggggtcgccgcggctcctgtcacgaactactacgctcggaggccgccggtcggcccgggttcgtgcttcgttcagtaaagcaagcagccaagcaggaaggtaccctcctacccacgccacgaggtgctctgccttcgtgtaccatatctgtgtgtaatccacggaaacaatctgtataataatctgtctccgttttcgatttcccaaagtcgaaataaaaccgcaccgttcaaacctccttcgagctcgggcagtactgcatttgttttctggcggcggggtgcgtcgctgtcggggaccggacgccatcttttcctcagtttggccttgacctgaaacccgctggtccaagctgcgcattaatggcgcgtgtaatttgcgaccacctgttgtgcttgggtggtttggagtgacgacaatgggtttggcaccttgttctatacttccaatatagagagagaggtcactgtccttcccatgcca

SEQ ID NO: 133865 - DNA, 868 bp, Zea Mays
ccccttcttcatttctttccttcctccatcccctaccccgttccccgtcgttcgagaggaggggcgagcgaccaactggtagcgatctggtgccccgcgcccgcgccgatccgccgcgccccggccggatttgccgccgtgggcggatcaggtccggatccccctccccctcaacaccaacacacgcgtttctttgaggatttctttttgcccgcggggcacggaaatagcctgagcccgtcgtgccgtcttccccgcagcgtccgtcgccgcctggggaggctccagtacgtggcctgtccatggcgacccccgatgacggcccggccccggccgggcccggggtccgcaagttctggcgttccgcgtcgtggtccgagccgcgggagccgctgccggacgccgcggcggggcccggggcagcgggcgggcggtcccggcgcgtgccgccgccgccgccgctcaccccgcggtcgatgagctccaaggcgcggtcctgcctcccgccgctgcagccgctcgccatcacgcgccgaagcttggacgagtggcccagggccggctccgacgacgtcggcgagtggcccaaccccaccacgcccggcgcgtccaaggcgggcggcgggccctcctccgccaggccaggggaggggctccggctcgacctctcctcgctccgctcgcagggacgcaaggaccagatcgccttctttgacaaggagtgctccaaggtcgccgaccatgtatacctcggcggcgacgccgtcgctaagaaccgcgacatcctcaggaagaacggcatcacccacgttctcaactgcgtgggcttcgtctgcccggagtacttcaagtctgaccttgtctaccg

SEQ ID NO: 133866 - DNA, 700 bp, Zea Mays
cgagaggaggggcgagcgaccaactggtagcgatctggtgccccgcgcccgcgccgatccgccgcgccccggccggatttgccgccgtgggcggatcagcgtccgtcgccgcctggggaggctccagtacgtggcctgtccatggcgacccccgatgacggcccggccccggccgggcccggggtccgcaagttctggcgttccgcgtcgtggtccgagccgcgggagccgctgccggacgccgcggcggggcccggggcagcgggcgggcggtcccggcgcgtgccgccgccgccgccgctcaccccgcggtcgatgagctccaaggcgcggtcctgcctcccgccgctgcagccgctcgccatcacgcgccgaagcttggacgagtggcccagggccggctccgacgacgtcggcgagtggcccaaccccaccacgcccggcgcgtccaaggcgggcggcgggccctcctccgccaggccaggggaggggctccggctcgacctctcctcgctccgctcgcagggacgcaaggaccagatcgccttctttgacaaggagtgctccaaggtcgccgaccatgtatacctcggcggcgacgccgtcgctaagaaccgcgacatcctcaggaagaacggcatcacccacgttctcaactgcgtgggcttcgtctgcccggagtacttcaagtctgaccttg

SEQ ID NO: 133867 - DNA, 608 bp, Zea Mays
gcgccgcactcccagtatgcccctctgcatttggtgcccaaaatgctcaatgacccatcccctgccgcactggactctagaggcgccttcattgtacacgttctgttgtccatctatgtctgggttgggatgaagtgtgatccggtaatggagaaggatgcaaaagctgctgcgtttcaggtagtgaggtacgagaaggtgcaggggcacatcaaggttgtgagagaaggtttggagccacaggagttttgggatgcattttcaagtacgctgcctaattcagatactaatacaaagattagcaaggaccagatcgattcagcatccaagagtaacccaggaagccggataattgagtcttatgacgctgattttgagcttgtctataaagcaatcaccgggggagtggttccagcgttctcaacttctggggctggggacgagacccaccttccagccagagagagtagctggagtttactgaggcacaagttcatctccaggtcgctagctcgtgtttattcagattctgctctaatcagggattttgatccacgggtagaccgtgtacagcacctggctgctgaggcatcgacctcacctccttt

SEQ ID NO: 133868 - DNA, 447 bp, Zea Mays
atggtcgacatcccagagatttctaatgtgctcgccgcaaggttcaacctagaggttggtgcactcaatctccgtcgagcttcgtcggacgcctacattctcatcctccccaacgagagtatggcgctgcgagtctacaacgggggaaggtcgttcatcacttcaactttgcgcttacaccttcggcggtggacgcgccaatcctgtgtggctcgtggagcttcgcttccaatcctggtcgacattgagcaactgggagtcccagagcacgtctggagcaaagaattagtggagctactccttcatgactcctgcatgatccagaggctgcattcagacacaaaatcctctcctgatttctcttccttcaagcttagtgtctggtgtgcccaccttgagcttattcaccaggctgtgaatctacacattgaagaattgatgctctag

SEQ ID NO: 133869 - DNA, 104 bp, Zea Mays
ttaaaaatctaatgtgggcacgggtgctactactacttcatccttcccacgtcaaggacccttcatcaagtcaagatggtctcacattccaagaggaccttcag

SEQ ID NO: 133870 - DNA, 1175 bp, Zea Mays
cggtctagcgaccgatcgatcgatcgatcgaccatgtcgtccttgctatgtattagccgcaggaacaacaagaaggacagcgatggcgatggagagtacggtggcgagcagatcatcatcagcacgggcggcgcggccatgaggaagggcccgtggacggacgaggaggacgagcagctggtacggttcgtgcgcctgttcggcgaacgccgatgggatttcttagcaaaggtgtcaggtctgaggcgcaccggcaagagctgccgcctccggtgggtgaactacctccacccggggctccggcgcggccgcatcacggccgatgaggagcgccgcatcgtggagctccacgcgcagtggggcagccggtggtcgcgcatcgccaggagcctgcccgggcgcaccgacaacgagatcaagaacttctggaggacgcggaccaggaagaaggcgctcgaggagaggagggctgccgcagcagcaacgtcgacggcggcggagtcggcgtcctcggtgatgacggtgtcgtcgtcgtccgagtgccgccgcccgcccgtatcgtcgtcgtcgtcgtcgtcttcgctacggcgggacgaagcgcggcgcagcggcgacgagaccgaggaggcgtccacgcccaccgcggcgccggcgaccaagcacgatgaggaaccccagccgcagccgcaggagtgctacgacttccccatggaccagctgtggaacgagatcgcggcagccgatgcggcggcgatgagctaccttgtcgtggacgcctgctggggcggagctgctgttggtggtcactgttattactacggcgccgccgcagcctcagccgcctcgccgccgccgccggcctcgccgccgtgggagtactgcggctccgatttttcgctgtggaggatcgacgaccaagagtactacaagaagatgctcgactcctcctcctgatcccggcccgcgactcatatcgtttggcgaggacacacgtacatacgcgctctgtgaatttgctagctcatatatattatccaggcgaggcgaggaacgagctgagatcatggtggtgagatgagatgagatgagatgagagagtagtgtgtattaatggtggttcagatcgagtagtgtgataaattaacagaatatatataataatttacgcttctctc

SEQ ID NO: 133871 - DNA, 2244 bp, Zea Mays
attattctggttcaggttgcacataacttgagttgcaactcaacaagtcctgtcagaacttaattattaggagtaagcttcgggtggattatataggagtattattacaatataaccaagcgcataaaccttggatgttcggccgggtttcgcccaggatcggaattattttatctgaaaaaagtagacaggttgcacatgcatcaagatccatcaaggacaaacaagcatatatagtttctcagaaactactgaagaatgtatttgtcgaactgaatcatatacaatctcatcatcacttatatatatatatagtacttagtacatgaataaatacatagatgcagcaggacacactacaatcgattgtgttgtgtctcgcctcatcatctgattcttcactaaacacacgatcgacgacgatgattatactacatgtctatatatcctagcacatattggtacaatatatatgatcgagagcagtatcatatcatacatatatatatatagatatgttacagtattatacaaagagatgcaacgaaagccgaaccgaagctttggattctcatagctgctgtatgctagactaatcagcacaaaaaaaagaaagaaataagctaatgatagatatgcatatgcgtgtgatggctggataatcgaatcaggaggaggagtcgagcatcttctcgtagtactcgtcgtcgtcgatcctccagagcgagtaatcagagcagtactcccacgccggcgacgaaggcggatcggcggcgggatggccggggccggaccctgtccagccgccgtcgatcaacatgtagatggccgcctccgccgccgcgatgtcgttccagaagtggtccgaggcgtagcactcctggtgctgctgctggtggtcgtcgtcttggtgttgacgctggcttgccgtggtggtggtggtggtggacgcctcgtcgagctcggcgtcctcgtcttcgccgccgctttgccgcagcgcggactcggtcagagcggacgatgacgtggccgtgccacagccgcggctggtcggactaggagagccagagcagctggacgtggtggtagtcacggacgacgctgaccctgagaacgccgacgccgtcgccgtcttgctgctccggctgtcctgctgctgctgctgctgctgcgccgccgccttctgcttcctggcgcgcgtcctccagaagttcttgatctcgttgtcggtgcggccggggaggctcctggcgatgcgcgaccagcggctgccccactgcgcgtggagctggaggatgagtcgctcctcgtcggcggtgatgcggccgcgccggagccccgggtggaggtagttgacccagcggaggcggcagctcttgccggtgcgcctcagacctgcacgagtacgccgccgacacatgcgcatgcacagagaagaagcagggcacgcacaagagagagagaaaagaaatggttaatcaacacccatcgccatagcccatcctacatcaatccatccccacgcacgcatgcatctacatatgcatgcatgcatgcatgcttggggatcggatgcacccgccaccgcgcaaacctgagacctttgctaagaaatcccaccggcgttcaccaaacaagcggacgaaccataccagctgagcgtcttcctcctctgtccacgggcccttcctcatcgccgccgccggcacctgctgcttatcactgttgccgctgcccctactactactgccactactacggtcaccaccgccctgcagcttcttgctcatcttgctcgctgctgccggtgtcgccatcgacgactgatgatgaggataacgatcgtccatcggtcagccttcgtcctcttcctttaatttttcggcagcgcggccaggaccgcgagttgatggtaggcgtccttcggtctccggccgcctcctccctccgaactgtccccgccgtcgaccgacctgatcgagctgcttggtggtggcggccgggcggaagacgagacgagacgagacgacagagacaaaggccacccaacaaaacaagcttcggcgcacctatcaatcaagaggaagaagaagaaagggactgcagatagatgcctcgatccactacttgcgtacgatatatagattctactgctgggtgctgggtgctggctgcgtgcgtgctagctggaacgctggatcgatgcctccgtcctcagtacacttgcttagttgcttaccagat

SEQ ID NO: 133872 - DNA, 2247 bp, Zea Mays
atggtgctcgcgcgcaaaaagttgaagctgaagctccacacgctcctcccagccggcaaagccgcggaggaggagcatggagaggatgtggaggccgtaaaggagaggctcgcatcctccaagcggctgcgccccaagcgggagcggaggcccaagaagaagctgtcgctccccgaggtggtgcggcagacggaggaggagataagggaggaggtggagcggaggagggaggagaggaggaaggagaagaaggagaaaaggaggatcaggaggttgatggaggccgaggccgcggagccggaaacgcagcaggtggagggggagataggggaggccgattctgctgccgggtctgagtctgaccagccggtcgaggcaaaggatagcgaccaaaatataaacaagttggaagtgaccaaccccgctgttgggtccaacaataacattgttccagacaataggcagcagaatcacaaaatgcagttggccaaaactgttgtcgtgtctgacaatcatgtagtcgcagagcatagggagcaaagcataaagaaggtgtatgttggtggcatcccatactattcatctgaggatgacataagaagtttctttgaagcatgtggtagtatcacaatgattgactgcatgaattttcccgaaagcgggaaattcaggggtattgcgattctaactttcaagactgatgctgccgcacagagggcattagctatggatggtgcagatatgggaggattttatttgaaaattcagccttacaaacataaccgtgagaaggaagattttgcaccaaagttgatagaggggtataataggatatatgttggaaatctgccatgggatataacagatgatgatctaaaaaagttcttctccgagtgcaaaatttcatccatccggtttgggacagacaaggagacaggtggtttcaaaggctacgcgcatgttgatttttctgacagcgcgtctcttgctgctgctttgaagctcgaccagaaggtgatcaaggaacgcccagtcagaatcagatgtgctgttccaaaaaaggataaccaaaaagtcaatgacaatgggaactcagatcatctgaaaagtaaaactaggacatgctatgaatgcggaacccctgggcacttttcttcttcttgccctaataagaaggattctgaagcaaggaagtgctatgaatgtggcaccccggggcacctctcttctgcttgcccaaataagaaggattctgaagtaagaaagtgctatgaatgtggcaccgctgggcacctgtcctctgcttgcccaaataagaaggattctgatgaaaaggaggataattctaactccaccatagcagcctcaaagaagaggcgaacatgttatgaatgtggcatccctgggcacctctcttctaattgcccaaacaagaaggatcctgaatttatttctgatgaaaagaacactaatgttgattcagctcctgcatcgtcgaagaagaggcggacatgttatgaatgtggaactcctggccatctctcatcggcttgcccaaacaaaaggacatcagaatctgttctgaacaacagagagcctgctgacgcaaaacctgcaaccaccatcaagcccgaggaaacaaaagctggcgatgaatcgaattcagtagcttcaaagaagaggcgaaaatgctacgagtgtggcatctccggtcatctctcctcggcttgccccagcaaaaaggccgctgagcctgtctgcaacgaagagaagcctggcaatcactcaaacgctgtactaccagtcgtttctgacgaaaagaaggcaagtgaggacgcaaaatctgcacctgcaaagaaaaagaagaggcggacatgctacgagtgcggcatcgctggccatctctcgtcggagtgcccgaacaaggcagctgctgtctgctgagggttacgttgcctgagcaaggcagacgctgaggtcaaacgattgcttctttcgttctccagaattttagtctcgtgttgtactgtatgttccttgatatgagcagtgaagttatctctatgtccccgaagaagaaaaatcgaagttttgtagcagggaatgtaggcatggtagacaaggtttattaatttttggcatgtcaaattttgattccatgataccacaggattcattatccgtcgggagaagagtcattattgtcatcatcatctatatgaattcttttgtttgaaaaaaaaacaa

SEQ ID NO: 133873 - DNA, 75 bp, Zea Mays
ccccttcttttgtggccatgccacacatgtttccgtcttcagaaaatcatgtcagtacgtaatttcttgccgaac

SEQ ID NO: 133874 - DNA, 1646 bp, Zea Mays
ctgctccctcctctcggcgcggcgctccctgctcctcctcccggtgctccctgctcggctgctccctcctctagatgctccctggctccctgctcggtgctccctcctcccgacgctcctttcggcgtcctgcaacagcgacgacgcagggcgtgtggggcagcagcaggagcatgcattgatgacggcgcatccgagtgtccagatgcctgtgtctctaagcattacagttctcgttgtttaatctagtttctgctaatgggcgatacacgtttccgagtgtccagatgcctgtgtctctaagcattacatacgacgtcgatctattctacatccagcttgccctgtcaaggacctacgattccctcaccgacgaattcagctacgcgctgcttctaatcacgatcgcagccctggttgctgccatcatcgtcacatggatttggtccgagaaggagttgggggacaagtggaggtgaacgaggtctcaaagttgtgacgtggaagaaaatttggggccccagtcagctagctctcttgttctagggtttttgttttacggtttttgtgctgtcgttttaggttttttttttgctaaatatagttttgtgtttttgcgggctcgggccggcacgggctactaaatgggccgtgctattcgggccggcccggcacggtcgggcctataccgtgccgtgctcgggaagaggtatgggcccgtcgggcggcacggcacggcccggttaagtggtcgggcctaaccgtgccgggcttaaacgggccgggccgagtcgggctcgggttgggccgggccgggccgcccgtttggacatctatatttagcaccataccaaacacatttttttctaggttttcgcgtttgcatgctgcaacaagcagaagaagaggactaccgtctacgtataaactagaccgagttccttttctgcttacatcaagcagcaggcaataattggtgtgctccgtgcaatcaagcgatgcgacgtcggcatacacaaccaatcatcgccggcaagtccgagtttgattttggcctcggattccactcactactcggatgggttgtttatgtggccgttcagatggtgaagtatcatcaagcaggtgcagatcggaagaggcatgcttctttctgatgcttgctacacggcagcagcagcagcagcagtcctctcctgctaagcatatatgcatgtttatactagttagattagatattgtgtgtacagtacagactgctgatacaaccatccaattactcactaattctattctggtttaagcagtggtgcactagtacgagcagcagcagcagcgtcgtgaggtcacaactcacaactcatgacgaaggggatcaagcgaccagacacaagtcactgtttattaatgcgtcatttggagcagcgatgagacgcttagtgatcttgtcattgaacaggctggatatataaatggacacacatgtgagtgtgtgtgcctttgtaagcatgtcgatgtaatcttttttgtgtttttctcttggcctgttggcctagttgtctttaaaaaaaaactgagctgacagaggatgtctgcagggccattgcaataagtgataattcagtgggagacggtgtgttggcagc

SEQ ID NO: 133875 - DNA, 1054 bp, Zea Mays
catcagctgattcacaagtgcaagcatttgatgaagaggtttgcagttcaggagagcgagatggcgcgcatgctggtgctcatgtcgcgctcgcacggtcaggaccaggcgctgccactgtcggcctgcctcgccggcggccagcgcggcgaggaccggcaggcgccggagcgggtgttcgtgtgcaagacgtgcaaccgcgtgttcccgtcgttccaggcgctgggcggccaccgcgccagccacaagaagccgcggctggacggggacggcgccggcgacccctcgctcgccaagcccaagctgcacggctgctccgtctgcggcctcgagttcgccatcggccaggcccttggcggccacatgaggcgccaccgcgccatgacgggcggcgtgccggcggtgccgcccgcgacgacgaggatcgtcgtcgacgagaagccggacggcgacgtcgtcggcatcatccgccacgaccacggcggcgtcaagcagcccggcggcgggctgtggctcgacctcaactacccgccgtgcgacgacggccgcgacgcggtggaggcggagtgtggccgcaatgccgccgccgccacggggatcacgttccatcagttcctcgacactgccaccatggccgtcgactgccttggctactagatagatagatatataccaccaagctccatgattcttctcccctgccgcgtactactggtgcaccggtctcttcttcttcttctttcttttcttttcttttctggaatcttcttcctcatttgcttctgggcggagggggagaaatccacattttgtagcagtagtagaatgaaggtgcctaatgcatgcatgggcttggctgatgtgcatgaaggttttgggatgtctttgagctgctcggtggataatctggaggattgattccaccaaagctagcttattttgccttgggtttcatgttattatggataaaaaccctttggtcaaaatggctttgatcgttgtaattatttaatctgagcaagataaacattatatatacagagcttgtggttgt

SEQ ID NO: 133876 - DNA, 216 bp, Zea Mays
atccctccttggctccttcccgactcggcgcctcgttccgacaacgacgaagcagctgggggacttgttgagcagcgagcggtacagatcccgatcctgaatcctccgagcgagttcttccgtcctcctcgcagtcagccatggcccgctcctcctcgcagtcgcagtcctccgtcggtggcggcggcggcggcggcggcgcgcgaccggccaccg

SEQ ID NO: 133877 - DNA, 527 bp, Zea Mays
ccggggccggcgggagcaacatgctccgcttctacaccgacgaggcgccgggcctccgcctctcgcccaccatggtgctcgtcatgtcgctctgcttcatcggcttcgtcaccgccctccacatcttcggcaagctctaccgctcccgcacggccgcggcctccgcgtgatccgatccggtccggtcccaccgctcttgtggatccacacaacggatcagactaccagatcagacggtgacttttttttgggtgatgaattatgtatggggagaagcccagcttgttatgttgcctagcttttgcttgatccttactttctcaacttagatctcagctagatctgcagatggaaaccgtacatgtcatcttaatgggggccctttctgttattttcttcccttcccttaccctaagaattattactgtttgatgcaaggaataattatgtctagttttttcttgtaattctgcttgtgagatcaccagttacacgtgcatcttcctaacttagatgtgctccattaa

SEQ ID NO: 133878 - DNA, 2090 bp, Zea Mays
atcccatgcatgtccgccacagagcgcgcgcctcctccctccctgccggcatagctagcagcacgtacggaccgaggccatgcatggacgacagtcgtcgtggcccaaggccaagacggcggtgaagagatggctgaacctcaagtcccattccgactgcatcgatggaagctttgggcttgggctggtggagagctctgctgacgtgtatggcggctccccgtccccgccggcgccgagctcgtcgcggcggcatcccaaggaactcagcatcttcgttgggacatggaacgttggagggcgagcggcgcacggagggctggatctctcgaactggctcgctgacgacggccttggtggtggttcctcctctcctcacatctacgttctcgggttccaggagatcgtgccgctgaacgccgggaacgtgctcggtaccgaggacaagggcccggcgcgcaagtggctggacctcatccggcgagcgctgaaccaccctccagcagcgtcgccgtcgagaagcagcagcagatggcgcaggtctccgtggcgtgacacgcaccggctccggaaaggcggccgggtgagtttctcggacctgctggcggcggaggaggacggcagccgcaggccgagcacggcgtcgtcggagccggacgacggtagcgaagcgtccacgccgtcaccgggaccgtcgtctagcagcgaggaggagccggcatgcgcggcggccagcaggcggccacgcggaggacgacaccgcgaccgctaccgcctggcggccagcaagcagatggtgggcatcctgctgtgcgtctgggtccgcgccgacctcctcccacgcgtcactcgcgtcagggcgtcgtgcgtcggcaggggcgtcatgggctacatgggcaacaagggctcagtgtccgtcagcctcacgctgcgtcccggcgttggcggtggccggggcgcgtcgctgtgcttcgtgtgcacgcacctcgcgtccggcgatagggacggcgacggcgccaggcgcaacggcgacgtggcggagatcctcaggcggacgaggttcgcacggcggggcgcgccgggccgcaccgcctgcgggacgagggcggcgccggtgaccatcttggagcacgacaacgtgatatggctgggcgacctcaactaccggctggtggcgccggcgggcagaggaggaggaggaggcacgcggacgtgggagctggtggaacggcacgattgggcggcgctgctggagcgggaccagctgcgggcggagcagaaggctgggcgcgtgttcgccgggtgggaggaaggccgcattgggttcccgcccacgtacaagttcgtggccggctctgacgcctatgccatgacgagcctcgtcgacgacggctccctgtcccgggagaggaagaagcgcacgccggcatggtgcgaccgcatcttgtggcgcggcgagggggtggagcagcggtggtacgcgcgaggcgagtcgtgcttctcggaccaccgccccgtcgctgcgctcttctccgtgcgcctgggcggcggggactacgacggggcagagcgcgcggtgggggctggcagacgagacgacggcgacgacgacattctccttgggaactacgatcgaacgcacaagctttctttctgaggtttgggaacaacaacagctggtggtagcctcaacctcgatcgtgggcctgctacctgcctgtctgcctccaagttccagtggtatctaaagaggatggagatgaacctatggatggagatgatggtctactaggaggagaagaagagaacaagttgggaagggagaagatgagcttttcgtgcttcgattctggtggtagcaaaaccttggccacaacatggaagcccagcaagccctcgtaccttctttttgggccgacccagatgcaagccagggcaatgctctgaatggaagaaaggaagaggacctagcaactaatgctattgcacatggccagttcagcaaaaagttgggatttttgcttcggattaaagatagttgtttggactgctccagctgcaatttatagagataaaaacattgtagaaac

SEQ ID NO: 133879 - DNA, 1088 bp, Zea Mays
ttccatttctgggaatggtcgagaacatgtctataaactgttacttccaagcatgtaggagccagtcattttccatttctgtttatagttgcctagtcgggaacatgtatgtaaactgttacttccgtgcatgcaggagcctgttatcccaggctgtttcctacgtgcgaaggccatcggccttatgccgatgattgatcagggagaggcagatgacaagatcattgcagtgtgcgctgatgatcccgagtacaggcattacaatgatatcaaggagctcccacctcaccgcttggctgaaatcaggcgcttcttcgaggactgtatcctttttatgattcatcagtatttcgtcctgctaaccaagagtctagtactacataaagtgattgctgttttgatcatgcttaataagttcttttaacttgtctacaaaacacttctttgctaaattccccaaacctgacatgagtcctgaacatgactgcctctgtcatttaaagagaaaaacctgtcaggtgtttttaactctcttaagacggtgtaaatgttagtgcttgcctcctgttagattgaatggtttctttaaccgagacattcagacaagaagaatgagaacaaggaggttgctgtgaatgactttctaccagcgagcgccgcttatgaagccatacagcactctatgtaagttgatttatcgcaactgtgtcatctcaacacgtatcctcgtttcgaccttcaagctaaccgcccagcaatgtgttgttcttccatccacagggacctgtatgctacatacatcgttgagggcctgaggaggtaggattctgatggctaggaaaggtggggaggatgttgacgaaaaactgggagaccatttaccgcatggaacgagtaccgttattattttatttgtgtcgtgtatactgctagtagtgaaccctcaatcaaagaccgaaatcccctggggagtcggagtcggtagtaggtgaagctagtaacaaggttggcgaaatattattttctggcctgactgcctatatatgttgtacgtgattggtatcgtaatattcattcgcttttgtgat

SEQ ID NO: 133880 - DNA, 1711 bp, Zea Mays
agtactactacctgagcaacgcacccacaggctacaggagctactaggtagaccgtgtccccgtagacatgaaacggaagcgtggctagagctagagacgcggaaaagacgagaggaggggcccactgaacccacacagcgcgaggaagcgggaaggacgaccgtgttcccgattcccgttccaccatgccaccgtgacaccgtctctctctctctgtcggtcctccgctccgccgctttaaaaccaaagccgaaccactgctccgcccactccatcccggctccgtcgtcgcgtgccatcctagggtttctttccccgtcggcgcctccccagatttggccgccgccgccgctgacccaggttgtcttgatggcgcccgctgtagaagccgtgaaggagacaggcaccttccagaaggttcctgccttgaacgaaaggatactgtcatccatgtccaggaggtctgttgctgcacacccttggcatgatctggagataggtcctggtgctccaaccatattcaactgcgtcattgagataccaaggggcagcaaggttaaatatgaacttgacaagaaaactggactgatcaaggtggaccgtgtgctgtattcatcagttgtttaccctcacaactatggattcattcctcgcacgctttgtgaagacagtgatcctttggatgtactggttataatgcaggagcctgttatcccaggctgtttcctacgtgcgaaggccatcggccttatgccgatgattgatcagggagaggcagatgacaagatcattgcagtgtgcgctgatgatcccgagtacaggcattacaatgatatcaaggagctcccacctcaccgcttggctgaaatcaggcgcttcttcgaggactacaagaagaatgagaacaaggaggttgctgtgaatgactttctaccagcgagcgccgcttatgaagccatacagcactctatggacctgtatgctacatacatcgttgagggcctgaggaggtaggattctgatggctaggaaaggtggggaggatgttgacgaaaaactgggagaccatttaccgcatggaacgagtaccgttattattttatttgtgtcgtgtatactgctagtagtgaaccctcaatcaaagaccgaaatcccctggggagtcggagtcggtagtaggtgaagctagtaacaaggttggcgaaatattattttctggcctgactgcctatatatgttgtacgtgattggtatcgtaatattcattcgcttttgtgatacataattcgttattggatcttcaattgtgttctgctctcggaacacggtggcgatgtgcctcgtagaaaaatgcaaaggcctcagcgttcttgtttgttactttgctgttatggaaaactgacaggacctgaagtcctgaacgttgtctggtggaatttgtccagcattcccctttcagctggttgcgtatttgaatcctgcacgtaaaaacaaccgcgcacttgtttaactacaattgatctagatttctttaagggctagtttgagagaaaaaaaagaggggctagaatctccttatttaagaagtaaacagaaaaatattaaatttaacagcagctcatggttgtttggatgcccgtcttagagcagcttcaatagttttctaaacaactctctaagtattaaatttaagaagtaaaaagaaaaata

SEQ ID NO: 133881 - DNA, 1632 bp, Zea Mays
aggagctactaggtagaccgtgtccccgtagacatgaaacggaagcgtggctagagctagagacgcggaaaagacgagaggaggggcccactgaacccacacagcgcgaggaagcgggaaggacgaccgtgttcccgattcccgttccaccatgccaccgtgacaccgtctctctctctctgtcggtcctccgctccgccgctttaaaaccaaagccgaaccactgctccgcccactccatcccggctccgtcgtcgcgtgccatcctagggtttctttccccgtcggcgcctccccagatttggccgccgccgccgctgacccaggaacacatatcaactcttcctagtgtaattgctggtggaccatgtcttcggtatggaccgtgttaccacacgtggtcaatgttggactctgtcatgagtgttacaatgttgtcttgatggcgcccgctgtagaagccgtgaaggagacaggcaccttccagaaggttcctgccttgaacgaaaggatactgtcatccatgtccaggaggtctgttgctgcacacccttggcatgatctggagataggtcctggtgctccaaccatattcaactgcgtcattgagataccaaggggcagcaaggttaaatatgaacttgacaagaaaactggactgatcaaggtggaccgtgtgctgtattcatcagttgtttaccctcacaactatggattcattcctcgcacgctttgtgaagacagtgatcctttggatgtactggttataatgcaggagcctgttatcccaggctgtttcctacgtgcgaaggccatcggccttatgccgatgattgatcagggagaggcagatgacaagatcattgcagtgtgcgctgatgatcccgagtacaggcattacaatgatatcaaggagctcccacctcaccgcttggctgaaatcaggcgcttcttcgaggactacaagaagaatgagaacaaggaggttgctgtgaatgactttctaccagcgagcgccgcttatgaagccatacagcactctatggacctgtatgctacatacatcgttgagggcctgaggaggtaggattctgatggctaggaaaggtggggaggatgttgacgaaaaactgggagaccatttaccgcatggaacgagtaccgttattattttatttgtgtcgtgtatactgctagtagtgaaccctcaatcaaagaccgaaatcccctggggagtcggagtcggtagtaggtgaagctagtaacaaggttggcgaaatattattttctggcctgactgcctatatatgttgtacgtgattggtatcgtaatattcattcgcttttgtgatacataattcgttattggatcttcaattgtgttctgctctcggaacacggtggcgatgtgcctcgtagaaaaatgcaaaggcctcagcgttcttgtttgttactttgctgttatggaaaactgacaggacctgaagtcctgaacgttgtctggtggaatttgtccagcattcccctttcagctggttgcgtatttgaatcctgcacgtaaaaacaaccgcgcacttgtttaactacaattgatctagatttctttaagggctagtttgagagaaaaaaaag

SEQ ID NO: 133882 - DNA, 1755 bp, Zea Mays
aggagctactaggtagaccgtgtccccgtagacatgaaacggaagcgtggctagagctagagacgcggaaaagacgagaggaggggcccactgaacccacacagcgcgaggaagcgggaaggacgaccgtgttcccgattcccgttccaccatgccaccgtgacaccgtctctctctctctgtcggtcctccgctccgccgctttaaaaccaaagccgaaccactgctccgcccactccatcccggctccgtcgtcgcgtgccatcctagggtttctttccccgtcggcgcctccccagatttggccgccgccgccgctgacccaggttgtcttgatggcgcccgctgtagaagccgtgaaggagacaggcaccttccagaaggttcctgccttgaacgaaaggatactgtcatccatgtccaggaggtctgttgctgcacacccttggcatgatctggagataggtcctggtgctccaaccatattcaactgcgtaaggccaccctgtcatgcttgactggtcctcttgtgatatgttcatgttaatagcatgatgtcttttgttctattggaaaataaaaagtctccctggactctaaaatcaatgcctgtgaacacatgaactgtttgtgtcacccatgttcctctgctccttggcactttctgatgcatgctcaaatgcttaagaaagactcatagaagcgactcctattcctatgccaggtcattgagataccaaggggcagcaaggttaaatatgaacttgacaagaaaactggactgatcaaggtggaccgtgtgctgtattcatcagttgtttaccctcacaactatggattcattcctcgcacgctttgtgaagacagtgatcctttggatgtactggttataatgcaggagcctgttatcccaggctgtttcctacgtgcgaaggccatcggccttatgccgatgattgatcagggagaggcagatgacaagatcattgcagtgtgcgctgatgatcccgagtacaggcattacaatgatatcaaggagctcccacctcaccgcttggctgaaatcaggcgcttcttcgaggactacaagaagaatgagaacaaggaggttgctgtgaatgactttctaccagcgagcgccgcttatgaagccatacagcactctatggacctgtatgctacatacatcgttgagggcctgaggaggtaggattctgatggctaggaaaggtggggaggatgttgacgaaaaactgggagaccatttaccgcatggaacgagtaccgttattattttatttgtgtcgtgtatactgctagtagtgaaccctcaatcaaagaccgaaatcccctggggagtcggagtcggtagtaggtgaagctagtaacaaggttggcgaaatattattttctggcctgactgcctatatatgttgtacgtgattggtatcgtaatattcattcgcttttgtgatacataattcgttattggatcttcaattgtgttctgctctcggaacacggtggcgatgtgcctcgtagaaaaatgcaaaggcctcagcgttcttgtttgttactttgctgttatggaaaactgacaggacctgaagtcctgaacgttgtctggtggaatttgtccagcattcccctttcagctggttgcgtatttgaatcctgcacgtaaaaacaaccgcgcacttgtttaactacaattgatctagatttctttaagggctagtttgagagaaaaaaaag

SEQ ID NO: 133883 - DNA, 1496 bp, Zea Mays
gaccgtgttcccgattcccgttccaccatgccaccgtgacaccgtctctctctctctgtcggtcctccgctccgccgctttaaaaccaaagccgaaccactgctccgcccactccatcccggctccgtcgtcgcgtgccatcctagggtttctttccccgtcggcgcctccccagatttggccgccgccgccgctgacccaggttgtcttgatggcgcccgctgtagaagccgtgaaggagacaggcaccttccagaaggttcctgccttgaacgaaaggatactgtcatccatgtccaggaggtctgttgctgcacacccttggcatgatctggagataggtcctggtgctccaaccatattcaactgcgtcattgagataccaaggggcagcaaggttaaatatgaacttgacaagaaaactggactgatcaaggtggaccgtgtgctgtattcatcagttgtttaccctcacaactatggattcattcctcgcacgctttgtgaagacagtgatcctttggatgtactggttataatgcaggagcctgttatcccaggctgtttcctacgtgcgaaggccatcggccttatgccgatgattgatcagggagaggcagatgacaagatcattgcagtgtgcgctgatgatcccgagtacaggcattacaatgatatcaaggagctcccacctcaccgcttggctgaaatcaggcgcttcttcgaggactgtatcctttttatgattcatcagtatttcgtcctgctaaccaagagtctagtactacataaagtgattgctgttttgatcatgcttaataagttcttttaacttgtctacaaaacacttctttgctaaattccccaaacctgacatgagtcctgaacatgactgcctctgtcatttaaagagaaaaacctgtcaggtgtttttaactctcttaagacggtgtaaatgttagtgcttgcctcctgttagattgaatggtttctttaaccgagacattcagacaagaagaatgagaacaaggaggttgctgtgaatgactttctaccagcgagcgccgcttatgaagccatacagcactctatgtaagttgatttatcgcaactgtgtcatctcaacacgtatcctcgtttcgaccttcaagctaaccgcccagcaatgtgttgttcttccatccacagggacctgtatgctacatacatcgttgagggcctgaggaggtaggattctgatggctaggaaaggtggggaggatgttgacgaaaaactgggagaccatttaccgcatggaacgagtaccgttattattttatttgtgtcgtgtatactgctagtagtgaaccctcaatcaaagaccgaaatcccctggggagtcggagtcggtagtaggtgaagctagtaacaaggttggcgaaatattattttctggcctgactgcctatatatgttgtacgtgattggtatcgtaatattcattcgcttttgtgat

SEQ ID NO: 133884 - DNA, 1262 bp, Zea Mays
acaagtcagaaaaaaaaaagaataagaagaaaggaatccctcctacgcggaagcgaagagattcgtcgcctcagccgcctctctgctcagatctgcggcggagcctcgccggcggcctgcgccccgcggcgccgccgatccaagatgccttcgtgcgtgcagggatgctgctgctgctcgtccctgcgccttctcccccgcgacgacgcgctctcgtccccctccgcctgcgcgcaccgcctgaagccttggtcttggcgtgcccaatcccccacctcgtcctcctaacgcttgtccccgcccgctccccaccctgatctacctgtctctacccttccctcctccatttctacatctccccgttgctgctctgctcctgctgccacaagagtattcgccttcaatcgttgctcgcgcctgtcatttcgtgccgcacgccgacttgtttgccgttttcgctgccgtcttctgttggatcggatttgtctggatcgattccaaggtcggatctacgctgctgcgggtcagcatcagtagcgcagcgtggttgtacgtttgcggtgttgctgtatcactctgcgtctctgcaagtgctaaaccagtcactttatggacggtggttcctgtggtctcgagggagcgtcggtagtgacatctactaccagcactggtattccgcttctgccagagaagcactgcgccttgtttgatgaagcttgtggagccatggcgggcagtaatggtcctgaaggagtgccagtagtgacttctgctgatgaccctccgacccgtgccgatattccatttgtctgcaattcagttgatgaaacctgtgaagccacagggggcggcagtgctcccttggagggtcagatatgtacgggtttctccaagttgatcagcttggaggtgaagaaaggcctccagaagtgtgcgacgttcccaccctcatctggtcagcctcagcaggaggattgttcatgctgccatgtaggtgacgagctcacgtgtgctcctgcctatgggcgatctgtgtccttacctgtgagtacctcatgttaaattattttaccatttgtcttaaatgattgcgattgtacttaaagttctacaaataagtcatacgctctgtgtacttgaatgagatcttttggttgcgatcattatgtatgatcaaagtaatagatggactccatcttggttattttagtgttcgctagcagccttaatgcctaatcaaatcaggttcatatttgctttcc

SEQ ID NO: 133885 - DNA, 1773 bp, Zea Mays
acaagtcagaaaaaaaaaagaataagaagaaaggaatccctcctacgcggaagcgaagagattcgtcgcctcagccgcctctctgctcagatctgcggcggagcctcgccggcggcctgcgccccgcggcgccgccgatccaagatgccttcgtgcgtgcagggatgctgctgctgctcgtccctgcgccttctcccccgcgacgacgcgctctcgtccccctccgcctgcgcgcaccgcctgaagccttggtcttggcgtgcccaatcccccacctcgtcctcctaacgcttgtccccgcccgctccccaccctgatctacctgtctctacccttccctcctccatttctacatctccccgttgctgctctgctcctgctgccacaagagtattcgccttcaatcgttgctcgcgcctgtcatttcgtgccgcacgccgacttgtttgccgttttcgctgccgtcttctgttggatcggatttgtctggatcgattccaaggtcggatctacgctgctgcgggtcagcatcagtagcgcagcgtggttgtacgtttgcggtgttgctgtatcactctgcgtctctgcaagtgctaaaccagtcactttatggacggtggttcctgtggtctcgagggagcgtcggtagtgacatctactaccagcactggtattccgcttctgccagagaagcactgcgccttgtttgatgaagcttgtggagccatggcgggcagtaatggtcctgaaggagtgccagtagtgacttctgctgatgaccctccgacccgtgccgatattccatttgtctgcaattcagttgatgaaacctgtgaagccacagggggcggcagtgctcccttggagggtcagatatgtacgggtttctccaagttgatcagcttggaggtgaagaaaggcctccagaagtgtgcgacgttcccaccctcatctggtcagcctcagcaggaggattgttcatgctgccatgtaggtgacgagctcacgtgtgctcctgcctatgggcgatctgtgtccttacctcagccaactttgaagctggtctctgccatgaaaggaggtcgtgaaaagaacggagtggcatcatcaccaagtgaaaaccgccatgtcaagtgggctcctgatgtgtacgacccccctgtgacatcggtatgccattcagtgaccaacagctatcagcgccggtcaaagcaccgcaagaaggagaagaacaaacagaagaagaggcagaaggggaagtcgaagaagaaccaacaacagagttctgcccagaatccatctgcaccgcaggttcctggtatcgggccgaaaggcgttagcaccactggtggccagtctccagcagacgatctcagcgaacatgaggccgggatcatggactacagcatgggtagccaggaagccaactgtggaagcagcttcttgcgcgagtctgttgctaagatgcacttctcgaccgccgaagcttcctgagaggcgtgcctcagttctgtaaatatgatggacgggatgtgtataaataaacccagcatgctgttttttttcgtcgtcgttgtgtgcgtttgagagctcgcctagtgttttggaacaataatttttggacagactatgtgttctgtatgttttggtcgtcagacatatctatcctcagtccatggctttgcttaacggtttaacctggactcttctgagaagttatggatgttctgaactcaagttatacactgcctaatgatgtttgatttgctggaa

SEQ ID NO: 133886 - DNA, 1716 bp, Zea Mays
acaagtcagaaaaaaaaaagaataagaagaaaggaatccctcctacgcggaagcgaagagattcgtcgcctcagccgcctctctgctcagatctgcggcggagcctcgccggcggcctgcgccccgcggcgccgccgatccaagatgccttcgtgcgtgcagggatgctgctgctgctcgtccctgcgccttctcccccgcgacgacgcgctctcgtccccctccgcctgcgcgcaccgcctgaagccttggtcttggcgtgcccaatcccccacctcgtcctcctaacgcttgtccccgcccgctccccaccctgatctacctgtctctacccttccctcctccatttctacatctccccgttgctgctctgctcctgctgccacaagagtattcgccttcaatcgttgctcgcgcctgtcatttcgtgccgcacgccgacttgtttgccgttttcgctgccgtcttctgttggatcggatttgtctggatcgattccaaggtcggatctacgctgctgcgggtcagcatcagtagcgcagcgtggttgtacgtttgcggtgttgctgtatcactctgcgtctctgcaagtgctaaaccagtcactttatggacggtggttcctgtggtctcgagggagcgtcggtagtgacatctactaccagcactggtattccgcttctgccagagaagcactgcgccttgtttgatgaagcttgtggagccatggcgggcagtaatggtcctgaaggagtgccagtagtgacttctgctgatgaccctccgacccgtgccgatattccatttgtctgcaattcagttgatgaaacctgtgaagccacagggggcggcagtgctcccttggagggtcagatatgtacgggtttctccaagttgatcagcttggaggtgaagaaaggcctccagaagtgtgcgacgttcccaccctcatctggtcagcctcagcaggaggattgttcatgctgccatccaactttgaagctggtctctgccatgaaaggaggtcgtgaaaagaacggagtggcatcatcaccaagtgaaaaccgccatgtcaagtgggctcctgatgtgtacgacccccctgtgacatcggtatgccattcagtgaccaacagctatcagcgccggtcaaagcaccgcaagaaggagaagaacaaacagaagaagaggcagaaggggaagtcgaagaagaaccaacaacagagttctgcccagaatccatctgcaccgcaggttcctggtatcgggccgaaaggcgttagcaccactggtggccagtctccagcagacgatctcagcgaacatgaggccgggatcatggactacagcatgggtagccaggaagccaactgtggaagcagcttcttgcgcgagtctgttgctaagatgcacttctcgaccgccgaagcttcctgagaggcgtgcctcagttctgtaaatatgatggacgggatgtgtataaataaacccagcatgctgttttttttcgtcgtcgttgtgtgcgtttgagagctcgcctagtgttttggaacaataatttttggacagactatgtgttctgtatgttttggtcgtcagacatatctatcctcagtccatggctttgcttaacggtttaacctggactcttctgagaagttatggatgttctgaactcaagttatacactgcctaatgatgtttgatttgctggaa

SEQ ID NO: 133887 - DNA, 1780 bp, Zea Mays
acaagtcagaaaaaaaaaagaataagaagaaaggaatccctcctacgcggaagcgaagagattcgtcgcctcagccgcctctctgctcagatctgcggcggagcctcgccggcggcctgcgccccgcggcgccgccgatccaagatgccttcgtgcgtgcagggatgctgctgctgctcgtccctgcgccttctcccccgcgacgacgcgctctcgtccccctccgcctgcgcgcaccgcctgaagccttggtcttggcgtgcccaatcccccacctcgtcctcctaacgcttgtccccgcccgctccccaccctgatctacctgtctctacccttccctcctccatttctacatctccccgttgctgctctgctcctgctgccacaagagtattcgccttcaatcgttgctcgcgcctgtcatttcgtgccgcacgccgacttgtttgccgttttcgctgccgtcttctgttggatcggatttgtctggatcgattccaaggtcggatctacgctgctgcgggtcagcatcagtagcgcagcgtggttgtacgtttgcggtgttgctgtatcactctgcgtctctgcaagtgctaaaccagtcactttatggacggtggttcctgtggtctcgagggagcgtcggtagtgacatctactaccagcactggtattccgcttctgccagagaagcactgcgccttgtttgatgaagcttgtggagccatggcgggcagtaatggtcctgaaggagtgccagtagtgacttctgctgatgaccctccgacccgtgccgatattccatttgtctgcaattcagttgatgaaacctgtgaagccacagggggcggcagtgctcccttggagggtcagatatgtacgggtttctccaagttgatcagcttggaggtgaagaaaggcctccagaagtgtgcgacgttcccaccctcatctggtcagcctcagcaggaggattgttcatgctgccatgtaggtgacgagctcacgtgtgctcctgcctatgggcgatctgtgtccttacctccaactttgaagctggtctctgccatgaaaggaggtcgtgaaaagaacggagtggcatcatcaccaagtgaaaaccgccatgtcaagtgggctcctgatgtgtacgacccccctgtgacatcggtatgccattcagtgaccaacagctatcagcgccggtcaaagcaccgcaagaaggagaagaacaaacagaagaagaggcagaaggggaagtcgaagaagaaccaacaacagagttctgcccagaatccatctgcaccgcaggttcctggtatcgggccgaaaggcgttagcaccactggtggccagtctccagcagacgatctcagcgaacatgaggccgggatcatggactacagcatgggtagccaggaagccaactgtggaagcagcttcttgcgcgagtctgttgctaagatgcacttctcgaccgccgaagcttcctgagaggcgtgcctcagttctgtaaatatgatggacgggatgtgtataaataaacccagcatgctgttttttttcgtcgtcgttgtgtgcgtttgagagctcgcctagtgttttggaacaataatttttggacagactatgtgttctgtatgttttggtcgtcagacatatctatcctcagtccatggctttgcttaacggtttaacctggactcttctgagaagttatggatgttctgaactcaagttatacactgcctaatgatgtttgatttgctggaattttatgttc

SEQ ID NO: 133888 - DNA, 1288 bp, Zea Mays
ggaggaataacagctacatctgttcttgtccatgtttctgtagcatcagtagcgcagcgtggttgtacgtttgcggtgttgctgtatcactctgcgtctctgcaagtgctaaaccagtcactttatggacggtggttcctgtggtctcgagggagcgtcggtagtgacatctactaccagcactggtattccgcttctgccagagaagcactgcgccttgtttgatgaagcttgtggagccatggcgggcagtaatggtcctgaaggagtgccagtagtgacttctgctgatgaccctccgacccgtgccgatattccatttgtctgcaattcagttgatgaaacctgtgaagccacagggggcggcagtgctcccttggagggtcagatatgtacgggtttctccaagttgatcagcttggaggtgaagaaaggcctccagaagtgtgcgacgttcccaccctcatctggtcagcctcagcaggaggattgttcatgctgccatgtaggtgacgagctcacgtgtgctcctgcctatgggcgatctgtgtccttacctcagccaactttgaagctggtctctgccatgaaaggaggtcgtgaaaagaacggagtggcatcatcaccaagtgaaaaccgccatgtcaagtgggctcctgatgtgtacgacccccctgtgacatcggtatgccattcagtgaccaacagctatcagcgccggtcaaagcaccgcaagaaggagaagaacaaacagaagaagaggcagaaggggaagtcgaagaagaaccaacaacagagttctgcccagaatccatctgcaccgcaggttcctggtatcgggccgaaaggcgttagcaccactggtggccagtctccagcagacgatctcagcgaacatgaggccgggatcatggactacagcatgggtagccaggaagccaactgtggaagcagcttcttgcgcgagtctgttgctaagatgcacttctcgaccgccgaagcttcctgagaggcgtgcctcagttctgtaaatatgatggacgggatgtgtataaataaacccagcatgctgttttttttcgtcgtcgttgtgtgcgtttgagagctcgcctagtgttttggaacaataatttttggacagactatgtgttctgtatgttttggtcgtcagacatatctatcctcagtccatggctttgcttaacggtttaacctggactcttctgagaagttatggatgttctgaactcaagttatacactgcctaatgatgtttgatttgctggaa

SEQ ID NO: 133889 - DNA, 453 bp, Zea Mays
atgatgctcatacatcctctggcatgggcagttcatcgctgggcatcctcagcttgcacggccctggatgacgtcaaggccaacctcggcggagtcggtggcctggagatccacctgaatgccgtccagctcccgcttgaacctctccttggagctggcgtagatcatcttgctcctcacgcgcgccgtgtcaggagaccaggcgatgaagaagatcttgctcttctggcagttctcctcggtgacgaagtcgtagtcgaagatggcgtacctgcactcgttggcggggaggctggcggcgaagtcgtcgtagccgagcacgggcttgcccacctgctccaccaccaccatcttcttcttctcgtcgatcctgtagatgatgaagcggtgcgtcctcttggccttgagctccaggaaccggcgcttgcagtcgtcgtccacggccatccctga

SEQ ID NO: 133890 - DNA, 647 bp, Zea Mays
aagatcctcacagctaacaatttgcagaagaggggatgggatcacaaccctatttgtcctctttgtcacatagatccggaaaccccgagtcacctgtgcaaagattgtagttactcaaaaaacatttggcggactttgttacattggaccaatctcaactctttagcaaacctaaactatgatggtcagttgcatacttggtggagaagatgtagactcagaattgataagccaagacgaaggttatttgacgggctagtagtctatttttggtggaatatttggaaagaaagaaataggcgaatttttcaaaattccgggaatgatcaacttgtcgtcgcccatcaaatcaaggaggatgtcttgcaatacagtgcggctttctctttcttttgatcagagagttctctagtggtggttttgttttttcttagtggtggttctttcttttttttctcttcttttcgctttcttcttttttcttgaattggctgtagttggtaccttgctggccagtagtccctgtatttggttttttctccttctattaatatattcagcaatcctcttgccgtcctttcgaaaaaaacagtatggctgaagcttcacgtacactcgatcacacacactgaacgacagctccgtcc

SEQ ID NO: 133891 - DNA, 1743 bp, Zea Mays
cgtcgactaaaattcgattcttgtgtatgtgtgtgtgtgtgattttagcagacgtgtctacggacggccactggtgcttcgtggtgttctgggtggtgccccgctcctcgtccatcagaatccggtgggcgagcctcaagaaccggctcatgtcgatgtgcccttcctcctactccatcccgttctacccggacatgagccagccgggcccctcgcagttctacctcctcaagctcttgtcaccggaccgcaaaggattgctgcacgatgtgacgcacatactatcagacttggagcttataatccacagagtgaaggtgtcgacgacgccggacggaagagtcgtggacctcttcttcatcaccgacggcatggagctgctgcacaagaaggagaggcaggaggagacctgctcgacgctaatcgctgccctgggcccttccataagctgcgaggttctgtcggcggaagggttccagcagggattctcctctctcgcgccgaagatcgccgaggagctgttccgggtggagctagcaggcgacggcgagatgtgctcgagctcgcttattagcgcagagctgaagaaggtccagactgccaccattaatttcgacaactccctcagccccgcgcacacgctggtccagatcatatgcgccgaccagaaggggctcatctacgacatactgaggacgatgaaggactgcaacatccagatattttacgggcggttcagatcggacaagaaaggcgggcggccaggcagcaaaggctgccgagaggttgacctgttcgtgaaacaagtggacggcaaaaaggttacggatcctgagaagcaggacgctctgcgggcgcgcctgagatccgagatgctccacccgctcagggtcatggtcgtcagccgcggaccggacacggagctcctcgtcgccaacccggtcgagctctgcgggaagggacggccgcgcgtgttctacgacgccaccctcgccctgaaagcgcttggggtctgcatcttctcggctgagattgggagacaggcagcgtccgagcggcagtgggaggtgtacaggttcctcctggacgacagcagggagttcccgttgacgaacagtctcgctaacaggaaccgtgtggtggatagggtgaggaaaacgctgatgggatgctacaactagtagggctcctctcctcggtgtcgacctgtctgtctctgccaagaataatgcaaagcttcaaggcaactaactggtgtttctagactccgttgtcgtcgctgcccacagctagctgcctgcttcgtcgtctcaaccccgtcgcagctgcgtgggatttcagagctagcacaacaaagccgtgaatgacttcgacacacacaaatgatgctgcctgtgtgtgccatggatccgttgtatacatgctgagaaagagtagacagagagagaagagcatgtttggtgggaggtgcgagccgccggagcaatgattgagcttttgtttggttcaggggggtgggattactggatgctgacacagatacatgaatctctgcttcaccaccttgtttatatctccttccacttccacacacaccttccctgtatatgattgccccgctagtagcactttgtcttcaagagagggagacccttgtctcctcatgcatgtaatgtaagcgcagtttgtacttggatgcatgctaattttacttaactattatgcagagaatatgttggtgtt

SEQ ID NO: 133892 - DNA, 2968 bp, Zea Mays
tgggacgcccgttgaaaaccccaaggagctggagccgatgaagtagccggcgatcccagcccgacctcgatcctgtacgtttgaactttgaaccacaccactcgatcgtcatcttcgctcgctcgtcggccaataagcaacatgtcgtcgtcggtggtgtcgtcggaggagatggcggccgtgaagacgtcgtcgaacggggtgtggcagggcgacgacccgctgcacttcgcgttcccgctgcttatcctgcaggcgctgctgatcctggtgctgagccggttgctggcgttcctgctccgtccgctgcgtcagcccaaggtgatcgcggagatcgtggcggggatcctgctgggcccctcggcgctgggccgcaacaaggcgtacctccgcgcgctgttcccgccgtggagcgcgccagtgctggagtccgtggccagcctcggcctcctcttcttcctcttcctggtggggctggagctggacctccggtccgtgcgccgcagcgggcggcgcgccttcgccatcgcggcggccggcatctcgctcccgttcgcgtgcggcgtgggcgtggccttcgtgctccgcgccgccgtcccgggcgccgaccaggcagggtacgcgccgttcctcgtcttcatgggcgtggcgctctccatcacggcgttccccgtcatggcgcgcatcctggccgagctgaagctcctgaccaccccgatcggggagacggcgctggcggccgccgccttcaacgacgtggcggcctgggtgctgctggcgctggccgtcgctatatcagggtctggcgacgccgcggggacgagccagcagcagcagcaccgcagcccggtggtgtcggtgtgggtgctgctttgcggcgcggcgttcgtggcggcgtggatggtggccgtgaagccggcgatggcgtgggtggcgcggcgcgcggacgcggcgggggacagcagcgaggcgtgggtggcggtgacgctggcgggggtgctggcgtccgggttcgcgacggacgtgatcggcatccacgccatcttcggcgccttcgtgttcgggctcacggtgcccaaggaaggcgggttcgcggcgcgcgtgacggcgcgcgtggaggacatcgtgtcggagctcctcctgccgctctacttcgcctccagcgggctcaagacggacgtggccaccgtgcggggcggcgaggcctgggccatgctcgcgctcgtcatcggcacagcctgcgcgggcaagatcgtcggcaccttcggggtggccatggcgtgcgggatgggggcacgggaggcgctcgtgctcggcgtcgtcatgaacaccaagggcctcgtcgagctcatcgtgctcaacatcggcagggagcgcaaggttctgaacgaggagatattcgccatcctggtgctcatggcgctggtgaccacgttcatcaccacgcccacggtgatggctatctacaagcccgcgcgcgccgccggccgcaggcgcctgcaccagcgcaagctccagggccccgacccctccgcgccgtcctcgccgtccgcctcggccggcgccggcgccgcgatggagctgcgcgtgctggcctgcatccacggcgggcaggacgtgcccgcggtgatcaacctcatcgagaccatccgtggccacacgcagccacgccgactcgtcaagctctacatcctccgcatggtggagctgacggagcgcacctcctccatcctcatggcgcgcgccgcgcgccggaacgggctgccgttcctgcgcccgcgccgcgcgggggagccgcacgaccaggtggacgtggccttcgacacgtacgcgcagctcggccacgtccacgtccgcgccatggccgccgtgtccgcgctccacaccatgcacgacgacgtcaccgccgtggccgaggacaagcgcgtctccctcgtcgtgctgccgttccacaagcgccacacgggcggcggcgacgacgtcgagaacctcgggcccgagtggcgcgccgtcaaccgccggatcctccgcgaggcgccctgctccgtcgccgtcctcgtcgaccgcggcttcggcggcggggagcaggtcagctcggagcaggtggcgcacggcgtctgcgtcgtgttcttcggcgggcccgacgacagggaggcgctcgagctcgccgggaggatggccgagcaccccggcgtgcaggtcaccgtcgtgcggttcgttgatggcaaggccggtagcgaggagcagtccgaggtcacgctgcgcccgtcccacaccaagaacgccgaccggagctacacgttctccacggccgtcgtcgacgccggcaaggagaaggagctggacgaggcggctgtggcggagttccggcagaggatggggtccctggtgcggttcgaggagcgggtggtggtgggcaacgtgatcgaggaggtggtgtcgatcgggaagagcagggagtacggcctggtggtcgtcggcaagggccggctgccgtccgcgatggtggcgcagctcgccgtcgttccggcagagcacccggagctcgggcccatcggcgacgcgctcgcgtcgtccggccacggggtgacgtcgtcggtgctcgtggtccagcagcacgacatgagcaacgccgacgaggtgcccgtctctgtggtggtcgacggccgtcctcaggacggcgagttcgccaaggacatggcggagccgtgagagccttgctccagtaggacgacgatggctaaaagtacttctatagttgttcttcggtaataagcatgtagtactaatcattattgctaagtgtgtctcggttttcttttcacaagcattgctgctgctaatacactattagtatatactgtattcactcgttagtttttatttaccgatgctaataatacccaaatgtataaatgtttgttcggacagctgagacaggcagagcttgatcctttttcagactgaa

SEQ ID NO: 133893 - DNA, 1206 bp, Zea Mays
atgttgttactggttgccttctttacgcatttcctggtttcatcgctgagcagtgcggaggcggggcccccgtcgtcgtcggcaacggccaccaggtggcgcgagctgcagggcaacaactcgtggaacggcctcctggacccgctggacatggacctccgcaggtccatcatctcctacggcgagctggtgcaggccacctacgacggcttcaaccgagagcggcggtcgccgcacgccggcgcgtgcctgtacggccgcgccgacctgctgcccggcgtgggcgtggccgccgcgggccgctacgccgtcaccaggttcgtctacgccacgtcggcgctgcccgtgccggggtcggacttcccgctcctgccgctgccggagaccagggaggcgtggagcagggagtccaactggatcgggtacgtcgcggtggccaccgacgagggcgcggccgagctcgggaggcgcgacgtcgtcgtggcgtggcgcggcaccgtgaaggacctggagtgggccaacgacttcaccttcacgccggtgtcggccgtgcccgtgctgggctccgccgccgccgccaaccccttggccgtggttctcgaggaggtgaggaggctgatggagttgtacaagggcgaagcgacgagcatcaccgtcgtcggccacagcctcggcgctgcgctcgccacgctgaacgccgttgacatcgccgccaacggcctgaacgaaggctccggctcctcccagcagctgccgtgcccggtgacggcgatcctgttcgcctgcccgcacgtcggggaccgtttcttccgggccgccttcgtcgggtcctttcgggacctgagggccctccacgtgaggaacgccggcgacgtcgtgcctttggtcccgccgctcgcgtacgtggacgtggccgtggcggtgctgccgatcgacacgagccggtcgccgtacctgcggtcgccgggcccggcggggacgctccacaacctcgagtgctacctgcacggcgtggccggcaagcagagcagcgccgccggagggttcaggctggaggtggaccgcgacgtggcgctggtgaacaagggcgccgacgcgctcagggacgagtacccggtgccggcgaactggtgggtgccagagaacaggtggatggtcaggggctccgagggccactggatgctcaaggacttcgaggaaatctaa

SEQ ID NO: 133894 - DNA, 1426 bp, Zea Mays
catcaatcgcatgccaagatgttgttactggttgccttctttacgcatttcctggtttcatcgctgagcagtgcggaggcggggcccccgtcgtcgtcggcaacggccaccaggtggcgcgagctgcagggcaacaactcgtggaacggcctcctggacccgctggacatggacctccgcaggtccatcatctcctacggcgagctggtgcaggccacctacgacggcttcaaccgagagcggcggtcgccgcacgccggcgcgtgcctgtacggccgcgccgacctgctgcccggtgtgggcgtggccgccgcgggccgctacgccgtcaccaggttcgtctacgccacgtcggcgctgcccgtgccggggtcggacttcccgctcctgccgctgccggagaccagggaggcgtggaccagggagtccaactggatcgggtacgtcgcggtggccaccgacgagggcgcggccgagctcgggaggcgcgacgtcgtcgtggcgtggcgcggcaccgtgaaggacctggagtgggccaacgacttcaccttcacgccggtgtccgccgcgcccgtgctgggctccgccgccgccgccaaccccttggccgtggtgcaccagggcttcctctccgtgtacacgtccagcaacgccgactccaggttcaacaaggccagcgccagagaccaggttctcgaggaggtgaggaggctgatggagttgtacaagggcgaagcgacgagcatcaccgtcgtcggccacagcctcggcgcggcgctagccacgctgaacgccgtcgacatcgccgccaacggcctgaacgaaggctccggctcctcccagcagctgccgtgcccggtgacggcgatcctgttcgcctgcccgcacgtcggggaccgcttcttccgggccgccttcgtcgggtactttcgggacctgagggccctccacgtgaggaacgccggcgacgtcgtgcctgtggtcccgccgctcgcgtacgtggacgtggccgtggcggtgctgccgatcgacacgagccggtcgccgtacctgcggtcgccgggcccggcggggacgctccacaacctcgagtgctacctgcacggcgtggccggcgagcagggcagcgccgccggagggttcaggctggaggtggaccgcgacgtggcgctggtgaacaagggcgccgacgcgctcagggacgagtacccggtgcccgcgaactggtgggtgccagagaacaggtggatggtcaggggctccgacggccactgggtgctcaaggacttcgaggaaatctaaatcgtatgcatgcatgccaagcttaacttgagaaaatgggcacatattcaacaccgatgacattttatttccaaccctgatggactttagttcattacgatagatgatcctgagcaatttggct

SEQ ID NO: 133895 - DNA, 708 bp, Zea Mays
ttataatgccagcaaagcaattgtcgtcttcgcgatgccaatagtctgaagcccaattagagtgccaaaattgcaaaaatctcgatgatggaaatctatctgaaacatccgtgctactccaatcggcaaattctaacagcaatggcatcaacggaaggtattatgaactatgatcgatacaggctagctaagggtagtctaaagggaaaaaatgaaccgcgtggcaacactagcgccagtgacacccatcaccggaacagatcgccgaaacattgcgcccatcccctagcgcaggggcatcgcacacaagcgtcaaccagggcggccgagatctagaagcggacttgatcggggggttcacctggttggtcagcgcttcttgtgctcctggacgaacttggagttcttgaggtcctcctcggtgaagttggccgtcatcttagtgatgatgaagccggtgatggcgaaccccgtgaggaagggccaattgcgcttccactcccggcggaagaagaccggccacggatcgaacgtcttcatctactaggcctccggctccggctccggctccggctgctcgcgatctcctcgcaccctcctcctccggcttcgcttctcgcgagattgaggtgagaagtggatggggtcgaatggaaattctccttcgagttcgatcccctccccctcgtagcggcgctgcgacgacct

SEQ ID NO: 133896 - DNA, 636 bp, Zea Mays
gaattaggacatcaggtggcccttatccgtcaagtcgctaacaaagttttcaccggtatgggtaaaactattgggtacaagatcggaacgatgattgagattcccagggtagctctagtggctgacgagatcgacgccatcagaggctggctggatggagggaacgacacctcccctgtgaccggccagccgcttgcgcaccgggagctggcaccgaatctcgcgcttggtgccgtgatccaagattacacggtgatgaggcggtggcagtgccgattctgcgattcgcacgacgacgttgctcctgcgcttcaaattttcccctcccctgtgggctgcgagcgcgcctgcgtgatcacccgtatcaagaccctcttccacgcctacccagacctaatcctcagcattagagccttcctgcccaagaggcatgccatcaggcctcaggacctccgcaaggacaaggagcccgtcgattatcccagggctatcagccttgtcaacagaattaaggtcaccttactattccatggccatccgcccatacctcctccgcaagcaggcacgacctcaaaagttaggcatgatgacaagaatgttataatgcattcggccatgagagatgagacagttcag

SEQ ID NO: 133897 - DNA, 1155 bp, Zea Mays
atggccccatccccatatatacgtgcatgcaagccgagaggttcctcagtcgacgcgacgctcgacggcacggcagcagagaaagccaacagcatggctccaccaccatggccggtcgtagcgctgctgctctgcgccgcgctagcgttcgcggcgcggccgagctcggccgtggacccggtgggcacgtactgcgccaagaacttcacgggcgcgcagacgcaggcgagcatcgcccaggtcctggccgcgctggtcccgcgcgcctccgcggcctactacgccacggcgacggccgccggcggcggcggctcggccaccatctggggcctggcgcagtgccgcggcgacgtcccggcgtccgactgcgcgctctgcgtggcggcggcggcgcggcaggcggcggcgtcgtgccggggccaggcggacgcgcgggtctggtacgactactgcttcctccgctacgacgacgccgacttcctgggcctgccggacaccgggtacgcgctcatcctcatcaacaccatgaacgccaccgacccggccgcgttcgaccgcgccgagcgcaggctcatggcgcgcgtcgctgccgacgccgccagcgccgggctggccagggagacggccaggttcggctccgacgggaccaccatctacggcctcggctggtgcaccagggacatcaccgccgccgactgcggcctctgcgtcgcgcaggccgtcgccgagctccccaactactgccgcttccgaaggggctgccgcgtgctctacagcagctgcatggctcgctacgagacctaccctttcttcttcccggtcaccggcgccggcgccggcgccggcgctgacgcctcctcctcccacgccggcgagtacgagactgtcgtcttgacgaaccacaaatagcagttccaactctcaagctagctagtagtgtacgattacgcttcctgtttgttaatcgcgcgcggtaaatcaatcgtgcaatagctatatgtcacctattatttgttgcacttatgatgataaatgtagagtaaataaatatggatgcttgcttgttgcatcgcatgcagaactgtactaatacaatatatatatagatgatggaaattgttgctgaaatttaatcaattaaatgcaagaatcttc

SEQ ID NO: 133898 - DNA, 1981 bp, Zea Mays
atgacaccaaatactcttctctccactccacgagcatcactagtaaggatgaaaacgggcccgaccttctccggtcatctcttccccaaggccccaagccaggccgagcctcaagcgccaggcgcgccaccgtccggagcagccaagcctggtgcaccgccgccgtcctcaactggcccgaccttctccggtcatctcttccccaaggccccaagcctttcagcatctccagtatatgtttggatggatgggttggaggtagtgttcgaccgtgcttctgctcctgcaatcagaagttctgaactgttcagagttccttgtttgttcactaaccatcctctttgtcaatcttctttgaaaattagctttcctcataggcttccatttgttagtaaatctgcacttttaggagactcagagttcgtcctagatgcaaaagtaccttgctggttgtggagaggtcagctgaaggctggaggtttgactatgttcgttgtttttgatatgttatatggctgttctgatgtctatcaatggtgggtgaagattgccaccggattaatttgaagcttgatcgtccttaattagaaaaatgttattagtgggatcaagtggtgttttggaggtagatttaaacattttggaggtggattgaagctttgactggactgaagtttattgcatctggagaacatcgtttggctctacctctcttttattggtactcttaaatttcttgttccttacacatttaggatggtgattctctacttgtacagcaactggattgtatggacggaggagcctgagttagattctgtttctgcatgagcaataagttataaactgttcaagattcccttggtttgctatcaatgttgttcgaaacttttgctgtcaatggtctttaaaaatttacttccctcgtaggcttttgatgttctggtactggatgtgcagttttgggaggcattgctacagagataggacttccagttgaaattgttgcccattgatcacgctttatcctattcctatgttatttgatgaatgttcatgttgtttgtgttctcagttgtcactatcaaataggtagttatccgagggtggtctcattgactgcagatctctaggtgataactgggcatgaaggaaccagtttgcatctattaagacctacaaccttcaacttgcattgtgtttgttcagtgtcttctaccttgaagtagttaatgattagggtcattattgcaggtctgtgctactatgcttcttccactcctgaaactgagcctgcaagtgcaggcaatgtggtcgctcgctagagtccttatccaatcggcgaaggcacttaactcgcgaagccgttgggatctgcaagcaaggtcatgttcatgcacatcgtgttggatgaagttagtatagcctgcaagatacggaatctgtgcccggtttaccaccctagctagagctgctggctgctgctctgctcctgcgtgccctgcccagttgccatcgtggcatgttgattgctgctaggaacatgctccatcttattatcgaagcctgtatctcgagaaagttgatcgatacatctgcttatttatggactggttatgttgtaccatctgggactttaaaagatacagctttgccccaagaatccccttggttaaactttatgaaagggtctcgactttcaggaccccttattgatgctctggtcgcatctcctgcttcaaggtgtttcaagctcttcaaggtgaggtctgttcagtttggccagaaaggcatcccctacctgaacacctacgacggccgcaccatccgctaccccgacccgctcatcaaggccaacgacaccatcaagatcgatctaaagaccaacaagatcatggacttcttcaagtttgacgtcggcaacgtggtcatggtgaccggcgggaggaacaccgggcgtgtaggagtgatcaagaactag

SEQ ID NO: 133899 - DNA, 1154 bp, Zea Mays
atgacaccaaatactcttctctccactccacgagcatcactagtaaggatgaaaacgggcccgaccttctccggtcatctcttccccaaggccccaagccaggccgagcctcaagcgccaggcgcgccaccgtccggagcagccaagcctggtgcaccgccgccgtcctcaactggcccgaccttctccggtcatctcttccccaaggccccaagcctttcagcatctccagtatatgtttggatggatgggttggaggtagtgttcgaccgtgcttctgctcctgcaatcagaagttctgaactgttcagagttccttgtttgttcactaaccatcctctttgtcaatcttctttgaaaattagctttcctcataggcttccatttgttagtaaatctgcacttttaggagactcagagttcgtcctagatgcaaaagtaccttgctggttgtggagaggtcagctgaaggctggagctaggaacatgctccatcttattatcgaagcctgtatctcgagaaagttgatcgatacatctgcttatttatggactggttatgttgtaccatctgggactttaaaagatacagctttgccccaagaatccccttggttaaactttatgaaagggtctcgactttcaggaccccttattgatgctctggtcgcatctcctgcttcaaggtgtttcaagctcttcaaggtgaggtctgttcagtttggccagaaaggcatcccctacctgaacacctacgacggccgcaccatccgctaccccgacccgctcatcaaggccaacgacaccatcaagatcgatctaaagaccaacaagatcatggacttcttcaagtttgacgtcggcaacgtggtcatggtgaccggcgggaggaacaccgggcgtgtaggagtgatcaagaactaggagaagcacaagggcagcttcgaggtcatcgacgtgctgcttggagctttttgcatgctatgtctagttttctcctatttgttgtacaggaaaacatagaatggaattcaaatttggtggtcgcaaaagtgtggagactagaattcatataaagttaggcttaacattagtgcaaatagttgtattttagtttagatttagagtacacttatgtatgccttgtttgacaa

SEQ ID NO: 133900 - DNA, 1221 bp, Zea Mays
attcacattcgcgtttggggagctggcgagaccgtgagggcgaggctgcgcctgcgcgcgagcgagcggtggccgaggggctgtgcggcggcgggcagccggctggggcactcgcgtaggtgcatgtagtactcgcgcagcggctcaggcacgcacggggcttgctttggcggtgctgctgctaggcgctcgacgccggcggctcgtcacctcggcggtgcgctggtgctggcgtgctgctgctaggcgctagcaggggcgcgagggtgctgtgttgctgctcggcgccttagagattgaagtgactcagtcgctgcagaagggagcaaacaaagggagatgaagctcagagtcgtgtgcaggaagctgtatgactatgtgcggtatgacctcaaggagatagccttcccgtcgtcactgccggaccctcctcacatcaagaagcggcccaagctctcatggcatgaacgctggtgcatcctcaaggaggccacccggctgtacggcgcgtcatgggtccgggacatcggccctgagctgaggcccaacgactacaagaaggcagccgaggacgtggaggagcagtcgtccaatggcagccaccccagctctggtagtgacaggaaggggaaggcgagcagcgagccaactgtgctggaggacctcgctgtcgccgctaggggtggcgcagagacgctgaagcctgccctgcggcggatttacatggcccgcgcgtccacgtacaccgacgcgatgaagaatttcgtggagacgtaccaggaggggctcaaggaccagctgcaggagaaggctcatggcggagaaggtggtggtggtggtggtcgttatcatcatcaggagcagaaggaacatggcaatgaggatgaggcatcaaagccacctccgccatgacatcatggttgtgttctgccagtgatggcatcaagtagtacttatttcagttcatccacccaaagtagaacaagatggttttggctagcactgtagagtgcagaccctgttggcactgcagtaggagtgcttgagaaggatcaccaattttgcccggtttatatttctaccaaatctcaatccgggtcctgccgaactactttacttgtaaactttggctggtgttgcctataatgatgtgtgatcctcgttactctccagcctgttcctacttgctgattgcaatgtgttttgcttgcgcttctctct

SEQ ID NO: 133901 - DNA, 1310 bp, Zea Mays
attcacattcgcgtttggggagctggcgagaccgtgagggcgaggctgcgcctgcgcgcgagcgagcggtggccgaggggctgtgcggcggcgggcagccggctggggcactcgcgtaggtgcatgtagtactcgcgcagcggctcaggcacgcacggggcttgctttggcggtgctgctgctaggcgctcgacgccggcggctcgtcacctcggcggtgcgctggtgctggcgtgctgctgctaggcgctagcaggggcgcgagggtgctgtgttgctgctcggcgccttagagattgaagtgactcaggtgaggaacagaggattaagattaattcagcacggtgccccctactaacttgctatcagatccaagtcgctgcagaagggagcaaacaaagggagatgaagctcagagtcgtgtgcaggaagctgtatgactatgtgcggtatgacctcaaggagatagccttcccgtcgtcactgccggaccctcctcacatcaagaagcggcccaagctctcatggcatgaacgctggtgcatcctcaaggaggccacccggctgtacggcgcgtcatgggtccgggacatcggccctgagctgaggcccaacgactacaagaaggcagccgaggacgtggaggagcagtcgtccaatggcagccaccccagctctggtagtgacaggaaggggaaggcgagcagcgagccaactgtgctggaggacctcgctgtcgccgctaggggtggcgcagagacgctgaagcctgccctgcggcggatttacatggcccgcgcgtccacgtacaccgacgcgatgaagaatttcgtggagacgtaccaggaggggctcaaggaccagctgcaggagaaggctcatggcggagaaggtggtggtggtggtggtcgttatcatcatcaggagcagaaggaacatggcaatgaggatgaggcatcaaagccacctccgccatgacatcatggttgtgttctgccagtgatggcatcaagtagtacttatttcagttcatccacccaaagtagaacaagatggttttggctagcactgtagagtgcagaccctgttggcactgcagtaggagtgcttgagaaggatcaccaattttgcccggtttatatttctaccaaatctcaatccgggtcctgccgaactactttacttgtaaactttggctggtgttgcctataatgatgtgtgatcctcgttactctccagcctgttcctacttgctgattgcaatgtgttttgcttgcgcttctctctcttttatctgtcttttgtgtatg

SEQ ID NO: 133902 - DNA, 1290 bp, Zea Mays
attcacattcgcgtttggggagctggcgagaccgtgagggcgaggctgcgcctgcgcgcgagcgagcggtggccgaggggctgtgcggcggcgggcagccggctggggcactcgcgtaggtgcatgtagtactcgcgcagcggctcaggcacgcacggggcttgctttggcggtgctgctgctaggcgctcgacgccggcggctcgtcacctcggcggtgcgctggtgctggcgtgctgctgctaggcgctagcaggggcgcgagggtgctgtgttgctgctcggcgccttagagattgaagtgactcagattaattcagcacggtgccccctactaacttgctatcagatccaagtcgctgcagaagggagcaaacaaagggagatgaagctcagagtcgtgtgcaggaagctgtatgactatgtgcggtatgacctcaaggagatagccttcccgtcgtcactgccggaccctcctcacatcaagaagcggcccaagctctcatggcatgaacgctggtgcatcctcaaggaggccacccggctgtacggcgcgtcatgggtccgggacatcggccctgagctgaggcccaacgactacaagaaggcagccgaggacgtggaggagcagtcgtccaatggcagccaccccagctctggtagtgacaggaaggggaaggcgagcagcgagccaactgtgctggaggacctcgctgtcgccgctaggggtggcgcagagacgctgaagcctgccctgcggcggatttacatggcccgcgcgtccacgtacaccgacgcgatgaagaatttcgtggagacgtaccaggaggggctcaaggaccagctgcaggagaaggctcatggcggagaaggtggtggtggtggtggtcgttatcatcatcaggagcagaaggaacatggcaatgaggatgaggcatcaaagccacctccgccatgacatcatggttgtgttctgccagtgatggcatcaagtagtacttatttcagttcatccacccaaagtagaacaagatggttttggctagcactgtagagtgcagaccctgttggcactgcagtaggagtgcttgagaaggatcaccaattttgcccggtttatatttctaccaaatctcaatccgggtcctgccgaactactttacttgtaaactttggctggtgttgcctataatgatgtgtgatcctcgttactctccagcctgttcctacttgctgattgcaatgtgttttgcttgcgcttctctctcttttatctgtcttttgtgtatg

SEQ ID NO: 133903 - DNA, 1368 bp, Zea Mays
attcgcgtttggggagctggcgagaccgtgagggcgaggctgcgcctgcgcgcgagcgagcggtggccgaggggctgtgcggcggcgggcagccggctggggcactcgcgtaggtgcatgtagtactcgcgcagcggctcaggcacgcacggggcttgctttggcggtgctgctgctaggcgctcgacgccggcggctcgtcacctcggcggtgcgctggtgctggcgtgctgctgctaggcgctagcaggggcgcgagggtgctgtgttgctgctcggcgccttagagattgaagtgactcaggtgaggaacagaggattaagttgctcctttgttgtcgacagattaattcagcacggtgccccctactaacttgctatcagatccaagtcgctgcagaagggagcaaacaaagggagatgaagctcagagtcgtgtgcaggaagctgtatgactatgtgcggtatgacctcaaggagatagccttcccgtcgtcactgccggaccctcctcacatcaagaagcggcccaagctctcatggcatgaacgctggtgcatcctcaaggaggccacccggctgtacggcgcgtcatgggtccgggacatcggccctgagctgaggcccaacgactacaagaaggcagccgaggacgtggaggagcagtcgtccaatggcagccaccccagctctggtagtgacaggaaggggaaggcgagcagcgagccaactgtgctggaggacctcgctgtcgccgctaggggtggcgcagagacgctgaagcctgccctgcggcggatttacatggcccgcgcgtccacgtacaccgacgcgatgaagaatttcgtggagacgtaccaggaggggctcaaggaccagctgcaggagaaggctcatggcggagaaggtggtggtggtggtggtcgttatcatcatcaggagcagaaggaacatggcaatgaggatgaggcatcaaagccacctccgccatgacatcatggttgtgttctgccagtgatggcatcaagtagtacttatttcagttcatccacccaaagtagaacaagatggttttggctagcactgtagagtgcagaccctgttggcactgcagtaggagtgcttgagaaggatcaccaattttgcccggtttatatttctaccaaatctcaatccgggtcctgccgaactactttacttgtaaactttggctggtgttgcctataatgatgtgtgatcctcgttactctccagcctgttcctacttgctgattgcaatgtgttttgcttgcgcttctctctcttttatctgtcttttgtgtatgtcttctttgcaatctgtctacattgacttattggtcaactatg

SEQ ID NO: 133904 - DNA, 1348 bp, Zea Mays
attcgcgtttggggagctggcgagaccgtgagggcgaggctgcgcctgcgcgcgagcgagcggtggccgaggggctgtgcggcggcgggcagccggctggggcactcgcgtaggtgcatgtagtactcgcgcagcggctcaggcacgcacggggcttgctttggcggtgctgctgctaggcgctcgacgccggcggctcgtcacctcggcggtgcgctggtgctggcgtgctgctgctaggcgctagcaggggcgcgagggtgctgtgttgctgctcggcgccttagagattgaagtgactcagttgctcctttgttgtcgacagattaattcagcacggtgccccctactaacttgctatcagatccaagtcgctgcagaagggagcaaacaaagggagatgaagctcagagtcgtgtgcaggaagctgtatgactatgtgcggtatgacctcaaggagatagccttcccgtcgtcactgccggaccctcctcacatcaagaagcggcccaagctctcatggcatgaacgctggtgcatcctcaaggaggccacccggctgtacggcgcgtcatgggtccgggacatcggccctgagctgaggcccaacgactacaagaaggcagccgaggacgtggaggagcagtcgtccaatggcagccaccccagctctggtagtgacaggaaggggaaggcgagcagcgagccaactgtgctggaggacctcgctgtcgccgctaggggtggcgcagagacgctgaagcctgccctgcggcggatttacatggcccgcgcgtccacgtacaccgacgcgatgaagaatttcgtggagacgtaccaggaggggctcaaggaccagctgcaggagaaggctcatggcggagaaggtggtggtggtggtggtcgttatcatcatcaggagcagaaggaacatggcaatgaggatgaggcatcaaagccacctccgccatgacatcatggttgtgttctgccagtgatggcatcaagtagtacttatttcagttcatccacccaaagtagaacaagatggttttggctagcactgtagagtgcagaccctgttggcactgcagtaggagtgcttgagaaggatcaccaattttgcccggtttatatttctaccaaatctcaatccgggtcctgccgaactactttacttgtaaactttggctggtgttgcctataatgatgtgtgatcctcgttactctccagcctgttcctacttgctgattgcaatgtgttttgcttgcgcttctctctcttttatctgtcttttgtgtatgtcttctttgcaatctgtctacattgacttattggtcaactatg

SEQ ID NO: 133905 - DNA, 1508 bp, Zea Mays
gtcaccatcaagcctcagctccccggcctcccactatctccgcgtcgccgtcccagtcactgtcccacgcgcccagcaccatccatccgtccgcaagggggaaagcacgctagctgagctgagctgctgagagagagagaggcaaaccctagcacgcacaagcacagcgacgtatacgcttccttccccccgccgattcatccatccatcgcagcgcgcaccgggcggggcgggccgggacgacgacagctaagctagcacatcgcaatagcatagcatctatctccgccgcagtacccaccaccaccaccaccaccatgatcttcccccctgccttcctgcaggattcctcgagctggaacgataaccagcaccagcagcagcagcaccaccaccagcagcaaggccacggccacctgcagattgccgtcagcggcagcggcgacgccaatcatgagctcctccagcaaccaatcatggggggagcgcttcccgatggaggaggaggaggtggtggcggggggcaggttgggggccccgccaagcccatgtccatggcggagcgcgcgcgcctcgcgaggatcccgctgccggagccggggctcaagtgcccgcgctgcgactcaaccaacaccaagttctgctacttcaacaactactccctcacccagccgcgccacttctgccgggcctgccgccgctactggacgcgcggcggcgcgctccgcaacgtgccggtcggcggcggataccgccgccacgccaagcgcgccaagcccaagcagcagcagcagcagcacgcggccgccgggaccggggctgccaccggcgcgatgcagcagcctcccgctgggtccatggcgtcgtcggccgccgcgtgcaccgcgaccacgacgatgacgaccaacgcgctccacgccgggcccggcggcggcatgctgcccatgctgccgccgctgctgcgcctagccgacttcgacgcaatgagcctcggctccagcttctccggcatatcgtccatggggaagcccggctccatcggcgcggcctgctacccgcactcggtcggcgggctggagcagtggagggtgcagcagatgcagagcttcccgttcttgcatgcgatggaccagggcccgctggggccacctctggccatggcgatggcggcgccaggagggatgttccagctaggtctagacaccaccagtgataacagccgtggcggtggcggcggcggagaagacgggtcgtctgccggagaggcgctccatatgatgcaagccaccaagagggagagctaccccgcggcaccaagagccatgtacggcgaccaacaacacaatcacctggctgctgctggtggctacacttcctattccaccaatgctgctgcaggtaaccatctcttgtaatggccggccgatcgatcgatcgagagctcaacaattcaagtgtcctgctatagctagctactacgacgtcgtgctacgatcgtatcggttcgt

SEQ ID NO: 133906 - DNA, 2287 bp, Zea Mays
cgatcacggccatcaagtgcgcaaaccgcgtggtctgctcggctgctcctcgtcttcttccgcttcgtttcggtttctcctcgaaaagtccaaaccaaaccccaacagaaggagcaccggcagaagaagcagcagcaggactgcgcccggcccgcccgacgccatgtccatccgcaaggcactgggcgcggtgaaggaccatgcgacgatcggcatcgcgcgggtgacgggcgccgtggcgcccgacctggacgtggccatcgtgcgcgccacctcccacgacgacgcgcccccggacgagcgccacgcgcgggaggtgctccgcctcgcgtccgccacgggcgccgcccccgcctgcatcgcctcactcgctcgccgcctctcccggacccgcgactacgtcgtcgccgccaagtgcctctcgctgctgcagcgcctcgcctccgccgagggcgacgtggagggcggagccggcacgcggccgttcctccacgagctgctccgccccgccgtctcgggccgccgcgcgggagagcccgtcctcgcgctgctcctcgacttccgcgacgacgcacacccggggtcctgggaccactccgccttcgtccgcgcctacgccacctacctcctcgaccgcgtccgcttcctcgtcctgctcctccccgcgccgccgcgcttttccgacggccgcgtcgcgccgggaccaccgcaggcgccggcggacgacatggacgcggaggcgctcctgggccgcgcgcgccacctgcggcacctgctcgaccgcctcctggcgtgccgccccgcgggcgccgccggtgccagccgcgtcgtgcgcgccgcgctccacccgatgctcagggacagcttccgcgtctacgaggacgtggcgctcctgctcgccctcctcctcgaccgcttcttcgacatggactactccgactgcgtcaaggccttcgagacctacgtcggcaccgccaagcagattgacgcgctccgggccttctatgcctggtgcgaggacgccggcatcgcgcgctcgtccgacttccctgacgtcaagcgcgtcgacgacaagttgctcgagacgatggagcagttcctgagggagcgcggcagggcggggcgcgcctgggcatcaccgccggcgccatcacgactcgcacaccagcctgatgcgaacgcgcaaggcgacgacggccatgtcgacggcatgaacagcatcaaggtgctcccggcgccgtcaacgcgctccatcggcgctgagcctgccacacccagaccggcggaagaggccagtcagtccgacctggtggacctaagagaaactgctgctaccgcggacgaggagggcaacaagctggcgctcgcgctcttctctgcgccgccggccacgaacggcagctgggtcacgttcccatcgggaccggacgccgccccagagccagcggtgacctcggcgtggcacacgcccgccgcggagcccaggaatgcggattgggagctggcgctggtggagacggcgagtaacctctccaagcaggcggcttcgctgggtggcgggatggacacgctgctcctgggcgggatgtacgaccacggcgccgtgaggcggcaggtggccgcgccggggagcgcgagcagcatggcgctgctgcccgggcatcaggtggctccggtgctgatgctcctgggccccgacggcagcacagcgcgtcaggtggccgggggcgacccgtttgcggcgtcgctggcggtgccgccgccgtcgtacgtgcagatggcggagatggagcggaagcagcagctgctggtgcaggagcagcagatgtgggcgcagtaccggcatggtggcatgcaggggcagcccgccgggttcaacaacggcctcgccggcggcagcgtgttcgcgccgaacgccgccatggccgtgccctatggggggtatgggtactattaacgatgcgactgcgagccttgctaattttccgcgatgaatgatgaagtctttgtcagcaaaccagtatcagcagaggtaactgaagtgttgggccaggaagataaggctgaaagtgtccatgggctgaaaaggagcgacagatctgggccagagtggatggcgtgaggcaaatgctgcagcagaagatggccgtaatagtgtcgcttgagctttaagctagtgggctttgtgctggcatgtaataagtagtggaaaggagttggagaaaggcatcaaagattgtaactgaattctgtttcctaagattctctcggctgctgccgttcttcc

SEQ ID NO: 133907 - DNA, 756 bp, Zea Mays
ccaaatccagacaccaacgctcgtgcgggagagagagagagagccgaggtcagagtgcatctaccaacgccggccccgtccgcgcctggagctcgggagttcacgacgggttagcgtacttcgtgaggttgctggtgaagcgcttgtggccgattggggaggaataaaccactgtgtcgaccagaattcgtcgtcggtcgccggattccgccacgcactgtgggtgggtctgggcgcccttcggatctcggtgagcatctcccgtagtgataccccacaattaccgctgtttggtactgctttcggataagagtttaggcatgaggatcggagattcgggagttccggccatggcgccgccgtggttcactgggttgcgccgttggcgtgttcccagggggaagaaagggtctgggccgtccatctgttgatcgacggctagattagaattaggcgtacccctttcccggcgtgtgatccatgccatcgattcatccgcgggcggctacgatttcatcgcgccatcatcgattctggatcattggatcgggatccagtgaccccgatttcatatcgattcacgccgctctaatcctggtcgttcgtacttgatcagacgaccgagatctattaataccgttttgtgtaggtaattttgcgtaagagttcctcggaaatcatagattcaacacgcggtacgttgcagaggtaaactgagtcttaggatttttcatgtaataacccttgcacttcgca

SEQ ID NO: 133908 - DNA, 410 bp, Zea Mays
agttcttcgcggcggtgcggtacccgaagaaggaaacagtcgaagggccgtggcttcttgcgcgaccgctggtggtggcgcgaggcggacggtggcttgcagcgacggcacagcatatggtttctcccgcataatctctccctctctcctcgatgacgcgtttttcggtggagcgcggatgaccaattcctatgtctcaggttggacagcagggcacttcgtaaagcagaggggagatgaagaggagcgaggacgagctccaacaacccggtcgaagcgcgcaagtggttacgggagcgggatctacgacgaggagatcggcaggaggcgttcttcggtcagcgcagtccgatcctcgcggggaagaaggtttgtcaggcgagggggcccacatgtcagtctcttaaagc

SEQ ID NO: 133909 - DNA, 772 bp, Zea Mays
gataaaaaggcgtaaaagccatcgccactctttccccatcccacgctgccctcggcgctgcgcctggccccggcacctacctcccccctccccacctcgccgccggcgggtggagtcgggctggagcagccgctctcctctgttaccccctaaccccctataaagaaaaagaaaaaaacagagagagagcgagcgaccggcggctcggcagccatggggcacggcgtcagctgcgcccgcaccggtgacgagcacgactacttccgcgcggcgcaggtcggggacctcgaggccctggaagcgctcctcgacgctgacccctcccttgcccgccgcgccacgctctacgaccgcctctccgcgctccacatcgccgccgcgaatggccgcctcgaggtgctgtcaatggtcttggatcacggggtgccgccggacgtggtgaatcggcacaagcagacgccgctgatgctcgcggcgatgcacggcaagaccgactgcgtgctgaagctcctgcaggccggcgccaatatcctcatgttcgactcccagcacgggcggacctgcctgcaccacgcgtcctacttcggccacgtcggctgcctgcaggccatcctcacggcggcgcggaccacgccggtggccaactcatggtgagcgtgataccttcacttcactttcgggccctacctacctcgcgtgccctgccgtccgtcccctcgcccccccggcgacgactcactcgctgctgtgcaagcctggcaggggtttcgct

SEQ ID NO: 133910 - DNA, 2587 bp, Zea Mays
gataaaaaggcgtaaaagccatcgccactctttccccatcccacgctgccctcggcgctgcgcctggccccggcacctacctcccccctccccacctcgccgccggcgggtggagtcgggctggagcagccgctctcctctgttaccccctaaccccctataaagaaaaagaaaaaaacagagagagagcgagcgaccggcggctcggcagccatggggcacggcgtcagctgcgcccgcaccggtgacgagcacgactacttccgcgcggcgcaggtcggggacctcgaggccctggaagcgctcctcgacgctgacccctcccttgcccgccgcgccacgctctacgaccgcctctccgcgctccacatcgccgccgcgaatggccgcctcgaggtgctgtcaatggtcttggatcacggggtgccgccggacgtggtgaagctcctgcaggccggcgccaatatcctcatgttcgactcccagcacgggcggacctgcctgcaccacgcgtcctacttcggccacgtcggctgcctgcaggccatcctcacggcggcgcggaccacgccggtggccaactcatggggtttcgctcggttcgtcaacgtgagagacgaccacggcgccacgccgctccacctcgccgccaggcagggccgccccggctgcgtgcaggcgctgctggagaacggtgccatcgtctccgctttgaccggctcatacgggtttcctggtagcacgtcgctgcacctcgccgctcgcagcgggagcctggattgcacccggaagctgctcgcctggggagcggatcgtctccggagggattcagcagggaggatcccttacgccgtggcgctgaagcgcaaccacgaggcgtgcgcggcgctgctgaacccgtcggcggcggagcccatggtgtggccgtccccgttcaagttcatcagcgagctggagccggaggccaaggcgctccttgaagcggcgctgacggaagccaacagggagagggaggagaagatcctcaggggcaccaagcactctccgcatcctcccacctgggaccacgcgagcgacgccgccgacgccgacgccatcgacgacgcgtcctcagatgccagcgccagcgacgcggagctgtgctgcatctgcttcgaccaggcgtgcacgatggaggtgcaggactgcgggcaccagatgtgcgcgccgtgcacgctcgcgctgtgctgccacagcaagcccgacccggtgacgctagcgctgccgtcgccagcctgcccgttctgccgcggcagcatctcgcggctgctgctggtggcccgggcaagcagcgacgacgcagacaccgagaagtcggcggcagcggctgcggcagcggctgcctcctccccgcagctcgtccggcggcggtcccggcggtcgcacaacctcagcgacggcggcagcagcagcttcaaggggctgtcgtccgccgtggccggttccttctccaagatcgggcgcgggtcgagccggacgatggccgacagcgacggctgcggcgtggacaagcccgagcacgacccgtgatcggcattggatcctgcgcatgtggagccgagcgcggggccatttgcggacatccaatcgaatccaagccaagcgtgactgcttgctgcgaaaataaccgcatccttttcttcttcttctccccatgtccctgtctgtcaatcctattcttgggcgtgccaggatttgttcacctggccattgccgtattccattgtcaccgaccggctatagtatatagtactagattccatttccattccttcgtgcccacgcagctgtggtatggttccaatggttgagccgagtttgagtcacagacatgtaaaacaccatcggtggtgtgtgtgtgtaaaagctgtcggcctggagagagctgtggtgaactgtggctccgttcatggcatcgcagtatcgcacagtcgtgaactgtatgtggctgccagtgacggcgacggagctggcttgctgtaacgatggcctgccacggccacgggatgtgacctcttgccacggcgtgtgatgtttgttgcaacgatgcactgcactggcactggcactgcagcgcaatggatgatggattcaagtcaggttcggcctggccgacctgtcgcctgctgccactgccatggcgtccgtccccaacccttgcgctccatacccataggcagggctcgggagatagcgggcacagtggtcctcctcgtccctggtccggtggtgaatctgtcgctcttgctctggggctctgcgccgctgccgcctgccgtgcccggaggaaggccctgcaacgtgcaccgcgggggcgctctagctgctgcggcctcaccgtctccggttcacaggcaggactccgtgacctccctgccggcctggaggggccacggccgtccggctgtgctgtggtgccacctgccgaggagcggcggtcgtcacactctgccagagaggcgctcagagcagtgattactctgtctgcagcaggtccggtaaaacaaaggatatgtacggtaaaacaactcgatttgaagtttgaaaa

SEQ ID NO: 133911 - DNA, 2650 bp, Zea Mays
gataaaaaggcgtaaaagccatcgccactctttccccatcccacgctgccctcggcgctgcgcctggccccggcacctacctcccccctccccacctcgccgccggcgggtggagtcgggctggagcagccgctctcctctgttaccccctaaccccctataaagaaaaagaaaaaaacagagagagagcgagcgaccggcggctcggcagccatggggcacggcgtcagctgcgcccgcaccggtgacgagcacgactacttccgcgcggcgcaggtcggggacctcgaggccctggaagcgctcctcgacgctgacccctcccttgcccgccgcgccacgctctacgaccgcctctccgcgctccacatcgccgccgcgaatggccgcctcgaggtgctgtcaatggtcttggatcacggggtgccgccggacgtggtgaatcggcacaagcagacgccgctgatgctcgcggcgatgcacggcaagaccgactgcgtgctgaagctcctgcaggccggcgccaatatcctcatgttcgactcccagcacgggcggacctgcctgcaccacgcgtcctacttcggccacgtcggctgcctgcaggccatcctcacggcggcgcggaccacgccggtggccaactcatggggtttcgctcggttcgtcaacgtgagagacgaccacggcgccacgccgctccacctcgccgccaggcagggccgccccggctgcgtgcaggcgctgctggagaacggtgccatcgtctccgctttgaccggctcatacgggtttcctggtagcacgtcgctgcacctcgccgctcgcagcgggagcctggattgcacccggaagctgctcgcctggggagcggatcgtctccggagggattcagcagggaggatcccttacgccgtggcgctgaagcgcaaccacgaggcgtgcgcggcgctgctgaacccgtcggcggcggagcccatggtgtggccgtccccgttcaagttcatcagcgagctggagccggaggccaaggcgctccttgaagcggcgctgacggaagccaacagggagagggaggagaagatcctcaggggcaccaagcactctccgcatcctcccacctgggaccacgcgagcgacgccgccgacgccgacgccatcgacgacgcgtcctcagatgccagcgccagcgacgcggagctgtgctgcatctgcttcgaccaggcgtgcacgatggaggtgcaggactgcgggcaccagatgtgcgcgccgtgcacgctcgcgctgtgctgccacagcaagcccgacccggtgacgctagcgctgccgtcgccagcctgcccgttctgccgcggcagcatctcgcggctgctgctggtggcccgggcaagcagcgacgacgcagacaccgagaagtcggcggcagcggctgcggcagcggctgcctcctccccgcagctcgtccggcggcggtcccggcggtcgcacaacctcagcgacggcggcagcagcagcttcaaggggctgtcgtccgccgtggccggttccttctccaagatcgggcgcgggtcgagccggacgatggccgacagcgacggctgcggcgtggacaagcccgagcacgacccgtgatcggcattggatcctgcgcatgtggagccgagcgcggggccatttgcggacatccaatcgaatccaagccaagcgtgactgcttgctgcgaaaataaccgcatccttttcttcttcttctccccatgtccctgtctgtcaatcctattcttgggcgtgccaggatttgttcacctggccattgccgtattccattgtcaccgaccggctatagtatatagtactagattccatttccattccttcgtgcccacgcagctgtggtatggttccaatggttgagccgagtttgagtcacagacatgtaaaacaccatcggtggtgtgtgtgtgtaaaagctgtcggcctggagagagctgtggtgaactgtggctccgttcatggcatcgcagtatcgcacagtcgtgaactgtatgtggctgccagtgacggcgacggagctggcttgctgtaacgatggcctgccacggccacgggatgtgacctcttgccacggcgtgtgatgtttgttgcaacgatgcactgcactggcactggcactgcagcgcaatggatgatggattcaagtcaggttcggcctggccgacctgtcgcctgctgccactgccatggcgtccgtccccaacccttgcgctccatacccataggcagggctcgggagatagcgggcacagtggtcctcctcgtccctggtccggtggtgaatctgtcgctcttgctctggggctctgcgccgctgccgcctgccgtgcccggaggaaggccctgcaacgtgcaccgcgggggcgctctagctgctgcggcctcaccgtctccggttcacaggcaggactccgtgacctccctgccggcctggaggggccacggccgtccggctgtgctgtggtgccacctgccgaggagcggcggtcgtcacactctgccagagaggcgctcagagcagtgattactctgtctgcagcaggtccggtaaaacaaaggatatgtacggtaaaacaactcgatttgaagtttgaaaa

SEQ ID NO: 133912 - DNA, 2716 bp, Zea Mays
gataaaaaggcgtaaaagccatcgccactctttccccatcccacgctgccctcggcgctgcgcctggccccggcacctacctcccccctccccacctcgccgccggcgggtggagtcgggctggagcagccgctctcctctgttaccccctaaccccctataaagaaaaagaaaaaaacagagagagagcgagcgaccggcggctcggcagccatggggcacggcgtcagctgcgcccgcaccggtgacgagcacgactacttccgcgcggcgcaggtcggggacctcgaggccctggaagcgctcctcgacgctgacccctcccttgcccgccgcgccacgctctacgaccgcctctccgcgctccacatcgccgccgcgaatggccgcctcgaggtgctgtcaatggtcttggatcacggggtgccgccggacgtggtgaatcggcacaagcagacgccgctgatgctcgcggcgatgcacggcaagaccgactgcgtgctgaagctcctgcaggccggcgccaatatcctcatgttcgactcccagcacgggcggacctgcctgcaccacgcgtcctacttcggccacgtcggctgcctgcaggccatcctcacggcggcgcggaccacgccggtggccaactcatggggtttcgctcggttcgtcaacgtgagagacgaccacggcgccacgccgctccacctcgccgccaggcagggccgccccggctgcgtgcaggcgctgctggagaacggtgccatcgtctccgctttgaccggctcatacgggtacggtagtaaagtctcctgctcctcttggctgcagctgctcacctgtactgtacgccgctgcaggtttcctggtagcacgtcgctgcacctcgccgctcgcagcgggagcctggattgcacccggaagctgctcgcctggggagcggatcgtctccggagggattcagcagggaggatcccttacgccgtggcgctgaagcgcaaccacgaggcgtgcgcggcgctgctgaacccgtcggcggcggagcccatggtgtggccgtccccgttcaagttcatcagcgagctggagccggaggccaaggcgctccttgaagcggcgctgacggaagccaacagggagagggaggagaagatcctcaggggcaccaagcactctccgcatcctcccacctgggaccacgcgagcgacgccgccgacgccgacgccatcgacgacgcgtcctcagatgccagcgccagcgacgcggagctgtgctgcatctgcttcgaccaggcgtgcacgatggaggtgcaggactgcgggcaccagatgtgcgcgccgtgcacgctcgcgctgtgctgccacagcaagcccgacccggtgacgctagcgctgccgtcgccagcctgcccgttctgccgcggcagcatctcgcggctgctgctggtggcccgggcaagcagcgacgacgcagacaccgagaagtcggcggcagcggctgcggcagcggctgcctcctccccgcagctcgtccggcggcggtcccggcggtcgcacaacctcagcgacggcggcagcagcagcttcaaggggctgtcgtccgccgtggccggttccttctccaagatcgggcgcgggtcgagccggacgatggccgacagcgacggctgcggcgtggacaagcccgagcacgacccgtgatcggcattggatcctgcgcatgtggagccgagcgcggggccatttgcggacatccaatcgaatccaagccaagcgtgactgcttgctgcgaaaataaccgcatccttttcttcttcttctccccatgtccctgtctgtcaatcctattcttgggcgtgccaggatttgttcacctggccattgccgtattccattgtcaccgaccggctatagtatatagtactagattccatttccattccttcgtgcccacgcagctgtggtatggttccaatggttgagccgagtttgagtcacagacatgtaaaacaccatcggtggtgtgtgtgtgtaaaagctgtcggcctggagagagctgtggtgaactgtggctccgttcatggcatcgcagtatcgcacagtcgtgaactgtatgtggctgccagtgacggcgacggagctggcttgctgtaacgatggcctgccacggccacgggatgtgacctcttgccacggcgtgtgatgtttgttgcaacgatgcactgcactggcactggcactgcagcgcaatggatgatggattcaagtcaggttcggcctggccgacctgtcgcctgctgccactgccatggcgtccgtccccaacccttgcgctccatacccataggcagggctcgggagatagcgggcacagtggtcctcctcgtccctggtccggtggtgaatctgtcgctcttgctctggggctctgcgccgctgccgcctgccgtgcccggaggaaggccctgcaacgtgcaccgcgggggcgctctagctgctgcggcctcaccgtctccggttcacaggcaggactccgtgacctccctgccggcctggaggggccacggccgtccggctgtgctgtggtgccacctgccgaggagcggcggtcgtcacactctgccagagaggcgctcagagcagtgattactctgtctgcagcaggtccggtaaaacaaaggatatgtacggtaaaacaactcgatttgaagtttgaaaa

SEQ ID NO: 133913 - DNA, 2816 bp, Zea Mays
gataaaaaggcgtaaaagccatcgccactctttccccatcccacgctgccctcggcgctgcgcctggccccggcacctacctcccccctccccacctcgccgccggcgggtggagtcgggctggagcagccgctctcctctgttaccccctaaccccctataaagaaaaagaaaaaaacagagagagagcgagcgaccggcggctcggcagccatggggcacggcgtcagctgcgcccgcaccggtgacgagcacgactacttccgcgcggcgcaggtcggggacctcgaggccctggaagcgctcctcgacgctgacccctcccttgcccgccgcgccacgctctacgaccgcctctccgcgctccacatcgccgccgcgaatggccgcctcgaggtccctccgccgccgccgcctctcttcagctgcgctcctcatcctcgggacctgagccagccgaccacctcgctcacctccctccgtctccttcctgcaggtgctgtcaatggtcttggatcacggggtgccgccggacgtggtgaatcggcacaagcagacgccgctgatgctcgcggcgatgcacggcaagaccgactgcgtgctgaagctcctgcaggccggcgccaatatcctcatgttcgactcccagcacgggcggacctgcctgcaccacgcgtcctacttcggccacgtcggctgcctgcaggccatcctcacggcggcgcggaccacgccggtggccaactcatggggtttcgctcggttcgtcaacgtgagagacgaccacggcgccacgccgctccacctcgccgccaggcagggccgccccggctgcgtgcaggcgctgctggagaacggtgccatcgtctccgctttgaccggctcatacgggtacggtagtaaagtctcctgctcctcttggctgcagctgctcacctgtactgtacgccgctgcaggtttcctggtagcacgtcgctgcacctcgccgctcgcagcgggagcctggattgcacccggaagctgctcgcctggggagcggatcgtctccggagggattcagcagggaggatcccttacgccgtggcgctgaagcgcaaccacgaggcgtgcgcggcgctgctgaacccgtcggcggcggagcccatggtgtggccgtccccgttcaagttcatcagcgagctggagccggaggccaaggcgctccttgaagcggcgctgacggaagccaacagggagagggaggagaagatcctcaggggcaccaagcactctccgcatcctcccacctgggaccacgcgagcgacgccgccgacgccgacgccatcgacgacgcgtcctcagatgccagcgccagcgacgcggagctgtgctgcatctgcttcgaccaggcgtgcacgatggaggtgcaggactgcgggcaccagatgtgcgcgccgtgcacgctcgcgctgtgctgccacagcaagcccgacccggtgacgctagcgctgccgtcgccagcctgcccgttctgccgcggcagcatctcgcggctgctgctggtggcccgggcaagcagcgacgacgcagacaccgagaagtcggcggcagcggctgcggcagcggctgcctcctccccgcagctcgtccggcggcggtcccggcggtcgcacaacctcagcgacggcggcagcagcagcttcaaggggctgtcgtccgccgtggccggttccttctccaagatcgggcgcgggtcgagccggacgatggccgacagcgacggctgcggcgtggacaagcccgagcacgacccgtgatcggcattggatcctgcgcatgtggagccgagcgcggggccatttgcggacatccaatcgaatccaagccaagcgtgactgcttgctgcgaaaataaccgcatccttttcttcttcttctccccatgtccctgtctgtcaatcctattcttgggcgtgccaggatttgttcacctggccattgccgtattccattgtcaccgaccggctatagtatatagtactagattccatttccattccttcgtgcccacgcagctgtggtatggttccaatggttgagccgagtttgagtcacagacatgtaaaacaccatcggtggtgtgtgtgtgtaaaagctgtcggcctggagagagctgtggtgaactgtggctccgttcatggcatcgcagtatcgcacagtcgtgaactgtatgtggctgccagtgacggcgacggagctggcttgctgtaacgatggcctgccacggccacgggatgtgacctcttgccacggcgtgtgatgtttgttgcaacgatgcactgcactggcactggcactgcagcgcaatggatgatggattcaagtcaggttcggcctggccgacctgtcgcctgctgccactgccatggcgtccgtccccaacccttgcgctccatacccataggcagggctcgggagatagcgggcacagtggtcctcctcgtccctggtccggtggtgaatctgtcgctcttgctctggggctctgcgccgctgccgcctgccgtgcccggaggaaggccctgcaacgtgcaccgcgggggcgctctagctgctgcggcctcaccgtctccggttcacaggcaggactccgtgacctccctgccggcctggaggggccacggccgtccggctgtgctgtggtgccacctgccgaggagcggcggtcgtcacactctgccagagaggcgctcagagcagtgattactctgtctgcagcaggtccggtaaaacaaaggatatgtacggtaaaacaactcgatttgaagtttgaaaa

SEQ ID NO: 133914 - DNA, 435 bp, Zea Mays
atggcgggtgcagttgacaggatcttatttactggacgccgctattatatttatacgcctcgtcgtcgtcctcctcctctcgactctcgtgcgccatcgccgggccgggccagctcagttgcagctgcagcaggagcagccgcagctggtgccgcacttgcaggtgttgcagtcgcagccgccgccctcggtggccgcctcgaagccgccggcgctggccttggtggtcggcgcggcgaggaccgtggtcttgacgctgctggtggcggcggtctccacgtcagggagcagctggagccgcacccgcacttgccgccgcagcaagacgacatgatcacaggcgaagggaggaggtgtggttcttgcttgtgctgctgccttgttgcttttgcttgtgatgagaggatggcagggtggggagaggggtataaatag

SEQ ID NO: 133915 - DNA, 582 bp, Zea Mays
atgacgacgtcgatcttgggcgacctgaaggaccccgagaagccgctgcggggcatcctcgacctactttcctggcagtggcaggtcagctgtgtctgtgtgacagtgcctgagaacgagggtggaattggatcgcctgggctctctcacctcggagaagataaagaagtggagattgggcggtggccgtggctgcagggacacgaaatcggctgcaatccccacgggctacggcctattcaccccttgtttgccactgctgcgaggggccacaggtcatcgtctcctctcgtgtggcgcgtgcgactctccttggcgttggagtgctgtgctgtactgctgttggatcatcaggccagagcccaggggccagggatacgatacgaacgagggatcgtgttgcatgtggttccaggtgatgtgctcagtgggcccgaggtttatacgagtaggcagaatgtccctacatccattcttcggtggctcgcgctaccgacacatatgttgctcaatgctcaaagtaggggttacaagcgggcgagcaagggaagaagagctcctaaatctcttatgcgcggctag

SEQ ID NO: 133916 - DNA, 1435 bp, Zea Mays
atgccgcctcgtagggctcagggtagtccgcaagctcctagtggggactcgatgagtccggcggcaatgttagccgcaatgcaggccatgcagcaggagttggcccttctgaggcaagccattcctgtcgcccctgcgggtgctgctcagggtgctggaggtggagaagtgcccgggggcgctgtccctgcgggtgctgttccaggtggcggggccgaggtgccccttccagtcagtggtctttctctgatgcagtggatgggcatgaagttggattcttttgatggcagtggtactccagtcgaggcggcagattggttgacttatgtggaggataagatgaatgtcttcgagattgcatatggagatcgggttcgctttggcactcagctgctgaagggagaggcgcaaatttggtggagaggcgtgcaggcagcgcactcctcctcaccaggagtcctatcatggggtgttttcatcaggcagttcgaaaggagattctacccggtcgcctttctggagaagatgaagattgacttgcagtcctacaagcaggagaagaagtcggtcacagagtatgaggtgggcttcaacaagatggtccgctttgtccctcatgtggcttataatgagatggagaaggcgagccagttccgtcagggtttgaagccttctatcaggcatgcactgggggccctttccgttggtggacttccggaccacggtggagcaggcgctgggtgtggaaatgcaacaccagtataccatggagtcgcaaaagtcttcgggtgttgatcagcctcgtagccaggacacgaggaggggcaacactggaggtccagctcacaagaggggcaagtctcagcatcagcgccaccatccttaccgtggcaaatcttctgactcgggtacttcgggaggaagtactcagaggtttcgggccgttcctaagcccgggctggggctggtgtgtttccgctgtggagatgtgcatcgccgtgcagagtgccagtggagtggcaggtgttcgatctgcagtcaggaccacaagtgttggggccatgcttcgttgcgccgaaggtcttgcgcgaagaagcagcttcggttgaaatcgtccccaggaaatggccgaaggttcctttttatagagcttcggcgttacgaaccgacataaagatagaatgacctttttatccatagaggtctaagataatgttgtaaacttttgtaaagggcataattgtaattcgtcacaggctgcgtcctgtgtctataaatagatgaacagtacccccgtactgttcacgcgaacctgtcatttgccttcgcatcacacttgtattcttcaagaccgaaggtacatttgtaatttgaagtcatttacattcgtttataataataaaaatggagatggttctatgataacatttaaata

SEQ ID NO: 133917 - DNA, 1206 bp, Zea Mays
ccccccctgcccattttgttctctctccattgtcgcagccaccaaaccctagcccccccctcaatcccctcctctcaaggtgccaatccttgccgctcggatcatcgtcacgtggtgcgagtcttcaatcgttttggtggagggaagaagggaggaaggaaagggggagaatccaaggtggtggactcctagatcgttcttagggatttgcccaaacttctggtgaaggcaagtaaaactgtgatggttattccgtctgtcagatgaggagtcttatacttgtttatgttgtgctattatgttcaaattcatagtttcttttgagtaccatcatttgaaaatgttcatgtttcatgaatttcatatgttgagtttgaggtttgattatgttactcaagtggttattatgtggaatgggtggaagtaaatgcctagcacatttttatttggaaagaactcatgatgttgccatgcataatgcactcatcatccattgcattgaagtttcgtcgcgatcttatggtccgaccgtaccggtacattgagcatcatatgttgcccgagaaggggtatggtgcagcttcatatccttagagatatggaggcagaagtcattcttgcatttgtagccatatgcattcatgggagaggtgttgaatctattatgtggatgtggataatttgggcttgtgcatggtgattctacttggcgttgagcttttagttacttgtttacttgctgcaatttactgttcaaaagaaaagaaagaagtcctgaacacgtggttgtgtaagcacagttgatttgcaatgtcctatttgttgttgttatgtttacttgctgagatgtgttatctcacatcttgcattgtttgatgcaggcacctaatttctgctttgggaatagagggatgtagcagcacggccactacacctttaataaaggaaccaccatttaataatgttgttaatcagagttggacaagtctagtgaattgctttgttcttggttgagcgtttattttggggtgggctgagtcttatcccatttgttttgcttcagttgggtcataattaagttttgccactattgcatttcagtttctactatgtgaattatatgtctttatatcttgtatgagcttcatgattctcctccttgttatgctagttttcaaaggaggtgctgccggattttgctatata

SEQ ID NO: 133918 - DNA, 579 bp, Zea Mays
atgagcaacgccaaaaccgccagatttgggcctgcggccaactgggaaggataccggcgccagccgaactacacggaggcaatgaaggagggcatggactgcaggcccgtgtcgggacactacgctgacggtgacggcagatcttggagctggcatcagacttacgaaagcggagctgggggaggcctgcccaagcctgtcgttgtggccatccgtgcgctccgcagcttcgtcggcgtgggcgccgtggccgcttgcaaggtcgccgccgaggacgcagtcgactgcctcagtgaagggggtgtttcgaggcatcaacctgggcgttcgtcaaagaacgcggtgattggaggcgccttggcaggtgcagctgtctcagtagcagacggctactacaacaggagccatggcggcaatgctggcacgccgcaggtgatcaaggctgcagtcgccggtggcgccatcggagcagccttggagctcatcagccaccgcaggcacgtcgatcggttgagaaccgatggccagacaatggaactgacacatgaaccaaatccgctcacaagcggtcgtaaataa

SEQ ID NO: 133919 - DNA, 150 bp, Zea Mays
gaatttttcatggcattacaggcaacctaatttctacagcagaacatgaaacacgacatcaggagtttgccatacaagtaattgctaccgaacaaccataaggcagcttgtaaggtcttctaaccttatacattagtaaataaatatttg

SEQ ID NO: 133920 - DNA, 931 bp, Zea Mays
atggcggtgaccacttaagcgtggtggcttctgagttttgcctcgatttcgattctttctttttcccccacgtgcgccgccgcgaccttcctcgatcccatctcccaacgcccccgcctcgcctcgggatcccgccgccgctccatctgcctttgctcccccacccgcaggcagcgagcgacagcgacggcgagggatggccaaggccaggtcgttggcgaagcagaagcaggcgcagcaatcaaacggcggcggcggccacgcgctgtcctccaagctcgcccggtacctcgacccggaggcctccttggacaaggaccaactgctggacgcggtgcactggatccgccaggcggtggggctcatatgcggcctgctctggggagccgtccccctcgtcggcgccgtctggatcgcactgtcagttcctacctccccctaaccctccgtccctcccatcttctcgtcctccctcggccttgccttgtagatctgtagctcccccttcgcgcgcataagcgagatcgagctctttcttatacggtgtacatatacatgcgtaccctttgtaatttgttacaagatagataccagatcgagtttacggctgctcagggacgttgcgtcatggcgtggtcactgttaaattgatagcgcttgtgcgattggaatccatgagactggccggtttctcaattttgttggttggctaagggagtcagggagacagggacaatttcacaactgctacgagcggtcagatctgttgttagacccttgtgtttacttgtgagtttggggtctgatactccgattagctagttagtggtctgattagctgcacactagctgaattttccagttactacctctgtaaaacagtgcatttactttgccttttcttttgtcaacacccaaaatcctaattcct

SEQ ID NO: 133921 - DNA, 1184 bp, Zea Mays
atggcggtgaccacttaagcgtggtggcttctgagttttgcctcgatttcgattctttctttttcccccacgtgcgccgccgcgaccttcctcgatcccatctcccaacgcccccgcctcgcctcgggatcccgccgccgctccatctgcctttgctcccccacccgcaggcagcgagcgacagcgacggcgagggatggccaaggccaggtcgttggcgaagcagaagcaggcgcagcaatcaaacggcggcggcggccacgcgctgtcctccaagctcgcccggtacctcgacccggaggcctccttggacaaggaccaactgctggacgcggtgcactggatccgccaggcggtggggctcatatgcggcctgctctggggagccgtccccctcgtcggcgccgtctggatcgcactatttatggccatctcgactggcattatctattggtactacacctacttgctgaaggttgacgaggaggaatatggaggccatggggcgcttcttcaggagggtcttttcgcttcattcacccttttcctgctttcgtggactctagtatacagtctggctcacttctgagaagctcctttggcgcacatacctttgttcactgtgccagacagaaaagactcaccaggacagtgtagactaaggagcattttagaacgagcgttgtatcaaaacggttctgagctgtaatgttatttcccaacccccagtgtaatcttggtgctatgggattagttcggtgctaagcagaacaaaaatgttgcatactacgcgtttttcagtcaaacgacatcctcttgcattaggaactgaattccatcctcttgcattaggatctgaattccatggacaacttttaacgcacggaagacctatttggttcgctgcctaacttttctgtctaaggtttgtttgtttggtgtctaaggcaccacaacgtgcctaacttttctgtctaagcttagttcttcaattcgagcgactaagcttagataatctcttcaattcgagcgactaagcttagacaatctgtggcaccttaggtagaaaaccaaacagatgtggtacagttagctacaaactaaataggcccgaattgttctaggatttgttacaaggcgattttgagcaaaggcaaactgtaatgcagctttattttatcaga

SEQ ID NO: 133922 - DNA, 1080 bp, Zea Mays
atggcggtgaccacttaagcgtggtggcttctgagttttgcctcgatttcgattctttctttttcccccacgtgcgccgccgcgaccttcctcgatcccatctcccaacgcccccgcctcgcctcgggatcccgccgccgctccatctgcctttgctcccccacccgcaggcagcgagcgacagcgacggcgagggatggccaaggccaggtcgttggcgaagcagaagcaggcgcagcaatcaaacggcggcggcggccacgcgctgtcctccaagctcgcccggtacctcgacccggaggcctccttggacaagatttatggccatctcgactggcattatctattggtactacacctacttgctgaaggttgacgaggaggaatatggaggccatggggcgcttcttcaggagggtcttttcgcttcattcacccttttcctgctttcgtggactctagtatacagtctggctcacttctgagaagctcctttggcgcacatacctttgttcactgtgccagacagaaaagactcaccaggacagtgtagactaaggagcattttagaacgagcgttgtatcaaaacggttctgagctgtaatgttatttcccaacccccagtgtaatcttggtgctatgggattagttcggtgctaagcagaacaaaaatgttgcatactacgcgtttttcagtcaaacgacatcctcttgcattaggaactgaattccatcctcttgcattaggatctgaattccatggacaacttttaacgcacggaagacctatttggttcgctgcctaacttttctgtctaaggtttgtttgtttggtgtctaaggcaccacaacgtgcctaacttttctgtctaagcttagttcttcaattcgagcgactaagcttagataatctcttcaattcgagcgactaagcttagacaatctgtggcaccttaggtagaaaaccaaacagatgtggtacagttagctacaaactaaataggcccgaattgttctaggatttgttacaaggcgattttgagcaaaggcaaactgtaatgcagctttattttatcaga

SEQ ID NO: 133923 - DNA, 1063 bp, Zea Mays
atcttctcgtcctccctcggccttgccttgtagatctgtagctcccccttcgcgcgcataagcgagatcgagctctttcttatacggtgtacatatacatgcgtaccctttgtaatttgttacaagatagataccagatcgagtttacggctgctcagggacgttgcgtcatggcgtggtcactgttaaattgatagcgcttgtgcgattggaatccatgagactggccggtttctcaattttgttggttggctaagggagtcagggagacagggacaatttcacaactgctacgagcgatttatggccatctcgactggcattatctattggtactacacctacttgctgaaggttgacgaggaggaatatggaggccatggggcgcttcttcaggagggtcttttcgcttcattcacccttttcctgctttcgtggactctagtatacagtctggctcacttctgagaagctcctttggcgcacatacctttgttcactgtgccagacagaaaagactcaccaggacagtgtagactaaggagcattttagaacgagcgttgtatcaaaacggttctgagctgtaatgttatttcccaacccccagtgtaatcttggtgctatgggattagttcggtgctaagcagaacaaaaatgttgcatactacgcgtttttcagtcaaacgacatcctcttgcattaggaactgaattccatcctcttgcattaggatctgaattccatggacaacttttaacgcacggaagacctatttggttcgctgcctaacttttctgtctaaggtttgtttgtttggtgtctaaggcaccacaacgtgcctaacttttctgtctaagcttagttcttcaattcgagcgactaagcttagataatctcttcaattcgagcgactaagcttagacaatctgtggcaccttaggtagaaaaccaaacagatgtggtacagttagctacaaactaaataggcccgaattgttctaggatttgttacaaggcgattttgagcaaaggcaaactgtaatgcagctttattttatcaga

SEQ ID NO: 133924 - DNA, 2387 bp, Zea Mays
aagatggacctaatttttgttatctttgcagaaaatccattcaaatacaaactagttttcctctcagagacaagctgaacacttctgttctactgaagagataataatccttccagtgaccagtgtggtcaatattcgatgccgattgagccttcctttgatgatctgtacaccattacagcgcctggacagcggcaagatggctcttctttctcttctcagcagcaactcacactgtatgaccacagactctgtgatccccagttgttccacaaaccaaccaatgaatcaaacatgcaattttccggtgtagtcaccattcctggaatgcacaatgtgagtaccaacctcggacaaaaccacctgcagattaccacaggggttagtccagactaccaaaggatcagatcaaacaatgctcttcaccacataagccagatcctgatggaggatgtggatgagagggtcggctcacatgaaggtggggccgcccttcaggatgccgagaaggccttctacgatattcttcagcaggtatacccaccttcactcgactggtcaccgctacataacagcagcgaagcaggaggaccaaatgagggtagcagcaattatcacaaaaggcctcgcagaagcagtttcactaatgacatttccagtcacagcatgttgcagtccttgccagccccattgagtccatatggctatggcaggagccttttacttccatatcagtctctggcaaacactgggagggcctcaagatttggttcccctgccttgcaaactagaagagaagctgaggatgcaaagtggttcgataagatggtgatcaatttggatgacgacaagcttttcatttccatactgaccactgctaaagcaaaaagaatagtcgggaagagcaaatatgcaatctttcagatcacaggccacaggaacaatccatatatccaggacttggataccagggaagggagaagtaaaaagcataccatcagctgcgaaataagccgcaacgagaagttggacaccgttctgctatgctatggtctggactgtttcattgaaacagcaaggctgagagacatggctgtaaaggaagtaagtaaggatgcaccgaagggtcaaagcaaagcaaatgctcaacagaagtctcagggtggtactaggcagctcaagaaagaggtggtcgatctcaggaccctcctcatccactgtgcacaggctgtggcagctgatgaccgtctgttggccagtgagctcatcaagaagataagacagcactcctcaagagatggagagtggtgccagagacaggcattttactttgtgaatggccttgaggcacgcctgactggcacagggagccagttgttccacaagatgctggcgaagcgagtaagcgaagacgtcgtgttgaagatctacaacttttatcttgcagtctgccctttccacagggcatcatacacctttgctaaccaaactattatggaaacctcggtggggcaatccagggtgcacatcgttgattttggtgtctgctatggttttcaatggccatcgctgatccagcttttcggtgagcaaggagtgactccaaggcttcggattacaggtatagaagtgcctcggccaggtttcagccccttggagaacatcgagcgggcagggaaactgttggctgactatgcaaacatgtacaaggtgccctttcagtatcagggcatttactcacggtacgaagatattcagatcgaagatctcaacatcgaggaggatgaagtgcttataatcaactgcatgtaccggatgaagaacctcggcgatgagacagtagccatggatagcgcaagggatagggtactgaagataatgaggaggatgaacccgaaggtgtctattttcggcattctgaatggatcatacagttcccccttcttcgtgacacgtttcaaagagcttctgttccattactcctcgctgttcgacatgcttaataccaatgtttcacgggataatgaagcgagaaagctgttagagggtgggctccttgggcgggacatcttaaacataatagcatgtgagggtgctgacaggactgagaggccagaaacttaccagcagtggcaagcaaggtgcctcaaggctgggttcgagcagcttcctctcgatcctgccatcatgaagtcagtattatggatgaagaaagaaatttaccatgaggactttgttgctgatgaagacaacggctggctgctacaagggtggaaagggagagtactgtatgcactgtccaaatggaaggttaattaatcatatatatgctgatcggtaatactcaaacaattggtggtatgcaccatgtgcaccttggctctctc

SEQ ID NO: 133925 - DNA, 1248 bp, Zea Mays
gcgcgcagcggacgccgcgaaaccctcgctccctgcccgcacccgcaacagcctcccgcacccagccagccccttccccagcagcagtctccagccgcagccatggccaagccaccgccgcccacctccacctccgaccccgcgctccccaccactgctacaaccacctcgtcggcccccaagtcgtcgtctcgccctaggccccgcccccggggcctcctcgatgcgctcgcagcctccgcgcgctccctcctcgcctcggcgcgtcgctccccggtcaccacgctagccgccgccttcttcctcctcgcgctcgtcatgtacggtgaggacgcccgcaccatcgtcgagctctccatcgacgactacctctacccggacgccgacctctacaacgtctccggcctgccgcccctcgcgctgcccccgctcacctgcgacctctctcgcagcaaatgggtcttcgacaacgtctccgttccggcgtaccgggagaaagactgcaccttcctcaccaagcaggtctcctgcctccccaacggccgccccgacgacatgcggcagtactggagatggcagcccaacgagtgctccctccccacgtacgtcttccttctcctccagatcgcatcttccatgctcagttggccagttgtgtgattcgattgattgacaagaaggtcacggtcgtggtgtcgccgacgccgtcgtcgtggcgggcggaagagctcggggcggctagcaagctgagcccgcaggccaagcggaaggtggtgaccaggctggcgtccctgctgccgctcgcaagctgatcaacatcgaaccaagaggagggactctctccgtccggctccaaaaagttttcccttttcccctccagaagatttctatttcccccgcgttcgtcgatccgtccgagggccggctccaggtgttttagcggttttccggcgcctcggagcagagagtgaaaaaagagagagagagaaacgcctccctttttccgtcgaatttttttcctttgttttgttcctgcgaaagaacaaaattttcagttgtccgcggccgggggaacgggaggaatctgggcagatttgggttccctgtcctctgttcttgggagggagggagagaaactgtgaatcatcactactgctatgatctataaaagcggttgagtactgtatcgtgttcatcaggtcatgtgaggcctgtgacttcaattgaaagtaccataattactctgca

SEQ ID NO: 133926 - DNA, 1647 bp, Zea Mays
tgaaagacggcaggtaaattccatggggatgccactttctgactttatgtgctctgctgcttcattgccaagccaggacagacaacggccgggacagtgatgctgctgccctgccaagcaagcagccagcacaagtatcctgctgcaacataggaaaggataggactagcatggatacatacagctacagaagaagcaaaaaaaaaaaaaaaaacaatcccccacctacaatgaaaacccttttatggtctccttgcaatcgacctgttctacaaatcctccaattcctccttcgccttccccttccccttcctctttttcttctaagtagcaggcaggagtaggagcagcagtatggtaaacacaatacaagacgaatgaattatgaaacaaaagcaacaagattcgcttcttgcagcgtgctgtactagagacagggaggcaggcagcaggagttggttcgtccgtcaactctgcaccgtggcgtcggcatgcccgtcctcgagcctccagctggtgctccggctcctggagccatggctgaacgcgtcgttgttgagctcaggcacggcgtgggagcgcgaggaggacgaggcgtggccgcgcccgaagcaggcgaagacgttgcggaggaagcggcggacggtgcccctgttcgtggacgcggcctgcctggacccccacgagacccgcctgggcgcgcggccgctgttgaacccggcgccgtccatctccgtgtacacgacggggagctcccgctcctcgggcgtccgcccgccggcgaatctaccgaccgcgaacccaccgccggggagcctccagatggtgagcccgaccgtggcctcctcctcctgctcaagggggatggcgtcggtgggcatctggtggcggcagacggggcaggagttgcggagcgcgagccatgggaggatgcagtcggcgtggtagatgtgggcgcagggcatttccctggcctcggcgcccaggtggaaggcctccttgcagacggcgcagtgcgcgtcggcggcggcgacggagacaacgggcatggcctggacggcggccttggacgccggcggcggggcgtcgcgggcgccggccgccagcccgccggcggcctcgatctgcgccagctggtccagcaggcgctggaagcccgagcccatgaggaagtcggacatggtctccgggagcgggcggaggcccgaccccgcgccgtcgtcgtacaggagctcgaagctggcggcggcgggcggggagcgacggagcacgatgacggggttgaagggcgaggccgcgcgggagtcggcggcgtggtgcgcgcgggggcggcggaggtaggccggtcgtggcggcggcgcgctcatctcctcgaggaagccgccgccgcaggaggggcaggcgggggaggagagcggggaggcggcgcgcacgaagcggtcgcactggtagcaccagtaggaggaggaggccgttggaaggcgtgtgggggaaggggaggaaggcatcgccatcggaaggcgggctcagatctgggatactttcagctccaggcggcggcggcggaggcggaggaagggttggtggtgggaggcgagacgaaggggccttgtattctcctccccgcccgctctgattgattgctcg

SEQ ID NO: 133927 - DNA, 112 bp, Zea Mays
ccgtaggtaaatttcttaaatttcgaatcgaatcaaaccgtgtcaccagtactgtcgacccattttatatcactaaaaatcttgattccaaaatatcagcgattctctttat

SEQ ID NO: 133928 - DNA, 3686 bp, Zea Mays
cactcttcccccactcccccagcacgccactgctcacacagaccaccccccactcggaggcggagtggagctcctccaatccgtcccgaatccggacgccgctcgcaccgcccgcaccgcccgcagatggacgcccgccccccgatccgcccgctctgaccagacgaacccggtccccgcccccgccgccgccgctggagcgcggtaatggcgggcttctagcgcgtcggacttaaagatctagcctttctattttgtttcctctctgcctcttttctttcgctggcaccgatggtcaccgagatggcggcgcgcggcggcgaggcggcggcgttcggcgcggaggccgaccgcggcgacttcgaggtcttccgcagcggctccgcgccgcccaccgtcgagggcgccctgggcgccgccgcggccgctgccgacctgctcgtggatgacgacctccgcgccgacccggcgtaccagagctactactactccaatgcgcacctcaacccccgcctcccgccgccgctcctgtccaaggaggactggcgctcctcgcaccaccgcctccgctccgcggccttcggcgggatcggggacggcaggaggcagcagcagccggctgcccaagggacggtcggcctgcccgggatcgatcttgcccgccagaggagcttctccaccgtctttcaggaggattcgtatcagcgtgatatggataggcagactgccagccacaatagtagtgaatcattatgttcttctggaatacagtatggtctaaatcgtggacctggaactattggaggcctgcactctagcaatagtttacgaagcttggatgaaattccgaacaatgatctgccatcaaatacatttgcttctcttttagggtcatctctttctaggagtgcatctccagatcctgagcttgtgaggagggcccctagtccatcccttcctccaatcggtgtgaaagttggcaacactgataagatgaatggtggttcctcttctttccgtcgtagttcatccgcaatcggtggatctgatgatctggtggctgccttatctgggatgaacttatcatctagggcaatgagtgggcaaactatggaccagtctcagctctatcaggatgttgataacgtccagaagtttctttttgatcgacagggtgaccaaccaaatggcaatcagcagcactacatgaggcgtcctgagcatggacaatctaagttatctgatggatattctgccaatttggccaattcatccacgatgagaaaccagattaattctggcagtttcacatcttttgacagtttgtctcttggatctggctttccttcccctaggattggttctagatcccctggagggactgtatcttctcgacaaaatttagctggtatgtctaacatgctaaactataatggaattggaagtccaactgcgtcaccttctcttcagacttctattgatccagcgtatatccagtaccttgctcaaattgcagctacctgggatgatcctctaatggacaggagccatctgggaagttcttacatggacttacttggtacacagaaagctaaccttggccctttacttcagtcacaaaagcaatatggttactgtggcaatcttggatttaaccttggtggttatgctggaagtccattgacaagtcctgttcttccctcttcacctattgcaccaggcagtccacttaggcatggtgaccgcaacatgcgctttccaccaggcatgagaaacttcggtaattcctttggttcatggaattcaggcatgagtggaaagatggatgctaatttgatgccctctctcctggaggaattcaagagcaacaaaagtaaatcatatgagctctccgaaatagctggccatgttgttgagtttagtgctgatcaatatggaagccggttcatacaacagaagctagaaacagccagtactgaagaaaaggacatggttttttcagaaattatgcctcaagctctcacattaatgactgatgtatttggaaattatgttgtccaaaagttttttgagcatggaagcactgcccagataaaggaattggctggtcagcttattggacgtgtccttgctcttagtcttcagatgtatgggtgccgggttatacagaaggctatagaagttgttgatttggatctgcagactaaaatggttgcggagctggagggtcatgtcatgcgctgtgtacgtgatcaaaatgggaaccatgttatacagaaatgcatagagtgcattcctcagcatgctatcgagttcattgtctcgacattctatggccaagttgtaatgttatccactcatccatatggttgccgagttattcagagggttctagagcattgtgatgatcctaagacacagcaaataatgatggatgagattctccagtctgtttgcttgctagctcaggaccagtatggcaactatgtggttcagtactgctgcctgttccatgtcgccatgtgctgtgctgccgtgtggaacaggaagcaacaagagaggtgtgagtactgctgcctgtcccatgtcgccatgtgctgtgctgccgtgtggaacaggaagcaacaagagaggtgtgagcatgttctggaacatggcaagccccatgagagatcagccattattgagaagctaattggccaagttgtgcaaatgagccagcaaaagtttgcctctaatgtcattgagaagtgcttagcctttggaaatcctgtagaacgtcaggttctgatcggtgagatgcttggatccactagcgaaagcgaacctcttgaggtaatgatgaaagaccagttcgcaaactatgtggtgcagaaggtgctagaaacttgtgacgatcagcagagggagatgatcttaacaaggataaagacacacttgaacacactcaagaagtacacatacgggaagcacatagtagcgcgtgtagagaagcttgttgctgctggagagaagcgccttgggcttcaaccagcatgcaccgccgcctgaagggcaaactctctaagttgtacagctaacagttgctaggtttgcctcatgtttttttctctactaaaaaccttatatgaaggccccttttggcctcgccaggaaaaaaaataaatactgtatgtttgcggggaagagtgtacattaattctgtagcagaaagaccccctacccatgtggcggaatcaagggaggagtgatgcgtgtgagtccgatcgatctgaaggctgctgtaaagaggaagatggaaggggaaggagtgagaagcatgtcagttactctgctgctgtacaaattaaacttagctcttagagtgaggagaaagtaagctgttagctgtctgcctaaaggaaagaaaggaaaaaaaaaagaagctggaggccattggcaccctgtttcatgtgttggtatagctgctgtggctctcctgttgtctgtctggcctttgttgtaacataaagctgaggcgcactagcctgccttcgttttcacagttaagctgaagttattagtatcagctttcctgaactgcttggtatgtaatgtgactctgtttcttccttgtactaatgcttgtctcatgtaatccaggcccctaatgtctgaatgttttaatctcatttttcacctctgat

SEQ ID NO: 133929 - DNA, 570 bp, Zea Mays
ctctagctggctgaacgggtctacaaatatacactactactccactaatgtcacatatccacaaccaggtgatctcaagtaattaacagaaaatatattccatcattgaaaatgagttccgttgttttgggtgctactggtagggagaataagacatcatggcctgaggtggtgggcatgtccatcaaggaggcaagagagatcattcttaaagacatgcccaacgctaacattcaagttctaccggttggctcgcttgtgacccaagactttcgccctgatcgtgttcgcatcttcgttgatattgttgcccagactccaacagttggctgacaaggatatgccttatctataggccaaataaacaaagcctacttttatgtatcatggctaataaatcctacatttcttggttatccttgattggtttagcttattagctatatcgccatcaaaaggggccccaagaaattacatgtatgtctatcataaaaatctcatcccgatggaatatataataaataaataatgatatatgcaatcgtaactatgtcaaaatagcacaaaaga

SEQ ID NO: 133930 - DNA, 731 bp, Zea Mays
tcttcgtagatagggcatttggcgcatatggaaggccatggctgcagcaagttaacgacgaaagacatgtcgacatgctgatcattgcactctctcctagctctctctgcccggccggatgggtccataaatacgcactagtacatactcagctagtagtctcacatagcatagccatcttcttcgtcgacaagcaggggagttaggtctcacatgcatgcttcatcacattgttgactgcataacgaaacacatcgtcgtcggatcggagatgatgagttccgtcgtcgtggatgctgctgctaccagcagcagcgagaagaagacgtcgtggccggaggtggtgggcatgtccatcaaggaggcgacggagactattctcaaggacatgcccaacgcgtacatccaggtgctgcctgttgggtcgcccgtgacgctggaccttcgccccgaccgcgtccgtatcttcgttgacaccgtcgccatgactccgacagttgggtgatacataccaaatgcaataaacaaaccctactttttattttatgtttccagttaataataaaccaggccttagcttcttggttgtccttccttggttggtgttagcttctaagctactagtacaccattaaaaaaaggaggacctcatgtatggctaccgtgaaaaatgtgatcttgatggaataatatatcataaataagcaattaatgatgatatgcaaccatct

SEQ ID NO: 133931 - DNA, 2184 bp, Zea Mays
atggccagcttctccttgaaaccacagcacaatggcagcagcagcaggatctaccatactatctgtagtgctactgcctccgaatggaggtcgctcctgcggtcccgaagcagtgtttcatggagctggaagaagcacacaaggttgcgattgcgatgctgtcagggttccaatgggggtgatgacagccgtctgagccaaaacaccggcattttccacccatcgatatggggggatttcttccttggttgctctagcagccctgaagaagctgctgcttcgtcccaacaaaaggcttggatggaacgatgcgatgaactgaaggaagaagtgggtcgtctgatggtagtagaagcaaactcaccattgcatgagaggctgcatttcatagacgcgctggagagcctgtgcttggaccacctgctgaaagaagagatcggtgctgcgctgacgcagatcgagaccgccggtgtcagtgacgactgcgacattgggaccgtctctctctggttttacttgctccggaaacaccgccgcagggcgtcgccagatgtgttcgtgaggttcagagacgcggagggaggtttccaggcgaacgatcctggggacctactgaggctctacaacgctgcgcatttcaggacccatggggagacaatactcgatgaagccatcgcgttcgcgagaagccgtctggagatgatgctgccctacgtgaaagggccattgttggcgcatgaagtcagatcctcgctggagatcccgctgcctagaagggtcaggatctacgagtcaaagtattacatccatgcgtatgagacaagtggaacgctgcatgagaaggtactgcaacttgccaagctgaactccaacgttctgcagctccatcatcagcaagagctgaagatccttacaagatggtgggaggatatgcagatcggatcaaaacttcctttcgcacgagatagaatcgtggagtgttttctatggatcttaggagtatactatgaaccgtgtcattcaagagcccggataatattgacaatggttatcgccatcgtgacactcttggacgatattttcgattctttcgcgaccccacaagaatgtgaaatactcactaattgcatcgaaagctgggatcccaaaggggctcaagacctcccaggttgcatgaaatttgctctagagaagatattggatagctaccagaccattacaaatatgctccaccgagaggacaagtatcgaatgacgtatctaagacactttgtaagataccttacatattttgttttctgtcaaagaaacatgttcaactaacagatatatatctctggtttttagtattgttggaagatcgtcatatatatacttttgctatcttttaattaatatacagacagaagatctagtgagaagcttcaacatggaggtaaaaatgcttcaaaaaggttacatcccagattctgttgaagagcatcttaaggtttcactcagaactggtgggtgtcccatcttatcatgtgcttgctttgtcgggatggatgatatagcaacaaaggatttctttgattggatttctagcgtacccaaaatggtgcgcgcactttctataattctgagactagcagacgatctccactcgtatgagcgggagcagctaatccctcatgtagcttccacaatcgacacctacatgaaaaagcacaatgtctcaattgaagtggcgcaggaaaacatacacaaactaaaagaagagtcatggaaagatttaaatagcgagtggctaaatccatgcaatgatgtgtatccaaagcaactattggagaggatattcaacttggcaaggacgatggagttcatgtacaaccaagaggacaatttcaccaactgccacaaccttaaggataccattcgctgcttgttggtagagccatataggatccacatttagtttttggcaacaaactaatgaattacagtgtccagttaatgtaatgcagagttatatgtcatccttatatgtgttagtatgttttctctagtgtatgtaatatggtgtcatctcatcctcatgtgtgtcaatcttcttttcatgtatagtgtcaatatgtacacatatatgtggcatcatttttgttttcaccctagagtttactcttgtcgtatcatttgcccttc

SEQ ID NO: 133932 - DNA, 700 bp, Zea Mays
agcctgtgtaatcctgatgagcgatgacacacacacatgctgccctgttggctgcagcagcagcagctctataaatacctcaccatcgcatactcgcttcacacaaagaagctccataattaattattgccctttcagttcgccatcggcagccgagcaccatgagctccacaggcggcggcgacgatggcgccaagaagtcttggccggaagtggtcgggctcagcctggaagaagccaagagggtgatcctgtgcgacaagcccgacgccgacatcgtcgtgctgcccgtcggcacgccggtgaccatggatttccgccccaaccgcgtccgcatcttcgtcgacaccgtcgcggaggcaccccacatcggctgaggtttaaatctacaaaatgaatgactcggacatgccatgcgtacctgtccgtcgccgaataatggatgtgtgtgtgcttcgatcgttcctataagttgctagtaaaaataatggcatcgtcgttatgcatgaataaaaagtatcagaataatgttcaccctttcacgattggatatatgaaaatgtgctcgatcagttgtttggtttccaacttcttttctataagatcgatgaactggaacgcaggctcaaataatgatggaatctgcacaatatagataggttaacgacttagagcatgtacatcttattaattaaatata

SEQ ID NO: 133933 - DNA, 694 bp, Zea Mays
agcctgtgtaatcctgatgagcgatgacacacacacatgctgccctgttggctgcagcagcagcagctctataaatacctcaccatcgcatactcgcttcacacaaagaagctccataattaattattgcccttcgccatcggcagccgagcaccatgagctccacaggcggcggcgacgatggcgccaagaagtcttggccggaagtggtcgggctcagcctggaagaagccaagagggtgatcctgtgcgacaagcccgacgccgacatcgtcgtgctgcccgtcggcacgccggtgaccatggatttccgccccaaccgcgtccgcatcttcgtcgacaccgtcgcggaggcaccccacatcggctgaggtttaaatctacaaaatgaatgactcggacatgccatgcgtacctgtccgtcgccgaataatggatgtgtgtgtgcttcgatcgttcctataagttgctagtaaaaataatggcatcgtcgttatgcatgaataaaaagtatcagaataatgttcaccctttcacgattggatatatgaaaatgtgctcgatcagttgtttggtttccaacttcttttctataagatcgatgaactggaacgcaggctcaaataatgatggaatctgcacaatatagataggttaacgacttagagcatgtacatcttattaattaaatata

SEQ ID NO: 133934 - DNA, 638 bp, Zea Mays
gcaataacatagtagtagctaccagtagtttgttagttttcgtttaacgccatcatcgattgatttgcagtttcagttcgccatcggcagccgagcaccatgagctccacaggcggcggcgacgatggcgccaagaagtcttggccggaagtggtcgggctcagcctggaagaagccaagagggtgatcctgtgcgacaagcccgacgccgacatcgtcgtgctgcccgtcggcacgccggtgaccatggatttccgccccaaccgcgtccgcatcttcgtcgacaccgtcgcggaggcaccccacatcggctgaggtttaaatctacaaaatgaatgactcggacatgccatgcgtacctgtccgtcgccgaataatggatgtgtgtgtgcttcgatcgttcctataagttgctagtaaaaataatggcatcgtcgttatgcatgaataaaaagtatcagaataatgttcaccctttcacgattggatatatgaaaatgtgctcgatcagttgtttggtttccaacttcttttctataagatcgatgaactggaacgcaggctcaaataatgatggaatctgcacaatatagataggttaacgacttagagcatgtacatcttattaattaaatata

SEQ ID NO: 133935 - DNA, 586 bp, Zea Mays
tcacacaaagaagctccataattaattattgccctttcagttcgccatcggcagccgagcaccatgagctccacaggcggcgacgatggcgccaagaagtcttggccggaagtggtcgggctcagcctggaagaagccaagagggtgatcctgtgcgacaagcccgacgccgacatcgtcgtgctgcccgtcggcacgccggtgaccatggatttccgccccaaccgcgttcgcatcttcgtcgacaccgtcgcggaggcaccccacatcggctgagaatcaaatctataaaatgaataactcggacatgtcatgcgtgcatgtccgtcgccgaataatggatgtgtgtgcttcgttccaataaattgctagtaaaaataatggcatcgtcggtatgcatgaataaaatgtatcagaatgttcatcctttcacgattggatatatgaaaatgtgctcagttgtttggtttccaacttgttttctataaggtcgatgaactggaacgcaggctcaaataatgatggaatctgcacaatatagataggttaacgacttagagcatgtacatcttattaattaaatata

SEQ ID NO: 133936 - DNA, 640 bp, Zea Mays
gcaataacatagtaggagctaccagtagtttgttagttttcgtttaacgccatcatcgattgatttgcagtttcagttcgccatcggcagccgagcaccatgagctccacaggcggcgacgatggcgccaagaagtcttggccggaagtggtcgggctcagcctggaagaagccaagagggtgatcctgtgcgacaagcccgacgccgacatcgtcgtgctgcccgtcggcacgccggtgaccatggatttccgccccaaccgcgttcgcatcttcgtcgacaccgtcgcggaggcaccccacatcggctgagaatcaaatctataaaatgaataactcggacatgtcatgcgtgcatgtccgtcgccgaataatggatgtgtgtgcttcgttccaataaattgctagtaaaaataatggcatcgtcggtatgcatgaataaaatgtatcagaatgttcatcctttcacgattggatatatgaaaatgtgctcagttgtttggtttccaacttgttttctataaggtcgatgaactggaacgcaggctcaaataatgatggaatctgcacaatatagataggttaacgacttagagcatgtacatcttattaattaaatatattttggtttgaggttaaa

SEQ ID NO: 133937 - DNA, 1010 bp, Zea Mays
cggagattttggttaagcgttctgtagtaaagtcaaagtccatatgaaggggaacatgtctcttgaagtgagtgggcctggtactgtacaaggtcgtgagtaaaattgctcccaaacttgccctgttagaattagtgtatgccgtttcagacctctgaaactgaattttcagtgtttttctttagactttggagctagttgatggttgatccaaggggtaaaagcttaagggttctgtggaggaatcgtagagggttgtttggtggacaagttttatttaacttgctctccctgttattacgagaaattgagaagttgaagggggttaacagggaggtacgcaacaagacaatagagctgatgaggctgattcagaattgggttcagattctgttcaagtaactgaagaagatctgtcttccttgttgtgtttatatttgagtgaaggggtagagataaggattaaatgcacagcttagaagtttggggctcactctgtactgaagaatatccagttttggactgtttgaaggcagtgaacagggagactttatctgttagccttggatggattgagctgggcagcaaagtaactctagtggctaccccattagaaatatcaagtcttggacatctttgtgcttagccacaagtggtgttctcagccacacgcctgcctgtctgtgttcactgaataaggttgatattttgggctgttagagcatatccacaagggatatttgtgtgctagctgtccagattcagtgtctacattgtgcctgtcagtttgtgagtatttgatgcatgaaagccacgtattggagcccaggttgtgctggcatctctgggaactcttcacctccatgcactgcacaggtttagtgacatctgtccttcatctgtggctataaaacttggtccagggaagttttcctccctatcctcaagctccagccaggttgcagcgtgtgtgagggtggtaaatcttctgtccacaccagtgttcacat

SEQ ID NO: 133938 - DNA, 273 bp, Zea Mays
atgtcggatctgaatgatggagctgcgacaaggcgaagggcggagagcttacatggctccctcgagtcaagaggagataggatttttggtttgtcaaccataccatcgttgttcaatgctctgattaaaatgtgcctagcgattgaaaccttcgatacattggagctcggagctgctgctctcatgcaaaggctcctgagcgcgagcgatcaacaagccgacgtgctgtcgctgctcgctggggggaaagaagatcacacaggtgtaaaataa

SEQ ID NO: 133939 - DNA, 135 bp, Zea Mays
atggcgggcgaggacgttacgaggatgctggcggtctgcgtgagagacttccagcgatgcaataatgcacaagataagagcaaggctggcaagatttcagagggagccgacatcttatctaggataagggtttaa

SEQ ID NO: 133940 - DNA, 678 bp, Zea Mays
ctattctgtcatcgtcgccgactcgactctctcgttcgtcctcccaaatcccaatctccctcgagcgggcgggccaggcagcagaccagctctccagcgtgctgggtgcagggctgcaccgctacaagccgtgcagcacactgcacatcccctcaggcagttgtccctgtccagagcacaggcaagatggttaacgcgatcaaggggctgttcatctcctgcgacgtacctatggcacagttcatcgtcaacctgaacgcgtcgatgccgccgtcggagaggttcatcgtgcacatgctcgaccctaccaacatgttcgtgcagcctcacgtggcgcacatgatcaggagcaagatcggggagttcagggaccagaacagctacgagaagccgcagtagtggaggatctaccgcgtcctacactccttccttgggacttgctttcgttgcctgtattatttctgctgtgagctgagcacctcagcggaaacgagtacgccaaatagatcccacctgtggccttgaaatcatactgctatgtgctataaacgtgcagagggcactgctactgtgctgcacttgtggtattctgggattctttttgtcaggtccttaaaatccgttgagaatttgagatccagatggggcttagaccccgtttcaatctcacggaataaa

SEQ ID NO: 133941 - DNA, 748 bp, Zea Mays
gaacatgggtttggtgggcgggcgaagaagccagcgggcccagcatctttatcgtctgccgcaaagagggctgaaggagaagcgaggaaaggtgaggccgatagatagaggagctgcggcgccgccggcgagcgaagagtggaggatccgatccgaagcgagaggactgaatcctgcggccgggagggacgcgggaccacgacgagcgtcgtcgtcggtgccaagcaacgttgtccctgtccagagcacaggcaagatggttaacgcgatcaaggggctgttcatctcctgcgacgtacctatggcacagttcatcgtcaacctgaacgcgtcgatgccgccgtcggagaggttcatcgtgcacatgctcgaccctaccaacatgttcgtgcagcctcacgtggcgcacatgatcaggagcaagatcggggagttcagggaccagaacagctacgagaagccgcagtagtggaggatctaccgcgtcctacactccttccttgggacttgctttcgttgcctgtattatttctgctgtgagctgagcacctcagcggaaacgagtacgccaaatagatcccacctgtggccttgaaatcatactgctatgtgctataaacgtgcagagggcactgctactgtgctgcacttgtggtattctgggattctttttgtcaggtccttaaaatccgttgagaatttgagatccagatggggcttagaccccgtttcaatctcacggaataaa

SEQ ID NO: 133942 - DNA, 712 bp, Zea Mays
gaacatgggtttggtgggcgggcgaagaagccagcgggcccagcatctttatcgtctgccgcaaagagggctgaaggagaagcgaggaaaggtgaggccgatagatagaggagctgcggcgccgccggcgagcgaagagtggaggatccgatccgaagcgagaggactgaatcctgcggccgggagggacgcgggaccacgacgagcgtcgtcgtcggtgccaagcaacggcagttgtccctgtccagagcacagcgacgtacctatggcacagttcatcgtcaacctgaacgcgtcgatgccgccgtcggagaggttcatcgtgcacatgctcgaccctaccaacatgttcgtgcagcctcacgtggcgcacatgatcaggagcaagatcggggagttcagggaccagaacagctacgagaagccgcagtagtggaggatctaccgcgtcctacactccttccttgggacttgctttcgttgcctgtattatttctgctgtgagctgagcacctcagcggaaacgagtacgccaaatagatcccacctgtggccttgaaatcatactgctatgtgctataaacgtgcagagggcactgctactgtgctgcacttgtggtattctgggattctttttgtcaggtccttaaaatccgttgagaatttgagatccagatggggcttagaccccgtttcaatctcacggaataaa

SEQ ID NO: 133943 - DNA, 816 bp, Zea Mays
gaacatgggtttggtgggcgggcgaagaagccagcgggcccagcatctttatcgtctgccgcaaagagggctgaaggagaagcgaggaaaggtgaggccgatagatagaggagctgcggcgccgccggcgagcgaagagtggaggatccgatccgaagcgagaggactgaatcctgcggccgggagggacgcgggaccacgacgagcgtcgtcgtcggtgccaagcaacggcagttgtccctgtccagagcacaggcaagatggttaacgcgatcaaggggctgttcatctcctgcgacgtacctatggcacagttcatcgtcaacctgaacgcgtcgatgccgccgtcggagaggttcatcgtgcacatgctcgaccctaccaacatgttcgtgcagcctcacgtggcgcacatgatcaggagcaagatcggggagttcagggaccagaacagctacgagaagccgcagtagtggaggatctaccgcgtcctacactccttccttgggacttgctttcgttgcctgtattatttctgctgtgagctgagcacctcagcggaaacgagtacgccaaatagatcccacctgtggccttgaaatcatactgctatgtgctataaacgtgcagagggcactgctactgtgctgcacttgtggtattctgggattctttttgtcaggtccttaaaatccgttgagaatttgagatccagatggggcttagaccccgtttcaatctcacggaataaactttagcttcctgctaaactttagctatatgaattgaagtgctaaagtttagtttcaattacca

SEQ ID NO: 133944 - DNA, 1011 bp, Zea Mays
gatcatctttaacctctgccgttgagctctcgtggccatcgatctctttcccctgcgcgcgaagctcaatcccttcctccgcgtcgcccctgcgtactcgtctctggcgctgttcagctcaaaaaaatctctcagccgctcatccctatctgttcagccagcacaagattttcctgtgtcagtcgttctcatcctctccgcagccactgtacctgactgcgtgatatttttgccgccgccctgttcattttatatgcgcgcagctcgccggccgtacgctcgccggagcccttcccctgctcggcctctgaggtttcccagtagcggcgcctagcatcttctccgcgcgcagcttgcttcctccctctgccgctcgtctccatctctccatctcccagcagaccgcgcccagctccagccatgagcgccgacgtcctctctctgtgcttgatctcccagtcctccgctccctgaaaccttcacccacatgtttgtgaaggtccggtagtggagatcttgcgaggtccactgctctgcgctcctattccacctgtctcatcccctcatcatgctcgacacttgctccctggcagcatgccgtagcagcatctgtgcttggtccatgctccactgtgccgtgctgtttctctgcacgcgtcaagctcacgcgctgaatccagccccatgttgacgcgttcatgttccagcttgtcgtgccgcgtcgtcatcactttctgtcgcgagctcgattcccgttgtcatcgggctttgtgcgtgctcgcgtttgccgtcgagtcgttgaacccgtcatcccctgctcaaccctaccccgccagctcgctccagatacaatctcattatcgtcccgcgcgtcatcaagaatcccaagaatcggatgaagacgaagctagcagcgcgatattccccaagcgctcgacaattgcctggatcggaaaatcactaccgatctcgcggattcgagtcggctattgaaacggtaagctaataaat

SEQ ID NO: 133945 - DNA, 1361 bp, Zea Mays
gatcatctttaacctctgccgttgagctctcgtggccatcgatctctttcccctgcgcgcgaagctcaatcccttcctccgcgccgcccctgcgtactcgtctctggcgctgttcagctcaaaaaaatctctcagccgctcatccctatctgttcagccagcacaagattttcctgtgtcagtcgttctcatcctctccgcagccactgtacctgactgcgtgatatttttgccgccgccctgttcattttatatgcgtgcagctcgccggccgtacgctcgccggagcccttcccctgctcggcctctgaggtttcccagtagcggctcctagcatcttctccgcgcgcagcttgcttcctccctctgccgctcgtctccatctctccatctcccagcagaccgcgcccagctccagccatgagcgccgacgtcctctctctgtgcttgatctcccagtcctccgctccctgaaaccttcacccacatgtttgtgaaggtccggtagtggagatcttgcgaggtccactgctctgcgctcctattccacctgtctcatcccctcatcatgctcgacacttgctccctggcagcatgccgtagcagcatctgtgcttggtccatgctccactgtgccgtgctgtttctctgcacgcgtcaagctcacgcgctgaatccagccccatgttgacgcgttcatgttccaacttgtcgtgccgcgtcgtcatcactttctgtcacgagctcgattcccgttgtcatcgggctttgtgcgtgctcgcgtttgccgtcgagtcgttgaacccgtcatcccctgctcaaccctaccccgccagctcgctccagatacaatctcgttatcgtcccgcgcgtcatcaagaatcccaagaatcgggtgaagacgaagctagcagcgcgatattccccaagcgctcgacaattgcctggatcggaaaatcactaccgatctcgaggattcgagtcggctattgaaacggtacgttaattaatcgcgtgatgcggaagacgagccaagtcgaccccaagcgtgggcttcttcgcaaggcgatgctgatggacaaacctgaagatggtcgtcaagtgctcatcgactaacaacactaacctagtgttactcaggttctcacttgcttgatgcattaggtgataggagttgattgctaaaacaattcctgcattaccttccttgaatttgattaccttccttgatcccccgttttacaaaagattttgatgcttagccttgctttagaaaaacaaaatgttttgtttttacaaaagatgatgtggcaaaagtgggtgggagtttgaaataaaatttgatggtgatcatcaggctg

SEQ ID NO: 133946 - DNA, 901 bp, Zea Mays
attttgcataagtaacaggtttctgtcgctagttggtggtgttgatgtgaatcagcaagttcaatgtgtttgctgtttattacagaagtggataaggccgttagatgggctagaaaccactatctgtcatcaacagctcttccttctatcaagggagacaagttaatcattccccatgagagtctggatatatcaattgagaggctgaaggaacatggtataacaactaagaaatcctctcaaaatctgaagaaaattggggcttgccacatgagcatcagtcaaaggtgtttcatgttaagcatctagaagtattggctttatttgctctcccagcatgtgctatctgcttcttttgttctgatgttgtcctgcgctgaatattgttctaatattgcccagatttgcatattctaactttgctcatgtattttgagcacatgaacaaaaagagcagaacatgcgtattcatcctgttgaccctactgatcttcgcaggcttgccttaagttaatatgtcatcctgctgtctaatctgagcaaattctcagcagggagggcaggttgcaattcgttccactatcgggtacccaaacggccacagggtaaaggagccccgccgggcagcaccacacaggtgatagacactgcagtggccagcaagaatggagtcatggaacatcggcaggagggatgcagcagcggcaaccgatgtatcccttggacaatctggttttgacatgatgcaaatcaatctgttgtacattgtattttgcacttgcatagattgtttggctaattacaagattatctcagtgttttggtttggatttagagtacacttatgtatgaaatattgattggtattcatctatattatattaattatattattattaaa

SEQ ID NO: 133947 - DNA, 627 bp, Zea Mays
gaatcgggaggagagcaaggcatgcgacgtttttcctaccaattgtctctcgtcgtacgccatcgctgcatgaggatctggatgaggtaggcgaggtagaggaggccaaaacatgggccaaggcggtgatgctcctcatcatgtgcagcgatcaccacgcatctggcgaggccatcaaggatgtgctttcagtctttcacctaggagcttggcgatgactaccaggctgcgccaccaaacggccgttatgaaactatgtttcatcaagctgcacccatttcaactgcaggaccatatgttttatttcttgacatatgattgtgatgtcctaattattcgttgaattgtatttatttttgttattgacgcatgttacttgaggactacttcatttactgttttatttaaatgttttatcactatttatatctaaaatgtattttgaattgttattttgaaatctaacttgtaccttattttaagaccttcattctcatcggactcattttatatcatttcagaagcaagaaaaatgtaaggatgctgaacttagtgcaatagatttttttaaggacatgcattgcaacaaaaagaaaggttttagtgaaaatattgagaaagctattg

SEQ ID NO: 133948 - DNA, 591 bp, Zea Mays
aaccacagcagattgtaacgtataccatgtgcggaatgtctattgtctgttatataggtttgatgaaagaatagcttcatttgctgaacaaaagttcaagagggccggaagtgagatctagaaaaacgaaggaaatcaaatccacaaacaaacttttcaccaaggaaaatggaactacctgaaacagtaagacaaaagataactttaaaaaagatggcatttcatctcttagtgaggcagtgactgtggttcgtgtcagaattgaatgtcgcctcctaacagaagcgtttatgtatcataggagctactgctctaaggtgaaagagcaacactcagcaaaaatgacacatgctgaggatgcattaaaaaacgcttgggtttatcatgttgagatgattgtgaccgaattttgtgctatctgcattaaaaggaatttagttgataaaatgattgatctgccctgggattcggagaagaaacatcttcacaagtccctctttgactctgctcatgaaatgcccatgaaaccaaatggtagttgttggaacttgctctcagcagcaaagaagccaacaagagtgaacagtggtg

SEQ ID NO: 133949 - DNA, 127 bp, Zea Mays
gggcgccgacggcgaagggcggttgcaaagcgtagggttagtgtggaggaaggggctcggcttcgcgtgagtggggctggtcggcaggagctgttgtctttgccggccgccgcgggtacaggggagg

SEQ ID NO: 133950 - DNA, 1284 bp, Zea Mays
ctgcgtggtccaaatatccggcccaggcatgaatggtcggttacaccggccaatcctcccctcgagcctggacgcagcacgacctcagatcacggcgcgccggcgcgggacgacggcatgacgccgccgtcaatcttccaccacccttgacgacattgatgagttttttagaagtagggaatatgttcaggatgaaatggaggacagcaagagtccaaaggatttaccccacctgaacagtgagactgtgcgagccaagggcagccattacagcatttatgtgtttagattttacaatacaatagtataaaaacgaattgatgctcgttaaatagcacgtgatgcatctagtcagctcaattcctgttttggatgttgggtggttgatttgatcataactccttgtttcgaatgtggacctcatcattatttccctgacatcctgtctagaattgagatgccttcatttaagattcggaccacttaattggaagttatctggactgtaggaataaataggtgctgggaggaataatgaggtaaattacaatggtcccgtaacaatgataaaaggccattgagacctgaatatagagatgatcacatggtggggcttgtgcctgaattctttgacacagtacaacatctcatcagtcttgggaaaagctatatcatatagtctagatttcttagctcagtaaaaattgctcctagattcttatggaagaatggcatcagttgtgttgtgtcctctactctctattgtgtcatggtgtgcacccctctgactctgactaaataataatattgttgtatggtgtgcacccctctgacttcaggagaaacttatcctatattttatagatgtttgggtctgtgatatggtttcctttgtctacactgaatgttctaattatctatattgttcctttgtacagctcttggtgtagcttgccactctcaccaatcaagttttcatgtctgatctcgacattcagatcccaactgccttcgatcccttcgctgaggccaatgctagggactctggtgcggcagcagggtcaaaggactacgttcacgtgcgcatccagcagcgtaatggtcgcaagagcctgactaccgtccagggattgaagaaggagttcagctacagcaagatcctcaaagatctcaagaaagagttctgctgcaatggtacagtggtccaggacccagaacttggacaattataaccgccttggtggtgagcagcaagaggtgagatagtagagatgttttggaaat

SEQ ID NO: 133951 - DNA, 120 bp, Zea Mays
cgtgttgtcgcccgggaacgccgccgtggacacccctcacatcgaccggctcttccatgccttctccgtccaaattcgtgcgagcatcgtaacccgggtgagccactagtactttcctag

SEQ ID NO: 133952 - DNA, 1745 bp, Zea Mays
gagaccatccatgtgcatcggagttggatacgcccagacccaccacatagacattaagacataggcacgtacgtagaacctactcacacacatacacgcgtagaccattcctcatcatccggactgatggcgcagtggcgatgatggctccattgcgaactgctccttgagctgcttctggttgtctccgcctgctgcgctcggctgctgctgctgcttctcttcgtcgtcttgatgctcctggtggaggtggtccttgctcttgccccagaggacgctgtagagccctccgacgaggaggccgctgccgaggaggctgcccaggcgcacgatctcgccgaggaagaaggaggagcagaagatggtgagcagcaggcccagcgggttggacatggccaggaacacgggcccgcgcttctcgatgcaccacgcctgcagtgcttagctagctactcacggagtaggcgacggcgaggaggccgacgtcgagctgcagcttccaggcggcggggtcccgctcgacggcgacggcgaggaggaaggactgggcggtgctgagcgcgcactgcaccagcgtggacagcagcttgttggggtactccttgagcagcgacgcctgcagcacgatccagagggaccacgtcgtgttggacagcagcatcaggaacgtgcccttgatccacgtccccttgccgccgccgccgccatcggcatggggatgggggtgctgctggtgcgccgcgaaggcgcggtggtggttcaccgggctcatcgacggcccagtgtacagcgcgatggtcaggaccccggccaggcacagcgccacgcccgccgccttcgccatgcctgacgggcttctcagccgaaccacttccagcctgcatgcataatatatatgtgaatgaacataatagtgacataggtgtgctagctaatgatgagttcctttttctgctttatgtatataccttaacaggactgccaggaagaaggtgaccacagggacagagttgctcgttgccgatgccactgttgcagaggtgtacttgaggcttatgttgtacagattcatgctcaatgtgttgctacaaaaagttcaaaaggagacaccacatacatacatgtcatatatgtatacaatatggtgttaaccatcagtagttgtattcagtaacaggaagctgctgataccactgattggatggatgtaatgtcagttacatacccaagcaatgcatagaagaacagcttcaaaaacagcctgaatgacatgggtggtgcattcttcctgcgatcgaatcaatcacagatatatcgatatcagcaatttcaccaagctattatatattcatcacatggggaaaaaagcaatttgcagttttaattatgcagagtagactgctgctgcttatccttagtcaagttgagtcggctgttgagctgttatacctttcaagcacaatggctatggggagcaacagcgcagtggcggccgcctggcggtagaagatgaacacgtaggtgctcatgccatggtcgaatgccgccttggagacgacgtacatgccggtgtagatgagctgtatgacgacggcaaccccgtaggctttcttgctggtggtgtccatggccagcaggcctcagctctctcctacacttgtgcagggaacgagtgcccgagatggttttatgcctgtctaagtgtctatctagctagctagctgatgcagctacctgctggctac

SEQ ID NO: 133953 - DNA, 1279 bp, Zea Mays
attgttctaactaacaagacacagctgtcgatggaggcgaagaagccttacctgatcgccgtcgtcatacagcttatatacgccggcatgttcgtcgtctccaaggcagccttcgaccatggcgtcaacaccttcgtcttcatcttctacaggatggccgccgcctcgctgctcctgctgccggtagccattaccctccaaaggaagaacgtgaggtccatgtccatgggcctgctcctcaagctcttcttctacgccttgatcgggaacacattcagcttgaacctgtacaacgtgagcatgaagtggacatcggcgaccgtggcgtccgcgtccagcaactccatgccggtcatcgccttctgcctggcgctgctgctgaggatggaggcggtgagtctgaggagccgctccggcgtggccaaggtcgccggcgtcgctctctgcgccgccggagtcttggtcctcgccttctacgccgggccggcgctcagccccgtgacccgccgccgcgccgccttcttcgctgccgcccaccacgcaacggacaagcatcatccggcgagcggcgggacggcgtgggtggaaggagcgttcttcatggtcctcgccaacgtcacgtgggccctctggatcgtcctgcagtccgcgttgctgaaagagtaccccaacaagatgcttgtgacggtgacgcagtgcgtgttcagcatgacgcagtcgttcgttgtggcggtggtggccgagaggggcgacttctccgagtggaagctccggttcgacattagcttgttagccatcctttacacggggtttgtggtaacgggcgtgtcctactacctccaggcatggtgtatggagatgaaaggccccgtctttctggccatgtccaacccgctctgcttcgtcttcaccatattctgctcgtccttcttcctcggagagatcgttcaccttggcagcatcgtaggtggtgctctcctggttgcaggactctacagcgtgttgtggggtaaaagcagagaagccatggagtctgaggcggagggaatggaagatcacgcaccgtcatccatggacgaacagagcaactccaatcatgagcccaatagttgggtcctatatttcaatttagctacgtactgaatttgtttagggcacaaactgaaggtccgtttccaactattgagccttaaatagtgtttatgttggaatggtcatgccatttctgttagccatccagcaatcgtcgaaggtccccccaagttgcccacgccaggcg

SEQ ID NO: 133954 - DNA, 2485 bp, Zea Mays
ctctttcctcacgcaacttctcccactactcacgctactacccctgccctaggccacgtccaacagcctcccccaatccgtcctttggcttcgctggcgacggcggaggctggtgaaggcaggaattggtgagcgctccaattcggggattggcggaggctggtgcgcgccacggcaggaattggcggcggctggtgcgctccagttcgaggaatcggctgcagctcacagaggacgcacggcgtgtgtttccttgccctcggttcggacatggctaggggtatgagaaagtgcatcattcaaagccaagaagagtatttggtagaggagcctattggggaaacaagtcatcggccacgagatgcagcatatgaccaccatccttctgctagagaacgccaaaaagaaagcgacaatggtaatgagttcaatgacctagatcatcataaaaaagatacaacatcttttgagactacttctggagtgtacccttctcctgatgatgcggatatagaggattctgttgaaggtcaaactaatgaagcaataagtcgtggtccgaacaaacttaaacatgtttggaaccttcaaaaaggaaaacgaattgtagttaactgtaacgagctcggccaacctattggagaggaggcaggagtcttaggaaaattccttggcatggttgctaggaatggctgcttatgtagcttaagcttcaaagattggagattactgataggaaagaaggacaggaacaatgaacaaaaaaacaagcaagatgtactgaagcaagtaaagatgagattcctataccctgcccgcatggaaaagtggatacttcgaactattggtgagagatggagacaacacaagtccaatctaaaatccttacattttgatgcgcataggagcaaggaaaataatctaaaaaatgttccaaaaggcgtcttagatgatcaatgggtcgctcttgtgaataattggtttacaacaaaatcacaggatatcagtgaggcaaataggataaactgcgcaaaaaggaaggcgacccatacatcaggaacaaagagttttgctcggaatagggaagatatgagggaacaagatccagaaaagaaatacccccatagggctgtattgtatatcaatacacacaagagtaacatcacaaagaacacaaacccacatgtggttgcgttgaaggaactattagtgcaagaaccaagtttagctgacactagtcatggaaaggttgcatggaaaggagatgcgcttagccaaattttaggagaagagaagcctggccatatccatggtcttggccttgttccgaatccagatcaagtgtttggtggatcaacttcaaggcatctaaaacatcttaatttaacctctttggatgcaacatcaagtgaagatgtagtatctcttcgacttcaagtggaaaaacttatagatcgtgtccagaagcaagatgatactatactaaatttgcgaaataccttggaactgcaaaaaagtcaccatgaatgtctagatgaacctttgtcggcatcaaaagatcttcagccgactatgaatcaaaaaattaatcttcttgatgaactgaatagcacaatggcggatgaaatcaaacatgatgggtacgaggagctgcaggcccagtgcaaaaaatctaaaattcaagaaaagggcaagccaccaatgccacgaggaggactccaaggtggtagagtttctacatcgttaaatgtaaaaaatagaagtaatgcagccaaggtgatgaaccaggacactgctcgaaattcctctaatcatgaaccatacaagaacaagggatctctagaaaattatttgccaagtactaaagacgatcagtctacatcaaaacgaaaagttggttctcatattttcttgaagagttggaggaatcaaaataagaaggttgcattaggtacaataattggttgtgatccaaagcaacaagttggaggagatccattgggcaaagaattttggaaggttcgtctcggtcttgtacttgtgcgtgatgaaccactaatacggccctacaacaatttcgtggttctaggagacatagacaacgaccctatagcatggccttcaagttgtatagaaaaggcagctctttaatgtcaaccattgaacaacaacagatctacatgagggctatgactttgattcttctttaaattggcgttattagtgatgagagcgatgagtctactgagtccagtttatgagtcaacctttgtttgtttcatactatcatagaaaaaatgttaattcatacattgtgtaatggattaagttgtggatgatattttataacgacactactatttttaatatagactgattccagattatttgccatgtgtgacccaataatagtttggaaattgataatgtgcaatgcacatgctttgcatatttgttttgatccaaataaaaaaataattataaa

SEQ ID NO: 133955 - DNA, 566 bp, Zea Mays
tggcgactggcggctagggttttctgcacgaggcgaggtagaggaggccaaaacatgggccaaggcggtgatgctcctcatcatgtgcggcgatcaccacgcatctggcgaggccatcaaggatgtgctttcagtctttcacctaggagcttggcgatgactaccagaagcaagaaaaatgtaaggatgctgaacttagtgcaatagatcttttaaaggacatgcattgcaacaaaaagaaaggttttagtgaaaatattgagaaagctattgttgacatggaagaaataatggtagcaccaatttaggatggataacaaccaaaatatcctacaaaagttgtttctaatatcgtaccgggctccagtgtgttcctatgcaatgttggtcttcggtctgcatccaagaaaagctccatagtgtcaatttctgcaaaggttcaacaactttaggatgaacttgagatcaagaagcaagaaatatttgcagtgaacaaattcatgcgatattttggttgtgatgtgtaatattccttgacgatatgaatgcttatgatgtgttccttc

SEQ ID NO: 133956 - DNA, 1561 bp, Zea Mays
cgatctctctctctatatatatacatatgtgtcactcacgactccacagatagatagctacacgtacgtacgtgtgtgtgcaaacaatccgatcagctgggaagcaaacaacaacgaacgaacgccatgatggcggcgtgcttggaggcgaagaaaccctacctgatcgctcttgccatccagatcatcggcaccggcatgttcgtcatctccaaggcagccttcgacgacggcatgagcaccttcgtattcatcttctacaggatggccgccgcctcgctcatcctcgtgcccacagccattgtccaccaaaggaagaatatgcggtccatgtctgggaagctgcttctcaagctcttcttgctcgccttgatcgggaacacattcagcttgaacacgtacaacctgaccctgaagctgacgtccgcgacggtggggtccgcgctagccaactccgtgcccgtattcaccttctgcctggtgctggtgctgaggatggagacggtgaacctgaggacggccgccggcgtggccaaggccgccggcgtcgcgctctgcgtcgccggagtcctcgtcctcgccttctacgccggtccggccatgagccccgtgaaccaccaccgcgccttcgccgccccgaggcagcacgccgcctccaccggtggtccgccgagcaggtcgaggtggatcacagggacgctgctcatggtcctcgccaacgtcacgtgggccctctggatcgtcctgcagtcggcactgctgaaggagtacccgaacaggatgcttgtgacggcgacgcagtgcgtgttcagcatgatgcagtcattcgtggtggcagtggtggccgagaggggtgacatgtccaagtggaagctccgatgtgacattaccctcgtagccgtcctttacgtgggttttgtggtgacgggactgtcccattacctccaagcatggtgcatggagctgaaaggccccgtgttcctggcgatgacgaacccgctctgcttcgtcttcaccatattcagctcctccttcttcctgggagagatcgtgcacctcggcagcatcttgggtggagctctgcttgtggccggcctgtacagcgtgcactggggtaagctcaaggaagacaggaggtctgaggcggcggaacaggagaagaccaagccgcaggaagaaccagcagcagtagctggagtgccctccgtgctcgaccaagcgtgatgctcatacatatggttgcttcatcagagcgccctagcttgagcgagctccatcgaccatcagctaactaatgaactgttgggaccaatatgcatgatgcatatcactgtgcatgaagaaccaattaattaactgtggattattaagagagtgagcatgtagttctacttgcatgcatctgggtattttgtatagaacacatcaagttgcgtctgtgacatcaatgcaagctagggcatgcatgcattccatcattcaatgcatgcataactcacttgaatgctgttgtatccactccacccatgcactttgaataaatacatatgtcgacttatat

SEQ ID NO: 133957 - DNA, 1233 bp, Zea Mays
atggcctccacccaactcacgtgcagcaggttccaactcccaagatctaggtcggacaccgacgcacaccacgtcagtaacgccaagcaccactcgttcgacctcggcaagaacccgcctctccgtcatcgcccccctccactctctctcgcttgctctagccgatctatgtgcatggggctcaacggctggaacaaatcctcgtcgatgctcagcgtgaaggcgccggtctttatgataactttctcttgccccgttggacgtggactcgtagagtatcagaaagagctattagggaaagactccgctgacattgacattgcgcttgacaatatgacgggtcagaatttctgtgagaaagtaaatgagtattcaaagttgataggggagcagcagaaaggaatcggtgttatccaatgtaaccccgatcaatccaagcacttggaaactgctaggatgcttattctcgacatctggattgattttgttaacttgcggtctgaaacatatactgaaaacagccgtatccctacaatgaattatattattacaattaaaacacatgttgactcaactacattagccactgccctgagggattcagatcttatcttcataatagctgggatgggagggggttctagatctggtgctgctccagttgttgcccagatatcaaaggaagccggttatcttacagttggtgttgtcacctatccattcagtttcgagggcccgtgtttatctatctatggagatcagattcaaaagcatgccatctcttccagcggctgtcgcccaggtccgtcaccgcctgccgcgccgtgtgcctcaggtggtccgagctgctctcttcgctctgtctcgagtttctcgccgacgtcgacgacggcaacgccgactcgtccgcatgcttcgctggcctcggcggtgcgttggtacccacttcaattttttcccacggcagctgaactcactgacatggaaggtgaatcatctattgttgcttcaccatttcctgtaccaagttcatccaaagggcatgaaatggaaatgactaagaagactgctgctgttgtgcctgaaatgactagcagcagtagtatgcccaatttagctgttgcaaaagatggaaataccaaggttttgcctttcgaatttcgagctcttgaagtgtgccttgagtcagcctgcagatctttggaagaggaagggggaggggggcttttatag

SEQ ID NO: 133958 - DNA, 1582 bp, Zea Mays
aaaaggaaggagcaggtcataccagtagtacggccactagcatagagtgacaggactgcttgaattgcaacgtacatggcaggaacattgaaagtctcgaacataatctgggtcatcttctccctgttggcctttgggttcaaaggagcctcagtaagcaacacagggtgctcctccggggcaacacggagctcattgtagaaagtgtgatgccagattttctccatgtcatcccagttgcttacaataccgtgctcaatcgggtacttgagcgtgagaatacctctcttggactgtgcctcatcaccaacatatgcatccttctgccccatccctaccatgacaccggtgtgacgaggacgcccaacgatgctagggaatacagcccttggtgcatcatcgccggcaaaaccagcctagaagatagatacacaaaattagtggcatatttgggtgggggagactatggctgtacaaattaaggggaaaagcactgaccttgaccattccggtgccattgtcgcagacaagaggctggatgtcctcaccatcagccatttctacagaactgctgcaggcggcagcgagcgaactcttgcagcggcggcgcgggttccgcccgtgtcgccccgcagaggagcgacggttcgcagcttcgcacagcatgaagggaagggaagagaagaggtgggagtacctggtgggtgctcgctgccggcgaagaggccaacgaaagcctcagcaccctggcttagggcggcggcggcggcaactgtggtctgagagcgaggagagcaagagagcaggaatgcagcggacggaaggggaaagggggaatgcaggaggagcagttgtttgtggcctgcaaccgcgagaagactgccagacccagatgcgattgagaagggatctgttctgtgctggcttgcaattcgacggtggttttgggcagcctcgattccgcttcaccgtccgtgaaaagcgaggggatgcgaagagcgcccttaagaaccttctgctcaatggcggcacatgtcaggaaagcagtaacaaacaaatgaggaagcagaaaggtggtaccgggtcgaaggctcagcgctctgctccaggaaaaaatccctgtggaaaaaataagcgcgggcattactggaaaagcttcgatgatgacgatgaatgcgcgcacacaccatatggtacctatggtggtaagaaatctttcacctggtactggcctggggaggacgacggccttggtagtaatcctagtggttttcaatggagggaggaatctcagtctgccaaatcaaaggagaagttctggaacgaaagtgacgtcgatgaggacgaggggtcgagccgtgatgatctgcgaagctataggatttctctcggattgccagttttaggtcccttaaagctggatcatattaaggctgcttttcgtgcatctgctctcaagtggcacccagacaaacatcaagggccttcacaggttggtgtcatagctgaagcagaagaaaaattcagacggtgcgtggaagcgtataacgcattgactcgtgctttcagatcaagtggctaa

SEQ ID NO: 133959 - DNA, 1207 bp, Zea Mays
agctcaaggatatggctgagagattaccaccagaccacggggcctataatgtcaatgagacaaagcaatcacataatccgaatggcattgactcacatgctgctagctactctagcatgaatggaattcaccagacacggaatgagttgctcaatgcttcaattgcacatagtctgaactctggacgaccatcgtcgcattgcaatggaatctcaggacaacataaattactgggcaatgtgagtgaacacagtgactgcagcactcacagcctaagaattaccgctcctcacgattcagagcttcctagtcgaagagcacgcagcagcagtgatgagatgctgacagcaggcagtagagtggatgacaatctgaacgttgatgctgtgtcccttcaaagcggcgaggatggctacaagcctcgaggcacaataccattgccaagcaaccaagttcaggctgaatggatcgaacaatacgaacctggcgtatacataacactcacaacccttcgtgatgggacccgggatctgaagagggttcgcttcagccgaagacgttttggcgaacatcaggcggaaaattggtggaatgagaaccgggaaaaagtgtatgagcgatacaacgtgaagagctctgagcgtgtgtcgtcggcagcctcaacccggtctgcgtattaacttgaggagacctgtgtcatcttggaacttgtagaaaaactgcaaaggctgcagcatcactactcaacagcagcaaactattcaggtcatacatactgggagatgacaaaaggccagcggccattattattttgttggcactacacaatgctggatacaatgctaggctatgtatgttatcggtctgttttggtgtaatgcacatagtcacatagacgatgatacacgagaagtgaaaccatgttttaggtcagcaaacatcactaggcaaggtaggttaggttctttgactgcctatttttcctctttcctttccacggatatgcttacttatgtatgttgacatttatatatggtaaaagttatcatgcagcaatgtaattgttatgcttttgtggtttgtgctatggaagccgaaatatagggtctgtggttagggagtcaacgggaatgaagtggcttcatatcagcttttgataatagagccatttttatcagtttttgatagagccattttttctgtattt

SEQ ID NO: 133960 - DNA, 2262 bp, Zea Mays
ccatccatcctcggtgcacgccagccggcggcctcccagtttccggcggcgctccggccggcggcgctccggccggaggccgggtggatcccatcttgtagggagtgcggaagccgtcaggggcaggagagctcttcctgccttcggcgcgtggagagctgacgcttggtctccaccaggagcttgtgatgcaacaatatgctcatgaaggggccatcttcagatgttctcagagcaagcatttctagcgccccaagtacatctagccatggttctgcacaagatgaatgtgattcattaggggatgtgtatgtatggggtgaggttgtctgcgatacttcagtacgaactggttctgatactgttattagttcaactggcaggattgacattctcctcccgaagccattggagtccaatttagttcttgatgtgtatcatgtagattgtggggttaagcatgctgcattggtcatgaaaaatggtgaggtttttacatggggtgaagattctggaggccgccttggccatggaacacgagaagattgtgttcgtccacgtctggttgagtctttgacagtttccaatgtagattttgttgcctgtggtgaatttcatacatgtgctgttacaacaacgggtgagctttatacatggggagatggaacttacaatgttggccttctcggacatggcaatgatgtaggacactggatacctaagaggatttctggagcactggaaggtcttcaagttgcttatgtttcatgtgggacctggcatacagccttgataacatccatgggccagttatttacctttggggacggttcatttggtgtattaggtcacggagatctgaaaagtgtttcttacccaagggaggtagagtcactatcagggttgaaaacaattgctgtggcatgtggtgtgtggcacactgcagctatagtggaggttattgtcactcggtccagttcaagtgtaaagctatctgctggaaagctgttcacatggggagatggtgacaagcatcgacttggtcatggtgacaaagaaactcgacttaagccgacttgcgtggctacacttattgatcatgatttttatagggtggcatgtgggcacagccttactgtagccttgacaacttctggacaagtattgagcatgggtaatgctgtttatggtcagcttggaaatcctcattcagatggaaggataccatgtttagttgaagacaagattgtgggtgaacaagttctccaaattgcctgtggatcctaccacgtcgcagttttgacaaataggagtgaagtttttacatgggggaagggagctaatggaagattgggccatggagatacagaggatcggaaggtgcctacactggttgaagccttgaaagatagagctgttaggtacatagcctgtggtgcaaacttcactgctgctatttgtcaatataaatgggtttctggagctgaccaatcacagtgctcctcatgtcgacaaccatttgggtttacacgaaagaggcgcaactgctataattgtggacttgtccattgtaattcctgcacctcgcggaaggctttgagagcatcactggctcctagtcctgggaaaccctaccgtgtttgtgattcatgtttcttgaagttgaataatgcctcagatcctaatgcagctaaccggaggaaagatcctgttccctatcaacctgttgaaagcaatggcgatgctaaagtaggaaaggctagtttgcctagcaatatggaaatgattcgaaatttggatatcaaagcagcatggcaagggaagaaaactgatgggctatcgtttctccggaatcctcaagttagttcgctcctgcagctgagtgatattgctttatctggtggcttgggcatgaacagatcagctccgagagcggtacacatatctgcagctcgctcggttactacttcaagagctgtttcccctttctctcgcaagcccagtccaccgcgttctactacaccagttccaacagcccatggtctttctttctcaaaaagtgctactgataatattgtgaaagcaaatgagctcttaaatcaggaagttgaaagactgcgtgcacaggttgataacctgagaaatcgctgtgagcttcaagaacttgagcttcaaaaatcagcaaaaaaagtactagaggccatgacactggttgccgaagaatctgcaaaatccaaagctgcaaaagaagtgaatcaagct

SEQ ID NO: 133961 - DNA, 174 bp, Zea Mays
ggacgagggatgtgaggcaacttaatagagccactgaaatgcttgtccttttgtggatcataattcttcagactaatctaaagctcaacagtctcagtgaacttcctattcttcttggcatcctgaactatctgggagatggcatccttgagaacgtcggactgcaacttactg

SEQ ID NO: 133962 - DNA, 683 bp, Zea Mays
gcgtgtcgtgcggcgacccgcgctccacgggcgctgacggcaacacaccttctacttccatgacaagacgggccacgacttctgcatcctcagcgacgccggcctgcacatcaacgcgcacttcatcggcggccacaacccggccctgaaccgcgacttcacctggatccaggctttgggcatccatttcgcgcaccacatcctctacgtcggcgccgccagggccgccgccgacgaccacctcgtgctcgccttcgacgacgacgccgtcctgttcccgtgcgccgtcggcgcccgctggtccccacacgccgcgccagcgctgtccgtcacacgcaccgcggactccaactccaacgccgtcgtcgtggagctccggggcgtcctccgcgtcatggccatcaccgccgaggactcgtgcgtccacagctacggcgtcgaccccggcgactgcctcgcgcacctcgacctcggcttcaagttctacgacctcactgatgacgtccacggcgtgctcggccagacctaccgcgccgactacgtcaacaggctcaacgtcaccgccaacttgcccctcatgggaggcgccgacaccttccgctcctcaggactctttgaggctgactgcgcggtagcaaggttcagacgaaacaccgccggcaccggcatcgccatggtcactg

SEQ ID NO: 133963 - DNA, 356 bp, Zea Mays
aactcgaccgccgccatatatgtgcagctcatgccccacggtccctcctccccgcagacccagtgttcccccgccttttgattcccacggccaaacgctcctcggccacctctgtggcgtgatccgtcgtcgctgcgcaaagccatcgccgccagggtcgctctgccacgtcgccgaccggggctgatccggggccagtgcggggttccgggcgttcgcgtgggtgtaacacgagagttcatgtgacagttgggtccagtactggcaccgggcgtcgacgatttctcaccggagcactcaactccgtcgtaaatccgcctggtccgcggacagctttgcgcccaccgttttctctg

SEQ ID NO: 133964 - DNA, 1709 bp, Zea Mays
aactcgaccgccgccatatatgtgcagctcatgccccacggtccctcctccccgcagacccagtgttcccccgccttttgattcccacggccaaacgctcctcggccacctctgtggcgtgatccgtcgtcgctgcgcaaagccatcgccgccagggtcgctctgccacgtcgccgaccggggctgatccggggccagtgcggggttccgggcgttcgcgtgggtgtaacacgagagttcatgtgacagttgggtccagtactggcaccgggcgtcgacgatttctcaccggagcactcaactccgtcgtaaatccgcctggtccgcggacagctttgcgcccaccgttttctctggtaaaattcctcaccctaactctgccttgatctcctctacgtgttgcacacgctgggttgttgtttggagcactacggcgtgaggggtggcttgccggcaatggcgccgccgcccctggttactggcgccaccgtggcacggctggtgttggggggaaacaccctggtcgtccgatcctcattgaacgggatagattagatcgacgataacctttcggctctttaaatctagtccgtagaaatgtgatcggagggctacggttgttttaaattcggtccgttgatggtagatccaagcgcctagaatgcatcatggttcgtcatagccggcttttaatctgggccgtccggtttctatcctgcagccagggatccaccatacccgttcgccgtaggcattttacacaagagtccctgagaaatataagaatcaaccccgcagtccttgcgctaggagctctgtgtcttaggaaaatttatgtagaggcccctatgttttctgtaaatggtgaactcagtccagagaacaaaaaatcaaaagaattcatttagaaaatacatttttgtgtgaaaataattataggaacttaattaattcctagaaaatacattttaactccttttcagtccattccaatttctataattttgtaataatgttgtttatcacctattgcctctgttttgacatgaaaacaataataaaattgatctcctaattaatctcatatcaaatacataaaatcattagaaattcataacttaaaatctatgactccgattggacccgttcaagttgagttagtctcgtataaatatttactatgcaataacaatatttattataccatgtctcattattttgtaattagatttctatttaacttatgttggttagtcttgttaatgtgcttatcattataatctactagaatatgatctaaggtcaaattataattttgattaaagttgagataattatttatagaataacctcttatatgatttatattaaccaatttataatatagttcaatattttaatcacataaatcctctatgaaatcatactttttaatcgtaactccaattttagtggttctcattcctacgatctcgtagcgacgcgtagatcattattattcagtttgtacttatgtttggtgtgatgttaattttttctataccatgtttgtttgtattgctacgactggcatgatgtcacgaggatctgaagaatcattctggtacctggaatctcaagtcccaggcaagttgtgcccttgaccacttttgttacccaataatattctttattatcactattcatgcataggttaattttaatggggc

SEQ ID NO: 133965 - DNA, 715 bp, Zea Mays
cacataaacacaaaagcaccacaattatatattcacaaaagcatcacaattataatatcattcacaactagatcatttacaaatagctacctagatcattcacaaaagctccagagatgatcagtcacaaaagcaccacagcgacatcgctctagcttgaagcagttcaaaagcccacaactacatcactaatgtttcatatcactccagctattgttcaaaagcccacaactaccatctcttcttttaaatcaatgttgaaacagcagataggagctgagcaagctatgttgaatatgcatttcaacagtggaagcatgaacatggctacatcagttcttctcgtcttctgttttgcttgacgtagtggcggcctgggtgcttgacgtggtgtgctttcaactgtggtgtgcttgacatagtggcggcctgggtgctaagtgatctactagcaggacaaaggccagcaccactgagagaacgagcaggttgtgcccttgataaagaatgaatgtactcaattgcagcctgaaagaaagttaaaagtgaggggcatgccaacgaatcatagtagtctgggaaataacatattgttaggaaaaagtgcttttacactattcataaattgatatattcatagttagtttactgcagtgactatcagaaattcagaagcaaaaggtggaaagattcattcccatgtgagtaaagcggt

SEQ ID NO: 133966 - DNA, 207 bp, Zea Mays
aacaaaatttcccagagttattcagtacttgcaatcacatcagagcaactcagcagttgcatccacaccacaccagtagttgcaattacaacacaccagcagttgcaatcattttgtttacatttttaacagatatttgggtagaattatacagcagttacaatcacacctaatgcggggttgcaatcacaccacaccagcagttgc

SEQ ID NO: 133967 - DNA, 206 bp, Zea Mays
ttcttgtgacattgtgtttgatgagactaacggctctcaagtagagcaagttgatcttgatgagctagatgatgaagaggctccgtgtgtcgcactaaggaacatgtccattggggatgtgtgtcctaaggaatccgaagagcctccacatacacaagatcaaccatcttcctcaatgcaagcatccactacaaaaaatgtttttt

SEQ ID NO: 133968 - DNA, 406 bp, Zea Mays
attgaaaagatccgttcattcacaccaagtgccattgccaaagtttcttcaacaatcaccgtgaacatctatgtcatttcatatgttgctgttgctgctgatctgacatattatatagatagtaatgtaactgattggtgtttgccggaattgattacgttaggagccaagattctggtagttcctgggaacctcccaactgggtgtgccaaaatatatgttgatattcaagagtgatgacagagaagattatgagctggaaacagactgcctcatgtggatgaacgaattttcagagtactacatcaagcttctcttggaggagctagacaaactgctcaagatgaatcctgcagtgactattatctatgctgactattatggagctgcaatggaaattttccat

SEQ ID NO: 133969 - DNA, 1178 bp, Zea Mays
gacgcggtggccgtggcgagtggaggaagaaaagctgccccactttgcttcgcttctccgctccctgccttctttctttcttccgcgattgtgctgtgtccaactcaaacaacaacagcaacaacaaagaaacctccccttcatcgtatccaaactccaccaccaccatcatcgaatcgaaaccgccatgaccaccagcatcgagtacgactatctcttcaagctgctcctcatcggcgactcctccgtcggcaagtcctgcctcctcctccgtttcgccgacgattcgtacgttgacacctacatcagtaccatcggcgttgatttcaaaatccgcaccatcgacctcgatggaaagactgtcaagctacagatttgggacacagcaggccaggaaaggttcaggacaattacgagcagctactaccgaggagctcatggaatcattatcgtgtatgacgtgacagacatggagagcttcaataacatcaagcagtggctgagtgagattgataggtatgccagtgacaacgtatgcaagctcctagttgggaacaagtgtgatttggttgacagtaaggttgttgacactgaaaaggcaaaggattttgcagattcattaggaattccctttattgagacaagcgcaaaggaatccatcaacgtggaggaagctttcctgaccatgtcatcagaaatcaagaaaaggatggcaacccaaccaacggtggagaggagacccacagtccatgttcacatgaaaggacagccaatacagcagaagagcagctgctgctcatcatagtcagggctcatagggcacttaaatttggctagtggttagatggacgccgcaggatgttgttcacttaagattatattggaggcggcactgaatggaatggatgatactattactatatgcgtgtcatttcagcgttagatattcgtctttatacataatacttttagtataaaattctcagtctgtattattattgttcgtcttaaaaatttgcagctatttgcatgatttacggtgtgagttctgacttatacagatcagcattaattgccataaactagcaaatcgtaccatcagtgatcagttatctttaaactagcagttaattgaatgataactgttgtaaattgctggtaattgattgttgaacatg

SEQ ID NO: 133970 - DNA, 1704 bp, Zea Mays
gtggccgtggcgagtggaggaagaaaagctgccccactttgcttcgcttctccgctccctgccttctttctttcttccgcgattgtgctgtgtccaactcaaacaacaacagcaacaacaaagaaacctccccttcatcgtatccaaactccaccaccaccatcatcgaatcgaaaccgccatgaccaccagcatcgagtacgactatctcttcaagctgctcctcatcggcgactcctccgtcggcaagtcctgcctcctcctccgtttcgccgacgattcgtacgttgacacctacatcagtaccatcggcgttgatttcaaaatccgcaccatcgacctcgatggaaagactgtcaagctacagatttgggacacagcaggccaggaaaggttcaggacaattacgagcagctactaccgaggagctcatggaatcattatcgtgtatgacgtgacagacatggagagcttcaataacatcaagcagtggctgagtgagattgataggtatgccagtgacaacgtatgcaagctcctagttgggaacaagtgtgatttggttgacagtaaggttgttgacactgaaaaggcaaaggattttgcagattcattaggaattccctttattgagacaagcgcaaaggaatccatcaacgtggaggaagctttcctgaccatgtcatcagaaatcaagaaaaggatggcaacccaaccaacggtggagaggagacccacagtccatgttcacatgaaaggacagccaatacagcagaagagcagctgctgctcatcatagtcagggctcatagggcacttaaatttggctagtggttagatggacgccgcaggatgttgttcacttaagattatactagtaacatgcccgtgcgttacgacgggagtaaaaaatagatacagatcgacagacatcactatgatatacaaaatgcagacaagtacatagcctctgttcataatcgtttgtgatggacgtcaaataccaaaatcgactatagaaaatattggatccttttccctttcacaaactatgtcttaacaaagtttcaagtcacatgcactgtatgagaaaaaataagttaccacagaaaaagatggtacaagcattatgccattgtagaccttatactcggacaagaacatcacaagagaagcagaacaaagctacacggccaagatccagaagtagacaatcctcgtcgggcttccaccggaaagttgatcactataccaaacttttaattctctgtatcatcattatcctcttccacttgatcgacaacacgagcatccaacgttacgctcgctgcctagaccagcagctttgcaccttcttgaatcaagccctgcaggctgcaactcccttttgctcaaacctgcccatgaaatcatcagagcgctcgcatggcagataattccattaggtgatttcattataatattctcaaagcacattctattccttgatttctagatggcccaacatatggccgaaacggccacgatatgaacatgtttggtttgtggcacaagcttctgcaaccacaaccagtactggttcacatcagaaatgtatggtccggttgcattttggatactatagacttgaatgcttaatggcctatagctgagaaaatgtttaaactggtacaattctgaattcaaataacatatgtgctttta

SEQ ID NO: 133971 - DNA, 3795 bp, Zea Mays
aggaaagccaaccaacaaacacagtgagtggagcacgagcgcgctgagtggagcaagagagttggagcttggagcccctccagtgctaagctagggttccatccccaccagcgccgcccgctccctttctccgtccgcatccggctgccatggtgaggaagaaaaggactggccctggagagagttctggggagacttctggagcgcctggtcagggctcctcacagcgtcctcaggcaacacaacagggtgcccgaggtggaggacaacaccaggtgcgtggtggatatccgggccatggagtgccgccttcagagcacccaggtggtgggccgcctgagtatcaaccacgtggctatcagggacgtggcgttccacctttacttcctggtggtgggccgcctgagcctcaaccgcgtggctaccagggacatggtggataccagggccgtggcgggccaccttcacagcatcctggtggtgggccatcacctgggtctcagcctcgtggctaccagggacgtggtggtctgcgtcccagagggggagtgccgcagccataccgtggcgggcatgtgggaggtagtgttggaccaattgttccttcaggtccgtctagaccagttcccgagctgcaccaagccccagatgtccaacatcaagcccctgtggtggcagcaccatcaccaccgggagctggctcgtcctcgcagcctgggatggccgaggtgagcactggacaagtccagcaacttgtgattcatgaccaaagttcagccagccaagttagtcaggtagcaccagcatcaagcaaagctgttagattcccattgcgccctggcaagggtacgcatgggtccaggtgcatcgtgaaggcaaatcatttctttgctgagctgcctgataaagacctccaccaatacgatgtatcaataacacctgtggttccttcacgtggtgtcaatcgtgctgtcatgaaagagcttgtaaaccttcatagacactcccatttggatgggcgtctgcctgcatatgatggaaggaagagtctttatacagctggagcattgccatttacttcgaagacattcgaaattactctgcaagatgaagaaaacagtcttggtggaggacaaagacaccaaaggggccagagggtctttcaggtggtgatcaaatttgctgctcgcgctgatctccaccatttggctatgtttctagctgggaggcaaccagatgctcctcaagaggctattcaagtacttgacattgtactacgtgaatttcctactgccaggtattgtcctgttggtagatcattttattctcccaatttagggagacgccagcaacttggtgaaggtttggaaacttggcgtggtttctatcaaagcataaggcccacacagatgggtctttctctgaatattgatatgtcctctactgcatttattgagcccctccctgtgattgattttgttgctcagcttcttgacagagatatctcagttagaccattgtctgattctgatcgtgtgaagattaaaaaagccctacgaggtgtgaaagtcgaggtcacacaccgtggaaacatgcgtaggaagtatcggatatctggcctcacttcacaagcaacaagggagttatcattccctattgatgatcgtggtactgttaagactgtggtgcaatacttcctggagacttatggctttaatattcagcacaccactttaccttgtttgcaagtgggcaatcagcaaagaataaattatctgcctatggaggtctgtaagatagttgagggacagcgttactcaaaacgactcaatgagaaacagatcactgctctactgaaggtgacttgccagcgtccccaagagcgtgagaaagccatcttgcagactgtgcatcacaatgcctactccgaggatccttatgcccaggaatttggtataaagattgatgagcgtcttgcatccgttgaagctcgtgttctgcctcctccaaggctgaaataccatgatagtggcagagagagggatgtattgccaagagttgggcagtggaatatgatgaataagaaaatggtcaatggtggtagagttagcagctgggcatgcattaacttctcacgaaatgtgcaagatggtgctgctaggagtttctgtcatgatctcgctttgatgtgccaagtatcaggaatggattttgcacttgaacctgtgctgccccctgtctatgcgaggcctgaacatgttgaaagagcactaaagagactttatcaagatgccatgagcatactcaggcctcagggccgagagcttgacttgctgatggtaatactgcctgacaataatggctctctttacggggatcttaaaaggatatgtgagactgatcttggattggtctcccaatgctgtctgactaaacatgttttcaaggcgaacaagcatcagtatcttgcaaatgttgccctgaaaataaatgttaaggttgggggaaggaatactgtacttgttgatgctttggcaaggagaatcccccttgtcagtgacgtagctactattatctttggtgctgatgtgacccatccccatcctggggaagattctagtccttccattgcagctgtggttgcttctcaagactggcctgaggttacgaagtatgcaggattagtgagtgctcaaacccatcgccaagaattgatacaggatcttttcaacgtacggcaagatccccaaaggggggctgtctctggtggcatgattagggaacttctcatttctttctggagggcgactggacaaaaacccaagaggatcatattctacagggatggtgtcagtgagggacagttctaccaagttctgttgtacgaacttgatgccattagaaaggcctgtgcatcattggagtctgattaccagcctccagttacctttgtcgtggtccagaagcgtcatcacaccaggttgtttgttaataatcacaatgatcagcgtgctgccgatagaagtggcaacatactgccgggcactgtggtggactcgaagatttgccatccaaccgagtttgatttctacctgtgcagccatgctggcattcagggaacaagccgtcctgcccattatcatgttctgtgggatgagaacaaatttacggctgatgggttgcaaactctcaccaacaacttgtgttacacgtatgccaggtgcacacgctcagtatcaatcgttcctcctgcatactatgctcatctggcagccttccgagctcggttttacatggagccagatacaagtgacagcggatctgtggcgagcggtgctacgacaagccgtggccctccaccaggggcgcgcaacaccagggctggtgctgcgaatgttgctgtgaggccattacctgctctcaaggaaaacgtgaagcgcgtcatgttctactgctaagattgacgctgcgctgatgctgtgagcaagcaattatcgttatggtggtgatgctaggacaccgttatgcaccggtaactttaataccttttgtactgtaactacttgtatggcattggaaactgtttgcgatatactcctattaagatgggcttgtcgtggattagattgcactattggaagccatcaatccagttctcatctgaaaattatgtaggtacgtacggtattacaacctctctctatctccctcccaatacagtacagaaaggacgcaattcttgatttcagatagacagtatctgttaggcaggtacttgttgcttgactgttcttc

SEQ ID NO: 133972 - DNA, 315 bp, Zea Mays
atgccgtgcctcgagaattcaattgataagttcattgttaataaaatgctgtcgagaagggagaaggccacaaacttcaaaccagactatgatattgatatccatatgaaggtcttagctatgagtgggcaagaatccagtattcttacaggctacaaactgaagattcccaatcagcttaagaagataaacaatctacagactgatggaattcttggagcaaaggaccagcacacggtcacctccaaagcaagacccaggctgcttctacaaggagctgtacaaagattgtgtgccagcggggatcttgagtga

SEQ ID NO: 133973 - DNA, 729 bp, Zea Mays
atgctcacccgcgatgacggtggacgaccggacgagctcgcggcgaagcacgaggacgacgatgctgctgctgcaccagggtcgtgcaaagacgagtcagggctacgcagagggctgcgcaggaggaagcgggggcagctaggccacgccacgggctgccatggccgccgagctgagcgagctcgcggggagaggcttggacgcgaggcaggcgtgcaggaggaagcttcgctagagatcgggctccggccgtccatcagaggcgttcacggcgattatcgatggcagggcgagcacggcacggtggaactctgggcgcaggtttctgctcgactactgctgcgcatggggaaagaggagaggcggggtggaactgcatggagtggggatgtggggcaaagcggttccagatctagggggaagatgaacagagcgatcggcggcgggttcctcggtgcgggcgcgtacatagctgagggagttgtgcggctgaccgggtcgctgggcgccttcgttgaggagtcggagacgggtgtcgagagccgagagccgagagtcggagaccgccagaccggtgtgttcctcgtgctcgttgtcgaggtcaaggtctcaatactatggatcttgacccggctgcagaggatgaggaggcggagcgacaacttgaggaccacaatgaggcgatggatgctagacaagccttattgggtgttggtgtcactcatttaa

SEQ ID NO: 133974 - DNA, 1843 bp, Zea Mays
ctggttttgagagcacagggatttatgtgataccacatgccaaattcgaaaaccgcaaatatattttactcaaaaggagtaacagcaacggtaacccattaatcacaaagaaaacaaaactaatggacctaaagtagtagccgagagcccagcaaagaaggcatccactcccactcggccactccccatgctttccttgcgcaacccagccccggcgccccgctgacctggtcgggtgcgcctccgcagctgccgctccggtgcccccaggccgcaggccgctgtcctcctgtgatgccatggtgatttggagttgctcttcttgtctccatggattcattcccagagcggcatggaggaggcactacccactcttgtctcccaggcctcctgcatcgccgccgcctatccaccacttctcctccgctagacggtccaccaagaaatctgccccaaaggcgccaatgggctcttccattcctgccgcaaaggcgctaatagactcttccagagagcccttctatgtcatccgcaagggggatgtcattggcgtctataagaacctcagtgattgccaagcccaagccagcaaatcggtacttcatccttcagtcactgtctacaaaggctattctctgcgtaaagaaactgaggaatatcttgctgcacgtgggttcaggaacgctgtctgttccattggtgcagcggatgcaagtgacgaattgtttggcgatctggttccctgcccttttcagcaacctgatgagaacacacaatctattttgaaaatgtcacagggacaggagatggaaacaagatcatcagagcatcccaaagttgctgatctggaaccattaccagatagcgaactctcttgtattcttgaatttgatggagcttgtaaaggaaatcctgggaaatcaggtgctggagtcattattcggcggttagatggatctgtgattgctgtactacgtgagggtttgggtattatgaccaacaacgctgctgaatatcgtgcattgatcctggggctaaattatgcttccaagaagggattcaagtatattcgttgtcaaggtgattctaagcttgtctgtaaccaggttcaaggtgcctggcgtgctaggagcgataatatgtctatcttgtgcgatatagccaaggaacttaaggaaacattccttacatttcaaatcaatcatgttttgagggaattcaactccgatgctgacgttcaagctaactttggatgccaacttgctgttgatgaagttcaagagctgtccgtttgaattgccattggcagagaaaacaagacacggtgcttgagagtagactgttaatcaatactaattgacccacgtgatcatatcacagggtgcaaagagctgtttcggctttttccaagagctgtttcgtttttaccggtaaaaagatggattggaaagaggagaaactggtagagagccacaagttctagcttcatgggctctgtgcgctgctaaagtaacaaacaacacgtagccgaagcaggtgagatatgcaccaagacctgcaatattttgctgttggtttggttttgtgttgccatgaggattgaggagcttgattctttgtacatgcaattgtgaactgaattgaagtatacttaactcacaaatacatgatttcagaaattattgagggtttattcgtttctttctcaatttatgtggattggatggatgaaatttaatctctagaaagtcaaaatttcttattttttcaattacatctaatccacgtggaatagcaataaccgaaaacctcaatgaaaacgaccgtgtatccttgaaatctg

SEQ ID NO: 133975 - DNA, 1005 bp, Zea Mays
actttgatctgactgccatattctgcagtttttattcaccaaaggaattattttgatcaatcacttaaaatgcatggcccaaagcacatgtcacaatcatagaatcaggtcgcatttgtaattttgtatgatcaggccttcatttctgcagcatatgagtccgatggacctagatgctggagcacttggaataacttgtgtagctgctagcagctttaccaacattcaactatttcttaagaagtaacaattatgctttctggcgcaggttcaaggtgcctggcgtgctaggagcgataatatgtctatcttgtgcgatatagccaaggaacttaaggaaacattccttacatttcaaatcaatcatgttttgagggaattcaactccgatgctgacgttcaagctaactttggatgccaacttgctgttgatgaagttcaagagctgtccgtttgaattgccattggcagagaaaacaagacacggtgcttgagagtagactgttaatcaatactaattgacccacgtgatcatatcacagggtgcaaagagctgtttcggctttttccaagagctgtttcgtttttaccggtaaaaagatggattggaaagaggagaaactggtagagagccacaagttctagcttcatgggctctgtgcgctgctaaagtaacaaacaacacgtagccgaagcaggtgagatatgcaccaagacctgcaatattttgctgttggtttggttttgtgttgccatgaggattgaggagcttgattctttgtacatgcaattgtgaactgaattgaagtatacttaactcacaaatacatgatttcagaaattattgagggtttattcgtttctttctcaatttatgtggattggatggatgaaatttaatctctagaaagtcaaaatttcttattttttcaattacatctaatccacgtggaatagcaataaccgaaaacctcaatgaaaacgaccgtgtatccttgaaatctg

SEQ ID NO: 133976 - DNA, 118 bp, Zea Mays
gagtcaaaggatgcatcttattgctttctttttaagcaactagcaaagggtgataaatacgaagctttcaccaaagttgggtacaataattggaaagatgcggttgtaaagtttaaag

SEQ ID NO: 133977 - DNA, 2820 bp, Zea Mays
acaccgcacacccttgcttgtctccaggcgtacttgcgtttagcgtctcttccctgctgccatctctgtccggagggcaagccatggcggcgggcggggacggcgtcgctcgccaggcggagctccgccggatcgagggcaacatctgcttcaagaaggcgcgcctcggcgccgccatcgactgctacaccgaggcaattgcgctctgccccgacgtcgccgtctactggatcaatcgggccctgtgccatttcaagcgcaaggagtgggccaaggtcgaagaggacagcaggagggctcttgcgcttgattacactttagtcaaggtcacattcttgtttcttctttcgtctcaaaactaaagcgccgacttcagttacctctacattatgtaatcgctattcttaactaaccgtttgacaccaataaagatacaaaagtaagtagccgtgattattccgttccttgtgtgatgtaggggcactatctgctggggtgtgcgctactcgagaaggaagaatctgctcttgctatcaaggaattcgaaaagggaagcttgtgaaactgctctgcaggagcatcactttctaactggtacacttgaggaagactccaacaggtcagacaacgagtattcagagcaaattaaactactatcagaggtcttcagccaagcgacagtcgccgatacaccaacagatgtgcccgattacctttgctgtcagataacattcgagatcttccgagacccagtgatcacaccgagtggtgtaacatatgagagggctgtacttgttgaacatctccacaaggtgtgcccttccgctgacgtgaagctgtttactttttgttggcaatttcgacccggtgacgcgagaacctctgaaggagcatcagctggttccgaatctggccatcaaggaagcagtgcaggcctacctgaaagagcacagctgggcccacaagttgaactaattggatgccgtgtgctttgctgactgcagatgctgataaatcggggatggcctgttattagagttagattttatgttgtgttggaatgagattgattggatagctcgattcatcgttcttagtattgattgggtaacttgacctgtaactgcaattctgcaaacactcattggatggatgtaatgaagcaagtgtacatgaaacattggttggttcagctcactgcatgtatatggttgcagcattatatatggttggtcgtagacccagtgggcctcaaacaagttaggcctagtttggatactctagtaatgagtgggattgaagtggattaagatgtattgagagagtatttgatgtattggggatttacaccctctccaatcccttcaaaacactccaatcctaaagtatccaaactaggccttaggtgggccggcctctatccaaggcccagccttttacttggcgctgacaagacaaaagagaggagacgagaaagaaaacaaaccctagcccgctacccctgccccttctctcttcgtcgcgcctccgcctccgccgtcgtagcatcctcctccgccacctcggccatggcgacatccccagcgctcctcttcccttctccctcctcggcatcctctgcgccttcgtcggcgcgggtggaggcagtggtgcttttcaacgtctgcgacagctacgtgcggcgcccggaccaggcggaccgcgtcatcggcaccctcctcggttccctcctctccgacggcaccgtccacgtccgcaactcctatgtcgtcccccacagcgagtcagccgaccaggtcgccatcgacatcgactaccaccataacatgtacgcctcgcaccagaaggtgaaccccaaggaggtcatcgtcggatggttctcgactggatttggtgtttctggggggagtacgctcatccacgagttctattcaagggaagtacaaaaccccatccatcttacagtcgacactggcttcactaggggggaggcttccatcaaagcctacatctcatccaatctgtccctcagagatagtcaactcgctgcacaatttcaggaaatccctctggatctgaagatgattgaggcggaaaaggctggatttgagatcctgaaatctactatggtagagaagctccccaatgatctggaaggaatggagtcatcgatggggaagctttacattcttatcgatgagatctacaaatacgtcgatgatgttgtggaaggacgcgtggcacccgacaacagaattggaaggttcatctctgattcttttgcttcggtgccgaaattgtccccggctgctttcgataagcttttcaatgacaagattcaggataaccttgcgctggtatacctgtcaagcatcacaaggacacaaatcagcatcgccgagaagttgaacactgctgctcaagtgctgtaggtttggcggtgtggcatctggtttggacgtggatggcttgatgctatctgtgatgcttggcgtaagtgtgattggtgacagaaatgcatttttgtactcattattattattgctaaatgagagacctgatggaaagggttagccaacgatgagatcccataatgttgccagaatgccagtagagtggtggatggcgagatgtttctgtttggatagtattctgtgctccaggttgaatatttgtaatgctcgttggttttgtgtagcgacacatcggcaatgtggagcaatgaagagatttgctccacattttacgtcgtcatttagaggtgtggtggcatgcaatgtgatgctgttgttgcaggaaaatcggttttgctgtcctgtt

SEQ ID NO: 133978 - DNA, 988 bp, Zea Mays
ttcttctttcgtctcaaaactaaagcgccgacttcagttacctctacattatgggcactatctgctggggtgtgcgctactcgagaaggaagaatctgctcttgctatcaaggaattcgaaaaggctctaactctcttaaagtctgtggattcaacgtatgaaatggctgaggacatttggcaggtccttgcaaaggcaaaatacttagattgggagaagcattccactgaacgactatggaggatggaaagtttgaatctcttaacagaagcgtatccccgtggacatgcagggaagcttgtgaaactgctctgcaggagcatcactttctaactggtacacttgaggaagactccaacaggtcagacaacgagtattcagagcaaattaaactactatcagaggtcttcagccaagcgacagtcgccgatacaccaacagatgtgcccgattacctttgctgtcagataacattcgagatcttccgagacccagtgatcacaccgagtggtgtaacatatgagagggctgtacttgttgaacatctccacaaggttggcaatttcgacccggtgacgcgagaacctctgaaggagcatcagctggttccgaatctggccatcaaggaagcagtgcaggcctacctgaaagagcacagctgggcccacaagttgaactaattggatgccgtgtgctttgctgactgcagatgctgataaatcggggatggcctgttattagagttagattttatgttgtgttggaatgagattgattggatagctcgattcatcgttcttagtattgattgggtaacttgacctgtaactgcaattctgcaaacactcattggatggatgtaatgaagcaagtgtacatgaaacattggttggttcagctcactgcatgtatatggttgcagcattatatatggttggtcgtagacccagtgggcctcaaacaagttaggcctagtttggatactct

SEQ ID NO: 133979 - DNA, 399 bp, Zea Mays
atggctccgccagggctattggttcgccaccattggggaaacgagatccgtcgcgaacgaatcacgggtacgccattggtcgagactcgacagcgggtctgggagcttcgtcggttaccatggggcgtgttcgatgcggtgccggagtcgatggccaacctagtggcggggaatttctcgccgtcgcgcagcgacaccatgaatccgctcctcgccgtggccgacgtcacccgaacgaccatccatggtaatatccccttgatcttgtttgccatgttcccctgtacatgtagcaccgttctccttaaaggtagcaagccagggcaagcgatacccctgcgccggaacaccgcgccgccgtccctgggaagcgcaccacgcgggtctgtacaggggtag

SEQ ID NO: 133980 - DNA, 225 bp, Zea Mays
atggccaacctagtggcgaggaatttctcgccgtcgcgcagcgacaccatgaatccgttcctcgccgtggccgacgtcacccgaacgaccatccatgcaccgttctccttaaaggtagcaagccagggcaagcgataccccggcgccggaacaccgcgccaccgtccctgggaagcgcaccacgcgggtctgtacaggggtagaagatgggcccgtgatcgttga

SEQ ID NO: 133981 - DNA, 602 bp, Zea Mays
catctcaagtggtagctagactccaacaagttgatttagcagaatttatagcacctgagcagactaccggtaaccatatgacatcaacatcaccctcgatagttgacttagaaaagctgttacatgcacaagctctgataatacagaaagcatctcaactcacgtcctcataccaacaagtgttggcaagtcgaaacatcactagaaatgaaacaactaatgaacaaacacaaaaggatgcacaaccaaaccaacatacaagtgaccttggaacatgttgttgttgtgagtactatggaattccttgtcgccaaatcaatgcaaatgaaagtaaaactgcaaaatagaagaaccagattttattttctggcataaaaagacagatgtctccccctgaacaactaatagcaaattctctcatacctaatgcactgtcagttgatgaattgcaaagtatttcaaaaaggaaacatcacaaggatgcccagctcgaaaaagaagcaaatgagtgttacattgatggatggactatcacctgcacacagtttcagcctcgtcgttgcatcaggtccaagaaacaaaaagggaaacatggataaagt

SEQ ID NO: 133982 - DNA, 690 bp, Zea Mays
atacattgctctgaatgatcaacagctcttgcatgcaatgcagcagaatatttttgttccatgaaccttcattccaagtatgaaacataagtacaaggttacaaggtaacatcgtgaacaaaaccctttcccttaacaaggcaggggaaagtagcacatttattccagcagggcagcaacagtatgcctcagatttgggaccttacttgaattcgaaatattctctataattagcacatgggatggggggggggggggggggggggggggatatcgtcatccgtcagaagtgaaacggacaacagatgagtaacgcttagaccactggaagctccccgcactcgctgatgactactttcttcttcggacggtcacctctgtcagtctcctgtgactcgatcagccttacaatatccatcccttccacgacctggccaaacacgacatgccttccatccaaccaaggcgtctgcaccatgcaaatgaaaaactggctgccgttggtgttcggtccagcattagccatgctgaccactccaggtccagtgtgaaccactaaaacacgaaatcagcaggccgtcagttttagcaaaggaactgggaaccacacagcatatcactactacttcgtacatttgaagttctcatctttgaaagtgcgtccatatatgcttttcccaccggtaccct

SEQ ID NO: 133983 - DNA, 4495 bp, Zea Mays
tgctgcctcgtctcctcgggctccggccggcgacccgccctcgcccgtcgcccccgccgaggaagcatcgcatcgtacagcagcagtacatgcgacctagagagagagaaagagtctcagatagtccagaggaagcaaggaaggagtacgtcgtcgacgtcgatctattcctcctcctcctcctcctccgatccgtgaatccaaagtccagaagcagttaatggtcgagaggggccacaacctccagccgttgcagttcttgcgttgagttggattgggttgccaagccccgccaaataaaacaaaagggcttcctgtaatcctgcgctgcaccgatggtgatagcgtcgggagccgttgacaggggccacctgtccccgattgctcccctgtcagagtcgccgtcgtcctcatcattcttctcccaggatctcgtccccactgagaggcaagttggattctggaaatcgtcagagtcaatggtcgatcacaaagggagcaagcctattttcacttctccactcgataaggcccatcccataggctcaagtcctgcaggtggtctggaacatcaacgaggtcaagccttcaaggggaagctgggcatgcttaaccttggtaatttggtggaccaacaagaaaatgctcctggcataccttcgatttcttggggtgatgtcctcagtacctccaggtccagtcttggcttgtctacaggagggacggcttttgttgaaccacccagtgctgatcaacatgtgcaagactatggagactgcttttcatccagctccttcactgaagtcttcggtagaaaatcaagattgatggcaagtggcgtttatggccaatcagctggtgcaaatgattccggttatgacggagatgaacctctagggtccatgaaagaaatggaagctcaaactattggtgatctccttcctgatgacgatgacctgatgtcgggaattattgatggctttgaatacaccggcttgtctaaccaggatgatgccgatgaagatatattctacactggaggaggtttggagctagagcatgatgattccaacaacgtcgacaaatttcgtgatgtgtccttcaagattcaactttctgagaagcactctatcgataaacaccattccagagctcttattgtaaaaaatattaatccaggcatcgagggttctgatttaagggctctgtttcagcaatatggggacgtacagacattcgacacatcctgcaagagccatggaattgttacagtgtcttactatgacattagagctgcacaggacgcagtgagagcagtccataacaaacctctggggctgatgaaacttgatgttcaattttcccttcctaaggaaaatgttccaaacaaagatcccaacaatggaacactggtggtatctcttattgactcttccatctccagccatgatcttctccaaaaatttagtgtttatggcgatgtcaaggagatttacaagtctcctacaagctgcaataagaaatttgtagaattctatgatatcagagcagcacaagaagcactgaatgacctcaacaagggtgaaatatcatgctcacaaatcaaagttgagcatagcttttctggaggagcaggatcttgcttcgcagagcaatattcaggagaacagaagcaaaatgccgtagctcaccaacttaagaactctccacctgggaccattgggaagttagatactaagagttgggacagcagcactgttcataatttatattctccagttagaccgcaacacgataaatcacaacatggcttctctgtgaatcctcctcagaagttgtcatcgcctatcagaattgaatctacacagcagcatagtaatcaaactgcttttggtgaacatagtggatctcttggtcatggcaactttggaggtgggctgcaagccttccacccgcactcactgccagagtgtcacaatggtatttgcaatggctataactccatgacattaaatgcaaggaattctaacttcagatttactgaaggaatagactacaataatcacaaagttgaccacagtgaccttcatggtcattcctctgatcaaaatgaagcaattagagttgctggaattggaagttgcccccttcatggacatcactatacctggagtaactcaaatggttttcctcaaagcccctctgctccaatgatgtggcctaactttcagcaaccagtgcatatgcattgctaccctgctatgcctcctcacatccggcgcagtgctgcccatcctatggaccaacatcacttgggttcagctccaaacagtgttggtggttttgcaaatgcacactcttttcatccaggatcccttgaaagcgtagggtttcctggcagccctcagctgtatccatcagatctctctgtatttgcatctgccagaggaaattacagggagaccatgttctctgccataagtgccgggtttccatcaattcagcaaattcttcatgcgaccaacggaaggaatcctatgatgcacgtctccacctcatatgacgccactaatgatcgcataaggagccgcaggcatgatggaaatgctgcccagtctgaaaacaagaagcagtttgagctggaccttgaccgcatagctaagggtgaagactcgcgcaccacactgatgataaaaaacattcctaacaagtacaccagtaagctgcttttggctgtcattgatgagaatcaccgaggaacttatgatttcatctaccttccaattgattttaagaataaatgtaacgtgggatatgcattcatcaatatgacggatccacagcagatagttccattttacaagacattcaacggcaagaaatgggagaagttcaatagtgagaaagtggcatcacttgcgtacgccagaatccagggaaggaacgctttgattgctcatttccagaattctagcctgatgaatgaagagaaatggtgccgccctatgcttttccacaaagatggcccgaacgcaggagaccaggaaccattccctgtgggtaacaatgttcgttctcggtccgggaggaacagaccacttagcagtggttcggagactaccaaagaggcaagtccatcaacctctcctaactgaagagaagccggctcccgatattccaactcaggacaggcaggcggtatttgctcactaactggaggctgaagggcatgtaataaatcatccccagttttgctgcttctttttcttttggtcctcgtcagcaaggtgacctgacttgctgagtgtgactagctaacgagaattctgcactgcatgagcctgctgaagattcaccttaaagtaactatgccttggttttgccataccattgacgtcaacggctacaggtaatggagaagacctggagtggtagagggaggtgtgtttcaggcgggtgaaaattcaagttgtacagttgaactcaccaggattggaaaatggtcatcaattcaaatttgagttgtttttcttagggttcttcttgctatgtttgatctcgtttatgtgcgtgtcatgtgtccacggtgtgagcccaaatgtttgaatgccttgtctttgtgcaatttctctcaaacctcagattctggtgtgctggttcattccatgtcctcttttgtttttcaaattcaagatttattacatcataaacatgttacaaagatggggggtcatgttgccccgaacaatccaagtttcaaaacacatgctagatattacaggttggagaatgaagcccctagagaaaaggcatggatttggggtagttgcccgtcttgctttttttttgcaagaacatcagctatcttgtttctctctaggaacctgttgtgccaaaatcatggcgtaagccaacacctggctgccagttaacaaaattgcatctcgcagatcgagtgcagcagctaccttgaaattaaataggaattgcatcctggaagaaagaagcatggggaatacctgtagcaggtcggtctcccccaaaccaaaagaaatggctgcaacactgcgcacagcaaaggttccacacccaaaaaagagggcgcccagcacccactaccttcagcatgctctgccacggcttctggtcctcctcgctggactgtcatcagctcccgtggcattcacactgctccgagtcaccctgcggccgctgctcacagcagggctgccgttgccgtcatcatgcatatcaccactcttcctggtccgtttcataggagtgacgcacacatcaacctcttccactgcagcactgctcttcaccctcttgccaccagtctcagcatcagccttgtgcttcgtctgtttcgcagcagcatcttcatcagccgtgcgcttcttcggctgtttcgcagcagcatcttcaactaacacatccaccacttcagccgcgcccatctttgactttttatcatcttttgcaccctccattt

SEQ ID NO: 133984 - DNA, 4449 bp, Zea Mays
aataaatagatagataccgtgaatcctttccatggccacgatcaagaaaacctgtcttcgtcgcctgctgtctattcgtcaatgacgatcggataactacctgcagtgaatgaaccaacgagactttctcctcatgcatcctttcgatgtttcttaagcaggaagcagttaatggtcgagaggggccacaacctccagccgttgcagttcttgcgttgagttggattgggttgccaagccccgccaaataaaacaaaagggcttcctgtaatcctgcgctgcaccgatggtgatagcgtcgggagccgttgacaggggccacctgtccccgattgctcccctgtcagagtcgccgtcgtcctcatcattcttctcccaggatctcgtccccactgagaggcaagttggattctggaaatcgtcagagtcaatggtcgatcacaaagggagcaagcctattttcacttctccactcgataaggcccatcccataggctcaagtcctgcaggtggtctggaacatcaacgaggtcaagccttcaaggggaagctgggcatgcttaaccttggtaatttggtggaccaacaagaaaatgctcctggcataccttcgatttcttggggtgatgtcctcagtacctccaggtccagtcttggcttgtctacaggagggacggcttttgttgaaccacccagtgctgatcaacatgtgcaagactatggagactgcttttcatccagctccttcactgaagtcttcggtagaaaatcagcaagattgatggcaagtggcgtttatggccaatcagctggtgcaaatgattccggttatgacggagatgaacctctagggtccatgaaagaaatggaagctcaaactattggtgatctccttcctgatgacgatgacctgatgtcgggaattattgatggctttgaatacaccggcttgtctaaccaggatgatgccgatgaagatatattctacactggaggaggtttggagctagagcatgatgattccaacaacgtcgacaaatttcgtgatgtgtccttcaagattcaactttctgagaagcactctatcgataaacaccattccagagctcttattgtaaaaaatattaatccaggcatcgagggttctgatttaagggctctgtttcagcaatatggggacgtacagacattcgacacatcctgcaagagccatggaattgttacagtgtcttactatgacattagagctgcacaggacgcagtgagagcagtccataacaaacctctggggctgatgaaacttgatgttcaattttcccttcctaaggaaaatgttccaaacaaagatcccaacaatggaacactggtggtatctcttattgactcttccatctccagccatgatcttctccaaaaatttagtgtttatggcgatgtcaaggagatttacaagtctcctacaagctgcaataagaaatttgtagaattctatgatatcagagcagcacaagaagcactgaatgacctcaacaagggtgaaatatcatgctcacaaatcaaagttgagcatagcttttctggaggagcaggatcttgcttcgcagagcaatattcaggagaacagaagcaaaatgccgtagctcaccaacttaagaactctccacctgggaccattgggaagttagatactaagagttgggacagcagcactgttcataatttatattctccagttagaccgcaacacgataaatcacaacatggcttctctgtgaatcctcctcagaagttgtcatcgcctatcagaattgaatctacacagcagcatagtaatcaaactgcttttggtgaacatagtggatctcttggtcatggcaactttggaggtgggctgcaagccttccacccgcactcactgccagagtgtcacaatggtatttgcaatggctataactccatgacattaaatgcaaggaattctaacttcagatttactgaaggaatagactacaataatcacaaagttgaccacagtgaccttcatggtcattcctctgatcaaaatgaagcaattagagttgctggaattggaagttgcccccttcatggacatcactatacctggagtaactcaaatggttttcctcaaagcccctctgctccaatgatgtggcctaactttcagcaaccagtgcatatgcattgctaccctgctatgcctcctcacatccggcgcagtgctgcccatcctatggaccaacatcacttgggttcagctccaaacagtgttggtggttttgcaaatgcacactcttttcatccaggatcccttgaaagcgtagggtttcctggcagccctcagctgtatccatcagatctctctgtatttgcatctgccagaggaaattacagggagaccatgttctctgccataagtgccgggtttccatcaattcagcaaattcttcatgcgaccaacggaaggaatcctatgatgcacgtctccacctcatatgacgccactaatgatcgcataaggagccgcaggcatgatggaaatgctgcccagtctgaaaacaagaagcagtttgagctggaccttgaccgcatagctaagggtgaagactcgcgcaccacactgatgataaaaaacattcctaacaagtacaccagtaagctgcttttggctgtcattgatgagaatcaccgaggaacttatgatttcatctaccttccaattgattttaagaataaatgtaacgtgggatatgcattcatcaatatgacggatccacagcagatagttccattttacaagacattcaacggcaagaaatgggagaagttcaatagtgagaaagtggcatcacttgcgtacgccagaatccagggaaggaacgctttgattgctcatttccagaattctagcctgatgaatgaagagaaatggtgccgccctatgcttttccacaaagatggcccgaacgcaggagaccaggaaccattccctgtgggtaacaatgttcgttctcggtccgggaggaacagaccacttagcagtggttcggagactaccaaagaggcaagtccatcaacctctcctaactgaagagaagccggctcccgatattccaactcaggacaggcaggcggtatttgctcactaactggaggctgaagggcatgtaataaatcatccccagttttgctgcttctttttcttttggtcctcgtcagcaaggtgacctgacttgctgagtgtgactagctaacgagaattctgcactgcatgagcctgctgaagattcaccttaaagtaactatgccttggttttgccataccattgacgtcaacggctacaggtaatggagaagacctggagtggtagagggaggtgtgtttcaggcgggtgaaaattcaagttgtacagttgaactcaccaggattggaaaatggtcatcaattcaaatttgagttgtttttcttagggttcttcttgctatgtttgatctcgtttatgtgcgtgtcatgtgtccacggtgtgagcccaaatgtttgaatgccttgtctttgtgcaatttctctcaaacctcagattctggtgtgctggttcattccatgtcctcttttgtttttcaaattcaagatttattacatcataaacatgttacaaagatggggggtcatgttgccccgaacaatccaagtttcaaaacacatgctagatattacaggttggagaatgaagcccctagagaaaaggcatggatttggggtagttgcccgtcttgctttttttttgcaagaacatcagctatcttgtttctctctaggaacctgttgtgccaaaatcatggcgtaagccaacacctggctgccagttaacaaaattgcatctcgcagatcgagtgcagcagctaccttgaaattaaataggaattgcatcctggaagaaagaagcatggggaatacctgtagcaggtcggtctcccccaaaccaaaagaaatggctgcaacactgcgcacagcaaaggttccacacccaaaaaagagggcgcccagcacccactaccttcagcatgctctgccacggcttctggtcctcctcgctggactgtcatcagctcccgtggcattcacactgctccgagtcaccctgcggccgctgctcacagcagggctgccgttgccgtcatcatgcatatcaccactcttcctggtccgtttcataggagtgacgcacacatcaacctcttccactgcagcactgctcttcaccctcttgccaccagtctcagcatcagccttgtgcttcgtctgtttcgcagcagcatcttcatcagccgtgcgcttcttcggctgtttcgcagcagcatcttcaactaacacatccaccacttcagccgcgcccatctttgactttttatcatcttttgcaccctccattt

SEQ ID NO: 133985 - DNA, 1284 bp, Zea Mays
atgacaaataaacattatgcaggtatcccgaaagttaaaaaatctgatagacagcagaagcacggggacactctgcaagacggatcggcgtctgatgtaaaatggggagagaggaatcgttacggtgacgggtcgttcagggagcttcatgcagaaaacgcagctgaagtttttgccgacgatttcgagggtatcgtcggccgcgtcgtcgtcgtccgcgacgtcgggggcgtcgccggcgaggagggcctggcggcggcgcgccttctcctggtcggagagggtgttgtcggactcgatggcgcggatggcggcaacgagggtgttagcaggggccgagggagcggcgacggtggcggagtccagggagcagtcggggcagctccagctggcggcgtcggccagggcgggagccttggagaggcacggggagtgccagggcgtggcgcaggtggagcaatggaggaggtcgacctccggcggggaggtgacgcggcagaccatgcagacgccatcgccgtcgcaggggaggtccggcatggcggcggagggagtggtctcagggtacggtttcgcgggccgagcgggggaatgatggcggagtggtggggagaggaagtggagcgagaggcggaggtgggctgccgctcaacattcacctctgccaagggcatggaccacatgacgatgctcggcgccggagccccccaccagctctccagggctgaaccaatgcctgaccgtaggtcaaggttctggcagacggatgtgcagcctgtgcctcggatagacatcatctgtcctctgccttgtcgcccttcccgctcactgctcctcaataggcccagccccaagcctaatggatctggaaggccaatcggtatgcgtatgctccaagtaaggtcagcagccaagcacaagactggtccttttgctgaaactgtgttctgcggttgcagggcactcccattgtatggagcaaaccctacttatgatatcgttgatctcatccttagcaagaatgaccctgatgtggatactgattcaagcagccaggcggcctttttctgtggctcgcctcctgcccgcactaacaaccctgttatccatgacccacagtttggaaagaaagcaccatccttttctcctctaggaagctcttctggaaaaatggcagctggaagagctgaagtaggttctccgtcctgcaggtcgagcagcccaaaaatgagaatcgaaggttttgcttgcgggaacaaagagccccctcactgctttgcctga

SEQ ID NO: 133986 - DNA, 967 bp, Zea Mays
cccccccctccctcgacctctctttcttgttgcacgcctgcctgggcgaaccgtcgccgctatacaccaggcgcccagggcttcgccggcgccgagtagccaccagctgccgctcaacattcacctctgccaagggcatggaccacatgacgatgctcggcgccggagccccccaccagctctccagggctgaaccaatgcctgaccgtaggtcaaggttctggcagacggatgtgcagcctgtgcctcggatagacatcatctgtcctctgccttgtcgcccttcccgctcactgctcctcaataggcccagccccaagcctaatggggcactcccattgtatggagcaaaccctacttatgatatcgttgatctcatccttagcaagaatgaccctgatgtggatactgattcaagcagccaggcggcctttttctgtggctcgcctcctgcccgcactaacaaccctgttatccatgacccacagtttggaaagaaagcaccatccttttctcctctaggaagctcttctggaaaaatggcagctggaagagctgaagtaggttctccgtcctgcaggtcgagcagcccaaaaatgagaatcgaaggttttgcttgcgggaacaaagagccccctcactgctttgcctgatgatccccattgaccctgcctaaccctgttttgctaccctgcaacctgtacattttcgctgcccagctgagagttcgtttcgttataagctgttaaactagctgagagtcccatgtgattgtggcttttgaaaattgcatgatccaaggggacggatgtaaataggtcgagttgtccggtgtatgtactagatgttgtatgcgtctggtaaatgtagtcatgctgggtgggtccatgtgtcggcgtctgtaaatacagccatgcatttggatgtgaaatttaaatgcgtcttcagttatgttgccatgctgttc

SEQ ID NO: 133987 - DNA, 745 bp, Zea Mays
cccccccctccctcgacctctctttcttgttgcacgcctgcctgggcgaaccgtcgccgctatacaccaggcgcccagggcttcgccggcgccgagtagccaccagggcactcccattgtatggagcaaaccctacttatgatatcgttgatctcatccttagcaagaatgaccctgatgtggatactgattcaagcagccaggcggcctttttctgtggctcgcctcctgcccgcactaacaaccctgttatccatgacccacagtttggaaagaaagcaccatccttttctcctctaggaagctcttctggaaaaatggcagctggaagagctgaagtaggttctccgtcctgcaggtcgagcagcccaaaaatgagaatcgaaggttttgcttgcgggaacaaagagccccctcactgctttgcctgatgatccccattgaccctgcctaaccctgttttgctaccctgcaacctgtacattttcgctgcccagctgagagttcgtttcgttataagctgttaaactagctgagagtcccatgtgattgtggcttttgaaaattgcatgatccaaggggacggatgtaaataggtcgagttgtccggtgtatgtactagatgttgtatgcgtctggtaaatgtagtcatgctgggtgggtccatgtgtcggcgtctgtaaatacagccatgcatttggatgtgaaatttaaatgcgtcttcagttatgttgccatgctgttc

SEQ ID NO: 133988 - DNA, 641 bp, Zea Mays
ccccccctccctcgacctctctttcttgttgcacgcctgcctgggcgaaccgtcgccgctatacaccaggcgcccagggcttcgccggcgccgagtagccaccagctgccgctcaacattcacctctgccaagggcatggaccacatgacgatgctcggcgccggagccccccaccagctctccagggctgaaccaatgcctgaccgtaggtcaaggttctggcagacggatgtgcagcctgtgcctcggatagacatcatctgtcctctgccttgtcgcccttcccgctcactgctcctcaataggcccagccccaagcctaatgggttagttctttcttcactctcctctttacaccacggacttccatgcaacatactaatgttgaataaaaaattgttgaaccggcctcataggttgcatactttcagcgttaactggtaagccataggttttcgtgtgttttgtatggctgcatccttgctagattttgagcgccaactggtagtccatacgttgcatgtttgtatttactttatttccatccatgctagatttttgagcgataattggtagtttgcatatctttgaatgcatgcatacatgctagatctggaaggccaatcggtatgcgtatgct

SEQ ID NO: 133989 - DNA, 690 bp, Zea Mays
catatcaatgtctttttttgtgtgtgtttacgtaggttatatgcgtgcattattgcagcacaacatgttgttcttctgggtacctgatggccaactctgtctcctctttcagaatgaccctgatgtggatactgattcaagcagccaggcggcctttttctgtggctcgcctcctgcccgcactaacaaccctgttatccatgacccacagtttggaaagaaagcaccatccttttctcctctaggaagctcttctggaaaaatggcagctggaagagctgaagtaggttctccgtcctgcaggtcgagcagcccaaaaatgagaatcgaaggttttgcttgcgggaacaaagagccccctcactgctttgcctgatgatccccattgaccctgcctaaccctgttttgctaccctgcaacctgtacattttcgctgcccagctgagagttcgtttcgttataagctgttaaactagctgagagtcccatgtgattgtggcttttgaaaattgcatgatccaaggggacggatgtaaataggtcgagttgtccggtgtatgtactagatgttgtatgcgtctggtaaatgtagtcatgctgggtgggtccatgtgtcggcgtctgtaaatacagccatgcatttggatgtgaaatttaaatgcgtcttcagttatgttgccatgctgttc

SEQ ID NO: 133990 - DNA, 1047 bp, Zea Mays
atgtccaagtacgaagaatttcagagaaggggacggtggcgagtcgcaagcggccgactgccaccatcgagtagtgtgggcaggctgccggcgagggcaagtgtgcgcgactaccgcgaggacgagtgcgagcgggctgctggcgaggagtgtgtgtcgatagctggcggcgacagattcttggatcacatccattggactgaaagggatattgttgatgaagaatctgaaaatagttacgaagaatctgacaatcccatcaatgatgaagcaaaaaagtggagagagtttaaggctgacctaaagaacaaatattttgatgaaacattgagttttgaagagcttattgctaaaagggatgaaagggtgaaagaatctgattgggagtggttgataacttattggatatctccagaagccgaggccgagcaacaaggacgccctgccagaagagatgaaatatatgttagaacacacacgcgtaagaacaaagaaggggatattgtgcctctacctggagcagaaatattcattaataaatttgaagaagttgttgctgagaacccagaactgaaggacagaagtattgaagatggtgatttatatgcacatgtttttggagagaaagaaccaagaggtcgtattcgtggtttaggcttaggaccaactccacaagatgtaggtacccctggaactcaaatgaaaatatcaacaaagcttcaaatggcattgcaagctcgcagtcagtctgagcaagagaactcaagggtgcatcgttcagatgaggtggcacatgattacaatggtaataaccattcacaaaatatggttgaagatgacttgcaacttactaggcgagttgcaagcactgtgggtcgtctaaggaatcgtgaagatgttaatactattgaagagcaaagtcgcaggcgagacattgcaacaatgatgggtcgtaacaaaaaatcaacgttgacccaaggttctacagcagcagcattgaaagttcttcagattcgaaaaataccaccaaaatgttcagctcattga

SEQ ID NO: 133991 - DNA, 1538 bp, Zea Mays
atggagatgaaggacgacgcggtagtcctcgcagcaaggccgaggcctgatgcagcagcagcggtcgtcgtcgtcaccttgcgccgcatgaacagcagcggcgacggcaggatgagctacgccgacaactccggcttccagcgggccatcgcttccgtcacaaagaatgccaggcaggaactggcggcggcgctctaccgcgcccgcggccgaccgagctccatggtcatcgccgatctgggctgcgccacggggcccaacgcgctgctcatggtgttggacgctgtcgaggccgtgctggcggtggcggaggagagccacccctcgccgccgccccagctgcacgtcttcctgaacgacctccccgccaacgatttcaacgccgtcttccgactgctgccatcgtcgccgctcgccgctaccggctgctgcttcgtgtcggcgtggccgggctccttctacgagcgcgtcttcccggaggccagcctggactacgtcgtatcctcaagcagcctgcacttcctgtccatggttggtagccattagccagcaagcacagcactagcttacacgagtagctaattgctgataggactaggaccatgccatatatgatatatatatgggaccctatatatatatatatgtctatgtgtgttgtgtcgtgtcgtcttcatgcaggcgccgacgatgaggacggagcatcccaaccggggccgcgtctacgtctcggagtccggccccgcggcggtgcttgacgcctaccgctcccagttccacgccgacttcctcgccttcctctcctgccgcgccgacgagatgaggccccgcggcttgctcatcctcaccttcgtcgccaggagaaccgcccgccccaccgcgcacgactgctacctctgggacttcctcgccgacgccctcatggacatggccgccgatggcctcgtcgacgaggagcaggtccacgccttcaacgtgcccttctacggcccctgcctcgacgacctagccaaggtcatcgccagggaaggctccttcaccgtcagaaccatgcagctcttcgacatctcgcgccgctgcctcctcctccagtcggcgtcggacgatgacgacgacttgccgcagtggctagccatggagacgacaagcaccgttagggcggtcgtggagcccatgctgcgagcgcacttcggcttggaagccatggacggactcttctgcaggtacagcctccggctagaggagtactaccgcagcaacaccagcagaaacaaggacgacctcaccaacgtcttcctcgtcttggagaagaaactgcactagcgctagtgcgctactctagctagctatgccatggagatacatctactgctagtgctagatgcgtgcatgactcttcggataaacgtacggaatgggacatccctggtcccttcccagtccccagctccagacctccagtctccgtcgacaatcctcatcatgcatctgttttttttctagaaaggaaaaaatattatgtctacctgttttccgtc

SEQ ID NO: 133992 - DNA, 1494 bp, Zea Mays
atggagatgaaggacgacgcggtagtcctcgcagcaaggccgaggcctgatgcagcagcagcggtcgtcgtcgtcaccttgcgccgcatgaacagcagcggcgacggcaggatgagctacgccgacaactccggcttccagcgggccatcgcttccgtcacaaagaatgccaggcaggaactggcggcggcgctctaccgcgcccgcggccgaccgagctccatggtcatcgccgatctgggctgcgccacggggcccaacgcgctgctcatggtgttggacgctgtcgaggccgtgctggcggtggcggaggagagccacccctcgccgccgccccagctgcacgtcttcctgaacgacctccccgccaacgatttcaacgccgtcttccgactgctgccatcgtcgccgctcgccgctaccggctgctgcttcgtgtcggcgtggccgggctccttctacgagcgcgtcttcccggaggccagcctggactacgtcgtatcctcaagcagcctgcacttcctgtccatggcgccgacgatgaggacggagcatcccaaccggggccgcgtctacgtctcggagtccggccccgcggcggtgcttgacgcctaccgctcccagttccacgccgacttcctcgccttcctctcctgccgcgccgacgagatgaggccccgcggcttgctcatcctcaccttcgtcgccaggagaaccgcccgccccaccgcgcacgactgctacctctgggacttcctcgccgacgccctcatggacatggccgccgatggcctcgtcgacgaggagcaggtccacgccttcaacgtgcccttctacggcccctgcctcgacgacctagccaaggtcatcgccagggaaggctccttcaccgtcagaaccatgcagctcttcgacatctcgcgccgctgcctcctcctccagtcggcgtcggacgatgacgacgacttgccgcagtggctagccatggagacgacaagcaccgttagggcggtcgtggagcccatgctgcgagcgcacttcggcttggaagccatggacggactcttctgcaggtacagcctccggctagaggagtactaccgcagcaacaccagcagaaacaaggacgacctcaccaacgtcttcctcgtcttggagaagaaactgcactagcgctagtgcgctactctagctagctatgccatggagatacatctactgctagtgctagatgcgtgcatgactcttcggataaacgtacggaatgggacatccctggtcccttcccagtccccagctccagacctccagtctccgtcgacaatcctcatcatgcatctgttttttttctagaaaggaaaaaatattatgtctacctgttttccgtctactagtactagcttggatcaattattcaatttcttaattagtactttgtcctcctattcgtcggtctgatctataaggggattgaaggcgaataaatactctcct

SEQ ID NO: 133993 - DNA, 249 bp, Zea Mays
ctcatttgattatctgaagggagggctatgaagttaaggacaaaatagccagaatggaagtctcttatgcctctacaactgagcagattgagcaggaaatctgctttgcgtttctttttgttccccaaggttcagtcagctggtcaatcgccacatgataccccagtttatcttaacgtgtatgatttgacaccaatgaatggctatatatattgggcaggcctgggcatatttcactcaagaattgaa

SEQ ID NO: 133994 - DNA, 88 bp, Zea Mays
gtctcacgtatttgaccagcaacaaaggacgaagattggagttgtgtgaattgtgtggaggcgacacgggtcaggagcatttcatctg

SEQ ID NO: 133995 - DNA, 680 bp, Zea Mays
ttttacttagaagtaaagagaagttgtttacatttagccatcctctgtacctgaaacaagactatgtttctaccttgtctttctcatggttcttagcctatggtcgaagcttccatgcttgattcttcaaacatccaatgcagatcccttttctttgatggatatgctgatattcaaggctgtggaagagcagatcaagaagagagtagagaataaggcaaggatcttcgagcaaaatgccactgatagtgagtgcaaggtcgatcctaaagtgctctccaagctatatgatcagtgggtgatgccacagaccaaggatgtcgaagttgagtacctcctgtgcttccttgactaatcaccgattagctgtagctgtaaattttatgtatacatggtttcagttgcgctcgaaccaattgtcttgaccttgaatggacattttgatgtttatttcatgaatgttcaggtcaatgacaagagaaaccaattgcgttgtatgagttttagatcataactcaagttttttgtagatcttggtgctatttcatctgatgcgtcatgtttcagtgattgatttatagtgaacttgtaagatgtaaaatgacctttatgacagaactagctgcaagaacagagtattatgaggaacctttgttgaagtaaatgtaattgagtttcct

SEQ ID NO: 133996 - DNA, 864 bp, Zea Mays
ctcggtacattacctgccgtgccgcagcattagaggtcctgtgtctcgtaggtggacatattctccgcgtgacttcaggtgtcgtcgccgagttgtctccggccgagggcggcggcgcgaccggtaaccagcgtcagcgtgagtgtgacaggcgacatgactcatatccttcccaaaccctgtttagatctgcgcgttgggggctcttcctctaatccatcctttgcttgtatacgatctcgatctgtttcgttgtttcgattctgttattgccctgttcctctttccttaactcgcgcgcacgcggcaaccagcgtgaccgcgatcgtgagcgcgcggcggcgcggaagcccaacggcaaggggccccaggacgggctcaccccggagcagcgccgtgagagggacaagaaagcgctggaggagaaggcggcgaagaaggcgcagcaggcagcggccggcggcaccgggacctccacggacaacaagaataaggcaggtggcaagaagtaggccgcagcggcgagcggcgccacctctgtacgattatcgatccatgcctttagcttgtaacctgttcgcatcctcgtagatgcgatgcttgttgggtcataaactcgttttctgttactctgatatcaaaatttggtgatgagaataatacgtggtgttctggttttgtgggttattattttcttctctttctatcgttttctgttctgttccttgagtggccagccagtcgatggatgggaatcctctagtttagagagtttagaggatgaactagggtgtgaaggagcttttgcttgctattgtgaacaactgggatatgatagcttttgaaattggaaattagattcaa

SEQ ID NO: 133997 - DNA, 716 bp, Zea Mays
attacctgccgtgccgcagcattagaggtcctgtgtctcgtaggtggacatattctccgcgtgacttcaggtgtcgtcgccgagttgtctccggccgagggcggcggcgcgaccggtaaccagcgtcagcgtgagtgtgacaggcgacatgactcgcggcaaccagcgtgaccgcgatcgtgagcgcgcggcggcgcggaagcccaacggcaaggggccccaggacgggctcaccccggagcagcgccgtgagagggacaagaaagcgctggaggagaaggcggcgaagaaggcgcagcaggcagcggccggcggcaccgggacctccacggacaacaagaataaggcaggtggcaagaagtaggccgcagcggcgagcggcgccacctctgtacgattatcgatccatgcctttagcttgtaacctgttcgcatcctcgtagatgcgatgcttgttgggtcataaactcgttttctgttactctgatatcaaaatttggtgatgagaataatacgtggtgttctggttttgtgggttattattttcttctctttctatcgttttctgttctgttccttgagtggccagccagtcgatggatgggaatcctctagtttagagagtttagaggatgaactagggtgtgaaggagcttttgcttgctattgtgaacaactgggatatgatagcttttgaaattggaaattagattcaa

SEQ ID NO: 133998 - DNA, 1803 bp, Zea Mays
agacacatcacacgaggcatcgatttaaaaatattatactctatcacattactatatgacatacaagagaatcattgcgaatattatattatccaatccattagattaattaataggagtggcgagccagcacattattaccaatcaatgcaaaggtttccgaaaacgatgatgcttttgtgggtgaggcgtttcatcgagcaccaggagagcctcacacaaacttcattttctgcttctatcgaactccactcataaccaaaccaccacctatgcagatcaactgaccatcgagaccaagcgatgctgaataatcttcacgacgacgagagcgggtgggacgatggcgaggtcctcacgcgatgaaaagatttgcacgactggcgcaacgctgaggaaaactcgaccaggccacgacgagccgatgttgtagcagagaccaacggcaaaccccgtgttgagtacaaggaacgacgatgtcgaggcgaagattggagactacagccggtgaggcaagcccacgacagctgacatgctcgacgactacaaacgcagctggggagggagcatcggtaggtcgcgcagggaagaagacaaggacaaggccgagtagaggagcgcgcggctgcatgcaaggagctcggcatggctagggagggcgctgagctcgcgcgggagggacggcgccagcgagctggaagccgcgcgctgagggagttcacgaaggggagtaggaggaggaggcgaggacgagactctccatgtcgtcgagccgagccgcgctgcacgacaccggagagtgagcttgaaggcaagcgcacggccgggcgatttgaggggcgcgacggccaggggattgaaggcgagggagctcggtacggacaaaaatacgagcagagaccgagcagacatcatgggagagagagaaggagcggcttgggaatgagcagagggagctctgggctgagctgtggtcgagcgcggggaaatcgccatgggcgaggtggaggtccggccggagccgaggaacgcggctacgcagaggaactcgactgccatggcaagcacaagggcgagctggagatgcgacacgatggagctcggccgacagacagcttgcgtgtagggacttcatgacgcgcggtggagctaagtgccggcaagcatcccaagcgtgtcgcgcagaggagaaactcggcgtgcagtggggcaagccagagagctccagtgtcgaggggatgcaggctccaggcaaatcccagggcgcggccatgggaggtgggcagtcggcgctggggacgatggagctggcagagagctcgccgaggagggagatggatgaccaagcagagcgctggggcgagttcggagggagccaggggcgcgctcgcgcggtaccagggagctcggccgccatgggagcaggggatgggtgcgacgcagggaggagaggagatgggtacacgacgctggaaaagaaggataggctggagaagaaagagcagcgcgtagagagaaggagagttgagcggtagagagaacagcggcgcagggaaatatccagcgcacgccaggaagaggcagataaggacggccagaaaaatctggggagaagaagagcggcgtgtgcggcaagatatttttttccttttttacgagaatcacagatattttttaatccagatttttagtgatgtaaaatgggtcaggtcacaacaatatgggtcgacggtaattgtggcacggttttgattcgattcgaaatctgataaatttatctgcggtctgaacatctgatttcat

SEQ ID NO: 133999 - DNA, 2755 bp, Zea Mays
gtctctctcagtctctctcctgccctgtccgtcccactccccgtccagcggagagagaccctgtgggctgtggccgggcagccgtttcccctccccttccctctccgctccctccagagtctactgtagcgcagtgccgtagggtttcgcgtcctatccttcctcgcatcctccatggccgatcctgacgacctcggccgccgcctcgccgcggtcgccgtatccgagtctcctaccgccgccgcggctgcgctggagagcagcaacaacaacctgttccaggtgatgcgcgccgtggaggacgcggaggccaccatccgccagcagctggaggagaacagccggttgaaggacgagctgatgctcaagacgcgggagctccacagaattaggtcagaagccacagaccaagcttcctctcatgggatccgtatccatcaggatcgcgctcttggtgcccacacagacacctcctccactgctcccatcaggactaccgctacagcagcagaggccttcgaatggggagctggggatgccggcatcaaccacaagtaccttgaggccaaccaggctaatggaattccccgtaaatcaccgagcgctcccgatagcgctttcccatctcagctatctaccccgtcttcgcgatccctttcaccaactaggcaccacaaagaaacagactatgattctaggctcaacttatccggacaaggcgcactgcctgtttcagacctcaactcaaacgtcgtcatctggaagcaggtatcaactgtttgcttcgtgtgtctgttgccatactttttgatcgattgattcactcttcttgctgagctgcttatttccttccacaggatctccttgttaaggtcaaagaacaaggggaggagattgcacagctgagaaggcatctttctgactactctgtcaaggaggcccaaatacttaatgagaaacatgtcctggaaaaacgcattgcatatatgcgcatggcatttgatcagcagcagcaagatctggttgatgctgcatcgaaagctttgtcctacagacaggatattatcgaagaaaacatccgtcttacatatgcattgcaggcagcacatcaagagagatctacattcgtatcttctttattgcctcttctatcagaatataaccttcagcctcctgttcttgatgctcagtctattgttagcaatctgaaggttctgtttaagcatttgcaagaaaaacttattattactgaggagaagctgaaggaatcacaataccagattactccttggcatgctgaatcttcaaataatacaagtgctgctgcacagtcgccttctcatcctcctggaaatgcattgatcaaagccaaccttgacattgtgccccagcaagcatattctcatgtacattctccagtttcttctcctgttcaaactaggcgtgactgggatttgttagggaatgaaaatcgtcaggtcattcgaagtgaggttgccacaacaagtgcagagcatgataatgttgggaggacctctccttcaaccagcagccataatatgaaggatgcccctcaaagaaccgatcatgattcccgtgctgttcgatttaacattgaatccaaggatcaaaacccatcattcaaggaccttattaagagtgatgcctcagaaagtctggagggagctgaggcccaaattccacaagaactttctgcgcagcaggattctggaggctcacctaatttgacatctggtcttgatgacgcaaatccaccatacccttatcttcctactgtccttgaggagcctagttcttctttttccgaagttgcagaggatgatccgcttccagccatagaaggactgcgaatcacaggtgaagcctttcctggaagagaacttcaagcaagtgggtactctatccatggaaccacaagttgtaattttgagtgggtacgccatttggacgatggatcaataaattttatagaaggtgcacggcagcccacctatttagtatctgctgatgatgtggactttgtactagcgattgaagtccagcctctggatgacaaaaaaaggaagggcgagattgtgaaggtttatgctaatgatcaaagaaaaattacatgtgaccctgaaaccaaggagcatattaagaaaattctctctctggggcatgtctcttatgaagttctattacctgttagatttttagatatgtgggaaccagctattttggcaataaagagggaaggttacagcgttaagtgtaatggacagcgcggtgtcgttgtcatggagaaatttcagcaagcgatgaccatcaatatcccatttgggcgtcctactgagttttcaattttgtctgctgatggtgctgagtacaatttaaagcctgcagagaatgccccatcacgagatgccattgttctaatactaaggctattcaggatgaaggctgttgagaagagcaagggaaaaagaaagggcatcttcttcaagtagtttgtagttgtagcagtattactacgtagtgtcatggcaggttgactgtatctgttacctatgttttcgcggttcatgtatgtagaaggaaagagcaagttgtctgcgtgcttatgtaaagttccgattcaattcgattagattcaattggcaccgtacccagttttttgtttgtttttgttctgttgtagggagggatgaattcattttccaattaatgttggtttgtttggccagattgtaga

SEQ ID NO: 134000 - DNA, 762 bp, Zea Mays
gagctccatttcttcttgagaggattgctggacaaacatgagctatgttagtgagagagaacaatcatgttatggtgtagaagggtttcgtttggcatattagatatatctcagtatctgctgagtaactcctatttgtgcagaccctgaaaccaaggagcatattaagaaaattctctctctggggcatgtctcttatgaagttctattacctgttagatttttagatatgtgggaaccagctattttggcaataaagagggaaggttacagcgttaagtgtaatggacagcgcggtgtcgttgtcatggagaaatttcagcaagcgatgaccatcaatatcccatttgggcgtcctactgagttttcaattttgtctgctgatggtgctgagtacaatttaaagcctgcagagaatgccccatcacgagatgccattgttctaatactaaggctattcaggatgaaggctgttgagaagagcaagggaaaaagaaagggcatcttcttcaagtagtttgtagttgtagcagtattactacgtagtgtcatggcaggttgactgtatctgttacctatgttttcgcggttcatgtatgtagaaggaaagagcaagttgtctgcgtgcttatgtaaagttccgattcaattcgattagattcaattggcaccgtacccagttttttgtttgtttttgttctgttgtagggagggatgaattcattttccaattaatgttggtttgtttggccagattgtaga

SEQ ID NO: 134001 - DNA, 312 bp, Zea Mays
atggctacaacaccattaccaaggccgccaaagggggcggatgggctcctggacggcgcacccgggctggacgacttgttccaacttgggttcttgcccctggccgggtcgactgcgatggcaggcgtaggcagtggtcgtgctgacggcggaggagcgctaaaaggaggtggtgcaggggccggggacgctggcggagatggcgagggcgtcggagcggcagacggcgtcggggacgttggagggggcgagagcagcggcggccttggaggagcagcagccgcccgcggcggcggcgaggctgtgtgttga

SEQ ID NO: 134002 - DNA, 4060 bp, Zea Mays
gggcggctcccctcagcttccttccacatggctcgtcgcccgccgccgtcaccccctcccccggcgcaagggaacgggagtgggagcgggagcctcaccaccagagacgccctcgcctatctcaaggccgtcaaggacaagttccaggaaaagcgccacacgtacgagcagttcatccaggtcatgcgtgatttcaagagcgacaggctcgacagcaccggcgtgatcgcccgtgtcaagaccatcttccacggctacccggacctaatcctcggattcaacgccttcctgcccaaggagcatgccatcaggcctctggacctccgcgaggacaagaagcccgtcgattatcccagggccatcagccttgtcaacaggattaagagccgattccagcaggaggaacatgtctacaagtcattcctggggatcctcaataagtaccgcatgcataacaagcccatccaagatgtttacaacgaggtcaccgcactgttacatggccatccagatttactcgaggagttcagtcattttttgcctgatacgcccatgcctcctccgcaggcaggcactactactaaagttaggcatgatgacaataatgctataatgcattctgtcacgagagctcagacagtccagagggggagagattttccatcaactgctgattgggacaccagtgctgatcgccttgatcttgagcatgatattcaaaaaagttgtattgagaaggagaaaattcgtgatgcctgcccacgtcagcatagaagaggttataaaaggaatgagaagaatgacgagtatgaaaatgaagatttggatgtggagcaatgcggtcacaaatcacaaagaaagatggagggtactggtgatgatacaccaggggatgctacattgtcctcattcaattgtaagtatgtagtaaaaagttcacacgcacaagagtttcaattttgtgagaaactaaaggcacatctagagcctgaagcttaccaagagttcttgaaatgccttcacatatacaaccaagatattattacaagaaatgaactaaaaagattggtaaaggatatacttcaacattacccagatcttgtgaatggattcaatgacttcttgggtcactgtgaaaatatagatggttttttggaaggaaccttcaataaaaggcaaacatcgcggatggttagacctgtggaaaaagagagatacaaggagaacgagggggatagcgatcctgagaaagagagatacaaggaaagcaaaaattctgaaagagtattgaccttcaattctaaggaaggagcagctcatgaagctagtacattccctagcaaagagaagtataacttatgcaaaccaatatcagagcttgatctatcaaattgtcagcggtgcactccaagttaccgacttttgcctaaaaattatccagtaccttctgcaagcaacaggactgacactgaagcttccgtgctgaatgatcgctgggtatcggtgacctcaggaagtgaagattattcatttaagcatatgcgcaaaaatcagtatgaagaaagcttgtttagatgtgaagatgacatgtttgagctggacatgctgttggaatctgttactgttgcaattgagcgtgttgagaagttggtggaaaggatggaaggcaattcactgaaaccagacagctctatctccctcgatgaacatttgactagtttgaatatgaggtgcattgagcggctatatggtgaccatggacttgatgttattgatgttcttcgaaaaaatgttggtgtgacattaccagttattttaaccaggcttaaacaaaagcaggaggagtggtcaaggtgccagtcagattttaataaagtttgggctgaggtatattcaaaaaattatcacaagtctcttgaccatcgcagtttttatttcaaacaacaagacacaaagaatttgaacacaaaagctctattatctcagattaaagaaatcagtgagaagaataggaagggggatgatgtgttacttgctattgctgctgggaataggtggccactagttgccaacatgtcatttgtgtatttggatatggacattcatgaagatctttatcagatcatcaaatactcttgcggagaactatgcaattcttcagatcaagttaacaaagtgatgaggatctggacaacatttttagagcctctgttagggattcatcatagggctcatggcgctgaagatgcagatatggtaaaatcaaagaggcgaactagagaagttggtttggcatgtggcgggaaaacaaataatgctgcagcaaagggtggtaatggctctaaaagtgctggagctgagtctgtggctgaatttatgggtaggaatgaaacaattccgtctatgaagagcataaaacatgacaggataacatctttgtatggagtgggtgtacatccatttagtgcatattcggtgtcccacaacaatttaaggcctgaaacagaagagggtgaattatctcctaatggtgatttcaaagaggaacacttctgtgttttcgaagatgaagctgtagatggaacttctaaacaaaatgaaggttctaccagcagatctccccagggtagacctaagaattatctcaagttttcaggcaaggatcattcaggtgcagaaaatgaaggtaacaagagagcccagaggtctgcagaggatagtgaaaatgcatctgaggctgatgaagatatctctggcagtgaatctgctggtgatgaggagtcttctcatgaagatcaggaggaagaagaggatgatatggatcttgatacaaaggcaaaaaatgactgcagagcagaggtaaatagggaggcacagggtttggatggaggaacatcattgtcattttcagaatgtttgcaaagtacagttaaaccaatttccaagtatgtttccactgcattaccaaaccatgaaaagaaactttctcacatattttatggaaatgactcattttatgttctgttcaggctacatcagatcttttatgagagaatattgtcagctaagacaaactgttccacatcagacaataactggaaagcttcaaggcacataaattctccagatcaatattcaaggtttatcagtgcactatacaacttgcttgatggttcttctgaccacaccaaatttgaagatgactgccgctccatcattgggactcagtcatatgttctctttactatagataaactgatatacaaaattgtgaagcagcttcaagcattagcatctgatgaaatggacaaccagcttctccagctttatttatatgaaaagtcgaggtctcctgggagcttctttgatctggtttatcacgaaaatgcacgagcccttctacatgatgacaacatataccgttttgaatgtcattctgatcctacagaattaactattcagctcatggagtatgggaatgaaaaacctgagttgactgctgtctcatttgatccaaccttttcaccgtatctttataatggttatctgtcaagtattgatgataccaaattggttgatgacgtcttccttaggaggaataagcggaagcaagggaggaatgatgactcccctacttccttgaagatcatggacaatgtcatgtttgctaatggtcttgaatgcaagatatcttgcgaatcttcaaaagtctcttatgtcctcgatactgaggatgtcttatttcgtacgagaaagaggagaagctctatctagtggaaccatgcctgcgctgcaaagacaaattttgtgaaaattaacaccgtaaaatcgatagtttcatttatctcttcagaccgtatagggtcttgtggtagagttatgttaattacaatggcatgcactggtgggatcctcgtgttgttgatctgtcacttcactggaatatattggtgattctttgtgttttactcgctaccaattatatatgagcgtgtagcatgggcgagtcacggaggcagtgttccgtatgtgtttttgcagttcaacgcgctgggttcac

SEQ ID NO: 134003 - DNA, 912 bp, Zea Mays
ggagagcaaatggataacgatgatatcaagtatgatgaggaatatgtattgaatgcacgaggaatgaatctcttcacatgccaatggagacctttgaactctgaaccaaaagctctgatctttctatgccatggatatgccatggaatgcagtatttcaatgagaggcacaggtacaaggttggcgcaggctggatttgtagtgcatggaatggactatgaaggccatggaaaatcttctggacttcaaggatatattaatagtttcgatgacattgtggttgattgctctaagtactttgcaagtgtctgtgagaaagaagagtataagaaacaaaagagatttttacttggagaatccatgggcggggcaattgtgcttatgcttcatagaaaggaacctaccttttgggatggggccattttggttgctccgatgtgcaagatattagatgatatgaagcctcaccctattatgatgtcaattttaagtaagcttagcaatgtgatccctacatggagaatcattcctaatgaagatatcatagatagagcaattaaatgtgaggagcgacgtgaagaggtaagaaataatcattattgctataaaggaaagcctagggtaaagactggccatgaaatttttatggcaagcttggatattgaaagtaatcttgacaaggttactctaccattcatcatagtccacggtggtgatgatgctgtaactgaccccacagtaagtgaggcactatatacaatagccacgagcaaggacaagacactaaagttgtaccctgggatgtgccatgctttgacttcaggagaacccgaggaaaacatagatattgtgtttgcagacatcatcaaatggttgaatgacagggtatcatcaatttcctatcttggatcc

SEQ ID NO: 134004 - DNA, 1577 bp, Zea Mays
cccctgccatttttcctttcgcagggccggacactacactaccatttttcctttcgcagcgtcccgtctgtctgtctgtctgcctccctccgctcacctcctctgcttcttctcgctttcttccatcttggtccagcctccactcttcctgctgagccatggcggctgccgaagaagggccagagccactcaggtatcagactctggccctgagggtgagcatccactgcgagggttgcaagaagaaggtgaagaaggtgctccacagcatagaaggggtgtacaagacggacatagacacgcagcagcagaaggtggtggtcataggcaacgtctctgcagacgcgctcgtcaagaagctcctcaagtccgggaagcacgcggagccgtggccggagcctgctccagccccaccggccgccgacagcccgcccgggcccgacggatctcccggcagcgcaggcaagaagaagaaaaagaagaagggcaacaagagccccgaggcggcgaacaacaagcccgccgatccggcgccagcgcccgcgcccgcgccggcggagggcaacggcggacccaaccccccggagcagcacgacaaggctgacggcggcgcctcgtgcgatgaggcatcggatggtgagcaggataagcctgaggctggcggtggcggcggcaacggctcccctgacgccggagaagccaacgagggcggcaaggtggccccttccgccatgacgccgcacggcccgcagcccatcgcggctgccaccaacagcaatggtggtggtggtggtggcggcggcggcggcaagaagaaaggcaagaaaggtggccacggcaatgccaacagagacggcgccgggccaatcgtcgaggtccagcccccgccggacgcacccacgaagccggccgccggcaactccggccctctcactgtcatcgacgcgggaccgtacccaccaccggcagcggcggcgatgagctacccagggtactacgccgccggggtccacccgccggcgtacgtcatgagctacagcacggcgcacccgagctctgcgctccggagcagcgcgtactaccacccgatggccggtgcgccgtacacaccagggagcggcggcgggtacttctactcgacggcgccggcgccggcgccggcggcgcccggatcgtactacatgttcagcgaggagaacgccaacgcatgcagcgtcatgtgagaagattagacggttaataatcaactcaactcaattattaactgcaagaagatgttgcagagagtggatgtgctagtcattatgctcttgttgtgcccaagaactggttgtcattgcaacgttattttgctgtatctgcaaaatacatggattttgattttggatgtgttattagtttatacattatagtagtttactactatatatgaactgaagcatcatttgcttggttgtttgttattacatttcgcttcatatagctggctattctttgattcatgggcgtaaggccaaggaaacatggtgtcaagaaggtatcttaggaagacaaaggaacagagataatcaaaaaaa

SEQ ID NO: 134005 - DNA, 1688 bp, Zea Mays
cccctgccatttttcctttcgcagggccggacactacactaccatttttcctttcgcagcgtcccgtctgtctgtctgtctgcctccctccgctcacctcctctgcttcttctcgctttcttccatcttggtccagcctccactcttcctgctgagccatggcggctgccgaagaagggccagagccactcaggtatcaggtgagaagctcggagcccgccctatccaagacttgccggtactcatattctgactgatgcttcctttggttaaaatggctgtgatcttcttttcttgttctctgttgccagactctggccctgagggtgagcatccactgcgagggttgcaagaagaaggtgaagaaggtgctccacagcatagaaggggtgtacaagacggacatagacacgcagcagcagaaggtggtggtcataggcaacgtctctgcagacgcgctcgtcaagaagctcctcaagtccgggaagcacgcggagccgtggccggagcctgctccagccccaccggccgccgacagcccgcccgggcccgacggatctcccggcagcgcaggcaagaagaagaaaaagaagaagggcaacaagagccccgaggcggcgaacaacaagcccgccgatccggcgccagcgcccgcgcccgcgccggcggagggcaacggcggacccaaccccccggagcagcacgacaaggctgacggcggcgcctcgtgcgatgaggcatcggatggtgagcaggataagcctgaggctggcggtggcggcggcaacggctcccctgacgccggagaagccaacgagggcggcaaggtggccccttccgccatgacgccgcacggcccgcagcccatcgcggctgccaccaacagcaatggtggtggtggtggtggcggcggcggcggcaagaagaaaggcaagaaaggtggccacggcaatgccaacagagacggcgccgggccaatcgtcgaggtccagcccccgccggacgcacccacgaagccggccgccggcaactccggccctctcactgtcatcgacgcgggaccgtacccaccaccggcagcggcggcgatgagctacccagggtactacgccgccggggtccacccgccggcgtacgtcatgagctacagcacggcgcacccgagctctgcgctccggagcagcgcgtactaccacccgatggccggtgcgccgtacacaccagggagcggcggcgggtacttctactcgacggcgccggcgccggcgccggcggcgcccggatcgtactacatgttcagcgaggagaacgccaacgcatgcagcgtcatgtgagaagattagacggttaataatcaactcaactcaattattaactgcaagaagatgttgcagagagtggatgtgctagtcattatgctcttgttgtgcccaagaactggttgtcattgcaacgttattttgctgtatctgcaaaatacatggattttgattttggatgtgttattagtttatacattatagtagtttactactatatatgaactgaagcatcatttgcttggttgtttgttattacatttcgcttcatatagctggctattctttgattcatgggcgtaaggccaaggaaacatggtgtcaagaaggtatcttaggaagacaaaggaacagagataatcaaaaaaa

SEQ ID NO: 134006 - DNA, 473 bp, Zea Mays
ggtttccgttgtggccgtacatgaagttgttgttctggtgctagctggtgctacccatcttcaacggcgtggcctacaactacgaggcgcacgtccggcactacttcaagatcggcagctacgtgagccccagctacagcgagcaccaccgccgggtgctacagatgacgagcctcgacgcgcgcaggtctgtcgagcacttcatcgacatgcacgggcctgacgcgctcgacaggatcatctgagctgctgagcaggaagccaagaggacctagcagcttagcgtgcgctgtaacttaagggattcagtccatagggcttcagaattcagatgggggtgaaggcgaagcaatgtgaattgtttggggcaaaaaccgaagcagcccgatgcctggcgtggattgttgtactgttatcgctcgtgtgaattactttgtgcagtgcatacatggtacgcgtgatgtttgtttgat

SEQ ID NO: 134007 - DNA, 748 bp, Zea Mays
gcgctcagattctagtcaaagcttgctgcttgtgtgtgcagtccttgtgtactaccggtatagccctctccccagcccaggtttgccctgtcctaaaacccttctccccatggactggatgagctcagtgacacacccctttcccttgcctacatattctgtaatttggggctagttattttggagctcctcactgcccttaagttccagccaagactctttgcatatgcgaggtgttcatgatgttcttaagtctacacagctccctccctagccacaaaaaaaattggtctatccagaggccgggcacaccatcaaatgtgtctgtggtgaccactctagtcagtttgccgtcttgccgtggctggagcaattcaaaaaggtaccggtccagtttatgcgtgttctgtgatcaccatgtgacagtgaagctcaccaagttgatgctcctaatgctactaccgtatgctgaccggaacagggtcgtgccgtcatgatctagcactgcagacagccccaccgtcgacctgtttaattgaatcgtccctggccaatctcgcgcccgcaccgtgaccaagaaacgttagtgatactctctgcgcacttaatttaaacactaccgtgtgaatactttggaattaaggatcactagacctactgttccaccgccgtcgttggtaacattattctcgggtcgtcgtggatcttttaagcccatactattgatcaccgtggttcagggatcaca

SEQ ID NO: 134008 - DNA, 211 bp, Zea Mays
ccgaccctatctacaaaacagatcctatctctacaaccgaccctatccacaaaacagatcctatctctacaaccgatcctattcacaaaatagatcatatctctacaaccgacaatatccacaaaacatatcctatctctaaaaccaaccatatccaaaaaacagatcctatatctaaaccgaccatatccagaaaacaaatcctatctct

SEQ ID NO: 134009 - DNA, 108 bp, Zea Mays
ggcgaggtcattcgtgtgtcacgggtgataaccaatggagccgtggtgtagtgattgcgaggaaccgttcgctcggagccttggatcatcaacgtcgagatctccact

SEQ ID NO: 134010 - DNA, 536 bp, Zea Mays
gacgagccttcttcctgtccttgggctctggtcttgggttccctgcatgtgtagggtaatcctcgagtcttcaagcttgtgcagtcctcttcccagccaccaactcggtcagttttctgcatagcgcgtcatctttctgccagtggctaccacagccaccaaattcccacctcactgtcgccagggcagctagagcagttgcacacccaagtaaggcttgttgtgaggtcctcgcgtggcagtgatgctcaccgaggtgagttacctaattttaccagggtctgctgatcggaacagggccatgtcgccgcagaacgcagccgtggacagctctactgctggccatccaatccatgttgatctcgactgatcttgcacgagcactgaaggcgtgagctccgagcagaaggagtgtaaattcaagacgaagtggttatggaagaggagtttgctccagtgcctattcagcaagtggatggagctatctaactggttattgggtagaaaggtcttgagcctcttcactgcaacaaagg

SEQ ID NO: 134011 - DNA, 365 bp, Zea Mays
gacgagccttcttcctgtccttgggctctggtcttgggttccctgcatgtgtagggtaatcctcgagtcttcaagcttgtgcagtcctcttcccagccaccaactcgggtctgctgatcggaacagggccatgtcgccgcagaacgcagccgtggacagctctactgctggccatccaatccatgttgatctcgactgatcttgcacgagcactgaaggcgtgagctccgagcagaaggagtgtaaattcaagacgaagtggttatggaagaggagtttgctccagtgcctattcagcaagtggatggagctatctaactggttattgggtagaaaggtcttgagcctcttcactgcaacaaagg

SEQ ID NO: 134012 - DNA, 91 bp, Zea Mays
tttatttctttactactctataagcgtgcaacgagggcgtccacaccccgtcgtgcccccgcccgtgatactactcgtcgaggcccgtgcc

SEQ ID NO: 134013 - DNA, 237 bp, Zea Mays
ggaaattagcctaatgatggtgtttcctgatttaaatgtaagattgtgatgcgtaatcttacatcttcaaaaccaaaggctgatgaactagcagcatcagaaatggtagttgcatatggctcctcgaattgggcattattagttgagggatgacctccatctgttgtcgagtaagtcacagaaagtgctctgttcaggcaaactagatagggtaattgctattggtgtgttctgttc

SEQ ID NO: 134014 - DNA, 1898 bp, Zea Mays
atgtgttccctggccgcaattcgtgggatgtcccacccgcaccgggcgctggccgagcaccacgacgccaggtccagggcctccaccaccaccacatcgtcctcgtcctcctccgcccgccgcgacgacgaccccgacccgccgccgaggtcgctcaaggacccgccctacacgctggtccccaagatcttcgactgggacgagcagcgcgccgcctagcactgccgccacctggagacgccgcccttcctcaacgacatcaagccacgggtgctgctcgtcacggggtcctcgcccaagccctgcgagaaccccgtcggggaccactacctcctcaagtccatcaagaacaagatggactactgccgcgtccacgacatcgaggtcttctacaacatggcgctgctcgacgccgagatggcaggcttctgggccaagctcccgtgcgggcgctgctcctcacgcacccggaggtcgagttcctctggtcgatggactctgatgccatgttcaccgacatggcattcgagctcccgtgggagcgctacgggccgtagaacctcatcatgcacggctgggacgagatggtctacgacgacaagaattggatcgggctcaacaccggcagcttcttgctgcgcaactgctagtggtcgcttgacaagctggatacctgggcgccaatggggccaaagggccctgtccgcattgaagccggcaaggtgctgaccaagtccttgaaggatcggcaagtattcgaggccgacgatcagtcggccatggtgtacatcctcgcgacgcagcgcgagaaatggggtgataaggtttaccttcagaatgggtactacctccatggctactgggggatcttggtcgacaggtacgagtagatgcttgagaattacaagccagggctcggcgatcaccggtggccactcgtcacacactttgtcgggtgcaagccgtgtggcaaatttggagactaccctgtcgagcgatgcctcaagaatatggagcgtgcattcaattttggggataaccagatcttgcagatgtatgggttcacacacaagtcactagcaagcaggagagtgaagaggatcaggaacgagaccagcaacccacttgagacaaaggatctcagcgaacacatcccacgaattatagaggaattgccaccagcttggattttttagattcttctattcatctttttgtcgtagctaattgattcataaattttaggaaccttcgagaaatggattgtagtggggtctgatagacgatttagtcaaatcagcatcagataaaggaccaatattgttactgactggtagatttgatggatatctctggaaagagggataaaccaagttacttcctggatcatgattcccaggaggttgatgctgaccatatggaggccgatgagatgaataggatagaccaacaccaccagaatactctggccatctgttaggatgaggtactggagcattctcaacaggaatggtagaaggctgctggttagaaggaactgctggtgggagagtatgatgatggaaatcgaatggtcttggatgagacacatcttgtggagggtagcttctcatctggttctgcaagaattcattttttggtgcaacaactttatggtggaactgcatttgagggaattctgatgttggaaatgatggttgtcctggtagctgtatcatatttgaggatgacaggtgttcaggaggactcaaactctaaggatgagactggagacgtttagatgtcatggaactcttggtagcttctacagacacatatgggacacctgcagcaggttggttcgtaagaattgggccacctgctgatgaagacacatttaagtatgatagagactcaga

SEQ ID NO: 134015 - DNA, 2329 bp, Zea Mays
tgccgtcgctccggactcaccgctaggtttttcctcctgccgccgcctcccagaccgtctcctccgccccagccgggatgccgacggtgagcgtcggccgggatcgtctcttggctgccattggtcgaacctacacacaggaggagttcgaggcgctctgcttcgagttcggcatcgagctggacgatgtgacgacggagaaggctattatcaggaaggagaagcacctcgaggacgacagtgaggtggacgaagatgacgaggtcatctacaagatagaggttgccgccaacagatatgatttgctatgtcttgaaggactagcaagagctcttcgtgttttcactgggactgaagcaagccctgtattccaagtttcatcaatccctcggggttcaatgcttcagatgcatgttaaaccagagacttcaaaaattagaccgtacatagtttgtgctgtcctaagaggggtaacttttgatgaagcaagatacaacagcttcattgatcttcaagacaaactccaccaaaatatctgccggaagaggacactcgttgctattggcacccatgatctggacactctgcaaggacccttctcatatgaggctctaccaccgaatgaaatcaattttgtcccattaaagcaggagaaaagcttcagagccgataaactgatggaattctataaatcagacatgaaactgaagaaattcttgcatataattgagaattctccagtgtacccagttatctatgatagcaacaggactgtattatcattacctcctatcattaatggcgcacattcagctatcacccttgcaacaaggaatgtctttattgaatgtacagctactgaccttaccaaagcaaatatagttctgaatacaatggttaccatgttctctgaatattgtgagactaaatttgaagtggaacctgttgaagtgatacatcatgatggaaggaaaacagtttaccctgatctttcatgttacaaaatggatgttttgttatctgacattcttgggcctattggcatctcccaggacgagaaacaggttgtctgtcttttgaataaaatgcaactgcaagctgaaagtcactccttgaaaggggaggctcgcatttcagtgtctgttcctccaacaagaagtgatattctgcatgcccgtgatttgtcagaggacgttgctattgcttatggattcaacaatgtgccaaaatcaaagccgaagtgtatgacaataggaggaaggcaaccattaaacagattctcagataaaattcgtgctgaggttgcaagagctggttatatggaggtgctcacatttatcttgtcttcacacgaagagaactttgacatgttaaacaggacagatgacaaaagtaaagcagtcattattgcaaaccctcgcacttctgaattcgaggttgttagaactagcctgatgtcgtgtttattaaaaacactgaaacataatatagaccatccaagacctataaagatttttgaagttggtgatgttgtgatgctggactcgtcacgtgatgttggtgcctctaataatcgcaggcttgcagctttgtactgcaatagggtttctggatttgaggaaattatgggattggtggatagtattgtcaaagttgtcagagctccacatgttaactttggcgagaattactatgtacctacagatgaacctgagttcttcccgaaaagacaatgtaaaattgtgacaagtgatggcaagcaagttggctacttaggaattgtccatgctgaggtcctaaggaaatttggcattccggatccctgcactttcgttgagatggacctcgaagcactgttgtaatgcagtcaacctgaaacaaaggaatgcttgaagctgatacctcatacctgccacatattggttttgttcgtaagcatggtggggtaccagcaagaagtgcatattacccaagctgcagtatctcgatgtacttctcaattgcattggattttgctgtgggaaaaaagggtacaacgatacagcaaatacccagcctaatttttgtgttagggattatgtttgcattgtaagggcttattcctatccaactttctatgaaaagtgtaccgtacatccttttgtaaaccatcgcgcgtccaaaagttatttctcaactcttgtcacctccacatgaggtcaccatgatgtaaagcaggttcagaatattagacctctaatatctccttgtgtttgtgaatggcattaaaatttgacattaaggattgtttggtttataaagactaattttagtccttttattttatttc

SEQ ID NO: 134016 - DNA, 582 bp, Zea Mays
atggccaccgcacaggaaggtctgacccagcgcgtcgttgccagtgccagcagggacgacggcgccggcgagagcgcggcggccgtctcgggtcccaacaagaagccgggcggcggccgcgcaaacagcagcaggcgtgggctccgttcgctcgccgccgcggtgtccttctccgtggcgctcacggcgctgtcgttcttcgccgcggggcagtcgccaccgtcgcccaagaccgccacggcgtcgactgtggcggtggtgcgggccgggtcggtggcgttggaggcggtgctggcgctggcggcgtggatggcgtgggcggagggcgggctgcacgcgcgcccggcagccacgctgctcccctatgccgcgcacctgggcgccgccctcgcatgggcgccactcgtgctgtgcagccacgccgcggcgcgcgcgggcctcgcctgctgcgccgtcatggccgcgggcgccgtggcgtgcgcgcgcgggttcggcgccgtcaaccccgtggctggcgacctcgcgaagcccgccgtcgcctgggccgtcatcctcgccgtcgtcaactacaagatgctctga

SEQ ID NO: 134017 - DNA, 1456 bp, Zea Mays
attcactaatttaccgtacgtcacataattaacatctcaaacctacccaatgcgactactccaaaatcatgaaaataattacatcacattcatcgaactaattcaataattaagctaacggaaatatggatcggcttaccatactaactctgacgcgctatccgcgagcacggcaaggattctagttcggcccttgtgtcgagtacttggtgaacatcacgctgctaactccgtctttacccgattttgggatttcttgatgacacacagaacgacaacgaccttcgattgaagtctttgaccgagcactagataagcaatgcacacggacctcgtttatttttgcctaactttcgggagtcgaggtttgacgaggtcgagtagggaagaacagagttccaacgatacaggagggtgacgtatatagagctgcacacacgacgcgacgacgaatgtcgatagccggcgagatcgacgacgcgatgggaattaaggccaaacaagccgagagggcgcgctggcgagcaggaaaccacgcgagcacaggacaggaaaacgactggcttgacagcacgcgaagctacaccagcgacaacacgacgatggcgatatgagcgagtgcggatcggcgctagagaagtcgagcgcacgatgtcaacaacagaggaggtggacgcgagctggacaccatgagtgagctgctcggccaccagcgagggagtacgccgagcggggaaaatacacagggcacgcacgagttgagcgacggcaggacggacagatcgacgtcaggggcgaggtggaggtccggccggaaacgaggaacgcggctgcgtagaggagcgagctgaagatgcgacacgatggagctcggccgacagacagcttgcgtgtagggacttcatggagcgtggtggagctgagcgccggcaagcatcccaggcgcgccgcgcagaggagaaactcggcacgcagagaggtaagccagagagctccggtgtcgaggggatgcaggctccagcaaatcccagggcgtggccataggaggtggagcagggagggcacgatgcaggggaggacacaagggaacgcggtcgaacaggggcctcggctagggaagaagctccacggcgagcttgagggagaagagaggaacggctgggcgtcgagctcacggcggggaaaatcagctggatgctcggccatgggagggagagaggagcgccatggggcttcgcggctggaagagagagaagcgcggtggccagggagcaggcgatgccgcggctggagaggaagaagaagtagagcgcacgcactgggaggagatggagctgagcggctgcgcagtggagcaagcagccatggaagagcagagattcgactgggagggaggagatgggacggcgcttgggatgtccgggaccagggcgcggctgcaggaggaagatgtgag

SEQ ID NO: 134018 - DNA, 101 bp, Zea Mays
gatggaggttaaattttcgtcactacaatgagccatcctctgaaaatcgtcataaacaagacgatctaatgacgaattactctattgtcattggctattcg

SEQ ID NO: 134019 - DNA, 467 bp, Zea Mays
atggcaaaatggatctcggcctagagctgcacggcgtgggggagaaagagcagagggcaccgagctggagaccagaaggcacaacaggggagttcgataagggctgagctggtgagggcttgagcttctccatggggacaaccacgccatgggagagggaagcactggggagttcgaccatcgacgttgctggccggccatggagaaggcgtggccctgcagctccggcttccgaggggaggagcgatggagaattggcagccaccatggccgaacttgagggaggcgctagaagtggccgagagagggaggaaggcagggaagcctgcctaatggccgacaccggagggagcagtggaggtgagcgactgctccctgatgtgtctagaaatagaggtgggatgctggcgtgaggaggaagaagcaaggaagaagagtggctggcggctagggtgggaaggaaaaat

SEQ ID NO: 134020 - DNA, 1698 bp, Zea Mays
cgacgagcacttctccatctccctccgcgccctggctcctctgctggccgctggacgcgcgtgtgccagggagcgctccctcctcccttgtttccctggcgcatggacttctctttaccccagttccttgccatggcacacccgaagctcccttctgcttcctgctcggcgtcctgctccagcgatgcagctcgcctagccgagctccctcagctcgccccatccatggcagcggtgcccctctgcctgctggaacttccttgtccgcgagccctccctcgtccaagcgcccgaccgccccagctcgcgcccaaactccctgcttggatttcgtccagatcgagctgctcccatggcgatttcccctcggattcctccctgttcgcgccactctctctctctctctctctctcgagtctctgtgccgcgccctggctcggattctgctcgacgcccctgcttccctcaaatccggtatgcgttgcattctgtcgtgctcctccctcgtcggagctcgccgtctggccatggtggtggcactgttgtgcctttgctcccaggttgacgcacgccccggcactactcttcactggattcaccttgctccatcccctggccatggatgtcatcgtcctccagccccgtggacgcgcgctcctctaccccaacatcggtagcattcctgcgcttgtgttcgtcgaccttcactcctctcaccatggtcggccaacctcgccgatgctactctttaggggtcacctctaggcctgatcgatgatttccctcggcccaagccttgcctgcgcgcctagacctcctcgacgccctcaccttgtttgggtgctcgtcgccggaaatgcgggagatgagccacgtctccctccaattgttgtcaagcgggcgaccttgttgtatcaagccggtcgtcgtccttgcctacggctacttctgctggcccctcacgtcgctgtcgctcaatacatgtgctacgccattggatgctggtcgaaccagggacatgcttccttcttcgtcatcgcaacagcagcccccttgctcctcaccgtcgtgctccttttgctgtcgggccgtgctttgccacgttcacttcattgtgtcgtcgtggatttgtcgacgtactgctgtggtacctggatcacgctcgcctcaacccgaacgagtcgtactgtcatcctcttcgtcggatagaaatcgtcacgctggcacgttgagatcgtcgatcgccatcctcgtctacgccaagccccaagctgtgaagacgctcttgtgctggcccgcgtcatcatcattcttatcgtggattaccgatgtcagtcgcctcgacaacaaccacatccacgactttgccgttccaataattttgccgtaccgcccttcaaatctaagtcctcgtccgttggatcgtcattgaccttgcaacttcagctcgagttaaatatggtacgttcttgatcacgtgatgcggaagacgaccccaggataatgcagtgagtgaacatctccgcaagacgacgtcgtcagttggacgaacctgaagatgcataatctgacaaatgttaagacaaaagatggtcgtcaaacggacgtcgtctaacaaacactaacatagtgtttattccaggcaagccccggtgcatgcaaccccttccttgtgtttgtaaattatttttacacact

SEQ ID NO: 134021 - DNA, 619 bp, Zea Mays
atggacttctctttaccccagttccttgccatggcacacccgaagctcccttctgcttcctgctcggcgtcctgctccagcgatgcagctcgccccatccatggccgcggtgcccctctacctgctggaacttccttgtccgcgagccctccctcgtccaagcgcccgaccgccccagctcgcacccaaactccctgcttggatttcgtctagatcgagctgctcccatggcgatttcccctcggattcctccctgttcgcgcccctctctctctctctctcgagtctctgtgccgcgccctggctcggattctgctcgacgcccctgcttccctcaactccggtatgcgttgcgttctgtcgtgctcctccctcgtcggagctcgccgtctggccatggtggtggcactgttgtgcctttgctcccaggttgacgcacgccccggcactactcttcactggattcgccttgctccatcccctggccgtggatgtcgtcgtcctccagccccgtggatgcgcgctcctctaccccaacatcggtagcatccctgtgcttgtgttcgtcgaccttcactcctctcaccatggttggccaacctcgccgatgctactcttt

SEQ ID NO: 134022 - DNA, 4083 bp, Zea Mays
accccgcgcgagactcacgtcgcgcctccggcctcccccctcccccctcccccagcgcgcctttcggattctgttgcgccctcgccaggggcctcggcgaacaagcggtgcgcgcgagcggcgggaaccctaggcggcggtgatggcgagcaggggagccgtggcgccggcggtggaccctagcagcccgagctcgagggcgtggggcggggaggacgagacgcctggggcggggaaggtgaagctgatgtgcagctacgggggccggattgcgccgaggcccggggacggggcgctgcggtacgtgggcggccagacgcggctcatctccgtaccgcgcgccgcctccttcggggagctcctgcggaaggtggaggcggtggacgaggcctccgcctcctctggcggggtgctactcaggtaccagctccctggggaggacctcgattcgctgatctccgtctcaggcccggaggactacgacaacatgatggaggagtacgagaagctggccgctgccgcgcccgacggctccgccaagctgcgggtcttcctcttcccggcctccgggagcgatgcggccggctctggctccgggtcccacctcgtcgccgcggtggacgagtctgggcagcggtacatcgacaccatcaactgcgtctccgcggaggctatggccgtggccatgcgtccgaaggacagtgtcgccagtgccggttcctccgcacacaactccgaggcatccgagtacagcggcctagtggaaggtatgtcaccgcgggcggtgccgccgcctgcgtccgctgcaactgagtattcatattcaggtggggcccattaccttagtgctttcccggagtcggttgggttcactgcagtctcgttgtcatctccggcgatgggcatcccggctcaaaatcccatctttgttgtgacagagccatcaacgttaccgcctcatcaggttgctcctgcttatgcaacaccgcatcagccgcctcaagtaaccacttatgtgcagcagcagcctcaagtcacccattatgtacaacaccagcatcctcagtctgctgcttatgtgcagcaggtgccgcagtcgtacatagagccacagcaggtacaatacatcaacacccaacaatttggtgggcatggggtgccgcaatctgtcaattacgtgcctgtgcatatgaaccaattcatgcccagcattcctgtgacgggttctttggccaccactgctgctcaaggcagtacgttcaggcctgcttccgcaggtgcagaaccagttctggagaccacacagttcacaaggccagtgcaagctcaggttgatcatagttaccgggtggtgcaaactccgctatcacagcttcctcctttgtcttctgtgcatcagcaggcaaatgatgcgcagaggcagaggtttggtgttcaacaagcgatgataagtgcagtaagcatgccagtggtgaccagttcaggcacaattcctgtggtggttagctcggccactgttccatcattgagatatgatgattgcacaatgtgccaaaaagcattgccacatgctcattcagataatattatccgggagcagggaaattctcgtgcaacaggcaaccttgaggcagctccaatgttttatagcccccatcaagacagtggatccaacaaatctagtctaggtgcaagttcaggaactcctacaaactatgtggcggaaccaagagctgggaacacagcagtgatgacacaatttaattcgactcttcctgccagaaaacctgcagttcaggcaactgcatctccggatacaggtgtgccggttcaacccaccgtgattcctttaccagtgtccagtgcacctgctccagatggagtatttgtcggtcattctcctcaggctggggctgaagatcctgtcaggtaccagcagcaactattctcttatagcatgcagccagcacaagttctagtgaatggcccacaaggcattgatgccagtgcatacaaggattcaaatcatccagcagcggaaccgctgagagaatatgcacacaatcttcttcatgactatgccagagctatcgatgttcatacgcaagcagttcatttgggtcctattgcaccaccagaatctactgtgcatgggaagccttctacttatggtatcattgatcatgccaaagttggaaagctacctttaaatattgatggtagttctatctacaaatctcaagctggagggtatcatatagggattacaaatgcctttgctgctcctgcattcaaccaagaggaaaacatttccaggcacagtgagaagccacgttatgcttttgatattggtacacaaaatgtccatcctgacataatccagcaaccacccaatctggctgtccagagcaaccttatagctcccattgaaccacctggttctaatgaaaaggttactgtgctaccatctaactctggtgctcaggttccttctggatcacctgtacagcgtcctaaagaaatggccaatcacttggtttcaattccccccaatggcagtaacaaatttccattgcagtctactgttggtattgatcgtgttgaaggtacacaggaaccggcttatgcagattcacttttctcaaatcaggatccttggaaagcagtgggcaatgcatctttagtgcctccaagaccaaacaagctaactaaggagtctgttgtttctggaggtcaatatattgatggccatatgcctgatatgaacatgcatgctgccataccctcagaagaagactcatgttttaaggatatgcacacagttaaattgaacaaaggacctggagaagatagtatcaagcgacaattacaagctgttgctgaaggggtagccgcatcagttcttcagccaccctttcctgaaaaaacagtggtgttctctggggatcacatcgattcgcatggagcagaagttgatgtcaagttccaggatgaagggaacaatcagtcagacaaaataagtcaaggggttcaagttttagatgacaacgataaccttcagataataaagaacagtgaccttgaagaattgcgtgaacttggttctggaacctttggtactgtttaccatggaaagtggagaggttcagatgttgctataaagagaatcaacgatcgatgctttgctgggaaggcttctgagcaagagcgtatgatggacctggtggatctgttgcaacggtaacagaatacatggctaatggctcactccgacaagcattacaaagacatgaaaagatctttgatcggcgtaggcgtctactaattgcaatggatgttgcatttggaatggaatatctccatgggaagaatatagtgcattttgacttgaagagtgacaatctgcttgtcaacctaagggatcctcaacggcctatatgcaaggttggtgatttgggattatcaaaggtcaaatgccagacactaatctctggcggagtaagaggaacacttccttggatggcccctgagttgttgaatggcagcagcagccttgtctcggaaaaggttgacgtcttctcgtttggcattgtgatgtgggagctacttacaggtgaagagccttacgccgagctgcactatggggccattataggtggaatcgtgaataacacgctgcgacctccggtgcccgagtcctgtgatccccagtggaggtcactgatggagcggtgctggtcagccgaaccgtcagagaggccgagcttcaccgaggtcggcaagagcctgcgcgccatggcttctcctaccaaggcacaacaatcgaaatagatgctttagccttgcctctcgcgtccttctgttcagcagattgtttcagtcttcaaaccgaggaggtgccaccatggctggcctgccttttgtacatgaataagttgaagaaaaatacgagaatgtggcatgcttatagagtcggtggatgcttgatgcttcctgtcttgcttttgacatggatcgtggatatatatggtagtacagcgtagtgtaagagtggcccctcgttctcacgtccattaggagttc

SEQ ID NO: 134023 - DNA, 110 bp, Zea Mays
acttactacacaataggttagggttcttttataggaggaagaaaaatgtggcattactagttactaccaacgcgtatcattgaattgatagaagaatagtcatacacaac

SEQ ID NO: 134024 - DNA, 123 bp, Zea Mays
tttttttgtatttatttattttgttattcgactaatataatcctattacttgaacttgttaaactaaaagggatcaattaatcgccttaggtttcataatcccaaagcattatcatagatata

SEQ ID NO: 134025 - DNA, 1554 bp, Zea Mays
gtcgtgtttactcgtctccctcgttgccagatctcaacctccgccttccctcccatgccctcaaacctacctcctaactagcatccgccgctccgatggaagccgcggcgcccgcgcccgcgcgtggcctcgggcggcaggagtacgcggtgctggcgctcaccttcgcgtcctacgcgtcgttccacgcctcccgcaagccgcccagcatcgtcaaagccgtgctctccgcggactgggtccccttctcgggcccccggggcccgcaccgcctcggcgaactcgacgtcgccttcctctcattctacgcgcttgccatgttcgccgccggccacctcgccgaccgcgccgacctccgctgcctcctcggcacggccatgctcgcgtccggcgccgcgtgcgccgcgctcggtgcggcctacttcctcgacatccacgcgctagccttcttcgcggccgcgcaggtgtccagcggtgtcgtgcagtccgccggatggccctgcgtcgtcgccgttgtggggaactggttcggccacgcctcgaagcgcggcaccatcatgggggtgtggaactcgcacacctccgtcgggaacatcgccggctcggtcctcgccgcagccgcgctcgagttcggatggggttggtcctttttgcttcctgcggtcgtcatcgccgcgctcggagttgtcgtgctggtgtttttggtcgcacacccgagcgaggctggtttggatgtggaagtaatggaggttgagatgaatggggatggtggggaggaggtagggctacttggggaggataagaaagaggttcaagggaatgaggataacgagttcgagctggaaatgggatcacaattgccgagggcaatcgggttcgtggaggcatggaaacttcctggcgtggcaccatatgcattctgcttatttttctccaaactcgtcgcctacaccttcctctactggttgccattctatatcaggaataatgccgtggcaggtcagttcttgtcacacaaggcttcaggaattttatcaattgtattcgacattggaggcgtcttaggagggatttcggctggttttctctcagatgccataggtgcccgtgcaataacatcagttctgttcctcttgctgtcaatcccatcactcgttgtgtaccggacatatggaagcatatccatgcaccacaacattgctctcatgtttctctctggttactttgtgaatggtccatactctctgatcaccacagctgttgcaactgatcttggcacccaagacgctatcaagggaaattcacgggcgctggcgacggtttctgcgataattgacggcactggttctgttggtgcagctctgggtcccttgcttacgggttacatctcaactagaggatggaatagtgtatttttcatgttgattgtttccatatcacttgccatcctgtttttgatacgactcgcaaagggcgagatagtagccaagcttagcacatggaattaaagtagtaatgtatgttcaattgaggatgcttcagatgtgagattgt

SEQ ID NO: 134026 - DNA, 1113 bp, Zea Mays
atggcatctgaaagcttgttcacctggctaggcgacgatgtgctaagaaaacccacctactcacgtttctgcgtagctctggataactataacccccaccaggataagcacgaggaaatagcttttgttgaagagatcgccagaacatcgccaattaagtacttgcaccggtacttagtgcagaagggggttgtgcctcaggactacgaggacttcaagagaatgctgacatccctatggtttgatttgtatggaagaggtggcaactctagctgctctactgcctttgagcatgtgtttgttggtgagatcaaaggacggggacaaggggagagtgagttttacctggaagaagccaagggaaatgtggattaccaagatacacccacatcggccgtggttagagtcgccctagaagaagagccccagaagaagagccacttcccgtcaaggcaccgccacgacgcatcggccacaaagagcttgaaggagcagtgcgccgagtacacccacccgttgctctccagcgcgccgagcggcccgtcgcaccatggtgcctcgcacgggtggtccaactccaagcaccggtaccgccccgctgcgtctgacgcccaaccaccggatacggtcaccagatgccaatgggaaatttctaggatccggctaggttctagaattcggctgggttctgcgccagcatggcaacgactaccgcagcaggccaggcgggcaccgcggaggccgaggtcgagaaggcggagtagtacctggcgccgcgcgtcgcggggagtggggcgaggatggcaggggcgacaccttccatcgatggagtgcgggcgcggtgatggcgggagcggcgatggaggatcccttgaagggcgcgacgaagagcagggtgggcggggcacggtgcaccaggggaggggtcgcttgcgcgagggcacacgggggcacagctccatggagagggcggacgcggagagtgctgagcgcggcgatccagggcggaggatgtcgcggacgcgggatctgggcggattgcgggagagagcggcgattgcgggagacaggcgggggcggttgccgcggggcgagcaggcagaaccgtgctga

SEQ ID NO: 134027 - DNA, 138 bp, Zea Mays
ggcctatggcccgcgacctagaaggaagtgtgctgcgttccttcatctcgtacatggatgaataccagattttcccttactaattctgattatgaaagcatctcctcttctcgaagcagatagaagaactatttaggg

SEQ ID NO: 134028 - DNA, 603 bp, Zea Mays
atgctattagtcttgacctgtctaggcagcattgatgcatgttcatgtgttctttttcttaaactgtcagtcattatttgactatgttgtattgctgttggcatgtaccaatatttcatggcaaatcttatatcccaagtttttatatgctcaacaggccgcacttgaagaaatcttatatcagtttgaggaaaaactccaagctgaaagagaggaagctgctaggaagtaggaagagttgcaagcacaactacaagctcaacaggccgcacttgaagaaaaccaaagtttgctgcgctagacccaagaggaagtgaaggggatgcataccaagtatgaagagaccaatgcactgctacgagctatcctgaaacttcagaaagattgaggtagggatgcataccaagtctgaggatgatgcctttgcttaaggtttttctaccttgctagaacatatctgtggttggaactttgtcagaactacgtgcaatctgtttgaatgcttcaaacctttgtggtggaacctttgtatgtttgaacctctgttgtggaagaactagtgtgctggaattatgtaaagtagaaacttaaacaagaaagaga

SEQ ID NO: 134029 - DNA, 795 bp, Zea Mays
ctcctttgattttcttctcgtcacccccttcactttactcttccctcacttctggccgcagctttgagctcagtagcaaacaagaagcagcaagatagtgatcctccatgggaaacaccctcggctttggcgtaggtgtcggcctcggcctcggcctcgccgtcggcgccgctgctctgatccaggttcgaatccacatcggtcttaacaaagtactgccagtgttcttaatttccttccgctttcgcatcgcgccatattgcaataatttacattgaaaagatgattgctaaactcaaaattttatcatgtggcttacgaatttctatattagttgatctgattgagtttccatcgcatccagggttgagatttttaaccctattgatccctatttcagtagtcctttgtatgtgcttgttcagacaccgctggctgcagactgcagtggtgattttaactcaaagtgtcgccgttaaatttagtaaaatgttctgtccttaacatagagctccactagaaagaatgtcatttaattcacagtacttttttttacctttctaaggatgaaaggttatgatttctttgacgttgtcgaatccgtggtagaatgctcgatcaaaggttatgatttctttgaagtagtcgaatcggtgcgtgcaaggttgtcctctaacagattgtgtggatcaactatgcgtgcgtgccttaatttagcctaggaatatttggaatctcagcctttgacgaccttgccgtgccaagatatttttttaacaaaaaaaaaaacgaaaa

SEQ ID NO: 134030 - DNA, 1357 bp, Zea Mays
ctcctttgattttcttctcgtcacccccttcactttactcttccctcacttctggccgcagctttgagctcagtagcaaacaagaagcagcaagatagtgatcctccatgggaaacaccctcggctttggcgtaggtgtcggcctcggcctcggcctcgccgtcggcgccgctgctctgatccaggcttttggtccgaaaattgacgaggaagtggtggtttctcagtatcaatgcaacaccgaggacattgacgagttgtctgccgaggagctgcgcgatgcgatgagctatgtgatgcacaatccgatgctgatccaggtgccggtgttaggaacaacgaagacattctggcgattatctgaggaagccactaggatcagcagaaaactttcattgatactgcgcaaccaccactcagcctgcaagtacctcgaagctcctctgcaggtgtccaatgtctggattgggagcactgggagtgtcaagctaaggggggtcagtttcactggcagcggtttctttagaattgagcgtgtgagagatgactacaagcacctttccagggtcctggaactgttgattatgatctcaggtggggatatcaacaaattgcctccagactacaaagaattcctctcgctcttgaggaggaagaaccttacaagggatgatgaattcttaattgtaaacaatgctgccctactacccatgaaaaaccgcactgaggtattcctgatgctacacgatagaattgtcaattttcttggtcagaaaaatcgagcaaagaagaagaaaatactctccaatctcccttacaagaacaactggttggatactgccacggcaaatgcaaagatcaaccagtgggttgtaaatgttcaaaatgagtacaaaaggactacaattgatctactgcggctcaacagaaatgtaagaagccacttgcatcagtacaaccacgaagatgatattgaggaaattctgtattgtgaatggcccatgctgctcattgtcatggagaagatgttgcacttggaaggtgagctccaagacactggcatccataacaagttcggctagggttctactgcaaaacagatgaaagatgtattctgcatttccatgggttggtaagctactgttcttcgatcttcattgagaaagtttatcagttcacggtgatgaagtgtaatgctacctgtagttgttttctctggacacgtcaacttgaaggtaaagctggtcagcttttgtaaagcatgttgtaagatatcacattacaaactctaaaattgtgctgcaaaattgaatggtattgagtttgcattcatcctttaatttctgattcttataaa

SEQ ID NO: 134031 - DNA, 1277 bp, Zea Mays
cttcactttactcttccctcacttctggccgcagctttgagctcagtagcaaacaagaagcagcaagatagtgatcctccatgggaaacaccctcggctttggcgtaggtgtcggcctcggcctcggcctcgccgtcggcgccgctgctctgatccagcaccgaggacattgacgagttgtctgccgaggagctgcgcgatgcgatgagctatgtgatgcacaatccgatgctgatccaggtgccggtgttaggaacaacgaagacattctggcgattatctgaggaagccactaggatcagcagaaaactttcattgatactgcgcaaccaccactcagcctgcaagtacctcgaagctcctctgcaggtgtccaatgtctggattgggagcactgggagtgtcaagctaaggggggtcagtttcactggcagcggtttctttagaattgagcgtgtgagagatgactacaagcacctttccagggtcctggaactgttgattatgatctcaggtggggatatcaacaaattgcctccagactacaaagaattcctctcgctcttgaggaggaagaaccttacaagggatgatgaattcttaattgtaaacaatgctgccctactacccatgaaaaaccgcactgaggtattcctgatgctacacgatagaattgtcaattttcttggtcagaaaaatcgagcaaagaagaagaaaatactctccaatctcccttacaagaacaactggttggatactgccacggcaaatgcaaagatcaaccagtgggttgtaaatgttcaaaatgagtacaaaaggactacaattgatctactgcggctcaacagaaatgtaagaagccacttgcatcagtacaaccacgaagatgatattgaggaaattctgtattgtgaatggcccatgctgctcattgtcatggagaagatgttgcacttggaaggtgagctccaagacactggcatccataacaagttcggctagggttctactgcaaaacagatgaaagatgtattctgcatttccatgggttggtaagctactgttcttcgatcttcattgagaaagtttatcagttcacggtgatgaagtgtaatgctacctgtagttgttttctctggacacgtcaacttgaaggtaaagctggtcagcttttgtaaagcatgttgtaagatatcacattacaaactctaaaattgtgctgcaaaattgaatggtattgagtttgcattcatcctttaatttctgattcttataaa

SEQ ID NO: 134032 - DNA, 345 bp, Zea Mays
atggagacgcggccgagtacagcaacgcagagtctcacggtggtgatgagctcggcaagagacaaggaccgggcgacgacatccgcgattgcgcgcaggaaaaccggcgagctgcggattgggagtgcgtcgcagaacgagcaggaagctcacaggggcgcggtctatgcgacgcagggaagagaggcgagacgccatgttgccaagggggtgctgggctcgggtgtagacgagaccgagctgaaggacagcgagcaggggcgcgcgcagcaccagagaagccgagcagaggcaaccagcgtgtgcgccatgggcgggtcgccgacgaacgggaacttgcgctag

SEQ ID NO: 134033 - DNA, 102 bp, Zea Mays
gtctcaattcactggatcgagtgataaaatccgaattgtcaaccaactgtgagtggagtgcagctacacgaagaacagaaggaagggtacacgaagaacgga

SEQ ID NO: 134034 - DNA, 578 bp, Zea Mays
ataattaagcccaaactactttcagcccatccagcccatttcacccgttcctctgcgataaaaaccctgcggcctcctccgtccacagaatctctccgtccgatccaagggtttccgtgttccgtcgtctccgccgccgaaaccatgtcgtggagttttgcgctgatcctacgcttttgtccggtcgcgttgcgttgcgtccccgcgcagccgtcccacaagaccttccggatcaagaagaagctggccaagaagatgcgccagaaccgccccatcccctactggatccgcatgcgcaccgacaataccatcaggtacaacgccaagcgcaggcactggcgacgcacgaagctcggcttctgagcggtggaagagatgatggccaacgatgcttgtggaggatagagctctgcaaaagctaggaagctcttgtttaagattttgttgtgttaaagggagctgactgagaatattgttctctctgatggttaaagaactgccttttatgttatgctgaatttatcgtgcctgcattgccttaatcagttgatctcgagctgattgttttgccttaatca

SEQ ID NO: 134035 - DNA, 689 bp, Zea Mays
ataattaagcccaaactactttcagcccatccagcccatttcacccgttcctctgcgataaaaaccctgcggcctcctccgtccacagaatctctccgtccgatccaagggtttccgtgttccgtcgtctccgccgccgaaaccatgccgtcccacaagaccttccggatcaagaagaagctggccaagaagatgcgccagaaccgccccatcccctactggatccgcatgcgcaccgacaataccatcaggtacaacgccaagcgcaggcactggcgacgcacgaagctcggcttctgagcggtggaagagatgatggccaacgatgcttgtggaggatagagctctgcaaaagctaggaagctcttgtttaagattttgttgtgttaaagggagctgactgagaatattgttctctctgatggttaaagaactgccttttatgttatgctgaatttatcgtgcctgcattgccttaatcagttgatctcgagctgattgttttgccttaatcagtctgatcgtacatggttgtccattcctcacttagctgcatggttttaacacttctctatgatttaggtcgcttcactcgtgacttggtaggcattttatcggctgattctgtgataatttgaatgcctctatttggtggcatgctgtaggcatcatgcctctgtttcctccta

SEQ ID NO: 134036 - DNA, 309 bp, Zea Mays
cttcctgatcgtcggtcaaggaagtcgggaatctttttctccatggtggtggagggtgaggctgccttgcaggtgtaggacatccggatggtgtgtgactttgccgacgtatttccagcagagcttccaggccttccaccggatcgcgatgcagctttcgaaatcaaactgattctgggtacgcagcctattcataaggccccgtatcggatggctccaaaggagcaggttgaattgaagcggcaattgaatgatctactggctaagggtttcattaggcctagcaggtcgccttgggcttccccagta

SEQ ID NO: 134037 - DNA, 207 bp, Zea Mays
atggtggctgtggctagtgcggttggagccgggaccggtagccgataccctgcgcacggctcggcagcaaggagtggcaaggggaagatgcagtgcacgacaaagtggtggactgggtctgtgcatttatggcccccagggagcaagagaatgaccttggtgagctcccaggcgagagaatcggtccaggcacaaccacccgagtag

SEQ ID NO: 134038 - DNA, 82 bp, Zea Mays
gaggggtataacctcgccggagaagacaaccccatggaccgaaggtccatgacacctggtatcagctccaggttatcctcac

SEQ ID NO: 134039 - DNA, 691 bp, Zea Mays
caccaccagccgcccatccctcaccaccaccagccgccgcgccatttgccgccgcaacgccctcccacccgccctctccaactctagatgcattcactcggctcgaagagaagtgggatcaattcgttgtgatgttccaccgctacaaggagaagacagagaaggaactccaagcagcggtgcggcttcaggcggcagcgcgagggttcctggcacgccgccaggtacagtcccttcgtggggagaagcaccttgctgtggcctccagggccaccccatggccgtcatcacatgagcaggccgtggtgcgcctgcaagccgtagtgcgcggcttccttgttaggcgggcggtgcggaagctgcacttgctgatcagctcatcgctgcaccaactcgcagcctgcgcgcccaaccaccaggtctcgtctatactttttgaacccactgcagaagtcgagatctgggtatgcagcccccctgcacggccaaagagggtcgtctccttcattcgggcaactgccttggtgctggacagacccaacataagaacgggctggttcctccttcacctgtcatccaacgtgaagtccgcagttcagctctttccttgggatccaggaggacaggaggacatagctggagttcaaatttatattttagttccacaattattttgtattttcgtcttaaa

SEQ ID NO: 134040 - DNA, 1704 bp, Zea Mays
atgacggcgccgcgcggtggcggagatgagccgccgccgtcttcggctgcggcggggcacgccgcggggaacgagccagtgacgccgacttccgcgctcgtgtcgggactcaaccgccgcgggtcgaggggtgcgggcatggccaccttctcgatggaggtcttcgacaacgaagtcgtcccatccacgctcaacagcatcgcgcccatcctgcgcgtcgcggccgagatcgagcacgagcgcccccgggtcgcgtacctatgtcggttctatgcatttgagaaggcacaccggctggatcagaactccatcggccgtggcgttaggcagttcaagacagctctgctccaacgtcttgaaaaggataatagccctagtcttgctaagcgcgtgaagaaaagcgatgctcgcgaaatcgagagtttttaccaacagtactacgagaactatgttcgtgcacttgacaaaggggaacaagctgacagggctcaacttgggaaggcctaccagactgccggagtcctctttgaggtactctgcgccgtcaataaaaatgagaaagtcgaggagctcaatcctgagattattcgcttgcacaaggatgtgcaagagaagaaagacatctacacaccattcaatatcctgccccttgatgctgccagtgcatcccagtccatcatgcagctggaggagatcaaagcagcagttgcagccctccgaaacattcgaggcttgaattggccttcaacatttgagccgcagaggcagaagggtggtgaccttgatttgttggattggttgagagctatgtttggctttcagcgagatagtgtgcggaatcaaagagagcatttgattctcctccttgctaatgtccacataaggcttgagccaaagcccgatccactgagcaagcttgatgaccgagctgtcgatgtggtgatgactaagctattcagcaattacaggaagtggtgcaaatttttgtcacggaagcatagtttaagatttccacaaggcgcacaaccacaagaaattcagcaacggaagattctatacctaggtctttatcttcttatatggggtgaagcagcaaacatcagatttatgccggagtgtctttgctacatcttccataatatggcatatgagctgcatggtttgctagctggaaatgttagtattgtgactggggagaatatcaggccatcttatggtggggatgaggaggcattcttgaagaaagtggttacacctttctatagagtcatcagaaaggaggcaggcaaatcacaacatgggaagacaccacattctgcgtggtctaactatgatgacctaaatgagtacttctggacatctgattgtttctcgcttgggtggcctatgcgggatgatggtgactttttcaaatccgtgcatgattcaaggcctgtaacaacggctggaagctcaccacaaaaggattccacgaaaagtacagggaagacaaatttcgttgagactagaacattttggcacatcttccgaagttttgaccgaatgtggactttctatattttggctctacaggcaatgctgatttttgcttggaatgattattcagtgaccgaaatccttcggaaagaccttttgtattatctatctagtgtattcgtcactgcagcatttctacagttcctccaaaatgaacttctcagttaa

SEQ ID NO: 134041 - DNA, 2287 bp, Zea Mays
atttccaattgaaactacagttaccctggtctgcgtgtggcatatatcgatgaagtagaagagagagaaggtgacaaggtgcagaaggtcttttactcagttctagttaaagctctcgacaatcatgatcaggaaatataccgtataaaactgccaggaccagcaaaattaggtgaaggcaaacctgaaaatcaaaatcatgcgatcatttttacacggggtgaagctctccagactatcgatatgaatcaggacaactatttggaggaggctttgaaaatgcgaaatttgctggaagagtttaatgaaaaccatggtgtccgtcaacccacgattcttggagtgcgtgagcatatatttacaggaagtgtgtcgtcacttgcatggtttatgagcaaccaggaaaccagctttgtaacgataggacagagggtcctagctaatccgttgaaagtacgttttcactatggacatcctgatgtgttcgataggatttttcacattacaagaggaggcatcagcaaggcttcctgtggtataaatttaagtgaagacatttttgctggtttcaactcgactctaagaagaggaaacgtcacccatcatgagtacatccaagtgggaaaagggcgcgatgtaggtctcaatcaaatttctctctttgaggcgaaagtggcttgtggaaatggggagcaaatactcagcagagatatatacaggctcggtcatcgatttgatttcttccggatgctttcatgctattttacaactgttggcttttatattagttcaatgatggttgtgataatagtttatgttttcttgtatgggagactgtacttagcattaagtggactggagtttgcaattatgaaacaagcacggatgagagggaaccgtgcacttcaagcagctatgggatctcagtctattgtgcagctaggtcttttgatggcattgccaatgtttatggagattgggctagaaagaggtttcagaagtgccctgggggatttcataatcatgcaacttcagctttgttcagtgttcttcactttctcccttgggaccaaatcacattattttggccgcacaattctccacggcggtgcaaaatatagggcaactggcagaggttttgttgttcgccatgtaaggtttgctgagaattacagaatgtactccagaagccattttgtgaaaggacttgagctgatgctactgctagtagtctatcagttatatggcgatgttgctacagattcgactgcatatatacttctgacatcatcaatgtggttcttggtcatcacttggctgttcgctccattcctcttcaatccatcaggatttgagtggcagaaaatagtagatgactgggatgactgggctaagtggattagcagtcgaggtggcattggggttccggctaacaaggcatgggaatcctggtgggaagaggaacaggaacatttgctgtccacaggtctactgggccgtttctgggaaatcatactctctctcagattcttcatattccaatacggtatcatataccacctgaatatatctgctggcaacaaaagcatctctgtttatggtctttcttggctggttattgttgctgtggtgatggtcctaaaggtggtatccatgggtaggaagaaatttagtgcggatttccagcttatgttccgacttctcaaattgttcctgttcatcggatctgttggaacactggcagttcttttcactgttcttcatcttacagttggtgacatattcgcaagcttccttgcatttgcacccacaggatgggccattctgcagatatctcaagcaagtaaaccggtcatcaaggcgtttgggctctggggatccgtgaaggccctctctagggggtatgagtacctgatggggattgtcatcttcgtcccggtggctgtgctggcatggttcccatttgtctcggagttccagacgagattgctttttaatcaggcatttagccgaggccttcaaatctctcggatcttggctggcggcaagaagcaaagataatgttaattcaggaaacattcgtacacacgggttaggcaagggattagctccaggatgattgttgtacatgggtcatgggtgtttgttggaggaattgtaaggctgctgatgctttcagagtcttggctgtatacacaaggctggtttttctttgtcatttccgttgtgtgtcatacgacattgttgcctcttggctcttggtacatacctaggctatatattttca

SEQ ID NO: 134042 - DNA, 218 bp, Zea Mays
gtccatgagccaggaaaaggaattaaggattaatgtgtacctccttgttctggttgatggtgtgacttggccttcatccctgccaccgggatagacggtcgagagggttattgcttccgcaggagaggaccaggaggagtagtgtggccaggcttcgccatgttactcggttttctccgttagttatttccgctgcattaaaatttatggttattatt

SEQ ID NO: 134043 - DNA, 405 bp, Zea Mays
gttctgagcaaagatgatccggtcaacgcgttgcagcggctacgtgatccatggcagcccgacgacgacaccgacccactggtgcaaaatccccatggcacaaatcagacacggcgtgaaaatcctcacgagctacggtcgagtcccatccggctttcggtgattgaggctccttcgaccgagggtgatgttccacgcgccacctgcggctgccgcagatggttttgccgtgccccaaagactccaatcagcgatggaccgaactaacacgatgtaggtgcggtgacggcgtcgtccacaagcactcgatctctctcttccggtctcgctataccctggcgttgatttctacagcgccgcatcaaaggagtcaaacgcggtaggggagaacggcgtcctcggctt

SEQ ID NO: 134044 - DNA, 2862 bp, Zea Mays
ccttggtttcgtggcccgttaccccaccctgcttcctctccgtgggcacctgacgccgcgaccccggccccgagctggctttgccggccaatcggctcgcccgcgccgaccaccgcgcctcttcccctcgccgagatcgcctgaaaaggcaagcgaggccagcccgatccccctccccgcccccctcaagaaccaaaaaagggtgtcatttcgtcctaggatcgcagctcgagctcggtcgctctcgctcacctcgctccctactcgcctgctttccacttcctccgcgctcccgatttcctctccgattccttcgccgactcgtttcttcttggcaattcgttgcgcgggccatcgccccgacggcacctgggtacatcagctacaggacgggacaggtccctcttctaggagaggcttcgccagccgcctcccgcccccgtcactacgggcgccgtggagcggagatccatccggacttggatcggtctcgtcgcgtgtttgagcaatatgggttggctgaccaagttttttagaggctcaacccacaatatctcggaagagcagtatcacagcaggcctgcagaagacacagcatggaatgaaccctctagctctcctgttgtgactgacatcctttcagagtttaacaatgaggatattgaccgtgctatagcgctctctctatcggaagaggagcaaagaaaggaaaaggcaatagataaggatatgcatttggaggaggatgagcaacttgcaagagctatccaggaaagtttgaatgttgagtcaccccctcgcagaaatggcagtgccaatggtggtactatgtatcatccgcctcgcgaaactggcaatgcatatcagccacctcgtgaaaatggcagtgccaatggtggaaatgcatatcacccattaccatttatgttctcatctggattcagagcatgcgcaggatgtcacagagagattggtcacgggcgttttctcagttgcatgggagctgtttggcatccggaatgttttcgttgccatgcatgtagtcaacctatatatgactatgagttctccatgtccgggaatcatccataccataaaacttgctacaaggagcagtttcacccgaaatgtgatgtctgcaagcagttcattcctacaaatatgaatggccttattgaatatagggcacatcctttctgggtacaaaaatactgtccttcacatgaaatggatggtactccgaggtgctgtagttgtgaaagaatggagccaagggaatcaaaatatgtattactggatgatggtcgtaagctctgcctggagtgccttgattccgcagtgatggatacaaacgactgccagcctttgtatcttgaaattcaggaattttacgaaggactgaatatgaaagtggaacagcaggttcctctgcttctggtcgagcgacaagctttgaatgaagccatggaaggagagaaggctggtcaccaccatcttcctgaaacaagaggactatgcttatcagaagaacagactgttagcacgatactgagaccaagaatggctggaaacaaaattatgggaatgataacagagccatataggctgacacggcgatgtgaagtgactgcaattcttattctgtatggtctcccaagattgttgacaggttcaattttagctcatgagatgatgcatgcatggttgcggcttaaaggataccggacactgagcccagacgtagaagagggcatttgccaagttcttgctcacatgtggatcgagtcagagatcatggccggatcaggcagtagtgccgcatcgtcatcctcaggatcttcgtcatccacatcatcgaaaaagggcgggcggtcccagtttgagcacaggcttggggactttttcaagcatcagatcgagacggatacttccatggcctacggagatggtttcagaactgggaatcgagccgttcttcattacggcttgaagcgcacccttgagcatatccggctaactgggacctttccattttgaagtagcatggattcatattttgggaaagcttatattatatacatgattttcttccagagttccattacaaccaaagagataaattgtaaaaaaacattctttccagaatccagagatataatatctatgaaggccaaaatgaagtattaaatgattgagatcgatggtcagtctgcccaatcattttgtattctgatcaaactctggaatgaaacaatggcaatctttttatatggtgtcagtttcaataaataccagtaccattttacagtatatatacagttgctttcatgtgtgagcttatctcaaactacttcgtccgttccaaattataaggtgttttaggttgtgtttgttttccttttagattatataagttggattatagtcaaagtgtaggaggataaatatatcaatttgagatcacaaattgtaacacacaaaatcctaattttgggatttaaaaattaaaaaaatattatcctgaaatctaaataagagtattttcttataaaagattaaagtaaaagtatctcataaaagatattatatattagaaagtatttcctcgtaaaacaaaataagtagtaaatattgaagtttttgaatgaacttttaatttgactacatattcaaaatactttcgcagaatgaatatgatgtgtgttgcatattgaacattacctaaataaataaggtaataaataaatgaataaacttaagacatatattttgcatttatgttggagatttttttgtgcaaattagaattctatttgaatttaaacctaattggaattggaaaatatgaaataaaaaggaaaa

SEQ ID NO: 134045 - DNA, 3174 bp, Zea Mays
ccccaccctgcttcctctccgtgggcacctgacgccgcgaccccggccccgagctggctttgccggccaatcggctcgcccgcgccgaccaccgcgcctcttcccctcgccgagatcgcctgaaaaggcaagcgaggccagcccgatccccctccccgcccccctcaagaaccaaaaaagggtgtcatttcgtcctaggatcgcagctcgagctcggtcgctctcgctcacctcgctccctactcgcctgctttccacttcctccgcgctcccgatttcctctccgattccttcgccgactcgtttcttcttggcaattcgttgcgcgggccatcgccccgacggcacctgggtacatcagctacaggacgggacaggtccctcttctaggagaggcttcgccagccgcctcccgcccccgtcactacgggcgccgtggagcggagatccatccggacttggatcggtctcgtcgcgtggtaagcatgtccagcgtgcttggatggattctagagtctatacagtagtgattggagttatcaatcaaatcctttttctcgcttcggttcagttcagttgcggatttgtccgcgtggttccgtactaatctaatccaaatgcactgttagagtaggttatctatttgtacgataaataatctgttgacacttacacgattgaacttggcacccaagtgctggtgcagtttgtttcctggggttcaattgtatccattctgatctcacccttcattttgcgtttcccaacattttggcattaatttcagattacagctcttgttttattgccagtttgagcaatatgggttggctgaccaagttttttagaggctcaacccacaatatctcggaagagcagtatcacagcaggcctgcagaagacacagcatggaatgaaccctctagctctcctgttgtgactgacatcctttcagagtttaacaatgaggatattgaccgtgctatagcgctctctctatcggaagaggagcaaagaaaggaaaaggcaatagataaggatatgcatttggaggaggatgagcaacttgcaagagctatccaggaaagtttgaatgttgagtcaccccctcgcagaaatggcagtgccaatggtggtactatgtatcatccgcctcgcgaaactggcaatgcatatcagccacctcgtgaaaatggcagtgccaatggtggaaatgcatatcacccattaccatttatgttctcatctggattcagagcatgcgcaggatgtcacagagagattggtcacgggcgttttctcagttgcatgggagctgtttggcatccggaatgttttcgttgccatgcatgtagtcaacctatatatgactatgagttctccatgtccgggaatcatccataccataaaacttgctacaaggagcagtttcacccgaaatgtgatgtctgcaagcagttcattcctacaaatatgaatggccttattgaatatagggcacatcctttctgggtacaaaaatactgtccttcacatgaaatggatggtactccgaggtgctgtagttgtgaaagaatggagccaagggaatcaaaatatgtattactggatgatggtcgtaagctctgcctggagtgccttgattccgcagtgatggatacaaacgactgccagcctttgtatcttgaaattcaggaattttacgaaggactgaatatgaaagtggaacagcaggttcctctgcttctggtcgagcgacaagctttgaatgaagccatggaaggagagaaggctggtcaccaccatcttcctgaaacaagaggactatgcttatcagaagaacagactgttagcacgatactgagaccaagaatggctggaaacaaaattatgggaatgataacagagccatataggctgacacggcgatgtgaagtgactgcaattcttattctgtatggtctcccaagattgttgacaggttcaattttagctcatgagatgatgcatgcatggttgcggcttaaaggataccggacactgagcccagacgtagaagagggcatttgccaagttcttgctcacatgtggatcgagtcagagatcatggccggatcaggcagtagtgccgcatcgtcatcctcaggatcttcgtcatccacatcatcgaaaaagggcgggcggtcccagtttgagcacaggcttggggactttttcaagcatcagatcgagacggatacttccatggcctacggagatggtttcagaactgggaatcgagccgttcttcattacggcttgaagcgcacccttgagcatatccggctaactgggacctttccattttgaagtagcatggattcatattttgggaaagcttatattatatacatgattttcttccagagttccattacaaccaaagagataaattgtaaaaaaacattctttccagaatccagagatataatatctatgaaggccaaaatgaagtattaaatgattgagatcgatggtcagtctgcccaatcattttgtattctgatcaaactctggaatgaaacaatggcaatctttttatatggtgtcagtttcaataaataccagtaccattttacagtatatatacagttgctttcatgtgtgagcttatctcaaactacttcgtccgttccaaattataaggtgttttaggttgtgtttgttttccttttagattatataagttggattatagtcaaagtgtaggaggataaatatatcaatttgagatcacaaattgtaacacacaaaatcctaattttgggatttaaaaattaaaaaaatattatcctgaaatctaaataagagtattttcttataaaagattaaagtaaaagtatctcataaaagatattatatattagaaagtatttcctcgtaaaacaaaataagtagtaaatattgaagtttttgaatgaacttttaatttgactacatattcaaaatactttcgcagaatgaatatgatgtgtgttgcatattgaacattacctaaataaataaggtaataaataaatgaataaacttaagacatatattttgcatttatgttggagatttttttgtgcaaattagaattctatttgaatttaaacctaattggaattggaaaatatgaaataaaaaggaaaa

SEQ ID NO: 134046 - DNA, 2866 bp, Zea Mays
ccccaccctgcttcctctccgtgggcacctgacgccgcgaccccggccccgagctggctttgccggccaatcggctcgcccgcgccgaccaccgcgcctcttcccctcgccgagatcgcctgaaaaggcaagcgaggccagcccgatccccctccccgcccccctcaagaaccaaaaaagggtgtcatttcgtcctaggatcgcagctcgagctcggtcgctctcgctcacctcgctccctactcgcctgctttccacttcctccgcgctcccgatttcctctccgattccttcgccgactcgtttcttcttggcaattcgttgcgcgggccatcgccccgacggcacctgggtacatcagctacaggacgggacaggtccctcttctaggagaggcttcgccagccgcctcccgcccccgtcactacgggcgccgtggagcggagatccatccggacttggatcggtctcgtcgcgtgattacagctcttgttttattgccagtttgagcaatatgggttggctgaccaagttttttagaggctcaacccacaatatctcggaagagcagtatcacagcaggcctgcagaagacacagcatggaatgaaccctctagctctcctgttgtgactgacatcctttcagagtttaacaatgaggatattgaccgtgctatagcgctctctctatcggaagaggagcaaagaaaggaaaaggcaatagataaggatatgcatttggaggaggatgagcaacttgcaagagctatccaggaaagtttgaatgttgagtcaccccctcgcagaaatggcagtgccaatggtggtactatgtatcatccgcctcgcgaaactggcaatgcatatcagccacctcgtgaaaatggcagtgccaatggtggaaatgcatatcacccattaccatttatgttctcatctggattcagagcatgcgcaggatgtcacagagagattggtcacgggcgttttctcagttgcatgggagctgtttggcatccggaatgttttcgttgccatgcatgtagtcaacctatatatgactatgagttctccatgtccgggaatcatccataccataaaacttgctacaaggagcagtttcacccgaaatgtgatgtctgcaagcagttcattcctacaaatatgaatggccttattgaatatagggcacatcctttctgggtacaaaaatactgtccttcacatgaaatggatggtactccgaggtgctgtagttgtgaaagaatggagccaagggaatcaaaatatgtattactggatgatggtcgtaagctctgcctggagtgccttgattccgcagtgatggatacaaacgactgccagcctttgtatcttgaaattcaggaattttacgaaggactgaatatgaaagtggaacagcaggttcctctgcttctggtcgagcgacaagctttgaatgaagccatggaaggagagaaggctggtcaccaccatcttcctgaaacaagaggactatgcttatcagaagaacagactgttagcacgatactgagaccaagaatggctggaaacaaaattatgggaatgataacagagccatataggctgacacggcgatgtgaagtgactgcaattcttattctgtatggtctcccaagattgttgacaggttcaattttagctcatgagatgatgcatgcatggttgcggcttaaaggataccggacactgagcccagacgtagaagagggcatttgccaagttcttgctcacatgtggatcgagtcagagatcatggccggatcaggcagtagtgccgcatcgtcatcctcaggatcttcgtcatccacatcatcgaaaaagggcgggcggtcccagtttgagcacaggcttggggactttttcaagcatcagatcgagacggatacttccatggcctacggagatggtttcagaactgggaatcgagccgttcttcattacggcttgaagcgcacccttgagcatatccggctaactgggacctttccattttgaagtagcatggattcatattttgggaaagcttatattatatacatgattttcttccagagttccattacaaccaaagagataaattgtaaaaaaacattctttccagaatccagagatataatatctatgaaggccaaaatgaagtattaaatgattgagatcgatggtcagtctgcccaatcattttgtattctgatcaaactctggaatgaaacaatggcaatctttttatatggtgtcagtttcaataaataccagtaccattttacagtatatatacagttgctttcatgtgtgagcttatctcaaactacttcgtccgttccaaattataaggtgttttaggttgtgtttgttttccttttagattatataagttggattatagtcaaagtgtaggaggataaatatatcaatttgagatcacaaattgtaacacacaaaatcctaattttgggatttaaaaattaaaaaaatattatcctgaaatctaaataagagtattttcttataaaagattaaagtaaaagtatctcataaaagatattatatattagaaagtatttcctcgtaaaacaaaataagtagtaaatattgaagtttttgaatgaacttttaatttgactacatattcaaaatactttcgcagaatgaatatgatgtgtgttgcatattgaacattacctaaataaataaggtaataaataaatgaataaacttaagacatatattttgcatttatgttggagatttttttgtgcaaattagaattctatttgaatttaaacctaattggaattggaaaatatgaaataaaaaggaaaa

SEQ ID NO: 134047 - DNA, 2487 bp, Zea Mays
gtgggcacctgacgccgcgaccccggccccgagctggctttgccggccaatcggctcgcccgcgccgaccaccgcgcctcttcccctcgccgagatcgcctgaaaagctcttgttttattgccagtttgagcaatatgggttggctgaccaagttttttagaggctcaacccacaatatctcggaagagcagtatcacagcaggcctgcagaagacacagcatggaatgaaccctctagctctcctgttgtgactgacatcctttcagagtttaacaatgaggatattgaccgtgctatagcgctctctctatcggaagaggagcaaagaaaggaaaaggcaatagataaggatatgcatttggaggaggatgagcaacttgcaagagctatccaggaaagtttgaatgttgagtcaccccctcgcagaaatggcagtgccaatggtggtactatgtatcatccgcctcgcgaaactggcaatgcatatcagccacctcgtgaaaatggcagtgccaatggtggaaatgcatatcacccattaccatttatgttctcatctggattcagagcatgcgcaggatgtcacagagagattggtcacgggcgttttctcagttgcatgggagctgtttggcatccggaatgttttcgttgccatgcatgtagtcaacctatatatgactatgagttctccatgtccgggaatcatccataccataaaacttgctacaaggagcagtttcacccgaaatgtgatgtctgcaagcagttcattcctacaaatatgaatggccttattgaatatagggcacatcctttctgggtacaaaaatactgtccttcacatgaaatggatggtactccgaggtgctgtagttgtgaaagaatggagccaagggaatcaaaatatgtattactggatgatggtcgtaagctctgcctggagtgccttgattccgcagtgatggatacaaacgactgccagcctttgtatcttgaaattcaggaattttacgaaggactgaatatgaaagtggaacagcaggttcctctgcttctggtcgagcgacaagctttgaatgaagccatggaaggagagaaggctggtcaccaccatcttcctgaaacaagaggactatgcttatcagaagaacagactgttagcacgatactgagaccaagaatggctggaaacaaaattatgggaatgataacagagccatataggctgacacggcgatgtgaagtgactgcaattcttattctgtatggtctcccaagattgttgacaggttcaattttagctcatgagatgatgcatgcatggttgcggcttaaaggataccggacactgagcccagacgtagaagagggcatttgccaagttcttgctcacatgtggatcgagtcagagatcatggccggatcaggcagtagtgccgcatcgtcatcctcaggatcttcgtcatccacatcatcgaaaaagggcgggcggtcccagtttgagcacaggcttggggactttttcaagcatcagatcgagacggatacttccatggcctacggagatggtttcagaactgggaatcgagccgttcttcattacggcttgaagcgcacccttgagcatatccggctaactgggacctttccattttgaagtagcatggattcatattttgggaaagcttatattatatacatgattttcttccagagttccattacaaccaaagagataaattgtaaaaaaacattctttccagaatccagagatataatatctatgaaggccaaaatgaagtattaaatgattgagatcgatggtcagtctgcccaatcattttgtattctgatcaaactctggaatgaaacaatggcaatctttttatatggtgtcagtttcaataaataccagtaccattttacagtatatatacagttgctttcatgtgtgagcttatctcaaactacttcgtccgttccaaattataaggtgttttaggttgtgtttgttttccttttagattatataagttggattatagtcaaagtgtaggaggataaatatatcaatttgagatcacaaattgtaacacacaaaatcctaattttgggatttaaaaattaaaaaaatattatcctgaaatctaaataagagtattttcttataaaagattaaagtaaaagtatctcataaaagatattatatattagaaagtatttcctcgtaaaacaaaataagtagtaaatattgaagtttttgaatgaacttttaatttgactacatattcaaaatactttcgcagaatgaatatgatgtgtgttgcatattgaacattacctaaataaataaggtaataaataaatgaataaacttaagacatatattttgcatttatgttggagatttttttgtgcaaattagaattctatttgaatttaaacctaattggaattggaaaatatgaaataaaaaggaaaa

SEQ ID NO: 134048 - DNA, 1006 bp, Zea Mays
aggaacatatggcaggatgttgtgagaaggatgttcagtaagcgcgagcgtagcaatcttgacatctacaaagatttcaaccaacttaccaagcgcggattcatggcatggccataatcagattaatgttggggcctctgaccaaagtgggaggatcagcaagaagaggaaggaaagtatagcaacggtggggagaatgattttcaagaagatgacgaaccctaggcaactaagaagccaagagttgtttggtcagtcgaactggtcggaaatttgttgcggttgtcaatcagcttggaattgataaagctgtaccaaaaagaatccttgagctgatgaatgtggagaaactcaccaggaaaatgtcacgggccatcttcagaaatacaggctctatctcaaacgattaagtgttgtggcgtcacagcaagctagcattgttgccgcttttggaggtagagaccccttatttcttcacatgggagcctttgaaggtctccagggttatcaaccttttgcaccctgtgctgctctatcatccttcagcccacatggcttgctaggtagaactagcgcggcaacattcagggtcccggaacttgctcctgccatgacagtgcaaagtgctaccaacagtggcataataagtcgttgtgctggtgatgcaaacaactttcagcttcccggtttacaagaagaccaacaagcacatttggggcaaggttcggccacatctcttgggctgccccaactccaacagaagtggatccaacaagaaaataatgacatgtctgttgtgttttctgggagtgcactggctaacactctatctggtgaactccagagacttatgagcagttcattgccatgccaccacaggaactggtggaacaaagtttttgcattggtaaacatgcctgtttgtccatccggtagcttaacagcatcatccagcaataacaaggatggtggtgctagttattgcagtagtgttgctcgctcctga

SEQ ID NO: 134049 - DNA, 246 bp, Zea Mays
gctcctgctcaacagtctccacctactgaacccctggatccactgtagctggctcgtcagggatgatcagaacgatggggctgaccacggtctagcggaaatcatcgacattcaaacgacacctagagctgtgatccttctctagcctccgaatttgacggtcccagctagcttccgacacggtttggtgatggcgaatccctcccctcgctcagttcttcacggtagtagtcaaagtttgtgatc

SEQ ID NO: 134050 - DNA, 186 bp, Zea Mays
gaaggagttgctcttatttatcttcaggctgctttatctaagaaggattcttctgctctttaaaggaggttttttgatttaggttgttaagaatagcaatgttaggggaaagtaattcattgatgtagccgactttcttgatgataggaatctacattcgttctcaacgtgaaatcccgtcttatc

SEQ ID NO: 134051 - DNA, 231 bp, Zea Mays
atgggaactgagtgcgaactcggacagggacaaccgatgagggagaaggacgcgatggggaggaagaggacctcgacctcggagatggagagggggccgagcaaagcctgggcgaggatggctgcttcttcccctcagttcgctgcgctagagctcctgatgctccgtgtgggcacgagcgcgacagtgaggaagatgaagacggcggctggaaatatcccagggagatga

SEQ ID NO: 134052 - DNA, 788 bp, Zea Mays
ctctggccgcgcgcgagctcctctgctgaacgctgctgttcggctccctgctgcgtctccctgccatggcgtgcccaggctccagctcgccctgcgctaagattccgtctccctctacgcatctctctctggtcgctcgctctcagtggagctcggtctccatctgcgtgcagccgtcgagctcccctgctcgctggtcgcccttccctctatccgcttgcgcgcagccgcgtccctgctctgctcgtcgggcgcgcaggtccttgctggtgctcagctccagtcgaccgcgcgcgctgctccctgcactcgcctggcgttcgcccctgccttcccatggccggaactcccagcgccgcggctacctttctctggtgcttggctagctcgccgtcgggctggctcaagccccatcgcggcactccagctcgcctagtctccgcgccgcgacactccctctggtccgcgcttccttcagctcggccatggcgagtcccttccgtctctgttctttccctgcttgcgtcgtgatctcccagctcctcaatacttgttcagtcgtctcggttcgctcggcctcaaattccagcgcctcgccctactctcgtcgttcggcgacagccggcgcgagcctggccgtggcggtgttgtggtgtggggacgtcgtgcgcgtcgcgacagctgtcttggccgcgaagcagtccgcgccatagaattcgcccgaccgcgacattgctttacttctcgcgtcgttgctcgccaagtcctttctcagtccgcgccataaa

SEQ ID NO: 134053 - DNA, 949 bp, Zea Mays
gctagcgattggatgtacgggcgtttgtgattggcgcacacgggataagataatcttatctgatggcgctcgtcgtggccacccattccatcttctgctgggtagcagctagcagtatacaagagcttgcttgctgtcctagtcctacctactgacgagctcgccatggcctccctctcctctgccgccgtcaccgccccttccttcgccgcaccagcgccagcccgcgccgtggtcagaaggaggtccttcaccgtgcgcgcctctctccgcaaggccaccggcaccgccgccgtggcaatggctgccagcgccctgcttgccggcggtgccatggcccaggaggtgctgctgggcgcaggcgacggcgggctcgtcttcgagcccagccagttcaccgtcaaggccggcgacaccatcacattcaagaacaacgccggcttcccgcacaacgtcgtcttcgacgaagacgaggtgccgagcggcgtcgacgccaccaagatctcgcaggaggagtacctcaacgcgccaggcgagacctactccgtcaccctcaccgtgccgggaacctacggcttctactgcgagccgcatcaaggagccggaatggtcggcaagatcaccgtcaactaattaagctagctatcgatcgatatccattcatgtattagctgttgcttcctgctttgtactccgccgatctgtccatctctacatgttttcgtcttcacacaacaacctctgctacgactacgtatatatgcatgctactagctgattgattttaacgaccaggccgaccccgaaagctagcttggaccaagttttgtacccattaattctaccgatgcatctctcagtttagactcccataatcatacaaactgctagctttcatctgcatctgcttagtacatctaactatttgtaccgcaaggtgacgtttttg

SEQ ID NO: 134054 - DNA, 1063 bp, Zea Mays
gctagcgattggatgtacgggcgtttgtgattggcgcacacgggataagataatcttatctgatggcgctcgtcgtggccacccattccatcttctgctgggtagcagctagcagtatacaagagcttgcttgctgtcctagtcctacctactgacgagctcgccatggcctccctctcctctgccgccgtcaccgccccttccttcgccgcaccagcgccagcccgcgccgtggtcagaaggaggtccttcaccgtgcgcgcctctctccgcaaggccaccggcaccgccgccgtggcaatggctgccagcgccctgcttgccggcggtgccatggcccaggaggtgctgctgggcgcaggcgacggcgggctcgtcttcgagcccagccagttcaccgtcaaggccggcgacaccatcacattcaagaacaacgccggcttcccgcacaacgtcgtcttcgacgaagacgaggtgccgagcggcgtcgacgccaccaagatctcgcaggaggagtacctcaacgcgccaggcgagacctactccgtcaccctcaccgtgccgggaacctacggcttctactgcgagccgcatcaaggagccggaatggtcggcaagatcaccgtcaactaattaagctagctatcgatcgatatccattcatgtattagctgttgcttcctgctttgtactccgccgatctgtccatctctacatgtcatcagttgttccttttctaagcctaggtgaacgacagtcggtacacaggcgagcatatccccatcgacggttgattcctctggtcgagtaaatctctagtggatccccaaatccaaaacatcatacctcaaacacctaaccccaaaacccaaaccctaaaaccccttattccaaacccaaatccctaaccccaaactttgaacccctaaccccaaccctaaaccccaaacttcaatcccaaaaccttaaaccccaaacctcaaaccctaattctaaaatcctaaccccccaaaccaagagctcaaacacctaaacccaaaacccaaacaccaaaaaccaataa

SEQ ID NO: 134055 - DNA, 349 bp, Zea Mays
aaaaatcatgtttaagtcagcaaaaggttttaggagaaaagctgatgtggcgttggtgtggtcatagactgacgatatagattgtgcacagaaaagttctaatagaaaaaggccgacgatggtagatacagtctagtcgatggtgatgtggcggtagatacaaacccaatgcattggatctagccttacacatgagctgcattggatagtgttggtcttgtgccgctgacatcgagtcttgcatctttgcccataatatacaacaggtcatcagttgttccttttctaagcctaggtgaacgacagtcggtacacaggcgagcatatccccatcgacggttgattcctc

SEQ ID NO: 134056 - DNA, 1303 bp, Zea Mays
acttagatttttccagcgacgctgtcttcttcccctgttgcgcgccgtggagctcccacacgcgtttcttcccctgccgaagccctcccatggcgcccggctctgcttgcccgtggccgtcgttcctaggatcagcctccatctccagttcgtctctctccctgcgcgctttcccagacgcgcgcctagctcctcgcgcgggtctctggtgctcagcagcccagctccctctgctcgcgacgcacgcccagcctctcccaagaactcgagttcctctgctttttccccaaccgcgcgcggtacttctcctctgctcgctcgtcgccatggcgatggccaccgagctcccttgtcgtggcttcctgcttcctcgtcgcgcgcgtagcgttccgtcgttccctgccgtgaccccgtcgtggtgcttcctcgcgcgcagctcaccccaactcccattcgtagtggtcgccagtcgtcgacctagctcggattccatttcgccaacacctgctcctagtcgacgcttgctcggattcgcgtccctgcgcccagccaagttcacccctgcgtgcagccgtgggtttctctgcacagcgttcctgctccccggcctctgtcgtgctcgacagcatgtaattcatgtcgaagcagcagcttcgatcccttgcgtcatgctcaccagatcgagtctcacgtcgtcgatctgtgccattatatttggctatcggtttcgccggttgtcgattttcctattcgctatggtcatcacgacaattgttcctatccgagctagcctcgctcgccagccgtcacgccatctttacctgttaggccgtgcgttgccgcgttcacttcgttgtgttgccgcgttcacttcgttgtgtcatcgtgaacttgtcgacatactgttgtggtacctggatcgcgcttgctgttgggcctatgcttcgtcgccgaaggtcttctaggaagaagcgaccttcggctgaagctgtttgtgtaagatggccgaaggtccctcttcatgaagcttcggtatcacaaaccgacttaaagatagaataaccttttggtccataaaggtctgagtcaatgttgtaaactttcataagggacatacttgtaatctctcacaggctgcgccctgtgcctataaatagtgaacagtattcctttactgttcacgtattcctgtatctgcaatcgcatcattcggaaaccaatctttgccaaggcagaggtataactgtattcaataattaaatatactgagtaaatgcaatgtggttcgtttatgattcgttta

SEQ ID NO: 134057 - DNA, 3094 bp, Zea Mays
cgcccctgcccccgcagccgatctcgtctccccgcccacgccgcctatcgacgccgagccgcctaaccagcccctccgtgacatcatccaaccgctacatggatctaatcctcccaccgcctctgaccaccgattcgattccaatgccgatcaagaggtcttggcaatggaagtgattgcaaagccgaatctgcccgcagaagaggatattgcagcagatgactcggcaatggaagtgactgcaaagtcgaatgtggctgcagcggatggtgtatcaaagccgaatgtttccgcagaggatactgcatcaaagtcaaatgtggccgctactgtagcagtagcaccaactctgttggaaactgccattgcagctggaaatgaccagtgtgatacctcaaactcaaatggagaaaatctacagcagcaagccgtggaaaatgtattagtctccaccactatgttagctgaggacactgtcacacctgcagctgctgccgggctcaagcctgcaaggcgcttcactcgatcgttgctcaagaataataaaccagataaagaagagtctgcatcttgtgaaagtcaggcaacaccagatggtagcaaggatgcctcagttggttttactttgctcctggagaagcctcagagaaggttcacaaggtcgttgctcaagacaaaggttgagagcagtttggttggatctgatgatgtgctggacagtgcatctgattcccctccatcagtgaagaagatggagatgaagatgtcaaagaaagttgcatgtctcacgaagcaccctggaaacattagagagctgctcaacacaggcatgcttgaggggatgccagttatgtacatcattcctcatagcaagaaggctgtcctaaaaggagtgattactggttgcaatatacgttgcttttgcctgtcctgtaatggcgccaaggccatttcagcttattactttgaacaacatgctggaagcaccaaaaaacaccctgctgattacatttacttagggaatggcaatagtttgcgtgacgtgctacgtgcatctgacagatctcccttggaggctctggaagaaacgattcgttcctccattgatccagtagttaaaaggagccgcattaattgtctgaattgcaatgagcttgttcttccgtcatcacatgaaaatgtactgtgtcaagtttgcctcgagtcaaagcaacctcaagatcctcttactgcatcgtatacatgtaatggcagttcgagtctgagtcgaagttccaaggaggctttgctaaggaacatatcatcaggcaagaagggtgggagtgccggcaaagtaacaaacaaggataacagactacacaaattggtctttaatgttctgcttgatggcacagaagtagcttactatgttgatgggcagagaaaggttgatgggtatatcaaggatcatagaatctactgtaatcactgcaacagagtggttagcccatcagcatttgaagctcatgcaggtgagggatcaaggcgcaaaccgtatgataacatattcacatcaaacggagtatcattgcatgagctggcgatgaaaatatcaaaggatatggaactgtcagaacgcgagacagatgatctgtgcagagaatgtggtcaggggggagacattttcccgtgcaaaatctgtccaaggtcatttcatccagcttgcgttggactgtctaaagtccccgcagaatggtattgtgatagttgtcgcaatcttgtgcaaaaagaaaaggctttagcaaagaacaaaaatgctaaagctgctgggaggcaagctggagttgattccattgaacagataatgaagagagctatacgaattgtccccatctctgatgatcttggaggctgtgctctgtgcaaacagaaagatttcaacaatgctgtgtttgatgagcgcactgtgatactctgtgaccaatgtgagaaagagtatcatgtaggatgcttgcagagtcaatggcaagtagaactaaaggaattgcccgaggaggagtggttctgttgcagtagttgctctgagacacgatcatcattggacaagataatctccgatggagctcaactgttggcggacccagatcttgaaatcataaagaagaaacatgagacacgaggtttatgcatggacaccagtaaagatctcaaatggcaattactttctggtaaaagggctactgaagacggaagcatattgctctctgctgcagtgccaatttttcatcaatcttttgatccaatccgtgaagctctcactggtagagatctgattcctgagatggttaacgggaggggacctaaggagggaatgcccgggcaagattacagtggaatgtactgcgcactgttaactgtgggctctaccgtggtgtcagcagcacttttgcgtgtgatgggaggtgatgtggccgagctgccactagttgctacaagccaggatgttcaagggctgggctacttccaagccttgttctcgtgcatagagagggtgctagtctcactgaagatcaagcactttgtgcttccagctgcacatgaagctgaagggatctggatgaacaaatttggcttctctagaatctctcccgaagagctggaagcttatcttaatggggcgcacttgactatattccatggaacgtcatacatgtacaaggctgttccagtgtcataattgatgggatagaagagatatgggtgatttcgtctgtcttttggggggtgggggtccgctcgctattgtgatgtacagagagagttgataaggaagcaaagcatggcaaagacaatgtacaggagctggaagccaaggcgaagcatcggatgaatctaaatgaatgaattccccttggtttgtttactcttgaatcgaaggaagcctgtctttttttggtgtgatatactagactagatgcaatgcaattgaaggagtcgcaccgagtcctggtactagagccagattttttgcaatttaaattttgactctgaaactgctaccagagctgctgtgcattcttctctttctgcatacaatttaaaagttgcaaatgac

SEQ ID NO: 134058 - DNA, 1590 bp, Zea Mays
cccaccagcagcgagcagtctcctctcctgctgcaactgcagccatgccgtcgtccacgatgcgcctgctgtccaggcgcaccgtcacgcctccaccgcgcccacgccaccgcattccgctcaccacctgggacatctcctttctctccgccgactacatccagaagggcctcctctacgccaagccgccgtttcccaccgaccgcctcctcgaccacctccaggcctcgctcgcccaggcgctcgacgcctactaccccgtcgccggccgcttcgtcacggaccagcaccgcgacgccaacggtcacgtcctcggctgctcggtctccatcgactgtgacggccagggggtcgacatcctccacgccgtcgccgacggcgtcgccgtggccgacgtcatcccgcccgacgcacgtgtcccgcgcctcgtccagtcactcttcccgctcgacggcgccgtcaaccacgacggccaccacctcccactcttcgccgtccaggtcaccgacctccacgacggcgtcttcctcggcttcgcctacaaccacgcgctctccgacggcaccgcactatggagattcatcaacgtatgggcgggcatcgcgcgcgacagcccctccccatccccagctccgccgccgccgcccttgctggagcgctggtcgcccgacgccggcccaaccacaccgccggtcgtcctcccctaccccgacctcacggggctcatcgagaggctgcccccgccgccactatgcgagcgcatgctgcaattctcggccgaaaccctggaggcgctcaaggaccgggcgcggcaggagctcctggcggccggggatacggccggcgcggccgccgttaccaagttccaggcgctcagctcgcttgtgtggcgctccgtcacccgcgcgcgccgcatgccgctcggccaaacaaccttttgccgcgccgccatcaacaaccgcacgcgcctccgcccgcagcttccgccggagtacttcgggaacaccatctacgccatcgcaacggaggccgtcaccgcgggggatctgctggagcgcggccacggctgggccacggcggccgtcggccgcgcggtggcggcgcacacggacgacgccatccgggcgcgcgtggccgcgtggatggccaaccctgtcctgtacaacctcaggttctttgaccccaacggcatcatgatgggcagctcgccgcggttcgacatgtacggcggctgcgacttcggctgggggccgcccctggcgccgcgcagcggcagggccaacaagtccgacgggaaggcgtcgctgtaccccggccgggagggagccgaaagcatcgccgcggagcttgtgctgacgtcggagcacatgacgctgctggagcaagacgacgagttctgggcggccgtttcgcccgacaggccttttccgccggcagcgctagccgcccagccaaagtcagacagacactgacagccacagagcatacaataaatatatctcagatcatatgacttctaaatctttcttcttactcacccgatctttggaattaaattccattttaataaagtaatttagttaaagatca

SEQ ID NO: 134059 - DNA, 1166 bp, Zea Mays
actctaaccgtttggacccagccagctcatgagctcacatgcctaggcgtgaggcgtatcgtcttcgacccttcgccttcctcgtccctttctctctcccagattctgactccgtcgggctcccccgtgtctgtgtcttggtaaacatcggtctctccccatcccacctggcagttgccatctcgcaaagtcgcaataacttgtcttctcgaatcggctgcaaccccaccccagaccccaccgccgccgccgctagggttttggggtgaggatcgccgatgtcgacggctcccaggcgtcccttccgaggccgcggcgccatgccctcgggcaccggctacgtccgccgcggccccgccccaggctccgccgacgccgccaagcccctgcgcaagcccgtcttcaccaccgtcgaccagcttcgcccccagacacacggtcacactctcacagcccgcgtcattgccgtccgcaccgtcctcgacaagccctccacgcacctcggccgcacccgcgtcgccgagtgcctcgtcggagacagcaccggcaccgtcctcgtcaccgcccgcaacgaacaggttgaccttttgaagccagatacaacagtgatcttccgcaatgccaagattgatatgttcaagggcaccatgagactggcggtggacaagtggggccggattgaggtgactgattcttctgttttcaaggtgaatgaagacaacaacatgtcactggtggagtacgagctggtggatgtggatgaagaggagtgagctgaagcgatattgcattgccatctgttgggccaagtcgtgctgcggatatgtatttccagctaaaggagggcggtagcgtttaggcttctatctagttatttattattattattatcctggaaggctggcgattgggacggttagttttaagaccatcctaaagaagcacgtcaaattatgtacatcagcattaggtgttctgtctgactgatgctttctgttccgcgacgccgaagtctatcctaatgctactacttttttccctctcacgttgggttgggtgtgtgtgtgtgttgttaatcctttttgacctgtagttttggtagattaaaatctagattctcttagaaaccttaaaaaatcttataaataaaaacatatttcagagta

SEQ ID NO: 134060 - DNA, 1287 bp, Zea Mays
gtgggcgtggacacgttgactttttcaactgtctgcccctgatgtccgttggctcccgacggaggccgccgccgccgcatcaccaccgtcgcgccatgacacctgcctcctccgtctccgtccccgcgccggttcccgcgccccctaagcctctctacctccggggcccggtcatcgcaggcgccgtcgcgctggccgcgtttctcctcctcgccgccgcctacgccaccaggcgagcagggtccccgccggccgccctcctctcccacccagctgtttccaccaggttcttctccttcgacctggtgcgcgagtaccctcacgacccggccgccttcacccagggtatcttgtacgcgggaaatgacacgcttttcgagtccactggcctctacggcaggtcttcagttcgaaaggttttggttaaccaccaaatggacggagatgtgtttggagaaggtttaactcttcttggtgacagattgtttcaggttacctggttgaagaacgacgggtttatatatgaccggcataacttctccaaatgcacgagttttacccataaaatgcgagatggttggggtctggcgactgatggaaaagttctttttggcagtgatggcacctcaatgctgtataagctggattcaaagtcacttgaagtcatgaaagtggtgactgtcaagtatcacggtaatcaagtcccctatcttaatgagctggaatatatagatggtgaagtctgggcaaatgtctggcagacagattgcatagctagagtgtcccctgaagatggcctagtggtgggttggatctttcttcatgagctgaggcggcagttgtggaactcaggcaacacgaatattgacgtcttaaacgggatagcttgggatgaaagaaggcacagattatttgtgacagggaaactgtggccaaagctatatgagatcaagctacgggcagtagatggtccagcagatggatctgtagaaaagctttgtccaaaagccagcttctatcgctgaagagtgtagaaccgcatatacactgggtgtgctaacatgggccttcatttgtttaaacgcacgatgcgaaggatgtggagatgtgagtacgtacatgtttgatctggtaccactgtcatatatatatacacccatgagttagtagatgtagctgtacattgttgtgacctgtatgaattttgatgatggctgtgttgtttgtgttaagagtgaattgcaacagattttgatgcattcaatgcaacttaatagcttgaagaaa

SEQ ID NO: 134061 - DNA, 1308 bp, Zea Mays
gtgggcgtggacacgttgactttttcaactgtctgcccctgatgtccgttggctcccgacggaggccgccgccgccgcatcaccaccgtcgcgccatgacacctgcctcctccgtctccgtccccgcgccggttcccgcgccccctaagcctctctacctccggggcccggtcatcgcaggcgccgtcgcgctggccgcgtttctcctcctcgccgccgcctacgccaccaggcgagcagggtccccgccggccgccctcctctcccacccagctgtttccaccaggttcttctccttcgacctggtgcgcgagtaccctcacgacccggccgccttcacccagggtatcttgtacgcgggaaatgacacgcttttcgagtccactggcctctacggcaggtcttcagttcgaaaggttgagcttcagaccggaaaagttttggttaaccaccaaatggacggagatgtgtttggagaaggtttaactcttcttggtgacagattgtttcaggttacctggttgaagaacgacgggtttatatatgaccggcataacttctccaaatgcacgagttttacccataaaatgcgagatggttggggtctggcgactgatggaaaagttctttttggcagtgatggcacctcaatgctgtataagctggattcaaagtcacttgaagtcatgaaagtggtgactgtcaagtatcacggtaatcaagtcccctatcttaatgagctggaatatatagatggtgaagtctgggcaaatgtctggcagacagattgcatagctagagtgtcccctgaagatggcctagtggtgggttggatctttcttcatgagctgaggcggcagttgtggaactcaggcaacacgaatattgacgtcttaaacgggatagcttgggatgaaagaaggcacagattatttgtgacagggaaactgtggccaaagctatatgagatcaagctacgggcagtagatggtccagcagatggatctgtagaaaagctttgtccaaaagccagcttctatcgctgaagagtgtagaaccgcatatacactgggtgtgctaacatgggccttcatttgtttaaacgcacgatgcgaaggatgtggagatgtgagtacgtacatgtttgatctggtaccactgtcatatatatatacacccatgagttagtagatgtagctgtacattgttgtgacctgtatgaattttgatgatggctgtgttgtttgtgttaagagtgaattgcaacagattttgatgcattcaatgcaacttaatagcttgaagaaa

SEQ ID NO: 134062 - DNA, 103 bp, Zea Mays
aattgagataggaaaatatctcgtcaacgtcgttatgcttgttcgcttggcttctattatattactccaaaacgaactacttgttcatgcagctggtaccggc

SEQ ID NO: 134063 - DNA, 2373 bp, Zea Mays
atggagacccaaccatcaatcccatttccctcccatctaggcagtcagcaggcagtaggcagtaggctgcatctcaatctccatctacacgactgcactcctgctcctactcctacaggaaacacacaagaaaagaaaagaaaagatgatggaggtctatggaagtgccggcactgcgattggacgcaccaacgcttgagtggtccatgcacagctgaaataatcctccacagtcagcagggacactgcaaaattgccagcaacgtcgattcgttagttcagcaccaaccattatatagttcaccacacaaagcctctgaccatgctactgggctgggtgctgaaaaccaagttgagaaacaggacaatgtcagcgctcaacaaactaaccacagttcgagtaatggcaacttggaaaatggttcacactctaatggtgtgcatgagatctccagcagcagtgaaaccgtgacgaccattgcggacggactcaaactgatcacaaccatccgcgagggcaggcagcacatcttgccaagttggagtggctctcttgaccacgtttctggtggcagcacgagcacatctcaggttcatgaaattgaagttgagaaggaagtcagtaagggcgacgtcaaagttgaagagtatgatcttgagaagattctggacgagcaagaaacccatgacctctattgccccaactgcaaatcgtgcataactcgaagggtcatccttaaaaagagaaagagaacagtaaggcaagaaacaggcaaggaaccaccaaaaagaccacagcttgtagagcctcccgccaatgctccaagccaaacaatcaatcaagactcgccggaagtatttagatgcttgtcgtgcttcactttcttcatcccaacaggttgcgggtttaatatattccgcatatttgaaaggagggatgtagaccaacaagttcaatctcagcattcttctgcgtctgttgaaaattgtggaagttggcttctttcttgtttccggacaatagatagtccaaagccattacataatgcagattcattggaggaacctctagtaagtgattcgcagaggactgacaatataacttcagttgaagagaacacaccattgcatagtgataacacaataggtaaagcagaacaatcaaacaaaccatcaccaactggatcccaaaccacagctgcgacgtatgaagtaaaggagtccttcagtcaattccatgcatcatctaaagacgtgacaggatccacgcaaaaagaggcaggacatgtggtaactgtgcagcgaaacggagcacgccaagagcaaattcctctctcacggcctgctgttgatactaaaactgataccagtcatctaggccacaaagaagaattcacgcaaacagaagcaggacatgtggtaactgtgcagcgaaatggagcacgccaagagcaaattcctctctcgcagccttctggtgatactgcgaatgattcaatgcaccttggccacaaacaagatattctggaagatataatggcgccctctgataacagcacatttttcagcccatcgtttgttaaaccagtacttacaatcccaataaaagttttgcctggggaggacaaccagacggttgagaaaccaacttcagttattcgtcagccagctgagccagaagctccacctcatagagtattggcagtccctgaggccgaggcactagttcctgcaccatcagctgagagggatgaatgggatatcctgaaagccgtagtgtatggtggccttgttgaatcaatcacgagcctctcagttgtatcagcagctgcagcaagtggtgccaagactttggatatattcatcctgggcatagcaaaccttattggtggtcttcctgtactttaccacaatattgctgatctacgaaacacaggagatatagctgaaagcagtgagcaagtggggcattactggctagagctgggaaggcgatccaagtaccagttgcacatggtgatagccatactgtcatacatcctcttcgggctgctgccaccagtcatctacggactgtcattcaggacgagcgacaacagagagaacaaagtgctggtggtcgctgctgcatctctcctgtgcattgcgctgctcgcaatcgggaaggcacatgttaagaggcataggacatacctcacaaccctcctctactacctgtccattggattcagcagctccggactgtcgtacgtcgcaggcgtcctcctcgcgaaggtcctagcacacttcggtatcattgatcagggtggtgcatcagctcctgctcctccaggtctctcattccctgaagcagccgcctgggcttcctactga

SEQ ID NO: 134064 - DNA, 1644 bp, Zea Mays
gaccgatacctccccggcaccccgcccgtcctcccggcgaccgacgcctcccgaccatcctcccaacgactagcgtcaggcaccccagcctcgggcgccgcgaagctattagccccgtggacgcggcggcggcggcggctccggctgccacaccaacacagacaggcaatggctaggcaaggcgcaagaagaggaggggaagtcgaaaataatttagcagcggaagcggaagcagcagcacgaggtgggtggggcagcggcagcgggggaccttccttcctgatacaggaaggcagggttcatgagtggcggcacgcctgcagcaagcagtagcctgcggacatcactctcatactacgtgaggcaagtccgcgcctatgactaccaccactacctctgccttctccacctggccccggccgtgcgcaaggccgcgttcaccttccgcaccttcaacatcgagacagcaagggccatggatgtggtgttcgacccccgagccggcctcatgcgcctcctctggtggaaggagggggtcgacaagatctttggcaacaagctagtcgagcacccagttgcccaggcgctctcttcgatcatcgcagaccacaaggttagcaagcactggctgaagcggtccgtggaggcgaggatcaacgacgccaaccgtgaggaaggcaccattcctaggacgagcgcgaagttggagaggtatgtggaggacacccagtccaccatcctttacatgaccttgcaggctggcggaatacagtccaccgtggctgaccacgccgcctctcacatcggcaaggccagcgggcttctgttactgctcaaggcgctgccgcaccatgtaaataatcaagggacggtacattatatcccagctagtgtggccgaggaatgcggcctgctcatcacacgggagggcggcaggtcggaggtcagggcaggcgagaggctgctagacgtagttttcaaggtcgcatctgttgcggaggctcacctgcataaggcgcgagagttggcaccgtccgtgcccaaagaggcgatccctatgctcctcccagccttgccggcccaggtcctcctggataccctgcgaaggtgagttcaacgtgtttgatccttggctgtcgaggggagtccacggggtctctcctctgtggtaccagctgaagcttaactggaacgcgcggcgaagcaggtactaatgaggaggaggaaccttttgccctcagccatgggagctgttgctgttccttgtagcaaaaagctttttattgggggtttttgacatagcagagattgaataactacttgcggcagatttgaagctgttagggtttagggttattcaattgtgccatgggagctgttgctgttccttgtagcaaaaagctttttattggtgttttttgacatagcagagattgaataactacttgcggcagatttgaagctgttgaatatgtgtcgtgcttttcgttgtgtttgtgggctgggctcatttacattgcacaattgcaacactgacagtgactgttttatttttcttttggaacatacaatgcctgtttgtattaatacagcagaaagcagacaatattttttgataaacgcaattagttttctatagtctat

SEQ ID NO: 134065 - DNA, 792 bp, Zea Mays
cggcgaccgacgcctcccgaccatcctcccaacgactagcgtcaggcaccccagcctcgggcgccgcgaagctattagccccgtggacgcggcggcggcggcggctccggctgccacaccaacacagacaggcaatggctaggcaaggcgcaagaagaggaggggaagtcgaaaataatttagcagcggaagcggaagcagcagcacgaggtgggtggggcagcggcagcggggtgagatttttttcgttcctctcttcgctttgcttctctgcacgcgatcgattgccggactggttgcgaggggggagctcgtgcgctcagcggcgggcgaggattcgtggtgggatagccaccgtataccgccgtctacggggaatttccgggggcggatgggcgctagtacccgcagtgcagcgcccgaaatctggggttcgaggcgagaattctgctcgggtttggttgtgctagccgtttcgatctgggttggtttgttttggtttgcgacaagtttttgcttagggttcaattcaatccgtccgcggggagcgtagtttagttctgggggtttatgccttgcccaatctaattgtcttccaccttacccaaactctaccaagaaagcccccaaaatgtttcatttttcttttcttcccatgtgtgatgttttgatcataaacataaacgtaaggatggttgtggaaatccatatgtttatcaccgtttgcttcctccagcagcgctattaccgtttgcttctcttcccatgtgctagccgtttgcttctctagcg

SEQ ID NO: 134066 - DNA, 1587 bp, Zea Mays
cggcgaccgacgcctcccgaccatcctcccaacgactagcgtcaggcaccccagcctcgggcgccgcgaagctattagccccgtggacgcggcggcggcggcggctccggctgccacaccaacacagacaggcaatggctaggcaaggcgcaagaagaggaggggaagtcgaaaataatttagcagcggaagcggaagcagcagcacgagggaccttccttcctgatacaggaaggcagggttcatgagtggcggcacgcctgcagcaagcagtagcctgcggacatcactctcatactacgtgaggcaagtccgcgcctatgactaccaccactacctctgccttctccacctggccccggccgtgcgcaaggccgcgttcaccttccgcaccttcaacatcgagacagcaagggccatggatgtggtgttcgacccccgagccggcctcatgcgcctcctctggtggaaggagggggtcgacaagatctttggcaacaagctagtcgagcacccagttgcccaggcgctctcttcgatcatcgcagaccacaaggttagcaagcactggctgaagcggtccgtggaggcgaggatcaacgacgccaaccgtgaggaaggcaccattcctaggacgagcgcgaagttggagaggtatgtggaggacacccagtccaccatcctttacatgaccttgcaggctggcggaatacagtccaccgtggctgaccacgccgcctctcacatcggcaaggccagcgggcttctgttactgctcaaggcgctgccgcaccatgtaaataatcaagggacggtacattatatcccagctagtgtggccgaggaatgcggcctgctcatcacacgggagggcggcaggtcggaggtcagggcaggcgagaggctgctagacgtagttttcaaggtcgcatctgttgcggaggctcacctgcataaggcgcgagagttggcaccgtccgtgcccaaagaggcgatccctatgctcctcccagccttgccggcccaggtcctcctggataccctgcgaaggtgagttcaacgtgtttgatccttggctgtcgaggggagtccacggggtctctcctctgtggtaccagctgaagcttaactggaacgcgcggcgaagcaggtactaatgaggaggaggaaccttttgccctcagccatgggagctgttgctgttccttgtagcaaaaagctttttattgggggtttttgacatagcagagattgaataactacttgcggcagatttgaagctgttagggtttagggttattcaattgtgccatgggagctgttgctgttccttgtagcaaaaagctttttattggtgttttttgacatagcagagattgaataactacttgcggcagatttgaagctgttgaatatgtgtcgtgcttttcgttgtgtttgtgggctgggctcatttacattgcacaattgcaacactgacagtgactgttttatttttcttttggaacatacaatgcctgtttgtattaatacagcagaaagcagacaatattttttgataaacgcaattagttttctatagtctat

SEQ ID NO: 134067 - DNA, 1585 bp, Zea Mays
ctcacaccgggccgccacacaaaatcccacacctgcgtatcgcgctgcccaccgcacatccccgcctcccgccggccggccggccgcctgacgactcgcggtcaccgcctgcgggccaccgtccgcccccagctcgctcacgatattgtacgttcgtggcgcggagcaccgtggtgttggcctagtacgtcgatttcacggtgacttcactaccattgccgcccagtggctgcagaagctccccgccagcaacaagttcacctacaactgcgacggccacaccttcagttacctcatagagaaaggatttaggaccttccttcctgatacaggaaggcagaattcatgagcggcggcacgcctgcagcaagcagtagcctgcggacagcactctcatactgcgtgaggcaagtccgcgcctatgactaccaccactacctctgccttctccacctggccccggccgtgcgcaaggcagcgttcaccttccgcgccttcaacatcgagacagcaagggccatggatgtggtgtccgacccccggaccggcctcatgcgcctcctctggtggaaggaggcggtcgacaaggtctttggcaacaagctggtcgagcacccagttgcccaggcgctctcttcggtcatcgcagaccacaaggttagcaagcactggctgaagcggtccgtggaggcgaggatcaacgacgccaaccgtgaggaaggcaccattcctgggacgagcgcggagttggagaggtatgcggaggacacccagtccaccatcctttacatgaccttgcaggctggcggaatacagtccaccgtggctgaccacgccgcctctcacatcggcaaggccagcgggcttctgttactgctcaaggcgctgccgcaccatgtaaataagcaagggacggtacattatatcccagctagtgtggccgaggaatgcggcctgctcatcacacgggagggcggcaggtcggaggtcagggcaggcgagaggctgccagacgcagttttcaaggttgcatctgttgcggaggctcacttgcacaaggcgcgggagttggcaccgtccgtgcccaaagaggcgatccctgtgctcctcccagccttgccggcccaggtcctcctggataccctgcgaaggtgtgagttcaacgtgtttgatcctcggctgtcgaggggagtccacggggtctctcctctgtggtaccagctgaagcttaactggaacgcgtggcgaagcaggtactaatgaggaggaggaaccttttgccctcagccatgggagctgttgctgttccttgtagcaaaaagctttttattggggttttttgacatagcagagattgaataactacttgcggcagatttgaagctgttgaatatgtgtcgtgcttttcgttgtgtttgtgggctgggctcatttacattgcacaattgcaacactgacagtgcctgttttatttttcttttggaacatacaatgcctgtttgtattaatacagcagaaagcagacaatattttttgataaacgcaattagttttctatagtctatataattcctgttttcggttc

SEQ ID NO: 134068 - DNA, 280 bp, Zea Mays
ctctagcctagtaatacatgacttcgtatcaaagaactgattgggaactaattcggtcctcttttacttctgaagggagctcttcatatttaagaaggcatggaacatcagtgcttgcacaagagtttatggtgtctacacatgattatgacattgaagaagaagaaatccatgggtttgcattgcctcaccagtctgcacctcgtgatatgaaaagcaccgggagacatccattcagacatcaaatagtgcttttgtgactgatcatctctagagcttt

SEQ ID NO: 134069 - DNA, 162 bp, Zea Mays
gatagggtcggttgtagagataggatctattttgtggatagggtcggttttagagataagatttgttttgtggatatggtcggtttagatataggatttgttttgtggatatggtcggttttagagataggatctgtcttgtggatagggtcggttttagag

SEQ ID NO: 134070 - DNA, 3219 bp, Zea Mays
atgtcagcttccgagttcaggattccataccagcaagtttcaccttcgcagcctgctgagaatgtaaatcagtttaagacctgtcgatgtggggagggagacccgaactccacttctgaaactggtgacagtccaccggcctcttgtcctaattgccaggtccttaagagtggacatttactactttcatctaaaggaattggatggacatcatggaaaaagcgctggtttgttcttacgagggcatccctagtgttcttcagaagcgacccttcactgacaacagcctacaagtttggcattctaataattcctagagttgaaatcagtgtgctgctgtacaatccaagtcattaccagaatgtgccgccacccagaggagctgaaccaattgttacacttggtggaattgacttgaataattctggaagtgtcgtcatcaaagaagaaaggaaacttttgacagtgttctttcctgatggccatggtgaacgaactttcactctgaaggcagaaaccacaggagatctaaatgagtggagaaatgcactggagagtgctatagctcaggcacccagcatagcaaatacaatggggcaaaatccaatattcagcactgatgtagaagcagaatctgctgaatctccagctgaacattcggaggaccgttctgttattggcagacctgcaaaatttgcacttgtagatgctgatggtagtccatcattcttggagaaggccctgaagttcattgaagatcatgggaaaaacgagttctctccagaagaggatgctcatgttattggtgactgtattaaggactcggaagaaggttcctgttcttcagatgcttatacggagtctgaggatgatgttgacaaggaatattccacagataatgacacccatgatgacgatggttcttatgattctggtgaagatgacattgaagaagatttggactactctgatgacagtgaacatgacagtaagatcaacgctaatatcaaggatggcaaggttaaaaacaatatctcagaaactgcagaagttgcacaggcagaggatacctctcctatggatatcaatagtcaatccaaccagaagcaagaatcatgtggaccgaatggatccaaagatcgtatactaagatcaacttctcgttcatcatcttccagagaaaaaactatggagaaatcatgcagttcagcacacaagggcaaaagaaccttatggggccgtacttcagcaagaaaagacctgtcaacagaggagattgaatgctgcagcgatgatgaggcccttgttgagaaacttgagagtaacaagattgatctccaatcaaaaattgcaaaggaggccaaagaaaatgcaatcctatggtcaagtctagaaaaacggaaagaagaactacatgagcgtcgtttagcacttgaaaaagaagttgaaaatttgagggaccagctgaagagggtgatgaatttgcgaagggggcaggtgtcctcgccttcaacaatagacagcaaggaaggtgctagtgctactgctgaatctgatatcatgaacttgaagcaagaggtttcttatcttcatgggcaggtcaggggccagcagctgtgctgtgaatcatgcaaccaacgtctcctaaatacagacaggcttagcggacctgaaagctcatcagtggaagcgtcaccgactgttgggagtgatcctgcatttgacatggtaagaaggcaaaatccctttcgttctgctttcattataagtgggaggaaagtctgttatcaggttaaaaagaagagaacatttcagggtgatatcgagcaatcaaggaagcaagccgcacagcattcgccttcttcaagagacaagccaagtcacgaggcggtcgggggcatcacccagagggctcctcaaagagggcattcgattgccagggagggccaagatgggtcgtcgtcgttgtcatcctctaattcgaagtggaatcttgcgcagaaacaatattcaaatagcccattgataagagggcttcatgtatccagcagactagaggatttcggtggaagcatatcaccagcagcgtcatcggcattagccaagctgacgaaccggctcaacttcctgaaagaacggagggcgctgctggcaagcgagatgcagagcttggatttgggtcggcccccaacagtgaagtccccaacaccaaaaggccatgaaagcaagaatagttgatgttagtctgttcctgtcgtgctcttctgaatgctagatagccttatgattaaaaccagcagtgtagtttgtgtgcatcccgttctcatccatgtagtgctgtctgtacatgtttccacaaaattctgctgcttcaaacttgcagatacatatagatacagattgaacgtgtcagctgctagtaggctgctttgttgaacacactacacaccaagcactagctgttctcattgctgaatggatcgtggctcaaagcactcttcactgatatacatagagagatggatctagtgatctggacatggtgacacattctaaagctcaaaatggctgtctgtccacataaaaacatggataacattgaaggtacaacaaagtgcagagatagctccctccagcattccaactaggataatagggagtctcaacaaagtgcagagttgtctcaggtctaaacttctcctagacgatagactagtagatatgctgctgctactgatctttcatcgggattcaggcatgatgatcctgacggccttgttcgcagtagccctattctcatcggagatggctccacattctgggagatcaaacttcctgtggctcagtaattctgcttccctggtggctcatggcttcaagctcctctagcatagatttctttgcggtccttaccatggattgaggggcaagcaccaaagatggccagagtccgaggctaatgtgatattatgatttatgcatctacagaaagagcaggtagcatgatttatgcatcatgccaaccaccattcactttcactggttatatggaacccagggataaaatgagatacaagcaggcttttatgaacgaaacagtttagtctgttggcaagtacatgtttagtacaaaagaaggatcagaaggaagttgaggaagaaacagttcgactgattaacatatattctttgtttttctcttgaatatgcaggagagtt

SEQ ID NO: 134071 - DNA, 339 bp, Zea Mays
gagatgccatcatctccagttcctgcatcatgttgcactgctctggttaaagcataccgtaagattaatttgaaattttgttatgcattctgtagttatcttgtattcctgaattcattaatcaatcaaactgatatatcatcccgattaatgtcataaagtaactacacataatgaaatcaatatatgcccttatctacatcattttgatatgttagaaatcgtaggatgatcaaggctagtgttacacaggaagtgacaaggcaagaagacttgatgagattaatagagtgataaatgaagttttcccagaaccaaatcgacaattgttgcagaggt

SEQ ID NO: 134072 - DNA, 1503 bp, Zea Mays
gagatgccatcatctccagttcctgcatcatgttgcactgctctggttaaagcataccgaagtgacaaggcaagaagacttgatgagattaatagagtgataaatgaagttttcccagaaccaaatcgacaattgttgcagaggactcttaagatgatgcaagttgttgagtcacacaaagctgtgaatagaatgtctcaatctgctttggcagcttgcatggcaccactacttcttcgacctcttcttcttggagaatgtgacatagacaatgaatttagtatgggaggggatagttcattccagctacttcaagctgctgcggctgcgaatcatgcacaggctattgttattattatgatggaggaatttgatcagatatttgatgactcggaagaaggttcctgttcttcagatgcttatacggagtctgaggatgatgttgacaaggaatattccacagataatgacacccatgatgacgatggttcttatgattctggtgaagatgacattgaagaagatttggactactctgatgacagtgaacatgacagtaagatcaacgctaatatcaaggatggcaaggttaaaaacaatatctcagaaactgcagaagttgcacaggcagaggatacctctcctatggatatcaatagtcaatccaaccagaagcaagaatcatgtggaccgaatggatccaaagatcgtatactaagatcaacttctcgttcatcatcttccagagaaaaaactatggagaaatcatgcagttcagcacacaagggcaaaagaaccttatggggccgtacttcagcaagaaaagacctgtcaacagaggagattgaatgctgcagcgatgatgaggcccttgttgagaaacttgagagtaacaagattgatctccaatcaaaaattgcaaaggaggccaaagaaaatgcaatcctatggtcaagtctagaaaaacggaaagaagaactacatgagcgtcgtttagcacttgaaaaagaagttgaaaatttgagggaccagctgaagagggtgatgaatttgcgaagggggcaggtgtcctcgccttcaacaatagacagcaaggtagtttcctaaagaagtgctagtgctactgctgaatctgatatcatgaacttgaagcaagaggtttcttatcttcatgggcaggtcaggggccagcagctgtgctgtgaatcatgcaaccaacgtctcctaaatacagacaggcttagcggaagagaacatttcagggtgatatcgagcaatcaaggaagcaagccgcacagcattcgccttcttcaagagacaagccaagatttcggtggaagcatatcaccagcagcgtcatcggcattagccaagctgacgaaccggctcaacttcctgaaagaacggagggcgctgctggcaagcgagatgcagagcttggatttgggtcggcccccaacagtgaagtccccaacaccaaaaggccatgaaagcaagaatagt

SEQ ID NO: 134073 - DNA, 848 bp, Zea Mays
cctcgtatcgtatcgacgaccacaatggcggcgaggcgttccagttgttcttccaccaccgcggtaccattactgtgcgcctcggccttgctgctattcatcctgctgtcggcgggcgtggcgccggcggcggcgtgcggcggccacccgtgcccgatcccggacggcaagtgcccggtgaacgcggtgaagctgggcgtgtgcgccgacgtgctggacgggctgatccacgccgtggtgggcggcccgcccaaggagccctgctgctccctcatctccggcctggccgacctggacgccgctgtctgcgtctgcctcgccatcaacgccaacatcctcggcgtcaacctcgacgtcgccgtcgacctctccctcctcgtcaactactgcggccgccgtgtgcccgccggattcaaatgcgcctagctatcgactttgctgtggcagtgcgtgcacaggtcgatcgatcgtctctacacgtaacacatagattgtcgggaataaaaacagtccctgtggttgccaggccagtgtccatgcagaccggaggcgttgactagtcttcagcgtgattggtttcctgtatgatatggtttcatcctgcatgcgtttgttttttcactcacatgccggctgcgcacacaagtgagtgaggggcgtttctggctgcctaggctcgcgcgagccacacgcacaagtgagtgagggacgtttctggctgcctaggctcacgcgagccacacgccgcaggtgctagcaaccaatcatgtagagtatgtctgtgtacgtacgtgtgctgcaggatctagttgatcgtgcttctacacatatgccgtcatataaggtat

SEQ ID NO: 134074 - DNA, 2704 bp, Zea Mays
accaaaaaaatgcggtggcacacacatactgtactgtagcatcggccatggtcgcggccgccgccaccaccacctccaactcggactgacctctccccggtcccagctcccgaacaaaaccctagccaaccctagtccgccgatggcgttcgcgccgccgcacctcctcccgctgccccctcctccggcggcggcatccacgcgggccgtctccgcgcgcaaccacggggggcgcacggcgcctgagctctcgggcccgaccccgcgcgtggtggtcgtcacctccggcaagggcggcgtcggaaagacgaccaccaccgccaacctcgccgcctctctcgcgcgcctcggcctcccagccgtcgccgtcgacgccgatgctggcctccgcaacctcgacctcctgctcggcctcgagaaccgcgtccacctcaccgccgccgacgtcctcgcgggagactgccgactcgaccaggcgctcgtccgccaccgcgcgctccacgacctccacctcctctgcctctccaagccccgctccaagctgcccctcgcgttcggatccaagaccctcacctgggtcgcggacgcgctacgacgctcgaccagcccacccgcattcatcctcatcgactgccccgcaggtgttgatgctgggtttgtcactgccattgcacccgcagaagaggcggtgctcgttaccactcccgacattacggctctccgcgatgctgaccgtgtcgcgggactgctggagtgcgatggcatcaaagacatcaagatcgttgtcaaccgagtgcggccagacctggtgaagggggaggacatgatgtcagcgctggacgtgcaggaaatgctcgggttgcctttactaggcgtggtgccagaggacacggaggtgatccggagtacgaataggggcgtgccgctggtgctgaatgacccgcccacgcctgctggccttgctctggagcaggctacttggagattggtggaaagagatgcgatgacggcggtcatggtcgaagagcaggagaggcccgagaagaaaggaggcggaggcggcttcttctcgttcttcggcggcaggtgatgagtcaagtcagtctttaggctgtagatggtgtacaggctcggagtttatgaatgctttctaggctagtgcccgattcattctgtcgttattgtgttgatgagacttgatactactagtcgcttgcattggacctgaactacaagttgtactaggcggctgatccacatccgaatacactccttgattgagctgctagttggtggccgggatgtcgtatgcgcactgctgcactgtgacctggtcgatgggcagcgtgtcggtcgggaacgggcatgcgccgtcgtgcgcgccctgtagcgggtcgcacggcgcggggctgacgttggccgacactccctcgatgtcggcgcagttccatgggtacttcctggacttggacaggtcggcggtgacgttggcgacgcagatgccccggaacggtgcgccctggatgccctggaggcgcgccgcctccttgtagacccccgtggccaccacgtcctggtagctgatgttggcgacaacggggacggcgttggggtcgtacttgtcgtccgggtgggacttgtagtcgcccgtcatccagaacacccgcttcatggtggtgagcgtcatccggcgcgcgaacacgtccctgacgtaggcgccgcggccgacggcggtcttgatgcgcacggcggactcggtgttgatcgccgtgatgtcctcggcgcgcacgtcctggatgccgcccgacatctcgctgcccagcgcgatgacggcgctggtcggggacacgcacgtgaggcggcggatgacgatgtgctggctgggcatcccgtacgagatgccgtactcgtcccagccgctcttgatggccacgcagtcgtcgcccgacacgatgtagcagtcctcgatgcggacgtgagagcaggagtctgggttgatgccgtcggtgttgggcgagttggtcggcgccaggatggtgatgccttgcaccacgatgttgctgctgtagactgggtggatgttccacgccggcgagttgagcagcgtcaggttggagatgtagatggtgtccgagtgcatcagctcgatgaggtagccgcgcgtgtacttgagctggttcttgtggaacttggaccaccacatggcgccctgcccatcgatcgtcccgttgctgccagtgatgactacgtcggtcaggttcgatccgccgatgaggctagcgaacctccctccgaccttgtccctccctcttccgtaagaaggcaggggatccacgattggccactcgcctacgtcctgggagccgaggatgacggcgtcttggtggaggtagagggtgaagtggctggtcaggttgaaggggcccgtcagccacttgcccgcgggcacgtacagcatgccaccgccgccgccctcgcccgagtactgcgacaggtggtccaccgcggaccggaacgccgcggtgttggaagtggtgccgtcgcccacgccgccgaagtccgccaccgacgccgtgtgcgcccggcaggccggcgccaggtacatgctctgcccgctgccgcgcgccggggaggccccgtggcgccgcccggacaccgccgccgccgcggcgagggccaggaggcacagggaccgcagaatctg

SEQ ID NO: 134075 - DNA, 1878 bp, Zea Mays
attgttggagatagcctaagcatctcctgttcgcgtcccctctctctcgttcagttctttctcccttcccatgtcttcctctgattccccacgctaacaattggtatcagattcgccgttccttggcgattctcaatctggagcacggctacttcacgcgttcgcagcgacgcgcgggtgtgatggatcccaatgtcctgttcatcgttgatgagatggagaagtttgcatctatggatgtcaagtgggagaagcgcttgtcggagctggtggcagctaaggaggagcgcctgatctccctcgagcgcgtcagcggggagttggaagcatggtagcccacggtggatgtagcgatggatgataccaagttgcagctccgcaaggtgaatctgcagttggatcatgccgttctggaggcggctggcggagattctagtctgttggggaaaccggatccatccttcggcaaatcggggtcgatcctgcatcaggaggatccgatcagtgaggatttcactctaggcgctccgattccgggtacttctggtgccgcgaagggtatgaattcgtttaccttgcctcatccgcccccaaagtttcacggttctctgtatgatggtcatccatttcatccgattgctcctgaattattggggaagttgccgaagctgccgtttccagtcttcgatggcgataatccacgtctgtggatctcgcgttgtgaaacatatttttaacatgtattttgttgatcatgtggcttgggtgcgtgtggcttttatgcatttgtcacctgttgttgcctgttggtttcaatttgtctagcgcaagtatatggatgtgtcctagccactgttgtgtaagttgctgaatgagtgttttgggagggatcagtatcagtttttgcttcgtcagttgtttcgcatcagacagagtggcacagtggcagaatatattgagcgattttccactttggttgatcagttgacagcttatgaagcagcgcatgatcctttgtactttaccacacgatttgtggatgggctccgaggtgacatacgtgccgttgtggtgattcattgaccaacagatttagacacagcatgcactttagcattgttgtaggaagaagtatctgaaccagcccatcggaaagaggtgcgcaagtttgagatgactccttggagcaaaaccacaacatctggcccactgtcgttaccgatgccactaggggttgacaagggtgttcggtctccatctcagcttgagaaacctgtggggagacctcaacgtcctgccgaagataagatgggagcacttcgagcttatcgtcgtgctaggggtctgtgtgataggtgtgccgagaagtgtgtcacacccggttttggaaggcaaaccgaatgtgaaacatgtacgtgacaggatcagaaactcacgtacacagtgattatataattggacgtcatcacacaatgctcaaagtaaatagcggaagagtattttattacaacaagatgtctgttgggggtatgcttcgtagccgaagatcctgaagaaagaaacaccttcagcagatcctctcaaaagcagtgctgaagctatcacctataaagctttggcatagcgacatgtctcaagacgaaggagtgaaccgacttaaagatgaaatgaccaataaacccatgatagtttgtgtcatgactgtaatcgattgtaaagggcttaaatgtaatttcacacaggctacgccctgtgcttataaatagatgaacagtacacccgtactgttcacgcaatcttgtaatcacttgcacgcgacatttgaattattgtcttctgtcaagacgaaagtataaatgcgattaaatgttatgtttt

SEQ ID NO: 134076 - DNA, 371 bp, Zea Mays
cacacacacttcatcgatcgggacggaagcacgatgcagcagatggagccgacgctgagtaggagggccgcgtaggtgaatccgtgtgcccacagtccgtcaaggatacctgcacaggcggccataaccggtgcggccacaaagaggtagctgcgagccaccgagccaggagccccatgcgagggacgacgctgccaaccgccgatgcgtggttctcctctgcctacacaggtccatcaccgacgcgaccaccaagacgtagcccacgcgagccaccgatccaggggccgcgtggttctcctccgcctgcacgcactacatcggtggccgctgagatgaatcgaggaggaggagcagggagccaatggcga

SEQ ID NO: 134077 - DNA, 1378 bp, Zea Mays
agggtgttacaacttcgccgcccattccatccgccgcccttagctccctccacggcggacctaggccccctatgtggcgcctgaccggaaaggagcaagcctcctcagtgctcgatctcggccccctctgcggcaagggaccaggagctggtccggtccgcgctccggctgcctccagctagtttgtgccctgtgctccagacgcctccggcctgtcagctgacgcctcacacttcgccgcccactgcccctccaccccggtcgtctacgcccatctaccgcccttagccccattcatcgctacccactccctcccaactccctccgaggctgatctgtgtccccgccaacaaacttgtgttgcatcccgtcgtcgaccctgctcgccgtcatcgtatttttgtctgatactgaattagctgtgatttggttcttttacttgttttcctttgtcgaatcaggaaaagagggaggaatacttgtgaatgcaacccttctatctacattagatggcaccgtgaattagcaatgattgcaatctatctacattgacattactgatcatctattgttttctgtcctgtaatatgttgccatgaaaaatatgtgtcctgtaacctgaaatatttgatatagtttgtgtgtatccttatctataccttaaattatttgtgtttgtagcatggattcacacatgtcaccggcaagtggctcctccgatagaggacaaggatggcctaggtatggtccggtgccgctaattcgctgccccaagtgcgaaaggccagagtcgctcatgagacttagatcgaaaaggtgggagaacgacaactttggtcaagagttcgtgaagtgtgagaacaagccataccaagataaagtttggtcgtgtttttgcccattacggttgatttcattgtttgtgattatttatgaactatgaaaccctatttggattgtttaggttctcaaaaaatgcaatttttcatgtggatggacgattaggtcaagatgattgaacgggctaggttaatgggtgactcgggggagatgatggcgtctaatatgtgtaacgaacgaacggcggcaaatagggcagatatgactacaaactgggacacatttgctgccgaactgaagaagatgaatttgctaccaaactgaagaagatgaatgacaacttgagcgagttgaagaagatgtttggagccttttatgcttctatgatttttaccgtcttgcttttcttcgtgatgaactataattgtaagcaccaaatgtgagggtacccctaaatgtgatggtggatctgtgatgaacattggtgatgatggtctatgatgaaactatgaaaatttgtgatgatgaatgtgtggac

SEQ ID NO: 134078 - DNA, 877 bp, Zea Mays
tcgccgcccattccatccgccgcccttagctccctccacggcggacctaggccccctatgtggcgcctgaccggaaaggagcaagcctcctcagtgctcgatctcggccccctctgcggcaagggaccaggagctggtccggtccgcgctccggctgcctccagctagtttgtgccctgtgctccagacgcctccggcctgtcagctgacgcctcacacttcgccgcccactgcccctccaccccggtcgtctacgcccatctaccgcccttagccccattcatcgctacccactccctcccaactccctccgaggctgatctgtgtccccgccaacaaacttgtgttgcatcccgtcgtcgaccctgctcgccgtcatcgtatttttcatggattcacacatgtcaccggcaagtggctcctccgatagaggacaaggatggcctaggtatggtccggtgccgctaattcgctgccccaagtgcgaaaggccagagtcgctcatgagacttagatcgaaaaggtcaagatgattgaacgggctaggttaatgggtgactcgggggagatgatggcgtctaatatgtgtaacgaacgaacggcggcaaatagggcagatatgactacaaactgggacacatttgctgccgaactgaagaagatgaatttgctaccaaactgaagaagatgaatgacaacttgagcgagttgaagaagatgtttggagccttttatgcttctatgatttttaccgtcttgcttttcttcgtgatgaactataattgtaagcaccaaatgtgagggtacccctaaatgtgatggtggatctgtgatgaacattggtgatgatggtctatgatgaaactatgaaaatttg

SEQ ID NO: 134079 - DNA, 873 bp, Zea Mays
atgataggccgcaggtccacctccgccatccgctcgctcttctccaacgccgcggccgcctaccacgaccgcatcgccgcgctcggtgagggcaagccttggaccgacccgcccgtagtcaaggagacgctcggatctggcgcacccaccccgcctaggaagccacccttgcatgcctctggaggcggcggcgggtgggacgactgggatgatgattttcgatcggacatgaggcggaatcagtcggttggatcattcggcgccgcgggggcgcagtcagggaggcagccgccgaggtccaaatcaacacaggacatctacactaggcagcagctagaggcgtcggcggctaataaggatgatttcttcgccaggaggatggcggagaacgagtccaagcctgagggtatcccgccatcccagggcgtaaagtacgttgggttcggatccagcccagcgccatcggctaataagaacggcggtgctgctcagggcgatgtcttgcaggtcgtctctcaggaaaacagaacaattactatggagtatatgtttgactacaatggtgtcatgagtagtgaaatttcagccatctcaacttcatcaaacaccataaaagctacaaacaggcctgatatcattgaccccgctctgctgaggccagggcgtcttgaccagctgatctacattccaattcctgctgagcagtctaggctccagatcttcaaggaccagctaatcttcaaattttatcctttttgtagttcacaagacttgtctttgaagcctgaactttttgaaggattgaggtttgacttcacaaaagggttgaatcaaaagttttctcttagccacagaaatgggcaatttcaataa

SEQ ID NO: 134080 - DNA, 1917 bp, Zea Mays
tgtatacactcttcaatcagtgtaggtattagtatgtggtaaggattaaagatagccacaaggactgaaaaggaaggggacacacacacgctcccagcagcatctttaattatttacacagggaaaagaaaaaaggttgtcaatctagctagctactccagttagctacaaaagctaaccatagcagtgtgtgcagtggtctctctcttgctcgccggccagtataattgatccgtggtgcggccggccggcgtcgtacgtcgtccatggccatccaccacccgcacctcctcgacttctcgccgcctccgaacacggtggccatggaggaggcgccgcccccaccccacttcgaccacggcctcctcgggctccatgtcgatggcatgcctcatcgcgtcctcgccgacgacgcgccggtggcggcatgggcgccgcaggccgtggtctcccactccctgtacggatacgataacacagcagcgggggcgtcgtcgctgtttggccaccatgaggcatcagaggcccagttctccgtgcttccgccggcagcgtcgtcgtttgcactactacctaaccaccaccaccagcagcagctgccgacgacgacggcggcgtcgagcatgcagcagccgttccagctgaggagctccaagtacctgggtcctgcgcaggagctgctcgccgagttctgcagcctggaaggggacctgctgcacgccacgaacaagcagggagcttccggagcagcagcaggtaacagcaggtgggacgacgtggagacgtcgtcgtcttcttctgctggcctctgggggcacctgtccctgagctccatggatctcctggagctcgagaggaggaaggccaggctcttgtccatggttgaagaggtggaccggcggtaccggcgataccgcgagcagatgaggtcagtggaggtgtcgttcgaggcggtggccggagccggcgcgtcgcaggtgtacacgcggctggcgctgcgggccatgtcgcggcacttccggtgcctgcgggatgcgctggtggcgcaggtgcgcgctctgcggaaggccatgggggagagggacggcggcccagctggtgcggcggcgggcgccaccaagggcgacacgcccaggctcaaggtgttggaccagtgcctgcggcagcagcgggcgttccagcacccgggcaccatcgacaactacccgtggcggccccagcgcggcctgccggagcgcgccgtcgccgtcctccgagcctggctcttcgaacacttcctccacccgtatccgaacgatgtggacaagcacattctagcgcgccagacaggactgtcaagaagccaggtttccaattggttcatcaacgccagggtgaggctgtggaagccgatgatagaggagatgtacacggaagaagtgaacccgaaaccggccgacgacacaagccaaaaccctagcgccggtggcggcgtcggcgtcggcgtcgccatcaaacctgagcagcaggtgagcacagctgcggcgggagccaccatcggaggcggcggcggcgaccatctgttcggtcctagttatcccagcatgtacgggagccacggcggcgccgtgtcgcttaccctagggctccagcagcagccgtttgcgtcgacgatgatgcaccagcgacgaccactgatgacgtttcaaggtgacgagcaagagccggcgctgccgtacagagaccttatgggctctcagttgctgcatcatttcgctgggtagcttgttacctacacatgcttgctagctagctaggagggtgggtatacggtggctaaatttttatatatattaaagacaaggtaaattttgtttaaatttcttgtcgactaaacgatcgatatatataccaaattaagcacacagattgtttaaa

SEQ ID NO: 134081 - DNA, 1096 bp, Zea Mays
gttactgttaaatactgtgtgtcgtttatttataaccatgcacaaactaactaaagcgaccatgatcaggtggaccggcggtaccggcgataccgcgagcagatgaggtcagtggaggtgtcgttcgaggcggtggccggagccggcgcgtcgcaggtgtacacgcggctggcgctgcgggccatgtcgcggcacttccggtgcctgcgggatgcgctggtggcgcaggtgcgcgctctgcggaaggccatgggggagagggacggcggcccagctggtgcggcggcgggcgccaccaagggcgacacgcccaggctcaaggtgttggaccagtgcctgcggcagcagcgggcgttccagcacccgggcaccatcgacaactacccgtggcggccccagcgcggcctgccggagcgcgccgtcgccgtcctccgagcctggctcttcgaacacttcctccacccgtatccgaacgatgtggacaagcacattctagcgcgccagacaggactgtcaagaagccaggtttccaattggttcatcaacgccagggtgaggctgtggaagccgatgatagaggagatgtacacggaagaagtgaacccgaaaccggccgacgacacaagccaaaaccctagcgccggtggcggcgtcggcgtcggcgtcgccatcaaacctgagcagcaggtgagcacagctgcggcgggagccaccatcggaggcggcggcggcgaccatctgttcggtcctagttatcccagcatgtacgggagccacggcggcgccgtgtcgcttaccctagggctccagcagcagccgtttgcgtcgacgatgatgcaccagcgacgaccactgatgacgtttcaaggtgacgagcaagagccggcgctgccgtacagagaccttatgggctctcagttgctgcatcatttcgctgggtagcttgttacctacacatgcttgctagctagctaggagggtgggtatacggtggctaaatttttatatatattaaagacaaggtaaattttgtttaaatttcttgtcgactaaacgatcgatatatataccaaattaagcacacagattgtttaaa

SEQ ID NO: 134082 - DNA, 2882 bp, Zea Mays
gtctggccagtcccgctgccgccccctccgcctctctcggccgtagtcgcaacgctgtgtcacgccgcacatggcgaagcgcccgcgccacgccggaaacggcgccggccgctcccagctggcgtcattcgagcggaagcttcacgacctcatactcaacggcggcctagcaggccccggcgcctccgccgaggacatcgccaacaccctccgcatccaccaccctaagttccgccgcctgaagcacggccccttctttgcctccgtccgccgcgctctcacctccatccccatcccctcctcctccgatgacgacggctcctccgcctcccgctgccgccacgacgcccacaccacctcctccgcctccgtctccgacgccgccgcccacccgtcgccaccggcccccgccttcgacgttaccaagtccacgctcttctcccattacgccgctcagacgcgcaagcggaaccaaaaccagcagctggagatcgaggtcacagcggagaagccgcgccgcctcatcacggccgaaggcggtggcggtggcgacgcgaagcccgaggccgtcccggctgctgaagggttttgcagagaggacaagggacccaggttcgccgacctcggcgggatggaggcggtgatcgaggagctcatgatggaggtggtcgtgcccctgtgccatccgaagctgccgcaccgccttggagtcagacctgtcgcggggctgctgctgcacggaccacccggctgcggaaagaccacccttgcccatgccatcgctattgagactggcgtgctgttctacaagatatctgcaccggaagttgtatctggggtgtctggagcttctgaggaaaacatcagaggcctgtttcagaaggcctatcggactgctccctcgattgtattcattgatgagatagatgcaattgcatccaagagggagaatctgcaacgagagatggagcgacgaatagttactcaattaatgacatgcatggatcaataccaccagaatattggatcggacactggcaatttggatgctgaatcatctgaatagaaacctggttatgttattgtaattggagccacaaataggcctgatgctgtggaccaagctctgcgaaggccaggaaggtttgatcgagagatatctcttggtgttccagatgagaatgcacgaaaacaaatactgaagatgcttactcagcatcttcgacttgaaggcgaatttgacttgttcaagatagctagagcgacacaaggttttgttggtgctgacttgaaggcattagtggataaagcagggaatcttgcaatgaagagaataattgataaaagaagaattcactatcgccgtgagcatgacgggaatagcaagcatgactggtggaggcaaccttgggatgaaagtgaggtggagggcctacatattactatggatgactttgaggaagcaacaaaaatggttcaaccatctttgagaagagaagggttttcttctgttcctgatgtcacttgggatgatgttggcggtcttgattcattaagaaaagagtttgaccgctgcattattcgttgtatcaagaaccctgaagactatgaggtatttggagtgaatatgcaagctggcttcctgctgttcggtcctcctggttgcgggaaaacactaatagcaaaagcagtggcacatgaggcaggagccaattttattcatataaaggggcctgagctattgaacaagtatgttggggagagtgaatcagaagttaggaaaatattcactcgtgcacgtactaactctccatgcatcctattttttgatgaggttgatgctttgacaacaaaaagagggaaagagggaggatgggttgttgaacgtctcttaaatcagttacttatcgaacttgatggtgctgatcaacgacaaggtgtctatgtgataggagctacgaacaggattgatgtgatagatgatgctgttctacggcctggtagatttggaaagaaacattatgtacctttacctggtgcacacgagcgggtttcaatattaaaagcacatgctcgcagcaagcccatctcgaccgatgttcatttggatgcacttgcacgtcgtgccgagtgcaacaatctcactggtgctgacctagcatcactggtaatatttgtgatatatcatcgaaccattcttttggaagttgtccaaacacaagcactagtgcttcttcagtttgcagaatgtagcattgttttctctctctcgtattgttaccttttgctttgcattgagatgggtgctggtgaattcaacctgacttagttgacaagctagctgcatcgtaataattaatagcagcgcttctttcatcgggtcaacgaagcacttgcagaacgttttaccaaaaaagagagagagagaagggagtgatgtgcttctttcaccaggtcaatgaagcagccatggcagcattggaagagcgattagagttcattgagaacgggacatcctcaatgggttcatcttgtttgattaagctctcacactttgagcgtgctctatcgaagatcaagccatcagtatctgaacagcaaattaaatattacgaggcgttgtcaaagagatactcgtcaaactgaggtatcaccacgtctccatgactcccatccatggttcgtcagtggttgcagctttgtatttttggtggtggtgaatggtgatgaaattctacagttgtagaaatcattttaggttttgctgcctacaggcaaatttttgtatggccttaagatacattatacaaggatgagtagtaccacaaatatgtcgcagttaatgctatcgaaggcctccagtcgtggagcgcattccccca

SEQ ID NO: 134083 - DNA, 2533 bp, Zea Mays
cgccgcacatggcgaagcgcccgcgccacgccggaaacggcgccggccgctcccagctggcgtcattcgagcggaagcttcacgacctcatactcaacggcggcctagcaggccccggcgcctccgccgaggacatcgccaacaccctccgcatccaccaccctaagttccgccgcctgaagcacggccccttctttgcctccgtccgccgcgctctcacctccatccccatcccctcctcctccgatgacgacggctcctccgcctcccgctgccgccacgacgcccacaccacctcctccgcctccgtctccgacgccgccgcccacccgtcgccaccggcccccgccttcgacgttaccaagtccacgctcttctcccattacgccgctcagacgcgcaagcggaaccaaaaccagcagctggagatcgaggtcacagcggagaagccgcgccgcctcatcacggccgaaggcggtggcggtggcgacgcgaagcccgaggccgtcccggctgctgaagggttttgcagagaggacaagggacccaggttcgccgacctcggcgggatggaggcggtgatcgaggagctcatgatggaggtggtcgtgcccctgtgccatccgaagctgccgcaccgccttggagtcagacctgtcgcggggctgctgctgcacggaccacccggctgcggaaagaccacccttgcccatgccatcgctattgagactggcgtgctgttctacaagatatctgcaccggaagttgtatctggggtgtctggagcttctgaggaaaacatcagaggcctgtttcagaaggcctatcggactgctccctcgattgtattcattgatgagatagatgcaattgcatccaagagggagaatctgcaacgagagatggagcgacgaatagttactcaattaatgacatgcatggatcaataccaccagaatattggatcggacactggcaatttggatgctgaatcatctgaatagaaacctggttatgttattgtaattggagccacaaataggcctgatgctgtggaccaagctctgcgaaggccaggaaggtttgatcgagagatatctcttggtgttccagatgagaatgcacgaaaacaaatactgaagatgcttactcagcatcttcgacttgaaggcgaatttgacttgttcaagatagctagagcgacacaaggttttgttggtgctgacttgaaggcattagtggataaagcagggaatcttgcaatgaagagaataattgataaaagaagaattcactatcgccgtgagcatgacgggaatagcaagcatgactggtggaggcaaccttgggatgaaagtgaggtggagggcctacatattactatggatgactttgaggaagcaacaaaaatggttcaaccatctttgagaagagaagggttttcttctgttcctgatgtcacttgggatgatgttggcggtcttgattcattaagaaaagagtttgaccgctgcattattcgttgtatcaagaaccctgaagactatgaggtatttggagtgaatatgcaagctggcttcctgctgttcggtcctcctggttgcgggaaaacactaatagcaaaagcagtggcacatgaggcaggagccaattttattcatataaaggggcctgagctattgaacaagtatgttggggagagtgaatcagaagttaggaaaatattcactcgtgcacgtactaactctccatgcatcctattttttgatgaggttgatgctttgacaacaaaaagagggaaagagggaggatgggttgttgaacgtctcttaaatcagttacttatcgaacttgatggtgctgatcaacgacaaggtgtctatgtgataggagctacgaacaggattgatgtgatagatgatgctgttctacggcctggtagatttggaaagaaacattatgtacctttacctggtgcacacgagcgggtttcaatattaaaagcacatgctcgcagcaagcccatctcgaccgatgttcatttggatgcacttgcacgtcgtgccgagtgcaacaatctcactggtgctgacctagcatcactggtcaatgaagcagccatggcagcattggaagagcgattagagttcattgagaacgggacatcctcaatgggttcatcttgtttgattaagctctcacactttgagcgtgctctatcgaagatcaagccatcagtatctgaacagcaaattaaatattacgaggcgttgtcaaagagatactcgtcaaactgaggtatcaccacgtctccatgactcccatccatggttcgtcagtggttgcagctttgtatttttggtggtggtgaatggtgatgaaattctacagttgtagaaatcattttaggttttgctgcctacaggcaaatttttgtatggccttaagatacattatacaaggatgagtagtaccacaaatatgtcgcagttaatgctatcgaaggcctccagtcgtggagcgcattccccca

SEQ ID NO: 134084 - DNA, 1040 bp, Zea Mays
accggaaaaaaaaaacattcgcggtcgcttctttcttcttgcccaatccaactccaaactctccatccagtgggaaaaaaaaaacaaaaagggtaccggaagcggcgaaagcctcgccccccgccgctctcgcatcgtctccggagcgcacgtcagatcaggtgcgccgcgcccccctcgcctaagctgcgacgaccatccatcgaacaggaaggatgacgggctccatggatctcccggccaagggcgggttcagcttcgacctgtgccgccggaacaacatgctggagaagaacgggctcaaggtcccgggattcaggaagaccgggacaaccatcgtcggcctcgtctttcaggatggggttgttcttggggcagacacaagggcaactgagggccccatagttgctgataagaactgtgagaaaatccactttatggcaccgaatatatactgctgtggagcaggaactgctgcggacacggaggccgttacagatatggtgagctcccagctacagcttcaccgttatgcaacgggccgcgaatcaagagttgtaactgctcttacactactgaagtcacacctcttcaagtatcaaggccatgtcagtgctgcccttgttcttggtggagtggattgtactgggccacatttacacactgtttatccacacgggtccactgatactcttccttttgccaccatgggctctggttctcttgctgcaatgtcagtgtttgaatcgaagtacaaagaaggccttactagggaggagggaatacagattgtgtgcgaagcaatctgtgctggtattttcaatgacttgggtagtgggagcaacgtggacgtctgcgtgataaccaaggggaagacagaatacttgagaaaccaccagttgccgaatcccaggacttatgctagttcaaagggatacagtttcaccaaggggcagactgaggtactgtcttcaaaggtcacacttctaaagcagaaggttgaggtcgccgagggtggtgatgctatggaggagtgatct

SEQ ID NO: 134085 - DNA, 1385 bp, Zea Mays
accggaaaaaaaaaacattcgcggtcgcttctttcttcttgcccaatccaactccaaactctccatccagtgggaaaaaaaaaacaaaaagggtaccggaagcggcgaaagcctcgccccccgccgctctcgcatcgtctccggagcgcacgtcagatcaggtgcgccgcgcccccctcgcctaagctgcgacgaccatccatcgaacagactcgccgtgactttgatccgtggcggtggctctgcgggtgcaggaaggatgacgggctccatggatctcccggccaagggcgggttcagcttcgacctgtgccgccggaacaacatgctggagaagaacgggctcaaggtcccgggattcaggaagaccgggacaaccatcgtcggcctcgtctttcaggatggggttgttcttggggcagacacaagggcaactgagggccccatagttgctgataagaactgtgagaaaatccactttatggcaccgaatatatactgctgtggagcaggaactgctgcggacacggaggccgttacagatatggtgagctcccagctacagcttcaccgttatgcaacgggccgcgaatcaagagttgtaactgctcttacactactgaagtcacacctcttcaagtatcaaggccatgtcagtgctgcccttgttcttggtggagtggattgtactgggccacatttacacactgtttatccacacgggtccactgatactcttccttttgccaccatgggctctggttctcttgctgcaatgtcagtgtttgaatcgaagtacaaagaaggccttactagggaggagggaatacagattgtgtgcgaagcaatctgtgctggtattttcaatgacttgggtagtgggagcaacgtggacgtctgcgtgataaccaaggggaagacagaatacttgagaaaccaccagttgccgaatcccaggacttatgctagttcaaagggatacagtttcaccaaggggcagactgaggtactgtcttcaaaggtcacacttctaaagcagaaggttgaggtcgccgagggtggtgatgctatggaggagtgatcttgcatcctgcattcatacaagcatattctgaatctgtgtaactttgcttagtggatcagctagaacaagaaaaaagaaaatttggagatctttgctgtactcgctggaccaaagccagggttcttatgctaaatgtgtttctaatgtttggcacattttaaattgcttgttgtttccgaatgtttaaaaccggtgaaggtatggtatttgcttggagatgttattactgtcgcgtcggttgtttgtcgaacgactaggtaatggcgcaatgaaaatcatgcctgatgcagtggtttacatg

SEQ ID NO: 134086 - DNA, 1360 bp, Zea Mays
accggaaaaaaaaaacattcgcggtcgcttctttcttcttgcccaatccaactccaaactctccatccagtgggaaaaaaaaaacaaaaagggtaccggaagcggcgaaagcctcgccccccgccgctctcgcatcgtctccggagcgcacgtcagatcaggtgcgccgcgcccccctcgcctaagctgcgacgaccatccatcgaacaggaaggatgacgggctccatggatctcccggccaagggcgggttcagcttcgacctgtgccgccggaacaacatgctggagaagaacgggctcaaggtcccgggattcaggaagaccgggacaaccatcgtcggcctcgtctttcaggatggggttgttcttggggcagacacaagggcaactgagggccccatagttgctgataagaactgtgagaaaatccactttatggcaccgaatatatactgctgtggagcaggaactgctgcggacacggaggccgttacagatatggtgagctcccagctacagcttcaccgttatgcaacgggccgcgaatcaagagttgtaactgctcttacactactgaagtcacacctcttcaagtatcaaggccatgtcagtgctgcccttgttcttggtggagtggattgtactgggccacatttacacactgtttatccacacgggtccactgatactcttccttttgccaccatgggctctggttctcttgctgcaatgtcagtgtttgaatcgaagtacaaagaaggccttactagggaggagggaatacagattgtgtgcgaagcaatctgtgctggtattttcaatgacttgggtagtgggagcaacgtggacgtctgcgtgataaccaaggggaagacagaatacttgagaaaccaccagttgccgaatcccaggacttatgctagttcaaagggatacagtttcaccaaggggcagactgaggtactgtcttcaaaggtcacacttctaaagcagaaggttgaggtcgccgagggtggtgatgctatggaggagtgatcttgcatcctgcattcatacaagcatattctgaatctgtgtaactttgcttagtggatcagctagaacaagaaaaaagaaaatttggagatctttgctgtactcgctggaccaaagccagggttcttatgctaaatgtgtttctaatgtttggcacattttaaattgcttgttgtttccgaatgtttaaaaccggtgaaggtatggtatttgcttggagatgttattactgtcgcgtcggttgtttgtcgaacgactaggtaatggcgcaatgaaaatcatgcctgatgcagtggtttacatgacacatctgtctggattac

SEQ ID NO: 134087 - DNA, 1165 bp, Zea Mays
agactcctctctctctctctctctctctcccctctgtgtgcggtgtgccctggcctcctccgccgccattgcagcgagcaagatcaatccctctgctgccattcatgagtcaagctggggcattccctcctgggaagaagatcacggtggtgtttgtcataggcggcccaggcagtggcaagggcacccagtgctccaagattgtcagacactttggattcacccacctgagcgctggcgacctcctgcgccaacaagttcagtcagatactgaacacggtgccatgatcaagaacctgatgcacgaagggaagctcgtgccgtccgacatcatcgtcaggctcctgctcacggccatgctccagagcggaaacgacaggttcctcgtcgacggattccctcgaaacgaggagaaccgccgagcgtacgagagcgttattggcattgagcctgagttggtgctgttcatcgactgcccaagggaggagctggagcggcgcatcctgcaccgcgatcagggaagagacgacgacaacgtcgacactataaggaagcggtttcaggttttccacgactccactctacctgttgttctgtactacgacagaatggggaaggtccgacgggtagatggcgccaaatccgctgatgcagtctttgacgatgtgaaggctatatttactcagctactgaccactcaggtccactcactcactcacatttatcttccttttttttttccaattgattgttctctcctgataaagccttgaaaaaacatcggcgctcgtccgtctatcctctttttgtttcactatgtatataggcaagccaaggtggcaatgcgagcagcaggcggagcaatccgccgctttgttcagtgctctaggatgaagcaacatacctccagctccaaataaaaaaaagaggatttcagaaaacacacacttgctgtgcgtatgtggtgtgttcgtgctgtgctgtgctgtgctgtgcagatttaatggcttgttaaaaagaaacagagaataatggccctccccagctgcagctggtatggttgttcgctcagtggcagcactagaggctgcgagcctgctgcaaacacacagcttgtatttctaattgtaaaatgtagcgaaatggatgaatgtgatgtgtgcaa

SEQ ID NO: 134088 - DNA, 109 bp, Zea Mays
cgtttcattattcaagcaattattcactggtgcaataatcctcatgtaatggttgtatgcatcgttatgctaaagccggaactcttgtttccattatcaaaaaaaataa

SEQ ID NO: 134089 - DNA, 235 bp, Zea Mays
aaatgaacctttacaagattgaaccttcatccgcccgctggcagcagcaatgtctctgcatcctcaacatcaaaatcttctattttctactgggccccactgattatgacatgttcagtattttttgggtccatctgtatgacaattttatgcttgcagtagggtgatttcatggtaaagctccatatctgtcaaataaacatttggcgaaaataatgtcagaacagcatagaga

SEQ ID NO: 134090 - DNA, 3188 bp, Zea Mays
gtccgtccacgtccatccatccccattccattccccggtcaaacaaactgcccagaggaaagttgtagcgcctttcctttcctgcaagtccagcgtcggtttgataagataatgcgggcggggcggagaacggcagttcccacgctgcccagtgcaaagatgtgttgttcgttgctgactgactgacccgagccgccgagcgggagtcgttggggggccccgcccgggcctgcaccagcaccgccggttgcggttgctggttggctggccacgaccgccgctagtgccagtggaggggttgcatttcttctctctgacccagcctgcctctcgttggaccggtcgtcgtcgaggccactccgttcactccactccacccaggggtgggtcgggaattgaattccccgccgtctctacgcctgctgccgcgggtggaaaatatctatctgcaccgggacggactagtcgcccgcgcgcaaggtgctcgacggattgctgctacaccgggcaggcatggcggcgggccggggcgactgggaggacatggtgcgccggatgttcccgccggggaccaccatcccggagccgctgcccgacatggactactccttcgcgctgacgtacaacgggccggacgtgtcgtacgagctcccgcggatccagcccgtctgcgtccccgccatacccaccgccgagccggcctcggggcccctggggctcggcagcggcgtcgtgcccgtcgcgcccgtcgtcggccctgctgcggcccgtgcccgtgccaacccgccggcagcgtcccgggctggtgctgctgatcgccgtgccgcgaggatgacgccgtcggattcctccgatgacgaggaggacgacgccggcagctccggctcccgctccacgaaggcctcgaggcctgcagtgccggaggggaggcgacctcaggtggtcacgttcggggtgccggaggaggacagcggcggcaggtacgagagcagcgagatggacggcggacacgacgcggcgtccgccgagcagcacgtcgcggtgacgaggccggccgagaggaaagggcggacctgctgccgccgctgcgggaagagcaagtgggagagcaaggagtcgtgcatcgtctgcgacgcgcgctactgcggccactgcctgctccgcgccatgggctccatgcccgagggccgcaagtgtgtcacctgcattggccagcccatcgacgaggccaagcgctccaggctcgggaagggctctaggatactgtctcgcctgctcggccccctggaggtcaggcagatcctcaaggtcgagaaggagtgccaggcgaaccagctccggcctgagcagctcctggtcaatggtttccctcttgacgacgaggagatgaccgatttgcttagctgccaacgacctcctgggaacctcaagcctggaagatattggtatgataaggagtcaggattgtggggaaaggaaggtgaaaagccagacagcatcattagcactaacctcaactttaacggaaagcttcagcctgatgctagtaacggcaccgctcaggttttcattaacgggcgggaaattacaaagattgaactgagaattctaaagattgcaaaagtccaatgcccccgtgatactcacttctgggtttaccatgatggtggctacgaggaagaaggacaaaacaatatcaaagggaaaatatgggagtcacctttgacacgttttgcgtgcgccttggtttcactaccggtgcctcctacaaactttgatgcgacaaaagatgaagccccttattcatcaaaaactgtacctgactacttagatcataaaagaatacaaaagcttcttattcttggatctcctggagctggaacaagcaccatatttaagcaggctaagttgttatacggcaatagatttactgatgaggaacttgagaatatcaaactaatgatccaaagcaacatgtttaagtacctggggattctgcttgagggccgggagcgctttgaggaagaggctttggctgtaccaaatcacccaagctcagtgggcgatgatcctcagcaagatgaaagtaaatcttcaagttccaattcttgcatctactcgataaatgcaaaactgaagaagttttccgattggctcctggacatcatagcgacaggagacctagatacattcttccctgcagctacccgtgaatatgctccagttgttgatgagttgtggaaagatcctgccattcaagcaacatacaaaagaaaggatgaattgcattttctccctgatgctgctgagtacttcttgagcagggctgttgaagtatcaagtaacgaatacgaaccgtcagagaaagacgtgatatacgctgagggagtaacacaagggaacggattggccttcattgacttcaccttggatgaccggagccctatgtcagaatcctttggcgacaaccacgatgcgtaccctcaacaaccagtaaacaagtaccagctgattagagtgagcgccaagggcatgaacgagggctgcaagtgggtggagatgtttgaggatgttagcatggtgatcttctctgtagcgctcagcgactacgaccagctcggagccccagcgagcggcagtagcaggacactcgtgaataagatgatccaaagcagggacctgtttgaggctacaatcaggcagccgtgcttccgtgacacgccgttcctgcttttgctgaacaagtacgacgcgttcgaggagaagatcgggcggtccccgctgtcgtcgtgcgagtggttcggcgacttctgcccgctgcggacgcaccacaacagccagtcgctggcgcagcaggcgttctactacgtggccatcaagttcaaggacctgtacgcggcgagcacggggcggaagctgttcgtgtggcagacgcgcgcccgcgaccggcccaccgttgacgaggccttccgctacgtccgggaggtcctccggtgggaggacgagcgtggcgtcgccgggtactgccccgacgagtccttctacagcaccacggagctcagctcgtcccgcctcatcgccgctgcacagtgactgtcgcagcgttgttttgtgtataatgatcgtatgcttgcttgtttcccgaacaaatcaaatgctatcaaatatagtgatctgagtgatgagca

SEQ ID NO: 134091 - DNA, 1259 bp, Zea Mays
tatttgatgcttagggatgccttgcactacaaagcagctttcattaggctaaaaacagcaaaccgtcaaaagtataacaacatttgtccttctgatagtgaatgggccatggctgtaaaagtttttcagtgcttgcaaagtttttatgatcttactgagttgctgtccggaacttcgtatccaactgcaaatatattctatagaggtttctgtgagataaaggaactgcttgataaatggtgtgtggatgaagatttaactattagaacaatggcaatatctatgagtgacaagtttgagaaatattggagctgttctagtttgagtcttgctctagcatgctttcttgatcctaggtataagaagaagcttgttgaattctacatgagaaagttctatggtgactactaccaggtccgtcttgatgagttagttggtgctatgaagaacttgtttctattttatgcaagctctaaaccttcagcttccaacaatgatatgaatgcaaaccaacatgtcagcccaacagaacatttagctacaaagaagaatgttgaacttgatgctttcttgtatgatgatgttaggcctggtactaattatttaaatgaattggacaaatacatggcagaacctcttctaaagcaagatccatttgatattttagctttctggaagaacaacacagataagtaccctattctctcacaaattgctcgtgatgtgatgtctatacaagtgtcaactgttgcttcagagtctgcctttagtgctgctggccgggttgttgatccatatcgcaatcgacttgactctgagatggtacaagcacttatatgtactaaagattggattcgtgcatcaagaaaagattctacaattattcattctattttggctgatctaaaaccttcggaagcaattcctatcagtcagccctgcatggatgatgaggaacaagatgctgaaagtgatcctgacgtcatgaatgattatgatgagctttgaatgtgagcctgcgactacgccgactagtcatggtgcttaatgcttggcaatatgtttggaatttagataaatatgttgctgtgtcaatgtgtgctgtgtccatgtttggcaactgtgtgctgtgtgagataaacatgtttggcaacatctatatggagcagcagcagctgtgtgctgtgtactgtgtatttaaatctgaacagaactgtgtgttgtactgttgtgtgcgataaatatgttgttgtgtgcta

SEQ ID NO: 134092 - DNA, 969 bp, Zea Mays
atggagatccaaatccgttgcgcccgcaaatccgccgcggatggaaggtccgcgcccctgcgccaaatcggccacgcccgcaacgcccgcaaatcctctccccagcaatgcgccaccacctcatcctcggacgcgcggatggaagctccgcgcccctgcgccaaatcagccgcgccctcaatttcgctcgcccgcaaatcctctccccagcaatgcgccgccacctccaactcggacgcgcggatggaaggtccgcgcccctgcgccaaatcggttgcgcccgcaaatccgctgcaacgcctgcaaatccgccgtcaatggaaggttgttgcccattttagagcgtcatggtgtgtgatgtccctgtccatgaactacaagtttgaggagctggtgcagacccaccccgaggtcttgttcctctacgtggacgtcgacgatgtccagaattatttgacaggtctcgtgccttcgttcattgggaaatatcccatgcagtacatttttgaatgtatccacaagttcactggtattcagttagatgtagctatcgttatagctcttgctttgacaaactcatatagctctgctactactcaattgaaagggagacgatcttgttcatactatttgctgtcagcatttctttcattcactgtactcttcattagagtaaggttatgggtaagagtaatgtcaaatgcaattgttgggtctatcattaaacatgatataattgcttatctaggtactcccaccattcattgttatttgttgccgattggtcagggtacatatagtaatgtttacagagccagtgatcttgaaaagaagattgttgctttgaagaaagtgcactttgatagtttggaacttgagagcggtcgtagcaacagggttcaaagacatgtgtttgatagggcggttgctcagcatgacgagaggtggggagttccattgttggtttaa

SEQ ID NO: 134093 - DNA, 114 bp, Zea Mays
gtattatttgggccagttaccagcgtgggctggaccctggagcctccttgggctgggccctagaggagctccaccagcaccccagcatccaaaacgaatgtgaaaaaaaaagac

SEQ ID NO: 134094 - DNA, 414 bp, Zea Mays
gattgagacatcaacacgccaacaccatacaactcaactcgtcggttggattgggacatcaacacgacaccacactcaccgccgacacagagtgcccaaacaacacaggcagcggcaaccccacacgagagcacacactccgacttcccaaagcagccaacaggcgaaccaaacaaaaagcagacagacagcccgaagcgaaaggtgtcaacaagtcatcgttgccgggctcaggcacagagcagctccgacttccaatcttgaccctccaccctacctccggtttttgcccgaccttcgaaacattctggaccacgaagaagggaggtccgcctcgtgttatcgttgccgagccacatcctctgacgtagcagctccgacttcacgttgcaaaacccccacctccactcgcgt

SEQ ID NO: 134095 - DNA, 1650 bp, Zea Mays
taaactggatgcatttttttttctttttgaacgaaggaagaaccatatgatctaacgatcatcagttacaattgtcttgcaagcaaaagaataaataacacattaacaactagcacacactcccctaccactatgtcatccatcatcaccaccaccaccatgatgcatcaaacgggcgaagcactgggatccatcaacagtgtcactgaaacacggccaaagaaacaagaaaaaaaagagagaacaaatccttctcacaagcacaacctccacaggacgcaatccttttctcccccacctcccaggaattcactgtcacgaatagtcatcatcataccctccccctgctctcgccagaatcagcgacggcgctacccatgccctcgcccttctccatcccgagaccgcccatcctcttctcgtcgtccatccccttgaggtgcccggccgccttcagcgccccgatgttgctgacgttgccgaagatcagcacgatgatgcccaggaagctcccgaggaacgcagcagcaaaggaccctcccgcgcgcccagggccagcggaggaggcagcgaagccgatcatggcaccggtgacacgaacaaacgcgtaccagaccgagaacgcaccctccttccccggcggcgaggcatcgaggagcaggatgcggccgaacgcgtacagtatgccattggcggtgctctggaccagggcgatgacgatgatgtgggcagccctccacctgtggctcttgaagtagaacccggcaccggacacgaacaggcagattatgaacccgagcagctgcatgcgcacggcgtccgcgcggattatgatctggatcgggtggaggagcgggagcgagatcaaggggaacagaaagtagaggatccatagcgcaagcacgagcaccggcttgatgcagacaccaccgatagcatagagcgtgccgctggtgaagatgcacattgtggcgaaagaggacaggaacaccgcaaccaggctgccaatggcctgcgggtaacggaggagggtcatgctgtagctgagcttggtgaagaagttgggctcgaatgcggtggtgggtgacgagctgctgggcctgtttgtgaagaggccatggcagatgccgatgaaccagataaggccacagaagatggacacgacccagaggccagtgagctggtcagtgcgccgcagcatgtggtacatgaaagctgccatgagggcagctccaatgcctcctatggcagtgcagtacaggctgagctggctggcagcagcgcggcggcgaaggacaaggtgcttgcccgagtcatgcgcagccaggccacggatcatcagcccaaggttgcgggtgtgcaccgcctcagcgacgatgatcgagccagcgatgaagaggatgtagaacaggaacacccagaccgtcttgaagaagcctgttagcaggcagaagaaggacccgaaggacgtggcggcaatgaggatcagcgactggtactggccacggtcgagatggtgagcggtctgggtgaggagcggcgccacgatgaggatgccgattgcccacgacagtccactccagcccaatggtgacatccgggatccatcgatcacaatggagtgcttggtaagcctctggtacctggaca

SEQ ID NO: 134096 - DNA, 88 bp, Zea Mays
ttttccattctatttccatgaggccaggcgatgcaggccctcacaggcacacagcacaggcgtgcaatgcgctctcagcggcccgttg

SEQ ID NO: 134097 - DNA, 621 bp, Zea Mays
aagggatattggggaagtaatcttctatttcttaattgccaaatgttcgaatacaagatataaataggcattatgccttctaacaaacatagatggaaaatctcctcaaattgagacagtggtttctggctgcggtgactcggtctccatcgatgatttgttgcaactcaatgttcagcaccttgagacagtggtttctagctgcggtgactcagtctccatcgatgatttgttgcaactcaatgttcagcaccagattaattttactttcgctaacatcgttcctagagatgatgacttggtgaggctttctcttccaagaactggtgtagaattcaatctgacattcccagaagcgacatcaaaatccaacaaatgaaatgcagattaagatctcttaccggatcagaccatcatcttcaacttcccccgacttaaacaatggtcaatcattcccattttaggcgattaggtgtggacagaagctctgtattttgagataacaggacattcacgagaactaacaacctaagaaaaacaaaataaaacagtcacaatagctactatttattaaatatcatagaaaaattatcacaaacgtatatttacagagcattgttc

SEQ ID NO: 134098 - DNA, 696 bp, Zea Mays
gtgttctagatgccttccgtcctacaagtaaggtatagcgatcacaacagagtacagagagcagacgagcaaacgacatggatttttaatagaagagactacacttgcatgatttatccaacttaggttatgcccacttaacagacatattttgttcacaacatcaaagttgtagctcttcctaatatacatgagatcacatgggttttaatagaagagactacacttgcatgatttatccaccttaggttatgcccacttaacagacatattttgttcacaacatcaaacaatgtctttgtttatagatgcactctgcatcttcgttgtttaccatattgtattttatagaatgtaagatttttcagacaaccgattcaacaaacaatcaatttgagactatttttatatattctaaaactggaacatgttatcgctcgccggttcttcctaacagggtcacatgcatttcattaatatcttcatgttgtactaattgttcttctgattagttcatatataacacgagataaaaagaaaaagaaagaaaagatagcactttgtttctccctcggttttgtgataatattttagataatggtaccgatatctctctacatcacaattaaagctgactctacatgagaatttgccattgaaaggtaacttcagtattgtaaataatccacttccagc

SEQ ID NO: 134099 - DNA, 401 bp, Zea Mays
catttcatacagagcccccaacagaaggagtgaagatttaagatgaagtggttgctgaagaggagtctactccagtgcctgttcatcaagtggatggagccatctaactgatcatcgtgttagaagtatctagaacctcttctctgcaacaaaggagaagttttattcccttatcttttggttagttacttcatgtggaggccttgaagcttagaatgtttatgtgtatctcttatggaaaggcttcacccttccaattattataataagttatgcactttgggtactatcaggacttgtaataattaccattcttcttatgttgtaaaacttgagctttggaaatgtaaaatatgttttgtaaagtctttcgctctatctccgaagtgtgtgtgtatcga

SEQ ID NO: 134100 - DNA, 588 bp, Zea Mays
tggcagcaggggaactcctggagattgcgattctagttaaaggtttctttcttgacaattgtactgttactattatagattgaccattatcattcacattcctttttctccatcttttacatcatgtagttacacaagaacaacttgatcatgacaaagaagcaaccaaatctgcagttttgatgaacttgaaatcaagggtacaatgtccttcctcctaatcaaatcctaattgtatgacatgtttccctaaagtgttctttacagtacatacttttcctcttttgtaatctatagcatctaagataaagacaagttctgacttatggggaaaggtatgagagtattgctatgctagcacatgttctgaagtgttcttgctgaagattctcccttgccctggtacttgcccttcacttgatggaactcatgaagcaaaaaacagattcaattgaaccaaaaggcgtattttaagataatatcttcatgcaccatgtatgtttatccacagttttaagttatatgtgcactcttaaatcggtgactaggttcattattattgaaacagtgttcactctccactattat

SEQ ID NO: 134101 - DNA, 101 bp, Zea Mays
tttttttgttgttgtttggttgttaagtctagagctctatccattcgcgataaggatatgagctcttatcggagcgtgagtctattggttcgtggatagca

SEQ ID NO: 134102 - DNA, 874 bp, Zea Mays
gaggaaatccggcccatcaacaggcccattggggagtggaagtggccggagaacattgcagggcggagcgcaacccccacgcccgaccggcccgggatgtccaccggactttcgcagctctctggcggcgtcggcggcgaccggggctcctcctcctccgccggcccccaccaccagcacagccaccacccacctcccccgccgccgcccaagatcctcctcgccaagccgccgctgccgcacgcctcgtcctcgggcgccgatgacgacggcgggaccggggtcgcgggtggccgcgcgcgccaggcgccgcagccgggttcgctcagcctcgtctccgacgcgtgggaggcccacaccgacaagatccttccgtatctgacggagaacaatgatttcatggtgattggggtaattgggccgcccggtgtaggcaagtcgaccatcatgaacgagctttatggatatgatgcgagctcacctggaatgcttcctccttttcctacacaaactgaggaaaccagattgatggggaaacactgtactactggtattgacatcaggatatctaatgagcgagttatactccttgacgctcagcctgtgtacagtccctctgttctaatcgatatgatgaggccagatggttcatccacaattcctgtccttaatggtgaacccttatcagcagacttagctcatgagctaatgggaatccagattggtgttttcttggcatctgtttgtaatatagtgttggtcgtgtcagaaggtatgaatgatttgtccatgtgggagctcatgcttacagacatggcagtaatgcagaaggctgaatggcagaaggctgaatggatgttccaatacatttatg

SEQ ID NO: 134103 - DNA, 1200 bp, Zea Mays
ttttcacctattgaccttatttcaaagaaaattgagctgcagttctagccttgtaatgattctatcacattctcatcatacctgtttctcccacccgtttttcccctgtatcccaaatagtttacaataacttggcttttgggacctggcagtaatgcaataggttgaatggatgttccgatacattgcttatgcctgtaggtttttggttcaggatctaagttttcacctattgacctaatttcaaagaaaaattgagctgcagttctagctttgtaatgattctatcccaatcccatcatacttgtttctcccaccacatttttctgtattttacagcaacttggctttcaggacatggcagtaatgcagaaggctgaatggcagaaggctgaatggatgttccaatacatttatgcaggttgatttattgaagcacgggatacctgatccgtccgtgttgacgtcatcagcttcccaagacaaggaaaacaaaaacgaagaccaaacgggctgcgaagactatatttccgatctctgtttcgtgcatactaggctgcaggggcaagatttttctccttcaaagttcatgcttctaaggagaactcttgagaagcacttcaactcatccacttttagagtcgggagctctaatgcaacgggtcatgcttctgattcgctggttccttcaagcacgaaagttgaagatttaacctccagtcggcaggacatatttcttcttcccctgagagggcacgacgactcgacaaagtttgagtatggaacgtactcgtgcatgctaggcatgatccgtgatcaggtacggttgctacgctgaggagttttgctcagtacaaaaggaatgttcagtagagagttacaaaccctagcccgctattcgaaaacgtggcagctacatgggctgggtttaggttctattaaaatctaaacatgggctgggtttaggttctattaaaatctaacacagcattttattatgtaaatgaaataagtatgagcaagtcatccctgcctaaacactagagtttcatccaaacattcttggcatctgtgctccagcaaatgatgggaagcattagttggtccggtgcttttagttctgagaagctaaaggttacatttgaaattcattcaatctgaactcattccgacgatagacatttgatgatgctgaacttt

SEQ ID NO: 134104 - DNA, 1906 bp, Zea Mays
gtcgttttgggccacaaggctggaagcaatcccttactaagggcccacgttggcccgcccggcccggaggcctggtgcacggccacggcgaccccagtcagtgtgagatccgaaagaccggccgccgccgcccaccgggtcatcgccattcgccacaaagccatttgaaccccccacgtctcctcgcctcgttccccatttgctgcgtctccttgcccgcgccgccgctcgccgtttgcccctcgtctccgcaccgcgcgctgttggtaattcctccgccccctgctcccattggtttccgccggttcgctcccctcaccaggcatcgggggtcttctctgatctaatctctggtagctgcggacgacgactcatgtgtcgggtattgccctcttggggccgtgggaatcagacgactagatctgtgcggatccgaccgattggggcgcggcgcgggcatccggaacttcacctcgcgtgcttacgctgacggcggcggccctctgtattttactgggttggagatccgtccatcccaacttgagtcgatttatgtctgatttcttttgttgctcgtgtaggcgaacggacggaaatttgggtggggagaaattttcgctttttaatggtcttagctatatagatatggatgtttgtcgtggtttgaattgcaccgtacacattacacatgacactgtcactgtaattctggtgagagagattcgtattgacgcatgtttttgaagaaagattgtggatgtaatgttaatgtgggatggaggtcacttcaagtatggcgagattcatattaacactgtcacttttaagcccagtgactttcttatttacactttcattgaagcttttatgttaatcattcatggtttgaaatgttcccatgcatatgccgctgttactgtaagactaatagtaacacttgtttcatgaagatggatactggatataatatactggtaacataacctgctacggattcggggttcactcgtttgttgctggaaaaaaactgtttgtctttctgctaacaatgaaatgttatagcttccccgggcttttgtgttggcgatttatctgttgctaggctatatgttctgtttatttgtgttatttgtgaggaacagtctataggtttgccttgtctacaatgcatctgcatatgttagtcatttattcatgattccattatttatcagacctgatagtctgtacttcagtccatccttgtgcagcaaaaatgacggctggctacattgttggctcactggtcggatcctttgccattgcatacctgtgtgacacatttatctctgacaagaaggcatttggaggttagtgtcatcctcaatagatttatgtttgatatctgtgcttcaaccctgtagatttggatttgatctggatcagcctttgcgggcacataggtagcacccccaagactgtttctgagaaggagtggtggcaagccacagacaccaagttccaggcctggcctcgcactgctgggccaccggttgtcatgaaccccatcagccgccagaacttcatcgtcaagtccactgagtaggtttgggctggagaagctggttctgcgacttggtgccgccatgaagccagagttccttttctaaggtcttaatcaattgtaataaaacgaaatacagtcaggatttttttgtgatttttacttgatctgtgagcgaacactgggtctttcaccttgtcatccaatgggttctgctccttggtgaaatctcccaccagccagtaaagaactgggttgttttcataatatatgcttttgctacgcagcctctgctgttgtaaggaattgcattgttatcttatatcactgtatggtgatgtttaactagtttgttgatgtgcc

SEQ ID NO: 134105 - DNA, 1813 bp, Zea Mays
gtcgttttgggccacaaggctggaagcaatcccttactaagggcccacgttggcccgcccggcccggaggcctggtgcacggccacggcgaccccagtcagtgtgagatccgaaagaccggccgccgccgcccaccgggtcatcgccattcgccacaaagccatttgaaccccccacgtctcctcgcctcgttccccatttgctgcgtctccttgcccgcgccgccgctcgccgtttgcccctcgtctccgcaccgcgcgctgttggtaattcctccgccccctgctcccattggtttccgccggttcgctcccctcaccaggcatcgggggtcttctctgatctaatctctggtagctgcggacgacgactcatgtgtcgggtattgccctcttggggccgtgggaatcagacgactagatctgtgcggatccgaccgattggggcgcggcgcgggcatccggaacttcacctcgcgtgcttacgctgacggcggcggccctctgtattttactgggttggagatccgtccatcccaacttgagtcgatttatgtctgatttcttttgttgctcgtgtaggcgaacggacggaaatttgggtggggagaaattttcgctttttaatggtcttagctatatagatatggatgtttgtcgtggtttgaattgcaccgtacacattacacatgacactgtcactgtaattctggtgagagagattcgtattgacgcatgtttttgaagaaagattgtggatgtaatgttaatgtgggatggaggtcacttcaagtatggcgagattcatattaacactgtcacttttaagcccagtgactttcttatttacactttcattgaagcttttatgttaatcattcatggtttgaaatgttcccatgcatatgccgctgttactgtaagactaatagtaacacttgtttcatgaagatggatactggatataatatactggtaacataacctgctacggattcggggttcactcgtttgttgctggaaaaaaactgtttgtctttctgctaacaatgaaatgttatagcttccccgggcttttgtgttggcgatttatctgttgctaggctatatgttctgtttatttgtgttatttgtgaggaacagtctataggtttgccttgtctacaatgcatctgcatatgttagtcatttattcatgattccattatttatcagacctgatagtctgtacttcagtccatccttgtgcagcaaaaatgacggctggctacattgttggctcactggtcggatcctttgccattgcatacctgtgtgacacatttatctctgacaagaaggcatttggaggtagcacccccaagactgtttctgagaaggagtggtggcaagccacagacaccaagttccaggcctggcctcgcactgctgggccaccggttgtcatgaaccccatcagccgccagaacttcatcgtcaagtccactgagtaggtttgggctggagaagctggttctgcgacttggtgccgccatgaagccagagttccttttctaaggtcttaatcaattgtaataaaacgaaatacagtcaggatttttttgtgatttttacttgatctgtgagcgaacactgggtctttcaccttgtcatccaatgggttctgctccttggtgaaatctcccaccagccagtaaagaactgggttgttttcataatatatgcttttgctacgcagcctctgctgttgtaaggaattgcattgttatcttatatcactgtatggtgatgtttaactagtttgttgatgtgcc

SEQ ID NO: 134106 - DNA, 844 bp, Zea Mays
gtcgttttgggccacaaggctggaagcaatcccttactaagggcccacgttggcccgcccggcccggaggcctggtgcacggccacggcgaccccagtcagtgtgagatccgaaagaccggccgccgccgcccaccgggtcatcgccattcgccacaaagccatttgaaccccccacgtctcctcgcctcgttccccatttgctgcgtctccttgcccgcgccgccgctcgccgtttgcccctcgtctccgcaccgcgcgctgttgtccatccttgtgcagcaaaaatgacggctggctacattgttggctcactggtcggatcctttgccattgcatacctgtgtgacacatttatctctgacaagaaggcatttggaggtagcacccccaagactgtttctgagaaggagtggtggcaagccacagacaccaagttccaggcctggcctcgcactgctgggccaccggttgtcatgaaccccatcagccgccagaacttcatcgtcaagtccactgagtaggtttgggctggagaagctggttctgcgacttggtgccgccatgaagccagagttccttttctaaggtcttaatcaattgtaataaaacgaaatacagtcaggatttttttgtgatttttacttgatctgtgagcgaacactgggtctttcaccttgtcatccaatgggttctgctccttggtgaaatctcccaccagccagtaaagaactgggttgttttcataatatatgcttttgctacgcagcctctgctgttgtaaggaattgcattgttatcttatatcactgtatggtgatgtttaactagtttgttgatgtgcc

SEQ ID NO: 134107 - DNA, 769 bp, Zea Mays
gtcgttttgggccacaaggctggaagcaatcccttactaagggcccacgttggcccgcccggcccggaggcctggtgcacggccacggcgaccccagtcagtgtgagatccgaaagaccggccgccgccgcccaccgggtcatcgccattcgccacaaagccatttgaaccccccacgtctcctcgcctcgttccccatttgctgcgtctccttgcccgcgccgccgctcgccgtttgcccctcgtctccgcaccgcgcgctgttgatttggatttgatctggatcagcctttgcgggcacataggtagcacccccaagactgtttctgagaaggagtggtggcaagccacagacaccaagttccaggcctggcctcgcactgctgggccaccggttgtcatgaaccccatcagccgccagaacttcatcgtcaagtccactgagtaggtttgggctggagaagctggttctgcgacttggtgccgccatgaagccagagttccttttctaaggtcttaatcaattgtaataaaacgaaatacagtcaggatttttttgtgatttttacttgatctgtgagcgaacactgggtctttcaccttgtcatccaatgggttctgctccttggtgaaatctcccaccagccagtaaagaactgggttgttttcataatatatgcttttgctacgcagcctctgctgttgtaaggaattgcattgttatcttatatcactgtatggtgatgtttaactagtttgttgatgtgcc

SEQ ID NO: 134108 - DNA, 915 bp, Zea Mays
gtcgttttgggccacaaggctggaagcaatcccttactaagggcccacgttggcccgcccggcccggaggcctggtgcacggccacggcgaccccagtcagtgtgagatccgaaagaccggccgccgccgcccaccgggtcatcgccattcgccacaaagccatttgaaccccccacgtctcctcgcctcgttccccatttgctgcgtctccttgcccgcgccgccgctcgccgtttgcccctcgtctccgcaccgcgcgctgttgcaaaaatgacggctggctacattgttggctcactggtcggatcctttgccattgcatacctgtgtgacacatttatctctgacaagaaggcatttggaggtagcacccccaagactgtttctgagaaggagtggtggcaagccacagacaccaagttccaggcctggcctcgcactgctgggccaccggttgtcatgaaccccatcagccgccagaacttcatcgtcaagtccactgagtaggtttgggctggagaagctggttctgcgacttggtgccgccatgaagccagagttccttttctaaggtcttaatcaattgtaataaaacgaaatacagtcaggatttttttgtgatttttacttgatctgtgagcgaacactgggtctttcaccttgtcatccaatgggttctgctccttggtgaaatctcccaccagccagtaaagaactgggttgttttcataatatatgcttttgctacgcagcctctgctgttgtaaggaattgcattgttatcttatatcactgtatggtgatgtttaactagtttgttgatgtgccgcttgtggttgtggtttcctgtaggctgttatgccaatctaactcttggctcatttagtactatactggtcaaattcttatgaatc

SEQ ID NO: 134109 - DNA, 2305 bp, Zea Mays
tggcagccaagccataataataatataataatagtaatcgatggggtctcacctcctcttgccgttcctcctgctactgtcctcaccatatgtgcaagctcaacagagaatcaccttgggctcctccttaacaacccaagggcctaacagcttttggctctccccttctggtgactttgcctttggcttccggtccatcgagggcaacacctcctcctacttgctcgctgtctggttcaacaagatcagcgacaagacagtggcatggtatgccaagaccgctgatccagatccagcgctggtacaagtttcatccggttcatgcctcgagctcacgtccagtggagcgctctcgctccaggaccctactggcaaagaggtatggaatccagaagttgtgagtgcaacctatgcttccatgctcgatactggaaacttcgtactggctgctgcagatggctcttccaagtgggggaccttcgataacccagcagacactattctgctcactcaggtgctcacccctgaaaccaagctccacagccggaccattgccacagactactccaatggacggttccaccttaacctgcaaaataatggtgttttcttctatgctactgctgtgcaatccgatcctcaacatgaatataattggtccatgcctgggaacgccacaaatttggtattcaatgcgactggcatgatatacatcaccttggataatggaacacaagtaaaaatcacatctgggaagacaagctccatagcggactactaccatcgtgccacacttgatccagatggcgttttccggcaatatatgtatccaaagaagttcagcaaccacctgtacactcaggcatggtcagttgtcgacttcaaagctccaaatatctatatcccaagaaggtcaatagcagagacacaggtcagcagtggaacatgcggtttcaacagttacagcaaggtggatgtcataaacaaccagactacctgcgtgtgcgtcccacagtacacatttaaaggtggaagtaaaggctgcacgcctgacttccagcaaccaagttgtgacttggatgaagcaggtgccacgaagcagtttcagttagtaacaatgagcaatgtggattggcctcaatgtgactatgaacagcatgacaacatacctaacaaccagtgccagcagctctgcctgacggattgtttatgtgctgtcgctgtgtttcgtgatagtgacaatacatgttggaagaagaagttgcctttaacaaataatgttgtaggggatagtgtgcagaggacagtttacatcaaggtaccaaaaaacaacagtcaacaacctgagcttcttgattccaacagatggaagaaagataagaagcactggatccttggaagttcattgtttctaggaagctctatcttgctgaacattgtcctgatctctgttatactcttcggtacttactgtactataaccataaatgaaagcccgtctgtgcagtcatcaaacaatctaggattgcccctgaaagccttcaattacactgagcttgagaaggcaaccagtggattcacggaggcggccagccagctgccgcggtcggccagccaggcgctgccgcggtcggcgcacgcgcaggcggctagccagctgccgtggtcggccagccagcgcgcggccgggtctggacgtgctgcatcgaccaaaagggctagagatgatgatcagggggattatattgaatggaatgatcatcataccactgttgtttgctcattgtttgctgaacaagttagaaaaggaaatagaccgaacacacacttgaataatttgggctacaacgaggagataactggtgttgggaaatttaagaataggcctctccaaaatgaagatgatatgaagatatgtagcgatgatgatggtgatgagattgaggattgtttcagaatggtcttaggcggtgctatgttggcacaaatatatgttgacatgtaccttactaaaaaccctacaaggacgtctacaacaagtggaatgggatttatgttagagcttttcaacactccaggggaatgccatagacaacttcacatgagcatagaaattttctttgacctccatgggttattggttgacaggtacgggctgaaagaatcactacacatgtcaactattgagagtctagctagagctgttattcctgacaaacacattcctcagcatcaaattgagagtccagctccatgcgtggagctgctctgtggtggagcagcagctccagagttgatttggtag

SEQ ID NO: 134110 - DNA, 118 bp, Zea Mays
attattagtccaaacaatttagtacagtatatgaaaaatatggtattccctggaagtacacataagtacataatgatacaaaaaggagaaacctattccaaacgctaagttattggtc

SEQ ID NO: 134111 - DNA, 2466 bp, Zea Mays
acccatcgcacacccctgctcacgaaaccgtaggcatcgccgcctccccatacctacgaaactagcatcccgcggcggcgatggccaccggcgacaacgacaagcccccgtcgcttgacgcagacgtcgacatggccgacctagcttccctcgacgccacggccgctacatccgccgccgcgggcggcgcgccttccacccgcttccgtcccaaggccaaggggaagcccaggccgaaggctgagcctcccagacccgtaccagttgccgtacccaagccggagccggagccagagccagaggcggttccgatgccggagcccgatgccaaccccgcgccgccaccggaggacacgatggaggtcgacggggcggtggacgctcctggacatggggagggggcggtggaggaggacttcgtgttgcgcgagatcgatgtgtacttcaaccccaagcccttcgaagacgacacccagctgtacattatgcagtaccccctgaggccatgttggcgcccatatgagttacatgagatatgtgaagaggttcgtgtgaagccattgagttcagaagttgaagttgatttgagtatcaatacacagagtgaaaattatgaccaagaggcacctttgaggctgacaaaacagacactatcgtcatccaaggcagttgatgttactaattacgcggttggagttcttaatggcaacttggtccatttgaatcatattgatgcagtggtgcaaatgcgaccatcaatgtcacatattatttctggccgagcacatactaggcaggcttcacaaccccgggaaatgaatgggggagctagtacctcgatggattcatctcataagggaaatgagcgccctgaagattccaaggaccgagcagaagattctgagccatggatttctctcatctaccaaccagcaggaagcaatactgcaactaagtaccatgataagatgatagcaaatgagggtgtgcctattgatttcacaatgagctcctcttgttatttgacgtccttgtgtcctggggcctctactagcagaaagcgtatcaacaaattccaagcaataagggagatgcttttgctaccactggaagaacgcctcaagaaatggtttactgaggtttcaggagtaaatcgatttgatgctctgaaggaccttgctccaacctgttcagaggttgaaattttgaaaatgcttccagagtgtgcatatttggtgcgtggattgtgggtctgcaaaagttctttgttgtttgatggtgtatattctggtcccatggatagaattcttcttgagtttacaaaaagggatcccgtcccatcaaatattctggaaccatttatcaatctgattggcaatcgtgctatgagagactggatactgtctccattgtgtaaaagacgtcaaattctgaaggaccataaatttatatcggcagatttgtctttcataaaacgctatccgcatatagtcaatgaacaagagtgtgcttggtctgctcgggagaccactctccgtgagtccctagaaatgagcactactttggcaaagaagaccatgaattcaaccagacctaatgttgcttctaaagggcctcattcaaatatgagcaagggcagggatggcccatctcaaggaagtgatgaccttgcgcgatctgttttgggcactgttttcactgccaataaagttcgcagcatgcaggcagttgttagagacttgcgccagttggctgcaaaatatgcttccaatagaaaggatggatccaaactgcaagctctgtgcaatgctgcaaaaaattgtgcatcgctgcctcatgatgagctgaatcgaaaaatacatctagttgctgttcctgttcatagtgtttttgttgcaaagcatgaggataagcgagctctacgaaacatatttattttgctcttccgtcacaaagaacccaatggaacattgactaagcaggaagttgttgctgctgctgcgaaacatataaaaagagagattactgacagagagtaccatcaggttgtgacggagatctgcatttctacagaagatgggcacttgctgttgaaaaatggtgatgagccctgagttcgctatgatatgccctgtgaaggtccaccaaggtggaatcgtctctgatgcgtagaatagggtcattcggagtttgggatttggccggtgagaatgagtattgatcaggcagttcaagatagctacagcaaactgttctaggtggctttgtcagccatttttggctcagcagtttttgctgggtgctaattgagcggtgtttttcggttagtcgtctttatttgtgtccattgaatccttgctggtctagcttggcgtaattcagttagggatgttattttgtcttttaagtgctgatattgtctgccttaagtaaagtaaagtggaaaccatgaaccaattcctcttt

SEQ ID NO: 134112 - DNA, 263 bp, Zea Mays
atggggacgagcgcggcagggaacaacgccggcagaggaggagctcggcctgacgccatggggcgagcagagagctcggagcggagctgggacgacgcgcagaggaggagccggctgcgcgcggctgccaagacaagcgcagaggaaactccgaccgggcgccggaaagaagaggccgccggggcgaagctccatggtcaggagctgggggcgaactcgagcagaaggaaggaagcaggcacggcgtaaaaattctgagcagg

SEQ ID NO: 134113 - DNA, 2118 bp, Zea Mays
accaccgctgacagccatgccccaccgcgtcgctgccctcctcctcctcctcccgctcgctgccgcgtcggaggaggcgccgggaccggcggccgaggccgcgctgctggagcggcacgcggcgcagctcgcgaaactagaggaggtggcggagtcgcttgcgaggtccgtccacgcgctcgagtccgcgcttgccagatccgcggacccggatccctcgcagcctgtcgccccggcggcggccgtcggggaccggcgctccccgcagggtgtggcggtcaccaagcgtcgccccgtctggtccgagcgcttccacttcacggcggccgcgcgtcttggggagggcgcctacgttgcggcggcggccgcgctgccgtacgaggacgccgaagggctcaccaagtacttcgccgtcggggactcccgcggccgggtcttcgtcttctccgccgcgggcgacgcgctgctcgagctcgaggccgccgcctccggcggcgagtgccgcgtcaccgcgctcctcgcctacctttcgccgcgccgcaccgactgcctgctcttcaccggccacgccgacggctccatcgccgcgcaccgcctcatcgagtcgtccccgcacggcgacgactggctcaccctcgccgccgcctcctcccgcctcctcgtccgcggcctcgacgccgcccctgtcgtgcacctcgaggcccaccacgccggccgggcgcgctacgtgctctcctgcgacgccggcggccgcatccgcgtcttcaccgagaacggcacgctctacggcaccgctatcgcctcgtccacgcctctcgcctttgtcaagcagcgcctcctcttcctcaccgaggccggagccgcgtccctcgacctccgctccatgtcggtccgcgagacgccctgtgagggccttgctgaaatgctcaatggcaccagcgtcaaggcatactcttttgacccctcggagcgattcaaggcctacggcttcaccgaagctggtgatctcgtgcacgtcctgcttcttggtgatgtttccagcctcaaatgccgggtccgttccgtcaagaaatctgagatggacaaccccgttgcaatacagacgatcaagggttaccttttggtggccagccatgataaaattcttgtcttcaacacatcgtctcagtattatgggagagtcggtgcgcctcggccgctgtttgccacaagcatcaaggacatcaaatctgtgtttgcgggttctggtggcgtgctgcccaccgagccagctgggaagcctgttatcgcggcagaccgggagaagctggtgatcttgggtcttggggatggccacattgctatctataggtctaacttcccggtgtacaagccagagagcaatgctgttgtatggagtggaccagcgctgcttttcctcctgttcttgatcggcatttggcaagtatacgtgaaaaagaaggattctctgggatggacaccagaggagacatttaacacctctgtaacagcaccaacggggagccttttgaatcatccaactagtgatcgagcctttgccgacagcacagcaagaagcggtgaccggggctatgttgatggaacatcaagagccagtgatagaagctatgtggatgccactacaagaactaccgaccgaggctattctgatgctactagggctgtggatctgcggggcggggcgttgaggagtgctccaagaaggtacgtgtcccctactagatatgcagggacatctggaatccaataccgacctgcttcggctgagcctggtcttaggggtactcctgagatcaagtacagggggccaggtatggagccccctggtttccccaagaaaagggaaccattgttctcgaacaatcaggctgtcgtagtagatgatcatgtggattgaggctttggttaggtcggtgtcggtgtcggcaggccccttaaattttggtctgattttgaaggtcctccgggacgccagtggtctacatgtgctgttgtatgttgtaactcaaaaagaatgctgtattgtacaagcacgttacggcctttttcaatatgatgctgcaaatggtgaaataacacagatattacggtttgtgc

SEQ ID NO: 134114 - DNA, 113 bp, Zea Mays
cttttacaaacctcatcgatgtagcctataatcgttgtatttttaagttaattcaactattcagcaaaacatcttcatttcatttgtcaaggggagcaaatttggggagatag

SEQ ID NO: 134115 - DNA, 206 bp, Zea Mays
ccatgcgcttgagccggcctctgttctgcttggcccaatttcatccacgcgtcagcccagtccgcgagggggaaagttgcggcgacatgtggggccagcgcgtcagccgccttgtgtcattcgcgccaagttcgctgccagtgggaccatgttgccagtgtctgtcgcaagcgcggtaggtatgccgaaacctcctcgtcgagatc

SEQ ID NO: 134116 - DNA, 330 bp, Zea Mays
gcgcggtgtgctcatcttgtcgccagatctttttcctttcctgtatgagcgctcactccctcatctccctcctcagccagcactcgcctctggccatggacatcagcgcagcagcgcgtggtagaggccctccgacctccgagttgacctccggtcggcgtcgtttctctagtccccaactcgacgtcctcctctgccgcggcctcccactcctcctgacgcgcgttcctcccctacgcttggccatggtcaccgcgagccgtgaatttccctgcgcgcgtgcacccatgccaagctcccagcgtcgccccccctccctctgctcgctca

SEQ ID NO: 134117 - DNA, 497 bp, Zea Mays
atatatgccttcgttcctcgatcgtcagccgccgccagttcctttgccggttcgcgcaccacgcaacgcaagtgctcttcccttcttctctctcggttctcgccttctcggccctcctcctctattcttccctctcgtccacggccacaggctagccggccttgagcgcctgtgacggcgcaggttctggggttgcaacacgcccctccgcccttccggcgcatctgctgaattccactctcctcttgcccgccggcgtcgcctcttttctttgctatcgtcggcctcggaccccaaagacgacaacagcaggagggcagcgcacctgtgaaagcggcgcctctcttgccgttaaatttccgcgtcgcctggcttctcttccgcactctgctttcaagcccctctgccatgaccgtgcccaccaaagacgacagccaaagcggcacggtggccgacacagtgccattaccgacataccgttcgttagcagcgccggt

SEQ ID NO: 134118 - DNA, 510 bp, Zea Mays
ggtgtgcatgttggcatgccctcggtacatgtagagtataacattgaaaatatcacaccacatttttgccgccttactgaccgcacttactctgctcccataaaagttcatatcgaatacactgtcggaaagcagcatgaagtgagaagaaagaataactttatcattggctacatgcctattatgctaagaagccatgcctgtattctgtatgaaaaggatgaagctgaactagcaaaatatggtgagtgccctcttgatcctggcggctactttgttgtcaaaggaacagagaaggtcattctaattcaagaacagctagcaaagaatcgtattattgttgacactgatagcaaaggaagggtgatcgcatctgttaccagtagcacgcatgcaataaaaagcaagacggtgatttttatggataaggggaagatttatttacagctgaatcagttcaacaagccaattcctattatagtggtgatgaaagcgatgggaatggaaagt

SEQ ID NO: 134119 - DNA, 518 bp, Zea Mays
aaaaatgggaacctacgaccaaagtgtatatacactgccttaatgttaaggcgcatgatggacgcaatcgtaaattctgacacctttgatgataaggattatgttggaaacaagagatttgagttgtctggccaactaatatcccttctttttgaggacctattcaaaacaatgaattcccaagctgttgagcgcatgaataaaaatagtgacaagactcactctagtcctttggattttagccagttgataatgcaagattccattacctttggtctggaaagggctatttccacaggaaattgggatattaaacgttttaggatgcataggaaaggtgtatctcaggttctttcgaggctatcctacatggcatctttaggctatatgacgcggataacaccccaatttgagaagactcgtaaaacaagtggtccacgtgctttgcagcctagtcagtggggtatgctctgcccatgtgatactcctgaaggagaagcttgtggattgacaaaaaa

SEQ ID NO: 134120 - DNA, 591 bp, Zea Mays
atttctggtcatgttcaatggattaatactggggaaacacaaagatcctcagaggcttgttattgatttgaggaatttacgtcgatctaatgtaattggagagtttgtaagcatttttattaatgagaaacagcattgcgttcacattgcctctgatggtggccgtgtttgtcgcccacttataattgctgatatggggatatcaaggatcgatgagactcacatggaaaaactgaggcatggaacttgtggttttgatgatttcctgcgtgatgggttgattgaatatcttgatgttaatgaagaaaacaatgcactgattgcattgtatgagcacatggatcaagatgatgttgaaagaagcagcatcacacacattgaaatagagccattgagtatcttaggggttgtatctggacttattccatatccacaccataaccaatctccacgtaatacttaccagtgtgcaatgggtaagcaagcgatgggaaatattgcatataatcagttgttcagagcagattcactactgtacttactagtgtatgcacaacggccactgctaacgacgaaaactattgagttggt

SEQ ID NO: 134121 - DNA, 1565 bp, Zea Mays
ggatatagtggttatgatattgaagatgcaattgtgatgaacaagtcatcccttgatcgaggatttggccgttgcatagcattgaaaaagtacacagttttaaaggataactatggagatggtgtatccgatatgattgttgaaccccaaagagataatggtgttttgattaaacagaatatgagagcgttggatgaagatggaattgccggacctggtcaaattattcgcaatcatgatatctatgtaaacaagcgaactcccaaaaacacttcaaaaggtattggtagggcattgagagaaagtgactacaaggactcacctgccttgtacaaaggtgttgatggtgagactactgtggtagatcgtgtaatgctgtgctcagatacaaatgataagttatccattaagtgtattattcgtcacactagaaggccagaggttggtgacaaattcagtagcagacatgggcagaaaggtgtctgtggtacgattgttcagcaagaagacttccccttctctgagagaggaatctgtcctgatttaatcatgaatccacatggtttcccaagtcgtatgacaataggtaaaatgattgaacttcttggtggaaaggctggtgtttcttgtggacggtttcactatggcagtgcatttggtgagccaagtggtaatgctgacaaggttgcagacataagctctactctaatcaagcatggtttcagctataatggaaaagatttcttgtactcaggcattcttggtcagcctcttgaggcatacatcttcatgggaccaatctactatcagaaactaaagcacatggttcttgataagatgcatgctcgagctagtggaccgcgggtgttactgacgaggcaaccaactgaggggcgaagccgtgatggaggcttgcgtcttggtgagatggaacgtgattgtctaattgcatatggcgcgagcatgctaatatttgaacgtctactgttatcaagtgatccttatcaagtccaggtttgcagaaaatgtggcttgttaggctactacaatcacaaactgaagacttcatactgttcaatgtgcaagaatggggaaaacatggccaagatgaggctgccatacgcttgcaagcttctattccaggagttgcatgcaatgaatgtagtaccacgcttgaagttaaccgaagtatgacagatgctgggactgtacaatgagagagatgctggattcgaaatgtgtttagagctatatgataaattaaagccctctttgataggggcatagggcttttttttttttgttaactggttcgagagaaaccacgtttaggtgtgtggtttcagccgtctagctagtctcttcgcgggcttctcttctcccgcggaggtatacaagctatcgccgggcaattgttgtatatatagttttttcccgatgtcatatatgaaggaatctggacctctttgtttagatgatcgctgaacgccctgcagggctagattacgatctttgaatgctgaatcattggcatgtgccattattattctagagtcactcgataa

SEQ ID NO: 134122 - DNA, 1250 bp, Zea Mays
ccccccctcccatatcctcctctctcaatccttgcagccacaccaccataccctagccccccccccaatctcctcctcccaaggtgtcaatccttgccgctcggatcatcgtcacgtggtgcgaatcttcaatcgttttggtggagggaagaagggaggaaggaaagggggagaatccaaggtggtggacttccggattgttcttagggatttgcccaaacttcctgtgaaggcaagtaaaactgtgatggttattccgtctgtcagatgaggagtcttatacttgattatgttgtgctattatgttcatattcatatttttttgagtaccatcatttgaaaatgttcatgtttcatggatttcatatgttgagtttgaggttttaattatgttactcaagtggttattatgtggaatgggtggaagtatatgtctagcacatttttatttgggaagaactcatgatgttgtcatgcataatgcactcatcattcattgcattgaagtttcgtcgcgatcttatggtccgaccgtaccggtacattgagcatcatatgttgcccgagaaggggtatggtgcagcttcatatccttagagatatggaggcagaagtcattattgcatctgtagccatgtgcattcatgggagaggtgtggaatctattatgtggatgtggataatttggacttgtgcatggtgattcttcttggcgttaagtatttagttacttgtttacttgctgcaatttactgttcaaaaaaaagaaaggagttctgaaccacgtggttgtgtaagcacagttgatttacaatgtcctatttgttgttgttatgtttacttgctgagatgtgttatctcacatcttgcattgtttgatgcaggcacctaatttctgctttgggaatagagggatgtagcagcacggccactacacctttaataaaggaaccaccatttaataatgttgttaatcagagttggtcaagtctagtgaattgctttgttcttggttgagcgtttattttggggtgggctgagttccttatcccatttgtttttcttcagttggggcataaataagttttaccactttgcatttagtttctactatgtgaattatatgtctttatatcgtgtatgaacttcatgttttcccctccttgttatgttagtttcaaaggaggtgctgccggattttgctatattttctttctttattacgcctcttgtgttgagtaagttaggtg

SEQ ID NO: 134123 - DNA, 190 bp, Zea Mays
ttttgtttagccatatgttacacaaagtgcttgggattcatgtgtaccaaaacttcatggttgtcagttttaaatactggtccaaaaatagcacacacacacacacatcattcatcacaaattcgagcatcatattagtaagtgttgcctctacataaaagtatgaagttcatttcttcggtagcaacat

SEQ ID NO: 134124 - DNA, 100 bp, Zea Mays
ggccatcagactatatcaacaattaaactgatgagaggagacagatttaccttaccagtaacagaagagacggtctggtgacaagttcatgtcagggagg

SEQ ID NO: 134125 - DNA, 2181 bp, Zea Mays
tgagatgtgtagttcaattcaagcaatgtactgcttttctgttcatacatatatgcacgtttattggcgcgaaagtggccaaattcttcattggccggtttttccaccgatgagacaaaacaaaacgggactgtggaatctttgcctccaatgaaggggaagatacctgccatcgctttgtttagtcccagcttgtgctagtgccacactcaactagtgcatgtcttctgtgcttgaactcttctgccaagcaccgttttaatagattaattagtgttttaggtgggattctattttataacattgcattcgttccattgcttctgctgcttgaatttcaaatggttgcccttggtaacctactgctgcagtactactaaagaaagcttttcgtgactcctgctatcattaatctggtcaattggtgcgccaggagagggaagattgagctgggagggggttcatggagatggaggggaggggcctgtctgatttgttcaggaacaccagcgaggagatcttcctcaaggcagtgatggagaactcaatgggagtggcagcagcgccaccaagcatggagatgctggggttcaaggccatgtcgcaaggtctcagagaagacagcgaggagctgttcaacagctggcttatgaatgaagagatcccaggatttggttcagcgaacaatcgccctcgacagccatctaggttgtcatcagaagctgtaggccttccaaatcaacagcatgacatttctcaacaaaattttctcactgacaacttggttccacagaatctagcaattccttcagtcgaatatccaaataatcacaagcaccaatcactcaaaaatgcagcagagaagggaatgcaagccagtgacttacttctagcaaaagcctggttccacagcactcaaccaatgactagaagtcgttcgtcagagttaaggaggaggtatgctgcaatgcaaactaatatgacaccaataactataggaagcattgaagcaattaaccagttaaaacaagattttacaaccacgacaaacagcatacctatgagcaacacacctgttcagacaccaaattttgcatctccttcaagttcatcaacatcccatctggataatccacatatggcagcacaagatactgttacctcagtggtgagcatgctcaaggacacgctcgagcgcaagaagcttggtagccatgctaacaaagacacctcagtaggccatccttttggattctatgatactcagcagtttcaacagaacattcttggaggaacggatttctttcccatcatgacaactgcccaggctcaggattccctgatgcttcccaaggtcgagaggcccatggaaccaaacaatggtagcttcgttccttctacaaaccaagtttggttcggtgcagcttctcgagagccttcgcacagtggatcttctactgctatgaccacttattcagctgggttcgaaatgtgcgatgagctaccacctgcagggcaagcgatgtctatttgtgagagctccagaaaaaacgctgcaaatggaacaaccatcggcagatcgaaaggcaaagaatacagagagagggtacaacaggataatttgaaagatgagagaaagatgagctcaactaatacttctggagcatcgaaagctgataatggagatcctatgaaaaagcgcagggttgagcgctcccgcaaaatggcagaagcgaaggaaagaagctctacaccagtaataccgtccgacatgcaggccgttcttaagcgctgcgaaaccctagagaaggaggttcggtcgctaaagcttaatctgtccttcatgaacaggaaagattcagagcagaccaagcagatcgaggagcttcaacagaagaacgaggacttggccgaagagaaggagcggttgctggaagagatcgagagaattgtctccgaccccaacacttgagcacccaatctcctttttttttgggtaacttatttttgtgtactaatagagttaggcttgaaatggtccttgatacaaatacgtacagtccagcagggcagcaagaattaagtgctggcctaaatgtatcaccattctttccttgttatcacaagtttaatgtatattaataccaacaagcaaagggatcagggattacagtttacttc

SEQ ID NO: 134126 - DNA, 1138 bp, Zea Mays
gagaaatatgacagtcccaaaatgcaatatgttcataaaattcaaaggattacacaaagatatccatcaattcgactcccatttcagatataaccatcaattcgattccatttcatcatcgtttcaatccagcagtagacacccaaccacacaatacattttcaggactccacgatcgccaagaaacagatcaggaactagagcagcacatacggcgaccaccactcagtgcttattcctcggcgaggtcctccttgacccagccgccgacaagggcgccgcggctgttgcagcagccttcctctttggcgacaacctcgccggcgccccagcagcgggtacagaagccttcctctttggcgaagccctcggcacggtagccttcctctttgttgacgtcgtcgccggcgtcgcggcacccggcttctgcttgctctccaacaccagctgctgctgctgctccgcggcgatgcggtcgaactcgtcgctgagcttcctcgcgcgcctcttcttggcggcggtgacgatggccgcgaggggctcgtcctcctccgactcgccggacccgtcggagtcctcgtcgtcgtcgacaagctcacgcttcagggcccgctcccgcgccgccacctcctgctcgtcctcggagtcgccgctggaggcgtcgtcgtcggacccaagcgcggcgagcgaagccggcatgtggccagcggcgcgggccttggccttggccttgaccctggcatcgcggtgcgcgcggcggcggagcttgtcgacggagccctcgatgcggccctgcaggcggaggcgcttcacgctgatgccgcccatggaccagtgcgcttcgcgcgcccactcgagcagcgggtcggtgacggacgccggcgggtccacgcggtcgcccgggaagaagcgcggcctcggcaggccgctgccgtagaaccggccgggcccgagcgccaccaccatactggactgtccctctcggttagttgtggctctgtcgctctagcgtagatctgccctctctctctctctctctctagatctctgtaattgcgaacgtggcgtggtctgtggaggagagaggaatcgtgagggagtttataggagaagaggaagcgcggcgggaaaggatagg

SEQ ID NO: 134127 - DNA, 2725 bp, Zea Mays
ccaccctgtcgtccgcgtcctccacgccctcgtcggctcgtcctcgccgtcctcctccacaccgcgcgcgcggcggtgttgacccacccacccgttcctcccccaccccatcagcgctggaggcggcggtgcgtaagtcccccggacccttcggcggcggcggcggcgcgcggttatgccgagaggctcccaggtttcatcaccgtgctctgctggagttatagcattttcagcaaggatatggagtacaccccctgcacagcaagttcctttgtatcccacatctcgctgctcgaggaagttcttggctggaggttttgtctttacggagacttcctggtcatctcttttgtcaactgcacttgaggatcaacccacacttagtgactgccttgcctggtcccatgctgtcagacattagagttgcccagtgattacactattacagtgcagctgtagcacatttatttgagcatggtggatctgtttctctggcaacattccagtaatctttgtcttggtgctaatcagccagcagaagttaccatcaagacatctttggacacttggatctaacgcttagagctttgccttcgcatataggctctaggtttgggttttcgttttctgctagctttcttctactctaccactgtaagttttcagtctgatcggtccaaagtttggtgtgtattggttacgctgtccttcaccagccttcactttgcatggcgtgaccttagagaagacgtgttcaagattttgttgtcgcaaaagcatgggaatagcatacatagctttgagaggagtctccagtgactttggtgttgtaacatccaaagacactcctgttatacatatatgagtcctgttttttactatacaactgttctgaaataagggcagttctgtgcaccaccagcgaataaaatggagagatatacaattatcaacgaagttggtgatggaacatttgggagtgtttggcgtgcaaccaataaggaaagcggtgaagtggttgcgatcaagaagatgaagaaaaagtattattcttgggaagagtgcataaacctccgtgaagtgaagtccctgcgaaggatgaaccatccaaacattgtaaagctcaaagaagtcataagagagagtgatacgctgttctttgtttttgagtacatggaatgcagtctttatcagctgatgaagagcagagggaagcccttttcagagactgaaatccgaaactggtgctttcaaatatttcaagctctgagtcacatgcaccagcgtggatattttcaccgtgaccttaagcctgaaaatttgcttgttacaaaggaactcatcaagatagcggattttgggcttgctcgtgaaatttcttctgagccaccttatacggaatatgtgtccactcgttggtatcgtgcccctgaagttcttcttcaagctactgtttataatgctgcagttgacatgtgggcaatgggtgccattatcgcggagctattttcactgcgacctctttttcctggatcaagcattattggcactccaaatcagcgtacttggcctgaaggactgcagctagcagcatctatgggttttcagttccctcagtgtgaaagtgtacatctttcggaagtggttcctttagcaagcaaagatgcaatcaatcttatctcgtggctttgctcatgggacccacgaagaaggccaacagcagtggaggttttgcagcatcccttctttcagccatgcttctatgtcccaccttcacttcgcttcaaatctactggatatgcatcaacgccaccatcagctggggctaaaggagctgttgatcagaagaacattaggagatactacatgggtactgtacccaatgcgaggccaacagttaattactcgtacttgagaaacaatgctcctgcaagagcagttggtgcacaaaggaaattggagttggattatcagctcccagagactaataaccataataaggtgacaaaggcagaagcgatgaaccagtcttggtccagaccagcagcagtaaggagcaatgcaggaaatcatcttgccaacgacctgaacccccgtgtacctgaccttgccgagaagctgtctcagttgtcaatgggccccaacagggtgtcgggtttgggttccgagaggtttgttagaacccatgagaacgctgccaagcgccccttgcccgtgggatccagggcgtggcatggtccagctgaccccttccggcgcccatacgagatgccaggtgatagaactctccttccaaggaatctcgttcgctgaggctgtgaagctcttcgcaagaaacatatccaacgctcgctgtcttcggagctactcttccccggctatttacctcgcaacaataaataaacaaccaaacttcgtttccagcagtgggtgttgctcagcattgtctgttaccgtgcttgtgcgtgacgaggataagaggcgtccgggtttgtgcaccccccccccccccccgggtcctcgagggctccagggctggttggttgcagcatggcccgatgtgcctccatgtgatatcgtttttttaattatgctgtgcgatgtgtgattggtaacactgcttcagttgttaccgctgcttgttcagtgggtttgtatgaactgtgacatgctccgctaaacgttattctaaatactggtatgcaaacatgtcgaaggtgaacaa

SEQ ID NO: 134128 - DNA, 2755 bp, Zea Mays
ccaccctgtcgtccgcgtcctccacgccctcgtcggctcgtcctcgccgtcctcctccacaccgcgcgcgcggcggtgttgacccacccacccgttcctcccccaccccatcagcgctggaggcggcggtgcgtaagtcccccggacccttcggcggcggcggcggcgcgcggttatgccgagaggctcccaggtttcatcaccgtgctctgctggagttatagcattttcagcaaggatatggagtacaccccctgcacagcaagttcctttgtatcccacatctcgctgctcgaggaagttcttggctggaggttttgtctttacggagacttcctggtcatctcttttgtcaactgcacttgaggatcaacccacacttagtgactgccttgcctggtcccatgctgtcagacattagagttgcccagtgattacactattacagtgcagctgtagcacatttatttgagcatggtggatctgtttctctggcaacattccagtaatctttgtcttggtgctaatcagccagcagaagttaccatcaagacatctttggacacttggatctaacgcttagagctttgccttcgcatataggctctaggtttgggttttcgttttctgctagctttcttctactctaccactgtaagttttcagtctgatcggtccaaagtttggtgtgtattggttacgctgtccttcaccagccttcactttgcatggcgtgaccttagagaagacgtgttcaagattttgttgtcgcaaaagcatgggaatagcatacatagctttgagaggagtctccagtgactttggtgttgtaacatccaaagacactcctgttatacatatatgagtcctgttttttactatacaactgttctgaaataagggcagttctgtgcaccaccagcgaataaaatggagagatatacaattatcaacgaagttggtgatggaacatttgggagtgtttggcgtgcaaccaataaggaaagcggtgaagtggttgcgatcaagaagatgaagaaaaagtattattcttgggaagagtgcataaacctccgtgaagtgaagtccctgcgaaggatgaaccatccaaacattgtaaagctcaaagaagtcataagagagagtgatacgctgttctttgtttttgagtacatggaatgcagtctttatcagctgatgaagagcagagggaagcccttttcagagactgaaatccgaaactggtgctttcaaatatttcaagctctgagtcacatgcaccagcgtggatattttcaccgtgaccttaagcctgaaaatttgcttgttacaaaggaactcatcaagatagcggattttgggcttgctcgtgaaatttcttctgagccaccttatacggaatatgtgtccactcgttggtatcgtgcccctgaagttcttcttcaagctactgtttataatgctgcagttgacatgtgggcaatgggtgccattatcgcggagctattttcactgcgacctctttttcctggatcaagtgagccagatgaactttacaaaatctgtagcattattggcactccaaatcagcgtacttggcctgaaggactgcagctagcagcatctatgggttttcagttccctcagtgtgaaagtgtacatctttcggaagtggttcctttagcaagcaaagatgcaatcaatcttatctcgtggctttgctcatgggacccacgaagaaggccaacagcagtggaggttttgcagcatcccttctttcagccatgcttctatgtcccaccttcacttcgcttcaaatctactggatatgcatcaacgccaccatcagctggggctaaaggagctgttgatcagaagaacattaggagatactacatgggtactgtacccaatgcgaggccaacagttaattactcgtacttgagaaacaatgctcctgcaagagcagttggtgcacaaaggaaattggagttggattatcagctcccagagactaataaccataataaggtgacaaaggcagaagcgatgaaccagtcttggtccagaccagcagcagtaaggagcaatgcaggaaatcatcttgccaacgacctgaacccccgtgtacctgaccttgccgagaagctgtctcagttgtcaatgggccccaacagggtgtcgggtttgggttccgagaggtttgttagaacccatgagaacgctgccaagcgccccttgcccgtgggatccagggcgtggcatggtccagctgaccccttccggcgcccatacgagatgccaggtgatagaactctccttccaaggaatctcgttcgctgaggctgtgaagctcttcgcaagaaacatatccaacgctcgctgtcttcggagctactcttccccggctatttacctcgcaacaataaataaacaaccaaacttcgtttccagcagtgggtgttgctcagcattgtctgttaccgtgcttgtgcgtgacgaggataagaggcgtccgggtttgtgcaccccccccccccccccgggtcctcgagggctccagggctggttggttgcagcatggcccgatgtgcctccatgtgatatcgtttttttaattatgctgtgcgatgtgtgattggtaacactgcttcagttgttaccgctgcttgttcagtgggtttgtatgaactgtgacatgctccgctaaacgttattctaaatactggtatgcaaacatgtcgaaggtgaacaa

SEQ ID NO: 134129 - DNA, 1287 bp, Zea Mays
tgacggcgggcgggtttcattctcggtcttgaggggtacaacaaatacaaagcacgctactagtacaaaccataggaacaggaaggagccggctcttacacagagacttctgttctgttctgttcttaatgaggtcggtacaatacactacggcaaaacaaataggtaggacgagggcgtaggcggcggcggcgtgacgatcgatctccactccaggcgacagcgcactagtgagcgtgagcgtccaccgtctagtggccgcccgatcgacggttcctcgtcagtcgcctgcagaaaacaagtttcagtcaagcatgattcgggcagcgaacagaatcaagagttctggtttctgagatgcagctcacatctgggcatcgggatggagatggagagctgggtggtggaggaggagaaggaggtcctgccggcccgcggcgcgccgtccatctccggcggccacgagtccgcccgcgtcccgggccactcgtcgaagaagggccgcagcggctggttctggttctcctgcttcacgttcccgagcatcccaccactgaacggctgctggcgctcctgctcctgcgccagcgaggcgatggtgacctgcccgagctcccgcggcggctccatgtgggagtgggactgggagtaggaggcgtaggcgccgggcaggaggccggagtccccgctcttcgtcgacagcgtgaacgggggcacgctggacgccagggcggagtgccacgagttgttatctgatggagagtcgatggtgaagccgcccctcgagttgttccccgatgacgctcctgagaagaagctcaactcgccgccgtccggtttagctccgagagggtacctgctgcacaaccaattggttacggataagtatgtacgttgacgatcacaagctgctgctacagataggggatcacgatcaaatactccttcacagaaagttaggactcttaaataatattactttaaaaataaataggaatagagtccgatcctaatacgattccatgcttaaataagcttagttctcaagctgctgctacagatatttacgaactgacagaaacttgtcagtccagcacccttgcttggagtctggtaatggtgccttgcctctacagcaaccagctagacatgggtttgcttggtatgtaagagatgaagtttatatacgggcgataaaaaataaattgataacaagtcagtgtacaaaaaataggaggctaatgagaaaaaaatctgtcagaaatgaagagctacttgttgttcaga

SEQ ID NO: 134130 - DNA, 231 bp, Zea Mays
atggaagagcttagagcacgccgagcccatgaactgatgcgtccagcgcccactggaattagcctgaagcgccagagtttaagagggctcacctccaggccaagaagggtcagcgacgcgtcgacaaaggcacccgactggggcgcaatgatagcacagtggatgggaatcctcgatagtggtgctagccacctcccaccatggcgcgtcgggtgcgctggtccatggtga

SEQ ID NO: 134131 - DNA, 780 bp, Zea Mays
cttcccactccccgcgtatggcgctggcggcgcacctgctcgcgcgagatcctcggatcagctgaccacgagtctcgtggaatcgacctaccgaacgtcgtggggagataaaggacaccgtaccctcactttccctctctacccacccagacgcctcgcgaccagagaagggcggagaaggagagtggagccaccgcgaggaaactccgaagtcgacggcacccaagcctttggtattgcgcccaacgtcctctgcaagaccgaagaagggaggtggtggccgtgccacttggaattcgtcaccagcgccgctctaattactcgtcggagtcacgccctcgccgccaactcaatccgcgccgtgtccagacctcccacagcgtgagcaccggtatgtgatagttttttttggttcatcgcgtagtcagaatggtagatcaccttataattggagtcgtgccgctgtagtttgggcggaatgcctcgccggccttcgcagatccaccgtgggtcactagataccatgggtagattccttaccgcgacgatttggcgtcggaacgacctaattacggtcgctacctcacgtggtgcgagtaggagtagttcatttcggagttcgggcgccgtggcggagcgtggccgccgctccggcgagcctccgtcgtgtggggcggtttggtgcgactgctgtgcggggcgacggggggaagaagttgtggtggctgtcgatccgtagatagacgaatgagattagaagggagatgtaccggttcgact

SEQ ID NO: 134132 - DNA, 104 bp, Zea Mays
ttttttttttttttttgctttgctaataataacccgtatgtgcgggcagatagttccatctcgagagtgagcatggtctattgatcaattgtcttgcatatatc

SEQ ID NO: 134133 - DNA, 114 bp, Zea Mays
acctttttgtagatttgataaagtccatagccttcttgacaacatcatcaggtttgtttgctaggacaagccaaagtcagaccaacaaaatgtcaaaatttggtagaaacccaa

SEQ ID NO: 134134 - DNA, 1298 bp, Zea Mays
caaatcacaatagctgctagcctgttactgcaggcctctctctctctgtcctctccccagcccgcctccgcttctcgccggactccggccgccgcccgcaacctgtgcctagggctcccgcttccgccacacctgcgcactcggccccggagacggctccttgacgagaggcctgtgggaggagttgcagctgggacgcccggtcggacttgcgtctccgcagctgggagatgctcagctcgtcggcgtccaggagggacgccgcgaggagcggcgcggagctccctcggccgcacgcggtggcagggatggcgcggagcggggagctgcccaagggcgccccctccgcgacggcccctgatgcggtgcggtgcgagggatggatggtgcgccacggccggaggaagatcgggaggtccttcttccacacgcgctacttcgtcctcgacaacggcgtgctcgcgtactacaagaagaagccgagggaccacatgatcccactcaagtcaattattattgatggaaattgcagagtggaggatagagggcttaaaacacatcatggtcaaatgatttatttgctatgcatttacaacaagaaagaaaaggagaaccaaatcacgatgggtggatacgatattgaagatgccctagcctggaagaggaagatagagcttctgattgatcagcaacaggatactacgacagctaaaaaccataaagcttttgcttcgttggactttgatatagatcttggaggaccattttcgttctctgaccatgacagcggacccgaagatgaagaagagccccgacccaccttgcttcgcaggacaactatagggaatggccctcctgattctgtacttgattggaccaaagaggctgacagtgggctgtcaaatcagaatgccaccagtcaggcttactccagaaagaactggaggcttcttagatgccagaatggattgcgcatctttgaagaacttgtggaggttgaataccttgcaagaagctatagtcgagcaatgagggctgtaggagtggtggaagcctcatgcgaggccatttttgggcttgtaatgagcatggatgcatcacgatatgaatgggattgtagcttccaatatgggagtttagttgaagaggtcgatggtcatactgcaatactgtaccatcgtctacaactgaactggttttcaatgtaactacattttccttgtatcacttaacagttgttacttgtggcttctttctaacaactcgtatgatgattacatttcacattctctcgagat

SEQ ID NO: 134135 - DNA, 2777 bp, Zea Mays
caaatcacaatagctgctagcctgttactgcaggcctctctctctctgtcctctccccagcccgcctccgcttctcgccggactccggccgccgcccgcaacctgtgcctagggctcccgcttccgccacacctgcgcactcggccccggagacggctccttgacgagaggcctgtgggaggagttgcagctgggacgcccggtcggacttgcgtctccgcagctgggagatgctcagctcgtcggcgtccaggagggacgccgcgaggagcggcgcggagctccctcggccgcacgcggtggcagggatggcgcggagcggggagctgcccaagggcgccccctccgcgacggcccctgatgcggtgcggtgcgagggatggatggtgcgccacggccggaggaagatcgggaggtccttcttccacacgcgctacttcgtcctcgacaacggcgtgctcgcgtactacaagaagaagccgagggaccacatgatcccactcaagtcaattattattgatggaaattgcagagtggaggatagagggcttaaaacacatcatggtcaaatgatttatttgctatgcatttacaacaagaaagaaaaggagaaccaaatcacgatgggtggatacgatattgaagatgccctagcctggaagaggaagatagagcttctgattgatcagcaacaggatactacgacagctaaaaaccataaagcttttgcttcgttggactttgatatagatcttggaggaccattttcgttctctgaccatgacagcggacccgaagatgaagaagagccccgacccaccttgcttcgcaggacaactatagggaatggccctcctgattctgtacttgattggaccaaagaggctgacagtgggctgtcaaatcagaatgccaccagtcaggcttactccagaaagaactggaggcttcttagatgccagaatggattgcgcatctttgaagaacttgtggaggttgaataccttgcaagaagctatagtcgagcaatgagggctgtaggagtggtggaagcctcatgcgaggccatttttgggcttgtaatgagcatggatgcatcacgatatgaatgggattgtagcttccaatatgggagtttagttgaagaggtcgatggtcatactgcaatactgtaccatcgtctacaactgaactggttttcaatgttggtctggccacgagatctttgttatgtacgctattggcggcgcaacgatgatggaagctatgttgtgctgtttcgatctaccgaaaatcagaactgtgggcctcaaccaggatttgtgagagcttctatcgaaagtggaggtttcaagatttcccctctcaaaagcctcaatgggaggccccgcactcaagttcaacaccttatgcagattgatgttaggggatggggcgtgaactatttaccatcattccagtactactctttgctgcagatgctgaactgtgttgctggattgcgtgaatatttttcgcaaacagatgaaattcatacagttccaaggattccggtgatgcataccatggttaatgcggcctcaatgaaaaaggaccaaaaccttcaagaaccagactcgaagaccaaacaagctgataacaaacatttggatatggtagatgaagagtcggaagatgatgatgactatcaagttcctgatgctgatgtggaggaagaacctaccaaatctgacagtgatgctaagaactcagacccaatagatttgtcttggttttcgggcattattcgtcaggatacaaatgagaaaagtcgtaactgttgggcagtgcctgatagcaagatctttaaagttcgtagcaagaactttccacatgacaaatcaaaggtaccagcaggtaagtatctaatggagctcgtagcagttgactggtttaaggacgccaagcgcatggatcatgtcgctaggcggaaaggatctgcggttcaggttgccgctgagaagggaatgttcactttcctggtaaacatacaaattcctggaccaagtcattacagcttggtcctttattttgtctcaaactccttgaagaaaggatcgctgttgcagcgttttgccgatggtgatgatgattttagaaacagcagactgaagcttatcccatctgttccaaaggggtcttggatagtgcggcaaagtgttggaagcacaccttgcttgctggggaaagccgtggactgcagctatttgcgtggtcctgactacttagaagtggatgtagatatcggttcgtccgcggtagccaacggggtcctgggcttggtgtttggcgttgttaccaccttggtagtcgacatggcgtttcttatacaggcaaacacgtacgacgagctcccagagcagctcctaggcgctgcgcggctgtcacacatcgaaccttctgcggccgtgtatcctgtccttgacaacatttcctgaacgggacggacaaatcaacctgtgcagattctttcgttctttccgtccgccccgccacaaaaaggctctcccaatttgttcagccactgcagcattgtgcagctcgatacatttgaggttcagacagacagactgcagcagtccacaagtgccttgtacccttcatacagttttgccatttttttaggtcttttcttttacattttactttactcggtgtagtttgagcttcctacagatattgtaatgcaatagacacatcaaagtgagatatacagatacagcatggttcagaaacaa

SEQ ID NO: 134136 - DNA, 995 bp, Zea Mays
cacaagcacttggcatcaaccctaaaccacccactatacccgcccgcccggctagggttttgccaccatggccgccgccgcggccgccgcccggaggctcctctcccgccgcgcctcctcgaactcgctctccgcgttcctccgccgcggcgctgccccggagcagtcgctgctgcgcccggccgtcgtcgcggcggcctcccgcctcggcttcccgcgcgggatggcgcggcgacctggcggggacggctacggcgcgggccgggaccgcgcgcccacggagatggcgccgctgttccccggctgcgactacgagcactggctcatcgtgatggacaagcccggcggggagggcgccaccaagcagcagatgatcgactgctacatccagaccctcgccaaggtcctcggaagtgaggaggaggcgaagaagaagatctacaacgtctcgtgcgagcgctatttcgggttcgggtgcgagatcgatgaggagacatctaacaagctcgaggggctccctggtgttctctttgtgctaccggattcgtatgttgaccctgagtacaaggactacggagctgaactgcttgtcaacggtgagattgttcagaggcctcctgagaggcagagaagggtcgagcccgtgccacagagggctgcagacaggcctaggtacaatgacaggacccgctacgcacgcaggagggagaaccagcgatgagatgaaaaaagtccacaataacaagttcaggtggtttgagctctgtaattcaaggatagtgtgctttggatgtattgtactctgtaactacagttactcagattgctcaaaggacctggtttggaatgcatgcactgttactagcgcccgtttgcacatgtaaaatttctttatggaagctgcttaattgactatgaaggcctaacattaggtatttcattcattgccaacagcttatccatccctatctctatttgaagttcaatttacgagc

SEQ ID NO: 134137 - DNA, 166 bp, Zea Mays
gggaagctataaattctgatggtattgaagagattggtataagtttggatggcattgaagagattttctccaaaatgaactcctaagtgccctacggatcacatgagctaaagtagaagtgactaaaggttagtcacttaggagctaaatatccaaataagaagag

SEQ ID NO: 134138 - DNA, 207 bp, Zea Mays
atgacgacgaaggaggtgttcatggtcacctccaccacccttgtgaagctagtatgccctccatactctctggcgatgtggtccagcacagtcgtgtttgttggaaaattaacaggacctaagattaatttgataatgcagcataaaacgaaaaacccagatctactaccagatagtatccatgacattaaaacagaacatatctaa

SEQ ID NO: 134139 - DNA, 1404 bp, Zea Mays
agacacatggatatgagcatcgctcgttcgttgcttgccaatcaatagggcccgcaatccacattggcacctgaggcggccacacttatgcctgagcggttttggagcaagaagataacgggagtgcacatcacattgatgtcgtacaactgcgtcttggcgatgccgaccttgaaccgggccacggcggtgaccgtcacggtgaaagcagagctattgacgtcggcgccgttgatgaaggccatggccatcgatccccgagacaccgacactgtagcgtcgacagtcgccacgctcccacgggtctgccacccagccatgagcgacgtcgcgttcttcttcaggtcggccttggtccagatcgacgccggggtcaccaccgtgctgttgagcacgtcgacgaggatggtgttgtaccacactgccgcgcgctggctggtgttgttggcggcgagggtgaagggctcagcaggacggagaagacggtgacgacgaccgccacggcgaggatcgccatcagagctgccaggatgtagtgtttgagattcagggccttcaggccagtccgcggcggagccatgcgtatatgggtgtggcagcagcagcagctctagccagagcgtatggtggttcaaactagtgtgcgagtactgcctgctgccaccagtttataccgtgcatgccactataattttagtatgcaaattatttgtggtcacaatgaccgggggaaagagccctccccccgcccccgaaccagataccaccaaatcaccccaatttccaaatccacaaaaatctgcgcagattcacgcgattcaaccctcagatccgaaaactccatctctcgatctacatcccaaggggcttttctctggcggtcgtggggatttggaggccggtcaggcggagaagactatcgactcctccacgctggtaagtccgcgcaagatcaatccgaagttgcaggggcgtgccagcgaggtcctcgagtgtctagctaaggaggtgctcctgcacggccatggatctcctctaccgcagcagggccagccgggagcggctgaaccttacttttactgcaaagacagagccaatccaggagagcatagagatttcaatgcaagcagtaatggagacggagttgcagagcaagcttcaagtgaagatccacagaagacgattttacagaagagaatcccatcctctgagaagatgaaatggacatttgacagcgccccgtctggtttcaatgccgttcaggtccgaagcgcgttgaagaccccatcccgggagtccgttcggtgtatccatgttcctcggaacatcgaggagctccaacgtccttgggatgattggagcatctatggttcttgggacatcaagggcctctcgatctcttag

SEQ ID NO: 134140 - DNA, 682 bp, Zea Mays
ttgctgtgtcgtcgtcgtaagtatggctgcagccggtggagaaggcgataacggcgagaaatcggggttccggtgcctagacgcggcgaggtacgtggctgccgccgtggtaatcgtgctgattgtcgccgtcgtcgtcaacgccatcaaggtagtcgcccgccccgacaacatctccgtcctagtgctcgggagctccgtgaccactcaccagatgacgactcaggcgggcaaggaccttgtgtccttcgagttcaccctccgcgccgtgaaccccagcggccgcgtccgtctcaacttctacgacatcctggcctacatcttcgacaacagcacgctggcgtcggcgacgacgtcgacgccggccgacgactgcagcatcctcgtcaacacggccaacataactctgaagccgagggcgtacgtggacaacaccaagacagtgatcttgggtgacgaccctaccaaaatcaggcactccttcttccaagcattgaacaagccaggaggcagggtggtcggcgcgacgatgagggtggatggcagcctcgtcagcgagaccgggctgggcttcagcacgagcgccccacggcggatcgtcctttactgccgggacctcatagtcggcccggtggacaaggcggctacggccactcaggagacgacctgcacagcatcgtag

SEQ ID NO: 134141 - DNA, 129 bp, Zea Mays
aaataataggaagaaaagaaaaataaataaacaatattattgccaacaaaagaaatggtattcccattaggattattttgccacttggaaattcgaagttcaaaacaagagtttaaaattcagtttgag

SEQ ID NO: 134142 - DNA, 89 bp, Zea Mays
actaaaggtgatgccgtaaatagacttgctttacagctgacagaagttgcatccatatcgttagtgcatgcagactgtgcaccggttgg

SEQ ID NO: 134143 - DNA, 2830 bp, Zea Mays
atccagcgcacaattaactagcaaatgcaatgcaaacccgctaggacaagcaacggaacaatcgagcttgtagaagtggtaacgacgcgcgcttgcatcgcaatcgcatgcatgcaacgatgaggcacatcatgacgtgcccagacaccattaacagctacgtgggcaacctcacagaatcctacaccgacaagagcaatgagcccaacatggtggcagcctccgtcatgatgttcgccctcgccgggctcttcttcaacctcaacctcttcagcggcatctccgacatcagcgccatcctcgaccctaaagtccggctcttcctctcgtcggcgctctccctcttgctccccgtcatgtcctacctcttctcggaagccaagaataacgccggcaacaccacccgcgtgggcactgtccacgtcgctgacctctcgctgagggccggcatcatccttgcatggatgctcctggtggagctcctgcgcaagaaggtggacgagatccgcatgcgcggctactccggcaccgtccagcgcgccggccgcgtcgtctggctgggaaccctcgtcttcttcaacatcaaaagcaccgggcggaaagcggtgttcgccatcctctggatcctctgcgccacccgggtgctgcagaggatcgccttcaccgagttcgggaagcgctcctacgcccatggcaagaacgcccgcctcatcagctcgtacatggcgcagatcctggaacaggaggagcctcgagcttctgtcgtccatggcgatgctgctgctggggacgaggtgctcaagagctgcaactacattgtcatgggagaggatacgctggtggacattgagcccactgcagatggctacaagctggacgagcaggccagcggctccccaccacgctacgacgacggcggcgttgtcaaatgggtcagagaaaacgatagcatcgtcaccgtcggcaaagtctgggagctcgatgacagtgacaagttcttcacctcccaaaatcagatccagcgcctgaagaggatctgcctctcgttcgctctcttcaagctactgcgccgaaggtttgagcacctgccggcgttgagcaaacaagaagtggacgactccagggacctactcctgaagggcctctacaacaatggcgaaaccagctgctcggccgaagcaatgttccaggtcatgaacgacgaggtggtcttcatcaatgagtactaccactccgttgtccccgtcgtccttgcgagccccttcttcctcgtcctaaactacttcctcctcaacatcgtcgtagccatcctgtgcgtcatgaccgtcatcctctgcgccaacggtgacgtcccctacgcgttccagagcatagccaaagacaactacaccttggattctggggtgtttaagatagccatctgcctcctgcagagagtcggcacgccttcaaacttcttctccgtcgtagacctctccatcaccatcctcctgttcgtcatctacttgtacgaggagatgtgggagttcttcgtcttcctcctctccaactggttcatggtgtccctgctctacaactacatctccaagccacggtggctgaggcacaactccttccggggcaccatgttctcggtgggtttcagcgtcatcatgtggctgaggagcaagatgacccagccgagcctaaccctcaagcagttcaccgtcctcaacgtccgtttgccgctcaagctgccgctcttccccgcgttcaccggcctggcggtggagaagaagccagtgccgaacagtgtgatgagatccgtcatcgactacctggcgaaacgtggacatggtgccccgaactacgactacgacctcgaccgtggcaggtctgcgctgcggaggaacggcgtcttcgacaagctgtcgtgggcgtgcgagagcgacagcgtcgccgagaccatcctcacgtggcacatcgccaccagcatcatggaggtgaaatgccgcccgcggacgacggcgggcagcagcgccgcggaggaaacaacctcctccagcagggtggccgtcaggctgtccaagtactgtgcctacctggtggccttccacccggagctgctgccggagaacccggagaaggtggagcgcgtcttcgagggggccaaggaggagctgaaggggatgatcggctgccgggactactacttctcgccggagcgggagcgggtcaggaagctcatggctgacgggacgacgaccctgacccccggtgatggatgcagcagcagagttgtgcgtgacggcgtgaggctagcagggaagttgctggcgatagacgaccataataataaccagtggcaggtgttggcggacgtgtggacggagctcatcatctacctggcgccgtcgagcgaggaggagcgtgtgatggggcacgaggacgccctggtgcaaggaggcgagttcatcaccgtgctctgggcgctcaccacacacatcggcgtgtccaggccgcagcagccggccagcaggccgccatgttgatctcgtgatctccaaggatgagggccatggccatgcatcccctttggtttccacacgtgttttgcccccttttggtttgcagcttgttgctgcttgatgttgctgctgttcttcttgctgcatgcatgctttggtgtgtttttgttttggcgtgctgtgtggttaattgtttgatagattgatttgatttgttccattacaaaaatttattttgtatcttttttttttgaaaaaaaacgggggcgagcccaccttacattaactgagaattgtcactcaagaagagtgctatggatgat

SEQ ID NO: 134144 - DNA, 1054 bp, Zea Mays
ccatgtcgaagccacctccacacattcaagcacctcctcctcccccgccggccaacaactcagccgccgcaaccgccacatcagccatgggcgcctgcgcaaccaagcccaagacgcttgaggggcaggccccagctgaggccgccgtctccacacccaaggttgcgcccgaggccactccaatctccgttgaggttgcggctgatgaacaggtagctgagaaggtggtggtggaggagccggctgcggcggccgacgttgagcatcagaaggctaatgaggtggtcgctccagaggcggccgtcgccgagcccgatcacaaggaggaggaagccgtggagaagaccgtcgtcgaggaggagaagccagcggcagccgccaatgcagaggaaaaggtcgccaccgccgccgagaccacgacgacggtggaggcgaagaagaaggacgtcgaggaggccaggaaggagaagcaggcgcagcaaagctgaccgactgtccgtgcatgcgcgtgccaactaatataattattggctgatgatacctgatgatcagtgtgtgatcgagcaaggagacgacacttgaattctctacagttggcatagcggcataggtcgggagagacactctcgactggccacaccatgtaacaaactaaccttcttcgatgtctcccattattttcctccacggagttcttctgatgaaacaacatgttctaattgggcttactgtggatgttgtctccattattaattaatcgctttgccatgaattattattcatcaacccaatgtcgttctcctattattcactaccggaatcgcgttatttgccgagtgtctaagacactagacactcggcaaagtctattttacactcggcaaagtaacactcggcaaagaatactcggcaaatattttattggcaaagggttctttgccgagtattttttctcggacactcggcaaagactttgccgagtgtcaaaaaacactcggcaaagaaaaacactcggtaaattaagaatcgaaaaaattaaaaaaacagcaaaaca

SEQ ID NO: 134145 - DNA, 959 bp, Zea Mays
gcgcgtttgggccatgcataactttacgtgggccctgcataactttactttgggccatacggctcgttacaagggcccagtctttggtggaatccgcctgtctctatcttctccatccgtgacacgtccggcagctccatcgagttcgaggactagccgccgccgccgcacctgcacgcacgccaagggacgggagagcaagagggagatccgaggaggtcaaagatgatctaccgcaattggtcgctgctctcgtcgacggtcgtcatctggggcggcgtcgccaccgccggcctggccggtatcttcctcttgggcggcaaggagaaattcagtcagtatctgtgccgcgaaggcgagaggcttaggcagcaggacagagccacgatcggcatgcaaaactagagaggaagcatatgtaagcctgttcgatatataaaggtcagaaaagcttgctctgtatgtcagcagtaataaaacttgtgctggctttcaatttccccagcaaaacttgctctgtatgtcagtagtaataagctgactctggtttgtcgtgggttcagtgcttgtttggcatcaacttgtgcgacatggtacacttctgaataaaggttatttcatttggctggcgtgacttgataaaatttagtactgggtgtactcgtacatgagtgatgtgcaggaattttctcatgactgatatacacccctaacattctaacagtattttctaggcacgattttaaaatgacgggtaaagagggaagaagaaaaaagaccacaggtcaatacaaaaggtagccccctacccccaccccatgaccctttcctcttggcatgcagtttttcatgttgacaactgttcagctattaactgtccaaactcaactcccagacaatttagtgtcccacagttgttgtatgtgaatccattgttttgggctctgagtccattgctt

SEQ ID NO: 134146 - DNA, 1999 bp, Zea Mays
ccgtgttcctggcgacaagccaactcgccaccgcaacaacgcgtcccgggaagcgccgactccaactccatgctcagggcgggcagcacgcaccggtggagccccggcgcccgcgccttctccacggcgccggctacgcggaccaccgtgccgctcgcgcacctggctgatctcccggcgtctctgccagaatcgggctacaccgtcacgccgcctgtccaaccctggccgcgccgcctcacggcgcggtcgctgtcccgtctcctcctcggcgcggccacgcccgagctcgcggtcctcgccctccgccacgcgctcttccacgccgcgcatcctctgccgccctcgctccccgtcttcgccgcggccctctcccgcctctcccacgccgacgctggcgccgcggcccgccacctgccccccgtcctctccctgctccgcgcctcccgcctcccggccttctccgaccgcccgttcctgccgctcctccgcgcgctgcggccgctcccgtccctccgccttttcctctccctcccgtccttcaactcccgtccttccacccgctcctttaacgcgctcctccactctctcgtctccgcgcgccgcctccgcctcgccgccgcgctcttccgcgccgcgccaaccaagttgtacatcacgccgaaccttgtgtcctgcaacatcctgctcaagggccttgttggcatcggtgacctcaactctgcgctgaaggtgctcgacgaaatgattggctgggggatcgtcccagatgtcgtcacttacaccacggttctcactgcctactgtgccaaaggggatctcgagggtgcacagcagctctttgacgatattattgccagcgggcgtaggccagatgctactatgtacacagtgctcatagatgggtactgccaccataggaagttgcaagatgcagcaaggatcatggatgagatgggagctgctggggtgcagccaaatgaggttacatactctgtggtgattgaagcgtgctgcaaggagagaaaatccacagaggcgcgtgatttgacaagggagatgctaggggcaggatatgtaccggacacaccactgtgtgctaaggtggttgatgtgctatgccaggatggaaaggcaggagaggcgaatgagatgtggagacagatggtgaagaagagcgtccctccagataacactgtcgtcagcacattgatctactggttatgtaagaaaggaatggttcaggaggcgaggaagctatttgatgagctcgagagggggttcttgcctagcttgctgacgtataactcgcttattataggattatgtgagaatggagagttacaggaggctggtagggtgtgggatgacatggtcgaacggcggtatgaaccaaatgcaatgacttatgaggccttgatcaagggtttctgcaaaataggcaaatcaaatgaaggttatgcgctatttaaggagatgatgtccagagggtgcactccaagcaagtttctttatcaagcgttggttgatagcctttctaagccaagtcatgatgatactgtttgcactattgttgaagctgcagctttacgtggtcaggatttcttggatggccattcatgggaaatatttatcaaaaaaatggtagatacaaatgaaacttggaaaaagtatctggatttggtgctaaatatgtagtgtagccacaaagaatacagactatagctgtcatgtggggccggtcctacacaaggcggcggcgggcgggcgcacgacatgcacagagctgtggagcgcgcatagatcaggaaggagtaggtattagtggataaattacaaagataagatctaattggttagtttctatatttagtccttaagtgtaggactcaggggcggatctacgagaggggctgtcgggactgcagctccggttgtctcccataacacctatgttatgacgtgttctaataatatatacttcatctatcttaaaata

SEQ ID NO: 134147 - DNA, 2406 bp, Zea Mays
atgaggcagccacccactcttcccattagcaaagcgtacatccctccaacaaaccttgagttgagagaggagagaggagacagcaagcgacacaacacagaggtaaccggctcacgcctgtctcggtggccgtgggcaatcatggccactgtgggacagtctggggccctgaggagggtcaccgtgcactacgccaactcgcccacaggcagcacggtggcagaggtgagctttgacgaccttgacgacgagctgctcctgtttgtgctcgccgatcttcttcctggccaggaaggtttacaccagtcgatcttggaaggaacatacaacaaccaggagaaccacatgagaggtgcagcacccagtgcaccatatggttattcacggccagaggagtaccgtgcagagagcagcactgctgcagcagcagcaactggttctaggaattcaggcatggatgaacagatcgcctcggacttcgagtacgccaagcagctgcagcaggagatggaggacctcagcgtcaaagacgaagacgacaacgatatcagctgcgtgccgtctccatctgactctgacgatgagcacgagcatcatgacgaagaggaagaggctgacaggcaggaggacggtgatggtgatgatgatccagacaacatgacttatgagcaaggacaggcacttgtagaatctgtggggactgagtacagaggtctatccgatgagctcatctcctacctgcagccatggaagtacaaggcagtcaaggcttcagggctcttctcccggaaaacaaaccatgaagactgcccgatctgcctgtccactttcagaaaccgggaaaccatgataacgttgccgtgcaggcatcactaccacgcagcttgtgtcaccagatggctcaaggtcaacaagacatgccctgtatgcaaatacgaactgtttggaccttcctaggatccgaccacgtcgacgatggagctgagaggataatgatgatgacgacgacaacgacagatggttgtgtcatctgctctctttttttagcgccaagaaaactggaaatgaaaaagggaaatcaatccgaaaggagaatagaaattaggaagtataggtagaatatctctcttgccagtgactgtgcgatgaattaagcatacctcgtgctatttatgatgaaaaagggaaatgaaaaagggaaatcaatccgaaaggatttttttatatataagaacttccccgtggaatcactagaaacggtgactgttatgacagggaagacggagtcctatcacaggactaaacaacctggcaaccagacaactgtgcactcatcgctctcgttcgctcaagcctcgctcgaaaataccacagccgtatcagtgccaaacacacagggcaatgaaccatagagaatcgattcctaaacattagatcttgtttcttctataatttgatttcatagaaccatgggaaacacacactcacgccgtgccagacaacaggagactataatcgacactcctccatagcatgaaaatgataaccacagcaacatgtcatacgcacacgctaacagctctatagattgcgccgttcccgactcccaagccaaatccaactcgctaccttacataattgtatatggcacgatcatctgaaactgtcaacacaaaaactccagaaagagaagggtggcaaagcttatattgttgcttggcgctttcggtgaaggaactcgatagtagtgtgaggcgtggtgggacatgctcaccacccttgtccggcgccgaacaacccgctctccatcagttcgtttgtgatcaagccgtcgaggtcgaggtcctccagttgatggaaggagtcgtcgaccttcgagttcaccgcaatgccaccggtagcagcagctggactgctgctcaccgacttgaagctgttgtttctgccggggggcatgctggctgtgttgttgatcacattgcttgggccagtaccagctggagcagcacccttcaccgcgccgttatggtcacgggtattactgttgatatgctgtccctgctccccagcagcagcaacgttgggaatagcaactcctggtgcaagaccgccgctcgctttaggtgcatctggaggcagttgctgtgctttcacgtggttattgttcttaacttcctgcagaagctgattaagcacatggtgctggtactgtgggttaacaccaccaaagccctggaaattgctctgctgcggcataggctgctgctgctgaatcgccgcagggtgttggaactgcacttggttaggtccacggaaggatctggctgcttccagctgtatgccactgtgcattgctgtaggacctttgaagacactcgatgcctcctgctgcagcaagactggatt

SEQ ID NO: 134148 - DNA, 572 bp, Zea Mays
aacgtaaaacacatcgacaggaccatttattatgtaacaaccaaaaggcaacacatggttcagatctcaaaaataagaaacctgtcatttcatatccgtgaacccataaatgatatacaaaatacgataatgagcgacacaatgatggtcaggatgttaaaaagatccatcattcatgtcgcacacatcaatcaagaacgatgtcataaatataacaaagatggcagatgccatgccataaatcatgtcaatatatgtgcatgttgaaccaataacagaaaacacaattgaaaaaacaaaatcatcagaacacttggcttctgctataaaaatgcttcttatgcttctttgtagcctatacatagttcctccatatgcttttatgattcccgaaagaaataggataagtgagatgaaaatgaaagaatacagtccaaaactttagtaacttacttctttatcctctaacatttctttagaacaattattatacatttctagtaccacaatcgagccatacaaaaattttaaagcccaatgttttcctgtttaccccatgaaaaaggaagaac

SEQ ID NO: 134149 - DNA, 1078 bp, Zea Mays
agcagaggtgcacttcggcctaggagcaccgagcacaggagagagccaagaagagaggcggacggagggaggcgccgtcgaccgaggagatggcgtcggggtcggactcgcggacggcggcggacccgtcgtacccgccgttccctctcctggagcaggacgacgagggcggaggccacgttcacgagctgggcctcggcgcggcccaggcggcgtcctacctcgcggagcgcgacgggttcctgcgggtgtaccgctacccgcggtgccccgagcccgggcgcctcggcatggaggcccacaccgacagctccgtgctctccgtcatcaaccaagaggagggcgccggcggcctgcaggtgctccacggcggcgcgtggcgcgacgtcgcgccggccgcgggagccagcacgctgctcgtcaacctgggcgacatggcgcgggccatcagcggcgacgcgtaccgcagcgtgcggcaccgggtggcggccagccaggcggcggagaggctctcgctctgctacttcgccttcccgcgggacgatgccgtcatcacctgcggcgccggcaggtataggcccttcacctacgctgagttccgggagcaggtgcaggccgacatcaaggccacaggatccaaggtcggcctcgagcgcttccttcttcaccactaaaaattccatcgagacgaagctacggtgggaagccacgtacgggatccaagctcggcctcgagtgcttccatcgagattctgagacgtttttttttcagacttccactcggggagcaacggacacaaaatctggtgtaatttgcaagctgctcctgatctttttttgtttcttcttctttttcctcttataaacaatgttttttctttctttctttcttttttcttgtctactttgtaaaactcgcattagtttttaaatatatagtttactgtaggggctactccggttccaaaaaaaagtttgaagaagatgagcaactccaagactagatatatgattctgtaaaagtaaatttagctaatctctactactcttaagaagataccgtaggagtccacagtag

SEQ ID NO: 134150 - DNA, 1557 bp, Zea Mays
ggttcccgcatccgcatccacctcgcccgcccgccccgcagccactgccttcctgcctgccattatttcttcctcctcctcgctgtccatccgtccgtcggtctcctctgcccgcccgcctgccatcattttcgccccgcccaagctgggagcagggaggcggtaagcagcatgctgggagcgagcgccagcaggggcaggaaggcggcgccgccatcagtgaagctgggggcggcgaaggaggcgccggcgaccgtggccgcagccgcctccggcggcaaggtgtcggcggaggaggtgtgggaggtgcggcccggcgggatgctggtgcagaagcggggcggggcggccgacgacgagccgtctcccggcgtcaagccggtgcgcaccatccgggtcaaggccaagcatgccggcgtcacgcacgagatctacgtcagctccgaggcctccttcggggagctgaagaagctggtggccgccaagacggggctgcacccggacgaccagaaggtgctgtacaaggacaaggagcgcgactccaaggcgttcctggacgtggccggcgtcaaggaccgctccaaggtggtggtcgtggaggacccggaagcccgcgcgcgccgcctcatcgaggagcgccgcaacggccacctccagaaggccgccagcgccgtcgccgcggtcaccgccgaggtcgacaagctcgcccccaaggtggcggcgctggacgcgtcggtgcgcaagggggagaaggtcgcggagaaggacgtggtgcaggtgacagagcttctcatgaacgagctgctcaggctcgacgccgtggtcgccgacggcgacgtcaaggcgcagaggcggatgcaggtgaagcgcgtccagaagtacgtggagacgctggacgcggtggcggccaggaacgccgccaccgtccgcaagtccggcgccaagccagcaccgccgccgccgcagcagcagcagcagcaagcgaggcaggcgcggtgggagatgctggacctgctgtcgtcgctgccgtccacgtcctcggcctcgtcgacgacaaccgtgagctccacggcgtcctccggcgcgccgccgaccaaccgcctggactggatgctgttctgacgggcgggcgagtgcagggcagcccggcgccggccggccaccggcgcgaaagcagtcaagccggatgtgggggaaagcggaaggcggagtgcagaactgcagatgcgatgcttgtgtgccaagaattgcaccccctgcagaaatctggtggcctccatgattgggcacgggctacctagcttggccacaaactgcattgctctgcatggtaccgtaccagccaactcgattcatcaaccatgtcttcttctttcattccttttgagattctttcctttttcctcatcttcttgttcatgaaacgtttgaggttctttttgtgtgcatactattcagatagacagagagaaagagagagagggttggttacttggtttagggcaaatcaaatgtattcagattgggaataaacacactactggagtcaaaaaaaaa

SEQ ID NO: 134151 - DNA, 1169 bp, Zea Mays
gcctggtgtatagtaataggatacggcctccattatttataaagaggagagagaataaaaaaagagacgtccttggcgtggtgtcctcgtcctcgtgcccatctctgtcccaatcaaactgattgatccgtcgcccgcagggccacagcagccgcggcgaggtcgtccgtcggattcggaggctcagttattactgaaaagataatacagtacctatggcttctctggacgccgtgcgaggagacctcgccctgctgattctgtacctgaacaaggccgaggcgcgggacaagatctgccgagcgatccagtacgggtccaagttcatcagcaacggggagccagggcctgcgcagaacgtcgacaagtccaccagcctggcccggaaagtgttccggctctgtaagttcgtcaacgacctgcacgctttgatcagccctcctgccaaggggactccgctcccgctgatcctactcgggaagtccaagaacgcgatgctgtcgactttcctcttcctggaccagatcgtgtgggcggggaggacaggaatatacaagaacaaggagcgggcggagtttctcgggaggatagcgttctactgcttcctcggctccaacacctgcacggccatcatcgagctagccgagctgcaacggctgtccacgtcgatgaagaagctggagaaggagctgaagcaccaagagctgtacaagaacgagcagtaccgcatgaagctgcacaagtcgaacgagcggctgctggcgctcgtcaagtcgagcctggacatcgtggtggccgtggggctcctgcagctggccccgaagaaggtgaccccccgcgtcacgggcgcgtttggcttcgccagctccctcatcgcttgctaccaggtaggcatgttggtgcaaccggttgtcgtcctgggtttgtggggtctcatgccttttgtcgccttggcagctgcttccaagcccaccagcaaagcagagcaagtgaggactcccactccaagcactgtttaccaggaaaataatcccccccggataggtttgatttggttgccacatccccttgtatggcagactagactaatatatgtaatcatcatcataataattgataaaccatcccactatggataggtttggtcactccaaacactgtttttttta

SEQ ID NO: 134152 - DNA, 1136 bp, Zea Mays
gacgtccttggcgtggtgtcctcgtcctcgtgcccatctctgtcccaatcaaactgattgatccgtcgcccgcagggccacagcagccgcggcgaggtcgtccgtcggattcggaggctcagttattactgaaaagataatacagtacctatggcttctctggacgccgtgcgaggagacctcgccctgctgattctgtacctgaacaaggccgaggcgcgggacaagatctgccgagcgatccagtacgggtccaagttcatcagcaacggggagccagggcctgcgcagaacgtcgacaagtccaccagcctggcccggaaagtgttccggctctgtaagttcgtcaacgacctgcacgctttgatcagccctcctgccaaggggactccgctcccgctgatcctactcgggaagtccaagaacgcgatgctgtcgactttcctcttcctggaccagatcgtgtgggcggggaggacaggaatatacaagaacaaggagcgggcggagtttctcgggaggatagcgttctactgcttcctcggctccaacacctgcacggccatcatcgaggtgcgtgcgtgcgtctctgtctcgagtgccgtattatctcgtgtttccgcacctgattcatgctccaagccgtgtagctagccgagctgcaacggctgtccacgtcgatgaagaagctggagaaggagctgaagcaccaagagctgtacaagaacgagcagtaccgcatgaagctgcacaagtcgaacgagcggctgctggcgctcgtcaagtcgagcctggacatcgtggtggccgtggggctcctgcagctggccccgaagaaggtgaccccccgcgtcacgggcgcgtttggcttcgccagctccctcatcgcttgctaccagctgcttccaagcccaccagcaaagcagagcaagtgaggactcccactccaagcactgtttaccaggaaaataatcccccccggataggtttgatttggttgccacatccccttgtatggcagactagactaatatatgtaatcatcatcataataattgataaaccatcccactatggataggtttggtcactccaaacactgttttttttattcatcgctaggagcaactccaaaa

SEQ ID NO: 134153 - DNA, 1299 bp, Zea Mays
gacgtccttggcgtggtgtcctcgtcctcgtgcccatctctgtcccaatcaaactgattgatccgtcgcccgcagggccacagcagccgcggcgaggtcgtccgtcggattcggaggctcaggcggaactgcaccccatggaaatggaatcgagagaacttacacgctgcttcgcaaccgtattatgcagttattactgaaaagataatacagtacctatggcttctctggacgccgtgcgaggagacctcgccctgctgattctgtacctgaacaaggccgaggcgcgggacaagatctgccgagcgatccagtacgggtccaagttcatcagcaacggggagccagggcctgcgcagaacgtcgacaagtccaccagcctggcccggaaagtgttccggctctgtaagttcgtcaacgacctgcacgctttgatcagccctcctgccaaggggactccgctcccgctgatcctactcgggaagtccaagaacgcgatgctgtcgactttcctcttcctggaccagatcgtgtgggcggggaggacaggaatatacaagaacaaggagcgggcggagtttctcgggaggatagcgttctactgcttcctcggctccaacacctgcacggccatcatcgagctagccgagctgcaacggctgtccacgtcgatgaagaagctggagaaggagctgaagcaccaagagctgtacaagaacgagcagtaccgcatgaagctgcacaagtcgaacgagcggctgctggcgctcgtcaagtcgagcctggacatcgtggtggccgtggggctcctgcagctggccccgaagaaggtgaccccccgcgtcacgggcgcgtttggcttcgccagctccctcatcgcttgctaccagctgcttccaagcccaccagcaaagcagagcaagtgaggactcccactccaagcactgtttaccaggaaaataatcccccccggataggtttgatttggttgccacatccccttgtatggcagactagactaatatatgtaatcatcatcataataattgataaaccatcccactatggataggtttggtcactccaaacactgttttttttattcatcgctaggagcaactccaaaagtgtgctaaggcccgtttgatttgagggactaaaaattagttcctctattttaatctcatttagtccttaaattgacaaacggtgagactaaaacaaagattaaactgttttagtctctagtcctttaagggagactaaaagtgactaaaccatattaattctatttttgcc

SEQ ID NO: 134154 - DNA, 1231 bp, Zea Mays
gacgtccttggcgtggtgtcctcgtcctcgtgcccatctctgtcccaatcaaactgattgatccgtcgcccgcagggccacagcagccgcggcgaggtcgtccgtcggattcggaggctcagttattactgaaaagataatacagtacctatggcttctctggacgccgtgcgaggagacctcgccctgctgattctgtacctgaacaaggccgaggcgcgggacaagatctgccgagcgatccagtacgggtccaagttcatcagcaacggggagccagggcctgcgcagaacgtcgacaagtccaccagcctggcccggaaagtgttccggctctgtaagttcgtcaacgacctgcacgctttgatcagccctcctgccaaggggactccgctcccgctgatcctactcgggaagtccaagaacgcgatgctgtcgactttcctcttcctggaccagatcgtgtgggcggggaggacaggaatatacaagaacaaggagcgggcggagtttctcgggaggatagcgttctactgcttcctcggctccaacacctgcacggccatcatcgagctagccgagctgcaacggctgtccacgtcgatgaagaagctggagaaggagctgaagcaccaagagctgtacaagaacgagcagtaccgcatgaagctgcacaagtcgaacgagcggctgctggcgctcgtcaagtcgagcctggacatcgtggtggccgtggggctcctgcagctggccccgaagaaggtgaccccccgcgtcacgggcgcgtttggcttcgccagctccctcatcgcttgctaccagctgcttccaagcccaccagcaaagcagagcaagtgaggactcccactccaagcactgtttaccaggaaaataatcccccccggataggtttgatttggttgccacatccccttgtatggcagactagactaatatatgtaatcatcatcataataattgataaaccatcccactatggataggtttggtcactccaaacactgttttttttattcatcgctaggagcaactccaaaagtgtgctaaggcccgtttgatttgagggactaaaaattagttcctctattttaatctcatttagtccttaaattgacaaacggtgagactaaaacaaagattaaactgttttagtctctagtcctttaagggagactaaaagtgactaaaccatattaattctatttttgcc

SEQ ID NO: 134155 - DNA, 1564 bp, Zea Mays
ctcacgcaccttctgttggctcctcctccgtcctcccccaagcgccccctctcggccggtcgaatttccggggagggggattggggggatttgatatatatcgagagagtagtgtttgtcccccgattcctcatgcgtggcgcccaaaacctagagatccttttttgcgcccgaaaccttcctgagctggtccgattcggtgccgttagaggggatctgtgtacctcgccgccggccggcgctgtcgatctggttgtcttccacggttggtttccagacggggactccgccggcgcggcgcggcgcggcgctcacccgcatccgccgccgcttttctaccgcccgcggggctgggtccggctctgacggttgagtctggtggcgcaggcggaactgcaccccatggaaatggaatcgagagaacttacacgctgcttcgcaaccgtattatgcagttattactgaaaagataatacagtacctatggcttctctggacgccgtgcgaggagacctcgccctgctgattctgtacctgaacaaggccgaggcgcgggacaagatctgccgagcgatccagtacgggtccaagttcatcagcaacggggagccagggcctgcgcagaacgtcgacaagtccaccagcctggcccggaaagtgttccggctctgtaagttcgtcaacgacctgcacgctttgatcagccctcctgccaaggggactccgctcccgctgatcctactcgggaagtccaagaacgcgatgctgtcgactttcctcttcctggaccagatcgtgtgggcggggaggacaggaatatacaagaacaaggagcgggcggagtttctcgggaggatagcgttctactgcttcctcggctccaacacctgcacggccatcatcgagctagccgagctgcaacggctgtccacgtcgatgaagaagctggagaaggagctgaagcaccaagagctgtacaagaacgagcagtaccgcatgaagctgcacaagtcgaacgagcggctgctggcgctcgtcaagtcgagcctggacatcgtggtggccgtggggctcctgcagctggccccgaagaaggtgaccccccgcgtcacgggcgcgtttggcttcgccagctccctcatcgcttgctaccagctgcttccaagcccaccagcaaagcagagcaagtgaggactcccactccaagcactgtttaccaggaaaataatcccccccggataggtttgatttggttgccacatccccttgtatggcagactagactaatatatgtaatcatcatcataataattgataaaccatcccactatggataggtttggtcactccaaacactgttttttttattcatcgctaggagcaactccaaaagtgtgctaaggcccgtttgatttgagggactaaaaattagttcctctattttaatctcatttagtccttaaattgacaaacggtgagactaaaacaaagattaaactgttttagtctctagtcctttaagggagactaaaagtgactaaaccatattaattctatttttgcc

SEQ ID NO: 134156 - DNA, 1258 bp, Zea Mays
ctgttggctcctcctccgtcctcccccaagcgccccctctcggccggtcgaatttccggggagggggattggggggatttgatatatatcgagagagtagtgtttgtcccccgattcctcatgcgtggcgcccaaaacctagagatccttttttgcgcccgaaaccttcctgagctggtccgattcggtgccgttagaggggatctgtgtacctcgccgccggccggcgctgtcgatctggttgtcttccacggcggaactgcaccccatggaaatggaatcgagagaacttacacgctgcttcgcaaccgtattatgcagttattactgaaaagataatacagtacctatggcttctctggacgccgtgcgaggagacctcgccctgctgattctgtacctgaacaaggccgaggcgcgggacaagatctgccgagcgatccagtacgggtccaagttcatcagcaacggggagccagggcctgcgcagaacgtcgacaagtccaccagcctggcccggaaagtgttccggctctgtaagttcgtcaacgacctgcacgctttgatcagccctcctgccaaggggactccgctcccgctgatcctactcgggaagtccaagaacgcgatgctgtcgactttcctcttcctggaccagatcgtgtgggcggggaggacaggaatatacaagaacaaggagcgggcggagtttctcgggaggatagcgttctactgcttcctcggctccaacacctgcacggccatcatcgagctagccgagctgcaacggctgtccacgtcgatgaagaagctggagaaggagctgaagcaccaagagctgtacaagaacgagcagtaccgcatgaagctgcacaagtcgaacgagcggctgctggcgctcgtcaagtcgagcctggacatcgtggtggccgtggggctcctgcagctggccccgaagaaggtgaccccccgcgtcacgggcgcgtttggcttcgccagctccctcatcgcttgctaccagctgcttccaagcccaccagcaaagcagagcaagtgaggactcccactccaagcactgtttaccaggaaaataatcccccccggataggtttgatttggttgccacatccccttgtatggcagactagactaatatatgtaatcatcatcataataattgataaaccatcccactatggataggtttggtcactccaaacactgttttttttattcatcgctaggagcaactccaaaa

SEQ ID NO: 134157 - DNA, 727 bp, Zea Mays
ccagaacactcccctttcccctcctctcctagggtttcacagtgacgcttcctcaccaccgccgtcgcagagatgcagtccctcgtgcccttcagtacggcttcgtccgcaaggcctatggcgtccggaccggcgagacgctgtgcccggggatctcgtgcgaggagagcgccatccacaaggtatacgacatcctcgccgcgtagctgctcctcaccaccgtcgtatcctccctcactgtagtgtctcaagcctacgaagcagcctcgctccacctgccgccgttgactggtccaccccttctgtaatccttactgtttcacgctcgctccgcaggctcgctccacccaccaccggtggtcgggggtgatttattcattggagtttactgcatttaggttgctcaagattcagttttgcttagaccatcagataaactctactagcacatactctgacttcagattggacatgagagagagactgcaaatttgtctgatgcaaaaaaatcatcgataagtcaaaccttcagataaagtcagtcatggcattggatcatctaaaaattatatttatgttcaagctaagaaggaggctcatgtcaaagaggcacttcctatatttcttgacataatgtttcatcatgttcttggtgtaatattgtcattgtcatttgttcttgtctttggagagggatcatgtctgggctcacactggggctcatgtc

SEQ ID NO: 134158 - DNA, 1316 bp, Zea Mays
agaacactcccctttcccctcctctcctagggtttcacagtgacgcttcctcaccaccgccgtcgcagagatgcagtccctcgtgcccttcagtacggcttcgtccgcaaggcctatggcgtccggaccggcgagacgctgtgcccggggatctcgtgcgaggagagcgccatccacaaggttgtgcaattctctatagctgtatgagcatttggagcctcgttgctggacaagggggtgatttattcattggagtttactgcatttaggttgctcaagattcagttttgcttagaccatcagataaactctactagcacatactctgacttcagattggacatgagagagagactgcaaatttgtctgatgcaaaaaaatcatcgataagtcaaaccttcagataaagtcagtcatggcattggatcatctaaaaattatatttatgttcaagctaagaaggaggctcatgtcaaagaggtacgtacattctattccttttcgacaaaagttgttgtaggagggacaatctaaaagtattgtgcaagatatagagcatgcactcatcatatctaagtgatcggagtgatattgattagcttattagatggatattggcccagtttatctttcatttttttctatagctgttagaattttactttgctcagttcatactataaataatatgagactcttgttttgtggtccaagtgtttagcgcttagggtgccttggaagtacgctagcttgttgtcatgaagaagtcattcaagttccttccagcacttcctatatttcttgacataatgtttcatcatgttcttggtgtaatattgtcattgtcatttgttcttgtctttggagagggatcatgtctgggctcacactggggctcatgtcgctcggcctcgtcgagctggtgatcctccaatgtagcgacataggcatctcaagagaccattaatattatgaagaggtcgatggaagaaaataacaacctccaactattaaacttcaatcgagaacaagtgcctccagcttatgtctgcttgaccactatatgatctacaaccttatggctactatagaagatagttatagtagctctgaatgtgaagttatacgatcattttcaattatccttaatatttatcactttgagtttaagttataagattggctttggattttaagttaaaggatttgaagatatatgtattgaagttatatgcttctttaatgaatgaaatatttgtgttcaacagattcatacaatattattgttggtgtaacattccatgatgatatgaatt

SEQ ID NO: 134159 - DNA, 1346 bp, Zea Mays
atataataatcatataacatagcggttgttgttgaataattgcgcttaataatgagtttgagcggcaagccttgattttttggtacttcttggttttaaatgttaggttgtgcaattctctatagctgtatgagcatttggagcctcgttgctggacaagggggtgatttattcattggagtttactgcatttaggttgctcaagattcagttttgcttagaccatcagataaactctactagcacatactctgacttcagattggacatgagagagagactgcaaatttgtctgatgcaaaaaaatcatcgataagtcaaaccttcagataaagtcagtcatggcattggatcatctaaaaattatatttatgttcaagctaagaaggaggctcatgtcaaagaggtacgtacattctattccttttcgacaaaagttgttgtaggagggacaatctaaaagtattgtgcaagatatagagcatgcactcatcatatctaagtgatcggagtgatattgattagcttattagatggatattggcccagtttatctttcatttttttctatagctgttagaattttactttgctcagttcatactataaataatatgagactcttgttttgtggtccaagtgtttagcgcttagggtgccttggaagtacgctagcttgttgtcatgaagaagtcattcaagttccttccagtgagttattagttcttatgtatatttctgtaacatgtaattttacaatctttatgcacattggaggtgtattttacgacataattaagcatcataaacaaatatattttagagtagaaagaaggacaatgcactccattatgttttaaacattgacttttatgtttacctcattgcaaccttttcaggcacttcctatatttcttgacataatgtttcatcatgttcttggtgtaatattgtcattgtcatttgttcttgtctttggagagggatcatgtctgggctcacactggggctcatgtcgctcggcctcgtcgagctggtgatcctccaatgtagcgacataggcatctcaagagaccattaatattatgaagaggtcgatggaagaaaataacaacctccaactattaaacttcaatcgagaacaagtgcctccagcttatgtctgcttgaccactatatgatctacaaccttatggctactatagaagatagttatagtagctctgaatgtgaagttatacgatcattttcaattatccttaatatttatcactttgagtttaagttataagattggctttggattttaagttaaaggatttgaagatatatgtattgaagttata

SEQ ID NO: 134160 - DNA, 303 bp, Zea Mays
atggctgcggtgattgccagcactcaaaactgtcgcgttcgtgtgccagcactgatcgtgttcactgccgtgctgctggtgacggcggcggcggcaaccgtggagccggcatcagccacgggctggtccagtgtcactgacagccgcagcggcggttactcggcgttcagcctgcagggcgcaagaaagctactgctgcaggacttgtgcataccgcaagggtatccctgcgcccttgcttacttcggtctcgggtgctgcagtggcgagacctgttatgatgcacagcagatctgcctctag

SEQ ID NO: 134161 - DNA, 2761 bp, Zea Mays
agtcataactcccaagtcccaacccaatcatggcgtcgtccgtccaccaactggaggagcacgacgaggcgggagaggagcacgatcgccatggcatccagctgatcacctctccgctgctgcaaccgtcgtcgcggcgcccgcatggctcggcggaggaaaaggaggctgaagcgggggacgacaacggctctccgatcgagcaggtggcgctgacggtgccggcgtgggacgacccggcgacgccggcgctgacgttccggacgtgggtgctgggcacggcgtcctgcgccgcgctctccttcctcaacgccttcttcgggtaccgcaaggagccgctcaccgtcaccgccgtgtcggcgcaggtcgccgtgctccccgtcggccgcctcatggccgcggcgctgccggagcgcgccttcttccgcggccgcccgtgcgagttcaccctcaacccggggcccttcagcgtgaaggagcatgtcctcatcaccatcttcgccaacgccggcgccggcaccgtgttcgccaagaatcttgtgacctctgtccgcgtcttctacggccagcacatgtccttcctcatcgccctcctcctcatcctcaccagccaggtgatggggttcggttgggcgggagttttccggcggtatctggtggagccggcggcgatgtggtggccctccaacctcgtgcaggtctccctcttcagggcacttcatgagaaggagcgaaggagaaaaggtagcatgacacgcaaccagttcttcacggtggcattcatctgcagtttcgcctactacatcttcccgggctacctgttccagatgctcacctccctctcctggatctgctgggtgtttcccagctctgtgattgcccagcagctcggctcaggcctccatggccttggcatcggtgcagttggactcgactggtcgtccatctcctcctacctcggaagcccccttgctagcccctggtttgccaccgccaacatcgcggctgccttcttcattgtcgtgtacataatcacaccgatcaactactggttcaatgtttacaaggcacgcaacttccccatctactcagatggcctctacacggtggctgggcagaagtacaacatctctagcatcatggactcccatttctacttcgatacagacgcctatgagaagagtgggccactgtacatcagcacgttcttcgcttccagctacggtcttagttttgcatgccttaccgcgacggtttcccacgttctccttttccatggaagtgaaatatggcagctaagcaaatcagctttcgaggataagaagatggacatacataccaagcttatgaggagatacaggcaggtccccgagtggtggttcatctgcatccttgtggctagtgtttcagccaccatgcttacctgcgagtactacattgagcaactgcagcttccttggtggggagtactgcttgcatgtgcccttgccattttctacacccttcctattggaattctcaaagcaacaaccaaccaggctccaggcttgaatgtcatcacagagtacatcatggggtacctatatcccggacgacccatggcgaacatgtgcttcaaagtatacggctacgttggcccacatcaagcactagagtttttgcaagattttaagttgggccactacatgaagatacccccaagggccatgttcacggctcaggttgtgggcactttgattgcgggctccgtataccttggaacaatatggtggctcctggacacaatacctgatgtgtgcaacacagagcttctcccagcaggcagcccttggacatgcccttacgatcatgtgttctacgatgcatccgtattatggggccttatcggcccacgcagaatatttggtgatttaggcacttactccgctgtgaactggttcttcctgggcggtgccattgctcccctccttgtctggtgtacacacaaggcattcccagctcagaaatggatccggcatgtcaatgcgcctgtactgattggcgcaaccaccttcatgccacctgccactgcagccaactataccacgtggatactcgttgcgtttctgtcaggttacgtggtctataagtaccggcgtaactggtgggagcgacacaattatctgctgtcaggtgcccttgacgccggtttggcgttcatggctgtgttgctctatctatgcctgggactggagaataaaagtttgaactggtggggcaatgatctggacggatgccctcttgcttcatgccccactgcaaagggtataactgtggatggatgtccagtgcataactgagagaggtcaccattcagtatttgagggtagaattacattatctctaaagggacatatgcacagatcactgaaccatacagataattgagaggttcccttattgctgcatccatgcctaggagtggagaacaaaagtttttgctaggacaatggtttggatggatggcttcatgccacgctgcaaagcacattgaacttcacatagatgtctggtgcataattgagagtattctaatcattgccagtactgggggataaaactagattatatcttgatgacaccatcaaagatcaatgtagtctttgccaaattataaaagatctcaactacatgatgaagacacagtcagaagtgtgagtgtatttcagataagaactaaccagattcagattagaactaatcagcaggaatagcagccatt

SEQ ID NO: 134162 - DNA, 550 bp, Zea Mays
catcagcgccgacgacctcgtcctggccttcatcatcagcgtcaagctgctcgcatccctgctccccaccgcaccgagctgctcacgtctctgctccgtcctccctcgtctttgtgcatgagcagctactgtacgccgtcattttcagcggcgtggtcgtgtttctccgccgaccagacacctcatcgtagcgtctcagtcctcctctgcaccagcacagcaagccacagtcatgggacttcgtctcgtccgcaatcaccggcaccagagcacccgcgccctagcttattgcttctgttcccatggccgctggccgagatgctgttcccagctccacgccgatgctcgcatagaaaactctctgtcctcgtcgtttatagtactcaggttctatcgacgtcttcgatctcttgctctggtctccctgttcctcaacgcttgccaggaatttgtaaaatggagacgaaccagtgagcgtcgttaatttttttgtttctgagtcaaattactagctgtgctgatgggtgtttttgtgtgtgagattggagaa

SEQ ID NO: 134163 - DNA, 1901 bp, Zea Mays
gccgcgccaggccagcagctagctaggcaggtagctcttgccaacgccccggccggccggcacctcacattttgtagcgtgatcgcgcgccgccgccacgcctccccatgcaagctactccgatcctagctactggctagctagttgcaactactcgagctaccagctagctaactggccagcagcaggtagtctgctcagggtcggagggtcggccggcgcggcggcggggcgcgcgcgcgcgggaaggcgggaaggcgggaacgcatgggcaacgccctggggtgcgcggggctcggcgagcggctggcggccagcgcgaggaacggcgacgcggcggaggtgcgccgcctgctggaggaaaacccggggctcgcgcgctgcgccgccgtcggcagcagcctcaactcgccgctccacctcgccgccgccaaaggccaccacgagatcgccgcgttgctgctggagaacggagcagaggtgaatgctaggaacctttccggcgagacggcgttgatgcaggcgtgccggttcggccactgggaggtggttcagacgctgctggttttcggatgcaacgtgtccaaggtggacagcctgagcggccagacggcgctgcacctggcggcagcgggaggccacgccacgtgcgtgcgcctgctgctggccggcgccggcgccggcaggaacaagctcgtgaacagggcggccagcggcggcgtgacggcgctgcacctggcggcgctgcacgggcacgcggactgcgtgcacctgctggtggacgagcgcgccgacgtcgccgcgccgacgctgccctgcacggcggcccccatggcggccatcggcgccgggagcgcgccgctgcactacgccgccgcgggcggcgaggtcaggtgctgccagatcctcgtggcgcgcggggccgacagggccgccgccaactgcaacgggtggatcccgttggacgtggccaggacgtggggctgccagtggctggagcacgtcctgtcccccgagtctcacctgcgcatccccaggttcccgccctccgcctacctctcgtcgccgctcgccagcgcgctcgccctcgcaagggactgccgcctgcttctcaacacggcgcagctggacagcggcggcgccgacgcctgcgcggtctgcctggaaagaccctgtgacgtcgcagccgaagtgtgcgggcacgagctgtgcgccaagtgcgcgctggacctgtgctctgtggtcaagtcctacgacgtgcccgggatcgccggcaccatcccctgcccgctgtgccggagcgccatcgcctcgttcaggatgcgggccgcggcggacgagcccgagcctgacgtgaacgacgccggcggtggccgccgcggtgccggcgaccgccaggcggcgccgtccagcccggagaagaaacggagcacggactcggaacaggatgtcgtcctccccttctactgcgcgcctctcgccgtcccgtcttgaccggccggcgatgcaggcaggctgcatttgcgggacgcagaggagctactgccgactgcatcatcagtggaaacgtcaaatgtgcatagacagaagaggcagacagattgtttgctgatgcttgccgacggcattgctggattttaatttgttttttattatggttctgcacatggcactagctggtgtaatgtaacatgttggtttattgtggaaagaaaggaggaacattcttttgctgtaaaaaataatgggggttggtttcggggtgttttggctcatgatcctttgcactctgtctcaagagcattattcacatgtacgtatcataagcattctgtctgaaaggaggaacattctttttgctgcaataaaagagaatggggttggtttcagccctttttttt

SEQ ID NO: 134164 - DNA, 599 bp, Zea Mays
gaatttacgatccagaagcacgcacgtgacgtggctgtcagcaagtagcagcttctgtcgcgtctccccctccctgaccgagcgatccagcgagagggagcgagtagcagccgcagccggaggagctcgccgaggccgccgaagacgaccatggggttctgggcgacgacgctcatcttcgtcctcgccggcgtcgccgcatccctcttcacgctcctctgctgcaaccgcgggccctccacaaacctgttccatttgaccttggtgactacagctgtaatttgttgctggatgatgtatgcaatcgtctaccttgctcagatgaagccattgatcaaccccattctgagcggagagtgagcgctgcatctgtattgaacagaacgaaagcgagacctgctgtaccattgttcagtccgtgaactttatattcattttggccccacctgatgaaataaataaataaactgccatgatttttttggtgccactcttcacccgtgattagtgtatgcaattgcatgatatacgcagtaataacatataaatatctatgtatcgatgatgtgcttgaattggggtgtctcgtgcgcgttccc

SEQ ID NO: 134165 - DNA, 405 bp, Zea Mays
tcatagagttgtctctggctatcaaggtcactgacatctcaaaagttactgacagttgggcgcgttgtgaatatttaggccgccgcttgcataatatgatgtcatgaatagcaaaagcatatttaggtatgcaatcgtctaccttgctcagatgaagccattgatcaaccccattctgagcggagagtgagcgctgcatctgtattgaacagaacgaaagcgagacctgctgtaccattgttcagtccgtgaactttatattcattttggccccacctgatgaaataaataaataaactgccatgatttttttggtgccactcttcacccgtgattagtgtatgcaattgcatgatatacgcagtaataacatataaatatctatgtatcgatgatgtgcttgaa

SEQ ID NO: 134166 - DNA, 81 bp, Zea Mays
gattataggttttaatatggttgcacgatacctttatgctgactcatctactgtcagctgcatgtgcatcacaagttgatg

SEQ ID NO: 134167 - DNA, 2424 bp, Zea Mays
tatcttttttctttgtctgtttgtgctgctaagtgctaacacagtgctactttcattggcagattagtattttaaactcaagatggttaacttcgggaagaaattgatggctgatcaaattccagaatggaaaggatattatatcaattacaagttgatgaagaagaaagttaaacagtatggccagcagctccagcagggcgagaaagatcgtcgccgggttctgaaggatttctcgaagatgcttgatgatcagatagagaagattgtgctgtttctgttggaacagcaaggaatgttggcaagcaggattgaggagttaggaaagcaaagggcaatactacaagaccagccagatatatctggtattgctgagttacgagaagcttatagggaagttggtattgacctcatcaaactccttaaattcgttgatcttaatgcaactggcattcggaaaattttgaagaagtttgacaagcgtttcggctatagatttactgattactatgtgacaagtagatcaaatcacccgtactctcagctgcaacaggtctttaagcatgtgggtgtaggagctgttgtaggagctttgtcacgtaaccttgctgaacttcaagaacgtcaaggaagctacttatctatttatgatcagccatcttctgctcttaaggaccccatcattgatatgataaactcctcagttgataagttgacaaggtcaactaattttcttcgctttttggggcaacatgccttgattgtggatgaggagtctcctagtactgcaggagaggaagaaatagaagatcagaaataccatttcatgtcccttatgctgaacctggtgaacacatttctttacatggtcaacacatacatcattgtgccaactgcagatgactattcagtaagccttggggcagcttctactgtttgtggtgtggtcattggttcaatggctgttgcacaaatattttcctctgtttacttcagtgcatggtccaacaagtcatatttcaaaccgcttgttttcagtagcattgttttgttcttggggaatgtatgctatgcaatggcatatgatatgaagtccctaacagtccttattatcggccgtttactctgtgggatgggttctgcaagagctgtcaaccgtcggtacattagtgattgtgtccctgcaagaatacgcatgcaagcttcggcaggattcgttagcgcaagtgcacttggcatggcctgtgggccagcgctagctggtttacttcaatggaaattcaagatctacatggttactttcaatcaatcgactctacctggttgggtgatggcagttgcgtggctattgtatttgatttggctatgggtctcattcaaagaaccgaaccgtgctactgaggtgaatgaagccccacaaaatcctgcttctggacaaacggttgatattggacaagtagagaatggacttgctcagcctctgctcatggattccgtagataaacaaaatgaagatgaagatgaagaagttgatgaaagtgaagaagctgcagatgattcacgcaagcctgcaacatcaattggctcagcatacagactgcttactccatcagtaaaggtccagttgttgatatacttcatgctgaaatacgcaatggagattttgctttcagagtctagtgttatcactaatcactatttcagttggaacacaagcgcagtggcaatttttctagcaatccttgggttgacggtgcttcctgttaatgctgttgttggaacatacatcagcaatatgtttgaggacaggcaactcctcatggtctctcaaattacgttgctagtaggcattatcttcagcttcaaggttacgagtacatactctgttgtccagtatgttgtctcagcacttgtcacatttgtttctgcagaagttcttgaaggtgtgaacctttccctcctatcaagcgtgatgtcatctcgcctctcccgtggcacatacaacggtggcctcctctcgacggaggccgggaccctggcgagggtggtcgctgactgcaccatcactgcggcggggtacctgggcgtggggaagcttctcaacgtcaccctgctaccatccctggtgatatgtgttgcgtccattgcctgcaccttcctgacgtataactcgcttttctgatggagcttcacaatgtatttgtgtcatcatgattcgttccatattagcgcaaatcaaggcagctgggagaccgccattgccattgcccgaaggggctattgtattactattattatatgttcgtcgatttaattgctgtaaattgattgataaaatgatggtagctactgaacctggtcttgccgtgcaaaattttgaccgactctatccttgtcatgaatacatgctgtccatattatggc

SEQ ID NO: 134168 - DNA, 827 bp, Zea Mays
gccggcacagagggcctcgcacagtcgcactctttattatagccacggccggccggtggacgacagcaccacaccacctccaactacccgagaccatcgacgagcatcttcctgcatctgcaatggctgccgctaccgtgtccgtcccccgcatcaagctgggctcccaggggctagaggtctccgcgcagggcctcggctgcatgggcatgtccgccttctacggtccgcccaaacccgagcctgacatgatcaagctcatccaccacgccgtcgccgccggggtcaccctccttgacacctccgacatgtacggcccgcacaccaacgagatcctgctaggcaaggcgcttcaaggcggtgtaaaggagaaggtcgagctggccaccaagtttgccgtctccttcgccgacggcaagcgcgagatccgcggtgacccggcgtatgtacgggcagcctgcgaggccagcctcaagcggctcggcatcgactgcatcgacctctactaccagcaccgcatcgacaagaaggtgcccatcgaggtcacggtgagcgcggtgtaccttctccatttgattcctttgtttggtagatgtggctgtcacctgcgcgtggtcgatgtgaacatacaagtggaagctggaaatgccggccggggtattcttgcacgtcagtgagtgatggtggttggtggagacaggtttgttggaggttggtgtctacaacatacgagtggtctgtggttataataataacatacgggcccttgcgtaaataattggcaaagatgtcatgctggcatataatgcaagatttcacttctataa

SEQ ID NO: 134169 - DNA, 1162 bp, Zea Mays
gccggcacagagggcctcgcacagtcgcactctttattatagccacggccggccggtggacgacagcaccacaccacctccaactacccgagaccatcgacgagcatcttcctgcatctgcaatggctgccgctaccgtgtccgtcccccgcatcaagctgggctcccaggggctagaggtctccgcgcagggcctcggctgcatgggcatgtccgccttctacggtccgcccaaacccgagcctgacatgatcaagctcatccaccacgccgtcgccgccggggtcaccctccttgacacctccgacatgtacggcccgcacaccaacgagatcctgctaggcaaggcgcttcaaggcggtgtaaaggagaaggtcgagctggccaccaagtttgccgtctccttcgccgacggcaagcgcgagatccgcggtgacccggcgtatgtacgggcagcctgcgaggccagcctcaagcggctcggcatcgactgcatcgacctctactaccagcaccgcatcgacaagaaggtgcccatcgaggtcacgattggtgaactcaagaagctagtggaagaaggaaaggttaagtacattgggttatccgaagcatctgcatcaacaatccgaagagctcacgcagtccatcctatcactgcagtacagcttgaatggtcattatggtctagagatgcggaagaagatataattcccacttgcagagaacttggaattggaattgtagcttacagtccactaggcagagggtttttttgtagtggagcaaaactagttgactcactgtcagagcaggacttccgcaagcatatgcctagacttcaaccagagaatattgtcaagaatgctaagatattcgagcatgtgaatgcaatggcagctaaaaaaggatgcacaccatcacagctagcattggcatgggttcaccatcaggaaacgatgtttgccccatacctggaacaacaaaaatcgagaacttcaaccagaacgtgggggcgctttctgtgaagttgacaccagatgagatggccgaactcgagtcctgtgctgctgcaggtgaaatcttgggtgaccgttatcctcaaatggccaacacctggaaggactctgagaccccgccattgtcttcttggaaatctgagtag

SEQ ID NO: 134170 - DNA, 1737 bp, Zea Mays
gccggcacagagggcctcgcacagtcgcactctttattatagccacggccggccggtggacgacagcaccacaccacctccaactacccgagaccatcgacgagcatcttcctgcatctgcaatggctgccgctaccgtgtccgtcccccgcatcaagctgggctcccaggggctagaggtctccgcgcagggcctcggctgcatgggcatgtccgccttctacggtccgcccaaacccgagcctgacatgatcaagctcatccaccacgccgtcgccgccggggtcaccctccttgacacctccgacatgtacggcccgcacaccaacgagatcctgctaggcaaggcgcttcaaggcggtgtaaaggagaaggtcgagctggccaccaagtttgccgtctccttcgccgacggcaagcgcgagatccgcggtgacccggcgtatgtacgggcagcctgcgaggccagcctcaagcggctcggcatcgactgcatcgacctctactaccagcaccgcatcgacaagaaggtgcccatcgaggtcacgtctgcagtagaggggtataacctcaccggagaagacaacggactggggctacgaactacgtagccggggtccgaccagttagggattcggcgcccttgacattaaacttttggattgaattggttagtgtgtccactctaacaccatgaaccatttccttttagatagttgagttggtcttctttttttcctgttgctagattggtgaactcaagaagctagtggaagaaggaaaggttaagtacattgggttatccgaagcatctgcatcaacaatccgaagagctcacgcagtccatcctatcactgcagtacagcttgaatggtcattatggtctagagatgcggaagaagatataattcccacttgcagagaacttggaattggaattgtagcttacagtccactaggcagagggtttttttgtagtggagcaaaactagttgactcactgtcagagcaggacttccgcaagcatatgcctagacttcaaccagagaatattgtcaagaatgctaagatattcgagcatgtgaatgcaatggcagctaaaaaaggatgcacaccatcacagctagcattggcatgggttcaccatcaggaaacgatgtttgccccatacctggaacaacaaaaatcgagaacttcaaccagaacgtgggggcgctttctgtgaagttgacaccagatgagatggccgaactcgagtcctgtgctgctgcaggtgaaatcttgggtgaccgttatcctcaaatggccaacacctggaaggactctgagaccccgccattgtcttcttggaaatctgagtagccaatctggtgtctcttcaattctgccaccgtcacattggtgtatctccaaattgtcggactgcagaagatactcaggtgcactttgcaaaagcgtccatatgatgtgcttgccttttgcaagctatgatgtttggtacttggtgtgtattgcatgcctcaatttgtatcaagagtatttacccatgagtatagcttgaaggttaaaaccactggttcgacgaataaccatatgcatttgtatcgagagtatttaccatgagtagcaaactgaattttgtaataatagtcaaaagtgtgattgtaaaatgtacttagggaatgtggtacgctatattagcgtgcaaacataagtatagccagttaagcccctcca

SEQ ID NO: 134171 - DNA, 1261 bp, Zea Mays
gccggcacagagggcctcgcacagtcgcactctttattatagccacggccggccggtggacgacagcaccacaccacctccaactacccgagaccatcgacgagcatcttcctgcatctgcaatggctgccgctaccgtgtccgtcccccgcatcaagctgggctcccaggggctagaggtctccgcgcagggcctcggctgcatgggcatgtccgccttctacggtccgcccaaacccgagcctgacatgatcaagctcatccaccacgccgtcgccgccggggtcaccctccttgacacctccgacatgtacggcccgcacaccaacgagatcctgctaggcaaggcgcttcaaggcggtgtaaaggagaaggtcgagctggccaccaagtttgccgtctccttcgccgacggcaagcgcgagatccgcggtgacccggcgtatgtacgggcagcctgcgaggccagcctcaagcggctcggcatcgactgcatcgacctctactaccagcaccgcatcgacaagaaggtgcccatcgaggtcacgcatatgcctagacttcaaccagagaatattgtcaagaatgctaagatattcgagcatgtgaatgcaatggcagctaaaaaaggatgcacaccatcacagctagcattggcatgggttcaccatcaggaaacgatgtttgccccatacctggaacaacaaaaatcgagaacttcaaccagaacgtgggggcgctttctgtgaagttgacaccagatgagatggccgaactcgagtcctgtgctgctgcaggtgaaatcttgggtgaccgttatcctcaaatggccaacacctggaaggactctgagaccccgccattgtcttcttggaaatctgagtagccaatctggtgtctcttcaattctgccaccgtcacattggtgtatctccaaattgtcggactgcagaagatactcaggtgcactttgcaaaagcgtccatatgatgtgcttgccttttgcaagctatgatgtttggtacttggtgtgtattgcatgcctcaatttgtatcaagagtatttacccatgagtatagcttgaaggttaaaaccactggttcgacgaataaccatatgcatttgtatcgagagtatttaccatgagtagcaaactgaattttgtaataatagtcaaaagtgtgattgtaaaatgtacttagggaatgtggtacgctatattagcgtgcaaacataagtatagccagttaagcccctcca

SEQ ID NO: 134172 - DNA, 1537 bp, Zea Mays
gccggcacagagggcctcgcacagtcgcactctttattatagccacggccggccggtggacgacagcaccacaccacctccaactacccgagaccatcgacgagcatcttcctgcatctgcaatggctgccgctaccgtgtccgtcccccgcatcaagctgggctcccaggggctagaggtctccgcgcagggcctcggctgcatgggcatgtccgccttctacggtccgcccaaacccgagcctgacatgatcaagctcatccaccacgccgtcgccgccggggtcaccctccttgacacctccgacatgtacggcccgcacaccaacgagatcctgctaggcaaggcgcttcaaggcggtgtaaaggagaaggtcgagctggccaccaagtttgccgtctccttcgccgacggcaagcgcgagatccgcggtgacccggcgtatgtacgggcagcctgcgaggccagcctcaagcggctcggcatcgactgcatcgacctctactaccagcaccgcatcgacaagaaggtgcccatcgaggtcacgattggtgaactcaagaagctagtggaagaaggaaaggttaagtacattgggttatccgaagcatctgcatcaacaatccgaagagctcacgcagtccatcctatcactgcagtacagcttgaatggtcattatggtctagagatgcggaagaagatataattcccacttgcagagaacttggaattggaattgtagcttacagtccactaggcagagggtttttttgtagtggagcaaaactagttgactcactgtcagagcaggacttccgcaagcatatgcctagacttcaaccagagaatattgtcaagaatgctaagatattcgagcatgtgaatgcaatggcagctaaaaaaggatgcacaccatcacagctagcattggcatgggttcaccatcaggaaacgatgtttgccccatacctggaacaacaaaaatcgagaacttcaaccagaacgtgggggcgctttctgtgaagttgacaccagatgagatggccgaactcgagtcctgtgctgctgcaggtgaaatcttgggtgaccgttatcctcaaatggccaacacctggaaggactctgagaccccgccattgtcttcttggaaatctgagtagccaatctggtgtctcttcaattctgccaccgtcacattggtgtatctccaaattgtcggactgcagaagatactcaggtgcactttgcaaaagcgtccatatgatgtgcttgccttttgcaagctatgatgtttggtacttggtgtgtattgcatgcctcaatttgtatcaagagtatttacccatgagtatagcttgaaggttaaaaccactggttcgacgaataaccatatgcatttgtatcgagagtatttaccatgagtagcaaactgaattttgtaataatagtcaaaagtgtgattgtaaaatgtacttagggaatgtggtacgctatattagcgtgcaaacataagtatagccagttaagcccctcca

SEQ ID NO: 134173 - DNA, 509 bp, Zea Mays
tgcataaaagagaaggatgcagcaacttgcttgtccggttcatgcagaacatgggtgtgcatagagacgaaggcccttatccatctggatggtaaatatttttgtacgtatgttccttggattcatctaccagtgtgaacctggagaaatgcaccagggtagcagccatgatcttcatctgcctgtatacaaattgcaaattccttcccaaatcagatgcaggggcctgcgtattatcatggaagaagggagattggttagatgctaattgttgtccaaattcaatgaaattaccgaccgtcgtcttaggaaattagtgaacacatattgccatctttcctattgtattgtaggtgtcacttgtagccacttgatgttagctaccaggggcgggcccaggatttggacaatgggtattcaaaattttactagagcaaaaaaatgatttgatagcctaaaatcaatcctagtagccttagtcatatataattgatggcctagagcatatt

SEQ ID NO: 134174 - DNA, 1611 bp, Zea Mays
acaacccgatcgcccacgcaaacctctcgacagaccacagctcgatcaaaccgcgaatgaaaaaaccacaaaaaatctcccaattctcgcaaccccaagccggccagcccccacgatctcgaatcccgatgctctcagcatctatcaactcccgagcggtcgtcaccagcgcatgagctttctccgctcgctggcgaactccttctcctcgctgctcttctcgtcggggggcgagacggcgcccatggacgcggcggggtcggcgccgtcgccggcggcggtggtgagggagcgcgtggcggtgaagctccggggctacttcgacctcgccaaggaggagatggacaaggccgtgcgcgccgaggagtgggggctccccgacgacgccaccgcgcactaccgcaacgcgatgcgcgtcatgctcgaggcccaggccgcgcgcgtccctgatgccgtctcctccaggtgcgcccgcgttctcttcctcgcgcccgtcgcggctagggcttctggaatgattcgtgactgactagtgggtggtgccctgcggagcttgagaggcttgcagcgagagggggcaggtcagggtgtaccaggagaagatcgccaagtggcaggcgcaggtcgaggagcggctcagagtgcttggtcagagaagtgctgaaggtgccactgctgcagtagtgcctaagaaggttgtcatggtgcaatggtctacttgttaggctatgttgaggtgggggtgaggcgtcctcttgtgctcctggggagctactaataaacctcaagagttggatgatgctgttcttcgaagactggtgaaaagaatatatgtgccactacctgatccaaacgtacggaggctacttctgaaaaatcagctcaaaggacaagcattcaaattgtcgaccaacctggaactgatccctggcagaccatgatttcgaaagattagttgtggagaccgaagggtattctggaagtgacctgagagccgtgtgcgaagaagctgcaatgatgccaataagagagctcgggccacagagtattcttgctattaaagcaaatcagttgcgacctttgaagtacgaggatttcaagaacgcgatggcggtgatcaggccaagcttgcagaagagcaaatgggacgagcttgagaaatggaacgaggaatttggttcgagctgacggcggctcgcactgcctgtgcctgatgatgatcaagcggtcctatttccatctgtatatatgatttatgtctcccacgctgtggctcacaacacaaggggtcacaccatgcgcccattgatgcgtcctcgttgggctaggcagcacaacatcgacagaagcagaatgtaaaggtatacttctggcaacggcctatacagccattgagggctagtttgaaacaccgttcaagggattttcatttttcaaagggaaattagctcattttcccttgtaaaaatgaaatttttttaggaaaatggtgttcccaaactagccctaagtattgctgttgcccaagttaaacaaaaaaacgtgtctattattgggctctgtttgtttaccctctaaattatattatccagcttaaataagttaagagat

SEQ ID NO: 134175 - DNA, 1550 bp, Zea Mays
acaacccgatcgcccacgcaaacctctcgacagaccacagctcgatcaaaccgcgaatgaaaaaaccacaaaaaatctcccaattctcgcaaccccaagccggccagcccccacgatctcgaatcccgatgctctcagcatctatcaactcccgagcggtcgtcaccagcgcatgagctttctccgctcgctggcgaactccttctcctcgctgctcttctcgtcggggggcgagacggcgcccatggacgcggcggggtcggcgccgtcgccggcggcggtggtgagggagcgcgtggcggtgaagctccggggctacttcgacctcgccaaggaggagatggacaaggccgtgcgcgccgaggagtgggggctccccgacgacgccaccgcgcactaccgcaacgcgatgcgcgtcatgctcgaggcccaggccgcgcgcgtccctgatgccgtctcctccaggtgcgcccgcgttctcttcctcgcgcccgtcgcggctagggcttctggaatgattcgtgactgactagtgggtggtgccctgcggagcttgagaggcttgcagcgagagggggcaggtcagggtgtaccaggagaagatcgccaagtggcaggcgcaggtcgaggagcggctcagagtgcttggtcagagaagtgctgaaggtgccactgctgcagtagtgcctaagaaggttgtcatggtgcaatggtctacttgttaggctatgttgaggtgggggtgaggcgtcctcttgtgctcctggggagctactaataaacctcaagagttggatgatgctgttcttcgaagactggtgaaaagaatatatgtgccactacctgatccaaacgtacggaggctacttctgaaaaatcagctcaaaggacaagcattcaaattgtcgaggtattctggaagtgacctgagagccgtgtgcgaagaagctgcaatgatgccaataagagagctcgggccacagagtattcttgctattaaagcaaatcagttgcgacctttgaagtacgaggatttcaagaacgcgatggcggtgatcaggccaagcttgcagaagagcaaatgggacgagcttgagaaatggaacgaggaatttggttcgagctgacggcggctcgcactgcctgtgcctgatgatgatcaagcggtcctatttccatctgtatatatgatttatgtctcccacgctgtggctcacaacacaaggggtcacaccatgcgcccattgatgcgtcctcgttgggctaggcagcacaacatcgacagaagcagaatgtaaaggtatacttctggcaacggcctatacagccattgagggctagtttgaaacaccgttcaagggattttcatttttcaaagggaaattagctcattttcccttgtaaaaatgaaatttttttaggaaaatggtgttcccaaactagccctaagtattgctgttgcccaagttaaacaaaaaaacgtgtctattattgggctctgtttgtttaccctctaaattatattatccagcttaaataagttaagagat

SEQ ID NO: 134176 - DNA, 1486 bp, Zea Mays
acaacccgatcgcccacgcaaacctctcgacagaccacagctcgatcaaaccgcgaatgaaaaaaccacaaaaaatctcccaattctcgcaaccccaagccggccagcccccacgatctcgaatcccgatgctctcagcatctatcaactcccgagcggtcgtcaccagcgcatgagctttctccgctcgctggcgaactccttctcctcgctgctcttctcgtcggggggcgagacggcgcccatggacgcggcggggtcggcgccgtcgccggcggcggtggtgagggagcgcgtggcggtgaagctccggggctacttcgacctcgccaaggaggagatggacaaggccgtgcgcgccgaggagtgggggctccccgacgacgccaccgcgcactaccgcaacgcgatgcgcgtcatgctcgaggcccaggccgcgcgcgtccctgatgccgtctcctccagaggcttgcagcgagagggggcaggtcagggtgtaccaggagaagatcgccaagtggcaggcgcaggtcgaggagcggctcagagtgcttggtcagagaagtgctgaaggtgccactgctgcagtagtgcctaagaaggttgtcatggtgcaatggtctacttgttaggctatgttgaggagctactaataaacctcaagagttggatgatgctgttcttcgaagactggtgaaaagaatatatgtgccactacctgatccaaacgtacggaggctacttctgaaaaatcagctcaaaggacaagcattcaaattgtcgaccaacctggaactgatccctggcagaccatgatttcgaaagattagttgtggagaccgaagggtattctggaagtgacctgagagccgtgtgcgaagaagctgcaatgatgccaataagagagctcgggccacagagtattcttgctattaaagcaaatcagttgcgacctttgaagtacgaggatttcaagaacgcgatggcggtgatcaggccaagcttgcagaagagcaaatgggacgagcttgagaaatggaacgaggaatttggttcgagctgacggcggctcgcactgcctgtgcctgatgatgatcaagcggtcctatttccatctgtatatatgatttatgtctcccacgctgtggctcacaacacaaggggtcacaccatgcgcccattgatgcgtcctcgttgggctaggcagcacaacatcgacagaagcagaatgtaaaggtatacttctggcaacggcctatacagccattgagggctagtttgaaacaccgttcaagggattttcatttttcaaagggaaattagctcattttcccttgtaaaaatgaaatttttttaggaaaatggtgttcccaaactagccctaagtattgctgttgcccaagttaaacaaaaaaacgtgtctattattgggctctgtttgtttaccctctaaattatattatccagcttaaataagttaagagat

SEQ ID NO: 134177 - DNA, 2263 bp, Zea Mays
ggtcccacctcgcacgccctcaggcctcgacatccactgccttccgttcgtctcaatcccccgtcgcattccgcaacacctgctcctcgcccccttctctcagaggcgacgcctcgggcgctcctaccctgccccgtctccggtccccccgcgccgtcggcgaggcagccggccgtcacagaagcccgatccggaccccgcgagaaatccttgttatacctgatggctatgattgatgagcctctttatccaattgctgtactgattgacgagctcaagaatgaagacatccagttgcgtctaaactccattagaagactttcaacaattgcacgggctcttggagaagaaagaaccaggaaggagctgattccttttcttagtgaaaacaacgatgatgaagacgaggtgcttcttgcaatggctgaggaattgggtgtgttcattccgtatgttggtggtgtagaacatgctcatgttttgctcccacctttggagacattgtgtacagtggaggaaacttgtgtccgtgataaagcagttgaatctctgtgccgtattggtgcacaaatgaaggaaactgacattgtcgactggttcattccagtagtaaagaggctagcagctggagagtggtttacagctcgcgtatcgtcctgtggtcttttccacatagcctatccaagtgcgtcggaccaattgaaaacagaattgaggactatctatggtcagctatgtcaggatgacatgcctatggtcagaagagcagcagcatcaaatcttggaaagtttgcagctacagttgaacagaatcatttgaagacagaaataatgtcaatatttgatgatttaacccaagatgatcaagattcagtgcgtctgttggctgttgaaggctgtgctgcccttggtaaattgttggaaccacaagattgcgtagcacacattcttccagtcattgtcaatttctcccaggataaatcatggcgtgttcgttatatggttgccaatcaattatatgagctctgtgaggctgttggccctgagcctacaagagctgatttggtgcctgcctatgttcgcctccttcgtgataatgaggctgaagtgcggatagcagctgctggaaaagtaactaagttttgccgcatattaaatcctcagctctcagtccaacatattcttccatgcgttaaggaattgtcatcagattcatcccagcatgttcgttcagctttagcctcagtgattatgggaatggctcctgtactgggaaaggatgctaccattgaacagcttgttccaattttcctctctttgttgaaagacgaatttcctgatgttcgacttaacataatcagcaaacttgatcaagttaatcaggttattggaattgacttgctatctcaatcactgctaccagcaattgtagaacttgcagaggataggcactggagagtccggcttgcaataattgagtacatcccattgttggcgagtcaattaggtgttgggtttttcgatgacaagctgggggcgctctgcatgcaatggttggaagacaaggtcttttcaatcagagatgctgccgctaacaacttgaagcgccttgcagaagagtttggtccagagtgggcaatgcagcatataatccctcaggtgctggagaagatcaacaacccacactatttataccgcatgacgattctgcaggcaatctccttgctagctcctgtcatgggtgcagaaatcacctgtcaaaagctgcttccagtcgtcattaattcttcgaaggacagggttcccaacatcaagttcaatgttgcgaaagtactacagtcacttgtaccgatcctcgaccaatctgtggtggagaagaccgtgaaaccgtgcctcgttgagctcagcgaggaccctgacgtcgacgtaaggtactatgcaaaccaggcactgcaggcgtgcgaccagatgatggtgtcaagctaactagcctttgtgtcaagtatttagagagttcgatcgatgctccatagtccaattttggattacctgtaatttggcctttagatttgaagagttgtttgtgtctagcctcggtaacagataaaaacggacggtcctgatccccttgttcgtttgtgttaattaatgttgtaattgagcaggacacaacgcgttgctgtgtgtgtttgcgtttacatggcagattgaactttacggtttgcttgcgctgtgcgatgctgctggcctatctacccttcgt

SEQ ID NO: 134178 - DNA, 2251 bp, Zea Mays
ggtcccacctcgcacgccctcaggcctcgacatccactgccttccgttcgtctcaatcccccgtcgcattccgcaacacctgctcctcgcccccttctctcagaggcgacgcctcgggcgctcctaccctgccccgtctccggtccccccgcgccgtcggcgaggcagccggccgtcacagaagcccgatccggaccccgcgagaaatccttgttatacctgatggctatgattgatgagcctctttatccaattgctgtactgattgacgagctcaagaatgaagacatccagttgcgtctaaactccattagaagactttcaacaattgcacgggctcttggagaagaaagaaccaggaaggagctgattccttttcttagtgaaaacaacgatgatgaagacgaggtgcttcttgcaatggctgaggaattgggtgtgttcattccgtatgttggtggtgtagaacatgctcatgttttgctcccacctttggagacattgtgtacagtggaggaaacttgtgtccgtgataaagcagttgaatctctgtgccgtattggtgcacaaatgaaggaaactgacattgtcgactggttcattccagtagtaaagaggctagcagctggagagtggtttacagctcgcgtatcgtcctgtggtcttttccacatagcctatccaagtgcgtcggaccaattgaaaacagaattgaggactatctatggtcagctatgtcaggatgacatgcctatggtcagaagagcagcagcatcaaatcttggaaagtttgcagctacagttgaacagaatcatttgaagacagaaataatgtcaatatttgatgatttaacccaagatgatcaagattcagtgcgtctgttggctgttgaaggctgtgctgcccttggtaaattgttggaaccacaagattgcgtagcacacattcttccagtcattgtcaatttctcccaggataaatcatggcgtgttcgttatatggttgccaatcaattatatgagctctgtgaggctgttggccctgagcctacaagagctgatttggtgcctgcctatgttcgcctccttcgtgataatgaggctgaagtgcggatagcagctgctggaaaagtaactaagttttgccgcatattaaatcctcagctctcagtccaacatattcttccatgcgttaaggaattgtcatcagattcatcccagcatgttcgttcagctttagcctcagtgattatgggaatggctcctgtactgggaaaggatgctaccattgaacagcttgttccaattttcctctctttgttgaaagacgaatttcctgatgttcgacttaacataatcagcaaacttgatcaagttaatcaggttattggaattgacttgctatctcaatcactgctaccagcaattgtagaacttgcagaggataggcactggagagtccggcttgcaataattgagtacatcccattgttggcgagtcaattaggtgttgggtttttcgatgacaagctgggggcgctctgcatgcaatggttggaagacaaggtcttttcaatcagagatgctgccgctaacaacttgaagcgccttgcagaagagtttggtccagagtgggcaatgcagcatataatccctcaggtgctggagaagatcaacaacccacactatttataccgcatgacgattctgcaggcaatctccttgctagctcctgtcatgggtgcagaaatcacctgtcaaaagctgcttccagtcgtcattaattcttcgaaggacagggttcccaacatcaagttcaatgttgcgaaagtactacagtcacttgtaccgatcctcgaccaatctaccgtgaaaccgtgcctcgttgagctcagcgaggaccctgacgtcgacgtaaggtactatgcaaaccaggcactgcaggcgtgcgaccagatgatggtgtcaagctaactagcctttgtgtcaagtatttagagagttcgatcgatgctccatagtccaattttggattacctgtaatttggcctttagatttgaagagttgtttgtgtctagcctcggtaacagataaaaacggacggtcctgatccccttgttcgtttgtgttaattaatgttgtaattgagcaggacacaacgcgttgctgtgtgtgtttgcgtttacatggcagattgaactttacggtttgcttgcgctgtgcgatgctgctggcctatctacccttcgt

SEQ ID NO: 134179 - DNA, 2107 bp, Zea Mays
aggcctcgacatccactgccttccgttcgtctcaatcccccgtcgcattccgcaacacctgctcctcgcccccttctctcagaggcgacgcctcgggcgctcctaccctgccccgtctccggtccccccgcgccgtcggcgaggcagccggccgtcacagaagcccgatccggaccccgcgagaatgaagacatccagttgcgtctaaactccattagaagactttcaacaattgcacgggctcttggagaagaaagaaccaggaaggagctgattccttttcttagtgaaaacaacgatgatgaagacgaggtgcttcttgcaatggctgaggaattgggtgtgttcattccgtatgttggtggtgtagaacatgctcatgttttgctcccacctttggagacattgtgtacagtggaggaaacttgtgtccgtgataaagcagttgaatctctgtgccgtattggtgcacaaatgaaggaaactgacattgtcgactggttcattccagtagtaaagaggctagcagctggagagtggtttacagctcgcgtatcgtcctgtggtcttttccacatagcctatccaagtgcgtcggaccaattgaaaacagaattgaggactatctatggtcagctatgtcaggatgacatgcctatggtcagaagagcagcagcatcaaatcttggaaagtttgcagctacagttgaacagaatcatttgaagacagaaataatgtcaatatttgatgatttaacccaagatgatcaagattcagtgcgtctgttggctgttgaaggctgtgctgcccttggtaaattgttggaaccacaagattgcgtagcacacattcttccagtcattgtcaatttctcccaggataaatcatggcgtgttcgttatatggttgccaatcaattatatgagctctgtgaggctgttggccctgagcctacaagagctgatttggtgcctgcctatgttcgcctccttcgtgataatgaggctgaagtgcggatagcagctgctggaaaagtaactaagttttgccgcatattaaatcctcagctctcagtccaacatattcttccatgcgttaaggaattgtcatcagattcatcccagcatgttcgttcagctttagcctcagtgattatgggaatggctcctgtactgggaaaggatgctaccattgaacagcttgttccaattttcctctctttgttgaaagacgaatttcctgatgttcgacttaacataatcagcaaacttgatcaagttaatcaggttattggaattgacttgctatctcaatcactgctaccagcaattgtagaacttgcagaggataggcactggagagtccggcttgcaataattgagtacatcccattgttggcgagtcaattaggtgttgggtttttcgatgacaagctgggggcgctctgcatgcaatggttggaagacaaggtcttttcaatcagagatgctgccgctaacaacttgaagcgccttgcagaagagtttggtccagagtgggcaatgcagcatataatccctcaggtgctggagaagatcaacaacccacactatttataccgcatgacgattctgcaggcaatctccttgctagctcctgtcatgggtgcagaaatcacctgtcaaaagctgcttccagtcgtcattaattcttcgaaggacagggttcccaacatcaagttcaatgttgcgaaagtactacagtcacttgtaccgatcctcgaccaatctgtggtggagaagaccgtgaaaccgtgcctcgttgagctcagcgaggaccctgacgtcgacgtaaggtactatgcaaaccaggcactgcaggcgtgcgaccagatgatggtgtcaagctaactagcctttgtgtcaagtatttagagagttcgatcgatgctccatagtccaattttggattacctgtaatttggcctttagatttgaagagttgtttgtgtctagcctcggtaacagataaaaacggacggtcctgatccccttgttcgtttgtgttaattaatgttgtaattgagcaggacacaacgcgttgctgtgtgtgtttgcgtttacatgg

SEQ ID NO: 134180 - DNA, 2180 bp, Zea Mays
aggcctcgacatccactgccttccgttcgtctcaatcccccgtcgcattccgcaacacctgctcctcgcccccttctctcagaggcgacgcctcgggcgctcctaccctgccccgtctccggtccccccgcgccgtcggcgaggcagccggccgtcacagaagcccgatccggaccccgcgagaaatccttgttatacctgatggctatgattgatgagcctctttatccaattgctgtactgattgacgagctcaagaatgaagacatccagttgcgtctaaactccattagaagactttcaacaattgcacgggctcttggagaagaaagaaccaggaaggagctgattccttttcttagtgaaaacaacgatgatgaagacgaggtgcttcttgcaatggctgaggaattgggtgtgttcattccgtatgttggtggtgtagaacatgctcatgttttgctcccacctttggagacattgtgtacagtggaggaaacttgtgtccgtgataaagcagttgaatctctgtgccgtattggtgcacaaatgaaggaaactgacattgtcgactggttcattccagtagtaaaggctagcagctggagagtggtttacagctcgcgtatcgtcctgtggtcttttccacatagcctatccaagtgcgtcggaccaattgaaaacagaattgaggactatctatggtcagctatgtcaggatgacatgcctatggtcagaagagcagcagcatcaaatcttggaaagtttgcagctacagttgaacagaatcatttgaagacagaaataatgtcaatatttgatgatttaacccaagatgatcaagattcagtgcgtctgttggctgttgaaggctgtgctgcccttggtaaattgttggaaccacaagattgcgtagcacacattcttccagtcattgtcaatttctcccaggataaatcatggcgtgttcgttatatggttgccaatcaattatatgagctctgtgaggctgttggccctgagcctacaagagctgatttggtgcctgcctatgttcgcctccttcgtgataatgaggctgaagtgcggatagcagctgctggaaaagtaactaagttttgccgcatattaaatcctcagctctcagtccaacatattcttccatgcgttaaggaattgtcatcagattcatcccagcatgttcgttcagctttagcctcagtgattatgggaatggctcctgtactgggaaaggatgctaccattgaacagcttgttccaattttcctctctttgttgaaagacgaatttcctgatgttcgacttaacataatcagcaaacttgatcaagttaatcaggttattggaattgacttgctatctcaatcactgctaccagcaattgtagaacttgcagaggataggcactggagagtccggcttgcaataattgagtacatcccattgttggcgagtcaattaggtgttgggtttttcgatgacaagctgggggcgctctgcatgcaatggttggaagacaaggtcttttcaatcagagatgctgccgctaacaacttgaagcgccttgcagaagagtttggtccagagtgggcaatgcagcatataatccctcaggtgctggagaagatcaacaacccacactatttataccgcatgacgattctgcaggcaatctccttgctagctcctgtcatgggtgcagaaatcacctgtcaaaagctgcttccagtcgtcattaattcttcgaaggacagggttcccaacatcaagttcaatgttgcgaaagtactacagtcacttgtaccgatcctcgaccaatctgtggtggagaagaccgtgaaaccgtgcctcgttgagctcagcgaggaccctgacgtcgacgtaaggtactatgcaaaccaggcactgcaggcgtgcgaccagatgatggtgtcaagctaactagcctttgtgtcaagtatttagagagttcgatcgatgctccatagtccaattttggattacctgtaatttggcctttagatttgaagagttgtttgtgtctagcctcggtaacagataaaaacggacggtcctgatccccttgttcgtttgtgttaattaatgttgtaattgagcaggacacaacgcgttgctgtgtgtgtttgcgtttacatgg

SEQ ID NO: 134181 - DNA, 2271 bp, Zea Mays
aatcccccgtcgcattccgcaacacctgctcctcgcccccttctctcagaggcgacgcctcgggcgctcctaccctgccccgtctccggtccccccgcgccgtcggcgaggcagccggccgtcacagaagcccgatccggaccccgcgagaaatccttgttatacctgatggctatgattgatgagcctctttatccaattgctgtactgattgacgagctcaagaatgaagacatccagttgcgtctaaactccattagaagactttcaacaattgcacgggctcttggagaagaaagaaccaggaaggagctgattccttttcttagtgaaaacaacgatgatgaagacgaggtgcttcttgcaatggctgaggaattgggtgtgttcattccgtatgttggtggtgtagaacatgctcatgttttgctcccacctttggagacattgtgtacagtggaggaaacttgtgtccgtgataaagcagttgaatctctgtgccgtattggtgcacaaatgaaggaaactgacattgtcgactggttcattccagtagtaaagaggctagcagctggagagtggtttacagctcgcgtatcgtcctgtggtcttttccacatagcctatccaagtgcgtcggaccaattgaaaacagaattgaggactatctatggtcagctatgtcaggatgacatgcctatggtcagaagagcagcagcatcaaatcttggaaagtttgcagctacagttgaacagaatcatttgaagacagaaataatgtcaatatttgatgatttaacccaagatgatcaagattcagtgcgtctgttggctgttgaaggctgtgctgcccttggtaaattgttggaaccacaagattgcgtagcacacattcttccagtcattgtcaatttctcccaggataaatcatggcgtgttcgttatatggttgccaatcaattatatgagctctgtgaggctgttggccctgagcctacaagagctgatttggtgcctgcctatgttcgcctccttcgtgataatgaggctgaagtgcggatagcagctgctggaaaagtaactaagttttgccgcatattaaatcctcagctctcagtccaacatattcttccatgcgttaaggaattgtcatcagattcatcccagcatgttcgttcagctttagcctcagtgattatgggaatggctcctgtactgggaaaggatgctaccattgaacagcttgttccaattttcctctctttgttgaaagacgaatttcctgatgttcgacttaacataatcagcaaacttgatcaagttaatcaggttattggaattgacttgctatctcaatcactgctaccagcaattgtagaacttgcagaggataggcactggagagtccggcttgcaataattgagtacatcccattgttggcgagtcaattaggtgttgggtttttcgatgacaagctgggggcgctctgcatgcaatggttggaagacaaggtcttttcaatcagagatgctgccgctaacaacttgaagcgccttgcagaagagtttggtccagagtgggcaatgcagcatataatccctcaggtgctggagaagatcaacaacccacactatttataccgcatgacgattctgcaggcaatctccttgctagctcctgtcatgggtgcagaaatcacctgtcaaaagctgcttccagtcgtcattaattcttcgaaggacagggttcccaacatcaagttcaatgttgcgaaagtactacagtcacttgtaccgatcctcgaccaatctgtgagttcctcaagctattccgcccacatgttaccaacattttcgaagaaggcggtacatctgtatttttcatggtattggggaatatcatcagtgcttactccgcaggtggtggagaagaccgtgaaaccgtgcctcgttgagctcagcgaggaccctgacgtcgacgtaaggtactatgcaaaccaggcactgcaggcgtgcgaccagatgatggtgtcaagctaactagcctttgtgtcaagtatttagagagttcgatcgatgctccatagtccaattttggattacctgtaatttggcctttagatttgaagagttgtttgtgtctagcctcggtaacagataaaaacggacggtcctgatccccttgttcgtttgtgttaattaatgttgtaattgagcaggacacaacgcgttgctgtgtgtgtttgcgtttacatggcagattgaacttta

SEQ ID NO: 134182 - DNA, 999 bp, Zea Mays
atgttggacttgtatagtctggatttactaaagaatatatatgtagcatacagttcacacacaaaggaattaccggcagatgaagaggacgagacggagaggcggcatatccagcaagatggagaggcggcacatctagcaagacggagaggcggcaaatccagcaagccaccatggcgaaaccccaacatcctctgggttcttcgtgggagctgggcggtcgcgtccagcctcatcttggcatccctggcctccacctcgagtgcacggatggcggcgtcgagcatatcccatgagcgcttcctagacgtggtggtctcgggctcggcgacgcggcgctccgcctcctcgcgtgcagcggtcgcggcatcgctaacggagtcatttgcgcaacacgtggcgacgaggaggacctgtttatcaaaccagttaatctcttggcacattaaactttggaatgtcagtgatcgtacgcgctccataagcttcccaccagctaatccgaataggaaatattctactggaatcagaacaaatgcacaagcacccaacgcaacaaacatgcttgcccagaacttgagcccttcagtagttctgcaggtggctcatagaacacctttattgcggtggaaatcaagtgcagagcgggacaagcagccgtgcgagcgcgggacaatctcacaagcagaagcagccgggctgccggatgggacaagcactcaagcaggaagcagccgaatgggtcggcggggcaagcagccagccgccgggcgcacgggaacaaggattagatctctcacttcgctctggcgcacgacaacaaggatcgcctcgccgaggcccaacaagtccgggatccggccgtcgtggcccccctcgaagcaggggcggtggaggcagcaatggggaaccggcggcggaggatccggatggggagtggagatgaaagaagggagagagaaggggatggcggcctcacgggggttcgttccaaagtga

SEQ ID NO: 134183 - DNA, 780 bp, Zea Mays
tcggtgacgctgcacacgaacctgggcgacatcaagtgcgaggtgttctgcgaccaggtgccgcgcacggcggagaacttcctggcgctctgcggaacgggctactacgacggcaccgtgttccaccgcaacatcaagggcttcatggtccagggcggcgaccccaccggcaccggcaagggcgggtcgtccatctggggcgccaagttcgcggacgagttgagggagtcgctcaagcacaacgcgcgcgggatcatgtcgatggccaacagcgggcccaacaccaacggcagccagttcttcatcacctacgccaagcagccgcacctcaacggtcactacaccgtgttcgccaaggtcatccacggcttcgaggtgctggacctcatggagaaggcgcagacgggacccggggacaggccgctcgccgagatcaggctcaaccgcgtcaccatccacgccaacccgctcgccgtctgaactcctcttcctaccgctctcccctccactcgctcctgtcctcatccaccgggatctgagcgtcatcagccttgctttcaaccgcaaaatcacgctttggtttcggaacatcaatctgtagctctctaattttataccgatgctgtgacatgtaacctttgatagatttgttttgcctggcgtttttttttttttttttgcttcatcgaccatcaaaatcttcaccggccatgtctgccagggtttgagtttgacactgtaacttgcaaaacaatatagcagccatggtcagcaaagaga

SEQ ID NO: 134184 - DNA, 468 bp, Zea Mays
cctggcccggttgccgtggtgaccgaaagcgctcatcgacgtcgtgaagagagtgagggcttgccgccaccgttgatttcccctacgttgtcgtccggggcgcttggaccggtcgggtaggatactaggatcacctcaatgcacaagacatgtgtgtgccggttgcgtgcttgggaagggtctcgcgactctcgccatcgaccaatttcttgtcgaagttggggggatcactgatatccgccgctcatcgtggccagcgcgcactaccgacttccatctccggtacgtgaccctgccgtgttcgcctcgtcctcctcgtcgcgaattactaactagatgggggtgtgtggtgtttgaacaccgagattacgcgtcgccagtgtgcggccgccgcagggtagggcggcaccgccgcggttgcccgcttggggttgtgaaggtacgctgtccactgatccagaagcgggc

SEQ ID NO: 134185 - DNA, 1270 bp, Zea Mays
cccggttagttcccgcgagagacgtcgttattctcttcggattctggggagggcgcgcgcaaagcaaacctcaaacgccaaacgcaacacccgccagcaggccacctgtgagcagcgatgagctcgtcgacgcccggccgcgacgacgacgcgccggacctcgtctgccagatcgactgcgtccacggcatggtggacgcgctctcctcggtccgctggaagcgccaccaggacgcggtgatggagctgtcggagcacgggatcgttctctccgtagaggagagcggttgtctccaggccaaggtcttcctcaagcgcgagctgttcgtagagtacgactatgcgggggacgggaggcagcggttcggcctcagcctgggtctcttcgtcgactgcctcaacatcttctcatcgccaggccacgcgtccgccgtcgagatccgttaccctggccccgacatgcagcttctcctcaagtctgtgggctctgctgatgcatgcctgtacgcagaaatcagaaccagaattccagacacagtctcctgggattaccattttgagcatgctgggaatagtccagtcagttttaccgtcaagtccgccgtcctgaaagaaacgatcgacgacctcgaatggccaggttccagcatccagattcgaatgcaaccagatcctccaacggttatactgaaaggcgaaggtcatggcgacttgcagaccgaattcccctactatgcaaacaccgacctcctaatcgtgttccaatgcgagcacgaagtgtcacacaggtacaaatacaagttcctccgagcgaccacctcgaacatccccagcagtgccgtgaaggagaaccgcaggaccaaggtctcgatcgggaggggagggatgctgaaggtccagcacctggtgtcgcttgccaggccaggcatgccgtacttccgtagcattggtggagggaacgagcagacgagccggatcgcgcatatagagttcttcgtgaagcccgaagaagacgataacggtgcctagctagcgttttgtggagtgtgttatcggcatgttgtttgagtagttcatgtgaaactgaagccgggtcttggtttttgaaacggctagtatcgtctatcagacaggctgtttctaatcatgtggatcctgttactaggcacgcattattttcctaatcaagtgaaacgcatgtttgtggccttgtgatttgcaaaagtgccctttcattctgaagcttttttttcccaacaaaacaaacaaa

SEQ ID NO: 134186 - DNA, 972 bp, Zea Mays
tatactaaagaaacacttctctattaacctttgagatgtttaattggatacaaagatatatgtaacctaagcagttcaaagcatttagaagaataaaaaattctcattcgagggactcttgtcatgtcaatgcaggtctgtgggctctgctgatgcatgcctgtacgcagaaatcagaaccagaattccagacacagtctcctgggattaccattttgagcatgctgggaatagtccagtcagttttaccgtcaaggtagtctgtctcgacgcgccctgtatatttgttggcactatgttattttagttcacgatgaataatatgattcgctgcctgaaattccagtccgccgtcctgaaagaaacgatcgacgacctcgaatggccaggttccagcatccagattcgaatgcaaccagatcctccaacggttatactgaaaggcgaaggtcatggcgacttgcagaccgaattcccctactatgcaaacaccgacctcctaatcgtgttccaatgcgagcacgaagtgtcacacaggtacaaatacaagttcctccgagcgaccacctcgaacatccccagcagtgccgtgaaggagaaccgcaggaccaaggtctcgatcgggaggggagggatgctgaaggtccagcacctggtgtcgcttgccaggccaggcatgccgtacttccgtagcattggtggagggaacgagcagacgagccggatcgcgcatatagagttcttcgtgaagcccgaagaagacgataacggtgcctagctagcgttttgtggagtgtgttatcggcatgttgtttgagtagttcatgtgaaactgaagccgggtcttggtttttgaaacggctagtatcgtctatcagacaggctgtttctaatcatgtggatcctgttactaggcacgcattattttcctaatcaagtgaaacgcatgtttgtggccttgtgatttgcaaa

SEQ ID NO: 134187 - DNA, 1530 bp, Zea Mays
gggagctagcgcgcgggcgatcgagcaatgcacatcgcgacctgcgtgtggcaagagaaggcggcgccggccggcggcatggggggagctcgagttgctggtggaggtggtggcggcgagtggggtgcgagggccgcggcggcggcggcgctgggcgttgccgggcgcgcgctcaactgcgcggtgagcttcgtggtgttctcggcgctggacgtgctggacgtggtgctgtgcctggcgtacaagctggcggactacgcggcggaggcggagtggaggccgtgctactgctccgcggcggcggacccgcgcgtggcgcagcagctgccccccaagcccaaggtggtgcggctgtcggcggcgtcgcccgccaggttgcacttgcagctggaggacgtgtcggacacgctgtacgcgcggccgtcgctgctggccgacgccacccgagccggcggcgacggcgtcgcccctgcgctcaccgtgagccccgccgccatcgcggcactgatccgcgagaagacggaccgcgcgccgcggcaggcgccgtgctggtctgactgcgactgcaaggtgtgccacgcctggagcgggacgtcccccgcgtcgttgtcccacctctacgtgcacgtccaggcgccgccggcgatgccgatggcagtggagacggaggacgtggtgttcatccacggcttcatctcgtcgtccgcgttctggacggagacggtgttcccggccttcagccccgccgcgcggtcccggtatcggatgttcgccgtggacctgctggggttcgggcgcagccccaagccggccgaatcgctgtacacgctgcgcgagcacgtggagatgatcgagcgctccgtgctgcggcgctaccgcctcggctccttccacgtggtggcgcactcgctcggctccgtcctcgcgctcgccctcgccgtcaagtaccccgccgccgtcaagtcgctcaccctcctcgctccgccatacttcccggtgccggagtcggaggccgagtcggcggcgcagtacgtgatgcggcgcgtggcgccgcggcgggtgtggccaccgatcgcgttcggggcgtccgtggcgtgctggtacgagcacgtgagccgcaccatatgcctcgccatctgccggcaccaccgcgtctgggaccgcctcttcaggatcgtcaccaggaacagggtgcgctcgttcctgatcgaggcgttcatgtgccacacgcacaacgcggcgtggcacacgctgcacaacgtcgtgtgcggcggcgcggggcggatgggagcgtacctggacgcggtggaccgccgcctctcctgcaaggtggcgctcttccacggccgcgacgacgagctggtccccgtcggctgcacgttggcggcgggggccagggtgcgccgcgcgcgcgtcaccgtctacgagcgcaaggaccacatcaccatcgtcgtcgggcaggagcgcctcttcgctgccgagctcgaggccatctggagcgccgaccaatagcctcagtcgtatcgtatc

SEQ ID NO: 134188 - DNA, 896 bp, Zea Mays
acctttctcaacctgccgcagctgtctctctcgcgtctctctagagccgcccgccgccagccgcctccgccgcccacaccaccggccggccccgcctccgcccgcccccgccgcgcctgcccacgccgcggccgccccggcccccgtcagccgcggacgcccccagcccagccctatcagccgcggcggccgccgcccccggccacgcctgtcggcccgcccccgcccctgcccgctgcggcactattctgctggctctgttcgtgtgtgcaggggagcagttccatttcgacgattgcggcatttgcaggatcctgctactcgacgacccttcgcgataggcactgctgcatcgagaactcgatgaagaacaactgccccatctgctacgaggtgaggccgcatactgtatgcaccttgtgcacgcccttcgcagctcaccgttggagacctctgctgctgctgttggtgcaaggtagtacctgttcgattcgctgagggagacgtcggtgctccattgcggccacaccatgcacctactgtgcttccacgagatgttgaagcacgacaagtaagcgcccatgcatgctctttcgccgttgcatgaacaagaagacgggtagactttgtcgaaaccctcttcactagtggcggtatcgaccatcactcgtcactgtaacccgatggtgatcggcgaccgtgagctttcattttattgtgttctgatacttgagacttttattatgactatgtaagagatattgtctcttattagtactggatgatgagatgtgtcttattatgactatggatgagacttttgtgatgtaactgatgggactatggatgagacttttgtgatgtaattgatgaaactctggatttaaatattgtta

SEQ ID NO: 134189 - DNA, 914 bp, Zea Mays
acctttctcaacctgccgcagctgtctctctcgcgtctctctagagccgcccgccgccagccgcctccgccgcccacaccaccggccggccccgcctccgcccgcccccgccgcgcctgcccacgccgcggccgccccggcccccgtcagccgcggacgcccccagcccagccctatcagccgcggcggccgccgcccccggccacgcctgtcggcccgcccccgcccctgcccgctgcggcactattctgctggctctgttcgtgtgtgcaggggagcagttccatttcgacgattgcggcatttgcaggatcctgctactcgacgacccttcgcgataggcactgctgcatcgagaactcgatgaagaacaactgccccatctgctacgaggtagtacctgttcgattcgctgagggagacgtcggtgctccattgcggccacaccatgcacctactgtgcttccacgagatgttgaagcacgacaagtaagcgcccatgcatgctctttcgccgttgcatgaacaagaagacgggtagactttgtcgaaaccctcttcactagtggcggtatcgaccatcactcgtcactgtaacccgatggtgatcggcgaccgtgagctttcattttattgtgttctgatacttgagacttttattatgactatgtaagagatattgtctcttattagtactggatgatgagatgtgtcttattatgactatggatgagacttttgtgatgtaactgatgggactatggatgagacttttgtgatgtaattgatgaaactctggatttaaatattgttatgtgattgtgtgtgagatgttttatgtgaaaatatgttgtgctatatagctattgatatatttgttatgttgtggaatgtggtgtaaaataaaaataaac

SEQ ID NO: 134190 - DNA, 89 bp, Zea Mays
tttcatgtgaaccaaagtaagcatgagcatcaaattaacttaagtaataaagaattcaccaagtatatacttaaaagtatcatgatcaa

SEQ ID NO: 134191 - DNA, 1640 bp, Zea Mays
cccactcttcagcccatttcttttatgggcccaattccatttcgtacaagtcccctcgcctcgcgtccttcagcccgtttcttttctggctgattccgtttcgcgcgtgggctcgattctttattctgtgccgtacgtgcctcctccgcgcttgccaaatctctgttccgtgggagtgggaacgctttttcttgaccaaaaacatttttgaggggcaatccgcaaaaaccctatcccaaaatcccaactccatcgcccgcgaaccactcgaagtcggctcacctcagtaccccactgctcggtgttcactccggtcgggccatggcgcgcgccggcgtctctaccgcgccgctctcccgcactcacctcctcccaccacgtccttccctcctccacaacacgcagccccactccctcctcctccggccccagcgcaaggcgcccgccaccaccgcggcggcgctgccgccggccgcggacttcccggcgctgtccctcccggccgcggccgccgcggcggccgcgctggcggcggcggtgtcactttccgaccccgagcggcggcggcgctcgcaggccgaggcggccggcggcggggacaaggaggccgtccgcgcctacttcaactcgacggggttcgagcggtggcgcaagatctacgggtcggcaacggagggcgtgaaccgcgtgcagcttgacatccgcgagggccacgcgcagacggtggcggcggcgctggccatgctccgcgattccccgctggagctggcgggcgccaccgtgtgcgacgccggctgcgggacggggtcgctggccatcccgctcgcggcggcgggcgccgacgtcctggcctccgacatctcggcggccatggtgtcggaggcgcagcggcaggcggcggcgcagtcgtcgtcgtcgtcgttccggatgccgcggttcgaggtccgcgacctggagagcctggaggggcggtacgacgtggtggtgtgcctggacgtgctcatccactacccgcgggaggaggcgcgcgccatgatccgccacctcgcgtcgctggcggacaagcggctgctcatcagcttcgcgcccaggacgctctacttcgacttcctcaagcgcgtgggcgagctgttcccgggcccgtcaaaggccacgcgcgcctacctgcacgccgaggccgacatcgaggacgcgctccgccaggccggctggcgcgtcgccaaccgcggcttcatctccacgcagttctacttcgccaagctcttcgacgccgtgcccgtcggctcctcgacgtagccgtgtaggccgcccgccgtgtgcttgtgtgtttgtttgcctcacgcgactgtttatagagctccagacggtcgccgcagcgcgcgcggcggcgtagcctgtttgtacttgcaagctcactcagttccattccgtagcttgatgccttgattgattcccacgtagacttccatcgacaaacacaattgcagggttttgagtttttgacccaaacgacacgacaaagagttcttatcatccaggggcctcgaccaccgtgctcgttttacaaaagctgtaattaaagactactttgcaagattatcgtgattttcattcatattttatgtgatatggctttcgat

SEQ ID NO: 134192 - DNA, 730 bp, Zea Mays
caaaggctggggcatttgatcatcacagccactgaagaacagttccaaacaagaaagcaagatcaacagacaatcatcagaaaaaacaaaaaagatgtacagaaactatcaaactgaatcattgctgcacccagcacagcttcttttggggtgtttgtatgggtgggtgggtgagggggagagggctcagcttcgcctttgctcattcatcttactgtatcctcatcatctcttatcaccagatcgacttgtcctgacaagtcagctgccctggttatcacccatgaagaatggcatgaccatccgaggacaaggtctttataattaggacataattgaaaaggtttccaagagagcaaagcgaggactccagtttggtacccatagcagccttgattgctcaaaggcgcatgtcagccttggttattgatcattgccccacattggaattttacttattcataattgaggggcactcaggtagaaacgtatgatatataactgactttgcatattagtcttaacattaacccatagaaaccaacccctaccctatcttgccgcacatattacccatcttgatgcaagagcatctccaacaatttatccgtgcatgaaaaaaagaaggtacacacgcgcaaagatatgcagacgacctctacttatcatgggggggcaaagatatgtggatgaccgctactagttaatatctattggaaaggttgcaaaa

SEQ ID NO: 134193 - DNA, 94 bp, Zea Mays
ttaggaggaaagtatacatgttccatccatcaagtagtagtagtgaaaacatgcttgtgaacgctactccctatcagagcatctccagtagttc

SEQ ID NO: 134194 - DNA, 107 bp, Zea Mays
ttatttatggatcttttttctgctcttcttaatgaaatgatgtgcatatctcttgagggttcaagaaaaaaatctattggaaaggttgcagaaacagaattttcacg

SEQ ID NO: 134195 - DNA, 1860 bp, Zea Mays
caccacctccgttggattcgtaatcaacggaagcactgccctctgccgttcggcagacgatctggttcccctcacgcccaccaaatcccgaatcccaccaccgccttctatcgcccccaccccggctcccagatcgcggcggcacacataatggccgcctcgccgtcgctgcacgccgtggcgcaccgggggccctccctgaccgccctcctcttcctcgtcgccgcgatggtgttggttccccctgcggcggccgagatccgggagaccgcaatccgggccgacccgcggagcatcatcccgctggatgaattcggcttctcccactcgggcgtgctggagctcaacgtctccggcatcgccttcgacccgcaggcctccgcggagctggacctctcccagctcggcttcttcctctccacgctcgacgcctgggtccacgtcctccgccagctccaggacctcgacgtcacctgcgcgctccagtccgagctcgtcaagctcgccttctctttcgaccgcctccgcccgccctccaaccccgccggcgtcgaggtcgctcgctcctcctccttctccaccgccttccgcgtctccgagcccggccagtacacgctcgtcttcgccaactgcctcggcggcggcctcaaggttgacatggacgtccgctctgccatgtacaacgtcgacccggcaaccggggagcgccagtacctctccgcgggggcctccgcgctgccctccttctacttcctcttctgcctcgcctacgctggcctcgccgctgcctgggtcgccatcctcctccgcaagcgggccgccgtattccggatccactacttcatgctcgccgtgctcgtgctcaaggcgctcaacctcctcgccgaggccgaggacaagtcatgcatcgagcgcaccggcaccgcccacggctgggacgtgctattctacatcttcagcttcctcaaggggatctcgctcttcacgctcatagtgctcatcggcaccggctggtccttcctcaagccctacctggccgaccgagagaagaaggtgcttatggtggtcatccccctgcaggtcgtagctaacatcgcgcaggtggtgattgacgaatctggaccctatgcccgggactgggtcacctggaagcagattttcttgctggtcgatgtggtctgctgctgtgctgtgctcttcccgattgtgtggtccattaagaacctccgggaggctgctcgcttggacgggaaggctgcggtgaacctcatgaagctcaccctcttccgccagtactatgtggtggtcatctgctacatttacttcacgcgggtcgtggtgtatgccctacagaccatcacctcgtaccggtacctgtggactagcgtcgtggccggggagcttgtgacgctcgcgttctatgtctttactgggtacaagttccggcctgaggtgcataacccatacttcgccattgacgatgaggaagaggaggctgcagctgagacgctaaagttggatgatgaattcgagctatgaggggttaggaattggaatcacctccatggcagttttaatattggtgttgtatgccccagcacaggacaagtggcataaactggtatctagtccgtatccttttgtttatccttttgagttggctacacttggtcttactgtaattgggtatggacaagaatcctgtgtgtgttcagcaatacagcttggctttgccttaaattttgtacacaatcactgagatgagcagattcggttctagatgttcactttgtttacacacttaaaagtgatcttatgacactgaatgtacttctgacttctgactatctgagttcggat

SEQ ID NO: 134196 - DNA, 448 bp, Zea Mays
aggagacatagaaacaagtgaagtcagagtcatagaagtcaactaaaacgttcagtcaatggaggaacagtgtaactatggcctgaaagggttctgattttgagccatggcgatgtctatcgagatgcaatgctgcttgcttatccatctacgcttgcagtcaagtttgatcactttcatggtttgggtcataacggtggaagcactgagttctggtcactagcattgtggagcaactttgcaagtggatggagccatgcatgctaaaagggcatcctctgtcacagttcgcctagcaaatgatttcctttcagttgtgttgacatcaaatcacaggggatgcacgcactcccatccaggttagtgccttgagcttatttggcgttgaaaacttgcatgcttccttatcgtggagagccatgctgctaaaataaatcgaggttgcttt

SEQ ID NO: 134197 - DNA, 232 bp, Zea Mays
acgcacgtagcgcgctacctgatctgccgactacagtcgtcgtcggctcggcgaggaggagggcggatggatggatggaaggatagtaaccgctcagtaaaaaaatttaaaacaaatccgcgtcaatcgatcgatcggggtggtcgctcgcatccgctggccggccggtagtcgagacgatcacccgtcgaatcatggaatccctcgcctttttccgggagaaaaaaaacaa

SEQ ID NO: 134198 - DNA, 548 bp, Zea Mays
ccgcgtcgcggtcatcatggcccacggcccgacgctcctcccccctcgccgaccaccccctctcccttcttctattcaccacccccgcctcgtctcctccatcgccgcccccacatctattcacccgttcgttccttcgtctctgcacacaaacgagagaaggctaggtcgtcgtcgtcgtcgttatcgtcgtgacgcggagagatctaggaggaggagcaatggatgggaagttgccgccaccgaacctgaacctgccgtaccggaggactactggagcgagggcgagacgtccacgctcgtcgacggctggggctcgcgctacctcgacctaaaccgcgagagcctccgctagccacagtggtgggaggtcgccgtcaactctcgccccggggcctccgcgcgtcgccgcccgccacgcaccgacatccagtgcaagaaccgcgtcgacacgctcaagaagaagtacaaggccgagcgcgcgcggggggccatcgccgtggaacttctacggccagctcgacctcctcgtcaggcccatgctcacc

SEQ ID NO: 134199 - DNA, 1464 bp, Zea Mays
ccggctcgatcgaggcttctggctccggcggccgtcaccgatcattcattccctttgcctctactccttctgctggcttgttcttccatcgatcaatcccgtcgggtactctgaattggtactacatatacgtacagacagacccttcttcttccttgttagctccatagccgtcactagctagctactcctgctttgggcggcggccgccgtgatgagcatctcggtgaacgggcagtcggtggtgcctccggggttccggttccacccgacggaggaggagctgctgacctactacctgaagaagaaggtggcgtcggagcgcatcgacctggacgtcatccgcgacgtggacctcaacaagctggagccatgggacatccaagacaagtgccgcgtcgggtcgtcgtcaggccctcagaacgactggtacttcttcagccacaaggacaggaagtacccgacggggacgcgcaccaaccgcgccacggcggccgggttctggaaggccaccggccgcgacaaggccatctacgcggccggcggcgccgcccgccgcatcggcatgcgcaagacgctcgtcttctaccagggccgcgcgccgcacgggcacaagtccgactggatcatgcacgagtaccgcctcgacgccgccgacgccgaccatcaccatccatgctgctacccctcgccgcctcctcttcctactgcgatcgtccgtggcgcggcggggccgggggaccaagtgccgcaggagcaggaggggtgggtgatctgcagggtgttcaagaagaagaacctcgtgcaccacggcgccgcccagagcagcggcggcggcggtacggcggcggcggcgtccaagatggagagcagcccgaccagcaccaccatcatcggtgaccacgccagcgacgacgcgctcgaccacatcctgcagtacatgggcggcggcgacaccaagccggcgctgctgaaccacaaccaacaccttgctgccgcggcagatgctactactactacgaccgccgcgtgtcctgccgccgccacaagcgccggcctctacgggaacaacaagttcatgaagctcccgcccctcgagcacgccggcggctggctgccgccgagtccggggccgtgcgagtacggcgcctcggggatcgccgactgggacgccctggaccggctcgccgcctacgagctcaacggcctctccgacgcgtccaagaacatggccgccttcttcgacggcgacctctggagcatggccagatcggtgtcggcgctacacgcggcggatttggccatgaacaacgcctagtctagtgttgccgtagtcgaccaacagcaccgacatccatggcgtacgcatgcatgccgcaccactagctacgtactcgaacagcaacgacgtgcatgtgcgccactgcgtcgtacgtgttgcatggccgccgccgtacgtgcgtg

SEQ ID NO: 134200 - DNA, 198 bp, Zea Mays
atggccaagggcaaagatgttagaatccgaattattttggaatgtattagttgtgtttgaaaggttaccaataaggaatcgacggggatttctagatatagtactcaaaagaatcgtcacaatacgcccggacaattagaatcaagaaaaatttatcgttattgtcacaagcataccactcataatgaaataaagaaa

SEQ ID NO: 134201 - DNA, 245 bp, Zea Mays
gtgaatgaagagatctataaccatgacgaattgaaagctaagtttaaaactcatgaattctaaaccggtagtgattgtgaagtgtagcccatctttatgaagaatgtggggaagaatttgtggatatgttggatggaatgatctcctttgttcttcttgatacatgtcaaaaaagcttcgttgtagctcatgatgctattgtcatctaccctttatacatgggatgttgtcttgatggtatgtaa

SEQ ID NO: 134202 - DNA, 297 bp, Zea Mays
atgggagatggtgaggaaggagatggggaagatgccgagcaagcaccagagaagggtagcgacggccagcctccatggcgtgctccagccaccagggagcgacgaagtagaagacaggctggtgaaagctctgtgcgtttgctgtctcaaaaatatatcaagcgatgggataaggctgactgtaccagcgcggcgagaaaagatcaggacagtggcaaaaaatatgtgcgccatagagatcagtccagggcagcggcagaaatattagtagagagagaattttgcaaagaaaagtga

SEQ ID NO: 134203 - DNA, 381 bp, Zea Mays
gactaccttcctctcatcaccaaagttgaaagaagggtcaatgccattagttcttggttatctttagcaggaagacttactctggtcaactctactttctcggcgatgcctagctttgcaatttgcacctttaagattccggtaacagtcattgacgttattgaccgtaccagaagggactatctctagcgtgacagtaatgaaaatgtgaaccgaaatcctctggtcgcctgagacaaagtttgttgttccagaaatagaaggggcttgggggttctcaatctaaagattcagaacacaacccccttgctcaaattcatccataaattctatggcagagaagacataccttgggtaaatctaatctggaccactcactac

SEQ ID NO: 134204 - DNA, 302 bp, Zea Mays
aaaatttgggattgttagctcagaggatatggctgagcatgcttgtgaagatagatacgctaatgttgatttagtttgtgctctatgcgacaatggaagtaaaattgtaagggggtggagtacatcactggcgacgaacaacaaccattttgatttgtgtcatgtttctatctgtacctactctgctggagtactgggcaaacaataaatggacaacatcgtcaccatttatcagggaagctggaggtttgttgctctattgatttgacccaaattggttgtgtttcagtaatcttgatttt

SEQ ID NO: 134205 - DNA, 518 bp, Zea Mays
tgaaacaatagagaaaatgttggttcaaattataaaataccagttgtcttccatttgcctgactcagtgttttgttgggcatggtttacatgaatgccatcttgttgaatactatagttgcttacatcaaaaacaaatcatgaccatgcaagatgctatagtacttggtttgtgtaaccatgtaaactaaatatgtgtcaattggtgttacttgtagagtgcaaagtggaagcaacacatgaagtcgacatggagaagaaaaatgcaacgacagtccacatgaagcttgtgaaaaaagaattaaatcccaaagttcctaatgaagagacttgtattacagttttatgttatattgtctatctatttgtgtgaatggagatgaccttaatggatggattagcttcgttgatgctttagtttgatgttgttgctgcttcagtttgctactgatgatgcttttactgtcttttactactttagtttgcttgacaaactattgtgatgatgaataaagtgtg

SEQ ID NO: 134206 - DNA, 394 bp, Zea Mays
ttaggctatccgcagcggttccctctaaatttttccctctatatcacttttctgggtcacatcatcaatagtgtatcccctactttttcatctcccgcagtggtttcccctaaatactccccctatatcccactacaatataaaatatcattttctatacctacttttcatctactatcaatttttcttctactattaattgaaggcgggcccacaggaacagtggtagagggagagagcgcgcgcgctgcagcgcgctgcagctgaggggagagagaagagtaccgcgtggtggagtgcgcgatagcgtgctgcgctgcgtgctttagcgcgcgcgctgtagccgccatgcaagggagcgcgcgccgtagcgtgcggcgctgcgggcagtctt

SEQ ID NO: 134207 - DNA, 254 bp, Zea Mays
aatgcaaggatttctacaagagggtgcttgggctacataaaatattttgatgcacatttcacaaaactcactggtggtgtggagacaattgagaactgtgtttgtttgcatgaggaggatcatgggatcctttggaaacaccaagactggagaactggtttagcagaagtaaggcgatcatggaggctcactgtttcatttatctgtacagttgcaaactatgagtatggtttttactgacacttctatcaggt

SEQ ID NO: 134208 - DNA, 783 bp, Zea Mays
atggctggccagagtgcgggggccttcagccatggcgcagccgcacaagcatggaacgcacaagggggagggctggctagagcagggacttggggctttgattggttggagcaagcgactgccgcagctggggacgcaggcaacgacacacaatgtgagcgggtggccaatgacgaagttggggctgcacatgaccagcagagacatggaacgatgcggccacgacggttcggccagcgaacgacatggagtggagccgtgacgcgcagcaagtatcaggcgtggctgggcgcgctgcatagagtaaacaccatggctgaaatgagagaacgagaagcagggcatggccttaccttaggcggcgcaggatgtcacgaccatggatctcgacgcagctcaatggcgtcggaagggttgcttgccggtaggggaggcggtgctggccgagcatggggaagggggcgtcgaccaccaggaactggagaggagaggagtggcggccaccaggaaagatacgacgtcctcgcctccttgctgctggcatggggagatgagggagaggccgtgagcagcgtcggcatggggaaggaacagggccagtggtggttctgggtcttaggcgcgagagtcacgggggcagttaccgatctcccttgcgtcgtggccaatacaaccgtggaagaggttatagggaagaaaatcaagatggcgggtgggccccacggcgctgcgcttgcgcaggcacgggtgcacggccatatggtcggccatgctggatgctag

SEQ ID NO: 134209 - DNA, 348 bp, Zea Mays
atgccgcccgatgtcggtgtcgacgaaggtggccaccatctccagcacgccgaaccgcgcgatgtggttcatcaccacggggacggggactctatgcagcgtgccgccgcaggcgacgtcgagggcttctggcggcggcctttgtacgtacaagatagcctgggtcaccgttggacttggagaagctggagccgcagcatgttcttcgtcgctgttggtgtagtgcccgacgacgctggcagtgagcagctgttgcctgtagcagccgtcggcgacgacggtcgacgtcgaaggaagaagagcaggcacgctgaggtggacgaggaagctcttcacctcgccggcgta

SEQ ID NO: 134210 - DNA, 361 bp, Zea Mays
cgcagcccaaagctgccatgccgccgtcgcattccgagccgcctctgttctgccttccaagccaccgctgcgccgccacttgaccattccagtcgtgccgccgccgtccgcccgccctcgaatccagtcccgcggcacccataaccaactggacggcgctgccgccctcccccagccctagcgccgtagcaggccctcccctagtcccagcgttgccatccatcgatgatccgccaccacccctccatcggacgacaccgttgctcagtagactggattgtctcacgtgctcgacgcacgtgagatgtacccgtctagaattgtccctattatggacagcctcggagtgaccgacaggatg

SEQ ID NO: 134211 - DNA, 330 bp, Zea Mays
ccagatgatgtcggtgtcgacgaaggtggccaccatctccagcacgtcgaaccgagcgatgtggtttaataccacggggacggggactctctgcagggcgccgccggaggcgacgtcgaaggcttccggcggcggcctttgcacgtacaagattgcctgggtcaccattggacttggaggatctggagccgcagcgctggcggtgtagtggccgacgaagctggcggtgagcagctgttgctcgtcgcagccgccggcaacgacggccgacgtcgaagaaagagcaggcacgctgaggtggacgatgaagctcttcacctcgccggcgta

SEQ ID NO: 134212 - DNA, 2118 bp, Zea Mays
tgtgcaaattgccatgtcttgcatgtggagcaagtaattctacacaccagctggtctatatatgaagccagatagatcaaggtctaacacaacaacagcatcatccttagctgctgacacaaatggagatcttccaactccagctgatgatcctgccttcgctactcacatgcttcttctccacactcctactcacacagctgatggctgcggcgggggcggaggcgacggtgaaagtgagcactaccccaatcttccctgagatcccactgggccaggctagaaaggacttccaagtgctgctgcgcgtcgaggcgccggcggcggttgtgcgtcccgaggcgcgcgtccccatcgacgtcgtcgccgtccttgatgtcagcggtagcatgaatgacccaactgcagtgccaccggagaggaggacgacaacgtcgaggctggacctgctgaggacggccgccaagttcatggttgacaaactcgaagatggagaccgcctctccatcgtagcgttcagcgaccgacccgttagagaacttagctccggcttgctatacatgaccgccgacggcaggagaaacgcaataagaagcgtggatcggctcgaggcccgcgccggcagcggcactgcccttgtcccggccttcgaggaggcggtgaacatcctggacgagcgggtgggagacggccgggaccgcctagggttcatcatcctcctcaccgacggcgagggcacgaccgtgtccgcgctgagcgagcggcgccgagaggtgatccgacgcgctctcggcaggtaccccgtccacgccttcggcctcggcgcggcgcacgatcccgaggtcctgctccacatggcccaagagtctcacggcacctactccttcgtcgacgacgacagcatcggcgatgtcgccggcgccctcgccgtgtgcctcggcgggctcagcaccatcgctgccgtcgagacgcgcgtcgtcctcaaggccgacgagctgaacggggtgcgcatcgaccgcgtcgacgccggtggctacgacagcagcgtcagctgcggcggaacctcgtgcgaggtctccgtgggcaacgtcctgtacgccggcgaggcgaagcatttcgtggtccacctgcacgtgccagctgctttgccatcgtcgtcagcaaagggcggttactactgcgatggcctcggcgcctgtgaccgttactaccatcatcgccacgagcagcacctgctcgccgtcgactactcgtaccgcaaccatcccagcgcgcgggcgatagagggagaaggacacgatgtatatgtgcggaggtcaccggcggtgctagacggcgggcggcaagctcccgctcctgttccctcgcccgtggtcctgcagcacatcgtccggtccgagctgctggaggtggtggccggcgtcgtccaaggtgagctgaccatcaacgacagagctcgtgccgcagacgtgttgcagctcaggtgggaggagttcgcagcgtgccaccagttctggggcggcggccatgacctgatgagcggcctggagaaggaggtgggaggcatggtgagcagcctcagggccggggtggcggcctacgcctacgcctgggtgtccagccaccagatgcagcgcgccaccagcatgggctcggccgagaaggtgaccgtcgagttcctgacgccggcgatgcggctcctattggaggaggcgcggaagttgccgcggtggtggaactggaaccccccgcacacgggctgcgtcgaccacggcttcgagatgatagaccggaggctggagctgtggtccaagatgaagcgcgacatgcagaacctcgggtcgttccaggagcaatcggcggcggcggtggacgacgagcagcagcgcatggccgccgtcttccaggaggcgtcgctggaggccatcgaccgcgcgatgcaccgcgacatttacctggctgtggtttatgcgagcaagcagaggcaatgccgccacttggtggctgcacagaactgaaggcgcttgtactggccatgccctagtccgcaaatgtgttgtttcgtttaatgaaataagggtgcccatgaaataatatacattttttgccgttttattc

SEQ ID NO: 134213 - DNA, 824 bp, Zea Mays
aagccttcccaggacagatcttgggaatgccaatatccgcttgttccatgcaaaagaaaatggagacgtggctcgttttgacggcactcctgctttcactctctctggtttacttttttcttcctttcatttcatgtccttggattgatggcacctatggtgacgatgaatcatctacgcatacgcatgtgccgcaggctgccgccgccggcacggagacggtgaaagtgatcaccaccccagtcttcccccacatccctcgacttcaggcaagcaaggatttccaggtgctcgtgcgcgtcgaggcgccaccggcgctgcagcagcatagacgcgtccccgtcgacctcgccgtggtgctcgacgtgggtgccagcaccggcaccggcaccggcgtgccgaggctggatgcggtgaagaaggcggtcaagtttatcatcagccaggtccacgacaacgaccgtctcgccgtcgtcgggccgtccaactatcggctagtcaccgggttcaaggacacctacgacgcccgacacaatgcccagaaatccgtcgagcagctgcagcaccgtggtgagttcacgtcgggcgccggcttggaggaggccatcaaggtacttgcgacgtttctccatgcatcttcatttcacaactgctacctggtcttaccgactggaatttcagatcctggaggagctaccggcgacggcgagccgtagcagccgcgcgcgcttcgtcatcttggtgacggacagggcagtggcagagggcagcagcagattcagcaagctgccgcgcgagtccctccccccggtgcacacgttcgg

SEQ ID NO: 134214 - DNA, 1952 bp, Zea Mays
aagccttcccaggacagatcttgggaatgccaatatccgcttgttccatgcaaaagaaaatggagacgtggctcgttttgacggcactcctgctttcactctctctggtttacttttttcttcctttcatttcatgtccttggattgatggcacctatggtgacgatgaatcatctacgcatacgcatgtgccgcaggctgccgccgccggcacggagacggtgaaagtgatcaccaccccagtcttcccccacatccctcgacttcaggcaagcaaggatttccaggtgctcgtgcgcgtcgaggcgccaccggcgctgcagcagcatagacgcgtccccgtcgacctcgccgtggtgctcgacgtgggtgccagcaccggcaccggcaccggcgtgccgaggctggatgcggtgaagaaggcggtcaagtttatcatcagccaggtccacgacaacgaccgtctcgccgtcgtcgggccgtccaactatcggctagtcaccgggttcaaggacacctacgacgcccgacacaatgcccagaaatccgtcgagcagctgcagcaccgtggtgagttcacgtcgggcgccggcttggaggaggccatcaagatcctggaggagctaccggcgacggcgagccgtagcagccgcgcgcgcttcgtcatcttggtgacggacagggcagtggcagagggcagcagcagattcagcaagctgccgcgcgagtccctccccccggtgcacacgttcgggctcggcgaggcgcacgaccccagggagctgttgcatatcgccagggaatcccagggcacctactcattcgtggacgaccagaacacggacggcatcaccggcgccatcgccgtctgcctcagcgggctcaagaacgtggtcgccgtcggcgcgcgcgtccgccttgagacgcccgtcgggagcggggtcaccatcgagaggatccagtcggggggatacacatacagcaggactcgccccatcaccaccagagacgacaagacgtacgtcgaggtcgccctcggcgccctatacgccggcgaggtgaagagcttcctcgtccacctcagcgtgcctgctcttcttgcttcgacgtcgaccgtcgtcgccgacggctgctacaggcaacagctgctcaccgccagcctcgtcggccactacaccaccagcgacgaagaatatgctgcggctccagcttctccaagtccaacggtgacacaggcaatcttgtacgtgcaaaggccgccgccggaagccctcgacgtcttctgcggcggcgcgctgcagacagtccccgtccccgtggtgatgaaccacatcgcgcggttcggcgtgctggagatggtggccaccttcgtcgacaccgacatcgggcggcatagcaccgtcaccgcggaagtggcgacgaagctgcgggcccagtgggagaagtttgtgcaggcgcggcagttctggagcggcctggacctgggagtcctcgaggacgaggtcagctggatggttaacatcctagaaaaagcagcaagcagaagcggctcgtcggcggcgacggcctacatgctgtcgtggctgtcgagctaccagatgcagcgaccgacggccatgggatccccggacagcgtcgcggccgctttcgtcaccgtgaacatgcagctcacactgctggaggtgaggaaaggcatcgtcacacttcctccaccacaaccaccaatcgtctgcgtggatccactgccgccgccgctgttcaagccgtccggacggaacgacgacacctaccgcgtcgtcaacaccgcttacccgccgagcgtactggtggacgccatcaacgaagcaatgaagcagatgcacctggcgttggttcaggcgagcaaactccagcgatgcgatggtgccggcgtcgatgcgatgatgccacgggcagctggcgcattcgcatga

SEQ ID NO: 134215 - DNA, 2118 bp, Zea Mays
gatcttgggaatgccaatatccgcttgttccatgcaaaagaaaatggagacgtggctcgttttgacggcactcctgctttcactctctctggctgccgccgccggcacggagacggtgaaagtgatcaccaccccagtcttcccccacatccctcgacttcaggcaagcaaggatttccaggtgctcgtgcgcgtcgaggcgccaccggcgctgcagcagcatagacgcgtccccgtcgacctcgccgtggtgctcgacgtgggtgccagcaccggcaccggcaccggcgtgccgaggctggatgcggtgaagaaggcggtcaagtttatcatcagccaggtccacgacaacgaccgtctcgccgtcgtcgggccgtccaactatcggctagtcaccgggttcaaggacacctacgacgcccgacacaatgcccagaaatccgtcgagcagctgcagcaccgtggtgagttcacgtcgggcgccggcttggaggaggccatcaagatcctggaggagctaccggcgacggcgagccgtagcagccgcgcgcgcttcgtcatcttggtgacggacagggcagtggcagagggcagcagcagattcagcaagctgccgcgcgagtccctccccccggtgcacacgttcgggctcggcgaggcgcacgaccccagggagctgttgcatatcgccagggaatcccagggcacctactcattcgtggacgaccagaacacggacggcatcaccggcgccatcgccgtctgcctcagcgggctcaagaacgtggtcgccgtcggcgcgcgcgtccgccttgagacgcccgtcgggagcggggtcaccatcgagaggatccagtcggggggatacacatacagcaggactcgccccatcaccaccagagacgacaagacgtacgtcgaggtcgccctcggcgccctatacgccggcgaggtgaagagcttcctcgtccacctcagcgtgcctgctcttcttgcttcgacgtcgaccgtcgtcgccgacggctgctacaggcaacagctgctcaccgccagcctcgtcggccactacaccaccagcgacgaagaatatgctgcggctccagcttctccaagtccaacggtgacacaggcaatcttgtacgtgcaaaggccgccgccggaagccctcgacgtcttctgcggcggcgcgctgcagacagtccccgtccccgtggtgatgaaccacatcgcgcggttcggcgtgctggagatggtggccaccttcgtcgacaccgacatcgggcggcatagcaccgtcaccgcggaagtggcgacgaagctgcgggcccagtgggagaagtttgtgcaggcgcggcagttctggagcggcctggacctgggagtcctcgaggacgaggtcagctggatggttaacatcctagaaaaagcagcaagcagaagcggctcgtcggcggcgacggcctacatgctgtcgtggctgtcgagctaccagatgcagcgaccgacggccatgggatccccggacagcgtcgcggccgctttcgtcaccgtgaacatgcagctcacactgctggaggtgaggaaaggcatcgtcacacttcctccaccacaaccaccaatcgtctgcgtggatccactgccgccgccgctgttcaagccgtccggacggaacgacgacacctaccgcgtcgtcaacaccgcttacccgccgagcgtactggtggacgccatcaacgaagcaatgaagcagatgcacctggcgttggttcaggcgagcaaactccagcgatgcgatggtgccggcgtcgatgcgatgatgccacgggcagctggcgcattcgcatgatccagacaccggccgacgatccatcagtcattcacctactgctgctgtcctaccatatatatatgttcttgatttcttgtttttttcctaaaaaataaaggagagcatcaatttgcattggcgtaaattttattttctttaattagacgagggagtgtacgaatcactgtcaacactcaatgcaacaccacctcaaagcattgtattgtaaccaagcatgtgataatatatataataagcaatcggtccgcatgcatttatgcactgttatt

SEQ ID NO: 134216 - DNA, 1221 bp, Zea Mays
atgcgtgcatatcccaggttatgcccgacacgctggaagtcaggagtctggaagtctttcgatgccttgcctggtgttgtgatcctgaacgtattccatctaagaaatacctctggatcactgaaccagaccaagcttcagctgctgaagggaagaaggccctggtgtacccggtgcaaattcgttgggttcctgctgattagagtctcatgcctggcgctccatagccgccggatggaggtgacggttaggacaaacccgacacccccttcacggagaagatgtggtgacgacaaccctccacctactcaacgtgctgcaatcactgacgatcctggcaacaagacccaccctcaacggcggccggtacatgacaaattgggacccttgaggcgctcggattcccccagggaattgagccagccttgggttctgattgatacaaaggctcgcagcagccagccttgtgctctgattgatgcagtggcatgcagcagcgtagggagtccttcgacccctgtgccggacggggatcagtgtctggtggcaggggatgtgctgctgcggcgcgaggagggctgcaaagaagctgaagtaattccaaagaccccgatggccgtttccagcctttgcccttcctccggagggagacgcagattgatgatgaaggccactgcaaaacaagcaaagttcaggaatccgcccatcgcgttcttcagacgacagcgacgcgctccgaagacccctgagggcgccccacttccctcttgctcatctggtgaccggggggcagggagcaacctgggcgccttgcctcctgccccagctgctggggtggccgcgtcgcccctaccacatgggccgcccccgcatgaggagtcccaagggtcgtcaggacagcaggattttcttcgtcgagtttccaaagttgttggcgccgttcttccacttccaaagacagtgaaaggaggacgacgacgaaggcaacccacttcccctccgaacgcgattcgccggagtcggcgcgttgcgtggttgggagtggagcaagttcagcatattcccaaagcaagaaagaaaataatgaagtccatcctcgcggagccggatagtgaacatttcagccaacaaaatcttgatgcatatacgaagctcttccaagcacccttgtctcgtgcccaggtggaggctctcgctgctctctttggatgggcgatgtag

SEQ ID NO: 134217 - DNA, 3074 bp, Zea Mays
atcttgttctggaatgtccgcggtctcaactccgccgcaagacaagatgctgtaaggagtttggttgactcattaagagtggatgttgtctgtttacaagaaacaaagttggttgattgtgatcgtcgcacagttttgtcaatgttaggcgctgattttgacaataatttcgtttgcctcccctcggttggggccagtgatggggtgctgatcacttggagagcaaaattggggagaatcgttgcttcttgtgtggactccttcagtgtttcagtcaaattcaaccctgctgacggcgaggcttggtggcttacctgcgtgtatggaccacaaggacatgacagaaaaattgcctttatccatgagctgagagcgatcagagctgcttgcaccgggccttggctcctagggggtgattttaatctcaatttcagagacgaagacaaaaacaacctaaatatcaatcgggccatgatggggaggttcagaaggtgcatcgatgatttaagcatcaaagatattgaccttttaggctggaaatatacatggtctggcgctaataatgtacaagtcaggctggaccgggtcttctgttcttcagattgggaggaaaaattccccaattatctgctgcaaagctcagcttcagaggattcagaccactgtcctctcctgttgggattgaaggacaactacactgggaaacggagatttcattttgaatccttttggcccagatttgagggttttttggaagcggtaactaatgactggggttctgttcagcagtcttcttgtcccctcaagaccctttccctaaaattcaaggcgacaacaaaaggactgcaatgttggagtgacaaaaaggttggaaacttcaaactgcaacttgggcttgctagagaattattgctgcagctggaagtggcaaaagagagcagaattcttaatgttttggagacatggctgcttaggcgcttgaagaaatgctctctggctcttgcctccttaatccgctcggtggctaggactagatcaagaattgcctggctcaaagatggtgatgctaatacaaagctctttcactcttggtctcgtcatcggaaaagaaaaaatttcatagccaaaattcaagacggggagcagctagtgaccagtcatagcgataaggcagaggtgcttcggtccttctattcagatctaattggtacagcgcagcaaaggtccagaactgtcaaccttgacaccttaggactgcagcacattgaccttcaggggctcgagcagccaatctcggaggaggaggtgtggaataccatcaaacagcttcctccggacaaagccccggggcctgatgggttcacaggtcgtttctataaggcctgctggtcaatcatcaaaaaagacattatggctgctatcctggctgtctggaacaaggacttctggaacttcagatacctcaacacagccttcatcactcttttacctaagaaagaggatgccatccttgccatggactttcggcctattagcttgatccacagcttcgcaaagttaatcacgaagatcatggcaaacagactgagtggctatatggacaagctgatttctaggaaccaaaatgtgtttatcaagggccgattcatccaagacaacttcatgttagttcagcagactgcaagattgctgcatgctcaaaaacagcctagaattcttctcaagctggacatatccaaggcctttgattcggtatcttggtccttcttacttgaagtattggaaaaggttggattcggccccatttggagagatgtgatcagtgggctgcttatgacctcctctacccaaattatgcttaatggagtgcctggggaatacatccaacacaagaggggcctgcggcagggggactcactatcccctcttcttttcattatcgttatggatgttctcaatggcctaattgttaaagctgctgatgagggtctgctccaacccctttcaactcattccattcagcaccgaatatcgctctatgctgatgatgtggtgatattcttgaaaccgactgctagtgacctgcacttggtaaccatgatattggagttgtttggggatgcctcggggctaaaaaccaacgtacaaaaaagcagtgtggctccaattcactgctctccggtggacatggaaatggtaacccaaatttttccttgcaaagttgaaacacttcctctcaaatatctcgggctacctctctctcgggaagttaagcaaggagcaactgcagccattaattgataggcttgcggacctcttacctaattggagggccgacttgataactcgagctggcagagctatccaagtgcagcatgtactcacggcaacagttatatgacaagattagacgtggctttctttggaaaggtcgaaaggatgtgctcggtggccactgcttagttgcttggggcaaagtgacacgctcaaaggagcttggtgggcttggcatctcagatttagaaaagctgaattgggcccttcgggttagatggttgtggttggaaaaaacagacccctcgaagtcttgggctgatttacctctccagagttccagcattctgaaatctatcctctctacagctttgattacagaagtaggtgatggtcgtaacaccttgttttggagggacagatggttgatggggcagaggattgaggatctatctcctcatattttcgccctcgtcccgactaggattgccaataatagaacggtggcagaaggtatcgtggagatggcttggatccgggacctgagaggcaccatcacttgggttgtcctctctgattttttaactcttagtgaagtcattgcagatttctcccttagtgatggagtgccagacaatcatatctggaaattttccccgacaggccaatattcttcaaagtcggcttatgatatgctattcctaggatccacttcttttggagcctttgagcgcgtttgggagtcttgggcaccttcaaagtgcagtttcttcctttggcttgccatgcacaacagatgc

SEQ ID NO: 134218 - DNA, 77 bp, Zea Mays
gagggagagggtcagccgcctgcactgccgctgccggtctgccgcactagcacactgccggtctgccgccggccgcc

SEQ ID NO: 134219 - DNA, 1096 bp, Zea Mays
agatttgccatccctagcgccgtcaaggcctccggaaccggtcgcaagcggcgtaggacccccgccgctacagagccctcgtccgtcgcacttcgccgccgcgccggagtcatccagctcgtcgacgcctggcggagagatccccagtgcgaggggaacctccacgacgggagatcagcggtcaccacccatgaaagagtgatggaagcccaaagtagtacttgcttttcaaaagtcgtgggacctaacttatggtatggcgatcgcacaagacttacacccaagcaagaagaagctgcgcttggtttgtcacgtgcctgtggctctggcattccagcatacatttgcaccatgaagaagtctaatgttgtcaagagacagatggtattttcaagacagttcagtaagcgacacatattcggtcgtctgggcacttatgggtgtgaaaccagagtttttgcaggcagggacctgttcggcagtaagctcaacttctcaatgatccatggagaactaaggcttcttggtggatggcccctctttgtgaagagtcaccgtatcgaagcaggacacgtgtgtgctttcatgttccaggaagaggaagagggcgaactgtcacttagggtgcacgtgctgggtactatgccagtgccaacaatctagcctttgcttgtttcgttgatgaggcacgggatgaacgtcgctaacgaattatgcatcagacattagtattggaaacagcaacatgcagctagctatcttgctctggaaggtgacaagggtatctagattacagccttataggttgtgttgttgttgttctatctagataactatgtatggacatattgttcttttgtgttggagggagtaagcgttagtgttttgagacacaaagattgttattttttagactgaccgctccagttgtgcaaataggaactgaattagtggcattgttagcatgtacatgaaaacgtgatttgtgcagtgctgggattagcatgggaatgtcgtccaaggatggccttatattgtttcctcgcaatttgtggttggatttttctatcccatctttaaagtacatttggaatgt

SEQ ID NO: 134220 - DNA, 1107 bp, Zea Mays
agatttgccatccctagcgccgtcaaggcctccggaaccggtcgcaagcggcgtaggacccccgccgctacagagccctcgtccgtcgcacttcgccgccgcgccggagtcatccagctcgtcgacgcctggcggagagatccccagtgcgaggggaacctccacgacgcgaggagatcagcggtcaccacccatgaaagagtgatggaagcccaaagtagtacttgcttttcaaaagtcgtgggacctaacttatggtatggcgatcgcacaagacttacacccaagcaagaagaagctgcgcttggtttgtcacgtgcctgtggctctggcattccagcatacatttgcaccatgaagaagtctaatgttgtcaagagacagatggtattttcaagacagttcagtaagcgacacatattcggtcgtctgggcacttatgggtgtgaaaccagagtttttgcaggcagggacctgttcggcagtaagctcaacttctcaatgatccatggagaactaaggcttcttggtggatggcccctctttgtgaagagtcaccgtatcgaagcaggacacgtgtgtgctttcatgttccaggaagaggaagagggcgaactgtcacttagggtgcacgtgctgggtactatgccagtgccaacaatctagcctttgcttgtttcgttgatgaggcacgggatgaacgtcgctaacgaattatgcatcagacattagtattggaaacagcaacatgcagctagctatcttgctctggaaggtgacaagggtatctagattacagccttataggttgtgttgttgttgttctatctagataactatgtatggacatattgttcttttgtgttggagggagtaagcgttagtgttttgagacacaaagattgttattttttagactgaccgctccagttgtgcaaataggaactgaattagtggcattgttagcatgtacatgaaaacgtgatttgtgcagtgctgggattagcatgggaatgtcgtccaaggatggccttatattgtttcctcgcaatttgtggttggatttttctatcccatctttaaagtacatttggaatgtttattgta

SEQ ID NO: 134221 - DNA, 1190 bp, Zea Mays
gccatccctagcgccgtcaaggcctccggaaccggtcgcaagcggcgtaggacccccgccgctacagagccctcgtccgtcgcacttcgccgccgcgccggagtcatccagctcgtcgacgcctggcggagagatccccagtgcgaggggaacctccacgacgcgagtacttctctacttcctatcacaaaaaaaaagatttgcaatctagcatatttatggaagcctttgctccggataaaatttgcgggtcagggagatcagcggtcaccacccatgaaagagtgatggaagcccaaagtagtacttgcttttcaaaagtcgtgggacctaacttatggtatggcgatcgcacaagacttacacccaagcaagaagaagctgcgcttggtttgtcacgtgcctgtggctctggcattccagcatacatttgcaccatgaagaagtctaatgttgtcaagagacagatggtattttcaagacagttcagtaagcgacacatattcggtcgtctgggcacttatgggtgtgaaaccagagtttttgcaggcagggacctgttcggcagtaagctcaacttctcaatgatccatggagaactaaggcttcttggtggatggcccctctttgtgaagagtcaccgtatcgaagcaggacacgtgtgtgctttcatgttccaggaagaggaagagggcgaactgtcacttagggtgcacgtgctgggtactatgccagtgccaacaatctagcctttgcttgtttcgttgatgaggcacgggatgaacgtcgctaacgaattatgcatcagacattagtattggaaacagcaacatgcagctagctatcttgctctggaaggtgacaagggtatctagattacagccttataggttgtgttgttgttgttctatctagataactatgtatggacatattgttcttttgtgttggagggagtaagcgttagtgttttgagacacaaagattgttattttttagactgaccgctccagttgtgcaaataggaactgaattagtggcattgttagcatgtacatgaaaacgtgatttgtgcagtgctgggattagcatgggaatgtcgtccaaggatggccttatattgtttcctcgcaatttgtggttggatttttctatcccatctttaaagtacatttggaatgtttattgta

SEQ ID NO: 134222 - DNA, 1032 bp, Zea Mays
gccatccctagcgccgtcaaggcctccggaaccggtcgcaagcggcgtaggacccccgccgctacagagccctcgtccgtcgcacttcgccgccgcgccggagtcatccagctcgtcgacgcctggcggagagatccccagtgcgaggggaacctccacgacgtcgtgggacctaacttatggtatggcgatcgcacaagacttacacccaagcaagaagaagctgcgcttggtttgtcacgtgcctgtggctctggcattccagcatacatttgcaccatgaagaagtctaatgttgtcaagagacagatggtattttcaagacagttcagtaagcgacacatattcggtcgtctgggcacttatgggtgtgaaaccagagtttttgcaggcagggacctgttcggcagtaagctcaacttctcaatgatccatggagaactaaggcttcttggtggatggcccctctttgtgaagagtcaccgtatcgaagcaggacacgtgtgtgctttcatgttccaggaagaggaagagggcgaactgtcacttagggtgcacgtgctgggtactatgccagtgccaacaatctagcctttgcttgtttcgttgatgaggcacgggatgaacgtcgctaacgaattatgcatcagacattagtattggaaacagcaacatgcagctagctatcttgctctggaaggtgacaagggtatctagattacagccttataggttgtgttgttgttgttctatctagataactatgtatggacatattgttcttttgtgttggagggagtaagcgttagtgttttgagacacaaagattgttattttttagactgaccgctccagttgtgcaaataggaactgaattagtggcattgttagcatgtacatgaaaacgtgatttgtgcagtgctgggattagcatgggaatgtcgtccaaggatggccttatattgtttcctcgcaatttgtggttggatttttctatcccatctttaaagtacatttggaatgtttattgta

SEQ ID NO: 134223 - DNA, 1365 bp, Zea Mays
aaagcaaccacgaaccgagaggcgagcggacccaccccgcccgactgtcgttatccggattccggtccctcctcccaagtcccaactgttcacctcccgccgccccctcgcgccgtcaaggcctccggaaccggtcacaggcggcgtaggacccccgccgctacagagccctcgtccgtcgcacttcgccgccgcgtcggagtcatccagctcgtcgacgcctggcggggagatccccagtgcgaggggaacctccacgacgcgagtacttctctacttcctgtcacaaaaaaagatttgcaatctagcatatttatggaagcctttgctccggataaaatttgcgggtcagggagatcagcggtcaccacccaagaaagagtgatggaagcccaaagtagtacttgcttttcaaaagttgtgggacctaacctatggtatggcgatcgcacaagacttacacccaagcaagaagaagctgcgcttggtttgtcacgtgcctgtggctctggcattccagcatacatttgcaccatgaagaagtctaatgttgtcaagagacagatggtattttcaagacagttcagtaagcgacacatattcggtcgtctgggcacttatgggtgtgaaaccagagtttttgcaggcagggacctgttcggcagtaagctcaacttctcaatgatccatggaggactaaggcttcttggtggatggcccctctttgtgaagagccaccgtatcgaagcagaacacgtctgtgctttcatgttccaggaagaggaagagggcgaactgtcacttagggctgatttggtgatttggtgattagggatccctaggggatccatggggaggaatcatcttgcaattcaattttgaatagcaagaggatttcttcccctcgggatccccggtcaccaaatcagtccttagggtgcacgttctgggtactatgccagtgccaacaatctagcctttgcttgtttcgttgatgaggcacgggatgaacgtcgctaacgaattatgcatcagacattagtattggaaacaacaacatgtagctatctagattacagccttataggttgttttgttgttctatctagataactatgtatggacatattgttcttttgtgttggagggagtaagcgttagtgttttgagacacgaagattgttatttttagactgaccgctcgagttgtgcaaataggaactgaattagtggcattgttagcatgtacatgaaaacgtgatttgtgcagtgcagggattagcttgggaatgtcgtcctaaggatggccttatattgggcctgtttggttcaacttttttcttaccagcttttctgaaaatctgg

SEQ ID NO: 134224 - DNA, 1756 bp, Zea Mays
atgctgggacttccaagccactggagacctcgcatgctcgagctgcacaacgaggagggacgttgtgacagcggaagcgaggagcggggagggacgtcgcaacaaccgcgtcaaggaacgggtggtggtggggttgctgtcgctggtcgctgtcgaaactggacgatggtcctgtggacaggaagagcacggcggccgacatggaactggacggtggcaaacgtggcgccgaccgtgcgggatacatttcgacggcggcaatcttgggggggcgaggggcaatctcgggtcggggtccctcccaagtcccaactgttcacctcccgccgccccctcgcgccgtcaaggcctccggaaccggtcgcaagcggcgtaggacccccgccgctacagagccctcgtccgtcgcacttcgccgccgcgtcggagtcatccagctcgtcgacgcctggcggggagatccccagtgcgaggggaacctccacgacgggaccttccttcctgatacaggaaggcagggttcatgagcggcggcacgcctgcagcaagcagtagcctgcgggcagcactctcatactgtgtgaggcaagtccgtgcctatgactaccaccactacctctgccttctccacctggccccggccatgcgcaaggccgcgttcaccttccgcgccttcaacatcgagacagcaagggccatggatgtggtgtccgacccccggacatgcctcatgcgcctcctctggtggaaggaggcggtcgacaaggtctttggcaacaagctggtcgagcacccagttgcccaggcgctctcttcggtcatcgcagaccacaaggttagcaagcactggctgaagcggtccgtggaggcaaggatcaacgacgccaaccgtgaggaaggcaccattcctgggacgagcgcggagttggagaggtatgcggaggacacccagtccaccatcctttacatgaccctgcaggctggcggaatacagtccaccgtggctgaccacgccgcctctcacatcggcaaggccagcgggcttctgttactgctcaaggcgctgccgcaccatgtaaataagcaagggacggtacattatatcccagctagtgtggccgaggaatgcggcctgctcatcacacgggagggtggcaggtcggaggtcagggcgggcaagaggctgccagacgcagttttcaaggtcgcatctgttgcggaggctcacctgcacaaggcgcgggagttggcatcgtccgtgcccaaagaggcgatccccgtgctcctcccagccttgccggcccaggtcctcctggataccctgcgaaggtgtgagttcaacgtgtttgatcctcggctgtcgaggggagtccacggggtctctcctctgtggtaccagctgaagcttaactggaacgcgtggcgaagcaggtactaatgaggaggaactttttgccctcagccatgggagctgctgctgttccttgtagcaaaaagctttttattggggttttttgacatagcagagattgaataagatgagtagggtctgctacttgcggcagatttgaagctgttgaatatgtgtcgtgctttccgttgtgtttgtgggctgggctcatttacattgcacaattgcaacactgacaatgcctgtttttttttcttttggaacatacaatgcctgtttgtattcatacagcagaaagcagacactattttttcgataaacgcaattagttactctatagtctat

SEQ ID NO: 134225 - DNA, 419 bp, Zea Mays
aaaataagattatatttagaatctctttttcagatgctcttagctaatctcgcgaaaaaaatttaaagccaaccacgaaccgagaggcgagcggacccaccccgcccaactgtcgttatccggattcaggtccctcccaagtcccaactgttcacctcccgccgccccctcgcgccgtcaaggcctccggaaccggtcgcaagcggcgtaggacccccgccgctacagagccctcgtccgtcgcacttcgccgccgcgtcggagtcatccagctcgtcgacgcctggcggggagatccccagtgcgaggggaacctccacgacggtaagcatagcttcagttccggagacgagcccccgcttggtatggtagcatggcaaacgtaggccggtggttctttcgattttggatttgggttc

SEQ ID NO: 134226 - DNA, 1335 bp, Zea Mays
aaagccaaccacgaaccgagaggcgagcggacccaccccgcccgactgtcgttatccggattccggtccctcccaagtcccaactgttcacctcccgccgccccctcgcgccgtcaaggcctccggaaccggtcgcaagcggcgtaggacccccgccgctacagagccctcgtccgtcgcacttcgccgccgcgtcggagtcatccagctcgtcgacgcctggcggggagatccccagtgcgaggggaacctccacgacgcgagtacttctctacttcctgtcacaaaaaaaagatttgcaatctagcatatttatggaagcctttgctctggataaaatttgcgggtcagggagatcagcggtcaccacccaagaaagagtgatggaagcccaaagtagtacttgcttttcaaaagtcgtgggacctaacttatggtatggcgatcgcacaagacttacgcccaagcaagaagaagctgcgcttggtttgtcacgtgcctgtggctctggcattccagcatacatttgcaccatgaagaagtctaatgttgtcaagagacagatggtattttcaagacagttcagtaagcgacacatattcggtcgtctgggcacttatgggtgtgaaaccagagtttttgcaggcagggacctggtcggcagtaagctcaacttctcaatgatccatggagaactaaggcttcttggtggatggcccctctttgtgaagagccaccgtatcgaagcaggacacgtgtgtgctttcatgttccaggaagaggaagaggaagagggcgaactgtcacttagggtgcacgtgctgggtactatgccagtgccaacaatctagcctttgcttgtttcgttgatgaggcacgggatgaacgtcgctaacgaattatgcatcagacattagtattggaaacagcagcatgtggctatcttgctctggaattagttgttgttgttctatctagataactatgtatggacatattgttcttttgtgttggagagagtaagcgttagtgttttaagacacaaagattgttatttttagactgaccgctccagttgtgcaaataggaactgaattagtggcattgttagcatgtacatgaaaacgtgatttgtgcagtgctgggattagcttgggaatgtcgtccaaggatggccttatattgtttcctcgcaatttgtggttggatttttctatcccatctttaaagtacatttggaatgtttctaattcttcttggaagatgtttgagaagtgtaagatacagctatgtacgactatgattcctttcattgttttcatcaagttggtgtga

SEQ ID NO: 134227 - DNA, 1178 bp, Zea Mays
aaagccaaccacgaaccgagaggcgagcggacccaccccgcccgactgtcgttatccggattccggtccctcccaagtcccaactgttcacctcccgccgccccctcgcgccgtcaaggcctccggaaccggtcgcaagcggcgtaggacccccgccgctacagagccctcgtccgtcgcacttcgccgccgcgtcggagtcatccagctcgtcgacgcctggcggggagatccccagtgcgaggggaacctccacgacgtcgtgggacctaacttatggtatggcgatcgcacaagacttacgcccaagcaagaagaagctgcgcttggtttgtcacgtgcctgtggctctggcattccagcatacatttgcaccatgaagaagtctaatgttgtcaagagacagatggtattttcaagacagttcagtaagcgacacatattcggtcgtctgggcacttatgggtgtgaaaccagagtttttgcaggcagggacctggtcggcagtaagctcaacttctcaatgatccatggagaactaaggcttcttggtggatggcccctctttgtgaagagccaccgtatcgaagcaggacacgtgtgtgctttcatgttccaggaagaggaagaggaagagggcgaactgtcacttagggtgcacgtgctgggtactatgccagtgccaacaatctagcctttgcttgtttcgttgatgaggcacgggatgaacgtcgctaacgaattatgcatcagacattagtattggaaacagcagcatgtggctatcttgctctggaattagttgttgttgttctatctagataactatgtatggacatattgttcttttgtgttggagagagtaagcgttagtgttttaagacacaaagattgttatttttagactgaccgctccagttgtgcaaataggaactgaattagtggcattgttagcatgtacatgaaaacgtgatttgtgcagtgctgggattagcttgggaatgtcgtccaaggatggccttatattgtttcctcgcaatttgtggttggatttttctatcccatctttaaagtacatttggaatgtttctaattcttcttggaagatgtttgagaagtgtaagatacagctatgtacgactatgattcctttcattgttttcatcaagttggtgtga

SEQ ID NO: 134228 - DNA, 825 bp, Zea Mays
atcggaggggattgagatggcatgggccgtagccgaaattggaagaagccctccgcagtaaactacgcatctggctgaccccacccgctcgcctcccacccacgcgttccagctcaccgcccacgaccacctcgccggcggccgcagcggcgccacggtgctcggctagggttccgcttcacccccctacccccctaacgaaagcgagagtgtggcatccgcgcccgcccggaggggcaagtcggagatggtgttcgtgtggctcaccgcgttcttcctcgtcgtcgcactcatcgtgcttgtcatctaccagctgatgtgcttggcggatctagagttcgattatatcaacccattcgattcatcctctcgaataaacaaggtcgtgatgccagaatttgtgttacaagcacttctcagcgtgctgttcctcttatctggccattgggcgatgctgttactttctctcccaatggtgtactacaattatacgctataccagcggcgacaacatctggtagatgtgacggagatatttaatcaacttggccgtgagaagaagcggcgcctttttaagatagtcagcctcatagttctcctgttcctgtccttgttctggatgatctggagtgtgttgtcggaggaggacgagtaggctgacaagatccggatggtagctcactctggccttgcaatcgttagttaggtaacaccagatgagggttgccatggcaggctaaacatgtcttagcgttatcactttgatactgttaattaacttttgaatctacggttgaatgtaggctatctggttcaatgtgaggc

SEQ ID NO: 134229 - DNA, 1227 bp, Zea Mays
atcggaggggattgagatggcatgggccgtagccgaaattggaagaagccctccgcagtaaactacgcatctggctgaccccacccgctcgcctcccacccacgcgttccagctcaccgcccacgaccacctcgccggcggccgcagcggcgccacggtgctcggctagggttccgcttcacccccctacccccctaacgaaagcgagagtgtggcatccgcgcccgcccggaggggcaagtcggagatggtgttcgtgtggctcaccgcgttcttcctcgtcgtcgcactcatcgtgcttgtcatctaccagctgatgtgcttggcggatctagagttcgattatatcaacccattcgattcatcctctcgaataaacaaggtcgtgatgccagaatttgtgttacaagcacttctcagcgtgctgttcctcttatctggccattgggcgatgctgttactttctctcccaatggtgtactacaattatacgctataccagcggcgacaacatctggtagatgtgacggagatatttaatcaacttggccgtgagaagaagcggcgcctttttaagatagtcagcctcatagttctcctgttcctgtccttgttctggatgatctggagtgtgttgtcggaggaggacgagtaggctgacaagatccggatggtagctcactctggccttgcaatcgttagttaggctatctggttcaatgtgaggcaaaaaaagaaaggaaaaaaaaggcaacatgcccccccctccccccaacagtgagcgagattgatgcaccaggctggttattgttcagttcagtggaagctccaactgttgtagcgtgcgccatgtgtatcgtgagccattcccgccatttgttgagcttgattggactgcgcatcaatactcacggggcaaagaaatagttacacagattaagtatgtgctctttttaatttgcataaaccctggtaagctgccaccatgtttgatggttcattgttttatcttttgctggagttcccctcgtatctcatgttaccccgccggcccgcccctagtcgtcattagcagtgcatttgctggttaaattgccgccacactgagtttccagcgcatcttgctggtactggatgcagctcatcaccgggtgctctgtgagcagctgtgctggaccaggaactgcagatctcactctttatcgctccctattttaaactttactc

SEQ ID NO: 134230 - DNA, 1192 bp, Zea Mays
ccgaatttcagattgaggttaaaaaaggtcagttgttggttcccctggtcgtgtgcacacgagatggactgatctatagggggtagatcctcgtgtctgggctgggagggctcaaagcacgagtaaagatctgacctatagggggcgaaccctcatgttgcacgggggactagctttcgtgatctttctcgatcggggtttcgattgagcttcttcttaatataataccgtgggggcggtctttcccctaccggctaagtttttttttctatagtttctccctgacaattgtaatttttggccactaagctgtccagttttcacttttcagaaccttttcttgttgtccagagagtaaccatcgattggttattaaaccacttgaaagctggaacaagcaactctagtttcctttcagcaccggtcacagataagtttatatgttttatgacctttgcagataccagcggcgacaacatctggtagatgtgacggagatatttaatcaacttggccgtgagaagaagcggcgcctttttaagatagtcagcctcatagttctcctgttcctgtccttgttctggatgatctggagtgtgttgtcggaggaggacgagtaggctgacaagatccggatggtagctcactctggccttgcaatcgttagttaggctatctggttcaatgtgaggcaaaaaaagaaaggaaaaaaaaggcaacatgcccccccctccccccaacagtgagcgagattgatgcaccaggctggttattgttcagttcagtggaagctccaactgttgtagcgtgcgccatgtgtatcgtgagccattcccgccatttgttgagcttgattggactgcgcatcaatactcacggggcaaagaaatagttacacagattaagtatgtgctctttttaatttgcataaaccctggtaagctgccaccatgtttgatggttcattgttttatcttttgctggagttcccctcgtatctcatgttaccccgccggcccgcccctagtcgtcattagcagtgcatttgctggttaaattgccgccacactgagtttccagcgcatcttgctggtactggatgcagctcatcaccgggtgctctgtgagcagctgtgctggaccaggaactgcagatctcactctttatcgctccctattttaaactttactc

SEQ ID NO: 134231 - DNA, 531 bp, Zea Mays
atgaggctgcaggtgctggttctgctgcggctgcggcaggggctcgtcgtcttcgagcgggaggcggtcgaaggcggcgttgccgaagcaggcggcgacgatgacgacggggccggaggcgacgagcggcccagccacggcgcctcccaccacctggccctgcccggcggagaggtagacggtgaggcccgtggcggccagcggcggcaggaaggagccgcagagggagagcacctcgaaccgccccgccagggtcgtcgtcacgacggcgccgggctggttccggatgcgcacgttggccacgctgccggcgccgctgagcacgcacacgcccacctggcggcggcgcgcgaacgccgccacgctgcccaccacgtcgcagccggcggccacctccagcacgtgggcgcgcagcgcgctggcgctgtcccgcgtgatgatcaccggcggcttcggcttgttcttggacggctggaccccgcggggcggccccgcgggcggcggaccaccggcaccgggtactggtgctag

SEQ ID NO: 134232 - DNA, 255 bp, Zea Mays
gcatggcgcccgaactcggtcgcccgctctcggccggtggctcgtcgccgacgtcgttgacgcgaatcattgcaggtgatgagagagggagtgagacagcaagtacaagcacgtacaggtcatcatcattataatttatccaccggtcacgaactgattagacaaagaaatgaatgaagccatccccaactaatcgcacgacgactaaaaccatgaggcatggacgccggctgattgtaatactaataaaaaaaa

SEQ ID NO: 134233 - DNA, 896 bp, Zea Mays
gacaaactgcaaacacggttgcgggtagaaggtggaattaaagcgttgcttggaatggttaggtgtgggcaccctgatgtccttgctcaagttgcacgtggcattgcaaattttgcgaaatgtgaatctagagcagctactcaaggaaataagatggggaaatcactattaatcgatgatggagcgcttccctggattgtaaaaaatgctaacaacgaagctgccccaattaggcggcacatcgagcttgcactgtgtcatttggcacaacatggtacccttcccagcatccctccttttattgcgcgtgcacacacacaatattatatgcttaagtttgaatgtgttcttttttttcgcagaagtaaattcaaaagacattatcaatgaaggtgccctatgggagcttgttcggatctcaagggactgttctcgagaagatataaggaatttggcataccggacattgacatccagccccactcttgaagcagagatgaggagattaggaataaaaatgtgataacagaacagagtgcagctggggctcacactatgaagttccatttctcgtgcacatacagaggtgtccgttgctatgggcgctggtaatcaagcacatcttcccttgatctacctgattttggcaggcatacacgggcaccgcactgactaatcagaagaggcaatggccttcgcaccaactttctcctcgagagttcatttttctttggtttgagggggcagttgaaaatctcgacagcactagcaattcgtttattttgtaaaataatgctagcatagcagatgttacctacccccaatgcagggtttgtaaattttttgctgtaaaaatatcaaggccaaaaggagtgctttcgcagtttgaagcataa

SEQ ID NO: 134234 - DNA, 1924 bp, Zea Mays
ccgaagctgggaagtggggatgtggaatacagccaccgacattttgttcacaatgtccgaaaaagggaaagaataactttttcctttgctcatttggcaaaaatacacgcaacactgactcctgtgcatcggctctgcaggcgggccctacaaatactccctgcctcccctgctttcttccccccaaatttgcttcccagatctgcccgccgcacccccaacccgtggcaatcaatccccttcctcgcttcgcaaatggctcattccaacggcgcggccgccactgccactgccggcggcggcgacatggacgacgagaccgccccggtgccgcgggccctcgcgccggcgcggaaggtggcgctgatcacgggcatcacggggcaggacgggagctacctcacggagctgctcctgtccaagggatacgaggtgcacggcctcatccgccgctcctccaacttcaacacgcagcggctggaccacatctaccacgacccgcacgcggtgccgtcggccccgcgtcccccgatgcggctccactacgccgacctgtccgactcctcttccctccgccgcgcgctcgacgccatctcccccgacgaggtctacaacctcgccgcgcagtcgcacgtcgccgtctccttcgagatccccgactacaccgccgacgtcaccgcccacggggggcgctccgcctcctcgaggccgtccgcctgtcgcgcaagcccatgcgctactaccaggccggttcctcggagatgttcggctccacgccgccgccgcagcgcgaggacacgcccttccacccgcgctcgccctacgccgccgccaaaggtcgccgcgcactggtacaccgtcaactacccgcgaggcctacggcgtattcgcctgcaacggcgtgctcttcaaccacgagtccccgcgccgcggcgagaacttcgtcacgcgcaagatcacgcgcgccgtcggccgcatcaaggtcgggctgcagaccagggtcttcctcggcaacctctcggccgccagggactgggggttcgcgggggactacgtcgaggcaatgtggctcatgctgcagcaggaacagccgggggattacgtcgtcgccactgaggagtcccacaccgtcgaggagttcctgcaggctgccttcggctacgccggcctcagctggaaggatcacgtggtcattgacaagaagtacttccggcctgcagaagtcgacagcctcaagggggacgccaccaaggcgaggaaggtgctcaagtggaagcccaaggttgggttccaggagctcgtggagatgatggtcgatcacgacattgagctcgccaagaaggagaaggtcctggtggatgctgggtaccgtgatcccaagcagcagccatagaaacatcacagttgcttcttgctctgttggggctcggattcagattgttcccctcatacatggtgggtctcaggggtagaggttgactgaagttactatcgatatttatcctggtaagaaataaggattgttgcagtatgatcttacagtgtgttcatttagttttctgactatgttatgtgctttaatcgaatgaatgaataatccgtgccaatttggtatttggaagaggatgatatgcctgcctgattgcagctgttgatgttaagagcaaaagtgtcctcctgatagcagctgcttcagtttgtattgttccacttcagctactcccacacttgttctgatacatggcagaaaagctgttgtagggacattttgtaagttgaatcagtggcaaatgcatccaacaacacttgcagttgaagaggggaacaaacaaaaggaaacaaaaaatagcacctaactctacctctacctgtgcagggagagcaattttaccattattatcaatggatttaccatgttggagtc

SEQ ID NO: 134235 - DNA, 2074 bp, Zea Mays
aaaaaaaaacagaggaaagaaaaaaccgtcagagcgacgttagtcggctcagctgtagtgtagttgcaggtgttcgccggcacacgcgcgtggccgcgaaccctagatgacaccggcgaacggcgccccagcgcgggcagcggaggcgggcccccacgaggtggagtcggaggccgacgcgttccggcgccaggtcgacgacctcgtctcgaagaccgacgtgctggagcggcgggtgaaagaggtggcggacttctacgatggcaaaaagcacggaagcggcgggaggaagggtggtggtggtggcaggtatggggcatcctcgaggggaatgccggaccttatgcgccagttcggcgtgcttttgaaagagatcacctctcataaagatgcatggccatttctggagccggtggatgttgtaactctacagcttcctgactatcacaacgtaatggctaaacctgctaatataattttgtcatttatcgctgcagttgattcctaacagagtagtaattttggttacaaggggatattgttgtaggtaggtgaaaatatttatcactaatgttgttgtatatctttagtgttatcctggatgtatgagcaatacaaaatcttgacaaggtacactgacttttatcttgatccagtttggcctccgtttgccttatattgcaagcacttgtatataaatataagtatataactacaatagacatgagccattgtagttagtggcttttcctttatcagtggaaccttctcacccccttttgagagttttaccattgaatgaatacaacagtttatgttcagtttcttgaaatacaaggttgtatccttaacctctattatctgttacatgattgtatcatttattattttttatgtatcacttcaaattgtggaatccttgacatgtagctgtatatgtttctctgtatttagcttctccttggaaactggttagatgcaccttagttacttattagttagagctgcttttgttatcgaacagccaaggcagggacacttgatatttatttatttatgtttcaataaagtttgtttgtagtggttcatgtatttagtttatcttgttgacagattattacccaacctatggacttctctaccatccaaaagaaaatggaaaggaaggatggtacttgttacaccaatgttagagaaatatgttctgatgttcgattaatttttgccaatgcgatgaagtacaatgatgatcaaaatgtcatccacttgatggctaaatcattgcttgagaaatttgaagagaagtggctccattttcttcctaaagttgagagtgaggaaaaaagacaaaaggaggaggaatcaaagggtgttgcagccacaaatacttctcgagaagttgcaatcgtaaaattagcaaaagacactgatgatgagctaaatcagatcaacaagaagctggaggagctccggaaaatggtggttcacagatgcaggaaaatgacgacagacgagaagaggaagctgggtgcaggtatctgtcacttgtctccagatgatcttagcaaggcgctagagattgtcgcacaagacaatcctagcttccagactaaagcagaagaagtggatcttgatatggatgcccagagcgagacaactctatggaggctgaaattctttgtgagggaagcgctggaacgacaggccaacgttgcctctgggaagatggacgaaaacgccaagagaaagagggagatatgcaatgctctggccaaaaccacctcgagacggatcaagaagcagccctagccatcttccatatctttcactcgcgtcctctgattgtttagaagttctttttttgatactagccaccagctttgtgaaacgttttcctgcattttttttgtgatgtgtatatagtagtatagtgaactgtccagtccagtaacaagtgatttcgtgtgtaaccatgagctggtcgcattcgcgtcccctctgatccaacaacaaacattgtctcacaatgtgattgattgtagaagcaagcttttgtcacagggcgatgttgctc

SEQ ID NO: 134236 - DNA, 1510 bp, Zea Mays
aaaaaaaaacagaggaaagaaaaaaccgtcagagcgacgttagtcggctcagctgtagtgtagttgcaggtgttcgccggcacacgcgcgtggccgcgaaccctagatgacaccggcgaacggcgccccagcgcgggcagcggaggcgggcccccacgaggtggagtcggaggccgacgcgttccggcgccaggtcgacgacctcgtctcgaagaccgacgtgctggagcggcgggtgaaagaggtggcggacttctacgatggcaaaaagcacggaagcggcgggaggaagggtggtggtggtggcaggtatggggcatcctcgaggggaatgccggaccttatgcgccagttcggcgtgcttttgaaagagatcacctctcataaagatgcatggccatttctggagccggtggatgttgtaactctacagcttcctgactatcacaacattattacccaacctatggacttctctaccatccaaaagaaaatggaaaggaaggatggtacttgttacaccaatgttagagaaatatgttctgatgttcgattaatttttgccaatgcgatgaagtacaatgatgatcaaaatgtcatccacttgatggctaaatcattgcttgagaaatttgaagagaagtggctccattttcttcctaaagttgagagtgaggaaaaaagacaaaaggaggaggaatcaaagggtgttgcagccacaaatacttctcgagaagttgcaatcgtaaaattagcaaaagacactgatgatgagctaaatcagatcaacaagaagctggaggagctccggaaaatggtggttcacagatgcaggaaaatgacgacagacgagaagaggaagctgggtgcaggtatctgtcacttgtctccagatgatcttagcaaggcgctagagattgtcgcacaagacaatcctagcttccagactaaagcagaagaagtggatcttgatatggatgcccagagcgagacaactctatggaggctgaaattctttgtgagggaagcgctggaacgacaggccaacgttgcctctgggaagatggacgaaaacgccaagagaaagagggagatatgcaatgctctggccaaaaccacctcgagacggatcaagaagcagccctagccatcttccatatctttcactcgcgtcctctgattgtttagaagttctttttttgatactagccaccagctttgtgaaacgttttcctgcattttttttgtgatgtgtatatagtagtatagtgaactgtccagtccagtaacaagtgatttcgtgtgtaaccatgagctggtcgcattcgcgtcccctctgatccaacaacaaacattgtctcacaatgtgattgattgtagaagcaagcttttgtcacagggcgatgttgctcacttgtggaatcagatgatgcatacatttcgtaactgttcattcattctccaccttggcttgaaaattaaggtgagaaggcctgcggatttacatgtt

SEQ ID NO: 134237 - DNA, 342 bp, Zea Mays
atggaagccaaccccaaccactgcctctgccgcctcgcctcagctctctcccacggtccccggcttccgactcctcccccgcccctcctcttcccccgcctcgcactctccagctccgtgccctccacgggcccgccaccgtcgctggatgccgtaaggaagggggagggagaggaagcggcggaagccagggcctccgaagctgatgccgaagcggggaaggaggaggagcatgaggacgacggcggtgcgcacgtgaacaaggccacctgcgaggtcggcagcgtctccaatgctcaacaactaccggccatggtcctcagcgacatcaagaacaagtaa

SEQ ID NO: 134238 - DNA, 1938 bp, Zea Mays
acttaacaagtccgtggaaatttgaagaaatggtgctggtgccatacactataactgacagcaaaagaatagttttagatagataacatgaacaaatagctcaaagggccctcctttgctttccttctctgcttgaatgagaatagcagcacatcactgcaatctgccagatgagcaacaactacctaacaggctaacaactacctaacatgatccatccactccattcatttgatttcaacttcgtgccggcttctccaacactgcagagaggtacatcgccggctttgcgctccctgttccggccttctctcccgttacccatttgagcttcttgtaaccaaacctaccaattagcctgacgagcagctgcctccgttcatcgctgtggcacacgtagctgtcaatccagagcagcccacgggcgcgcagcacccggtcgacatcaaacatgaagaactcaagcgcttcctccgtcccggcctgacccagcgccggcgaccctccttcggccagcgcggtggtcccgacgtgcacgaggtcgaacaccccgtcgtagaacgggaaccggtgcgccggcgagagcagcagcgggaacagccccctggccgccacgaactcgttcatgggcttcccggcgctgtcgagtaccgtggtgaagacggtgaccccgcgctccctcatccgggcggcgaagttggcggcgccgccggcgacgtcgaagccgatccggatcttgccgccgccgccggcgaggcgcaggacgtcgtcgatgaggaactcgtggtcgtggcgcggcttcacccagcggtggctgtcgacgcccatgttggaggccgggagcgcggcgcgcgggccccgggagaggcagcggcggcggggcagcggctcgcaggccttggagatgaggcggtgcgggagcgtggcgttgcgccgcgggcaggcggtgtggggcgtgtaggtggcgaaggcggccaggagcgccagcgtgggcggggagcggaagcaggcgtgcgccacggaggccggcatgtgggtgagccccgtgcgcgcgtcgcggcccagcgggagcgcgtgcggggacaggaagaggagcagctccgggggcagggcgccgccgccgtggcgcgggacgaggcgggtcgcgtcgatctcccgcgcgatggcggccacctgcgcggagatggcggcggaggaggagaggttggcggcgccggcggcggggacggagtgcgcgcggggggagagaaaggcgcggagcgccaggaggttggtggagaggagggagagcagcacgagcaggttgagcagcgcggacgagcacagccacgccaggcgccgcccgccgcgccgggatgacgccacgttcagggacaccgaccccatcgcgcggcggcgccactgcccacggcctgcagaggagagaaaaggccgcagatttcgccgacgctgggattcgccgcgttcgtgtcagtgtgcgactgtgcctgtgcgtgcgtccgcgctcgagctcgggacggggaaagggagtgggggctggagatagcgacactggaggaggcgcgtgaatggtatgtcggctgcccgtaaccccgtgcccaacacccggattatcagaacgacccggctgttccgtactgtactaaacattcggtcgagacgagagagagagagagaggggggaaggatctgtgacagcaatcaaatcaaatggtaacattaaagcttggtaacgagctgacgagttgggcgatcagtcctgttttgtgaatgccctaatgacatgtttggatgaaactgattctactgacattgattgaagttgagaaattgaaggttggaaggaaagtgttgttcccatttttaatttcgttgttgcactgaactaaatttgttgcttttaaaacatgtaatctgagaaatttgctatttgagatg

SEQ ID NO: 134239 - DNA, 900 bp, Zea Mays
atggcgcgcggcggcatcgcccgcctactcgccacgctcctcctcttcctcctgctcgccacgcccctcgcagacggagcttccgaggcagaggcgggcctcgcgcagggcgcgtccgaggcggcggcgccggacgcgggcgcggacgcgcagcagcagcacctcctgccgcggcccctcgtcatcgagctcccgtcgtcgcgggccgaggacgaggacgagcccggcgccgacgccgtgccgccggacgtgcgctgcgccagctggcggctggcggcggaggccaacaacctcgcgccgtggagggcggtgccgccggagtgcgcgccgcacgtgcgggactacgtcaccggcgtcgcctaccgctccgacctcgacctcgtggcgcgggagtccgccgcctacgcgcgcgccgccgcgccgctcggcgccgacgggcgcgacgcctgggtcttcgacgtcgacgagaccctgctctccaacctcccgtactacgccgagcacggctacggggctgagttgttcgaccaccacaagtttgacgagtgggtggagaggggcgaggcggccgccatcccctcgagcttgaagctgtacaatgaggttcgcgagctggggttcaagaccttcctgctcacgggcagaagcgaggggcaccgaggcgtcacggtggacaacctcaacaaacaggggttccatgactgggaaaagctcgtactcagggcagcaggtgaccgcaagaaaacagcgacagtctacaaatcagaaaagaggaaggagatggaacaagagggttacaggatcctaggcaactctggcgaccaatggagcgacctgctggggtcttccatgggtgcccgctctttcaagctccctaacccaatgtattatatcccgtga

SEQ ID NO: 134240 - DNA, 182 bp, Zea Mays
gtcacaaaagcaccacaactacatcactcacacaagccacacatgttatcgtgttttgcacatatatttgcaaacactttataaaattattcacaaaagaactaatgcttcaaacggttcacaaaagccttcacacaaccactccagcttcttgtatcctcctgttttaaggcataagcttt

SEQ ID NO: 134241 - DNA, 1654 bp, Zea Mays
gctcagtgctgagtctgctccgtccgtctccgtgccgtgtgctggcggtggcggtccaggccccgctcgctcctaccagtggcccgtgcgtgcggccgccggcgccctgatcgatcgacccgcgcctcggccggatggaggcgtcagtagcagcagcaggaggtgggggaggcagcgccgccacgcggagcagcccggcggccgtgcaggccaccaacgacgacgccgcggccagcaagctgtcctgtgttaacaaaggatacatgaaggatgattatgtgcggttttttgttaggcgaccaacaagaagggctccaataatcaatcgtgggtattatgcgcgttggtctgttctcaggacgcttctgcatcaattcctcaatgcggggaagaatagtaacaatgacaagcctaaacaaatattatcccttggtgctggctttgacacaacattcttccagttgcaagatgaaggaatggctccacactgttatgtagaattggatttcaaggaggtaaccagcaaaaaagccgccatcattaaccattatagtgaaatgaaggaaaagttaggctcagaagcttcaatttcaatcgaaaaaggtgaagtgataagcacacattacaagctattttccgctgatattcgtgacataccaaaactggattcagttattcgcatggctgaaatggatcctagcttgccgacctttataattgcagagtgtgtgcttatttacctggacccaactgccactggtgctattgtgagttgggcatctcaaaagttctccactgctgtctttttcttatatgagcagattcatcctgatgatgcatttggggagcaaatgattagaaatcttgagagtagaggatgcccccttctcggtataaatgctacaccaaccttgagtcacaaggagaaactttttcttggcaatggatggcagagagccgttgcatgggatatgctgaaaatctataatgacttcattgacagtcaagaaagacgcaggatcgaacggttagaactgtttgatgagtttgaagagtggtatatgatgcaggtatgtgataccttgagaaacactgtactgctcattgtttgaggaatatttttttttcttgatttactaccatatataaagaagtcgatcagttaagtgtgtttctgttctgaaacctttgacttgtgctttcaggaacactactgtgtggcctatggaatcaacgacgccgagggcatatttgacagttttggatttggggagacatagcagcactggtgccttttcttctgtgggtaccagctgcacttgttgtaaaccgacaccattaattcaagtattactcgaagtaaactttgcttgataaaagaaggaacgattgcttgataaaagaaggaacggacaggggtaggatacctaaacatctcctgatgttggagcttgctttgataggctgttcaagttcaacggcgttgtgcttggtttaaggtctttggtgccagtcgcagtggtgtttgatgtcaagcatgccaggctgccagttcgtcacaatatgaacagaacagtggtgctttccattttactgtttgcagatttaggttaaatctggtagcacatgtttgcagaataaatccgatgtagtt

SEQ ID NO: 134242 - DNA, 1573 bp, Zea Mays
gctcagtgctgagtctgctccgtccgtctccgtgccgtgtgctggcggtggcggtccaggccccgctcgctcctaccagtggcccgtgcgtgcggccgccggcgccctgatcgatcgacccgcgcctcggccggatggaggcgtcagtagcagcagcaggaggtgggggaggcagcgccgccacgcggagcagcccggcggccgtgcaggccaccaacgacgacgccgcggccagcaagctgtcctgtgttaacaaaggatacatgaaggatgattatgtgcggttttttgttaggcgaccaacaagaagggctccaataatcaatcgtgggtattatgcgcgttggtctgttctcaggacgcttctgcatcaattcctcaatgcggggaagaatagtaacaatgacaagcctaaacaaatattatcccttggtgctggctttgacacaacattcttccagttgcaagatgaaggaatggctccacactgttatgtagaattggatttcaaggaggtaaccagcaaaaaagccgccatcattaaccattatagtgaaatgaaggaaaagttaggctcagaagcttcaatttcaatcgaaaaaggtgaagtgataagcacacattacaagctattttccgctgatattcgtgacataccaaaactggattcagttattcgcatggctgaaatggatcctagcttgccgacctttataattgcagagtgtgtgcttatttacctggacccaactgccactggtgctattgtgagttgggcatctcaaaagttctccactgctgtctttttcttatatgagcagattcatcctgatgatgcatttggggagcaaatgattagaaatcttgagagtagaggatgcccccttctcggtataaatgctacaccaaccttgagtcacaaggagaaactttttcttggcaatggatggcagagagccgttgcatgggatatgctgaaaatctataatgacttcattgacagtcaagaaagacgcaggatcgaacggttagaactgtttgatgagtttgaagagtggtatatgatgcaggaacactactgtgtggcctatggaatcaacgacgccgagggcatatttgacagttttggatttggggagacatagcagcactggtgccttttcttctgtgggtaccagctgcacttgttgtaaaccgacaccattaattcaagtattactcgaagtaaactttgcttgataaaagaaggaacgattgcttgataaaagaaggaacggacaggggtaggatacctaaacatctcctgatgttggagcttgctttgataggctgttcaagttcaacggcgttgtgcttggtttaaggtctttggtgccagtcgcagtggtgtttgatgtcaagcatgccaggctgccagttcgtcacaatatgaacagaacagtggtgctttccattttactgtttgcagatttaggttaaatctggtagcacatgtttgcagaataaatccgatgtagtttccttcagcctcttcagatacgagaggagatgacatatacgtccggttccaatt

SEQ ID NO: 134243 - DNA, 256 bp, Zea Mays
tgcccgtcgtggcccatggcaccgacacctccattacaaggaagagctcctccatgtgattcccctcggtccctacaccgcgttgcacctattgggtatgtattttgatgcgggggcgtcaatttgctcatcgtcagtgagggagcgtcgccgcctcgctacggtcctacggacgtcgctggtgttggtcagctgggaggaagaaccgcttctgaccacccgatccgcgtcgtatggtgtggattaaaaacggagg

SEQ ID NO: 134244 - DNA, 794 bp, Zea Mays
aattttcagattccctcgcgcggctctatggagataagcttttcatcggttgtcgctcccaatcttcagttcgccgactgactgtcgtgttccttattttccctcgtcagtcgacctcgtcgcgacttagttcgtccatcgtgctggtcactattccatactatacctattagcttagatcctgctcagctcgtcgttgcgtcatttgctgtcgagtcgtcaaaaacggcatcccctgctcgacccccacctcactagctcgccccaaacccgatctcgtcgtcgttccgcacgtcagcaagaaatctcaagagtcgagtgaagacggagccaacagcgtggtgttcaccaagtgcacgacagaaagctcgagccagaatttatcagcattcgtacgagtattgggtcgcgtttgatgccggtacgttaattaatcgcgtgttgcggaagacgagccaagtcgaccccaagggtggactaattcgcaagatgatgctggtgggttaacctgaagatggataatcggaacaagtatcagaacaaaagatgatcgccaagtggacgacgtctaacaacactaacctagtgttatccaggcaagccccggtgcatgcaacctcttccttgtgtttttaaataatttttgcacactttaagtctagtgaaatctgcattaggtttataggagttgctgggaaaccctttgatgcattgccttccttgatatacatacctttatagatacttctggtgaagtatcaaaatatgatttacaaaaatgcttagccgtgctt

SEQ ID NO: 134245 - DNA, 1591 bp, Zea Mays
ttttcccagcgcccatctccctgccgtgcagctctagctcccgcgccctgagctcctcccagccatggagctcgccggcctgcagctcgcccagccagccgtggttctccctgtccccagctcggctgctcgctcctcccatggagctcgcccagcgcccttgcactctccctcatgtccggtcattcctccttttcttggtcgttgtcgagctcgcaggtgacaccagggtcggtcgtccctgctcccccttgcctccctccgcgcgcacgccagccgttgctccagcttgccgcgcccatggccgaggcctccttcctacgcgcgcagatttcttttccctagctcggtccggccctttgctgcagctcgtccccatggccgccgcagtcctgccgagatccctgacgtacgcgcgctgctcctccctcgccatgccgcgccgatccctctccttcctaccctgctcggattgtgccgcgctgctgtcgcgttaggcctgctccggatccgaagatggtcgctttggtgtgaaattgccattgcatccggggttttgacatgtctccctactcgccgtcgaacttaggttccctgcttagcctttagcgctagcgcgtcgccgtgatgttaccgtctcgccgtgattggtccgtgtctccacatgttcaaatcgtcaaccccgtgcatcacctgctcgctaaatgggaaaccaacagtcctgtcctctccctgctcctctgcgcgcagccgcgttcctctatcagccatccgttgccgctgaaccactgtcgaattaattttcagcttccctcgtgcggctctctggagataagctcttcatcggctgtcgctcccaatcttcagttcgccgactgactgtcgtgttccttatttttcctcgtcagtcgacctcatcgcgacctagttcgtccatcgtgctggtcgctattccatactatacctattagctcagatcatgcccagctcgtcgtcgcgtcgtttgccgtcgagtcgtcaaacacgtcatcccctgctcgacccccacctcaccagctcgccccaaacccgatctcgtcgtcgttccacgcgtcagcaagaaatctcaagagtcgagtgaagacggagccaacaacgtggtgttcaccaagtgcacgacagaaagctcgagccaggatttatcagcattcgtacgagtattgggtcgcgtttgatgacggtacgttaattaatcgcatgttgcggaagacgagccaagtcgacccaagggtggactaattcgcaagatgatgctggtgggttaacctgaagatggataatcggaacaagtatcagaacaaaagatgatcgccaagtggacgacgtctaacaacactaacctagtgctatccaggcaagccccggtgcatgcaaccccttccttgtgtttttaaataatttttgcacactttaagtctagcgaaatgtgcattaggtttataggagttgctaggaaaccctttgatgcattgccttccttgatatccatacctttatagatacttctggtgaagtatcaaaatatgatttacaaaaatgcttagccctgctt

SEQ ID NO: 134246 - DNA, 327 bp, Zea Mays
atggctgcgcctgaaatatcggagtcggtcggcttggaccgagtctcctcttcctcctcctctgctgcagcgtcatgggcggtggccatctcgccgctcgccttcgccattgcctgctgctcctctgccttgatggtgtcccctgttttaccgatcggggagaacttggccctggcgagggagagcagcaggagggatccgagcatgaaggctatgagtgccacattccccagcctcttcccctccgccctcgacaggttccggttggacttcatggcctccctctcacccctccactcggagtcggatgctcctcgctcgaggtga

SEQ ID NO: 134247 - DNA, 1309 bp, Zea Mays
tgataggtgatggtgacatggtgcagcaaaaacttgaagaggtcgaccaagacaggtgcaggataataccaagtttatcctatgggccaatggggatcaggaataaacaaaagtgttgcaaacttatgccccttaaaactgattttgaggagttattttctagggagctcttggagatgctcttattcctattggaaatcaggcaggctctactacctttacctggcgatgctaaaagccaaccagcactagcaacaacgactcaagttgctgccacacaaacaactgcaccagcagaggacgctaccgtagaagccaccacggaatcagatcctgcaatgccaacacctctttcaccttatacaaattacccagatctcaaaccgccatcaacccctatgccaccgtcagtggagtctgaagtcgagacgaaggctggcagcaccatgactgaaggaccagcagtggtcaattctgcacctatagcagacgctagcactggctcatctcctgtcaatactaggcccagacctcagtcaccataccctaattatccagatttcaagccaccatcctcgccttcgccgtcagcaccttaatttggcaagagtacaagaaacctggtctagaggatattaaagaagttgagttgttcatatggagccgacatctcaccagaggtgtatgttatattatgtgcgtgacagtgtggctaagtcactgtggcgagttttctgcaacagtaaatatatgaggatgcgaagttcaagctctgcaaggtgaggtctgttcagtttggccagaaaggcatcccctacctcaacacctacgatgaccacactatccgctaccccgacccgctcatcaaggccaacgacaccatcaagatcgatctggagaccaacaagatcatggacttattcaagttagacgtcgcaacatggtcatggtgaccggcgggaggaacaccgggcgtgtaggagtgatcaagaacggggagaagcacaagggcagcttcgaggtcatcgacgtgctgcttggagctttttgctatgtctagttttctcctatttgttgtacagaaaaacatagaatggaattcaaatttggtggtcgcaaaagtgtggagacttgaatttatataaagttaggcttaacattagtgcaaacagttgtattttagtttagatttagagtacacttatgtatgcattgtttgacaatgcttatttatgatatattgaatggtacttatttatattatattaattataatgttgttcaatatatgtgtatgtatatttctctt

SEQ ID NO: 134248 - DNA, 1508 bp, Zea Mays
ctttaaaacgcacaactccataaaccctagcggacaaagccacttgctcacaccagaaccctctccgcaatctccccgcctcgctcccgcctccacccaatggcgtctctccctaacggtggcggcgccgccgcctctggctcatgcggcgcgcgccctgtggacaaggaggtggacttcgccaactacttctgcacgtacgcctacctttaccaccagaaggagatgctctgcgaccgcgtccgcatggacgcgtaccactccgccgtcttccgcaacgcgccccacttccagggcaaggtggtccttgacgtgggcaccgggagcggcatccttgctatctggagcgcgcaggccggggccaggaaggtgtacgccgtcgaggcgactaacatggcggagcacgcgcgcgagcttgctcgcgccaacggcgtcacggatatcgttgaggtgatacagggcaccgtggaagacgttgaccttccggagaaagttgatgtcattatatcagagtggatgggctactttcttttgagagagtccatgtttgattccgtcatttgcgcacgtgaccgctggttgaagccagatggtgtgatgtatcctagccatgctcggatgtggctagcacccataagaactggtttgggtgacaagaagagggaagattttgatattgctatggatgactggagcctgtttgttcaggacactcaaacttattatggtgtcaacatgaatgctttgacaaaggcatatcgtgcagaacatgaaaaatactatttgaagtcttcaatatggaacaatcttcatccaaaccaagttatcggtcaacctgcagctatcaaggaaattgattgcttgacagccactgtcgatgagatccgagaagtcagagcacaagtcacattgccaatcagaatggaagctagattatcagcactggctggatggtttgatgttcattttcgaggtagtgctcaaaaccctggggtggaggaagttgaattaactacagcgccagatgagcatggtggaactcattggggtcagcaggtattcttgctgactccacctctgagtgtgactaaaggagacaacgttaacgtttccttctcgatggttcgctcgaaggaaaatcatcggcttatggatatggagttcacatatgaattgcacgagttatctggcaggaagcacccagcagtcaaaaccaagatgtacttagagtagaacaagatggaaagacggaacctcacgacgccgttgctgaaacctttgctcagaagctgagcatgtagtgtgcttgttacacccatgatgggtacattgagaccatttatgttgtattagtaatatattgtttgattgcccaattaacggggtgagccattgtttcatcacaacatcgatgtgttagcagataaccacatcgccgttttaagcaaacattgagtgcggaattttgttgtctttgtgaagtccgatgaaagcatcttcttctgatc

SEQ ID NO: 134249 - DNA, 1431 bp, Zea Mays
agtgttttgggctgatctgcaaacttgcggtgaaattccggtttcggcttccgcggggtgggaatttggatagcgcggcgcaggaaaaatggcggcttccgctctccacctccgcctccacccctcgccgccggcgggtgtgaagcttcagcagcggaaactgcgctcgaaaatacagaggcagggtggcctatctcgaagattttcaaaagttgtgtcctattacggtctcacaaccccaccatataaactggatgctctggaaccttatatgagcaagaggacagttgaacttcactggggtaagcaccatcaagattacgtggatggcttgaataagcagttggctaccagccctctgtatggatacactctggaggatctgataaaagaagcttataacaatggcaatccattaccagagtataacaacgcagcacaggtctggaaccatcacttcttctgggaatcaatgcaaccagaaggtggtggcttacctgagggaggtgtgctgcagcagattgaaaaggattttggctcgtttactaattttagggaagagtttatccgctcagccttacagctgttagggtctggttgggtttggcttgtcttgaagagaaatgagagaaagctttcggttgttcatacacgaaatgctatctccccacttgcttttggtgacattccaatcatcagcctagacttgtgggagcacgcttactacttagactacaaggatgataagctaacatatgtcacaaactttatggaccatcttgtctcttggcatactgtcactctacgcatgatgcgtgcagagtcttttgtgaaccttggtgagccaaatatcccagaggcttgagctacagatacaccctagttatcatcgtgaggcattcttcggatacatcggatcaaatcctgctggaggaaccagagagttggaaaatctcatgtctcacaagaaatgcttatcaccccaatgtcatacacgccaagataagctgctgggatttcaccattgcccttggatattgctacaaggaaatcactagtcagcatccagtttgaagacatgcaacaaaacagctctagaagctatggagctggtagattctggagttggcagtgaggcagtgatccaacttgggctttgaagccatggtgctttctctagacggctattatttccatagtgttgttagaataatcctggttctgtgttttcataacttcatcatgctagggttctgttgtagcgtaacgcagaatggaacggaacaatattcttgttttactggttgagaaacctgttagttttggactgcagggaaatcttttacttgtatcagacgctgcaagcatggactttttttgtctggaaggaagttgaaacttctgaacttgaatgcaatactatagccatcc

SEQ ID NO: 134250 - DNA, 1563 bp, Zea Mays
cagctgctgtccaattttttagatgtttttgaaccacctactggtatgccaccaatccgtgactgtgatcatgtcattccattgatcgtcagtgcgactccagtgcacgtccgaccttatcgctatcctccagcgattaaggatgaaattgaacgccaaattgccatcatgcttgacactggcattattcaagcaagttccagttctttttcttcttcggtcctgttagtcaagaagaaggacggcacgtggagattttgtgtggattttaggcatctcaatgctatcactgtcaagatgtcatttctagtaccggtcattgaagaattattggatgagttgggtcaagcctcttggtttacaagcttggatttaatagctggatatcaccaaatcaggctacattccagtgacacgcataagactgcatttcaaactcactcagggcaatatgaatttcgagttattgccccggctaccttccaacgggcaatgaatgcaactttatcatctttattgcgccgttgtgtgttggtattttttgatgatattcttatttatagtaccagttttgaacagcatatcgagcatgtgcagttggtcttggaactgttgcgaaaggatcattggcagatcaaactttctaagtgtaaatttgcacagcagcagttagcttacttggggcatataatctctgctgccggtgtatcaatagatccagaaaaaattaaggcagtggctaagtggactagtccaaccaatgtgaaagaattaagaagttttttgggattggcaggatattaccgacggttctttatcttggaaacagatgccagcaacattggagtaggtgctgtcctcatgcaagccggccatcccatagcttatttgagtaaggcattgtgtcctcgcaatcaaggcttgtccacatgtgagaaagaatttttggccatcatccttgcagttgaccattggaggcattatcttcaactcaaggaattcattattcatacaaaccatcgaagtttggcacagttggatgagcaaaggttgcacactccatggcaaaagaagatgtttacacggttgttgggattacaatatcgcattgtgtataaaaaaggaatagataatggtgctgctgatgcgttgtctcgcaatccacagatgtcaagtgactatttggccatttcttcgtgtactcctcaatgggtttcagaaattatagattcatatacacatgacccatttgccaaagatctccttgtcaaactagtagttgatgcatcggctgtgcctcattattccttacgagatggtcttcttcgttataaaagaagaatatgggtgggacagtcagctcctcttcaggatcacctaattgcagcattgcatgcgtcagcagttggtggtcattccgggtttcccgtcacatatgctcgcttgaagcaactgtttgcatggaaaggtatgaaaaaagcagtagagcagttcgtttcgcattgcctcatctgtcaacaatccaaagctgaccgagctcgtctgcccggcctgttacaacct

SEQ ID NO: 134251 - DNA, 2122 bp, Zea Mays
ggaatccgggcccacctggttccgctgccctgatcggccctaggggcattgtcgtccttgcacatcaccgtatgctcgacccgtgtccatgtgtgtatatatatctccatgcgtttgccacttacggctctgcttcgtggccgccttttttcagagaaaacagagggaggaaagaaaaagctcacccccctctctcttcccaccacctctctcacgtgtgtgaggtggcgagcccaaggaggagcgggaggccacaagtccgatccgcccgtatctaatccgctcgagcgcagcggctcgttcctcgcgggggcgcacggttggcatttcgagtgctgagacatcggcttcattgaatcctaaagcacggttgagccatggctggctcccttgctgcctcagccttcttccctggcccaggggcgtctccagcagcatccgcgaagaacttggctggtgaagtaccggatagtttgagcgtccgtggtattgtcgcaaagcctaatgccaattctgggaacatgcaagtgaaggctcaagcacaaacccttcccaaggttaatggcaccaaggttaacctcaagaatgcaagctcagacacagaggaggcgataccctacactgctcccaagacattctacaaccaactgccagattggagcatgcttcttgcggctgtcactaccatcttcctggcagcagagaagcagtggacactgcttgactggaagccgaagaaacccgacatgcttgttgatacatttggttttggtgggatcatccaggatgggatggtgtttaggcaaaacttcattattcggtcctatgagattggtgccgatcgtactgcttctatagagacattaatgaatcacttacaggaaacagctcttaaccatgtgaagacagctggccttcttggagatggttttggcgccacgccagagatgagcaaacgaaacttgatctgggttgtcagcaaaattcagcttcttgttgagaagtaccccttgtgggaagacacggttcaagtggacacgtgggtagctgccgctgggaaaaatggcatgcgtcgagactggcatgtcctcgactgcaagtctggatgtacgatcttgagagctacaagtgtttgggtgatgatgaataagaacactagaaggctttcaaaaatgccggacgaagtaagggctgagataggcccgtatttcaacgcccgcgcagccataacagatgagcagagcgagaaactggctaagccagggagcactgctggtggcgatgctatgaagcagttcatgagaaaggggctcactcctaggtggtggggtgaccttgatgtcaaccagcacgtgaataacgtcaagtacatcggttggattcttgagagtgctccgatcgcgatcctggagaagcacgagctcgcaagcatgacgctggattacaggaaggagtgcggacgcgacagcgtgctgcagtcgctcaccaccgtcgcgggtgaatgcgtagacggcgacacagactccaccatccagtgcgaccacctgctccagctggaaacaggagccgatattgtgaaggcgcacacggagtggcgcccgaagcgggcgcatggtgaggggacccccatggggggtttcccggcggagagcgcgtgaatccatatttggcagggtgagggggacggctgtgaagcacagatcctatgtttatgggtacactaacgcccaactgagttgagtgtgttttggttggttggttggtcgcgacaagtatggcaggcacatgggggagcgccgcattacccacacccaacctggggatttggccaagacaaaagcccagcggtatgaggatcgaggaagcagaccagagttgttgcggagcgagaggactggggatcagtgtgtgttgtgggttgctgggcaaggatacatgcagggggagctgatggttttgcaggggatgatgttgtgtagctggttggttggttggggtgtgtagaaggcattcattcccctttgtaacagcctaatctgtacattcttaccatcatctttgtcttgttgattgatcgagtcgcagacctcctgcgtttatttgcattcctcctggtggtgcc

SEQ ID NO: 134252 - DNA, 112 bp, Zea Mays
tttctttgtttgttaatgagttgcaacaattttattctcttttatgagcccttgtctaaaagcatttatacaaattggatatttttaagtattatatatgtatatatatata

SEQ ID NO: 134253 - DNA, 668 bp, Zea Mays
gaaccacggctggcctcacgccgggaaccagctgcgggcgtgcggctgaggcggccgcagctcagctggcacgacgccagtacgaatggatggcgacggcgatggccgctcggtaatggccgtggtaggactaggcgtgctcggctgcaactccgccgtggccgtctacaggtcgtggggcgacccggcctcggtcggcttcgtggtcgccgccgacgcggcgctgctgctgctcctgcatttcctgcgccggttcgagcgtgcgcggcctagggacgacggcggcaggggcagggcgaaggccgctgtctgggcgctcaccacgctgctcacggcgatgttcgcctcgcgcgtggcgccgatgatgccgccgcacgtcggcctcgccgtctgggtggcggctgtggcgacggccggcggcgggttctgggcgttgtttattcattagttttttgaggtcaggagtcaggactcaggaggtgacaagggaacgtgctggtctgctggggcagctcaacttggtccatctgtgtcgtcacgtagattggccttggcaaaagcatgtgtcgcaattttcagtttggagggaaattttttgtagtggggttttcagaactttgggccaaaattttgtgtcacggaattgaggaaaagtttccgactaagag

SEQ ID NO: 134254 - DNA, 776 bp, Zea Mays
agcccgatgcgaaaatgcttgaagcctccaagaatctgggtgcaccgctgaggcgctgaccaccacgcaccacctcaccagatctttcttcctgttgcttcctcggctggtttccttctctcgccgcgtcgcctgcttcttcccccaaccaaagacacgaatcagccatggcgctcgcctccgccacgtcccgccccctcctcggtcgcccccgccggcaccgcgcggccccacctcgccgtttcctcatcctcccccgcctcctcgatccgcttcccccgcggcgccgacggcggcgccagcagagcggccgtctctctccgcgcccccacgcctccagcggcggcaacagcaacatctggtagcattgctccagcaatttcattgactgaaaaggccttgaaacatctgaaccaaatgagagctgaacggaatgaagttttgtgcttgagaattggagtgaaacagggtggatgctcaggcatgtcttacaccatggaatttgaaaatcgagagaatgccagccctgatgattctgttgtagagtatgatggttttgcaatagtctgtgaccccaaaagccttcttttcatgtttggaatggagctggactacagcgacgccctcattggtggcggcttcttgttccagaatccaaacgcaacaaaaacctgtgggtgcggcaaatctttcgcgactggaaaggagaccgaggccgcggcaaccacttgcaacaactagagtagagaaatattgttagctaaacgtgatgtggc

SEQ ID NO: 134255 - DNA, 811 bp, Zea Mays
agcccgatgcgaaaatgcttgaagcctccaagaatctgggtgcaccgctgaggcgctgaccaccacgcaccacctcaccagatctttcttcctgttgcttcctcggctggtttccttctctcgccgcgtcgcctgcttcttcccccaaccaaagacacgaatcagccatggcgctcgcctccgccacgtcccgccccctcctcggtcgcccccgccggcaccgcgcggccccacctcgccgtttcctcatcctcccccgcctcctcgatccgcttcccccgcggcgccgacggcggcgccagcagagcggccgtctctctccgcgcccccacgcctccaggttatccgcattcaatttatccttgaatgacagagcggcggcaacagcaacatctggtagcattgctccagcaatttcattgactgaaaaggccttgaaacatctgaaccaaatgagagctgaacggaatgaagttttgtgcttgagaattggagtgaaacagggtggatgctcaggcatgtcttacaccatggaatttgaaaatcgagagaatgccagccctgatgattctgttgtagagtatgatggttttgcaatagtctgtgaccccaaaagccttcttttcatgtttggaatggagctggactacagcgacgccctcattggtggcggcttcttgttccagaatccaaacgcaacaaaaacctgtgggtgcggcaaatctttcgcgactggaaaggagaccgaggccgcggcaaccacttgcaacaactagagtagagaaatattgttagctaaacgtgatgtggc

SEQ ID NO: 134256 - DNA, 505 bp, Zea Mays
ttttttcgtaccttccatcgcaactgtttgcaaccaagtattcagaatgaaccaattctaataaaacatttatatgcagctttaagaacttccattccatctcaactgattagttctctatttagaacgaatcaattctaacggcatgcatttctttctttggattatgcagtctgtgaccccaaaagccttcttttcatgtttggaatggagctggactacagcgacgccctcattggtggcggcttcttgttccagaatccaaacgcaacaaaaacctgtgggtgcggcaaatctttcgcgactggaaaggagaccgaggccgcggcaaccacttgcaacaactagagtagagaaatattgttagctaaacgtgatgtggcatgttgtatagcttgctcatgttgaagccctgtggctacaccacagatacataaagaggcatagttcaaaggaattacaccattaccaatggcctaattcagattttcttgtttggtgatca

SEQ ID NO: 134257 - DNA, 519 bp, Zea Mays
caagtctcacaagaatcttcaccaaagtttgcaatcggttaattatgtaaaaatcgtttgcaacttgacgaagcttagcatcagaggcaacagaaacaaccatattactcccagaagtgactctcctaggcggcgaagagatccatacatgcaggttagtccacgaacgaaaccaaagcagcgaagagatccatatgcttcaacacaccagttgaaatgacccactagcgatcaagacattacctgtttgaaataaagagtgaattagacaacttaaaaactaatgaccaaataaatccttacttaaagcctatagaatatatatctacataggtgtgcactgtgatttcactacgtatttattatcctaaacacaaaagagttttgttcgcttaattttaatctgtaccgaattctactgcttctacaatgttttatctctatgaattgcagctgcagccatccgcgtgaaccaatcaggcggcaaaggaactgcgagtctgcgatccacagcatcgg

SEQ ID NO: 134258 - DNA, 681 bp, Zea Mays
aaaacgaaattacccacgattatttaaccacttcagatccttttacaagataacccaggctaaaccataccacaacataccaaagaacacgtcacgtaacaatacaggtagccgtaagcaggaacagatttcttagatcttgtcgatgtcctcgtcctcgaactggatgtagtcgctgccctcctcgccttcctcgggcccatcgacgtcgacgccctcgttgagcctgagcgtgtcaggaagctccccgtaggccttgagcaggcgcgcctcgtcgttcatgtacttgaggataacgtcggccttgtcgtcctggtagtcgcggaggccgacgaggacgatgtccccagccgcgatccagaccttcttgtgcatcttaccccggatatggcagaggcggcgcgtgccatcgacgcagatggcctcgcaccgcccgttgccgagcatccgggtcacctgcgcgtactcctgcccgtcttccttgaagacgagctcgcgcttgtcgtcgtcagcctcgttctttcctcgcttccggttcttgcctcccttacccttgttcttcggcatcttcgcggaggacgagagcgacgagacgaaaccctaggtgcgagatcgagttggggaaagggaggtgcgcgttgcggagctgggtgcggcggcgattttatctctatctcttgc

SEQ ID NO: 134259 - DNA, 472 bp, Zea Mays
ctcccagcctcgccctcccaccgtcccacgttgttcctcccgaccctcgccgtccctcccgccgcgacccgccctcctcctcccgaccacgccgcccagcccgtgtaccactccctcccagcctcgccctcccacgccgtccctcccgccgtgacccttcctcctcctcccgacctcgccgcctagcccgtgtcgccgccgtcgcccgtgccactctgctgctgcgaccacgacaatggggatgtggaaggtggtgtgcgtcaccgacgcatcagcgtacatcgcgtcctggatcgtcaggctcctcctcgaccgtggctacaccgtccgcgccaccgtgcgagacacagatggtactacatcgcaacttacacatcctttggaaatgtagagcccacctcagttgatctattcaagaacttccattatagcaaaaacaatggatttaccgagtttgtacagaaagcaattg

SEQ ID NO: 134260 - DNA, 1785 bp, Zea Mays
ggacgcacgcccgcctccccaccgcgcgctataagaccccgccgaggaccgaccacaagctctccactgcgccggctccctccacctcgctcatgtccgctcaccggggcgggctcagcatcctttcgaagaagtaacacttctccgtgaggcctgagcccctcgccgcggtgagccaagccggcgcacgtcgccccggggctcacgctcaccaccgagccccaaccaattaataatatatatatatagctaggatcgatcgtcagtaaaatggcaggctccgccgtcctgaggagccccctgtccgtcctcctctacatcctcgccgccgtgcccgccaccgccgcggcgacgccgaccgacgccgccatcgacgaggcgtacgcgcatctcgtcaacctcaccgctaaccaggagtactgggcggagcgcgcggaggcggcgcacgcgtacaaccgcgcggcgtaccagaccgaccccgtggccgtcgtgcagcgcttcaacgacggcgtgcacagggcgacggcgacgcggtcgcggtccctggcgcacagggcgcggggcccctgcacggcgaccaaccccatcgaccagtgctggcggtgccgccgcgactgggcccgcgaccgcaagcgcctggccaggtgcgccatgggcttcggccacaggaccaccggcgggctggccggcaagttctacgtggtgattgaccccagcgacgacgccgccgacctcgtcacccccaggaagggcacgctccggcacgccgtgacccgggcccgggcgctgtggatcaccttcgcgcgcgacatggtgatcgagctctgccaggagctcatcgtgagcagcgacaagaccatcgacgggcgcggagcgcaggtgcacatcgtgggcgcgcagatcacgctgcagaacgtgcgcaacgtgatcctccacaacctgcacgtccacgacgccgcggcgcacggcggcggcgcgatccgggactcgcagcaccactggggcgtgcgcggggagagcgacggcgacggcgtctccgtgatggggtccagcgatatctggatcgaccacctgtccatgagcagctgcgcggacgggctggtggacgcggtggacggctccaccgccatcaccgtctccaacggccacttcacgaggcacgaccacgttatgctgttcggggccagcgacgccgcgtccaaggacagggagatgcaggtcaccgtcgccttcaaccacttcggcaaggggctggtgcagcggatgccgcgctgccgtcacggcttcttccacgtggtgaacaacgactacacgcactggctcatgtacgccatcggcggcagccggaaccccaccatcatcagccagggcaaccgcttccgcgccgtcgacgacagcaggttcaaggaggtgaccaagcgggagtacacgcagtacagcgagtacaagaactgggtgtggaagtcgcaggacgacctgttcctcaacggcgccttcttcaaccagtccggcggccagaacgagcgcaagtacgacaggctcgacctcatccaggccaagggcggccagtacgccgagtcgctcaccaggtacgccggcgcgctcaactgccgcgtcggcaggaagtgctagtgcgtgtgcagctctaggctgcagctttcatcattggcgatcgatcgtaacaatgcaaggttgtgttgtatataactcttgtgtttggaatgccgcccgtaattaatggtcaactctaacactgcttgcctttgcctgccggccagcaacacc

SEQ ID NO: 134261 - DNA, 258 bp, Zea Mays
atgccatatacgaactgtaccatcttcggatccagtaatgattatagggagctcaggatggaaacaaacagcagaaatgttatgtgtatgcccttcaagtgtctgaacacagcttttcgtctggtaatcccagacctttgcagtggagtcatcagaaccagtaatcaaatagggcctgtcaccaccagtgaagtagtcaacacaattgacacccttttgatgtccatcaagtgtgaagtttggatctggagaacctaa

SEQ ID NO: 134262 - DNA, 1188 bp, Zea Mays
atggcggctagggtgtggactctgcctggaatagaagttcagaaaactgaaacacggaccagaagtgatcagcagacgacagtgctccctgacactgggatttcgctcagaacagaagctaccacgataatgggatctagtgacaagattatggaatatcgaaaggaaaaaattaggaaattcatgcaattacaacaaaaagaagacgatgaattgttttttgtaatagttcctgccatacttcagtgccttaatgatgagaaaaggccagttcatacttctgaatatactggtgctaaaaagatgaaggaaattctagaggggcatgagagttggtgtaagtcagagtttcgtatggagcccgagatttttaaggcaacatgcaactatcttaggtgggaggggttgttgcgtgacacacggagagttaccattgaggagcagctaggaatgtttctatttatgatttcacacaatgctagcaatgaaagactaaagaaaacatttcaacatagtggggaaacagtccataggcacataaaggcggtgatggttccatggatggcgcccgtgcctgatgcgtactatgcttggtgtcgatattgggcttccgaaggcttccagaaagcgtcagcgcatcacagacaatgtcgaggaaccaatcctaaccacaagtttggcggtgacgacatgatacgaaaagctaaaagaatggaagctacgagtggccaaaagcctagtgacattgaggtgtaccaggagggccacaaaggaccagacccgaacaaccctgaccagctctgcagccagacagccacggatcgcttggagttggagattatgaggatgcgtgaagagatgagacaacaacgcgaatttatggaggcttgcaatgctcataatcaagcgatgtatcaattaatgcagcaacagggcatcacatcaaattttccaccgccaccacaatggagccaatttgcaaacacaccagttccaccaccacagttcaccacccctccgacacatatacctgcacctggagatagggttacgcctgaagcgggtggcagtgggtctgatccagcagcagggactggatttgttgactcgctcttcgcgttccctcctcctagtggtgaaggcggcagcggtcaaagctctaaccacccaagtggtggttatctctaa

SEQ ID NO: 134263 - DNA, 270 bp, Zea Mays
atggacagggaagtgcgcaggctgctgcacggctgtgaagaagacagggagggtgccattggaagggacgtgcagggctgccgcgttccagggagaaggagtaggggaacagggaggaagaaaggaggtcgaccatggacagggaggttcgcaggaacaccatggacgacggcgaagaggatgtcgctggggaatgggagccgctgctcgcctgcaggggacgccatggagcaggggaacagcaagctcagcctgctgggaggaagatga

SEQ ID NO: 134264 - DNA, 228 bp, Zea Mays
atggcctgcaccggcacgactgccagggccgcgcgactgctggcgtgggtgcggctcctggcgcggcatcaggcctcagctcaggcgcatggccttcgacgcggcgtgagcatctctgatgtgcgggcgagcggtgcagctctggcgcgtggtcgcgacaccaaggcgggcacaaactctggtgctcgggcgagatcgagtggagccccaccggatatggtggagtga

SEQ ID NO: 134265 - DNA, 263 bp, Zea Mays
actaggtaagtgcccgtgcgttgcaacggaaccgtataataacacgataacttatgtacatgtgtgtgtgttatatgtatatgcttgtgcgttgctacggagttaatattataaaacacaatattttttgtatattaatgtattttatcatagcaacacatgagcatatacctagttagattcttatgtggtgaggtcacaactatttaattccattatgctctataggttgcatgtacacgagatagttcacgggtaactac

SEQ ID NO: 134266 - DNA, 2315 bp, Zea Mays
gccggagcagccttttgcctcgcccgcagcagatgagcagacgctgcagcagagcagccttttgcctcgcccgcagcagacgctgcagcagagcagccatggcgcctccgccgttctacctgcccctcctcctcgcctttctgctcctctccaccgctgccgcccactcccagcatctccacctccagcaccacggccacggtccccaccaccatcaccatgtctccccgtccatgacagccaccgcccgcttctacaccgcgccgtccatgcaccagaaccgcatggagtcggaggatgcccgccagtctctgcgcgtcttcagccccttcctcacccccgtggcagctcaggctccttctgccgaggaggccatgtcggcgatggtcgcagccgcggacgcgggggaccccgcgcgggcgcggctcgacccgccctcgccgccttcttccctactcgccgcgggcgatctgatgccgtcctccctcccgctgctgcagccacaagctgaggtggtggggtcgttcgagtcggagcccgcggctcctccttccgtcgtcgatgagcagtaccgcgacgaggcgagcccatcgcctccccctcccgccgtctacgagccgtaccgcgatgcggcgagcgctcctccttccgtcgttgacgagccgtacagcgacgcggcgagcccaccgcctccgcctttcgtcgtctacgaaccgtaccgcgacacggcgagcccaactcctcccgtcgtctacgagccgtacctcgacgcggcgagccctcctcctcctcctcccgtcgtctacgagctgtaccgcggcgtggcgagccctccgcctccttctcccgtcgtctacgagccgtaccgcgcggcgagcccccagtctcccgtccacgactacgctgcgggggtggtgtactcgggctcgggcgacgacctcggcctgcagcagatcgccaaggtgctcgcgtcgctggggtacaacgagatggcttcgtcggccacgctcctcgcaggctcggcttccgtcgctacatggcccgggccgattaccgtcttcgcggccccagacgtattcctccaggccgactcctgccccgagtccgagtgctcgcgacgccacctcctcctggaccacatggccctgggctacttcccctacgccgaactcgccgcggcgcccaccacgaagctcccatcggcctccgtcggcttctgcctcgacgtcgcggcccagccacagcgcgggcccttctccgtccaccacgccagcctgtacgtcgacggcgtcatggtgtcggaacctgagctatacgacgacggccgctacgtcgtgcacggcctccacggcttcatcccgccgctctcccgcgcctcctgcgccgaggacgcgcatgagcatcctcaccaccaagtccacctccaccagcaccgccgccaccaccacctcagcgccagatcgtcagccgcctccgctgcgatcgccgcctctgcagtgcgcgtcatgatccgcgaagccatatcccgcctgcgcgacggcggcttcggcttcgtggcgctggccatgcgcgtcaagttcgccgagctggagaagctgtccaacctcacggtgttcgcgctcaacgaccaggccatcttcaccggtgaaggccacggctacgtctcggcggtgcgcttccacatcgtccccgagcaccgcctcacccgcgccgacctcctgcgcctccgccccggcaccatacttcccaccctggccggcgaggaccaaaagctcgtcgtcaccctcggctccggctccgccaccgacgaggtccggatcaactacatacccgtgaaggaacctgacgtggtgatcaactcgcgcgtcgccgtccacggtgtctacgtcccgttcccccgcctccacctcgccaacctcgccacattggtggccgtcgcctccgacctgcagacgaacgacagctgtggcggcgccgggggacctttgggcgactgcgcctccaccccgatgacctctacgacgatctcagttgatcagggctacggcaaagggcagtgatgcgtgagcccgtccgttctcttcttctgagtttcttaccaactagtaggatttttgagcttcgcagtttgtttgttagatgagggatgaggttttggtagtcggatactcggatttatggatgtccgtgtcgttgcgtgatggaatgtgtaccgcacattcgcactgctgcatggtgaacgaattcttgatggaactttatgtggcgatgctgttttgcgcgctttgaaaaattactcatgctctgttcagttc

SEQ ID NO: 134267 - DNA, 506 bp, Zea Mays
acacagcccggtacgtacgtgcaagagacgagcgtagtaacaactgtgagcagctagcacatgcatggcgtcgtcgcagctggtcgtcgtgtgcctgtttgtagcgtcggcggtgactgtgacgatgaacggcggcgcgcaggcgcaggcgcagccgattgtgccggcggtcatctcgttcggcgactccaccgtcgacgtcggcaacaataactacctgccgggcgcggtgttcaaggccgactacgcgccgtacgggcagggcttcgcgcggcacaaggccaccggccgattctccgacggcaagatcgtcaccgacatcaccggtcgctagccattcccatatatatatacatgctataccaccacgcatgcattatgcatggcggcggctgcaggtgcgtgacgaattgaacgagttcttcgttctgtgcattgtttattgttgcagccgaaacgctcggcttcgagagctacgcgccgccgtacctcagcccgcaggcgtc

SEQ ID NO: 134268 - DNA, 1649 bp, Zea Mays
acacagcccggtacgtacgtgcaagagacgagcgtagtaacaactgtgagcagctagcacatgcatggcgtcgtcgcagctggtcgtcgtgtgcctgtttgtagcgtcggcggtgactgtgacgatgaacggcggcgcgcaggcgcaggcgcagccgattgtgccggcggtcatctcgttcggcgactccaccgtcgacgtcggcaacaataactacctgccgggcgcggtgttcaaggccgactacgcgccgtacgggcagggcttcgcgcggcacaaggccaccggccgattctccgacggcaagatcgtcaccgacatcaccgccgaaacgctcggcttcgagagctacgcgccgccgtacctcagcccgcaggcgtcggggaagaacctgctcaccggcgccaacttcgcctccgcggcgtccagctactacgacgacacggcggccatgtatgacgcgatcacgctgacccagcagctcaagtactacaaggagtaccagtcgaagctggcggcggtggccgggcgcgccagggctcgcgccatcctcggcgacgcgctctacgtcgtcagcacgggcaccggcgatttcctccagaactactaccacaacgcctccctgtcccaccgctacgacgtcgagcagtacaccgacctcctcgtcggcatcttctccggcttcgccaacgagctgtacaggctgggggcgcggcggatcggcgtcacgtccatgccgccgctgggctgcctgccggcgtccatcaggctgtacggcgacggcaagggagcgtgcgtgccgaggctcaaccgcgacgccgagaccttcaacgccaagctgaacgccaccgtcaaggcgctcaagcggcggcacgccgacctcaagctcgccatcctcgacatctacacgcccctccgcaaactcgcacaagaccccgcggcttacggcttcgccgacgctagagggacgtgctgccggacggggacggccaagacgagggtgtacctctgcaacccgacgacggccgggacgtgccggaacgccagcagctacgtgttcttcgacgccgtccacccgtcggaggctgccaacgtcttcatcgcggagtccacggtcgacgcgggcatcgagctggtcacctagctagtaggaataataaaggagacgacacacatctgcagatctgctcacatgtttcctgctccatcgaaacagaactacgtacagtgtctggaatagccagtgaaattaaaaattgcaccgtcggccctgcccttttcgtaatgttgtggagcagtttcctgttccatctgtagccgctcaccagtttcctgtttccatccaagaaaacaacggtacaccttgaattgcctgtgaaattgcaccatctatctccctaccattcttgtaatattgttgatcatatactatgcgtacgtgcgttttcctatatatcatgcataatatgaggtgtttggtttctaggaactagtttttagtccctacattttagtccataaattgataaatataaaaactaaaactccctgtttatttgttaacttagagcaactccaatagttatatataattatactacataaatcctagatttagcaagttctcaaataatataggaaacaaaaaa

SEQ ID NO: 134269 - DNA, 375 bp, Zea Mays
atcgagcgcgagacgggcttgatcgaagagtcgactatggacggcgagaacgaaccctacgttatctccgacctcaacgcctccctccccgcggccgctgcagcccttagcgccgaggaccgcgccggcctcgtcaatgctcttaaggataagctgcagagcctggcgggccagcatgccgatgtgctagagacgctttcgcccaatgttaggaagcgtgttgagtttttgagagggatccaggtcgtcaagcacaaaattgtcatcgtcttcattttcatcactctcatcaacaccatcttcatcatcctcaagaattggcacttgagtaccatgagctctcctaggaaagtaggggccttgaagttggattaa

SEQ ID NO: 134270 - DNA, 650 bp, Zea Mays
taagggataagattatccctcatgctgtttcctggttcactggtgaggctgttcaaggtgaggattttgctaacttgggtgatgatgaggatgacgacgataaggatgacgacgacgaagaagaggacgaggatgaggagggagaaagcaagccagcaaggaagttaggcttgcagttgaccagcaatatgtttagatatgggaattgaacctttcctcttgctaatacatcccatttctaattgtctcaacagttgggatccggtcacaaacagaaggagccgcaggaagtgttgcagggaaatgccgaacaaccagcgtagtgcaagcagcagtaaattggctggtggccattttttgcctgttgatgttggtgcttggttgatgcagtattttccattgatctggagcactctgctgcgttagtggatggaaatcggtttgcaacttgtctcctagtgatctcggggttttcgctacgtgcaatcggatgatattatatggttgtgtaattatctttgcactcagcagataatggcgctttatttgtcctaggtctatattggctatcttaaattgatttgtagttagcttagagcatctacaatcgaccacccaaatcagggggtctatttttgatttgatgccca

SEQ ID NO: 134271 - DNA, 536 bp, Zea Mays
agtttaaaacaaaagtcaactcaaaaagccaataagttcacggtgctgaagtagcaaagaatatgtccggtatttcatcacataaagcaaccaaaagaagtgtgccctactgtgtttcagagtaacaccagcaatccactttctaactggcactaccggactatgctacaccaattcaacggaacggaagcccagcaatgaaccccatgcactttctaactggcaccgaccacactatgctacaccaacccaaactagccaagtccttgacctacaacaatactctaatctaaataactgcctactgtcagatttcctaaaccaggcatcttgtacgcctacatcaaccttggggcctaaacacggtatttataagctgcttcaggttgctgcagggcaagatctcaatgtcaatatcaagtggtctgagcaacttctcggaggttttgggaacgacgcacttcttgtatcccagctttgaaatagcaatcactcgcttgtccattcttggcaccttcaaaaaaatggaaagaaat

SEQ ID NO: 134272 - DNA, 482 bp, Zea Mays
ccaataagttcacggtgctgaagtagcaaagaatatgtccggtatttcatcacataaagcaaccaaaagaagtgtgccctactgtgtttcagagtaacaccagcaatccactttctaactggcactaccggactatgctacaccaattcaacggaacggaagcccagcaatgaaccccatgcactttctaactggcaccgaccacactatgctacaccaacccaaactagccaagtccttgacctacaacaatactctaatctaaataactgcctactgtcagatttcctaaaccaggcatcttgtacgcctacatcaaccttggggcctaaacacggtatttataagctgcttcaggttgctgcagggcaagatctcaatgtcaatatcaagtggtctgagcaacttctcggaggttttgggaacgacgcacttcttgtatcccagctttgaaatagcaatcactcgcttgtccattcttg

SEQ ID NO: 134273 - DNA, 1309 bp, Zea Mays
attgttttttcctatttaagatccctatgtatcagcagttggtactttagtaactgaaacaatatgtgctgccataattgtggtcacatgtcattatgtcaacatctcaccataacgtaatgagagtgaacatagaataaacttagcaagtgaatctactaatcaaagcaggatcaagctgtagcgtagtcacccaaaaatattttttttgggaaaatagatagcatttataaaccagaccatttataacggatacttggttttaatttaaaaattaactacgaaacaaagtaaacaatatgtgttgccttagttgtctcaccggtcaacaccaccataacgtaattagagtgaacatagtacaaacttagcaagtgaatttgctaaccaaagcaaggtcagcctgtagcgcaatcagccaaaaacaacttccaataaattagaccatttataatggaacaatggcatgaatataacagaataaataagagtaattctaatctctaatcaggctccacgggatatttagttttaaataacaaaaactgactacggaaccaaggatcaatagtattgtagataaccaagtaatcgagactctgggactctgcaatttcgaatctagatctaacaggattcagcatcgaacacagtaatcaagcttcggacacagtaatttagcttggaacccagtaatcaagactctgctaccccacactaaaataggaaccacaggttccacagattcatcaggacctgcattcctggcttagactgtagtaatactcctgcgcagcaaaaccaagaacttatcctcaattccgtaaaagcaagggggaggacatggagcaggcgaccgatccacaacgtatatgtggctgctatctgctctgatgtgacttagcttttttgacgaggagaagattcatagtatgatggtgtggcctgtccgtcctgcgggttgggcaatacctaagcaaactctacattacagggggagcgagcgatggaaaaatgcgaggaaggcgattgctactcgatgtgtagtaatggtatgggagcgcacattgcggcaggctggaagacaaccctaacactgaggggacgcagatctgtgaagttacggtgaaaaagattgttcgtacctatggcaatcggagagacgacgacaaagcaaacgggggaggtgcggacacagaggaatggctgccaccatggtcgctgtagccgacgtcaacgatgtcgcagctgagcggagacgacggtgcctgctccccttttcccttccccatcatgtggtattcgtttc

SEQ ID NO: 134274 - DNA, 368 bp, Zea Mays
cactataaaacagtttgtcaggttcatctcttctctccatggttgcgttgccaacttcttcaccacactataggagccggaggttggttcaattatattattgcattgaatggcttcaaactcgccattttctcttctcacgtgtgtatagaactgccaaactaaatgtttgcacgtgacttggatgtgtagcttcctataagttacaacaggagtagttcgtggtctcaccaatatatgttatttcttgtagtcgttgattacgcatttcagcgggcaacacaacgtcagtaaaacaattgttactggaactgtactccactgaacttcagctattccaggatctgatcgtgcaaagttcctgctgg

SEQ ID NO: 134275 - DNA, 440 bp, Zea Mays
atgcccagaccccggcctccatcgtgcttgtctgcctcggcagcaagtacttcgtgtcggagcagcggcagcaacgccctcctttgcgtcgtgctcactagatcgggcctcgcatcggcgatctgtgcaattcctgttcggctatcggtttcatcggttgtcgatttcctattcgccattgtcatcctgtcggttgttcctatccgagctagcccagctcgccagccgtcgcgccctctttacccgttgagccgtgcgttgccgcgttcaccttgttgtgtcgtcgtggacttgtcggcgtgctgctgtggtacctggatcgcgctcgcctcaactcgaacgcgtcgtacgaccatcctcttcgtcgaatggaaatcgtcgcgctggcacgtcgaggtcgtcgatcgccatcctcatctacaccaagtcccaagccgtga

SEQ ID NO: 134276 - DNA, 1674 bp, Zea Mays
atgccggagaagacctgtgtcctcgacgcgcgccaggtgtttgatgggagttattacgcaactcgtaggaagtgggacggggcagtaattccgcaactggccgtatatcattttttatttattaagcttcaaaaccaaagcgcaacaatcttcatgttcttcgctcagggtgcagatggttctcggggacgtggtttacacggctgtgccgttctacaagagggtgctgatggtcgaagaagacgcatttggcttgttggtgctgctcctcgtgcgagagaaggagccagtagtgccaccactgtccagcagcttgaggacttcaagatggccctagaactcattcagtttgatgccatgtttgatccttatgttaaatgtcggtctccaccaaagatacttgtcatcttgaatcctcgatctggacatggtagatctagcaaagtttttcatggaaaagtggaacccatatttaagaggtggcagcaggaccattggcaccttcatcaatttaagttcagtgtcagcggtgaggtatgccatctatcctttatctggagaagcttcactggcagtgtcatctatatttccgttacctgtatttcttgtatgtttgtaatatatttggtcatactgatagataaagctaaaatttattctccatccatagtgaagtagatagcattgatacaaccaatcaatcatacattaataattggacacttgcagaaattactaaaataaatggtaatatcccctaggtagctaagtttactttccttctttatttcagagaaactttgacccattttttttgaataaaattcatctaagatttgtgcagccaaccattagggttttgctatgcaaataaaattcatctaagattggtggccactgtaaagggctcgagtctggtactagcaaatgtgaaggttttgtagtttcttgaggacttcattatatagcatagagtcgtaccttgtgtttcaaaactttaaatagtactctgggttactttattgctgttaattgggaaaaaactgaatcagtctaatttttcactttgatgtcgtctttaaatccagttttcatcgtcgcgtgtatgcgtaataaaatgtcacttctgtactttgtgctattatgggaaaatccatcaccagcatgggataagttggtatttaacaaaataaaaggtagaccctgtggacgagtgagacttatgagtttagtcgcttctccgctatcagcagatgtcagatttgcatttgctttttcttgagcactttgttgctcatttgctcttgttttattgcttgattgtggccttatgtgcgctttgttgctgcatttctcaggttcgacatgccccgtgcctactatcactctcgatttgaagaagagtctcaagattctgcaagtgttgtgttactcctaattcagttaccttactggcaataggatgccattgcaacttctgaaagtgcaaccatctgattgaagcggatttaattatacaagatagatctagaattgctttacttgagattcaagcaatgttggatgcttttgtgacttatcatctctagagcttttgtaaatgatctagctagctatctgtaaatgatctagttgtgaatgatattataattgtgatgcttttgtgaatatata

SEQ ID NO: 134277 - DNA, 522 bp, Zea Mays
atggaccacaccctcaggcagaaaggcataggtagtatggacccggtgctacgtgacggtcccaggcaagatgaccccaagaacgacgggtgggacgactctggttccatgtgcgactctgaccacatcagccttgtggcgcctagcaaggatataagtctcatgttcatcacatttaatgtgatgaaaggcataggtagtatgaacccggtgctacgtgacggtcccaggcaagatgaccccaagaacgacgggtgggacgactctggttccatgtgcgactctgaccacatcagccttgtggcgcctagcaaggatataagtctcatgttcatcacatttaatgtgatgggcaacattgtagtcaaagggcatcaggcgagccagcaccactatgcacgacgtgcagttgaagttctcattatagccatgcctgcgatgacaggcatacccgaaggtattataaagtaccagctaatacattatactcaacggtgtgggcacgcataccgtccactgtag

SEQ ID NO: 134278 - DNA, 583 bp, Zea Mays
ctagaagggggctaccccaccccagtgtgtgccccctttgcgaccaagaagaggaaacaatacaacatcttctcatctcttgcgtctttgcacgacagttctggtattccttgttaagcaggtctgggttgcctaacctttcaccagataatgctagttgcagccttgatgattggtggagcggagctgtggagaagattccccgtgatctccaatccggcttcaattctctagttattcttggcgcttggagcctatggcgtcatcgcaacgactgcgtgtttaatgggagatcgccaagtctggcgagtgctctcaccctcgctggcgatgagctcaggatgtggtgtagtgccggggcaaaagggctgaacctgctttcaactcttatgtttatgcttgacccagggggatagactagtggcttgttcagagtggctgtgtgtggtttctgtgttgcgtcttgtatcttgttgtgtcatgtgtgtgtgtgtcgtgtcaggtgtgtgtcgggtgtggtgtgttgtaccttcttctatctattaatggaatgatacgcagatctcctgcgtgttcgagaaaa

SEQ ID NO: 134279 - DNA, 202 bp, Zea Mays
tagcaaccctaggttgcctttctcccccaccattcagctgctgctgcccccgatttcgccgccgccacctcagattcgccgccgccgacaattcggatgctgccgccaacgattcagatgtcgccgcccccgattcagcctccgtcgccctggatttggcctccctgctcccgattcggcactgctgccccgaaacggcgcc

SEQ ID NO: 134280 - DNA, 932 bp, Zea Mays
tttcagggaacaatttttgatccggagagtggcgaccgtttgcacattgagctagctaaatcaacttcacgcagacctcgtggaggtgtcgaaggctaccgagttattgacaaacgggctaacaaaacagaaggaaatgctgaccatgaaaacgttggtgatgaagatgatgacgaagtatggggggaagatgaggatggaggcaatgacaataatggtgatggaggatcagatgagccatcgggcacagaaaatgaaaatcccagtgataagaatgaattgcctacggatcagagtgatcaaccagggcacaagcagcagaatgggcaatctctctcaaatgaaggacgagacaaatcttcaagtgatataccaccttgctctactatcttcattgcaaatttgggacatacatgcacagaggacgaactcaaggaagttttatccaagtatgatgtgtggattcttctaatttgcttttgaagtggatccatagtaatgaaactgctcattgttgttctatattgtcagggaacctggatttcatgtccttaaaatgcgtcgccgtggtggaatgcctgtagcttttgctgattttacggatattgaatcgtctaccgctgctatgaatagactccaaggcactgtactggcatcttctgataacgatggattgcacattgagtacgcaaggtcgaagatgaggaaaagctaagttgttggactgcaaggattggcagtgtcatctcctgtctgtcttcctggaggctaccagtaggcatccctgcacacgtagctgcgtgtagctgcttgctaagcgtgagaatccagaacggtgctaattgtcctgtatgccattatacaatactccctcttttaaatcatgagatactctcttcgtttcaaattcaaattacagcccgtttggataa

SEQ ID NO: 134281 - DNA, 1220 bp, Zea Mays
tttcagggaacaatttttgatccggagagtggcgaccgtttgcacattgagctagctaaatcaacttcacgcagacctcgtggaggtgtcgaaggctaccgagttattgacaaacgggctaacaaaacagaaggaaatgctgaccatgaaaacgttggtgatgaagatgatgacgaagtatggggggaagatgaggatggaggcaatgacaataatggtgatggaggatcagatgagccatcgggcacagaaaatgaaaatcccagtgataagaatgaattgcctacggatcagagtgatcaaccagggcacaagcagcagaatgggcaatctctctcaaatgaaggacgagacaaatcttcaagtgatataccaccttgctctactatcttcattgcaaatttgggacatacatgcacagaggacgaactcaaggaagttttatccaaggaacctggatttcatgtccttaaaatgcgtcgccgtggtggaatgcctgtagcttttgctgattttacggatattgaatcgtctaccgctgctatgaatagactccaaggcactgtactggcatcttctgataacgatggattgcacattgagtacgcaaggtcgaagatgaggaaaagctaagttgttggactgcaaggattggcagtgtcatctcctgtctgtcttcctggaggctaccagtaggcatccctgcacacgtagctgcgtgtagctgcttgctaagcgtgagaatccagaacggtgctaattgtcctgtatgccattatacaatactccctcttttaaatcatgagatactctcttcgtttcaaattcaaattacagcccgtttggataattggaattgaattctattctaataatagtaatttagtcacatatcaattaagctaatacggttttatacaaaatatatttatatattattattagtaagatattagaaatatttgtgttatgttttactaaagacgagtgagctgaaaagcgtcctgtaaattgtagagtgaaaatatattgtactgatatataaaattatttttcatcctctatataggtttatatctaaactttagaaagtgacggaatattaaatttcaaattaaagaggttactttattaaataaattctaatttcttaagatcaaaacgcctcattataagatttctcggcacttcaaagtacatatatctaaaaaaacaaaaga

SEQ ID NO: 134282 - DNA, 1673 bp, Zea Mays
atggtgccgccgcctcccgagtcccgccgaactgccaagcgcgaacgcttcccgtcctctttaaagccaggtgtcgtccagtccaagtgcttgctcccaaccatttctgcgcgtgcgcctccaccgccagaaccccgaagaagagcatccccctccttggagattttcagtaaccgttcctgctcgacgccgacggcatgccgaccgagcgcgtcgatgtcgcggtctcctcacggacgctgctgcgggcgtccgacccgcctccggacttccccgcggtgctccaggcgtccaacctcgacctcatcctcggttccttccacatctacctcatcgccatgtaccccgccccggccgcgggcttccccgccgtggtagctgccgcgcgggacgccatgcccgctttcctctctcgcttcttccctttcgctggccgcgtcgtcgccaacgccgacaccggcgtgcccgagatcgcgtgcgacaacaccggcgcggagctcgtggtggcgcgcgctggggtgaggctcgcggacgtcgacttcgcggacgccgaccgctcgctgggccgcatcgcggtgccgttccagcaggacctcgcgctgtcgctgcagctggtgcggttcgcgtgcggcgggttcgcgctgtcgtgggggaccaaccacctgctcgtggacggccacggtctgacggcgctgcccagcgcgtgggcggagctgctccgcaccggcggcctctcgtgggagcctcaccacgagcgggcctcgctcttccggccgcgggacccgccgcggtacagcgcgtcgctggacgccgagttcacgcggtacgcgccggcgggcctcccgaactcgctcctgacggccacgctcgtgcgccgcaactacgtggtgtccgccgcggacgtggaccggctccgcgccgcggccagcacccccgcgcgccgcgccacgcggctcgaggcgctgtcggcgcacgtgtggaagctgctcgcggcggccgtgggcgggctcgacgcgcactgccgcatggcgtggctcgtggacggcaggccgcgcctggacgccgccaggtacgacggggccaccgtgcggcgctacctcggcaacgtgttgacgtacgcgtcgcgggaggcggccgtggaggccgtgtcgtcgtccccgctggccgacgtggcggccatggcgggcgcggccatcgcggaggtgttccggtgggagcggtacgaggagctggtggactggatggaggtgcacaagggggtgttccgggagggcggcaagtggacggaggtggtgggcaccggcatggggagccccgcgctggtggtctctacgttcgtgccgttccgcgtggagggggactttgggttcggccggccgcggttggtgtttccgtgggtgcgcccggggcggctgggttccgcggccatgacggtgtcacggagcccgcgggaggacgggtcgtggctcatcaccgccaggatgtggccgcgacttgccgacgccgtggacgcggacccggacgccgtgctcaagccggccaccgccgcgcggctcgggttcggcgcgcccgatccggcagacgtgatgcagcatgctaccagtcgcatttttgtacattttttatcggcacgatccaagaaaatattttggacattcacagtagctctctct

SEQ ID NO: 134283 - DNA, 2085 bp, Zea Mays
atggtgccgccgcctcccgagtcccgccgaactgccaagcgcgaacgcttcccgtcctctttaaagccaggtgtcgtccagtccaagtgcttgctcccaaccatttctgcgcgtgcgcctccaccgccagaaccccgaagaagagcatccccctccttggagattttcagtaaccgttcctgctcgacgccgacggcatgccgaccgagcgcgtcgatgtcgcggtctcctcacggacgctgctgcgggcgtccgacccgcctccggacttccccgcggtgctccaggcgtccaacctcgacctcatcctcggttccttccacatctacctcatcgccatgtaccccgccccggccgcgggcttccccgccgtggtagctgccgcgcgggacgccatgcccgctttcctctctcgcttcttccctttcgctggccgcgtcgtcgccaacgccgacaccggcgtgcccgagatcgcgtgcgacaacaccggcgcggagctcgtggtggcgcgcgctggggtgaggctcgcggacgtcgacttcgcggacgccgaccgctcgctgggccgcatcgcggtgccgttccagcaggacctcgcgctgtcgctgcagctggtgcggttcgcgtgcggcgggttcgcgctgtcgtgggggaccaaccacctgctcgtggacggccacggtctgacggcgctgcccagcgcgtgggcggagctgctccgcaccggcggcctctcgtgggagcctcaccacgagcgggcctcgctcttccggccgcgggacccgccgcggtacagcgcgtcgctggacgccgagttcacgcggtacgcgccggcgggcctcccgaactcgctcctgacggccacgctcgtgcgccgcaactacgtggtgtccgccgcggacgtggaccggctccgcgccgcggccagcacccccgcgcgccgcgccacgcggctcgaggcgctgtcggcgcacgtgtggaagctgctcgcggcggccgtgggcgggctcgacgcgcactgccgcatggcgtggctcgtggacggcaggccgcgcctggacgccgccaggtacgacggggccaccgtgcggcgctacctcggcaacgtgttgacgtacgcgtcgcgggaggcggccgtggaggccgtgtcgtcgtccccgctggccgacgtggcggccatggcgggcgcggccatcgcggaggtgttccggtgggagcggtacgaggagctggtggactggatggaggtgcacaagggggtgttccgggagggcggcaagtggacggaggtggtgggcaccggcatggggagccccgcgctggtggtctctacgttcgtgccgttccgcgtggagggggactttgggttcggccggccgcggttggtgtttccgtgggtgcgcccggggcggctgggttccgcggccatgacggtgtcacggagcccgcgggaggacgggtcgtggctcatcaccgccaggatgtggccgcgacttgccgacgccgtggacgcggacccggacgccgtgctcaagccggccaccgccgcgcggctcgggttcggcgcgcccgatccggcagacgtgatgcagcatgctaccagtcgcatgtgagtcatagagtggtttgccgtgcgcgagccgcgaggcgagccggtgggcctcagccctcagactcagggtggcacgggcggacagaacagcgcccctgtgggcctgcgtatgacatggcggcatggcgctgacgggagtttcatgtgcgcccatcgatctgaggcgtggacggtccgcgaactgggacatagctaagggtttcctgcctgacgaccagacggtccgcgcgtgtgcagggacggcggaagtcgccggcggcacctggatatcgctctcgggagagaccccgtcggggaggagagatcctaggtgttgtctagactcggcaggccgacctagactcctctaatcgacatagagtcgaagagaagcagaaaatttgggaattagagggctaaactagaactagactagaactacttctaaatgtacaagaaataaatgcgagataaattgtttattgattcgattg

SEQ ID NO: 134284 - DNA, 2180 bp, Zea Mays
gctcccaaccatttctgcgcgtgcgcctccaccgccagaaccccgaagaagagcatccccctccttggagattttcagtaaccgttcctgctcgacgccgacggcatgccgaccgagcgcgtcgatgtcgcggtctcctcacggacgctgctgcgggcgtccgacccgcctccggacttccccgcggtgctccaggcgtccaacctcgacctcatcctcggttccttccacatctacctcatcgccatgtaccccgccccggccgcgggcttccccgccgtggtagctgccgcgcgggacgccatgcccgctttcctctctcgcttcttccctttcgctggccgcgtcgtcgccaacgccgacaccggcgtgcccgagatcgcgtgcgacaacaccggcgcggagctcgtggtggcgcgcgctggggtgaggctcgcggacgtcgacttcgcggacgccgaccgctcgctgggccgcatcgcggtgccgttccagcaggacctcgcgctgtcgctgcagctggtgcggttcgcgtgcggcgggttcgcgctgtcgtgggggaccaaccacctgctcgtggacggccacggtctgacggcgctgcccagcgcgtgggcggagctgctccgcaccggcggcctctcgtgggagcctcaccacgagcgggcctcgctcttccggccgcgggacccgccgcggtacagcgcgtcgctggacgccgagttcacgcggtacgcgccggcgggcctcccgaactcgctcctgacggccacgctcgtgcgccgcaactacgtggtgtccgccgcggacgtggaccggctccgcgccgcggccagcacccccgcgcgccgcgccacgcggctcgaggcgctgtcggcgcacgtgtggaagctgctcgcggcggccgtgggcgggctcgacgcgcactgccgcatggcgtggctcgtggacggcaggccgcgcctggacgccgccaggtacgacggggccaccgtgcggcgctacctcggcaacgtgttgacgtacgcgtcgcgggaggcggccgtggaggccgtgtcgtcgtccccgctggccgacgtggcggccatggcgggcgcggccatcgcggaggtgttccggtgggagcggtacgaggagctggtggactggatggaggtgcacaagggggtgttccgggagggcggcaagtggacggaggtggtgggcaccggcatggggagccccgcgctggtggtctctacgttcgtgccgttccgcgtggagggggactttgggttcggccggccgcggttggtgtttccgtgggtgcgcccggggcggctgggttccgcggccatgacggtgtcacggagcccgcgggaggacgggtcgtggctcatcaccgccaggatgtggccgcgacttgccgacgccgtggacgcggacccggacgccgtgctcaagccggccaccgccgcgcggctcgggttcggcgcgcccgatccggcagacgtgatgcagcatgctaccagtcgcatgtgagtcatagagtggtttgccgtgcgcgagccgcgaggcgagccggtgggcctcagccctcagactcagggtggcacgggcggacagaacagcgcccctgtgggcctgcgtatgacatggcggcatggcgctgacgggagtttcatgtgcgcccatcgatctggtacagttttgtacattttttatcggcacgatccaagaaaatattttggacattcacagtagctctctctctcttgactggagataacgaagatggtgggaccgtgggagtagcagtgagcgattgaatctgttggtgtctttttgatcgtcaatcactgcatgaaaactgacggctctgctcgctgcagaggcgtggacggtccgcgaactgggacatagctaagggtttcctgcctgacgaccagacggtccgcgcgtgtgcagggacggcggaagtcgccggcggcacctggatatcgctctcgggagagaccccgtcggggaggagagatcctaggtgttgtctagactcggcaggccgacctagactcctctaatcgacatagagtcgaagagaagcagaaaatttgggaattagagggctaaactagaactagactagaactacttctaaatgtacaagaaataaatgcgagataaattgtttattgattcga

SEQ ID NO: 134285 - DNA, 832 bp, Zea Mays
acacagcctgaagccgaaccggccctctccggtttccaatttgaaaacgggtggttgcccccgcaacgcgggaaaagcctccggcgagcagctagccaaataacttcctttcccatcgctgggatcccgccggtgacaatggtaaggtggctgccgccgccggtgacagcggacggcgagctacccttcggccacgacgccgtaacgttttccttcttggtggcgtgcgtggccgccaccgtcacgctcgcgtcgtccatgtgctcggcgtgcggccgcaagccaaaggcggccaccaacgcggacccggcggggacgggctcctccgtctccggtggtagcggcagccaggaggctggcggcgcggaggaggcggcggtagaggaggaggtggtgaggctgtcgccggagctggcgatgcacggcgccatcgagccggtggcgctgccgtcgtcgacgtcgaggcggcggctgtccatcagcgtgagcaagaagctgagcctgaatatcccggacaagctgcggctgagccggcgggagcacaaggaccaccaccatcacaaggtggagtcggaggacacactgtggaagaagggcatcatcctcggggagaagtgcaggatcccgggggagcgggaggcggagtgcgccgaccccgacgacgacgacatcgccgccgccaacttccgccggtccagctactcacggcccgtgtcgcggtcaagctcgttcgccatgcaccagccgcagcacgacgcccccgggcccgccttgcacgcctcggatacttgacagcccgagagtaggtgtacgtgtaggcgtcaaaggggag

SEQ ID NO: 134286 - DNA, 811 bp, Zea Mays
aggactgtcatttcgtctggacctagttctgaccgaacccaaccgttcccacttcccacaccgtctgcggtctgcctgaccgaaaccgaaccccccagcctacaccacccgctgtcctgatggcgacggaccccgcgccggtgccggcgatgcgctgctactcgctgccgccagtccgcctccccgcggaggacattctcttctgcgtcgacgttgacctcgaggcccgcgccgagatgaagtccgccgccgccgccgcagcgtcctcgggctccacctccaccgcttcgccgcagccgacgcagcccgcgggggccgggggtgccccggcggcggggccccggaccgtggtcaggcggatggacgcggtcaggcaggcgctgctgctgttcgtccacagcaagctcaccatgtgcccagagcaccgcttcgccttcgcctccctcggcgagacgttctccatggtaccacggttcccctcatctgatcccttaatttctcggcaacatctagtcggtcttcgcgttctttgctcttgtcgacgagaaatttaggggacgattattcctatttgtgcagaactgttactagatgactacctgctgtctcatacagacatacagtcatactaccaatcacgatttgttctgtgacgtggtaatgtttgagcgcccaattcgaggtatgatgaggggatctacgtgagggagttctgtttaggctggatttaagttaagcgtggagtgagatattcgcccccaaatttccccaatcatcgtgcattattgttctgtagtttgctctgagagtt

SEQ ID NO: 134287 - DNA, 1781 bp, Zea Mays
cggccacgcctccacaggccgcgtcgttcccgccggcatctcattcgctcgtctccgccggtcgacgttacgccgcgtcgccacacgcccccccggccgctcctatcgctaccacctctcctctcctgaagccacccggacgccggacgcaatggatttttcaaccgcatctacctcctctccccatggcgccgccgcccgcgccgcctgctgactggacccctgatctaaggcccgtagccagcgtgcccgtgcccatcaccgttccgagcccgcgggaccacactcaccaccaccaccacctagtcgatcgtcgggacacgccgcggggccgcgcgtgggagccggagcggaaccggcgcggagaggcgatggacggtgctgcagtggtcaagctgatgtccggcgaggctgggtatgtcttagaagacgtgccgcacgtgtcagactacctccccgatctcccgacctacccaaatccattacaagataacccggcatactccgttgtgaagcaatactttgtaaacccagacgacactgtctgccagaaggtatattttgaaccggatgaggtccatgcatgcattgtcacttgtggaggattgtgcccgggacttaatactgtgattagggaaattgtatgtggattatctgacatgtatggtgtcaccaagatacttgggattcagggtgggtatagaggcttctatgctcgcaacaccatcaccttgactccaaagattgtaaatgacattcacaaaaggggtggaactgttctcggatcatctcgaggaggccatgacaccgtgaagatagttgacagtatccaagatcgtggcataaatcaggtctatgtaattggtggtgacggtactcagaggggtgctggagtgatattcgaagaagttagaagacgcggcctcaaagtttctgttgctggcattccaaagactattgataatgacatccctgtaattgacaagtcatttggtttcgacacagcagttgaggaggctcaacgtgcaataaatgctgctcatgtggaagctgtaagtgctgagaatggtataggtctcgtcaagctaatgggccggcacagtggttttatcgcacattatgctaccctcgctagcagggacgtggattgctgcttgatcccagaatcaccattctatctggaaggtgaaggcggactttttagatatatagaaagacgtttgaaggacaatggtcatatggttatcgttgtcgcggagggtgctggacagaaacttatcgctgaaaccatgcagtcaattgggaaagatgcttcaggcaatcagctgcttcttgatgttggtctttggttatctcagaagataaatgaatatttcaagaaaaacaagatgaccattaatctgaagtacatagatccaacgtacatgatacgtgccattcctagcaacgcctctgataatgtctactgcacactgctagctcacagtgtggtccatggagccatggctggatacactggtttcaccatcggtcaagtgaatggtcggcattgctatatccccttctacaggataacagagaagcagaacagggtctcgataaccgacaggatgtgggcaaggcttctgtcgtcgaccaaccagccgagcttcctctgcaacaaagtcatcgaagaggcaaagaaggagcaggaaagagcggcgcagcttttagatggctcgccttcccatcggaaggttgacgacgaggttgcagcttccaacttgggtcgtaccaagtga

SEQ ID NO: 134288 - DNA, 1844 bp, Zea Mays
cggccacgcctccacaggccgcgtcgttcccgccggcatctcattcgctcgtctccgccggtcgacgttacgccgcgtcgccacacgcccccccggccgctcctatcgctaccacctctcctctcctgaagccacccggacgccggacgcaatggatttttcaaccgcatctacctcctctccccatggcgccgccgcccgcgccgcctgctgactggacccctgatctaaggcccgtagccagcgtgcccgtgcccatcaccgttccgagcccgcgggaccacactcaccaccaccaccacctagtcgatcgtcgggacacgccgcggggccgcgcgtgggagccggagcggaaccggcgcggagaggcgatggacggtgctgcagtggtcaagctgatgtccggcgaggctgggtatgtcttagaagacgtgccgcacgtgtcagactacctccccgatctcccgacctacccaaatccattacaagataacccggcatactccgttgtgaagcaatactttgtaaacccagacgacactgtctgccagaagattgttgttcacaaggatggccccagagggaaccacttccgtcgtgccggacctcgccaaagggtatattttgaaccggatgaggtccatgcatgcattgtcacttgtggaggattgtgcccgggacttaatactgtgattagggaaattgtatgtggattatctgacatgtatggtgtcaccaagatacttgggattcagggtgggtatagaggcttctatgctcgcaacaccatcaccttgactccaaagattgtaaatgacattcacaaaaggggtggaactgttctcggatcatctcgaggaggccatgacaccgtgaagatagttgacagtatccaagatcgtggcataaatcaggtctatgtaattggtggtgacggtactcagaggggtgctggagtgatattcgaagaagttagaagacgcggcctcaaagtttctgttgctggcattccaaagactattgataatgacatccctgtaattgacaagtcatttggtttcgacacagcagttgaggaggctcaacgtgcaataaatgctgctcatgtggaagctgtaagtgctgagaatggtataggtctcgtcaagctaatgggccggcacagtggttttatcgcacattatgctaccctcgctagcagggacgtggattgctgcttgatcccagaatcaccattctatctggaaggtgaaggcggactttttagatatatagaaagacgtttgaaggacaatggtcatatggttatcgttgtcgcggagggtgctggacagaaacttatcgctgaaaccatgcagtcaattgggaaagatgcttcaggcaatcagctgcttcttgatgttggtctttggttatctcagaagataaatgaatatttcaagaaaaacaagatgaccattaatctgaagtacatagatccaacgtacatgatacgtgccattcctagcaacgcctctgataatgtctactgcacactgctagctcacagtgtggtccatggagccatggctggatacactggtttcaccatcggtcaagtgaatggtcggcattgctatatccccttctacaggataacagagaagcagaacagggtctcgataaccgacaggatgtgggcaaggcttctgtcgtcgaccaaccagccgagcttcctctgcaacaaagtcatcgaagaggcaaagaaggagcaggaaagagcggcgcagcttttagatggctcgccttcccatcggaaggttgacgacgaggttgcagcttccaacttgggtcgtaccaagtga

SEQ ID NO: 134289 - DNA, 446 bp, Zea Mays
atgaagaaggagaaaaagagaaggaaaagaactgggaaatacaattcgtttatggtgttagcacttttcagtacccttgtagatcttatgtgcttcaaggacgaatcgagctgcttctccagtaagacacgtggtatgggagctgggcgcaagctcaagacccacagaaggaaccagaggtgggctgacaaagcctacaagaaaagccatctcggcaacgagtggaagaaaccctttgctgggtcatctcacgcaaagggaatcgtccttgagaagatcggcattgaggctaagcagcctaactctgctatccgtaagtgcgctcgtgtctagctggtgaagaacggaagaagattgctgcctttgtgccaaacgatggttgcctgaactacatcgaggagaacgtaagttctatttctccagctcataggactcttcaccatggg

SEQ ID NO: 134290 - DNA, 912 bp, Zea Mays
gctttttataagataaataaatcctattccgtctgctcatcttcaaagaacatttcaatgaaacaaatatttgggaaaaccaatggaaaaagaataaaaataaaaattgaaaaagagaagtggaggaaaagtagggttccattccacggcctgtcgagtgtcgacccacaaaccacgcaaccgatatattccccagcacccccagtctccagccgtccaaccgagacaccgcgtgcgaaccaagcagaccacaacaagaagaagcgtagtcgtcgccggaaggaaaggcgcggagcaagatgtcgtggcaggcgtacgtcgacgagcacctgatgtgcgagatcgaaggacagcatctcagcgccgccgccatcgtcggtcacgacggcagcgtttgggcgcagtccgagagcttccccgagccgtgcggcccggccggatcggagcgaggggatgtccggatctcggtcgctgaggcgagatgcggatctaaggccccttccctcggtgacgtggttgctgctgctgctgttctccgggcgtttgatgccaatatagctgagatcaagcttgatgatctgcgtactgtggatttgctagtgagggatggccggatcgggctgttggcgtccgacctgatttggttgttcgcttgaatagacttacttaccagtggacagtggtagtgatcgttcagcagcagtagagcaatttgttttacatgtaaaatttgagtggctgctagagatgcaccaatggccgagctgcatgtgtttattcctatatagcgacagttgtgtgattgatccaaaacgcaaaattttagttttcatcaaatgatgatttcctgatgccactacctgtgtgtgaggcacttattaaatgaaaagtaactttcggttgggatctggg

SEQ ID NO: 134291 - DNA, 1161 bp, Zea Mays
gctttttataagataaataaatcctattccgtctgctcatcttcaaagaacatttcaatgaaacaaatatttgggaaaaccaatggaaaaagaataaaaataaaaattgaaaaagagaagtggaggaaaagtagggttccattccacggcctgtcgagtgtcgacccacaaaccacgcaaccgatatattccccagcacccccagtctccagccgtccaaccgagacaccgcgtgcgaaccaagcagaccacaacaagaagaagcgtagtcgtcgccggaaggaaaggcgcggagcaagatgtcgtggcaggcgtacgtcgacgagcacctgatgtgcgagatcgaaggacagcatctcagcgccgccgccatcgtcggtcacgacggcagcgtttgggcgcagtccgagagcttccccgaggtcattcactcccaccttatctcttcccgctctacttgcttagttgctttatccatgttcagtgctcctgcgctgatttagacccgcgcgactctggatctgccccagccgtgcggcccggccggatcggagcgaggggatgtccggatctcggtcgctgaggcgagatgcggatctaaggccccttccctcggtgacgtggttgctgctgctgctgttctccgggcgtttgatgccaatatagctgagatcaagcttgatgatctgcgtactgtggatttgctagtgagggatggccggatcgggctgttggcgtccgacctgatttggttgttcgcttgaatagacttacttaccagtggacagtggtagtgatcgttcagcagcagtagagcaatttgttttacatgtaaaatttgagtggctgctagagatgcaccaatggccgagctgcatgtgtttattcctatatagcgacagttgtgtgattgatccaaaacgcaaaattttagttttcatcaaatgatgatttcctgatgccactacctgtgtgtgaggcacttattaaatgaaaagtaactttcggttgggatctgggaatctgtattgtgttccgtggttggtcacagcttgtggcctgcattgttccataggccaaatggctaggcaaggaaaataaatcatgtaatttggaaaaaaataactgccatagtcagtagtgtacagcagtacatgcttg

SEQ ID NO: 134292 - DNA, 934 bp, Zea Mays
gctttttataagataaataaatcctattccgtctgctcatcttcaaagaacatttcaatgaaacaaatatttgggaaaaccaatggaaaaagaataaaaataaaaattgaaaaagagaagtggaggaaaagtagggttccattccacggcctgtcgagtgtcgacccacaaaccacgcaaccgatatattccccagcacccccagtctccagccgtccaaccgagacaccgcgtgcgaaccaagcagaccacaacaagaagaagcgtagtcgtcgccggaaggaaaggcgcggagcaagatgtcgtggcaggcgtacgtcgacgagcacctgatgtgcgagatcgaaggacagcatctcagcgccgccgccatcgtcggtcacgacggcagcgtttgggcgcagtccgagagcttccccgagttaaagcctgaggaggttgctggtatcataaaggactttgatgaacctggtactcttgcaccaactggtcttttcgttggaggtacaaagtacatggtgatccaaggtgaacctggagttgtcatccgaggaaagaaggtacagtggggaacagattgtctgatagaagaaatgctttgatcattccctttttcgtatgcttatgttaattttaccgaaaaaacaaactcaattcatatttgtagtactccctccattcttttttatttgttgcgttttagctcaaaaatgaactaacggtcgacaaatattcgaaagcggaggaagcactatattagtgttatgatatctaaatggatcaagctcttatagaattattacgcaagaggaatactgtatcaaatatgcctggatacatggtcatgatcactttcagttaattaatattcctgctgaactctgttagctgcatctgcaagtttttgtagcatgtattcaagatcactctacgc

SEQ ID NO: 134293 - DNA, 1223 bp, Zea Mays
gctttttataagataaataaatcctattccgtctgctcatcttcaaagaacatttcaatgaaacaaatatttgggaaaaccaatggaaaaagaataaaaataaaaattgaaaaagagaagtggaggaaaagtagggttccattccacggcctgtcgagtgtcgacccacaaaccacgcaaccgatatattccccagcacccccagtctccagccgtccaaccgagacaccgcgtgcgaaccaagcagaccacaacaagaagaagcgtagtcgtcgccggaaggaaaggcgcggagcaagatgtcgtggcaggcgtacgtcgacgagcacctgatgtgcgagatcgaaggacagcatctcagcgccgccgccatcgtcggtcacgacggcagcgtttgggcgcagtccgagagcttccccgagttaaagcctgaggaggttgctggtatcataaaggactttgatgaacctggtactcttgcaccaactggtcttttcgttggaggtacaaagtacatggtgatccaaggtgaacctggagttgtcatccgaggaaagaagggcactgggggcattactatcaagaaaaccggcatgtccttgattattggtgtctacgacgagccaatgactccagggcaatgcaacatggtggtggagaggctcggcgattacctgatcgagcagggcttctaaaagttcgtcatgttctgttttggtcatttgggcaccaaagtttgcgcctcatttggttctgtaatccgtgagctcgtgcatgtacttggcgtattgcatgcagtgaataatttagcttgggtttgtttgttgggggcagtgttggggacggatttggattggggtttatgcttggcatcgcgtcgtatcgaaactcagctgctgtttcgctgagtaatgtacatttccctggtaatggtacttgtggactctgatgcttttatgggaacgagtgcattttactgccgtgcttggccgtgctgttgaattattcccgtagtgtattaaatattggatgcaccagattgtttgtcccatttacgcataattttcccgtcatatgttgaattatttacgaattataaaatatgtaatttatatttatttttatgaagtatataaaattttacttttttgttatataattaaatattttttgttttgataaaatggtatgttttattttaaataaaaatctataaaaaaaga

SEQ ID NO: 134294 - DNA, 938 bp, Zea Mays
gtactgtaggccgtatcaccttgtggtttgtgtacgttgtcattaaatcatggttgcatccattaaataatgaaaactgacttgtaacatggcacactagttagcagcgaatccttagactgccactagttgatgtacaataatctactccggagtggtatttcttagtcatataagaaatgtttaaatacttccctcccacatctcagtaaacatgtgaaaacacactcttgaaaacgccttttgatttaccctgttgtttccatatccattacagggcactgggggcattactatcaagaaaaccggcatgtccttgattattggtgtctacgacgagccaatgactccagggcaatgcaacatggtggtggagaggctcggcgattacctgatcgagcagggcttctaaaagttcgtcatgttctgttttggtcatttgggcaccaaagtttgcgcctcatttggttctgtaatccgtgagctcgtgcatgtacttggcgtattgcatgcagtgaataatttagcttgggtttgtttgttgggggcagtgttggggacggatttggattggggtttatgcttggcatcgcgtcgtatcgaaactcagctgctgtttcgctgagtaatgtacatttccctggtaatggtacttgtggactctgatgcttttatgggaacgagtgcattttactgccgtgcttggccgtgctgttgaattattcccgtagtgtattaaatattggatgcaccagattgtttgtcccatttacgcataattttcccgtcatatgttgaattatttacgaattataaaatatgtaatttatatttatttttatgaagtatataaaattttacttttttgttatataattaaatattttttgttttgataaaatggtatgttttattttaaataaaaatctataaaaaaa

SEQ ID NO: 134295 - DNA, 684 bp, Zea Mays
tttttttgtgttgccttgttcttaattcatagcatttgagaacaagtccccaacaaccatgcagcgtaaacaatacggggatattgttcatctatttataggcgcgagccgtagcccgaacaaaattacatttatatcattaataactaattatgatcataatacagactaccaagggctatacagtattttcctctttaagtcggtatcgtccttcgtctttagcatgacaccaaaccgaagctcttttgattgtagcttcggcttatatcttcatgttgcacctgcctttgtactgtcttgctgaaggtgtttttgcctaaagggccttcgcggagaagaagaccccaacactagcgaagcttagatctttggaaaatgaacatcattgaagcattgcagcacacttcaaacctagctacttggattgttctgttgaagtttgaatgataacccagtcctggatatcctttctccgtcatttggtacagcaagaaacctttctcaagatggcctaaactggacagtggatatctagtgatcttgtcgtcacctcaatactctcttctccggcgcttgaaactcgaaggtacggtgaactgattttgggagttctggagggatgtaatttcaggaacaaacattgtgctgtcatatgcagggaaacacaaattcccatgccaa

SEQ ID NO: 134296 - DNA, 1181 bp, Zea Mays
ccgttcttccctgacaacgcgacccagagctgtggaattcttgaaacaagtccttggaacttacagcttaagatatattaaggcttcccgtatgcttggtgaccaattagcacttgcatgggtcgtcaagtttcatctaccatcggctttgggaaaattttctaagcatgaagcatttactggtgaagttaatggaacatctgttctcttcttgccttgtgctgtttataattggacctcgcctgagggtgctggacagtttcatggtatacccttggatgttaaggttgtccatttcaaaggttcaagaaagcgattgatgcttgagaggctttggaatttctcagctggaaagtttctgaagacatataccggccatgttaacacaaagtactgcatcccagcggcgttttctatcacaaatagcaagtatattgtcagtggctccgaagacaaatgtgtctacctatgggacctccagtcaagaagaatagtgcagaaactggaaggccatactgatactgtcattgcagtctcatgtcatcccaaggaaaacatgatcgcatccggggcgcttgacaatgacaagaccgtgaaagtttgggtccaaaaggaagaagattgatgagctacctggttacgctcttatctacattggctgtcatgtggactgactaatggtaagcaaaatatgcagcttcccaagcaactaaagtttgctgtagtggagaatgtgatgctcctggcatgtgtaactgagtgagtgctatattgtctgttcagcagctcggcgatgatattagtgaactcaagtgttctgtagagctattcctgggaggctgggatcatgtaagaaagactcaacacaacaatgcttgaacttcatttgttgtgtttctgatcccctaatctttgatgcggagctgtttttgttatctatccatattagctcaatattttgaagtctgtacgctgggttacaggttcagttgctggtcatagatgctgaagtatattagctgaccttgtcatggttcattgatttatttttttaagttgtggcacatagaaggaagaaaaaaaagaactttaatgtggctgctgtgctcaatttgggggagttaatttgaaaattctgaaactcaaatgcaactcgatgaaagctgaaccaagtctgctct

SEQ ID NO: 134297 - DNA, 146 bp, Zea Mays
gtcttagttgtttggggtgtgttttttggttttggtttgccaaatgtaacacctttgtactggggttttttctccccattttattcttcttcttcttaatacaaaaatacgcagctctcctgcgtattcaagaaaaaaaaacataa

SEQ ID NO: 134298 - DNA, 495 bp, Zea Mays
atggatgacgtgccgcgtggacgggcgagcagtacacgaactggacagaaccgagcgcgcaggctccacggcgaactgaaaaaccggctacgcgcaggggcagaggaccgcgcgcgcaaggcgacaacgcccaggaacaggaagcctggacagggcactgtacggaggagttcggctgggacttggcagggagctggctgggcgcgttgcgcgcaggagcaagctcggcaaagcacgagcgagcagggggataggggcgagctcgcgcgcagagaaagagatagtgggagggagaagccgagcaaggaaatcgcggttagaaagatggacgccatggcgagaggagcagagcgccgagcagaaagggcgcgcgagggagaagctcgaggccggacgagtggccgagctgggcgaacagaggagagaggagggccatcccgacgcgcaggaagactggaccagggcgcggcggccatgggagacagagagaactga

SEQ ID NO: 134299 - DNA, 1537 bp, Zea Mays
cctcccgcccatgtccgccgcggccgatgaccgcgcgcgccgcgccgccgcgttccgccccgccccgctccctccgcctgcgcagaagcagcagctctccggcgtggccgccgccgtgctcgacgccgggggacgcctgggccgcgccgtgggcgacgtcttccgccgcctccgcatcgacgacaccttctactccggcggcggcggcggcggcggcggcgcgccgaatcggagctggcgcgacgccgggaacaatggcgggaggccggcggccgccggagccccggctgcggccagcagggaggaggccacaggcggcggcgcctcctccgggcggttcgcgcgggcgcaggggagcatgaacctgtcggcgacgtacgacagcaggacgcacgacgtggagagctcggtggtggccagaggcgacctgtggcgcgcggaggcgtcgcacagcagcagcagcagcgccggcgccggcggcaatggagccaataacaacctgttcctcgtgcagctcggtcctgtcctcttcgtccgcgacacgacgctactcttcccggtgcacctctccaagcggcacctcatctggtacggattcgagcgcaagaacggagtgcactcggtctgccccgcgtactggtcggcccacaagagatggttcttcatgtccatgctatgcctgaacccgttcgcttttgtaaagtctaggcgatcgaccttgtgtccccacccagcctattttctgctacgtacttttagctttctctctcctgtccatatatatttcccgacttaaacatttttgttcgaacactgtcagtcgttcatggacatgcaattcccaaacgggcaactgaggtacgtcgccggcgacggcttcacggcgcgtgctttcctgcccctccgtggcggggtcttgcaagcccacggaaagttcccgggggagaagaggctcagcttctctttcaagaacaggaatggcggcagcgtcgtcccgatggttcagtggccggataagtcactctcggtgggggtcgtccaggcgttgtcttggaggagatccggcctgatgctgcagccagcaacacagatcagcatatgtcctacgatcggcgggcgccatcctggggtgtgcgtggagctgatccactcggcggacgacaacgtcggcgtagtctgcggctactcccacaccgcttcttcccctgcttccgcatacgcctccatatcgatcggaaggtcgaagctgaacggcggagcggcaaggtcagggttagcgttcagagtagacgctccactactccacggttttggccggccatggttctcggtccagatgaacagcggcatcgagttctgattccccactgtcttgccgttgccatgactgaacgaacgaacttactgtacagtagttgatgttgtgtataaagcttgacgacgactcactgatgccatgagtatacgcagtaaacgctacaacactatatgtttggtcgctggctaacttatcataatatgtctattttttattgag

SEQ ID NO: 134300 - DNA, 1002 bp, Zea Mays
atgtcgcgggaggataatgtttacatggccaagctggctgagcaagcagaacggtacgaggaaatggttgagtacatggagaaggtggctaagaccgtagatgtggaagagctcaccgttgaggagcgaaacctcttatctgttgcctacaagaacgtaattggggcccgccatgcctcatggcgcattatctcctccattgagcataaggaggagtcccgtaagaatgaggaacatgttattcagatcacggagtaccgtggcaagattgaggctgaattgagcaacatttgtgatggtatcctgaagttgatcgactctcaccttgtgccttcctccactgctacagagtcgaaggtgttttacctcaagatgaagggagattatcacaggtaccttgctgagtttaagactggtgctgagaggaaggaagctgcagagagtacaatgatagcttataaggcagctcaggatattgcgttggtggaactggcatctactcatcccataagacttggacttgcacttaacttctcagttttctattacgagattctgaactctccagacaaagcttgcaaccttgccaggcaggtgtttgatgaggctatttctcagttggatacgcttggcgaggattcatacaaagatagcaccttaatcatgcagctcctgagggacaacttaaccctatggtccgctgacagcacaacggaggacggcatcgaggagggcaatgaggcctcgaagggtgatgctggtgagggtcagtagtctggtaaaacctcgattgatggttcggcatgtttttgaagtccactgtgttggaaaccatgttctaatagaaggcgtctcccgctccatgcattccaagattctgtcctccccctccctcacccatgttgtaggctggtagtggtcaaattagttggccctgggtccaattggactgatgtattgtttactgctattgaagtcattcgttctcgttttgctcttgca

SEQ ID NO: 134301 - DNA, 1087 bp, Zea Mays
ttttttccctttccatttcgtctcgtactcgtcccggctcgttgctggagggagacgaggagaggaaatctcccgctgacttttcccgtgtccgtgtcgtgttgcctgcgtccgccgttggccagccgcgacccgtcggcatctcctctcgggtctcctcacccgcgcgggagcgggtggttgctgcggcggttgacgacttgacgtttagtagtagagagggacccggccggcagttaaagccgacgcgagagaaccgaggcgagaggggatatggggaaccaggtcgggggccggcggcggacgagcgctacacgcgcccgcaggggctgtacccgcacccggacatcgacctcaggaagctccgccgcctcatcctcgaggccaagctcgcgccctgccaccctggcgccgacgacgcgcgcgctgacctcgacgagtgccccatctgcttcctgttctaccccagccttaaccgctccaagtgctgcgccaaggggatttgcacggagtgcttcctccagatgaagtcccccacctcgtgcaggccgacgcagtatcctgacccagttcacatcaatttgaatccatgctttgttgagacttgagagagagagtttattcgggaggtctctggtattattaaactgtgccggttattgctcagttgcaaagccccttaacttaccttgtactgaggtgtccatattgcaagacgctgaattacgcagtggagtaccgcggcgtgaagaccatggaggagaagggcatagagcagcttgaggagcagagggtcatcgaggcgcagatcaggatgcggcggcaggagctacaggacgatgcagagcggatgaagaacaagcaggctgcgcctttgagtgacgtagtagcatctgcacaagttgattcttgcagtactgacggtgcatcaacagtagctgcaagcagtccgcgaggcaacgatgctctctcgtccgaagtgcagcgttcggagttgatattgaggaattctgaagtcttccaacagaggagattcagttttgttggaagcattgtgattattgttgcattgaattattggggatga

SEQ ID NO: 134302 - DNA, 905 bp, Zea Mays
ttttttccctttccatttcgtctcgtactcgtcccggctcgttgctggagggagacgaggagaggaaatctcccgctgacttttcccgtgtccgtgtcgtgttgcctgcgtccgccgttggccagccgcgacccgtcggcatctcctctcgggtctcctcacccgcgcgggagcgggtggttgctgcggcggttgacgacttgacgtttagtagtagagagggacccggccggcagttaaagccgacgcgagagaaccgaggcgagaggggatatggggaaccaggtcgggggccggcggcggacgagcgctacacgcgcccgcaggggctgtacccgcacccggacatcgacctcaggaagctccgccgcctcatcctcgaggccaagctcgcgccctgccaccctggcgccgacgacgcgcgcgctgacctcgacgagtgccccatctgcttcctgttctaccccagccttaaccgctccaagtgctgcgccaaggggatttgcacggagtgcttcctccagatgaagtcccccacctcgtgcaggccgacgcagtgtccatattgcaagacgctgaattacgcagtggagtaccgcggcgtgaagaccatggaggagaagggcatagagcagcttgaggagcagagggtcatcgaggcgcagatcaggatgcggcggcaggagctacaggacgatgcagagcggatgaagaacaagcaggctgcgcctttgagtgacgtagtagcatctgcacaagttgattcttgcagtactgacggtgcatcaacagtagctgcaagcagtccgcgaggcaacgatgctctctcgtccgaagtgcagcgttcggagttgatattgaggaattctgaagtcttccaacagaggaggggaaataattttgat

SEQ ID NO: 134303 - DNA, 774 bp, Zea Mays
atgaagcacgtggaccgtcctccgaataatcccaaaggtataacaattcagtcaagccaggagtgtttcagtgttgacattccgtgcgcagaacagtcaaatccaagtcaaattatgggaaatcctccaaatgctgacagtcaaactttgatcaatgagacagtagaggtggattctgatgacaatgactttatgccagctgttaagaagcgtaatgtttctgtaagccatacaagagttctaagaaaagttgtgaccaagaggataaaagcgaaggatcttccccgccagaggctcaatgtcaggtgcaaccctcaagatgtaattgcaagcattcacatattgaatgacagacaacgtcaggccataagacgtaaagggttctctaacattcttgatatgacattagatgctttgtgtggtagatcccacctttgctggttgatggataagcttgactacaaggacatgacaattcgtcctggtccaggaaaggaattaaaaatcacaaaggacattgtgcatcttatacttggtgtaccaaatcatggcggtggaaaaccattggggattgatgaagcagttgtagcaagtaatttgagggcagagcttggtttggctaaagacgagttcaatgtgacattgttacagtatcgtttaaggaaaggggaggatgatgaccttaccatcagatgtttcttccttatcttattcaaccatctgttgtttccaactgctagctggggcataacaaaccatgaagtgcttttttga

SEQ ID NO: 134304 - DNA, 463 bp, Zea Mays
gtagccagaatctctgttggcgtcgcctgtttcattgtgttcatgatgatcctttcagtactaggcctttttaggtagtaaaggaaacgtttgtgctctggtttctgcaagaggcttacacagacctgttttgacaagagccgagcagcgatgcttccatttcggaccacgacctagctaaaggctaatggttccaaatgtctgaagtaccaaagacagggctagctcctcgtttttttgtcatgtcaaaatcgtgtatgattgcaacaatattggcgaaatatagttgtactttatattttgatatactatgaacaaaacaagtgccctatgagatcatcgtgatttatgcattttcaaactaaattttatgacacttcttgttgtgttttatgcttccattaaaaaacagtcttactgcgttttacgccaaattgatgacactttttgatgtgttttacag

SEQ ID NO: 134305 - DNA, 2454 bp, Zea Mays
aaccgctacccatcgcaaacgctttccctccactcgtccgctccggccgcgcgcctccgccccacgccgatgccgcccccgcccccaccgcctctcggcctccgcctccgtctctccctcctcccgccccaccctatcgctccttctatccgtcatgccttctgctcaccctccgtcgtgtcctgccatctttcggtgcgccccctcgcccaacgccgcggtgggcgcccgcgccccctctgcgccgcgcggggcgaggccgaggcggagggcttcgcgtggccggatgggtccgaggaggagctgcggcggctcctggagctgctccctagggagctgagtcggcgggtggagacccacccagagctcccggcgctcgtggaggtggtcatggacctcggccggcccccgctcgcgcgcttcccgtccggagacttcctcctctcccaacgccccatctccttcgacgacctccgtcacgctacctcccactcccaggttggggactttggagcggataatcgtgctggaatcagccgcacgctgcaccggatcagcgccattaggaatcggaagggcgtcattgtcggcctcacatgccgtgttgggcgtgcagtgcccgggagcgctaatttgcttcaggatttggttaaggacggtggctcattgctgctcatcggcccacctggggtggggaagactactgtcataagagaaattgcccgtatgttagctgatgactataagaagcgcgtgatgattgtcgacacatctaatgagattggtggggatggtgatattcctcacccaggaataggcaatgcacgtaggttgcaagtgcctaaccaagacatgcagcataaggtactgatagaagctgtggaaaaccatatgcctcaggcgattgttattgatgaaattggaactaaactagaggccatggctgcaagcaccattgcacagaggggcatacagcttgtggcaactgcccatggggtaacgatagagaatctgatcatgaacccatcactagagatgcttgtgggaggaatacagagtgtcacacttggtgatgaagaagctaaccggagaggagttcaaaaaactgttctggagcgcaagggcccatcaacatttacatgtgctgcagagatcgtctccaaaaaagaattacgtgtccatcgtagtttggaagccacggtagatgctttactcgcaggtaagctgcctaattttgaaattcgaaagttgggttcaaagggatctatgcaggaagtttctgtgcaaaaggaacaatcacatcttggtatttatgatgcaactgaatttggcagtgactctctaaggaatgccagaagaagcttagactctgcatttagtcttgactctgctgaagggcatatagtgaggtcagatggagctgattcaagctttaatctttatgcatatgggatctccgagtcgactgccttgcaagccattcatcagctggagttggacgacagtgttactttaacttataatatcagtgaagctgatgcagtgatcgcgttacattcaaagctcaagaagaactatcagattcaggctgtgctgaaatctcaagatataccggttttcctcgtaaagacaaactccctgcctcaaatcaccagggcactccgtgctcttgtcgacgatcacatggacgaagtgatagactacaatgataaagaagaagcaaggtcatcagaagaaaccgatgctctggaggaggcaaggctggcaatcgagcaagtagtgattccgaaaggcgagagcgtgcagctactgccaaggccatcaagcatcatctcgtcccaagtgggtctcgtcgaaagcttcagcctcaagtgggaggtcgtaggccaggagcctaaggcatgcgtgaggatccttccgcactttgcgccaaaacaagtcgaagctgtcgcgcgagaaaccccagcggagcccgccgactcggactgggagagccacgatgactcggatcatacccagagtggcatcaccaggctacctttcctaccggattagcgcggcgtctggcgtatcctttcagttcttcgtggccctgccgcctgctgtgtatgtattccatttatttatcttggtaataacttgcaccagaaagcacttgcgtggttgcgtctatctacctacgtaatataagtggatagtgctccgatccggcctctacgcgcgcgtacagatatatacagtatctaatctgttgtcgacccgtacagtcatatcatccatgcatctcttcccattttttacatgctctgccaattccccaagtgctgcgtatccgttctaatctagtactaccgaacaagataaagcagcaagctagcatataatcgggtcgttgtgtttgtgccttttgactagttgtccaataatataattaagctccatccttgtacttgt

SEQ ID NO: 134306 - DNA, 285 bp, Zea Mays
atggcgctgtcggccaccaacttgaatacgctcaaggcgctgctctgcgccgtgttcctcctgtccacgaccgtcgacatcgtcgtcgccctcggccactgtgagcctacggcggcggtggtagtgcccgccggcgccggccggagaatgctgggcgccgctgcgagctcggcgtctgccgtgagcatgccgcggctcactcgccccgcccccgcggccgccgccgcgacgtactccgagtcgaagagggcgagccccagcgggccagatcctcagcaccattaa

SEQ ID NO: 134307 - DNA, 569 bp, Zea Mays
aattctccccggagacagactgccaaacgggcctctgctccagctaaccgcctgcctgccttttcttctctcgtccaccctaggtctcagtctctgctcgcgctcttgtggagctactaggtgaccgtcgcggccgccctacgccacgtgctcgatccagcctcgtcggcttcttcgcacccgtcaccggcggtcagcacccaccaggttcatagatggcagagacggtgttcaccccctctttggaagggatgaagcatgtgaaggcagagaacggagtcattctcaccaagcccttccttgatgtctgcaagcaaatcttgcctgtcctggataaatttggagctgctatggcaattgtaaagaatgatatcagcggcaatatcacaaggctggaaaacaagtattcttcagatccatcaaagtatggacacatgtacagcatggttcaggaagaagttcaaaacaagaccgcgaaaggttcctcaagctgcacaaatggtcttctgtggctcacgaggtgcttcaatttcttattgttttgtcgtttttcattgcaacttgatcag

SEQ ID NO: 134308 - DNA, 1180 bp, Zea Mays
aattctccccggagacagactgccaaacgggcctctgctccagctaaccgcctgcctgccttttcttctctcgtccaccctaggtctcagtctctgctcgcgctcttgtggagctactaggtgaccgtcgcggccgccctacgccacgtgctcgatccagcctcgtcggcttcttcgcacccgtcaccggcggtcagcacccaccaggtattcgcactccttctcttgcctttcttctgtccgaaactgagcagccgaaccctattcagatctgatgttcatagatggcagagacggtgttcaccccctctttggaagggatgaagcatgtgaaggcagagaacggagtcattctcaccaagcccttccttgatgtctgcaagcaaatcttgcctgtcctggataaatttggagctgctatggcaattgtaaagaatgatatcagcggcaatatcacaaggctggaaaacaagtattcttcagatccatcaaagtatggacacatgtacagcatggttcaggaagaagttcaaaacaagaccgcgaaaggttcctcaagctgcacaaatggtcttctgtggctcacgagggccatggatttccttgttgagttgttccgtaacctgcttgagcatccagactggaccatgactcaagcttgcgctgattcatacaccaagaccttgaagaaatttcatggctggcttgccagttctagttttacggtggccatgaagctctctcctaatagagataaattcatggaggtcattagtggaactggtgatatcaatgcagatattgagaaattttgcacgaccttctctccttttctcaaagaaaatcacgagtttctggcgagcgttggtcttgatgatatgaaggcttcgtagagcgatctccaaggtggtgattacaacaaaataagcgtgtcttatcaaactcaagtgttgcagaggatatacctgttttctgtagccatctccccattgaaaattatacagggtgataataatttttccgcatgattgaccatggctacttacacactgacttgacagtactctacaaatttactttccaaagttagtccctttttttacagataatctacatatgatatgaaattctagtgcaattaataaataaattcctgcaaaaaacagaaacgttaccggtt

SEQ ID NO: 134309 - DNA, 1111 bp, Zea Mays
aattctccccggagacagactgccaaacgggcctctgctccagctaaccgcctgcctgccttttcttctctcgtccaccctaggtctcagtctctgctcgcgctcttgtggagctactaggtgaccgtcgcggccgccctacgccacgtgctcgatccagcctcgtcggcttcttcgcacccgtcaccggcggtcagcacccaccaggttcatagatggcagagacggtgttcaccccctctttggaagggatgaagcatgtgaaggcagagaacggagtcattctcaccaagcccttccttgatgtctgcaagcaaatcttgcctgtcctggataaatttggagctgctatggcaattgtaaagaatgatatcagcggcaatatcacaaggctggaaaacaagtattcttcagatccatcaaagtatggacacatgtacagcatggttcaggaagaagttcaaaacaagaccgcgaaaggttcctcaagctgcacaaatggtcttctgtggctcacgagggccatggatttccttgttgagttgttccgtaacctgcttgagcatccagactggaccatgactcaagcttgcgctgattcatacaccaagaccttgaagaaatttcatggctggcttgccagttctagttttacggtggccatgaagctctctcctaatagagataaattcatggaggtcattagtggaactggtgatatcaatgcagatattgagaaattttgcacgaccttctctccttttctcaaagaaaatcacgagtttctggcgagcgttggtcttgatgatatgaaggcttcgtagagcgatctccaaggtggtgattacaacaaaataagcgtgtcttatcaaactcaagtgttgcagaggatatacctgttttctgtagccatctccccattgaaaattatacagggtgataataatttttccgcatgattgaccatggctacttacacactgacttgacagtactctacaaatttactttccaaagttagtccctttttttacagataatctacatatgatatgaaattctagtgcaattaataaataaattcctgcaaaaaacagaaacgttaccggtt

SEQ ID NO: 134310 - DNA, 1332 bp, Zea Mays
ggtcatcagcgaagcacaaagcgcagatcgtcgatctagcgagctcggagtcggagcacgcctagacaccagcagaaagaagcaatggcggctcggcggctcctcgtcgcgttccttgccttgtgctctggcttctcggccgtccacgggcagaagttcaacgccatcttcagcttcggcgactccatgtccgacaccggcaacctgtgcgtgaacggtccccccaccggcctgacgctcacccagccgccctacggcgagaccttcttcggccgcgccacctgccgctgctccgacggccgcctcgtcgtcgacttcctggccgagaagttcgggctgcccttgctgaagccgtcgaagcagggcggcgcgaacttcaagcagggcgccaacatggcgatcatcggcgcgaccaccatggactctggcttcttccagtcgctgggcatcgccggcaagatctggaacaacgggcccctcaacacccagatccaatggttccagcagctgatgccgtccatctgcggttcaaggcaggcctgcaagtcgtacctgtccaagtccctgttcgtgctgggcgagttcggcggcaacgactacaacgcgcagctcttcggcggctactccccggagcaggcgagcaggcagagcggcaccatcgtggacgccatcgggcggggcgtggagcagctcatccgcctgggcgcgacgcacgtggtggtccccggcgtgctgcccgtgggctgcttcccgatctacctcacgctgtaccggacctccaacgccggcgactacgaccggcacggctgcctgaggcgcttcaacgcgctgtccgcgcggcacaacgcgctgctgcagcgcaaggtgtcgggcctgcggggcaggtaccccggcgcgcggatcatgtacgccgacttctacgcccacgtctacgacatggtcaggaggcccgccagctacgggttcagcgcgaacctcagggcgtgctgcggcgccggcggcggcaagtacaactaccagaacggcgcgcgctgcggcatgcccggcgcgcacgcgtgctccaacccgtcgtcgtcgctcagctgggacggcatccacctgacggaggcggcgtacaggaagatcgccgacggctgggtcagcggggcctactgccacccgcccatctcggcgtaattgtttgtttaggccttattcgtttgtttgtaagtggatcagagcggtttggaagcaagatgatggaggcgataagcaaaaaaaatcgattatacaccgtgtagcttcaatgcaccctgttttatgtgcaatgaaatgatgggacaaccttctggc

SEQ ID NO: 134311 - DNA, 1536 bp, Zea Mays
cggcatttctgatccgtacgtggaagcggtacgtatacgtagacggatagatacatacagtgtacacagctagtacaccacgagcggtcaagcgccatggattcccgagccctgggcaccgttggcctcctgctcgtctcctgtttcctcctcgctgccggcggcgcccagaggttcgaggccatgttcaacttcggggactcgctgggcgacacgggcaacctctgcgtcaacaagtcggcggcgaaccagctcctgctcaccttcgcgcagccgccctacggcatgacgtatttcggccaccccacctgccgctgctccgacggccgcctcgtcgtcgacttcctcgctcaggagctggggctaccgctcctcccgccgtcgaagcagcaggacggcgcggacttccgcaggggtgcgagcatggccatcgtcggcgccacggccctcgacttcgagttcctcaagtccatcggcctcggctacccgatctggaacaacggcgccatgaacgtccagatccagtggttcagggacctgctgccgtccatctgcggcgccgcgccgccggcggaagggcaaggctgcaaggactacctggccagatccctgttcgtcttcggccccttcggagggaacgactacaatgccatgctcttcttcgggctcaccgtggatcaggcaaggaactacacgcccaagatcgtcgacaccgtcgccagcggcgtcgagcaactcatccagttgggcgcagtggacatcgtcgtcccgggagcgctgcccgtggggtgcttcgccatctacctcacgtttctcccgagcgacgacccggccgactacgacgggcacgggtgcctgagggcgctcaacgagctgtccgtctaccagaactccctgctccagagcaggctcgccgccctccaggcaaggtatccctcggcgaggatcgtgtacgccgactactacacccacatcgaccggctggtgcgcagcccggcgcgcttcggcttcacaactggcgccgtcccggcgtgctgcggcgctggtggcggcaagtacaacttcgagctcgacgcgcggtgcggcatgaagggcgccaccgcgtgccgggacccgtcgaggcacgagtcctgggacggcgtccacctgacggaggccgtgaacaggctcatcgccgagggatggctcagaggcccgtactgccatcctcccattgcgactcagtcgatagcgtaggtcacccccggcccatgcggggctgcgcccatggtaagactggcacgggccttccctgacatacagtggcatgatggcgtagtgttgtaccgtatttacgaagtgaaaatctaaaagcttaaatcataaaaaaaaactccctaagctccgatttagtaagttgctaaatacatattaggaataaaatccactttagtctccaacagttttcaataaataattttaaattatgctaactcggattttctagttattacttacaactttaaacttggtttcatttgtacaataaagtttaat

SEQ ID NO: 134312 - DNA, 1368 bp, Zea Mays
cgagcctccaagagaaaaagaaggcgccgcaccaatcgccgccccagtcccaggctccggcgctcgtgttccaaacggccgtgctcccgttccacccacccccatccctcctccactcacccggcctccgtccgatccgcccacgcagccgtgtcggcctcgtgcgcaacgaagaccggccggccggctcacccgccctcccgcccgccgccatgcctggctcgcccaaggtcttctttgcttcctccgcctcgcgccgctccggggcactgcgccggctgctctcctcgccggccttctctgcggcctgcctcttcttcggcctcgccggctttctcgccgccacgctcaccctctcgcgctccccgtccatcactcacagccgctgccccgactcctcgcgcccgctctccgtctccgtcgcgtgggaccgtcgtccaggggatggctccgccgcgggctccgcggagctcccggcctcgctcgccaccggatcgcgcggccgtcacaaggtggccttcgtcgggatcttcaccgggtttggctccatcggccgccgccgcgcgctgcgccggacgtggctccccgcggatcgccagggtctacttcgactggaggaagccactggtctggcattccggtttgtgattgggaaaagcaattcaaagaacaagatggccgctcttaacagagaagttgaagaatatgatgattttgtgcttttagatctcgaggaggagtatagcaggctcccatacaaaacgttagctttctttaaggcggcctatgcattgtatgattctgatttctatgttaaagcggacgatgacatttacttgagaccagatagactttccttacttttggctaaagagcggtcacatccacaaacatacattggatgcatgaagaaggggcctgtttttactgatcctaaattgaaatggtatgagccccaatcctttttactcggatcagaatacttccttcatgcgtatgggccaatttatgctttatcagctgacgtggtggctagcttggttgcattgcgaaacaacagtttccgtatgttcagcaacgaggacgttacaattggatcgtggatgcttgctatgaacgtcaaccatgagaacacacatgcactttgtgaacctgactgcacggagtcttcaattgctgtttgggacatcccaaaatgctcaggtcatttgctttcttatttcttagatggatagattggcatctgtacattttcttgcccccttgtaatgatttggctaacacacatatttccatattgtacattagaatctttaatcaaatgtactcttccccttctaaattataagacgttttggatttctagat

SEQ ID NO: 134313 - DNA, 1994 bp, Zea Mays
cgagcctccaagagaaaaagaaggcgccgcaccaatcgccgccccagtcccaggctccggcgctcgtgttccaaacggccgtgctcccgttccacccacccccatccctcctccactcacccggcctccgtccgatccgcccacgcagccgtgtcggcctcgtgcgcaacgaagaccggccggccggctcacccgccctcccgcccgccgccatgcctggctcgcccaaggtcttctttgcttcctccgcctcgcgccgctccggggcactgcgccggctgctctcctcgccggccttctctgcggcctgcctcttcttcggcctcgccggctttctcgccgccacgctcaccctctcgcgctccccgtccatcactcacagccgctgccccgactcctcgcgcccgctctccgtctccgtcgcgtgggaccgtcgtccaggggatggctccgccgcgggctccgcggagctcccggcctcgctcgccaccggatcgcgcggccgtcacaaggtggccttcgtcgggatcttcaccgggtttggctccatcggccgccgccgcgcgctgcgccggacgtggctccccgcggatcgccagggtctacttcgactggaggaagccactggtctggcattccggtttgtgattgggaaaagcaattcaaagaacaagatggccgctcttaacagagaagttgaagaatatgatgattttgtgcttttagatctcgaggaggagtatagcaggctcccatacaaaacgttagctttctttaaggcggcctatgcattgtatgattctgatttctatgttaaagcggacgatgacatttacttgagaccagatagactttccttacttttggctaaagagcggtcacatccacaaacatacattggatgcatgaagaaggggcctgtttttactgatcctaaattgaaatggtatgagccccaatcctttttactcggatcagaatacttccttcatgcgtatgggccaatttatgctttatcagctgacgtggtggctagcttggttgcattgcgaaacaacagtttccgtatgttcagcaacgaggacgttacaattggatcgtggatgcttgctatgaacgtcaaccatgagaacacacatgcactttgtgaacctgactgcacggagtcttcaattgctgtttgggacatcccaaaatgctcaggtctatgccacccagaggtaaaaatgctagagctccatgaaagaaaagaatgcacaggtggtccaactgtggcagctgaggtgtccgagtctgaggattgatgattcttggttgggggacaaactacggatctgatagttgacctgtgtcctcacccaatagatgtgtttggagtattcatttgattcatcaggcgcaatcattgcgggagcactgctcaaggaacctatagttggctggcgtcgtaacctagcgctgtagcaaaggcattctcattcagcattcttgtcacagcagccttcattgcttctcttgcaattggaaccgtggtcgacgtctggaacgttcaatcctgtatcgtagcagaaattaaaggagttttgttgtatagaaattagaaggaaagaatgcattggcaattaattgataagaccatgcgtacacctgatgctgtggctgattgagattagggatattccttgaggttctctttttggagtaaattattttctgagccgtcgtctacttattttctgatccataactaagcgagcaagctgagtcttgaggatgataacaagcaacgcattctcattctgcattcttatgatcagtgtttttacttgtggcttcgaaattattttctctctcgaaaatatatatggcaagagccttgccggtgattattatactgctattaaagatgaatccttttgttatggggagcgatattgagtgtctctctccagctgtgtaagtagcatggatctgagattgggacaataaacatt

SEQ ID NO: 134314 - DNA, 410 bp, Zea Mays
gatcaagccaaggatggaggcaataagagcttcgaggtaccgagtgcacgggagaaggtcaaagaggctgaggaacccaaagccaggggtgaaaaagaagacttgcaaactcaaggttgatcgagttgagaagagatatggtgcattgaggatcatgacttaagaatgtgacttataactaatgaggtaatactatggttatctggtgtaagtcacaaggctcaagataaagctcaagaattgaacaagggtgttggagctcagatatgtcaatctagatcaagtcaagttgacttgatggtttagagtccaacatcgacctcaaacaggccaaaatgggtaaaacgatgaaaaaggttaagtatgtaaggtttgagtgttcaactatattgcatacacctcttactaca

SEQ ID NO: 134315 - DNA, 534 bp, Zea Mays
atggccggcagggacagggagccgctggtggttggtagggtggtcggcgacgtgctggaccccttcgtccggaccaccaacctcagggtcagctacggggccaggaccgtgtccaacggctgcgagctcaagccgtccatggtggtgcaccagcccagggtcgaggtcgggggacctgacatgaggaccttctacaccctcgtgatggtggacccggatgctccgagcccaagcgacccgaaccttagggagtacctacactggctggtgacggatattccgggaactactggggcagcattttggcaagaggtgatctgctacgagagccctcggccgaccatggggatccaccgcttcgtgctggtgctgttccagcagctggggcggcagacggtgtacgccccgggctggcgccagaacttcaacaccagggacttcgccgagctctacaacctgggcccgcccgtcgccgccgtctacttcaactgccagcgtgaggccggctctgggggcaggaggatgtactcgtga

SEQ ID NO: 134316 - DNA, 499 bp, Zea Mays
atgcattccaaaaatagaaactaatacaaggaaaagtatcacgacagtgtaagaaatgttcgacactttccaaacatcgtcacatatatacaaccagtggcctccaaaagtaatgtacaaatagcaaccaagccacctaccgcctgtgggtcgattaattaggacgatagaaacctccaaaggcgtggtgtacaactaaaggcctcaggtacacacacaggtaattaacactctccaacgcacaccaggaactgctctcctctggccgcccctcatgcctttttctatagccgccacgagcacctgctcaatttattttccaacaacagtaggacctgttgtcctcttactgcccctcatgtgccttttctcaatgctctctgcagacgtcaggacccctcactgcttagtttaccttccaacacagcaaggacctactctgctaccatcaaaacccctcactgctcagtttatctgccaacacatagaaagattcact

SEQ ID NO: 134317 - DNA, 112 bp, Zea Mays
attcgatctgtttaaaagaattgagatctaatttatattcgagtttatgtactcaatatcccatctatatacaattatccgtatctgtatttccaaagttagatttttaaaa

SEQ ID NO: 134318 - DNA, 2305 bp, Zea Mays
gctgggcgtgcgagcgaataaacaacgccgccacgagaagagaggagagcagagggcagtggggagctcggagaccgagggaggcgaggaaagcggcgggtgccgggccgcccgcgccggtgccgaggtcctcgagtcgaccccttacgtctgtcccccgcttgccgccacccgctcgtggtccttccatttccgtttcctcccccgcatccctttttaatgctcgtcgtcctccattctgtcgccgctgtgttcgtgtctctcctcgctccccgatcgctgcccctgggcgccgcgttcgccgccggatctgggggcgggacggtgccccagacgaaccgatggcgcgggcggcgcttcgattgggcgtgcgcgcgctcgcgctcctcgtcttcgtatcagtggctctgcttccacttgtcagttccgacgatgggtacagacactgcgagggtgtcgtcaggggctgggcggatgcctcgtctgggcgcgtgaaggacggggacaaactgagcctcaaggatttgctcttcttcctccacattcctaggactggaggccgcacctactttcactgcttcctcaaaaagctgtatacgaacgcgcaggaatgcccgcgttcttacgacaaactacggttcgatccaagccatcctgattgcaagctggttgttagtcatgatgactatagcttaacttccaagctgccaagggagagaacttctgttgtaacgatactaagaaacccagttgatcgtgtatttagcacatatgagttctcagttgaagttgcagctagattccttgtgcatccaaacttaacttctgcaaagttaatgactacccgtgtgttaacaaagtctcgtgctgtcagtactttggacatctggccttggaagtacttggttccatggatgagggaagatctgtttgcaaggagagatgccaggggtgtttacaaagttcatagtagtaagaaggttaatgcatatgatgtggacgatatggttatgccattacatcggtacatcaatgatccagttgcccatgaaatcattcataatggggctacctttcagattactgggttaacgaacaactcatattttgatggagcacatgaggttcgacattgtgtcaggaagcatccagatcttggtcgtattgtgcttgaagttgctaagaataggctggaccagatgctatatgtaggacttacggaggatcatgaagaatcagcgaggttgtttgctcatatggtaggagcacaggtgctttcacaatctgggacattgactttagatctcaaggaagatctgcccattgagactgattctcacccatccatggagcctgaggacgaagaaacaaacggacatctgaatagcacacatggttggcagaataatgaagcgatgaactctaccaacgacgaacatggaaaaggaaatatgactgttggtaaactgatggaagcttatgaaacttgcattgccaaactgtggaaatctcaatctggccgacgtaaaatatccctaaagaaagttcaggaagcgaacttttcaaaagaggcacggaagctggtatctgaggcaattctgaaccaaatcatctcattgaacagacttgatatggaactttatgaccatgctaagaaaatttttactcaggaacatctgatgctaaaagctcagcaatccatggtggggcagcacagacagtttggagaacaaaaggtttgttcaaactcaaagagcacatcttcgttatgcattttattttagttttgacaaagcttttcccgcaagagttcagaacctcagtgatgtatggtgaacatgggttaggtccggagcgtgtaccgtgctaattgttgaactacaatctagataaatttgacaaatagggaacctgcttcgtatcaacagccatcaagtgcttgattgcgttattagttttccaatctatttgacattgcgttaacattacacatgctagtgtttgatgcatgcgcacatgccagagaggaggaaacacgataagatgtaagatatatgaattcattctcgtacgcggtggaaatgtggaaatgaagaattgtacttcttctgttagcaatcctcatgtgacttgccttatctctttctctttcagggttggatcggcgtaatgtgcagcgtcgggatttgccctccttggatggtggtcttggttgttctagggatctccacgatcatagttttggtcacgttagctgtaacgacgagaaaaagaacgtctaaacttaaggtttaaccggaattca

SEQ ID NO: 134319 - DNA, 2096 bp, Zea Mays
gctgggcgtgcgagcgaataaacaacgccgccacgagaagagaggagagcagagggcagtggggagctcggagaccgagggaggcgaggaaagcggcgggtgccgggccgcccgcgccggtgccgaggtcctcgagtcgaccccttacgtctgtcccccgcttgccgccacccgctcgtggtccttccatttccgtttcctcccccgcatccctttttaatgctcgtcgtcctccattctgtcgccgctgtgttcgtgtctctcctcgctccccgatcgctgcccctgggcgccgcgttcgccgccggatctgggggcgggacggtgccccagacgaaccgatggcgcgggcggcgcttcgattgggcgtgcgcgcgctcgcgctcctcgtcttcgtatcagtggctctgcttccacttgtcagttccgacgatgggtacagacactgcgagggtgtcgtcaggggctgggcggatgcctcgtctgggcgcgtgaaggacggggacaaactgagcctcaaggatttgctcttcttcctccacattcctaggactggaggccgcacctactttcactgcttcctcaaaaagctgtatacgaacgcgcaggaatgcccgcgttcttacgacaaactacggttcgatccaagccatcctgattgcaagctggttgttagtcatgatgactatagcttaacttccaagctgccaagggagagaacttctgttgtaacgatactaagaaacccagttgatcgtgtatttagcacatatgagttctcagttgaagttgcagctagattccttgtgcatccaaacttaacttctgcaaagttaatgactacccgtgtgttaacaaagtctcgtgctgtcagtactttggacatctggccttggaagtacttggttccatggatgagggaagatctgtttgcaaggagagatgccaggggtgtttacaaagttcatagtagtaagaaggttaatgcatatgatgtggacgatatggttatgccattacatcggtacatcaatgatccagttgcccatgaaatcattcataatggggctacctttcagattactgggttaacgaacaactcatattttgatggagcacatgaggttcgacattgtgtcaggaagcatccagatcttggtcgtattgtgcttgaagttgctaagaataggctggaccagatgctatatgtaggacttacggaggatcatgaagaatcagcgaggttgtttgctcatatggtaggagcacaggtgctttcacaatctgggacattgactttagatctcaaggaagatctgcccattgagactgattctcacccatccatggagcctgaggacgaagaaacaaacggacatctgaatagcacacatggttggcagaataatgaagcgatgaactctaccaacgacgaacatggaaaaggaaatatgactgttggtaaactgatggaagcttatgaaacttgcattgccaaactgtggaaatctcaatctggccgacgtaaaatatccctaaagaaagttcaggaagcgaacttttcaaaagaggcacggaagctggtatctgaggcaattctgaaccaaatcatctcattgaacagacttgatatggaactttatgaccatgctaagaaaatttttactcaggaacatctgatgctaaaagctcagcaatccatggtggggcagcacagacagtttggagaacaaaagtgtttgatgcatgcgcacatgccagagaggaggaaacacgataagatggttggatcggcgtaatgtgcagcgtcgggatttgccctccttggatggtggtcttggttgttctagggatctccacgatcatagttttggtcacgttagctgtaacgacgagaaaaagaacgtctaaacttaaggtttaaccggaattcatgaggcagtctatagattatgatgtatagcctgggaggctgggacaggcgttagagcaactccaataagtataataaaatatagctcctaaaacatagaaattgagatcttaaaaatattaaatccaataaaaaaagtagtactccaacactccatattttt

SEQ ID NO: 134320 - DNA, 2044 bp, Zea Mays
gctgggcgtgcgagcgaataaacaacgccgccacgagaagagaggagagcagagggcagtggggagctcggagaccgagggaggcgaggaaagcggcgggtgccgggccgcccgcgccggtgccgaggtcctcgagtcgaccccttacgtctgtcccccgcttgccgccacccgctcgtggtccttccatttccgtttcctcccccgcatccctttttaatgctcgtcgtcctccattctgtcgccgctgtgttcgtgtctctcctcgctccccgatcgctgcccctgggcgccgcgttcgccgccggatctgggggcgggacggtgccccagacgaaccgatggcgcgggcggcgcttcgattgggcgtgcgcgcgctcgcgctcctcgtcttcgtatcagtggctctgcttccacttgtcagttccgacgatgggtacagacactgcgagggtgtcgtcaggggctgggcggatgcctcgtctgggcgcgtgaaggacggggacaaactgagcctcaaggatttgctcttcttcctccacattcctaggactggaggccgcacctactttcactgcttcctcaaaaagctgtatacgaacgcgcaggaatgcccgcgttcttacgacaaactacggttcgatccaagccatcctgattgcaagctggttgttagtcatgatgactatagcttaacttccaagctgccaagggagagaacttctgttgtaacgatactaagaaacccagttgatcgtgtatttagcacatatgagttctcagttgaagttgcagctagattccttgtgcatccaaacttaacttctgcaaagttaatgactacccgtgtgttaacaaagtctcgtgctgtcagtactttggacatctggccttggaagtacttggttccatggatgagggaagatctgtttgcaaggagagatgccaggggtgtttacaaagttcatagtagtaagaaggttaatgcatatgatgtggacgatatggttatgccattacatcggtacatcaatgatccagttgcccatgaaatcattcataatggggctacctttcagattactgggttaacgaacaactcatattttgatggagcacatgaggttcgacattgtgtcaggaagcatccagatcttggtcgtattgtgcttgaagttgctaagaataggctggaccagatgctatatgtaggacttacggaggatcatgaagaatcagcgaggttgtttgctcatatggtaggagcacaggtgctttcacaatctgggacattgactttagatctcaaggaagatctgcccattgagactgattctcacccatccatggagcctgaggacgaagaaacaaacggacatctgcacacatggttggcagaataatgaagcgatgaactctaccaacgacgaacatggaaaaggaaatatgactgttggtaaactgatggaagcttatgaaacttgcattgccaaactgtggaaatctcaatctggccgacgtaaaatatccctaaagaaagttcaggaagcgaacttttcaaaagaggcacggaagctggtatctgaggcaattctgaaccaaatcatctcattgaacagacttgatatggaactttatgaccatgctaagaaaatttttactcaggaacatctgatgctaaaagctcagcaatccatggtggggcagcacagacagtttggagaacaaaagggttggatcggcgtaatgtgcagcgtcgggatttgccctccttggatggtggtcttggttgttctagggatctccacgatcatagttttggtcacgttagctgtaacgacgagaaaaagaacgtctaaacttaaggtttaaccggaattcatgaggcagtctatagattatgatgtatagcctgggaggctgggacaggcgttagagcaactccaataagtataataaaatatagctcctaaaacatagaaattgagatcttaaaaatattaaatccaataaaaaaagtagtactccaacactccatattttt

SEQ ID NO: 134321 - DNA, 2016 bp, Zea Mays
cgagaagagaggagagcagagggcagtggggagctcggagaccgagggaggcgaggaaagcggcgggtgccgggccgcccgcgccggtgccgaggtcctcgagtcgaccccttacgtctgtcccccgcttgccgccacccgctcgtggtccttccatttccgtttcctcccccgcatccctttttaatgctcgtcgtcctccattctgtcgccgctgtgttcgtgtctctcctcgctccccgatcgctgcccctgggcgccgcgttcgccgccggatctgggggcgggacggtgccccagacgaaccgatggcgcgggcggcgcttcgattgggcgtgcgcgcgctcgcgctcctcgtcttcgtatcagtggctctgcttccacttgtcagttccgacgatgggtacagacactgcgagggtgtcgtcaggggctgggcggatgcctcgtctgggcgcgtgaaggacggggacaaactgagcctcaaggatttgctcttcttcctccacattcctaggactggaggccgcacctactttcactgcttcctcaaaaagctgtatacgaacgcgcaggaatgcccgcgttcttacgacaaactacggttcgatccaagccatcctgattgcaagctggttgttagtcatgatgactatagcttaacttccaagctgccaagggagagaacttctgttgtaacgatactaagaaacccagttgatcgtgtatttagcacatatgagttctcagttgaagttgcagctagattccttgtgcatccaaacttaacttctgcaaagttaatgactacccgtgtgttaacaaagtctcgtgctgtcagtactttggacatctggccttggaagtacttggttccatggatgagggaagatctgtttgcaaggagagatgccaggggtgtttacaaagttcatagtagtaagaaggttaatgcatatgatgtggacgatatggttatgccattacatcggtacatcaatgatccagttgcccatgaaatcattcataatggggctacctttcagattactgggttaacgaacaactcatattttgatggagcacatgaggttcgacattgtgtcaggaagcatccagatcttggtcgtattgtgcttgaagttgctaagaataggctggaccagatgctatatgtaggacttacggaggatcatgaagaatcagcgaggttgtttgctcatatggtaggagcacaggtgctttcacaatctgggacattgactttagatctcaaggaagatctgcccattgagactgattctcacccatccatggagcctgaggacgaagaaacaaacggacatctgaatagcacacatggttggcagaataatgaagcgatgaactctaccaacgacgaacatggaaaaggaaatatgactgttggtaaactgatggaagcttatgaaacttgcattgccaaactgtggaaatctcaatctggccgacgtaaaatatccctaaagaaagttcaggaagcgaacttttcaaaagaggcacggaagctggtatctgaggcaattctgaaccaaatcatctcattgaacagacttgatatggaactttatgaccatgctaagaaaatttttactcaggaacatctgatgctaaaagctcagcaatccatggtggggcagcacagacagtttggagaacaaaagggttggatcggcgtaatgtgcagcgtcgggatttgccctccttggatggtggtcttggttgttctagggatctccacgatcatagttttggtcacgttagctgtaacgacgagaaaaagaacgtctaaacttaaggtttaaccggaattcatgaggcagtctatagattatgatgtatagcctgggaggctgggacaggcgttagagcaactccaataagtataataaaatatagctcctaaaacatagaaattgagatcttaaaaatattaaatccaataaaaaaagtagtactccaacactccatattttt

SEQ ID NO: 134322 - DNA, 1502 bp, Zea Mays
aaagcaaactcacttccttccctcgctaattagcctctgtgcgcccagcttggcctctccaaccaccaccaccgttccgatcctctccgccgtcgcgatggcggcctcctgccgccgccgccgtcacacgccaccgcagagctagctaccgacgaagacaaggcgggcaatggccaaggcgcccctgccgcttccgtcgctgctcgtcctcgccgccttcttcttccaccacccctgctgcacggcgcagggccgcgccgaaaacatctcggaggtcgaggccgcggtccgcgcccgcgcgtccgagctgctccgcgacgccaccagccagctcgtcgacctgcccctcccggccaacctctccggcgcgggcgtccgggcctcggccctcagcgtgcgcagcaacgcgctctgggccggcggcgtcaacaccaccggcttcaccgtcccgccgcgcgtcgtgccggtcccgttcgcgcgccgcctcgccatcgtcttcgagcgcttcgtgggaaactcgacggccgcgttcgccgcgccgcaacgctacgcgctggccgcgcccgtggccggcctcctcgcgtacgacgcgtcggcggggcccgacgcacgcgtctcgctccgggcgctcggcgcgccggtgcgcgtcgagttcaaggacgacctgtcggcggcggcggctctggacaaggggttcgagttcgacgccaccaccgcgcggtgcgtgacgttcgcggccagcggggaggtcgtggccacgcacgccgtcgcgccgggctccgcgtgcgcggtgaacggcacgggtcacttcggtatagcggtgctgctgcccgagacgccgccgccagcctcggccgtgagggccaggtggtgggcgtggacggtgggtgtcggcgccggtggggtgctgggagccagcgccttgacgctctctgtggccggcgcggtgagctggaccaggatgcggcgaagggaggagatggatcggcgggcgatggccggggaggagctggggaggatgacggtgcgcgggagcaggatgccatcggcgaaggtggtaaggacgcggccggagttggaagagcgcagctagcacgccgccgtagcggtaggcgagctcctctccgagtacgttgcaccagccggggggtctggctcctcaactgatggcaacggggagttccccgccggaaatagctcaccgtctccgtccccgcgacgaaaaaacttccctgcagggatcctacgaacgctttggaaagaatatttcttccttatccctgttcctcgcggggataaatccccaacgggatctcatccccgtttaaattacaattaagacatacgtactttgctattaatgttaaatattgtcacttatacacattgtcagatataagaaatcattatgcatacatcaaaatgaatacatttgtacaattagtggtctcttgataagataattatttatttttgtcgttaactagtacataaaaaacata

SEQ ID NO: 134323 - DNA, 1135 bp, Zea Mays
atatatatttagtgacccatatagaagcccattagttcagcacagcacatcttcctcgcagcgccggcgctccatcttccgctccctcccccaccttcgatcggcacgcaggctcggcgtcgtcgtcagcggttcctcctcccgcctctcgccagtagcctcgcgccctcgccgactggcgaccctgccttgaaggggctggcaagatgatcggcgtagggaaggcgaagcagtacgccaacgtccttgacaagcccctcagccgtggcaggcaggaggtcagtttgagtgcatttgcattcttgttctctgagttggttcagtacaaccagactcaagttgacaacattactgagctggaacggaggctggaggatgctggttatgctgttggtgcaagggtgcttgaactactctgtcacagggagaagggaaatagacgagagacacgacttctgggcattttatcattcatccacagtactgtttggaaagtgttgtttggaaaggtggctgactcacttgaaaagggaacagaacacgaggatgaatacatgatcagtgaaaaggagcttcttgttaaccggtttgtgaacttgtgtacttcataaagcacttcttttccttccaagtctaaatttgatattctttctatttggacagtttcatttctgtgccaaaagacatgggagcattcaactgtggagcttttgttgcgggcattgtaaagggtgtattagataatgccggctttcctgccgtagttactgcacattttgtgccaattgaaggccagcaaaggccaagaacgacaatcctgataaagtttgctgaagaggtattacacagagaagcaagactgggctgagtttttatgtatgtacacaaaacctttgactagcctatttgtaaggtgaatcgttactggagtttggtgatttcttgtatttgagtagttcggtgatttcttgtatttgagttatgtaatagcagtgtgactgagaataaaagttatgtaggtgagatcgcaggtgcttcatcagtcttattgaaatccgaccgaaactgctgtattaatgcttttccttgcattcaccttgtattaaaggaatccttcatcttttgatttttcgta

SEQ ID NO: 134324 - DNA, 1058 bp, Zea Mays
atatatatttagtgacccatatagaagcccattagttcagcacagcacatcttcctcgcagcgccggcgctccatcttccgctccctcccccaccttcgatcggcacgcaggctcggcgtcgtcgtcagcggttcctcctcccgcctctcgccagtagcctcgcgccctcgccgactggcgaccctgccttgaaggggctggcaagatgatcggcgtagggaaggcgaagcagtacgccaacgtccttgacaagcccctcagccgtggcaggcaggaggtcagtttgagtgcatttgcattcttgttctctgagttggttcagtacaaccagactcaagttgacaacattactgagctggaacggaggctggaggatgctggttatgctgttggtgcaagggtgcttgaactactctgtcacagggagaagggaaatagacgagagacacgacttctgggcattttatcattcatccacagtactgtttggaaagtgttgtttggaaaggtggctgactcacttgaaaagggaacagaacacgaggatgaatacatgatcagtgaaaaggagcttcttgttaaccgtttcatttctgtgccaaaagacatgggagcattcaactgtggagcttttgttgcgggcattgtaaagggtgtattagataatgccggctttcctgccgtagttactgcacattttgtgccaattgaaggccagcaaaggccaagaacgacaatcctgataaagtttgctgaagaggtattacacagagaagcaagactgggctgagtttttatgtatgtacacaaaacctttgactagcctatttgtaaggtgaatcgttactggagtttggtgatttcttgtatttgagtagttcggtgatttcttgtatttgagttatgtaatagcagtgtgactgagaataaaagttatgtaggtgagatcgcaggtgcttcatcagtcttattgaaatccgaccgaaactgctgtattaatgcttttccttgcattcaccttgtattaaaggaatccttcatcttttgatttttcgta

SEQ ID NO: 134325 - DNA, 1990 bp, Zea Mays
gcaactccgcccgtttcacctccagaggaccgacatcgacaacgctagtagatagatgcactactgacgccactggccacctccggcctctacagcggcgaggagggtggggtggcctccctgtccaggcccaggctcgggccgctactcccctcgtcctccatctcacgccacctgcacgaatccgtgtggcgatgcttccttatccacgctcagagaggggagacggggcggctatcttgggcctcgagaggcgggcgagagaggggagtggatcgcgccagtctgcacgccgaggaggagaactgcctctacttggggagtggatcgcgccgaggaatgggttgcagtggaccgggatgggcgggcacggccgtggattgcggcgaggagaacacgacacgagaattccatggagagcatatgagtgagggagtggatcacgccgctctgcgcgtcgaggaggagaagggagtggaccgcgtcgaggagtggatcgcagaccttccatctgcggcccaggcagaaccgtgcaccagtaaattatggacgcctacattctgctcctaaggagtagcagagatagagggagtacattcttgtgcagcaaattcagaaaaggctggcgtggcccaaccccgaacggtgcagaaacacaccacacactgtgcccggcaggtgtcacgcggatcgcgatccgcggcagcgctgcgggaggcatcccaaccgtcaaatccaccctgatccaagggctcccctatcgacccgttgcgaaacaccctgccgcgcctgattaaaatttcaaagccgcgcgccaactccccaaaccccagcgcttaaaaacgcacccgaatctgccactccaaaatctcccaaagacgccgtcgccgctcttgttgtttccgatcccaaaccccaaacacgctccaccggcacctccgctcccacaccacaccgatggcccgcacgaagcagacggcgcgcaagtccaccggaggcaaggcgccgcggaagcagctggcgaccaaggcagcgcgcaagtcggccccggcaaccggcggcgtgaagaagccgcaccgcttccgcccgggcaccgtggcgctccgcgagatccgcaagtaccagaagagcacggagctgctcatccgcaagctccccttccagcgcctggtccgcgagatcgcgcaggacttcaagaccgacctccgcttccagtcctccgccgtcgccgcgctgcaggaggccgcggaggcctacctcgtcggcctcttcgaggacaccaacctctgcgccatccacgccaagcgcgtcaccatcatgcccaaggacattcagctcgcccgccgcatccgcggggagcgcgcttaggcgtttacggttgattgtcactactgtagatgtttaggctatgttctcgccatgtcctaggtctgctttgttcttatttgtttttttggtttcatcctgtgcgttgatggttgtcaatgagctatcggtgcctgtctgagagaaatggagtgatctgttggcgccattgttgaacaccatgaagttgcgagctcggacgttataaattcctaccagacataaatatgcatgaacaatacaattaactggagatattggtagactagtacatctactatatttgcttatgcttggatgtacattatgtccagcctgtaggagaactggtgtgaactgtacatggatgcggtacacaaacgcgaggcttctggtccatttctctcagacaactgtagtcttggaaagataaaggacgaaacatggaaatgtgtatttaattggccacaaatctggatgtacattagttatgttatcagcattcaaagaaactttagctgttagagaaccattttttttcatgattaggaatacaacaaggagaaagagcataccttcgttggattattctccataattcaacaccgcagatgagacaccttcacgcccaaaacccccattgagg

SEQ ID NO: 134326 - DNA, 1404 bp, Zea Mays
atgagccgccactgtgtgactctccctgtgatcatctttggattactgcagatggctgtggctctctactctaatccaagttcaacgcatccgaactgcacggagagatgtggcaacgtcagtatccaatatcctttcggcatcggatccggctgcttccggcagcccgatttcagcctcacctgcgacgacggcggcggcggcggcggcaaccagccgcccaagatctttctgcatgacggcatcaccgaggtcttgcccgattccggtggcacggtgggtctgtcaaggcttattgatgtagccatttcccacaccatctttatggcacctggtattcctagttacaacttctcgtggaatctcagttctttcactatgtttgacggctcattcaacgtaactgggtgtgacttcgatatatatattcaagaaccgggcacgaatggttccttatggccatgtacaaatcgctgcccccaaagcatcaccaccgagacggtggccagacatgactgcaatggaactggctgctgcattgtttaccttggaattagtgttcgtgatttccagctcaaatttgtgcgccacgataatggcgctagaggtgatcatgatgctctctctaatggaagcgccctgtgggatacaattaacattaccagcaactgggcccaaatatactgggatatagatgatcaaccgacatgcgccagagcgaaggaaaagaatataaactacgcatgtgtcagcaaccacagccaatgctttgacgatgaagtgtttgatgttggttatagatgtgcttgtaacagcggttacgtaggcaatccctttgtagttgatggctgcaagcgtgacgaagcttcgagtcagctagcaaacttttacaacctccgagcaggggtgaagctaggatatagtccaaatcaactgaaggagaactgctcgaggtcctgtggtaatatcagtgttccatatccctttggtttagaggaaggctgctctgcaaggaagctatttaaactcaactgcacaaatgcgacagcgtctatgctccaattcgatgacgaccgtgttgtggcgtttataaatgttacagggagtctcgtgggcatcaggtttacctcacaattcgaagatggtcagcttgggatatatgtatcaggtgaacccgatctctttatgggtcttggggaatcagtggtctcaatgcactgggcagctgccaatcttacatgcgacgaggccctgaaaaataaatcacaatatgcatgttgttcaaacagcaaatgtttaggagtcaattcaaaggatggttatattggatacagatgcaaatgcttagatggtttccaaggaaatccatatagcatcagtgatggttgtgaaggtacaacttaa

SEQ ID NO: 134327 - DNA, 1494 bp, Zea Mays
ctagtagtaggtagtagtagaggagaacagccactcagccagccccctttacttgcacacaatagacaacctcgaacagaaaagaagcagttttgccgtccgagatgagccgccactgtgtgactctccttgtgatcatctttggattactgcagatggctgtggctctctactctaatccaagttcaacgcacccgaactgcacggagagatgtggcaacgtcagcatccaatatcctttcggcttcggatccggctgcttccggcagcccgatttcagcctcacctgcgacggcggcggcggcggcaaccagccgcccaagacctttctgcatgacggcatcaccgaggtcttgcccgattccggtgtcacggtgggtctgtcaaggcttattgatgtagccatttcccacaccatctttatggcacctggtattcctagttacaacttctcgtggaatctcagttctttcactatgttggatggctcattcaacgtaactgggtgtgacttcgatatatatcgtcaagaaccgggcaagaatggttccataccgcggtgtacaaatagctgcccccaaaacatcaccgagacggtggccagacagaactgcaatggaaccgggtgctgccgtctttacgttggagaagttgttcctgatttccagctgaaatttgtgctccacaataatgacactagaggtgatcatgatgctctttctaatggaagcaccctgtggaatacaataaacattaccagcaactgggcccaaatcttatgggatatagatgatcaaccgacatgctccagagcgaaggacaaaaatataaactacgcatgtgtcagcaactacagccattgctttgacgctgaactgtttgatattggttatagatgtggttgtaacagcggttacgtaggcaatccctatgtagttgatggctgcaagcgtgacgaaggatatagtccaaatcaactgaaggaaaactgctcgaggtcctgtggtaatatcagtgttccatatccctttggtttagaggaaggttgctctgcaaggaagctatttaaactcaactgcagaaatgcgacagcgtctatgctccaattcgatgacgaccgtgttgtggcgtttataaatgttgcagagagtctcgtgggcatcaggtttacctcacatttcgaagatgatcagcttgggatatatgtaccaggtgaacccgatctctttatgggtcttggggaatcagtggtctcaatgcactgggcagctgccaatcttacatgcgacgaggccctgaaaaataaatcacaatatgcatgtgtcagttcaaacagcaaatgtttaggagtcaattcaaaggatggttatattggatacagatgcaaatgcttagatggtttccaaggaaatccatataccatcagtgatggttgtgaaggtacaacttaactgtgattctcacccctatccaatttccatttaattttagtgt

SEQ ID NO: 134328 - DNA, 4030 bp, Zea Mays
ctagtagtaggtagtagtagaggagaacagccactcagccagccccctttacttgcacacaatagacaacctcgaacagaaaagaagcagttttgccgtccgagatgagccgccactgtgtgactctccttgtgatcatctttggattactgcagatggctgtggctctctactctaatccaagttcaacgcacccgaactgcacggagagatgtggcaacgtcagcatccaatatcctttcggcttcggatccggctgcttccggcagcccgatttcagcctcacctgcgacggcggcggcggcggcaaccagccgcccaagacctttctgcatgacggcatcaccgaggtcttgcccgattccggtgtcacggtgggtctgtcaaggcttattgatgtagccatttcccacaccatctttatggcacctggtattcctagttacaacttctcgtggaatctcagttctttcactatgttggatggctcattcaacgtaactgggtgtgacttcgatatatatcgtcaagaaccgggcaagaatggttccataccgcggtgtacaaatagctgcccccaaaacatcaccgagacggtggccagacagaactgcaatggaaccgggtgctgccgtctttacgttggagaagttgttcctgatttccagctgaaatttgtgctccacaataatgacactagaggtgatcatgatgctctttctaatggaagcaccctgtggaatacaataaacattaccagcaactgggcccaaatcttatgggatatagatgatcaaccgacatgctccagagcgaaggacaaaaatataaactacgcatgtgtcagcaactacagccattgctttgacgctgaactgtttgatattggttatagatgtggttgtaacagcggttacgtaggcaatccctatgtagttgatggctgcaagcgtgacgaaggatatagtccaaatcaactgaaggaaaactgctcgaggtcctgtggtaatatcagtgttccatatccctttggtttagaggaaggttgctctgcaaggaagctatttaaactcaactgcagaaatgcgacagcgtctatgctccaattcgatgacgaccgtgttgtggcgtttataaatgttgcagagagtctcgtgggcatcaggtttacctcacatttcgaagatgatcagcttgggatatatgtaccaggtgaacccgatctctttatgggtcttggggaatcagtggtctcaatgcactgggcagctgccaatcttacatgcgacgaggccctgaaaaataaatcacaatatgcatgtgtcagttcaaacagcaaatgtttaggagtcaattcaaaggatggttatattggatacagatgcaaatgcttagatggtttccaaggaaatccatataccatcagtgatggttgtgaaggtacaacttaactgtgattctcacccctatccaatttccatttaattttagtgtatctgctggatctattccgtcacatgcatatccactttatttcatcaccatgtatttacgctaacatcttctcaagatgggtcaaaaaaatatttttaatatttatcttgttacaagttgacacattttctttaggacttagaccttttatgagataatcagctagttggctatgagacttaatggaatagccttacacttccactatctgttggatcttttatgggtctggccaatttattgaataaactctatggtgtgtaatggtggagaatactaatagtaccatattggaaatccaagggtcttttggcttaacttatatggtgggaattattccacttaatttgagaagtcaagaaatgaacagggcgtaccacacgcgcgcgcgcgccgccgctgcccgggcgtggcgtggcgaggcaggcggcgagcgggcgtggtgtggttttgttaatttttagcactcattaacagcgggagtttcaactccgggttaaacctttcagttgtccgtctcttcgtcagccgcgcgagaccctttgtcctttagctgcccgtctcctggcgtgccgcatgcgacccttctcctttagcttccctctgcgagaggttaaatagaggagaacccctggcacttggtacacgagaacagaaccattttcagtcacagtccagccgcaagtgagagtattcccatctcgtgactctgcgcgcacagagcagcgagaggacaggtgcctccgaagcccttgccgttcgagaccttgcacaggggatcggcaattaggtttttggggagcgtctacgcgactgcccaaaacatcttcttcctggcgacatgacaagggaagctgaacaaggatctagatcatcagagcgcatgggagggtatgatcagtttattttcttactgttttacgttctgcagattatatatgtttcatatattcatctatgttgttttatatgtagcaatgattttatcttatctgtcctgtcttattataatatgctatatctgtttgttttaattttacagtcatgttgtttatattgctatctgtttagtttcaattgttcagttagtttatatgcttatcgtatttatatgatttatatgattcatatgctttatgttctcatgatccatattgttatggatctgtttgagatcacgatttctatgattaattatttgttaatgtcgtcatcataatattaatttatggaattaaaatgatatggaaaatgcctatatatctaacaatccaaaaacctaatgttaggcattttttctgtcagaggttttgctgctgtgctaaagcttgatccttttgatggtaaaaacttcttgatttggaaagctaaaatggaattgtggctaactgcaatgttatgttattatgtcgctgagggcaagcctgccaacttacctcctgaggatgaagctaagtttaaggctgatgacaacctcttttgaggagcagtgattagcgcacttgacacaaaattccagaaaagctatatcatccttcccacagggaaagagctgtgggatgcacttgttggaaagtttggagttactgatgctggtagtgagttgtatctcatagagcagttgtatgactacaagatggttgagaaccgatctgtagtggaacaggctcatgagtttcaggcactagctaaggaactcgagctttttccttgtcctttgcctgacaagtttgtggctggcggtataatcgccaagttgccaccttcttggaaggattttgctacctctctcaaacataagagaaaagagttcaatgtggaagagcttattggtactcttgatgttgaggaaagagctagaacaaaggacaatggaaaaggtgttgagacctctactgctaatgtggtgcagaagagaaactttcgcaagtttaacaagaagaaaaaccagaacaaacaagagaatacaaataaacctgttcaaacagcacaatttaaaaagaagaagaacaacaacaagggaaagggaggatgctttgtctgtggcagtgatcaacactgggctagagagtgccctgatcgcaagttcacacaggacaagaaatcagctaatgttgtaaccactgaaactggagatggaacatctgggtatggtaattctttaccatttgttctctcagtttgtaactcacctgagtggtggatggacaatggtgcaaatattcatgtgtgtgttgatgcctctatgttctcctcctactaggtcgggaggtctgatgccttgttaatggaaaatgggtcgcgtgctcatgttcttggtgttggtacggtcattcttaagtttacctcgggaaagacagtgccattgaagagcgtgtagcatgtgccctctatcaagaagaatctcgttagcgtttctatgctatgttgagatggatacaaagttgttcttgagtctaataaatgtgttgtgtctaaacatggtatttttgttggtaaaggatatgactgtggaggtttgttccgcttatcactg

SEQ ID NO: 134329 - DNA, 1677 bp, Zea Mays
gttcgctatttatataatccactaggatatatgtttttccttatgtgctattgctttgcttcttgtaacaacaccagggaagctatctccatcttaaatttttagtgcattagaaaatgatgagacttatatccattttagcaattttgtttgccattttgtatttttctttcatgcttcatggttatttatgtttccagatatcaatgaatgtaaaacacaacacatttgcaaagagaacgaggtatgcaacaatgttgtagggagctactactgcaccaattgccctgataaaacagagtacgatgcagcaacaaaccagtgcaaagcaacaaaacagctgggtcttgttttgggtgtgattattgggctttgtgttggctttggcattctagtatcttgcttgggcgggatgcttgtcatccgtagatggaaaagggacattcaaaagcaactacggagaaaatactttagaaaaaaccaaggacttctcctagaacaactaatatcatctgatgagaatgcccgcaacaatacgaagattttttctctggaagagctcaagaaggctacaaatgactttgatacatcacgcatacttggacgtggaggccatggaatggtttacaaaggaatcttgtcggatcagcgtgtggtagcaataaaaatttccaagatcatggagcaaggtgaaatcgacagttttatcaatgaggtcgccattctttctcagataaaccaccgcaacatagtacgactcttcggatgttgtcttgaaactgaggtcccacttcttgtgtatgatttcgtatctaatggttctttgttcgaaattctccatgccgctgaggcaagcaacgatttccagttgtcttgggacgattgcttaaggattgcattagaggctgcaggggcactttattatctccattcttcagcttcagtctcaatcttccaccgtgatgtcaagtcctcgaatatacttttggatggaaactacactgcaaaagtttcagattttggtgcgtcaaggttggttcctattgaccaaacccatgttgttacgaatattcaaggcacttttggctacttagatcctgagtactaccacactgggcaactaaatgagaaaagtgatgtgtatagctttggagtggtacttgtggagctactccttcgaaagaagccggtttttacaaatgagactgggacaaagcaaaatctgtccaactatttcctttgggaaaagaagatgaaacctgttacagagatagtggcttctcaagttctcgaggaagcaacagaggaagaaattaacatggttgcctcccttgccgagaagtgcttgagactccgtcacgaagaaagacctacaatgaagctagtagaaatgactctacagtttttgcgagcagagcggttgaactcaagtagtgatgttcctgcgagcaagcaagaggtggaagaacttttgggtacaagcacttcctattctgacactttgctggacaataaagctgctacaacatcccaacaatcaaagggatattatagtttggagcaggagtttgcttctactactctaccacgttagatttgtcactcgagtgtgaattattaccgttgtcatttacgttataattcgtgaaccaaacaacacctcggtgcgttgtcatt

SEQ ID NO: 134330 - DNA, 112 bp, Zea Mays
gttccgttttggtttgtttaaacagcatgccccaagtagcgcatttaccgaatttatagagattgctcgaactgagcgaaatactcaagtgacaattttagttcgtctcaat

SEQ ID NO: 134331 - DNA, 456 bp, Zea Mays
gaggccttgcgtcgagctccataaattcgatgaccaaacgcggcgcgacccgctgctttcgtcccgtccttctccagtccagcgcgctgcgcgcgtctcaaacacaagcagtgagctgcaaatcaactcgcccgtcccattgtccagctagcctagctcgtcgccagccatacgtcgtcgatggggaagaggaagtcgaggagctccaagctggcggcgcagccaaaaaaggcgccgaaactggagaaggtcttcacgtgcccgttctgcaatcacccggagagcgtcaagtgcctcatcgacctcaagctgggttacgcggaggcgtcgtgcctcatctgcgaggagagttactgcaccgtcccccacaacctgaccgcgcccactgacatctaccacgagtggatcgacgagtgcgagcgcgccaacgacgacgcccgccgctcccgccggtga

SEQ ID NO: 134332 - DNA, 1364 bp, Zea Mays
atgcgagtccagattccatcgcctaccttgaaataacccgcctcgcctcggcttgcaaccgtcccattgcattgcaaggaaggaacacctgctctgctccgctctcgcccctcgccctccaagcaacaacccgccggctgtctgccgtcgccgccgcgccaccacaacaccagtccaccaccacgcggcggacgccacgacgatggagctctttcctcacgggggcttcgtgcggctgcggagccgagcgcgggacaagtacgtccacgccgacgtggacgcgagcggggtctccctgcgcccgctcggcgccgcaccctctgtgaacgcggtgtggaaaccggagcgttggcccagcgaaggggacttcttaatcctccagatcgtcgcctacggccggtacctcgctgtctcggacaaggacgcgccgcccggccaccgcggcgtccgcgccgtccagcgcgactacaactcgccgcgcgcggaggctcccttcttgtggacggcctttagggtggatgcccaccagaactacgtccgcttgcacaaccaccagcgctggctccgcgccaacggcaggcatcgctactggaacaacgtcgtcaccatcgataccaggaacgccagcctgaccacgatgatgcagtggagggtcgaggaaatcccagtgagcccggagccgctaccccttccgcctccacctcaacaacctacgattcatgtaagccgtggcctattcaagcggcgggccaaggtgcatccatcgggccggatgatacagcacgtgcggatggacgatgatgggtttattcttgacaattggcctgatttcaacttcgacgactactccgtgtccaacctgagggccgaggtggcgctccgtcaggatgacgagaacatcacgttgtgcctgcgggccggcaagcatgcgctcttaatcccgcttatcacagacctgcctcataacacagatcccctggacatcatcgtgatgcccgccggatcaccaggtttagatgcgttagagtacccacagtttgatgcgccagaaccgtagaggagtaccggagtagagctgttaaactttggcactttgcaattcatctttgggaagcagtgagcctttaagcatcgacgcccctgatatatacagtgacatgagaattgattgttatcttttgttaagatagtttcagcaattttttttctgtaatggtggttagatttgatgcgatccactgaccggatgcggtttgagatgacatttcagtttcagaaacttaaaaaaaaattctgaaaccattatgtagaaattatggtgaacggctttgcaaggaaacatccgctggaacgatctgaagctc

SEQ ID NO: 134333 - DNA, 1011 bp, Zea Mays
accagatgcgtcgggagacttctaggctgtctttacatacgaatggactctagcgaacagaagtgcctgtgagcattgtcgtttctccaaaaaggatgacaccttcaatgttcgcgacaatccaacagcgacggcgaggaacctttggccctccttcattgcagagcctggagtcggccataaaatcacaatcgacatggtgaaggcagcaagcgaatggttcgatcgcttcctgcatgcatgaatgcaaaagttattgtcgcccatcatttgttctatatcgattgtgatttgtcaacagcatcccttagttgaagtatttatgtcctcgtctgtgtaccttggtaattgccggtcggacaaacatctctatctctatttattatattaggatacgtttggttgctggacaaatgagggcagaatagaatggctcctaagttgggaatggaatgattcctcatattatttggttggaaggatgagatgatccttgttttttgtttggttagagatataactggggatagattgttcatgtcctttgtttggttcgagaacagagcacaaaaaaatgtttgccgccattgcccccatctcatgatatgttacaactaatattaagtcgacaaaacacacatattattaatttcacacaatacataataatgtgtcctagcattacacataatatcaagtttaaggcttccacaaaatctgcatgttcaagcaaaatccgctgacgtacttagaccacatttcattgtttgatgtggttcaagcaaaagaactgtccaagcctatctactataactaccctcacactcctgggtacacataaatcacaattcattgttcgatgtggttcaagcaaaagaacccctaccacctaccctcacactcttgggaacttcactgacgaaattgcgagcccagattaacttgtggtcgaatggcaacttgttgaaggctctagcaatgtgagggtgcgccaccagataattgaaataa

SEQ ID NO: 134334 - DNA, 1977 bp, Zea Mays
atgggtcccctgtgcctgtggcctgcgccacacacacattcctctccaccgtccccactcgctgccgacactccagtgtccagtcgcccacgtacccggcaccccgctgccgtgcccgtgctccatcccgctccgtgtcccaccaccacgcggccttcgctccctactggccacggtgtctcccgccgcagcggatcccaagggaagttccctggcctttccgtgcgtcactgctcgctctccgcctccacctcttttagtgcggccgcctgccagtgcggtgtccactgtccagccagccatccaggcccaggagcgcgagttctgtgcctgtgcctctgctccacctcccctgcccctgcgccccaagtccacgtccaccacttagcactcacgctgctcgctcgctcgctcgtacacgcgcccgcttcgcgcagggaaggaaccgtgggagggaagcggacggacatgatgcacgccaagtcggagtcggacgtgacgagcctggcggcgtcgtcgccgcctcggtcgccgaagcggggcggcggcgccgccggcaacggcggctactacgtgcagagcccgtcgcgggagtcgcacgacggcggctacaagtcctcgtcgatgcagcccacgccggtctacaacagccccaacgagtcgccgtcgcacccctcctacggccgccactcccgctcctcctccgtcagccgcttctccggcaacctccgcaagggcgccgccggggaccgcaaggtgctcaacgacaaggggtggcccgagtgcaacgtcatcgaggaggagggcccgtacgaggacctcgccggcgatagcggcctctcccgccgctgccagatcatactcggcttcctcaccttcgtcctcctcttcaccgtcttctgcctcatcatctggggcgccgcccggccgtacgagcccgaggtcatcgtcaagagcttggtgatggacgacttctacgcgggtgaaggcacggaccacagcggcgttccaacaaaattggtcacaacaaactgctctctgcacatagctgtctacaaccctgccacaatgtttggaattcatgtcacttctggccccatccacctgatgtattcagagatcccaatagcagtcggtcaggttcggaggtattaccagccgaggaagagccaccggatggtgacggcggtcatccacggcgagaaggtgccgctgtacggcgccgggggcagcctgatgctgtcgacaagcacgggcggggcggtgcccctgacgctggacttggacctgacctcgcggggctacgtgatcggcaagctcgtgcgggtgacgcacaaggtgcacgtgacgtgccccgtcgtcgtggacgccaagaagaccaagcccgtcaggttctccaagaaggcctgcgccgtgtacagggcctgaacttcaaatgcgttttcgtaggctgcgatccgacggcgcattagcaacgcgcgtaggatgccgtgcctgtatttagttatcgtattggtggtgaagaacaataagctgcacacacatatggtctgtttgagccttttggttctgccgataaatcgcgctgtacggcgggtgtcctcttgttcttgctcttgcctgtgtgtatctttctttttttcagggcgcaatcctagagacgggacggatggctgtaaactggtcctatctgcagattcacacctgggtgccattgtttattttttatttttgagagagaacatcaagcaagcagcgccatgaaccaggaactgtcggttgcgacctgcggcgtggtcaccgcaggcctactgctagtgctacttcccggcttgcgcccaccaggctgcagcgcgcgccgcggcggccaaagcttgtttttttctcatcagcttttctgaaaatctagctgtggagagaatctgcctgtgtagaaaatttaagtatcattagaattacgtgcggaggaaaataaag

SEQ ID NO: 134335 - DNA, 2127 bp, Zea Mays
atgggtcccctgtgcctgtggcctgcgccacacacacattcctctccaccgtccccactcgctgccgacactccagtgtccagtcgcccacgtacccggcaccccgctgccgtgcccgtgctccatcccgctccgtgtcccaccaccacgcggccttcgctccctactggccacggtgtctcccgccgcagcggatcccaagggaagttccctggcctttccgtgcgtcactgctcgctctccgcctccacctcttttagtgcggccgcctgccagtgcggtgtccactgtccagccagccatccaggcccaggagcgcgagttctgtgcctgtgcctctgctccacctcccctgcccctgcgccccaagtccacgtccaccacttagcactcacgctgctcgctcgctcgctcgtacacgcgcccgcttcgcgcaggtgcgtgtagaacgacggaggcattccatttccgactgagccgtgtgtgtttggatcggatcggacaacccctgccaaaaccgcgtgtgccggcgctgttctgcctctgatcgtgtgtgctgctgttggttttggttttggtttggctagggaaggaaccgtgggagggaagcggacggacatgatgcacgccaagtcggagtcggacgtgacgagcctggcggcgtcgtcgccgcctcggtcgccgaagcggggcggcggcgccgccggcaacggcggctactacgtgcagagcccgtcgcgggagtcgcacgacggcggctacaagtcctcgtcgatgcagcccacgccggtctacaacagccccaacgagtcgccgtcgcacccctcctacggccgccactcccgctcctcctccgtcagccgcttctccggcaacctccgcaagggcgccgccggggaccgcaaggtgctcaacgacaaggggtggcccgagtgcaacgtcatcgaggaggagggcccgtacgaggacctcgccggcgatagcggcctctcccgccgctgccagatcatactcggcttcctcaccttcgtcctcctcttcaccgtcttctgcctcatcatctggggcgccgcccggccgtacgagcccgaggtcatcgtcaagagcttggtgatggacgacttctacgcgggtgaaggcacggaccacagcggcgttccaacaaaattggtcacaacaaactgctctctgcacatagctgtctacaaccctgccacaatgtttggaattcatgtcacttctggccccatccacctgatgtattcagagatcccaatagcagtcggtcaggttcggaggtattaccagccgaggaagagccaccggatggtgacggcggtcatccacggcgagaaggtgccgctgtacggcgccgggggcagcctgatgctgtcgacaagcacgggcggggcggtgcccctgacgctggacttggacctgacctcgcggggctacgtgatcggcaagctcgtgcgggtgacgcacaaggtgcacgtgacgtgccccgtcgtcgtggacgccaagaagaccaagcccgtcaggttctccaagaaggcctgcgccgtgtacagggcctgaacttcaaatgcgttttcgtaggctgcgatccgacggcgcattagcaacgcgcgtaggatgccgtgcctgtatttagttatcgtattggtggtgaagaacaataagctgcacacacatatggtctgtttgagccttttggttctgccgataaatcgcgctgtacggcgggtgtcctcttgttcttgctcttgcctgtgtgtatctttctttttttcagggcgcaatcctagagacgggacggatggctgtaaactggtcctatctgcagattcacacctgggtgccattgtttattttttatttttgagagagaacatcaagcaagcagcgccatgaaccaggaactgtcggttgcgacctgcggcgtggtcaccgcaggcctactgctagtgctacttcccggcttgcgcccaccaggctgcagcgcgcgccgcggcggccaaagcttgtttttttctcatcagcttttctgaaaatctagctgtggagagaatctgcctgtgtagaaaatttaagtatcattagaattacgtgcggaggaaaataaag

SEQ ID NO: 134336 - DNA, 99 bp, Zea Mays
ctattcttatttattattttgttaaagttaaaaatattttactcaatgaacaacgagaacgacacttattttagaaccttggacgtggaattcaactct

SEQ ID NO: 134337 - DNA, 96 bp, Zea Mays
atgaggatggggtggataccagaaatgttgtacacttacgcagacaacatggagattgaagacaacatggagattgaaatgaacactacattaacc

SEQ ID NO: 134338 - DNA, 103 bp, Zea Mays
tagtagtctccggccaagagcagaactactatgtgacaccccagtgtcacctagggcttttctcagtgctaacccaagaaccatcatttcatgtaagccaaag

SEQ ID NO: 134339 - DNA, 1309 bp, Zea Mays
agagtgggttggtgggtgggtccgtccccagcgagccgcggcaggcaccaattggccaccaacaacacgtccccggtcggtcagagtcagccgcgcgcgctgttcttcccacaatccacacccaccaacccctctccccacactcgtcaaccacggccacgctcgctgggcaccatggccaccgggcaaacgggaacgggaggctgaaggcctcttcaccaaacgcacggatcaggtcatcagaccagtggccagcctaccgctgcgcactggcacggcgcacctatgcccgggtccggcaagcctaaccacaccaaccaacccacagggccacacccacaccgaccgtgtccgtccgctgacgcgccgggcccggaccccgtcgctcctaactacactgcacgcaatggccaccacggcgaccgaggcggcgccggcgcaggagcagcaggccaacggcaacggcgagcagaagacgcggcactccgaggtcggccacaagagcctgctcaagagcgacgacctctaccagtacatcctggacacgagcgtgtacccgcgggagccggagagcatgaaggagctccgcgagatcaccgccaagcacccatggaacctgatgacgacctccgccgacgaggggcagttcctgaacatgctcatcaagctcatcggcgccaagaagaccatggagatcggcgtctacaccggctactccctcctcgccacggcgctcgccctcccggaggacggcacgatcttggccatggacatcaaccgcgagaactacgagctgggcctgccctgcatcgagaaggccggcgtcgcccacaagatcgacttccgcgagggtcccgcgctccccgtcctcgacgacctcatcgcggaggacaactacctcaactaccacgagcggctgctgaagctggtgaagctgggcggcctcatcggctacgacaacacgctgtggaacggctccgtcgtgctccccgacgacgcgcccatgcgcaagtacatccgcttctaccgcgacttcgtgctcgtcctcaacaaggcgctcgccgccgacgaccgcgtcgagatctgccagctccccgtcggcgacggcgtcaccctctgccgccgcgtcaagtgaaaacatggcctggcctggcctgccccaccaccgccaccgacggcgccgccggccgcatcctcattccaatcataatagacgacccgcagcattaattatccaccggctttttttttggctctttcttgcccctgtaatctttctcctcctcttccttcttgggaattgtcgccg

SEQ ID NO: 134340 - DNA, 1548 bp, Zea Mays
agagtgggttggtgggtgggtccgtccccagcgagccgcggcaggcaccaattggccaccaacaacacgtccccggtcggtcagagtcagccgcgcgcgctgttcttcccacaatccacacccaccaacccctctccccacactcgtcaaccacggccacgctcgctgggcaccatggccaccgggcaaacgggaacgggaggctgaaggcctcttcaccaaacgcacggatcaggtcatcagaccagtggccagcctaccgctgcgcactggcacggcgcacctatgcccgggtccggcaagcctaaccacaccaaccaacccacagggccacacccacaccgaccgtgtccgtccgctgacgcgccgggcccggaccccgtcgctcgcacgaccgactgcttcttcaccttcacgttggccatatttgagtagcgtcacattggccgtcgcgttggcctacttggcagtggatgccaagctctcacatggctcatcttcgccttcgccttgccgccgcgcgttatataagccgccccggcaggcaaggtcggtcaatccagcaatacccgagtacccgacgcgctagctagttctattgccgcaccccagatctccaggagggactcgttcgttcagctaactacactgcacgcaatggccaccacggcgaccgaggcggcgccggcgcaggagcagcaggccaacggcaacggcgagcagaagacgcggcactccgaggtcggccacaagagcctgctcaagagcgacgacctctaccagtacatcctggacacgagcgtgtacccgcgggagccggagagcatgaaggagctccgcgagatcaccgccaagcacccatggaacctgatgacgacctccgccgacgaggggcagttcctgaacatgctcatcaagctcatcggcgccaagaagaccatggagatcggcgtctacaccggctactccccgtcctcgacgacctcatcgcggaggagaagaaccacgggtcgttcgacttcgtcttcgtggacgccgacaaggacaactacctcaactaccacgagcggctgctgaagctggtgaagctgggcggcctcatcggctacgacaacacgctgtggaacggctccgtcgtgctccccgacgacgcgcccatgcgcaagtacatccgcttctaccgcgacttcgtgctcgtcctcaacaaggcgctcgccgccgacgaccgcgtcgagatctgccagctccccgtcggcgacggcgtcaccctctgccgccgcgtcaagtgaaaacatggcctggcctggcctgccccaccaccgccaccgacggcgccgccggccgcatcctcattccaatcataatagacgacccgcagcattaattatccaccggctttttttttggctctttcttgcccctgtaatctttctcctcctcttccttcttgggaattgtcgccgccgtttcgatacgtaaatcacgagatcggtaatacagtaatgctcctcaattttacaatatactcctactattactactgctacc

SEQ ID NO: 134341 - DNA, 1272 bp, Zea Mays
cttcgccttcgccttgccgccgcgcgttatataagccgccccggcaggcaaggtcggtcaatccagcaatacccgagtacccgacgcgctagctagttctattgccgcaccccagatctccaggagggactcgttcgttcagctaactacactgcacgcaatggccaccacggcgaccgaggcggcgccggcgcaggagcagcaggccaacggcaacggcgagcagaagacgcggcactccgaggtcggccacaagagcctgctcaagagcgacgacctctaccagtacatcctggacacgagcgtgtacccgcgggagccggagagcatgaaggagctccgcgagatcaccgccaagcacccatggaacctgatgacgacctccgccgacgaggggcagttcctgaacatgctcatcaagctcatcggcgccaagaagaccatggagatcggcgtctacaccggctactccctcctcgccacggcgctcgccctcccggaggacggcacgatcttggccatggacatcaaccgcgagaactacgagctgggcctgccctgcatcgagaaggccggcgtcgcccacaagatcgacttccgcgagggtcccgcgctccccgtcctcgacgacctcatcgcggaggtacgaaatggccaggccgccagatctgtgcttcttcgcctatatcgatcgagtagaagttgacatgacatctcggacccgtgtctgtctgcatctgcgcaggagaagaaccacgggtcgttcgacttcgtcttcgtggacgccgacaaggacaactacctcaactaccacgagcggctgctgaagctggtgaagctgggcggcctcatcggctacgacaacacgctgtggaacggctccgtcgtgctccccgacgacgcgcccatgcgcaagtacatccgcttctaccgcgacttcgtgctcgtcctcaacaaggcgctcgccgccgacgaccgcgtcgagatctgccagctccccgtcggcgacggcgtcaccctctgccgccgcgtcaagtgaaaacatggcctggcctggcctgccccaccaccgccaccgacggcgccgccggccgcatcctcattccaatcataatagacgacccgcagcattaattatccaccggctttttttttggctctttcttgcccctgtaatctttctcctcctcttccttcttgggaattgtcgccgccgtttcgatacgtaaatcacgagatcggtaatacagtaatgctcctcaattttacaat

SEQ ID NO: 134342 - DNA, 108 bp, Zea Mays
ggctaactggcctaaggattcataaggataatgtcacacccggttttaaggaacaaagtcgggtgcatctcatacatgcgccaaagaagacaacatatataataacag

SEQ ID NO: 134343 - DNA, 1613 bp, Zea Mays
tttaccaataactttatataccaaccataatttactaatttccctttgtttttctttacgaaggttgaagaattattattcttagatggaaacgcagcatctctcgcaaaaacatacttgctgaaaaaagaaataaaaaagattatcctgttttctccaatgaagggtccgtcgtcttctttcttcaattttcactcccacaatcagcacactcgctagccaaatccgagcgctggctccccagtccccaagggtggctcttccagcccagcgccaccgcaaccatgccccatgtcctctccttcctccacctccacctcccgctcaacactgcccctttgcattccttccgagtccatcgcactcgccactcccaccctcacctctccctccgtactcggcgcgcctcagcgacggcggcggccgccgaagcagagaacccgtccgcatcggcggacgtcgagatggtccgcgggcgggacggtgtttggacggcgcggtccccaactgtggtggtcctgtgggatctcgacaacaagcccccgcgcgggccgccgttcccggccgcaaccgccctcatcggcgccgcctctctcctcggccgcgtcgtctcgatttcggccttcgccaaccgccacgccttctcccacctccctggctgggtcaccgccgagcgccgcgcccgccgcgccctcgaccgctccgagcgcgcgggggtcgtcgtcccttccgtgccctactcctgctccgtctgtggccggcgcttccctacccgccccgatctcacccgccacttccgccagcttcacgagcgcgagcgaaacaagaagctctcccgcctccgctccctcaagggcaagaagcggcagaagttccgcgagcggttcatcaccggcaacaccaagtacgaggatgccgcgcgggagctcctcacccccaaggtagggtacgggcttgcctccgagctccggcgcgcgggcgtccacgtccgcaccgtccccgacaagccgcaggccgcagaccacgcgcttaagcgtcaggtgaagcactccgtcgcctgtggcgtcgattggctggtgctcgtctctgacgactcggatttcaccgatacggtgcgtaatgcacgcgctgccgacctgaggacggtcgtggtgggcgacggttgccgcgctcttggcaaggttgctgacatttggttgccatgggaccgagttgagaatggggaggttgatgaggagatgctgaggagttgcacgttttcagagtaccgagaagatcagggaactgagcgggatgggcagttcataggggattgggatgcaggtgactttgatgatgttgttgacgatattgttggaactagaaccagtttgcttggagctacgacaatgtctgcgtttgctgacgaggacattgcagatggcatatttggagttgaattgaccggggataacatgttttggagttgtgacgatgaggaagaggatgattacttgtgaggttcacatgtgtattgagcagtaaacatttagggcttgtttgctttttcttaatccatgtggatcggatgatattgggtgaatttaaatcctaaacaagtcaaaattcttcat

SEQ ID NO: 134344 - DNA, 1454 bp, Zea Mays
caatattgaattggtctctatgtgttatgttattcctaccgctattggcttggtgtataatgcattaatgctgtggacctgtgaactatttgtgtttgacacataggcatgaacttattctcatatgtatcatgtattcatgttactgctgttattattgtgagactgatgtaatcatgtaatgatgctggtaccatttcagtttgagacatgaatttattgttgcaatgttgctgttttgtctaagattattacctgtgaactgttttttgctgctgggccagtgggccttcacctggcgtcagccggtctgctggtcacagcacgcacacccgacggggacccgaaacccacccgaaacccgacgggtgcgggtgcgggtgtgggatttcacccgcgggtgtggtcgcgggcgggtttgggcttattccgcgggtgcggtcgcgggtgggttttttctccacccgacccgaacccgacccgttgccatctctaccacgagggccacgaccaccaccacccccgccgccgccgcggcaaactgctgctgcccaaccgcgggatggaggtggacgccactgccttctgcccgccgccccagcccgcgcctgccgcctccccggcttcaaagccgcctgcgccggtgctgggcgccggtggagcggtcgcgccggtggcagggcacggccgcggcggagggaggcagtaccgcggcgtccggatgcgcaagtggggcaagtgggtggcggagatccgcgagccgaacaagcggtcgcggatctggctcgggtcctactccaccgccgtcgccgccgcgtgcgcctacgacacggccgtcttctgcctccgcggccgctccgcgcggctcaacttccccgaccagctcgacggcgcggcggtggccgacaaccccgaggacggcgcggggctcacagccgccgccatccgcaagaaggcggccgaggtcggcgcccgcgtcgacgcgctccactgcggcggcggcacctctccgcagccgctgtcgttccatcgccgccgccccaagaaccccgacctcaaccgggagccaaccccggaaacctcagacgacgagtaaagcgcgctgattagggtagctagctagctaggcaggcaggcaggcagcagtagcaagtaaagcaagcaaccaggtggcggcggcgggtccaaacggatgagcgtgggcgggtgcagcgcaaggtgttcggtggaatgcggatgggctcggaggtgtccaataatggagccgcgacgtcgacgtcagggccggaagccgtagtaaagtggaatagcgcgcgggctgtgccgtttgcccggaggcgacggctctagcagtagcaggagacagacgggtgcgtccgtgcctcagtcagtgtgtgcgagcatgttgctcagcaagacggctatgttcatctccccttctcacataaagacgt

SEQ ID NO: 134345 - DNA, 141 bp, Zea Mays
tgttttttttatttttttattttattttatttactttctgtgatcataattactgtattttaagtaggctaatcactgttcatgctatggggaaaataggaagtttaatttaaaattccgttatgttattgattcacgtag

SEQ ID NO: 134346 - DNA, 78 bp, Zea Mays
atggaattatgtcattttataatccctgttcgtccagtcagtcgttatgaactattttctaatcgctcacttcattga

SEQ ID NO: 134347 - DNA, 2351 bp, Zea Mays
ggttgccgaaccccagtcccccaatcggcgtcggcgcgtgggaatcgtcagaaaaacgcgacgaacagccgaaccggtcacaccgaaagcgcagttgcgaggctgttctccgttgtcacgtttctgcccgcatctcccctccaccgtcctctaggctctagtattctagtcctagtcccccaccggccaccaccaggcaccacgccagccagccccaccactccatccgagtcagagtcttcggctccaagccgccccactgttcctcctcgactccaagcaccgcgccggcagcgtgaggagagggctgtcgcgggccgcccgcaggctcctctgctgcggcagggccgcctccccggaggacctatctgatgaaggaagtggatcattgaggtgggtgttctcattgagagagcttcgatcagcaacaaacagcttcaattacgataacaagattggagaagggccacttgggagtgtgtattggggacaagtttgggatggttctcaggtttctgctccgtacatcttcacccttgctgtgaatttaactttcaactttgttgcctgccacttctcgcccagtcacagttactttacacatgcaaatattttatcggtacctatctcactaaataaccgaacaattacttatacttcttttctttttgttttgggacattgatcttcgattgcgttattattaggttggtaggatatgttgtcattggaagtcaacaaaaaaattatatgaactggctacaggtttgcatatctccatcttgtaaataaaaaagaaaaatgcctgcctcaccctgtcatggtggcaactattggacgcgtcttctttaaaattatgattgaggtctcatgttcctgcagagtaatattcttttgaataattgtgagaagtattggtatggtgcttatagacaaataaagtccatctcgtaagtatgctttgttctgtgtctacatttattcttttttacatgtgtagttgtgtccatattttgcagattgagtagctgagaatattgtgacaacgtgtcattccatgcatcaccctgtttccatcttttgtattatataaaactaagttgaaatcaatgcaaccaactgattgactttaccaatcttcattgatccagatcgctgtcaagaggttgaagagtgcaaagaatggcacagaagcggaatttgcttcagaagtcgagatattgggaagaataagacacaaaaacctcctgagttttcgtggatattgtgcggatggacccgaacggattctggtgtatgactttatggcaaactcaagtctctatgcacatcttcatggaccacattctgctgagtgtctccttgactggcggaggagaatatctattgccatcaacactgctcgggctctcttgtaccttcaccactatgcaacacctaagataatccatggaagcatcaagaccaccaatgtgttactggattcagacttccaggcacatgttggcgatttcggtctgataaggtttattcctgatggaatggatcatgaaaagattaccagcgaaagccaacgaggctatcttgctcctgagtacattatgttcggcaaaccaactgcaggttgtgatgtatacagctttggaataatactattggagcttgctagtggcaaaaggccgatagaaaagtcgtgttctgttaagacatatggaattcgaaactgggtgctcccgctggcaaggcagggtagatatgatgaaattgcagactcaaaactgagcgacaagttctctgaatctgaactgagaagaatggtcttagttgggctagcatgtactcattcagaatctgaaaaaagaccaacaatgcttgaagttgtgccgttgctgaaaggcgaatcaaaagaaacccttattaagcttgaaagagatgagttgttcagctcagactcgatggtgagttcacaaggaacaccaaccccagatgggggcacagactctgtgccaaaggaagatcaagaactggttggagcgtgaaatgtgatatgttgctactgtaggcgatggtagaatgcggatttgtgttattggttgatgattggtttgtgcggtttgacatgaatgtaaattgtataggcattgttttctgtaaggaggtatttacccatcccttttgagagattaaggaagagcatgggggctggagatagctgtttatgcgaagtggtttttgtatgcaccgcatagaaaatgcacatgttttttcaggatgtttgtatatttctctgatcaggctgtccacatattaagggtccgtttggttcgtgccttgtttttaaaatctggttc

SEQ ID NO: 134348 - DNA, 1711 bp, Zea Mays
ggttgccgaaccccagtcccccaatcggcgtcggcgcgtgggaatcgtcagaaaaacgcgacgaacagccgaaccggtcacaccgaaagcgcagttgcgaggctgttctccgttgtcacgtttctgcccgcatctcccctccaccgtcctctaggctctagtattctagtcctagtcccccaccggccaccaccaggcaccacgccagccagccccaccactccatccgagtcagagtcttcggctccaagccgccccactgttcctcctcgactccaagcaccgcgccggcagcgtgaggagagggctgtcgcgggccgcccgcaggctcctctgctgcggcagggccgcctccccggaggacctatctgatgaaggaagtggatcattgaggtgggtgttctcattgagagagcttcgatcagcaacaaacagcttcaattacgataacaagattggagaagggccacttgggagtgtgtattggggacaagtttgggatggttctcagatcgctgtcaagaggttgaagagtgcaaagaatggcacagaagcggaatttgcttcagaagtcgagatattgggaagaataagacacaaaaacctcctgagttttcgtggatattgtgcggatggacccgaacggattctggtgtatgactttatggcaaactcaagtctctatgcacatcttcatggaccacattctgctgagtgtctccttgactggcggaggagaatatctattgccatcaacactgctcgggctctcttgtaccttcaccactatgcaacacctaagataatccatggaagcatcaagaccaccaatgtgttactggattcagacttccaggcacatgttggcgatttcggtctgataaggtttattcctgatggaatggatcatgaaaagattaccagcgaaagccaacgaggctatcttgctcctgagtacattatgttcggcaaaccaactgcaggttgtgatgtatacagctttggaataatactattggagcttgctagtggcaaaaggccgatagaaaagtcgtgttctgttaagacatatggaattcgaaactgggtgctcccgctggcaaggcagggtagatatgatgaaattgcagactcaaaactgagcgacaagttctctgaatctgaactgagaagaatggtcttagttgggctagcatgtactcattcagaatctgaaaaaagaccaacaatgcttgaagttgtgccgttgctgaaaggcgaatcaaaagaaacccttattaagcttgaaagagatgagttgttcagctcagactcgatggtgagttcacaaggaacaccaaccccagatgggggcacagactctgtgccaaaggaagatcaagaactggttggagcgtgaaatgtgatatgttgctactgtaggcgatggtagaatgcggatttgtgttattggttgatgattggtttgtgcggtttgacatgaatgtaaattgtataggcattgttttctgtaaggaggtatttacccatcccttttgagagattaaggaagagcatgggggctggagatagctgtttatgcgaagtggtttttgtatgcaccgcatagaaaatgcacatgttttttcaggatgtttgtatatttctctgatcaggctgtccacatattaagggtccgtttggttcgtgccttgtttttaaaatctggttc

SEQ ID NO: 134349 - DNA, 2288 bp, Zea Mays
cgcagttgcgaggctgttctccgttgtcacgtttctgcccgcatctcccctccaccgtcctctaggctctagtattctagtcctagtcccccaccggccaccaccaggcaccacgccagccagccccaccactccatccgagtcagagtcttcggctccaagccgccccactgttcctcctcgactccaagcaccgcgccggcagcgtgaggagagggctgtcgcgggccgcccgcaggctcctctgctgcggcagggccgcctccccggaggacctatctgatgaaggaagtggatcattgaggtgggtgttctcattgagagagcttcgatcagcaacaaacagcttcaattacgataacaagattggagaagggccacttgggagtgtgtattggggacaagtttgggatggttctcaggtttctgctccgtacatcttcacccttgctgtgaatttaactttcaactttgttgcctgccacttctcgcccagtcacagttactttacacatgcaaatattttatcggtacctatctcactaaataaccgaacaattacttatacttcttttctttttgttttgggacattgatcttcgattgcgttattattaggttggtaggatatgttgtcattggaagtcaacaaaaaaattatatgaactggctacaggtttgcatatctccatcttgtaaataaaaaagaaaaatgcctgcctcaccctgtcatggtggcaactattggacgcgtcttctttaaaattatgattgaggtctcatgttcctgcagagtaatattcttttgaataattgtgagaagtattggtatggtgcttatagacaaataaagtccatctcgtaagtatgctttgttctgtgtctacatttattcttttttacatgtgtagttgtgtccatattttgcagattgagtagctgagaatattgtgacaacgtgtcattccatgcatcaccctgtttccatcttttgtattatataaaactaagttgaaatcaatgcaaccaactgattgactttaccaatcttcattgatccagatcgctgtcaagaggttgaagagtgcaaagaatggcacagaagcggaatttgcttcagaagtcgagatattgggaagaataagacacaaaaacctcctgagttttcgtggatattgtgcggatggacccgaacggattctggtgtatgactttatggcaaactcaagtctctatgcacatcttcatggaccacattctgctgagtgtctccttgactggcggaggagaatatctattgccatcaacactgctcgggctctcttgtcagtgaacgacctctttatctttgttcataaccgaaaaacattgataattcatacattgttgcttttgttaaacactgaccgctataactcaagtactttctcacaggtaccttcaccactatgcaacacctaagataatccatggaagcatcaagaccaccaatgtgttactggattcagacttccaggcacatgttggcgatttcggtctgataaggtttattcctgatggaatggatcatgaaaagattaccagcgaaagccaacgaggctatcttgctcctgagtacattatgttcggcaaaccaactgcaggttgtgatgtatacagctttggaataatactattggagcttgctagtggcaaaaggccgatagaaaagtcgtgttctgttaagacatatggaattcgaaactgggtgctcccgctggcaaggcagggtagatatgatgaaattgcagactcaaaactgagcgacaagttctctgaatctgaactgagaagaatggtcttagttgggctagcatgtactcattcagaatctgaaaaaagaccaacaatgcttgaagttgtgccgttgctgaaaggcgaatcaaaagaaacccttattaagcttgaaagagatgagttgttcagctcagactcgatggtgagttcacaaggaacaccaaccccagatgggggcacagactctgtgccaaaggaagatcaagaactggttggagcgtgaaatgtgatatgttgctactgtaggcgatggtagaatgcggatttgtgttattggttgatgattggtttgtgcggtttgacatgaatgtaaattgtataggcattgttttctgtaaggaggtatttacccatcccttttgagagattaaggaagagcatgggggctggagatagctgtttatgcgaagtggtttttgtatgcaccgcatagaaaatgcacatgttttttc

SEQ ID NO: 134350 - DNA, 1881 bp, Zea Mays
tgcttacccaagcgtgtctctctccctggcctcaatctccagccgccactcactaggagatcttctccttcacgccacctaacgtgccatcgtcttcacccggccgtcgtccaccctgccttctccagcttgcgccaaacgtgcgctctttgtgccgccttcgtgacctcccctagctcggccatggatgtcgcgccgcccttctcctatctctctgctcgaccgtgcctcttcttccttgagccacgcccggtgctcctccaccaagcctcgtcggcatgctctcctggcagcggtcggatctggcctcctgcttcccctctagtacgctctcgcttccagctcgttgtgcctctgtactggagttcgccggacagtgcccttgctcggcttctccaatgcgccctaccgccagcacccctctcttggtcatcccttcccctgcgcatgcgctgggcgtgtctcccagccgccagctcggctcctcgcttcaaccgtagacctggtactcctcccgtcgtgcctgtcctctgtgcgcacgcgccatcgccttctctagccattgtgctcggccgatgactcacttcgtgccactcaggggtggatctacgaccggggctgcctgggctgcagccccggtcgcggccagtaaagcgaataggctcatcacgcgtgacagcccagctctgcatccagccgcctagctctagccgtgtccagtccgtgctgtgattctgtgagcatttttcctaccctaaaccagctgccgccgccgcccgccagccgtggaggagccacccagacacccaccgcctacggcccgccgccgcagcacgcagcgctgctagcttggaggccgcagccagcccaccgccgcagcacgcagcgctgctcgcttggaggccggagccagaccgccggacggccggagcctcggagcaccgccgccggcccgccgccgcagcacgcagcgctgctcgcttggaggccggagccagaccgtcggacgcccggaggcccagaggccggagctagaccgccggacggccggagcccggaggcccagagcactgccgcagcaatggctgaactaccaaagtgtacactgctagtatttgctaatgatcggattcggagctgcacgtttcagaagggaatatagtagctcaagttgataggccatatatggctgaggacaatctggaagcatcgacatgacgccacctcatcgctcgcggaacgcgtggttagttgatgggtacgtactgtttttgtttggtttaattttttttgttatagtcttaagtttgtagccccttttagattaatcctgtatccgccactggtgccactgcttcggtgattgcactcagtcctgcgatgtcgacccatctcagttgtcctccagccctaccgtacgcctcgtgttgtcgatggcagcccatgacttcaacatcgacatataccaagagtcggcagtaagcagccctccctcgtagccagtgaagtttcatcatcaccctattgctctgcgtcgttcatgccttgcacctatcgttgtttgttgttagattgcatgtgtgtgtggtggtttggtgaagatggagctatggacggagtagagagtgaatcccagttcgacgctcgtgacgaaaaaccaaatccaagaattattggcattcttgcgaattttgagccaggttatttgtggtgagctctcttgcttgttttccagttgtcgttaacaccatgacacttgctgctgaccccagattgctcatgtgtgtgatttttgtggtgggatgaaagcggagtcccgatgtgtcgctcgccaagggcttgataaaacgactgaaccagaaatccattgccattcttgtg

SEQ ID NO: 134351 - DNA, 1928 bp, Zea Mays
tgcttacccaagcgtgtctctctccctggcctcaatctccagccgccactcactaggagatcttctccttcacgccacctaacgtgccatcgtcttcacccggccgtcgtccaccctgccttctccagcttgcgccaaacgtgcgctctttgtgccgccttcgtgacctcccctagctcggccatggatgtcgcgccgcccttctcctatctctctgctcgaccgtgcctcttcttccttgagccacgcccggtgctcctccaccaagcctcgtcggcatgctctcctggcagcggtcggatctggcctcctgcttcccctctagtacgctctcgcttccagctcgttgtgcctctgtactggagttcgccggacagtgcccttgctcggcttctccaatgcgccctaccgccagcacccctctcttggtcatcccttcccctgcgcatgcgctgggcgtgtctcccagccgccagctcggctcctcgcttcaaccgtagacctggtactcctcccgtcgtgcctgtcctctgtgcgcacgcgccatcgccttctctagccattgtgctcggccgatgactcacttcgtgccactcaggggtggatctacgaccggggctgcctgggctgcagccccggtcgcggccagtaaagcgaataggctcatcacgcgtgacagcccagctctgcatccagccgcctagctctagccgtgtccagtccgtgctgtgattctgtgagcatttttcctaccctaaaccagctgccgccgccgcccgccagccgtggaggagccacccagacacccaccgcctacggcccgccgccgcagcacgcagcgctgctagcttggaggccgcagccagcccaccgccgcagcacgcagcgctgctcgcttggaggccggagccagaccgccggacggccggagcctcggagcaccgccgccggcccgccgccgcagcacgcagcgctgctcgcttggaggccggagccagaccgtcggacgcccggaggcccagaggccggagctagaccgccggacggccggagcccggaggcccagagcactgccgcagcaatggctgaactaccaaagtgtacagtttagtaatcgttaattgatctttgtatgagaatttaccatgtgagttaatcatatagtcgttgattaaggtttattgtcttgctagctgctagtatttgctaatgatcggattcggagctgcacgtttcagaagggaatatagtagctcaagttgataggccatatatggctgaggacaatctggaagcatcgacatgacgccacctcatcgctcgcggaacgcgtggttagttgatggattaatcctgtatccgccactggtgccactgcttcggtgattgcactcagtcctgcgatgtcgacccatctcagttgtcctccagccctaccgtacgcctcgtgttgtcgatggcagcccatgacttcaacatcgacatataccaagagtcggcaattgcatgtgtgtgtggtggtttggtgaagatggagctatggacggagtagagagtgaatcccagttcgacgctcgtgacgaaaaaccaaatccaagaattattggcattcttgcgaattttgagccaggttatttgtggtgagctctcttgcttgttttccagttgtcgttaacaccatgacacttgctgctgaccccagattgctcatgtgtgtgatttttgtggtgggatgaaagcggagtcccgatgtgtcgctcgccaagggcttgataaaacgactgaaccagaaatccattgccattcttgtgatatcgtgtcgacttggtcttggtaagaaaaattattgtttgtgttagttcggctgatgaatggagtaactagatatcttagttgtgagcattgatatggtcgcaatcgtgattggc

SEQ ID NO: 134352 - DNA, 1497 bp, Zea Mays
atggaggtagaacttaggtggagacaattgagttggctgcgtgagaggtggtgcgatttgaaggcacaggaaagggagttcctcacagtggcaaggtcagcgcatgacatgtttgatgaaacgtctgctgagaagcagcttgctcaaggtgaagaagtcttagatgaatcggatgagaaggagggtgaggtggtagatgagaccagcaggtctaactcactgagtgaggcagctgctatggttatgcatggtggaagcatggaggagcttcttcttgctagtgctggcagtgtgatagaggatagcctggagaaggagcaaaatgctaccagtgaagaggaggggaaagattaccttgcggtatctaaagaaggggctgagaatgaggtgttgcagtttcagttagaagacgatgaaatatgggaggataaagataaccaaactgaagtgagaaaatggaatactgctaataccttgcagggtgacctgtcagacaaagaagtccatgtagcagaagaaaagcttgatagctctaccgagacacttgcatctaaggttgttcctgccttgagtgagacaactggtcccgaggagggtgctgctactgaaaaagcagtgaaagaggttgacaccattgtgaaatcttgggatgaattcaccttcgaggagggagaatcaaaagagatgcaaaagaagcagccacaagattatgtttctgttgatattgtcgataatagatcattgcctcatttgcgacacgggttttcacaaaacagtgagaaatatgagaacttactgattcaaaggcaccacttggatttcaattcaccaatcaacgtaacttttgaagcctatgcagaaaagttcgatccatctagtggttcttttgctcaaaggaattctaaattgttgaaggaaaatgtgaacagacaacttgagcagcccgactattatgtcgatcgcaatcacattgtagtgctttggtgttctagtccttccactaatgctgatgagtatcgcgacaatgttgttgctgctgattttggagacagcgttttcaaccagtttttggacaaagtttgtcggttgagacagatggttgtagatggtgtaccacatggtgttgaagtgacgttaggcatggcacttacaacatttcgggcagcgcgtggtgttgcagctaagcatgaagcgaaactgtttccggactggcatttggcatatctggtgtatgctattgttgcctcccttactgatctctccatggccttatgggatctatatgatctatacgaagtgagcagagaccactgctatattcctggtggcatttctcattttattcgtgcatttactaatgaaatcctaatagtctacgggcagaacgtaccaaggatacaatatggaggtgatgggttcagggtgcacggtgataagatggcatcccgtggtgatatggtcctatgtatggttcctcttggcgtgcttcttctttga

SEQ ID NO: 134353 - DNA, 375 bp, Zea Mays
atggtccgcccagccgaggtcttgcccagctcgcctggccgctgcgcagccctctcagctccatctcccagctcgccaatttcctggccggagctcgctctgctctctcccatgacgcgcgccggtgcccagctcggcctccgcttcttcctgttcgcgctcggtatccagcgcgtccagccccagcgccgtcggccatccccagcttgcttggccgccacctcccatggccggctgctgctccttggtgcagctcgcccagctcggattgcgctcgacttccagcgccgtggtctcgccaagatccctgtcgagctcgtccctgcgcgcacgtttttttctgcacgcagcttcctcaaatcgtggtgtgcctag

SEQ ID NO: 134354 - DNA, 3218 bp, Zea Mays
gattaaacaattctgaaacacaaagtaggggcctcttcgcaaatcccaccagcaccaccgccttcgcctccgaccgcctcccagatccgctcgcccggccgccgtcgtcttcctggtccgcctctgcggcagtgagattcctcgccgccccgccctggattccgtcgagaggatcgtcgaggacttcgcgatggacctcgccatcaaccccttctcctccggcacccgccttcgggacatgatacgtgcgatacgcgcgtgcaagacggcagcggaggagcgtgccgtggtgcggcgggagtgcgcggcgatacgggccgccatcagcgagggcgaccaggactaccggcatcggaacatggccaagcttatgttcatccacatgctcggttaccccacacacttcgggcagatggagtgcctcaagcttattgctgcggcgggcttccccgagaagcgcatcggctatctaggactcatgcttctgctcgacgagcggcaggaggtcctcatgctcgtcaccaactctctcaagcaagatcttaaccactcaaaccagttcattgttgggcttgcgctctgtgcccttggcaacatatgttctgctgaaatggcacgcgatctggctcctgaagtggagagactgttgcaaaatagggaccctaatacaaagaagaaggctgctttatgctctataaggattgtgcgaaaagttccagacttggcggaaaatttcatgagtgctgctgcatcattactgaaggaaaaacatcatggtgttctgatatctgccgttcagctttgcatggaactatgtaaagccagccatgaagcattggagtacttgaggaagaattgccttgaaggactggtccgaatactgagagatgtctccaacagttcatatgctcctgaatacgacatcggtggcatcacagatccattcttacatatccgagtgcttaaactcatgcgaatactgggtcaaggagatgcagattgcagcgagtatatcaatgatattcttgctcaggtttcaacaaaaactgagtcaaataagaatgctggaaatgctattttatatgaatgcgtggagacaataatgggcattgaagctacaagtggtttacgtgtgttggcaattaatattttgggtcgttttttgtccaaccgtgataacaacataagatatgttgccctaaacatgcttatgaaggccattgccgtggacacacaagcggtgcagaggcacagggcaacaattttagagtgcgtcaaggatgcagatgtctctattcgtaaaagagccctagaacttgtttatctacttgtcaatgatacaaatgtaaagccattgactaaggaacttgttgattaccttgaagtgagtgatcaagatttcaaggaagacctcactgctaaaatatgctcaatagttgaaaagttttccctggacaagctatggtacttagaccagatgttcagagttttgtctctggctggtaattatgtaaaggatgatgtatggcatgctcttatagttctaatgagtaatgcatctgaacttcaaggatattcaatcaggtcattatataaggcattgcaagcatctggtgaacaggaaagtttagttagggtggccatttggtgcattggtgaatatggagaaatgctggtcaacaatcttagtatgttagacatggaggaaccgatcacggtaactgaatctgatgctgtggatgccgtagagattgctcttcagcgttactcggcggatgttactaccagggctatgtgtcttgtctctcttttgaagctttcttcccggtttccaccaacatcagagagaataaaagaaatagttgcgcaaaataaagggaatactgtgcttgaattgcagcaaagatctattgaattcagttccattatacaaagacatcagtcgataaaatcatctttgcttgaacgtatgcctgcattggatgaagcaaattatttggtgaagagagctgcttctacacaggctgcagtttcatctgtaaattctgctcctgcagtcacttctggaggcccacttaagcttccaaatggcgtagcaaagccaccaccagctcctttagctgatttgcttgatttgggttctgatgatgctccagtgactacttcggcccctactacatcacctaatgattttctacaggatctgttgggcatcggtttgactgattcgtctcctataggtggagctccgtctacaagcactgacattctgatggatcttctatctattggttcatctcctgtacaaaatggcccaccaacgtcaaactttagccttcctggcatagagactaaacctccccctgttacacctcaagttgtggatcttcttgatggtttgtcctcaagcacatctcttcctgatgagaatgcagcttacccgacaatcacagcattccagagtgcaaccttgaggatcacattcagtttcaaaaagcaacctggaaaacctcaggagactacaattaatgcttctttcacaaatttagcaactactgcattaacagatttcgtcttccaggcagccgtgccaaagttcatccagttgcgtttggacccagctagcagcagcactcttcctgccagtggaaatgtgtcagtcacacaaagcctcagtgtcactaacaaccaacatgggcagaaaccacttgcaatgcgtatccggatgtcttacaaagtgaatggtgaagacaggctggagcaagggcaaatcagcaactttccttctgggttgtagtgccacctgtgtctatggggttggggttgctctttcagcgtgctacaggcaaggcgtttgtattcttgttcttgaacattttcacttctgcttgcctgctaatgagtttgtacactggtagttggttttggtcgcccattctctctttatatatagtgtacagtagatggcagcgattaatgatatatcctaccaaaattttcaaccttaggctatctccagcagcctccctgttcttctcacttcttatttcaaactccactcttgtaaacagtatcgcctacagtacaaaacagtgttttgcacgctcgtgagatggccttatgctcccatacacagaaggaatgtgttgtatcgcgattttcctgatgtaattatttatttttctaatcaagctcgtacaggcttattgtgcacagac

SEQ ID NO: 134355 - DNA, 287 bp, Zea Mays
gatgcaggcacctgatctttgctttgggagaagggatgtagcagcacggccaccacacttttaaataaaggaataactgattattaatgatgttaaacaggaagggtcaagtctagggaattattacattctaatctttcatggtagttgaactgtttagtttggtgggctgagatgactatcttttgtctggtcatgaatgttcttttctaccattgcatttcgattatactatgtcaattatctttcttttataccctgtataaactatatgctttccttgttat

SEQ ID NO: 134356 - DNA, 616 bp, Zea Mays
cgccccacgccggtccccatggctcgttccgctcccactttcgtcgctgtttttctcctagtcctcgtgcttctcaccatggacgcggcgcagggtcaacagccgttcccgctgtccaccgatccatccgacgcggatgctctgcacgctgtgttccggcagtggagactggagggcggcgcggcgatggaggacccgtgcaggaagggcgtctggtcagagtcgtccggaataaacgcgtccgtcgaatgcaactgcctcccctcaagggtgtgccgcatcacaagcctaaatgtgagtgggcacgggaacatctcggcgatcccgcgggagctattcaatttgacagaactggtctctctggatttaagtaataacaacttgagtggttcgatacccccggaagttattaatctttccaaactggaaacatggcacttcaataataatcctctcagtggaggttttcctcatgaactgtcgcttttaaggaatctacggtccctgtggatgtttgataattacattgtagggccttttccggcatttattcagaacttaaccaatctcacagacttgcgaatatatgggacgaatcttcaaggacctattccaa

SEQ ID NO: 134357 - DNA, 1488 bp, Zea Mays
cgccccacgccggtccccatggctcgttccgctcccactttcgtcgctgtttttctcctagtcctcgtgcttctcaccatggacgcggcgcagggtcaacagccgttcccgctgtccaccgatccatccgacgcggatgctctgcacgctgtgttccggcagtggagactggagggcggcgcggcgatggaggacccgtgcaggaagggcgtctggtcagagtcgtccggaataaacgcgtccgtcgaatgcaactgcctcccctcaagggtgtgccgcatcacaagcctaaatgtgagtgggcacgggaacatctcggcgatcccgcgggagctattcaatttgacagaactggtctctctggatttaagtaataacaacttgagtggttcgatacccccggaagttattaatctttccaaactggaaacatgctaggcacttcaataataatcctctcagtggaggttttcctcatgaactgtcgcttttaaggaatctacggtccctgtggatgtttgataattacattgtagggccttttccggcatttattcagaacttaaccaatctcacagacttgcgaatatatgggacgaatcttcaaggacctattccaaaaaatttctctaatctgagcaatcttgaagtcctgatgcttggtgatcttgcgggcaaccattcttatttaaatgtcataggagcgtgggcaaacctttcagtgttatctctgagaaaatgtggtcttacaggtcaggttcctaatactcccccaaacttgcccaagctaaaatatctggatttgacatcaaacaacttatcaggatcaataggaggactcttgctttcatataagacctcaaattacatggatgtttcgtataactattatgttgacggatccctttctaacaatccttctggtcagaagcagttcataaattatcttggaacatcaattgatgcaagtggaagaatcaacagtggaaatcttacaatcctgaactgccttcgcatgaacgaatgcaacataaataatttaactaatcgtgcaacttccttcgctataaactgtggtggcaagcaagtggagtattcagatctaatgccaattatgttctctgaagactccactgatcttggaggatcaggctttcatgttaatgctactagtcattgggtagttagtcatgtgggttctgatccatttaacgaatccaccggtattgtaaatacaagtgatatttttgaaaccaacatgcaagagctctaccaaacagcaagaacttcaacaagttcgttgtggtactatgtggtaggtttagctaacgggaactacacagtccaactcttctttgcagagatagtcataactcatggacctggaaagcgcttatttgacattgatattcaggaccagaatatcaggaaggactttgacattactaaggaagcagggggttccagaaaagccactaacataaccta

SEQ ID NO: 134358 - DNA, 1554 bp, Zea Mays
cgccccacgccggtccccatggctcgttccgctcccactttcgtcgctgtttttctcctagtcctcgtgcttctcaccatggacgcggcgcagggtcaacagccgttcccgctgtccaccgatccatccgacgcggatgctctgcacgctgtgttccggcagtggagactggagggcggcgcggcgatggaggacccgtgcaggaagggcgtctggtcagagtcgtccggaataaacgcgtccgtcgaatgcaactgcctcccctcaagggtgtgccgcatcacaagcctaaatgtgagtgggcacgggaacatctcggcgatcccgcgggagctattcaatttgacagaactggtctctctggatttaagtaataacaacttgagtggttcgatacccccggaagttattaatctttccaaactggaaacatgctaggcacttcaataataatcctctcagtggaggttttcctcatgaactgtcgcttttaaggaatctacggtccctgtggatgtttgataattacattgtagggccttttccggcatttattcagaacttaaccaatctcacagacttgcgaatatatgggacgaatcttcaaggacctattccaaaaaatttctctaatctgagcaatcttgaagtcctgatgcttggtgatcttgcgggcaaccattcttatttaaatgtcataggagcgtgggcaaacctttcagtgttatctctgagaaaatgtggtcttacaggtcaggttcctaatactcccccaaacttgcccaagctaaaatatctggatttgacatcaaacaacttatcaggatcaataggaggactcttgctttcatataagacctcaaattacatatatgtaggtggaaacaacttaagtggacctgtgccttctgaaattgttcaatcatcagtttccttggatgtttcgtataactattatgttgacggatccctttctaacaatccttctggtcagaagcagttcataaattatcttggaacatcaattgatgcaagtggaagaatcaacagtggaaatcttacaatcctgaactgccttcgcatgaacgaatgcaacataaataatttaactaatcgtgcaacttccttcgctataaactgtggtggcaagcaagtggagtattcagatctaatgccaattatgttctctgaagactccactgatcttggaggatcaggctttcatgttaatgctactagtcattgggtagttagtcatgtgggttctgatccatttaacgaatccaccggtattgtaaatacaagtgatatttttgaaaccaacatgcaagagctctaccaaacagcaagaacttcaacaagttcgttgtggtactatgtggtaggtttagctaacgggaactacacagtccaactcttctttgcagagatagtcataactcatggacctggaaagcgcttatttgacattgatattcaggaccagaatatcaggaaggactttgacattactaaggaagcagggggttccagaaaagccactaacataaccta

SEQ ID NO: 134359 - DNA, 792 bp, Zea Mays
tgcctcgggtgttggctgtgtcaggccggagtttgcaagcagcttccccagcgcctcaggagagcacacctggtactgtacctccccggtgtcgggctgcagaaatacctcggccagctccagcttctcggcagtcaagctggtggagtccatggtcttgctgaggaccttgagcgcgagaccgacggcctcctcgcgggtcaaggcgtccttgtagtcctgcttgagcatggactgcgcggcctggctgttggccccaacagcggcggccttccacccgccgtagttgccagatgggtcgctcatgtagagctggaaaccgtggtgcttgtcccaaccggcgaataggaaggagaccccaaaggggcggaggccaccaaactgggtgtaaccctgcttggtgtcgcagagggactggacgagctgctcgacggggatgggctcctggtaggagagcgcgtagcgctgggcgtggaggcgggcggtgttgatgaggatgttggcgtcggacatgatccctgccacagcgcacgccaggtgggagtcgatcttgtacatcttctcggcggagcgggaggtctggaggagcttggaggtcaccttcttctcgccgaccaggactacgccgtcggccgccaggatcccgagggctgacccggcgttgccgatcgcctccatcgcgtactccacctggtagagacgcccctccggcgagaagatcgtcgtgcgactgtcatagcggcgagacatcgcggcggcggcgagatgggatttccgtttgctagatttggg

SEQ ID NO: 134360 - DNA, 869 bp, Zea Mays
tgcctcgggtgttggctgtgtcaggccggagtttgcaagcagcttccccagcgcctcaggagagcacacctggtactgtacctccccggtgtcgggctgcagaaatacctcggccagctccagcttctcggcagtcaagctggtggagtccatggtcttgctgaggaccttgagcgcgagaccgacggcctcctcgcgggtcaaggcgtccttgtagtcctgcttgagcatggactgcgcggcctggctgttggccccaacagcggcggccttccacccgccgtagttgccagatgggtcgctcatgtagagctggaaaccgtggtgcttgtcccaaccggcgaataggaaggagaccccaaaggggcggaggccaccaaactgggtgtaaccctgcttggtgtcgcagagggactggacgagctgctcgacggggatgggctcctggtaggagagcgcgtagcgctgggcgtggaggcgggcggtgttgatgaggatgttggcgtcggacatgatccctgccacagcgcacgccaggtgggagtcgatcttgtacatcttctcggcggagcgggaggtctggaggagcttggaggtcaccttcttctcgccgaccaggactacgccgtcggccgccaggatcccgagggctgacccggcgttgccgatcgcctccatcgcgtactccacctggtagagacgcccctccggcgagaagatcgtcgtgcgactgtcatagcggcgagacatcgcggcggcggcgagatgggatttccgtttgctagatttggggcggtgacgccgagattggggtttgcgtttgagaccctggaagggggagcgactcggcagaagctaaccagctccag

SEQ ID NO: 134361 - DNA, 631 bp, Zea Mays
caacggaggaagggagagagcctgcttaatgtggttgatgtttcttatggtggcgagaatttattcaaccaagctatcgagttatctgctgaaattctagcaaatgtgaagttcattcaagtgaagaagttaattggcaagaattttgaagagatcagccaggatactgggaaatatgtctttggtgttgatgacactctgaaggctcttgaaatgggtgctgttgagacctggtagtgtgggaaaatttggatatcaacagatatatcctcaagaatagttctaatggggaaattactataaaacatatgaacaaagagcaggaagctaatcagagcaatttccgtgacccaattaccaatattgtcctagaagttcaggaaaaaatgtctctctttgaatggtttaccaatgaatacaagaaatttggtacacatcactggagtttgtaaccaacaagtctcaggagggatcacagttctgtagaggatttggtggcattggtggtttgccaatgatgtgtatgaagattctgattagcaatcagccaacctcatggctgtgctggcccatggaaggacgcaacagctcgatctcgctatacttttgcaggaacacaagaaaagcaact

SEQ ID NO: 134362 - DNA, 89 bp, Zea Mays
ctttttattaatagataaatatcaatatatatttaaatatttcaaaaattataatgaatctaataatattattttaataaataaaattt

SEQ ID NO: 134363 - DNA, 104 bp, Zea Mays
atgatatatatttttttcttctaccaattttaggtcttacatgttaccttcggatgcctgaagggcttaagaatgctggaggaagcttcagcagaatgacagcg

SEQ ID NO: 134364 - DNA, 441 bp, Zea Mays
atgaagagaggcgacagaagccacggcacccggcatcgaacgtccagggcggcggtggccatgaacacgccggcaacagacctagctgggtggaccgtgatcaatgtcggaggtgcgacaagacgagccactgggccagggagtgtcccacgaagcccaaaaaaggtgaggcgcgtgctgcacaagcagagaggagggaacccttctgctggcccgactccactcgatccacacctccggcagcgatggtgtgtcgccgcctacgccgttcgcgagaacacggggtgtgacaaccctgcttcagccacccgaggcgacgcatcaggacccgatggatctaactccgcccggtccagagcagttgtcgtcgaccccgatctcggcactggaggagccgccgaccgagctggtggagcaggaggcctcgacctcggtgaataa

SEQ ID NO: 134365 - DNA, 1444 bp, Zea Mays
accagattgtcaatcctttttcattgtgaacctgtgatctctctgttgcacatgtttggtatattgcttttgtttgttatttcctaagtgcatagaatgaatgattactttacgtagacaacgagcagtctgtgtttcccgaggaagttgcagaggaagtccctgatcagcagtttggtgaaggcaagtgtcctctgacccattatgtcccatttactttataatacactgtcccgcatactatgaacaacctaaggatttactagctttctatttaccttgtccttgatttaccttttgggttactatggttagcttcatgctagcgctttactttaatcaatgaacatgatgagatacaatgatgatactatgattttactctggatatgatgatatacttgtggcatttaggggactcgagcggtttctcgagtgcctctccgtaaggacctgttcgttgagagaccacccgggataacagtgcaaccatgagggtggaatggggtgcccttagctaattaattagaggaactagaggtgtagttgcttcgccgtcgtgccgtcaatggggtccaggcacagtgcttgctctgccgaggctgggtgccgaggtcctttcgttttgcttttgttagtcaccctcctgcggggaggagtactgtgtttatcaaactggagaaacctaacgggcggctatgacctctagggaatctttgtaaaagctacgtagtgataccctgccggaccacctaggaagtgatcaatggggagtcatgatccccgggcaaaacgggaatcacggctcatgggtaaagtgtgcgacctctgcagagggaatgaaactgatatgtcagccgtgctcacggttatgagcggccttgggatcctctttgattagagatacagctggttcgagacacaatggtttgatttatggttttggttcgatgatgatattgatgtttcctcgaggaggaaatggttcatgggttggttatatgataaaacttggcttacactaataataaatacttgaccaactaaaagcaactgcttgagcttaactccacataaagctagtccacctcagccaaacgggacatttgctgagtacgttgatgtgtactcacccttgctttcacaaaacaccaggttgcctttggtgcaatctatgctcaggtaaagaagaagtcgccgaggcggatctccaggagttctaggacttcgacgagttcgaggattaggctagcgacctcccccagtcagctgcctgtggtgggttgtttacgtttgctacgtttcgattctgtgtactttgatttatattatgtaaatggctctagtctgtaatattattacttactctttattgtaattcgaagcattgtgctatgatgagtcatttatgtaatcgccgtgtacgtgaattactgatcctggc

SEQ ID NO: 134366 - DNA, 2440 bp, Zea Mays
agaaaagctactcacaccaataagccaaagccaaacagcccttccttcgcagcgatggcggcggcggcgccgccggtggccaagaaggtcccgcggcagctcgttgagcacggcgacgtccgcgtcgacaactactactggctccgcgacgactctcgatccgacccggacgtcctcgcgcacctccgcgccgagaacgactacaccgccgccgtcatgtccgatgtcaagcaacttgaggatgaaatatatgctgaaatcagaggaagaataaaggaagatgatatagatgcgcctcttcgcaaagggcggtactactactatgaaaggacattgactggcaaggagtatgtgcaacactgtaggcgtcccgtatcgactgatgctcctattacagtccacgatgtgatgcccacaggacctgatgcccctgatgagcatattatcctggatgagaatgttaaggctgagggccacgactactacagcatcggagctttcaaggtcagtcccaacaacaagctagttgcttacgctgaagacactaaaggtgatgaaatctacacggtctatgtcattgacacggagagtggagaatacgttgggcaaccacttaaaggaattacttctgacattgagtgggctggtgacgaccacctcgtttacattacaatggatagtatacttcggccagataaagtatggctacataagttagggtctgaccaatcaagtgatgcttgtttgtatcatgagaaagatgatacattttctctaggccttcaagcttctgaaagcaagagatatttatttgttgaatctggaagcaaaaacacaagctttatattctacctggacatacccaaacagaacaaggaacttgctgttttgacacctcgtgtgtatggcattgatacaacagctagtcatcgtggaaatcatttctttattaagaggcgaagtgatgaattctacaattctgaattggttgcttgtccactggataatgtagctgagaccactatactgctaccacatagagaaagtgtgaaaatacaagacttccagctctttgacaaccatattgctgtatatgagcgtgagaatggccttcccaaagtgatcgtatatcggctacctgctattggagagtcaattggacaactccagggaggtcgagcgattgattttattgatccaacatatgctgtggaccctgaggagtctcagtttcattcatctgttctacgatttcattatagctcaatgcggactccaccctctgtttatgactatgatatggattcaggggtgtctgtgctgaagaagatccatactattttaggcggattcaatgcatcaaattatgtaacagaaagaaaatgggctgctgctgctgatggcactcaggtccccatgtccattctatacagaaatgatcttgtgaagcttgatggctcagaccctatgctactctatggctatggctcctatgagatatgcatagatccgagttttagagggtcacgattctctctggtagataggggctttatatatgtgatagctcatatccgcggtggtggtgaaatgggccggaagtggtacgaggatgggaaactgttgaagaagaaaaacactttcactgatttcattgattgtgctgagcacttgataaaaagcaagtactgctccagggaaaagctttgcattaatggcagaagcgcaggtggcttattgatgggtgctgtcctaaatatgaggcctgacttattcagggcagctgttgctggagtgccttttgttgatgttgtcacaactatgcttgatccaactatcccactgacaacagctgaatgggaggtgatggcgcaagagtatcccaacattcttgtcactgcaggcttaaacgatccacgcgtgatgtactctgagcctgcgaaatacgtggcgaagctgagggagctgaagagagatgacaatcttgtgctgttcaagtgcgagctgggagctggacacttctccaaatcgggaaggttcgagaaattacaggaggatgcgtttacttatgcgttcatcctaaaggcgctgggcatgactcggaagctggcatcactgtgaattcgattggtgtgaggcacctggactggatttgtatcatggcctgccctcttggttgggggatggatggattctgatggaatatgcatttagatttgaatagggacacagatgttatgcaaaagagattgtttgaaactttgaattctgatttgcatttggatatctgtcctagaataattgtgcttctattattcaatatttgccccatttttaacctatggaccatataaattttgctattttctcctttcaaagtactacaatcattacatgttggtactagtattattttacaggagcatgtatgtaattttat

SEQ ID NO: 134367 - DNA, 2410 bp, Zea Mays
gggaggcgatgctccggctggccggatccttccctcgtctgccccctcccgtgcgccctatctccccagcccccgccccgtcccagctctcactccgccgcgttctcctcctcctctcctccgccggcttcagccccccttcctgttacagcagcccttccttcgcagcgatggcggcggcggcgccgccggtggccaagaaggtcccgcggcagctcgttgagcacggcgacgtccgcgtcgacaactactactggctccgcgacgactctcgatccgacccggacgtcctcgcgcacctccgcgccgagaacgactacaccgccgccgtcatgtccgatgtcaagcaacttgaggatgaaatatatgctgaaatcagaggaagaataaaggaagatgatatagatgcgcctcttcgcaaagggcggtactactactatgaaaggacattgactggcaaggagtatgtgcaacactgtaggcgtcccgtatcgactgatgctcctattacagtccacgatgtgatgcccacaggacctgatgcccctgatgagcatattatcctggatgagaatgttaaggctgagggccacgactactacagcatcggagctttcaaggtcagtcccaacaacaagctagttgcttacgctgaagacactaaaggtgatgaaatctacacggtctatgtcattgacacggagagtggagaatacgttgggcaaccacttaaaggaattacttctgacattgagtgggctggtgacgaccacctcgtttacattacaatggatagtatacttcggccagataaagtatggctacataagttagggtctgaccaatcaagtgatgcttgtttgtatcatgagaaagatgatacattttctctaggccttcaagcttctgaaagcaagagatatttatttgttgaatctggaagcaaaaacacaagctttatattctacctggacatacccaaacagaacaaggaacttgctgttttgacacctcgtgtgtatggcattgatacaacagctagtcatcgtggaaatcatttctttattaagaggcgaagtgatgaattctacaattctgaattggttgcttgtccactggataatgtagctgagaccactatactgctaccacatagagaaagtgtgaaaatacaagacttccagctctttgacaaccatattgctgtatatgagcgtgagaatggccttcccaaagtgatcgtatatcggctacctgctattggagagtcaattggacaactccagggaggtcgagcgattgattttattgatccaacatatgctgtggaccctgaggagtctcagtttcattcatctgttctacgatttcattatagctcaatgcggactccaccctctgtttatgactatgatatggattcaggggtgtctgtgctgaagaagatccatactattttaggcggattcaatgcatcaaattatgtaacagaaagaaaatgggctgctgctgctgatggcactcaggtccccatgtccattctatacagaaatgatcttgtgaagcttgatggctcagaccctatgctactctatggctatggctcctatgagatatgcatagatccgagttttagagggtcacgattctctctggtagataggggctttatatatgtgatagctcatatccgcggtggtggtgaaatgggccggaagtggtacgaggatgggaaactgttgaagaagaaaaacactttcactgatttcattgattgtgctgagcacttgataaaaagcaagtactgctccagggaaaagctttgcattaatggcagaagcgcaggtggcttattgatgggtgctgtcctaaatatgaggcctgacttattcagggcagctgttgctggagtgccttttgttgatgttgtcacaactatgcttgatccaactatcccactgacaacagctgaatgggaggtgatggcgcaagagtatcccaacattcttgtcactgcaggcttaaacgatccacgcgtgatgtactctgagcctgcgaaatacgtggcgaagctgagggagctgaagagagatgacaatcttgtgctgttcaagtgcgagctgggagctggacacttctccaaatcgggaaggttcgagaaattacaggaggatgcgtttacttatgcgttcatcctaaaggcgctgggcatgactcggaagctggcatcactgtgaattcgattggtgtgaggcacctggactggatttgtatcatggcctgccctcttggttgggggatggatggattctgatggaatatgcatttagatttgaatagggacacagatgttatgcaaaagagattgtttgaaactttgaattctgatttgcatttggatatctgtcct

SEQ ID NO: 134368 - DNA, 3042 bp, Zea Mays
gggaggcgatgctccggctggccggatccttccctcgtctgccccctcccgtgcgccctatctccccagcccccgccccgtcccagctctcactccgccgcgttctcctcctcctctcctccgccggcttcagccccccttcctgttacagcagcccttccttcgcagcgatggcggcggcggcgccgccggtggccaagaaggtcccgcggcagctcgttgagcacggcgacgtccgcgtcgacaactactactggctccgcgacgactctcgatccgacccggacgtcctcgcgcacctccgcgccgagaacgactacaccgccgccgtcatgtccgatgtcaagcaacttgaggatgaaatatatgctgaaatcagaggaagaataaaggaagatgatatagatgcgcctcttcgcaaagggcggtactactactatgaaaggacattgactggcaaggagtatgtgcaacactgtaggcgtcccgtatcgactgatgctcctattacagtccacgatgtgatgcccacaggacctgatgcccctgatgagcatattatcctggatgagaatgttaaggctgagggccacgactactacagcatcggagctttcaaggtcagtcccaacaacaagctagttgcttacgctgaagacactaaaggtgatgaaatctacacggtctatgtcattgacacggagagtggagaatacgttgggcaaccacttaaaggaattacttctgacattgagtgggctggtgacgaccacctcgtttacattacaatggatagtatacttcggccagataaagtatggctacataagttagggtctgaccaatcaagtgatgcttgtttgtatcatgagaaagatgatacattttctctaggccttcaagcttctgaaagcaagagatatttatttgttgaatctggaagcaaaaacacaagctttatattctacctggacatacccaaacagaacaaggaacttgctgttttgacacctcgtgtgtatggcattgatacaacagctagtcatcgtggaaatcatttctttattaagaggcgaagtgatgaattctacaattctgaattggttgcttgtccactggataatgtagctgagaccactatactgctaccacatagagaaagtgtgaaaatacaagacttccagctctttgacaaccatattgctgtatatgagcgtgagaatggccttcccaaagtgatcgtatatcggctacctgctattggagagtcaattggacaactccagggaggtcgagcgattgattttattgatccaacatatgctgtggaccctgaggagtctcagtttcattcatctgttctacgatttcattatagctcaatgcggactccaccctctgtttatgactatgatatggattcaggggtgtctgtgctgaagaagatccatactattttaggcggattcaatgcatcaaattatgtaacagaaagaaaatgggctgctgctgctgatggcactcaggtccccatgtccattctatacagaaatgatcttgtgaagcttgatggctcagaccctatgctactctatggctatggctcctatgaggtacgttctgtttgtttattttcttttttgctatttggtaaactgtaataaggaatctttctgcaatttttaacacttcgaagtttgaacaaatttcaagattggcatgtacactgcgctagctgcagttataaatgcaggcttgtactgtagcatggcttgctgcagctgcaaccgcagcaagcactgctgagcaggctgatagtgatagtttatgtcaacttcctttggttcgtttgaaagtttgtgttcttctttatatgtgcatcatgtacagactatacttatttgctaatgtgctatcatgcattcattagctgttttattcatcattgttttcaaatgacaacaattctttagcattcagttattctagtgtttcctcgctgagaaagattccttggcaggaaccagcaatgtctaactagtagtaactgcatgtgacaacttggcatcgagactatgagatggttccaggtttcaggaataaatataatagaagttattgtgataaaaccgtgctcttgttttctttgttcttatggctacagatatgcatagatccgagttttagagggtcacgattctctctggtagataggggctttatatatgtgatagctcatatccgcggtggtggtgaaatgggccggaagtggtacgaggatgggaaactgttgaagaagaaaaacactttcactgatttcattgattgtgctgagcacttgataaaaagcaagtactgctccagggaaaagctttgcattaatggcagaagcgcaggtggcttattgatgggtgctgtcctaaatatgaggcctgacttattcagggcagctgttgctggagtgccttttgttgatgttgtcacaactatgcttgatccaactatcccactgacaacagctgaatgggaggtgatggcgcaagagtatcccaacattcttgtcactgcaggcttaaacgatccacgcgtgatgtactctgagcctgcgaaatacgtggcgaagctgagggagctgaagagagatgacaatcttgtgctgttcaagtgcgagctgggagctggacacttctccaaatcgggaaggttcgagaaattacaggaggatgcgtttacttatgcgttcatcctaaaggcgctgggcatgactcggaagctggcatcactgtgaattcgattggtgtgaggcacctggactggatttgtatcatggcctgccctcttggttgggggatggatggattctgatggaatatgcatttagatttgaatagggacacagatgttatgcaaaagagattgtttgaaactttgaattctgatttgcatttggatatctgtcctagaataattgtgcttctattattcaatatttgccccatttttaacctatggaccatataaattttgctattttctcctttc

SEQ ID NO: 134369 - DNA, 2569 bp, Zea Mays
gggaggcgatgctccggctggccggatccttccctcgtctgccccctcccgtgcgccctatctccccagcccccgccccgtcccagctctcactccgccgcgttctcctcctcctctcctccgccggcttcagccccccttcctgttacagcagcccttccttcgcagcgatggcggcggcggcgccgccggtggccaagaaggtcccgcggcagctcgttgagcacggcgacgtccgcgtcgacaactactactggctccgcgacgactctcgatccgacccggacgtcctcgcgcacctccgcgccgagaacgactacaccgccgccgtcatgtccgatgtcaagcaacttgaggatgaaatatatgctgaaatcagaggaagaataaaggaagatgatatagatgcgcctcttcgcaaagggcggtactactactatgaaaggacattgactggcaaggagtatgtgcaacactgtaggcgtcccgtatcgactgatgctcctattacagtccacgatgtgatgcccacaggacctgatgcccctgatgagcatattatcctggatgagaatgttaaggctgagggccacgactactacagcatcggagctttcaaggtcagtcccaacaacaagctagttgcttacgctgaagacactaaaggtgatgaaatctacacggtctatgtcattgacacggagagtggagaatacgttgggcaaccacttaaaggaattacttctgacattgagtgggctggtgacgaccacctcgtttacattacaatggatagtatacttcggccagataaagtatggctacataagttagggtctgaccaatcaagtgatgcttgtttgtatcatgagaaagatgatacattttctctaggccttcaagcttctgaaagcaagagatatttatttgttgaatctggaagcaaaaacacaagctttatattctacctggacatacccaaacagaacaaggaacttgctgttttgacacctcgtgtgtatggcattgatacaacagctagtcatcgtggaaatcatttctttattaagaggcgaagtgatgaattctacaattctgaattggttgcttgtccactggataatgtagctgagaccactatactgctaccacatagagaaagtgtgaaaatacaagacttccagctctttgacaaccatattgctgtatatgagcgtgagaatggccttcccaaagtgatcgtatatcggctacctgctattggagagtcaattggacaactccagggaggtcgagcgattgattttattgatccaacatatgctgtggaccctgaggagtctcagtttcattcatctgttctacgatttcattatagctcaatgcggactccaccctctgtttatgactatgatatggattcaggggtgtctgtgctgaagaagatccatactattttaggcggattcaatgcatcaaattatgtaacagaaagaaaatgggctgctgctgctgatggcactcaggtccccatgtccattctatacagaaatgatcttgtgaagcttgatggctcagaccctatgctactctatggctatggctcctatgagatatgcatagatccgagttttagagggtcacgattctctctggtagataggggctttatatatgtgatagctcatatccgcggtggtggtgaaatgggccggaagtggtacgaggatgggaaactgttgaagaagaaaaacactttcactgatttcattgattgtgctgagcacttgataaaaagcaagtactgctccagggaaaagctttgcattaatggcagaagcgcaggtggcttattgatgggtgctgtcctaaatatgaggcctgacttattcagggcagctgttgctggagtgccttttgttgatgttgtcacaactatgcttgatccaactatcccactgacaacagctgaatgggaggagtggggtgatccaagaaaagaagaattctattattacatgaaatcgtattctcctgttgacaatgtgatggcgcaagagtatcccaacattcttgtcactgcaggcttaaacgatccacgcgtgatgtactctgagcctgcgaaatacgtggcgaagctgagggagctgaagagagatgacaatcttgtgctgttcaagtgcgagctgggagctggacacttctccaaatcgggaaggttcgagaaattacaggaggatgcgtttacttatgcgttcatcctaaaggcgctgggcatgactcggaagctggcatcactgtgaattcgattggtgtgaggcacctggactggatttgtatcatggcctgccctcttggttgggggatggatggattctgatggaatatgcatttagatttgaatagggacacagatgttatgcaaaagagattgtttgaaactttgaattctgatttgcatttggatatctgtcctagaataattgtgcttctattattcaatatttgccccatttttaacctatggaccatataaattttgctattttctcctttcaaagtactacaa

SEQ ID NO: 134370 - DNA, 2783 bp, Zea Mays
gggaggcgatgctccggctggccggatccttccctcgtctgccccctcccgtgcgccctatctccccagcccccgccccgtcccagctctcactccgccgcgttctcctcctcctctcctccgccggcttcagccccccttcctgttacagcagcccttccttcgcagcgatggcggcggcggcgccgccggtggccaagaaggtcccgcggcagctcgttgagcacggcgacgtccgcgtcgacaactactactggctccgcgacgactctcgatccgacccggacgtcctcgcgcacctccgcgccgagaacgactacaccgccgccgtcatgtccgcaacttgaggatgaaatatatgctgaaatcagaggaagaataaaggaagatgatatagatgcgcctcttcgcaaagggcggtactactactatgaaaggacattgactggcaaggagtatgtgcaacactgtaggcgtcccgtatcgactgatgctcctattacagtccacgatgtgatgcccacaggacctgatgcccctgatgagcatattatcctggatgagaatgttaaggctgagggccacgactactacagcatcggagctttcaaggtcagtcccaacaacaagctagttgcttacgctgaagacactaaaggtgatgaaatctacacggtctatgtcattgacacggagagtggagaatacgttgggcaaccacttaaaggaattacttctgacattgagtgggctggtgacgaccacctcgtttacattacaatggatagtatacttcggccagataaagtatggctacataagttagggtctgaccaatcaagtgatgcttgtttgtatcatgagaaagatgatacattttctctaggccttcaagcttctgaaagcaagagatatttatttgttgaatctggaagcaaaaacacaagctttatattctacctggacatacccaaacagaacaaggaacttgctgttttgacacctcgtgtgtatggcattgatacaacagctagtcatcgtggaaatcatttctttattaagaggcgaagtgatgaattctacaattctgaattggttgcttgtccactggataatgtagctgagaccactatactgctaccacatagagaaagtgtgaaaatacaagacttccagctctttgacaaccatattgctgtatatgagcgtgagaatggccttcccaaagtgatcgtatatcggctacctgctattggagagtcaattggacaactccagggaggtcgagcgattgattttattgatccaacatatgctgtggaccctgaggagtctcagtttcattcatctgttctacgatttcattatagctcaatgcggactccaccctctgtttatgactatgatatggattcaggggtgtctgtgctgaagaagatccatactattttaggcggattcaatgcatcaaattatgtaacagaaagaaaatgggctgctgctgctgatggcactcaggtccccatgtccattctatacagaaatgatcttgtgaagcttgatggctcagaccctatgctactctatggctatggctcctatgagatatgcatagatccgagttttagagggtcacgattctctctggtagataggggctttatatatgtgatagctcatatccgcggtggtggtgaaatgggccggaagtggtacgaggatgggaaactgttgaagaagaaaaacactttcactgatttcattgattgtgctgagcacttgataaaaagcaagtactgctccagggaaaagctttgcattaatggcagaagcgcaggtggcttattgatgggtgctgtcctaaatatgaggcctgacttattcagggcagctgttgctggagtgccttttgttgatgttgtcacaactatgcttgatccaactatcccactgacaacagctgaatgggaggtatctatttcctcaaaattattccatgttcggtgtcgtatcgcaatttttattcttgccggttcttatgaatccatgtgtcgctgtccttggttcaggagtggggtgatccaagaaaagaagaattctattattacatgaaatcgtattctcctgttgacaatgcaagtgcagatctttatttgtaaattgaaatattgcatcaccctgtgtcatttgtttgtggacgccacaggtgatggcgcaagagtatcccaacattcttgtcactgcaggcttaaacgatccacgcgtgatgtactctgagcctgcgaaatacgtggcgaagctgagggagctgaagagagatgacaatcttgtgctgttcaagtgcgagctgggagctggacacttctccaaatcgggaaggttcgagaaattacaggaggatgcgtttacttatgcgttcatcctaaaggcgctgggcatgactcggaagctggcatcactgtgaattcgattggtgtgaggcacctggactggatttgtatcatggcctgccctcttggttgggggatggatggattctgatggaatatgcatttagatttgaatagggacacagatgttatgcaaaagagattgtttgaaactttgaattctgatttgcatttggatatctgtcctagaataattgtgcttctattattcaatatttgccccatttttaacctatggaccatataaattttgctattttctcctttcaaagtactacaatcattacatgttggtactagtattattttacaggagcatgtatgtaattttat

SEQ ID NO: 134371 - DNA, 2772 bp, Zea Mays
gggaggcgatgctccggctggccggatccttccctcgtctgccccctcccgtgcgccctatctccccagcccccgccccgtcccagctctcactccgccgcgttctcctcctcctctcctccgccggcttcagccccccttcctgttacagcagcccttccttcgcagcgatggcggcggcggcgccgccggtggccaagaaggtcccgcggcagctcgttgagcacggcgacgtccgcgtcgacaactactactggctccgcgacgactctcgatccgacccggacgtcctcgcgcacctccgcgccgagaacgactacaccgccgccgtcatgtccgcaacttgaggatgaaatatatgctgaaatcagaggaagaataaaggaagatgatatagatgcgcctcttcgcaaagggcggtactactactatgaaaggacattgactggcaaggagtatgtgcaacactgtaggcgtcccgtatcgactgatgctcctattacagtccacgatgtgatgcccacaggacctgatgcccctgatgagcatattatcctggatgagaatgttaaggctgagggccacgactactacagcatcggagctttcaaggtcagtcccaacaacaagctagttgcttacgctgaagacactaaaggtgatgaaatctacacggtctatgtcattgacacggagagtggagaatacgttgggcaaccacttaaaggaattacttctgacattgagtgggctggtgacgaccacctcgtttacattacaatggatagtatacttcggccagataaagtatggctacataagttagggtctgaccaatcaagtgatgcttgtttgtatcatgagaaagatgatacattttctctaggccttcaagcttctgaaagcaagagatatttatttgttgaatctggaagcaaaaacacaagctttatattctacctggacatacccaaacagaacaaggaacttgctgttttgacacctcgtgtgtatggcattgatacaacagctagtcatcgtggaaatcatttctttattaagaggcgaagtgatgaattctacaattctgaattggttgcttgtccactggataatgtagctgagaccactatactgctaccacatagagaaagtgtgaaaatacaagacttccagctctttgacaaccatattgctgtatatgagcgtgagaatggccttcccaaagtgatcgtatatcggctacctgctattggagagtcaattggacaactccagggaggtcgagcgattgattttattgatccaacatatgctgtggaccctgaggagtctcagtttcattcatctgttctacgatttcattatagctcaatgcggactccaccctctgtttatgactatgatatggattcaggggtgtctgtgctgaagaagatccatactattttaggcggattcaatgcatcaaattatgtaacagaaagaaaatgggctgctgctgctgatggcactcaggtccccatgtccattctatacagaaatgatcttgtgaagcttgatggctcagaccctatgctactctatggctatggctcctatgagatatgcatagatccgagttttagagggtcacgattctctctggtagataggggctttatatatgtgatagctcatatccgcggtggtggtgaaatgggccggaagtggtacgaggatgggaaactgttgaagaagaaaaacactttcactgatttcattgattgtgctgagcacttgataaaaagcaagtactgctccagggaaaagctttgcattaatggcagaagcgcaggtggcttattgatgggtgctgtcctaaatatgaggcctgacttattcagggcagctgttgctggagtgccttttgttgatgttgtcacaactatgcttgatccaactatcccactgacaacagctgaatgggaggagtggggtgatccaagaaaagaagaattctattattacatgaaatcgtattctcctgttgacaatgcaagtgcagatctttatttgtaaattgaaatattgcatcaccctgtgtcatttgtttgtggacgccacaggtgatggcgcaagagtatcccaacattcttgtcactgcaggcttaaacggtatctgaaggcttaaacggcatttgtggttggtctgtggtagctagctgagtatctgactcggtgttgttggtgataacaaaccagatccacgcgtgatgtactctgagcctgcgaaatacgtggcgaagctgagggagctgaagagagatgacaatcttgtgctgttcaagtgcgagctgggagctggacacttctccaaatcgggaaggttcgagaaattacaggaggatgcgtttacttatgcgttcatcctaaaggcgctgggcatgactcggaagctggcatcactgtgaattcgattggtgtgaggcacctggactggatttgtatcatggcctgccctcttggttgggggatggatggattctgatggaatatgcatttagatttgaatagggacacagatgttatgcaaaagagattgtttgaaactttgaattctgatttgcatttggatatctgtcctagaataattgtgcttctattattcaatatttgccccatttttaacctatggaccatataaattttgctattttctcctttcaaagtactacaatcattacatgttggtactagtattattttacaggagcatgtatgtaattttat

SEQ ID NO: 134372 - DNA, 1728 bp, Zea Mays
ctgccctacatgtttatttttaactaactaaagatgatggacactttatgtgacagcgtatgctaacggatccggcgggccctgcaacggcgcggcagcaggataagaggacgcggcgcgcgcatccacaagcagcggaggagcccgaccacgccagtgagcccgcccgattcgccgtcgcggcggccacgtttcccctccaatggccaccagctccaccgccttgctgcaccttgtcataccggcctcccgccgccgccggcacttggtgcctcgggccgcacactccgagtccgccccgcccgccgcctccgtcgaccgccgccgcttcatcgcccacaccgccgccgcggccgccgtctcccctctcgtcttgccccgctggacccccgcggctcgcgcggacgaagcgccggcgctctccgagtgggagcgcatcttcctgcccatcgactccggcgtcgtcctcctcgacatcgccttcgtcccagacgacccctcccatggttttctccttggaacaagacagacaatactggagacgaaagacggcggcaacacctggttccctcgctccatcccttccgcagaggacgaagatttcaactacaggttcaactcggtaagcttcaagggcagagagggatggattatcggcaagcctgcaattctactgcacacctcagatgctggcgagagctgggaaagaatacccctgagtgcccaacttcctgggaacatggtttacataaaagctactggggagcagagcgcagagatggttaccgatgagggagcaatctatgttacctctaaccgtggatacaactggaaggctgccgtgcaggagaccgtttcagctactctgaacagaacagtttcaagtggcattagcggtgcaagctactacactgggactttcaacacggtgaacagatcggccgacgggcgctacgtggctgtgtccagccgagggaacttctatctgacgtgggagcccgggcagccgttctggcaaccccacaacagggcggtggcacggaggattcagaacatggggtggagagcggacggtggactttggctgctggtgcgcggtggtggcctcttcctcagcagaggaaccgggataactgaagattttgaggaggtgcaggtgcagagccgggggtttgggatcctggacgtgggctaccgctcgcaggaggaggcctgggctgctggtggcagcggcgtgctgctcaagaccacaaacggagggaagagctggatgcgcgacaaggctgccgacaacatcgccgccaatctctactccgtcaagttccttgatgacaggaaaggcttcgtgctgggcaacgacggcgtgttgcttcggtatcttggctgacattctatgtatatgtgtgtacagcgaacggcatgtgctgctgctactactactgtaaaaggctgcttactgtgcttgcgttctctcttctgcaacccaaattgagtgtaaagatgcatgtgctgcttgctaggaacttgaaaaccttgtatacccgtatctactatctatatatatgctaccttgttgcaaacaaccctcaaaccattgagaagctctccattctcaatgcctgggacaaatcattctactcaatctatttgcatttttctacgaagacccatattaacaaaggccatctttcagagccaataaaattccctgcatattgcaatcttgac

SEQ ID NO: 134373 - DNA, 1723 bp, Zea Mays
ctgccctacatgtttatttttaactaactaaagatgatggacactttatgtgacagcgtatgctaacggatccggcgggccctgcaacggcgcggcagcaggataagaggacgcggcgcgcgcatccacaagcagcggaggagcccgaccacgccagtgagcccgcccgattcgccgtcgcggcggccacgtttcccctccaatggccaccagctccaccgccttgctgcaccttgtcataccggcctcccgccgccgccggcacttggtgcctcgggccgcacactccgagtccgccccgcccgccgcctccgtcgaccgccgccgcttcatcgcccacaccgccgccgcggccgccgtctcccctctcgtcttgccccgctggacccccgcggctcgcgcggacgaagcgccggcgctctccgagtgggagcgcatcttcctgcccatcgactccggcgtcgtcctcctcgacatcgccttcgtcccagacgacccctcccatggttttctccttggaacaagacagacaatactggagacgaaagacggcggcaacacctggttccctcgctccatcccttccgcagaggacgaagatttcaactacaggttcaactcggtaagcttcaagggcagagagggatggattatcggcaagcctgcaattctactgcacacctcagatgctggcgagagctgggaaagaatacccctgagtgcccaacttcctgggaacatggtttacataaaagctactggggagcagagcgcagagatggttaccgatgagggagcaatctatgttacctctaaccgtggatacaactggaaggctgccgtgcaggagaccgtttcagctactctgaacagtttcaagtggcattagcggtgcaagctactacactgggactttcaacacggtgaacagatcggccgacgggcgctacgtggctgtgtccagccgagggaacttctatctgacgtgggagcccgggcagccgttctggcaaccccacaacagggcggtggcacggaggattcagaacatggggtggagagcggacggtggactttggctgctggtgcgcggtggtggcctcttcctcagcagaggaaccgggataactgaagattttgaggaggtgcaggtgcagagccgggggtttgggatcctggacgtgggctaccgctcgcaggaggaggcctgggctgctggtggcagcggcgtgctgctcaagaccacaaacggagggaagagctggatgcgcgacaaggctgccgacaacatcgccgccaatctctactccgtcaagttccttgatgacaggaaaggcttcgtgctgggcaacgacggcgtgttgcttcggtatcttggctgacattctatgtatatgtgtgtacagcgaacggcatgtgctgctgctactactactgtaaaaggctgcttactgtgcttgcgttctctcttctgcaacccaaattgagtgtaaagatgcatgtgctgcttgctaggaacttgaaaaccttgtatacccgtatctactatctatatatatgctaccttgttgcaaacaaccctcaaaccattgagaagctctccattctcaatgcctgggacaaatcattctactcaatctatttgcatttttctacgaagacccatattaacaaaggccatctttcagagccaataaaattccctgcatattgcaatcttgac

SEQ ID NO: 134374 - DNA, 3321 bp, Zea Mays
ctgggttctgtctggggagcaggagcagcagtcgccgagagcaacccaaagcaagctgcagttcgtaagaggatcaggggccggcgccggaggagatcccccgcgctatttggagctccccaagaaatgccgtgtgcactagaagtgattgatgcaaggttacagagcacatcacatattcagtgcagcagatcatttgaccaaaacattggaagacgcttttcaaagggccatctgatacaaaaacctgttgccatttgtcctgagaacagtgacacctcatcaacaatacttctgtttcggcacgatccagactggaaacaagcaccattcttgtctgacactcaagaggtcaacaagccaaatgaaaagaacatgcatgatcaggttgattcttctaaaccagtttccaatggaaacacacatgggggaagcacctttagacaatctcagcaaagggaaaacgtttgtaattcattgatggcagttcctccctgccatgtagttgcaaagaagtactccaggtctgttgctactgctctgagtctgggatctgattctgatattttgcacaacggtgacaagcttccaaaaaggaattctagaaagagaggaaaacagtgcaagcgaacaatccgcaaaaggctgaatttggcatcagaaaccatttttgaagagagtacttatggtgcttctcctgcggaggtagttccgaccaatttactggttgataagttgtcagagaccacatcctctgctagctcattggttaaaactgatggtcggtacaaggaggaccatgtggaatgtggtattatgttgaatttagctacattgggaactgatgagatggatggttctggatgtgctggttcatcttataatgatgcaggagggagattaagctccagttgtgtttcttacttgaatgacaaatccaatacgacagattcttcagaatttgacggatccaccttcactgaacatggcttgggagaagaaagcaatagctaccagaagttaacatgcccctatgtttataatcccagttatgcaaccatggattccatctttagtaggtggaacagcgacaacagtgggaactacagtgtcgatgttgaggctaggttaaccgtcaaagacgaaaatagacatgatcattcgaaactgggggcttccacagggcggagtaatgtgaggatggaatgccagttgatagggtcatgttttagtgctactcatgctgaagacacaaacgatcctctagggatcagatcatactcctctaaggatgttactgatagttgtagccatactgaaatggttcagtgcagcagcaagtcctttcattttaaatcagggaggaggaacataaaatcaagtaaaacaccaagctatgttgatttgactgcgtctaacagagtgagaggttctaataggcacaagaacaatggaaaagatagttcagcagtgtggcagaaagtagaaaggaatgacaagatggtatctaaagcaggccatccgagcgatacacctgttcatgataagggtgcaaatgaagttggtaagaagggtgtacaggaagatccaacaagaattcgggcaaaacataatccgaataagaaagtgtgcaaacagaagccttcaaatggagcagttgaattggagcctgccaaaggagaagatgcattgaactcatgccatacattttctggacctttctacacgaagcaagcaccctttctacgccagcaaagaaactctttttcgaaacaaggttctcagtcattgaaaaactactgtgctcctaggaatggtatccccaaggtggcaaaggattacttgcagcaagaagaattacctatgttggtgctagttcatgccaagaacaccagtgataaatcaagctcatattcaagttcagctgatgaagttggtctaactggagtcagcaacaactatccaactgagggaaatgagagttcacaacctgatattgaggtagcagcgtcagtatcttgcaacttggttccagatttggctccacaagctgcttctgatgatttccacatatcagatcctcactctttacgtcctgaaaacaagggtgcatccaacagtcggagctccaataacttgtgcacagatccttttgctgcagaagcaaaggaagctcgatgtgtgaagctactaacagagaataattcccaagaaccctcagataatgcagctgagaccgattacagcaagatgaaagaagtcatcagctatgtttacacagcacagcagcgagtggaagacatccaactttgcattggtaggcctattgctgattttgaaaattttgtttactctgcttctccagttgtgcactgcagctcgtgctctgttggctgtaaatcttgcctgcaagaatgtgtgaaggatggcttatgtttgcatcagactccagatatcactctaagaactgtctggcagtggtacgaagagcctagttgctatggtttggatgtaaaggcacaagatctctggaggtcaaaagccttgtggaatagtcattgtcagtttacaacatattttgtaccatatctatctgctgttcaactcttcagtcaacctaaaagaaccagtggtggaagcattgataaggaatcaatccatagggatgtgacatgtgaaacatctccacagctgaacctgcccccaatatttgcaaagctttttccaaaacaatctgttccagtaaataaaccatctactctgcgtactgaagatgatcaacagtcagcagatggggagctggtatttgaattttttgaatatgaacagccatactcacggcgacaattatttgacaaggtaaatgagctgattgccggtgcgaaaccgtcaaattgccaaatatctggggacccaaagaatctggaggccagcctgcatgatctccatccagcgtcttggtattgtgttgcatggtatcccatataccggatacctgatggaaaattccaggctacattcttgacatatcactctcttggccactggattcgtcggagcagctcagcaggtggggccgctgttttgccagtcatgggcctgcagtcttacaatgccaaggcagagtggtggtttgagatgagcaagtccgaatctgaaggcgggcagtcgcaggccagtgaagcatccgagattctgaaggagagatcgcgcacgctgagtgaggctgcggccgtgttgtccagggccagcgtgctgaagaatgggcagatgagtagaaacagacatccagactacgagttcttcctctcccggagctga

SEQ ID NO: 134375 - DNA, 3751 bp, Zea Mays
gctgcaggtatttgctttcgtctgcgtcttcgtcttcgtcgtcttggttgccgaaaggctccccaagaaatgccgtgtgcactagaagtgattgatgcaaggttacagagcacatcacatattcagtgcagcagatcatttgaccaaaacattggaagacgcttttcaaagggccatctgatacaaaaacctgttgccatttgtcctgagaacagtgacacctcatcaacaatacttctgtttcggcacgatccagactggaaacaagcaccattcttgtctgacactcaagaggtcaacaaggtaatctctttgtcatcaggagctcttgatacagattgccttgagctattatctgaacagccaagaatactgttttgcttagatcagccaaatgaaaagaacatgcatgatcaggttgattcttctaaaccagtttccaatggaaacacacatgggggaagcacctttagacaatctcagcaaagggaaaacgtttgtaattcattgatggcagttcctccctgccatgtagttgcaaagaagtactccaggtctgttgctactgctctgagtctgggatctgattctgatattttgcacaacggtgacaagcttccaaaaaggaattctagaaagagaggaaaacagtgcaagcgaacaatccgcaaaaggctgaatttggcatcagaaaccatttttgaagagagtacttatggtgcttctcctgcggaggtagttccgaccaatttactggttgataagttgtcagagaccacatcctctgctagctcattggttaaaactgatggtcggtacaaggaggaccatgtggaatgtggtattatgttgaatttagctacattgggaactgatgagatggatggttctggatgtgctggttcatcttataatgatgcaggagggagattaagctccagttgtgtttcttacttgaatgacaaatccaatacgacagattcttcagaatttgacggatccaccttcactgaacatggcttgggagaagaaagcaatagctaccagaagttaacatgcccctatgtttataatcccagttatgcaaccatggattccatctttagtaggtggaacagcgacaacagtgggaactacagtgtcgatgttgaggctaggttaaccgtcaaagacgaaaatagacatgatcattcgaaactgggggcttccacagggcggagtaatgtgaggatggaatgccagttgatagggtcatgttttagtgctactcatgctgaagacacaaacgatcctctagggatcagatcatactcctctaaggatgttactgatagttgtagccatactgaaatggttcagtgcagcagcaagtcctttcattttaaatcagggaggaggaacataaaatcaagtaaaacaccaagctatgttgatttgactgcgtctaacagagtgagaggttctaataggcacaagaacaatggaaaagatagttcagcagtgtggcagaaagtagaaaggaatgacaagatggtatctaaagcaggccatccgagcgatacacctgttcatgataagggtgcaaatgaagttggtaagaagggtgtacaggaagatccaacaagaattcgggcaaaacataatccgaataagaaagtgtgcaaacagaagccttcaaatggagcagttgaattggagcctgccaaaggagaagatgcattgaactcatgccatacattttctggacctttctacacgaagcaagcaccctttctacgccagcaaagaaactctttttcgaaacaaggttctcagtcattgaaaaactactgtgctcctaggaatggtatccccaaggtggcaaaggattacttgcagcaagaagaattacctatgttggtgctagttcatgccaagaacaccagtgataaatcaagctcatattcaagttcagctgatgaagttggtctaactggagtcagcaacaactatccaactgagggaaatgagagttcacaacctgatattgaggtagcagcgtcagtatcttgcaacttggttccagatttggctccacaagctgcttctgatgatttccacatatcagatcctcactctttacgtcctgaaaacaagggtgcatccaacagtcggagctccaataacttgtgcacagatccttttgctgcagaagcaaaggaagctcgatgtgtgaagctactaacagagaataattcccaagaaccctgtaagtggtattctgctgctggacacttgtcacagaagtgggttcctgttggaaagaaagagacttgcaatgggatctgtttagatgtctcagctaatggtgatgacagcaacttgcctagtgaaaggacttataaactgaacttatctgaacatgctgcagcagataatgcagctgagaccgattacagcaagatgaaagaagtcatcagctatgtttacacagcacagcagcgagtggaagacatccaactttgcattggtaggcctattgctgattttgaaaattttgtttactctgcttctccagttgtgcactgcagctcgtgctctgttggctgtaaatcttgcctgcaagaatgtgtgaaggatggcttatgtttgcatcagactccagatatcactctaagaactgtctggcagtggtacgaagagcctagttgctatggtttggatgtaaaggcacaagatctctggaggtcaaaagccttgtggaatagtcattgtcagtttacaacatattttgtaccatatctatctgctgttcaactcttcagtcaacctaaaagaaccagtggtggaagcattgataaggaatcaatccatagggatgtgacatgtgaaacatctccacagctgaacctgcccccaatatttgcaaagctttttccaaaacaatctgttccagtaaataaaccatctactctgcgtactgaagatgatcaacagtcagcagatggggagctggtatttgaattttttgaatatgaacagccatactcacggcgacaattatttgacaaggtaaatgagctgattgccggtgcgaaaccgtcaaattgccaaatatctggggacccaaagaatctggaggccagcctgcatgatctccatccagcgtcttggtatgctctcttttcatggaacgtgcacttgtatctggtattgtgttgcatggtatcccatataccggatacctgatggaaaattccaggctacattcttgacatatcactctcttggccactggattcgtcggagcagctcagcaggtggggccgctgttttgccagtcatgggcctgcagtcttacaatgccaaggcagagtggtggtttgagatgagcaagtccgaatctgaaggcgggcagtcgcaggccagtgaagcatccgagattctgaaggagagatcgcgcacgctgagtgaggctgcggccgtgttgtccagggccagcgtgctgaagaatgggcagatgagtagaaacagacatccagactacgagttcttcctctcccggagctgatttggaagtgcctcttcgtactcggatttagttaggtttcagtgtatgtatgtgttgttgacactaaagcttattctgcaaccgatgactggaagctgtttgcttagcttagcttagcaatataataataatgctagtcagttctcatccaagtgtcatgtcactgttattgaagtagatcagagatgaaacaggaaggac

SEQ ID NO: 134376 - DNA, 3714 bp, Zea Mays
gctgcaggtatttgctttcgtctgcgtcttcgtcttcgtcgtcttggttgccgaaaggctccccaagaaatgccgtgtgcactagaagtgattgatgcaaggttacagagcacatcacatattcagtgcagcagatcatttgaccaaaacattggaagacgcttttcaaagggccatctgatacaaaaacctgttgccatttgtcctgagaacagtgacacctcatcaacaatacttctgtttcggcacgatccagactggaaacaagcaccattcttgtctgacactcaagaggtcaacaaggtaatctctttgtcatcaggagctcttgatacagattgccttgagctattatctgaacagccaagaatactgttttgcttagatcagccaaatgaaaagaacatgcatgatcaggttgattcttctaaaccagtttccaatggaaacacacatgggggaagcacctttagacaatctcagcaaagggaaaacgtttgtaattcattgatggcagttcctccctgccatgtagttgcaaagaagtactccaggtctgttgctactgctctgagtctgggatctgattctgatattttgcacaacggtgacaagcttccaaaaaggaattctagaaagagaggaaaacagtgcaagcgaacaatccgcaaaaggctgaatttggcatcagaaaccatttttgaagagagtacttatggtgcttctcctgcggaggtagttccgaccaatttactggttgataagttgtcagagaccacatcctctgctagctcattggttaaaactgatggtcggtacaaggaggaccatgtggaatgtggtattatgttgaatttagctacattgggaactgatgagatggatggttctggatgtgctggttcatcttataatgatgcaggagggagattaagctccagttgtgtttcttacttgaatgacaaatccaatacgacagattcttcagaatttgacggatccaccttcactgaacatggcttgggagaagaaagcaatagctaccagaagttaacatgcccctatgtttataatcccagttatgcaaccatggattccatctttagtaggtggaacagcgacaacagtgggaactacagtgtcgatgttgaggctaggttaaccgtcaaagacgaaaatagacatgatcattcgaaactgggggcttccacagggcggagtaatgtgaggatggaatgccagttgatagggtcatgttttagtgctactcatgctgaagacacaaacgatcctctagggatcagatcatactcctctaaggatgttactgatagttgtagccatactgaaatggttcagtgcagcagcaagtcctttcattttaaatcagggaggaggaacataaaatcaagtaaaacaccaagctatgttgatttgactgcgtctaacagagtgagaggttctaataggcacaagaacaatggaaaagatagttcagcagtgtggcagaaagtagaaaggaatgacaagatggtatctaaagcaggccatccgagcgatacacctgttcatgataagggtgcaaatgaagttggtaagaagggtgtacaggaagatccaacaagaattcgggcaaaacataatccgaataagaaagtgtgcaaacagaagccttcaaatggagcagttgaattggagcctgccaaaggagaagatgcattgaactcatgccatacattttctggacctttctacacgaagcaagcaccctttctacgccagcaaagaaactctttttcgaaacaaggttctcagtcattgaaaaactactgtgctcctaggaatggtatccccaaggtggcaaaggattacttgcagcaagaagaattacctatgttggtgctagttcatgccaagaacaccagtgataaatcaagctcatattcaagttcagctgatgaagttggtctaactggagtcagcaacaactatccaactgagggaaatgagagttcacaacctgatattgaggtagcagcgtcagtatcttgcaacttggttccagatttggctccacaagctgcttctgatgatttccacatatcagatcctcactctttacgtcctgaaaacaagggtgcatccaacagtcggagctccaataacttgtgcacagatccttttgctgcagaagcaaaggaagctcgatgtgtgaagctactaacagagaataattcccaagaaccctgtaagtggtattctgctgctggacacttgtcacagaagtgggttcctgttggaaagaaagagacttgcaatgggatctgtttagatgtctcagctaatggtgatgacagcaacttgcctagtgaaaggacttataaactgaacttatctgaacatgctgcagcagataatgcagctgagaccgattacagcaagatgaaagaagtcatcagctatgtttacacagcacagcagcgagtggaagacatccaactttgcattggtaggcctattgctgattttgaaaattttgtttactctgcttctccagttgtgcactgcagctcgtgctctgttggctgtaaatcttgcctgcaagaatgtgtgaaggatggcttatgtttgcatcagactccagatatcactctaagaactgtctggcagtggtacgaagagcctagttgctatggtttggatgtaaaggcacaagatctctggaggtcaaaagccttgtggaatagtcattgtcagtttacaacatattttgtaccatatctatctgctgttcaactcttcagtcaacctaaaagaaccagtggtggaagcattgataaggaatcaatccatagggatgtgacatgtgaaacatctccacagctgaacctgcccccaatatttgcaaagctttttccaaaacaatctgttccagtaaataaaccatctactctgcgtactgaagatgatcaacagtcagcagatggggagctggtatttgaattttttgaatatgaacagccatactcacggcgacaattatttgacaaggtaaatgagctgattgccggtgcgaaaccgtcaaattgccaaatatctggggacccaaagaatctggaggccagcctgcatgatctccatccagcgtcttggtattgtgttgcatggtatcccatataccggatacctgatggaaaattccaggctacattcttgacatatcactctcttggccactggattcgtcggagcagctcagcaggtggggccgctgttttgccagtcatgggcctgcagtcttacaatgccaaggcagagtggtggtttgagatgagcaagtccgaatctgaaggcgggcagtcgcaggccagtgaagcatccgagattctgaaggagagatcgcgcacgctgagtgaggctgcggccgtgttgtccagggccagcgtgctgaagaatgggcagatgagtagaaacagacatccagactacgagttcttcctctcccggagctgatttggaagtgcctcttcgtactcggatttagttaggtttcagtgtatgtatgtgttgttgacactaaagcttattctgcaaccgatgactggaagctgtttgcttagcttagcttagcaatataataataatgctagtcagttctcatccaagtgtcatgtcactgttattgaagtagatcagagatgaaacaggaaggac

SEQ ID NO: 134377 - DNA, 348 bp, Zea Mays
atggcgaagcagttgcagagcaggggctggcgctgggacagagatcaggcacaacgtcggcgacggcgcgagcagggcgactactccggagacgaacagtttccggtgacaacagtagtgcgcgtcagtacccttagcatgcgagtggcgggaaggggaggaggcgcaacaccaagagctgtgctgacagcaacgtggtggcaacagaaccgacggcacatagagacgtacgagcgagcgtccaacttctggtgttgggagaagaagaccttacaaacggaccccacatggcataaagagagagtgagcgagagagaagataccggtataggcgtcgggctgcagtag

SEQ ID NO: 134378 - DNA, 365 bp, Zea Mays
cgcaccgcgtcttccttcctcctgggcgaccggcccttcttctctccacgtctctccccccttctttctccagaccgagcgtacgtatgctacacacagcaacagcacaacagtactagttccaccacaagaagatgcccaatgccaagaaataacccatgcttcttgtcgacgatccagccgcactagagatggccaaacgggccggcccggcccggcccggcccgggcccggtgaagcccggccaaaaccgggccgggcctgctgagccagcgggcttaagtttctgtccaagcccggcccgcagcgggcctaaacaggccgggccggcccgtttagcacgaaaaaacgggccaaaaagcggg

SEQ ID NO: 134379 - DNA, 2042 bp, Zea Mays
gctccttgctgttctgctgactggtctcaccatctcatcccaccaccaccaccaccaccaccatctttaggataagatagcaaatatatggccatcatactcgtacgagcagcgtcgccggggctctccgccgccgacagcatcagccaccaggggactctccagtgctccaccctgctcaagacgaagaggccggcggcgcgccggtggatgccctgctcgctccttggcctccacccgtgggaggctggccgtccctcccccgccgtctactccagcctcgccgtcaacccggcgggagaggccgtcgtctcgtccgagcagaaggtctacgacgtcgtgctcaagcaggccgcattgctcaaacgccagctgcgcacgccggtcctcgacgccaggccccaggacatggacatgccacgcaacgggctcaaggaagcctacgaccgctgcggcgagatctgtgaggagtatgccaagacgttttacctcggaactatgttgatgacagaggagcggcgccgcgccatatgggccatctatgtgtggtgtaggaggacagatgagcttgtagatgggccaaacgccaactacattacaccaacagctttggaccggtgggagaagagacttgaggatctgttcacgggacgtccttacgacatgcttgatgccgctctctctgataccatctcaaggttccccatagacattcagccattcagggacatgattgaagggatgaggagtgatcttaggaagacaaggtataacaacttcgacgagctctacatgtactgctactatgttgctggaactgtcgggttaatgagcgtacctgtgatgggcatcgcaaccgagtctaaagcaacaactgaaagcgtatacagtgctgccttggctctgggaattgcgaaccaactcacgaacatactccgggatgttggagaggatgctagaagaggaaggatatatttaccacaagatgagcttgcacaggcagggctctctgatgaggacatcttcaaaggggtcgtcacgaaccggtggagaaacttcatgaagaggcagatcaagagggccaggatgttttttgaggaggcagagagaggggtaactgagctctcacaggctagcagatggccagtaagtccactcaacttcacatttcccacccagtatagcacagcatcctcacttccttttctttgttaccattgcaggtatgggcttccctgttgttgtacaggcagatcctggatgagatcgaagccaacgactacaacaacttcacgaagagggcgtatgttggtaaagggaagaagttgctagcacttcctgtggcatatggaaaatcgctactgctcccatgttcattgagaaatggccagacctagccaccagagaagctgcaatgcaaggttcaggttaggctagatagaaagttaaatggggcaacatcaggaggccttgatgaaaaacagacaacctggtgaattgttgttgggatcaggcacagaacagataagagccgcgcagccaacctagggcatgtttggtttcaattagttctaggactaaactttagtcctaggactaaactttagtccctatatgtttggttctagggactaaatagattctaaagtcattaaatacattgtccaaagactcaaatacccttagaatatactcatgatattagttatctataaaaaggtaagggcaacatgataattatgagcttttagtctcttttagcacctatgtgaaggactaaagactaaatcattttagtccatattttagtcctagtgtttggcaaaaaagggactaaaagggactaaaaactagagactaatctttagtccctctaaccaaacacccccctagatggatacggaacattcgcctcttattcggagcaatatatgtctctcaaggaaagagcccaacatgtatactgccttctttttctcatcccagatttgggggaaaaacaatgtaaatgccaatggtatcgtaggaagattactagaagt

SEQ ID NO: 134380 - DNA, 2084 bp, Zea Mays
gctccttgctgttctgctgactggtctcaccatctcatcccaccaccaccaccaccaccaccatctttaggataagatagcaaatatatggccatcatactcgtacgagcagcgtcgccggggctctccgccgccgacagcatcagccaccaggggactctccagtgctccaccctgctcaagacgaagaggccggcggcgcgccggtggatgccctgctcgctccttggcctccacccgtgggaggctggccgtccctcccccgccgtctactccagcctcgccgtcaacccggcgggagaggccgtcgtctcgtccgagcagaaggtctacgacgtcgtgctcaagcaggccgcattgctcaaacgccagctgcgcacgccggtcctcgacgccaggccccaggacatggacatgccacgcaacgggctcaaggaagcctacgaccgctgcggcgagatctgtgaggagtatgccaagacgttttacctcggaactatgttgatgacagaggagcggcgccgcgccatatgggccatctatgtgtggtgtaggaggacagatgagcttgtagatgggccaaacgccaactacattacaccaacagctttggaccggtgggagaagagacttgaggatctgttcacgggacgtccttacgacatgcttgatgccgctctctctgataccatctcaaggttccccatagacattcagccattcagggacatgattgaagggatgaggagtgatcttaggaagacaaggtataacaacttcgacgagctctacatgtactgctactatgttgctggaactgtcgggttaatgagcgtacctgtgatgggcatcgcaaccgagtctaaagcaacaactgaaagcgtatacagtgctgccttggctctgggaattgcgaaccaactcacgaacatactccgggatgttggagaggaaggaaggatatatttaccacaagatgagcttgcacaggcagggctctctgatgaggacatcttcaaaggggtcgtcacgaaccggtggagaaacttcatgaagaggcagatcaagagggccaggatgttttttgaggaggcagagagaggggtaactgagctctcacaggctagcagatggccagtatgggcttccctgttgttgtacaggcagatcctggatgagatcgaagccaacgactacaacaacttcacgaagagggcgtatgttggtaaagggaagaagttgctagcacttcctgtggcatatggaaaatcgctactgctcccatgttcattgagaaatggccagacctagccaccagagaagctgcaatgcaaggttcaggttaggctagatagaaagttaaatggggcaacatcaggaggccttgatgaaaaacagacaacctggtgaattgttgttgggatcaggcacagaacagataagagccgcgcagccaacctagggcatgtttggtttcaattagttctaggactaaactttagtcctaggactaaactttagtccctatatgtttggttctagggactaaatagattctaaagtcattaaatacattgtccaaagactcaaatacccttagaatatactcatgatattagttatctataaaaaggtaagggcaacatgataattatgagcttttagtctcttttagcacctatgtgaaggactaaagactaaatcattttagtccatattttagtcctagtgtttggcaaaaaagggactaaaagggactaaaaactagagactaatctttagtccctctaaccaaacacccccctagatggatacggaacattcgcctcttattcggagcaatatatgtctctcaaggaaagagcccaacatgtatactgccttctttttctcatcccagatttgggggaaaaacaatgtaaatgccaatggtatcgtaggaagattactagaagtaaatgccaatgtaaaaacagatgagttggcatttacatgataggatggtgggatcatcagactgaaaatgataggggattgtgctcccctgcgactccaactattaaacaaggaatccgtcagcagta

SEQ ID NO: 134381 - DNA, 2093 bp, Zea Mays
gctccttgctgttctgctgactggtctcaccatctcatcccaccaccaccaccaccaccaccatctttaggataagatagcaaatatatggccatcatactcgtacgagcagcgtcgccggggctctccgccgccgacagcatcagccaccaggggactctccagtgctccaccctgctcaagacgaagaggccggcggcgcgccggtggatgccctgctcgctccttggcctccacccgtgggaggctggccgtccctcccccgccgtctactccagcctcgccgtcaacccggcgggagaggccgtcgtctcgtccgagcagaaggtctacgacgtcgtgctcaagcaggccgcattgctcaaacgccagctgcgcacgccggtcctcgacgccaggccccaggacatggacatgccacgcaacgggctcaaggaagcctacgaccgctgcggcgagatctgtgaggagtatgccaagacgttttacctcggaactatgttgatgacagaggagcggcgccgcgccatatgggccatctatgtgtggtgtaggaggacagatgagcttgtagatgggccaaacgccaactacattacaccaacagctttggaccggtgggagaagagacttgaggatctgttcacgggacgtccttacgacatgcttgatgccgctctctctgataccatctcaaggttccccatagacattcagccattcagggacatgattgaagggatgaggagtgatcttaggaagacaaggtataacaacttcgacgagctctacatgtactgctactatgttgctggaactgtcgggttaatgagcgtacctgtgatgggcatcgcaaccgagtctaaagcaacaactgaaagcgtatacagtgctgccttggctctgggaattgcgaaccaactcacgaacatactccgggatgttggagaggatgctagaagaggaaggatatatttaccacaagatgagcttgcacaggcagggctctctgatgaggacatcttcaaaggggtcgtcacgaaccggtggagaaacttcatgaagaggcagatcaagagggccaggatgttttttgaggaggcagagagaggggtaactgagctctcacaggctagcagatggccagtatgggcttccctgttgttgtacaggcagatcctggatgagatcgaagccaacgactacaacaacttcacgaagagggcgtatgttggtaaagggaagaagttgctagcacttcctgtggcatatggaaaatcgctactgctcccatgttcattgagaaatggccagacctagccaccagagaagctgcaatgcaaggttcaggttaggctagatagaaagttaaatggggcaacatcaggaggccttgatgaaaaacagacaacctggtgaattgttgttgggatcaggcacagaacagataagagccgcgcagccaacctagggcatgtttggtttcaattagttctaggactaaactttagtcctaggactaaactttagtccctatatgtttggttctagggactaaatagattctaaagtcattaaatacattgtccaaagactcaaatacccttagaatatactcatgatattagttatctataaaaaggtaagggcaacatgataattatgagcttttagtctcttttagcacctatgtgaaggactaaagactaaatcattttagtccatattttagtcctagtgtttggcaaaaaagggactaaaagggactaaaaactagagactaatctttagtccctctaaccaaacacccccctagatggatacggaacattcgcctcttattcggagcaatatatgtctctcaaggaaagagcccaacatgtatactgccttctttttctcatcccagatttgggggaaaaacaatgtaaatgccaatggtatcgtaggaagattactagaagtaaatgccaatgtaaaaacagatgagttggcatttacatgataggatggtgggatcatcagactgaaaatgataggggattgtgctcccctgcgactccaactattaaacaaggaatccgtcagcagta
